United States Patent Application Publication US 2025/0333808 A1 - sequence listing, part 7

SEQ ID NO: 104425 - DNA, 80 bp, synthetic construct
  source 1..80: mol_type = other DNA
aggagtgcctactgacgtcatcaattcttgggcaggagatatattgagaactcaggagtcttcctgcacttgcatccaag

SEQ ID NO: 104426 - DNA, 80 bp, synthetic construct
  source 1..80: mol_type = other DNA
gtgattgctattgggtaatgactgatggccccgccaataggcaggcacagtatagaatatacaaagcgaagcaaggcaga

SEQ ID NO: 104427 - DNA, 80 bp, synthetic construct
  source 1..80: mol_type = other DNA
aatgtcctattacatgtcgtgagcatcataataacagtattagtcctggggaaaggtggaaacaatggggtctgcaacga

SEQ ID NO: 104428 - DNA, 80 bp, synthetic construct
  source 1..80: mol_type = other DNA
atagttggccaaacagatgtaaactttaatggaggacacattgaagagtgctcttgctaccccaatgatggtaaagtgga

SEQ ID NO: 104429 - DNA, 80 bp, synthetic construct
  source 1..80: mol_type = other DNA
atgcgtgtgtcgagacaattggacaggaaccaatagacctgtattggttatctcgcctgatctctcttacagagttgggt

SEQ ID NO: 104430 - DNA, 80 bp, synthetic construct
  source 1..80: mol_type = other DNA
atttgtgtgcagggctgcccagtgatactccaagaggggaagatgcccaatttactggttcatgcactagtcccatggtg

SEQ ID NO: 104431 - DNA, 80 bp, synthetic construct
  source 1..80: mol_type = other DNA
agacccccatgttgtatccacaaccaatgccctgatctcacgtatttcattggctcgttccgcacttgctaaggcacaag

SEQ ID NO: 104432 - DNA, 80 bp, synthetic construct
  source 1..80: mol_type = other DNA
cttaacttgattagtaggggcccatctccaattccacaagacaagcccccaaaagaccagagggataaacccccaaggaa

SEQ ID NO: 104433 - DNA, 80 bp, synthetic construct
  source 1..80: mol_type = other DNA
tggtttattgcactgcgcccgatgttgaacagacacgtcgtactaaccctggcgacaccggagccctcaaggattgtttt

SEQ ID NO: 104434 - DNA, 80 bp, synthetic construct
  source 1..80: mol_type = other DNA
gactggaatggtgctggaggaaggttgtcctgagggtgttgtgtgttctattctcataaagcgtgactctggtgagttgc

SEQ ID NO: 104435 - DNA, 80 bp, synthetic construct
  source 1..80: mol_type = other DNA
tgccccttgctgtccgaatgggcgctatagcgtccatgaagattcagggaaggctagtgcatggccagtctgggatgctg

SEQ ID NO: 104436 - DNA, 80 bp, synthetic construct
  source 1..80: mol_type = other DNA
atctactaagaccaagttttggaggtcaacccctgaaccattaccaccaggtgtttatgaaccagcgtatcttgggggtc

SEQ ID NO: 104437 - DNA, 80 bp, synthetic construct
  source 1..80: mol_type = other DNA
gagatcccagggtaaaaagtgggccctctctacagcaagtcttgcgtgatcagttgaaaccatttgctgagccgcgaggt

SEQ ID NO: 104438 - DNA, 80 bp, synthetic construct
  source 1..80: mol_type = other DNA
ggttatgtaaagaacacagaacaacaaccccctgatcaccaagtcaaatggagtgccagtaatggggttgatcttggggt

SEQ ID NO: 104439 - DNA, 80 bp, synthetic construct
  source 1..80: mol_type = other DNA
cgaatgccagagcctggtctacttgaggcagctgttgagactgtcacatccatgcttgagcaaacaatggatacaccaac

SEQ ID NO: 104440 - DNA, 80 bp, synthetic construct
  source 1..80: mol_type = other DNA
gtcaatcacttgacaagaccacaagttcaggacacccgtatcacaaaagaaagaatgatgattggaatggaacttcattt

SEQ ID NO: 104441 - DNA, 80 bp, synthetic construct
  source 1..80: mol_type = other DNA
gttggagagcttggagaacaggcagcacatgccaacaacatgtatgaattaggcaaatctatgaaaccactatacactgc

SEQ ID NO: 104442 - DNA, 80 bp, synthetic construct
  source 1..80: mol_type = other DNA
tggggtgctgatctctcaacagtcataagggctgccagggcctttggacctttttgtgatgctataaagtctcatgtcat

SEQ ID NO: 104443 - DNA, 80 bp, synthetic construct
  source 1..80: mol_type = other DNA
aggcaaattgacaactgtgccaggtccagcatggaatctgtgccccatgccaccaattgatcaacgcaacaatggcccag

SEQ ID NO: 104444 - DNA, 80 bp, synthetic construct
  source 1..80: mol_type = other DNA
ggcctatcatactcagaagacaggtggatggtcttgttttcttgaggaggacaatctccaaagatgctgcgggcttccag

SEQ ID NO: 104445 - DNA, 80 bp, synthetic construct
  source 1..80: mol_type = other DNA
ggaaggctagatagaggttcaattgaaagacagctctggtggactcgaggccctaaccatgatgaccccagtgagactct

SEQ ID NO: 104446 - DNA, 80 bp, synthetic construct
  source 1..80: mol_type = other DNA
caaaggaaccacttattggtgacatgatagaattctatgaggggcacatttaccattatgcaatatacattggacaagga

SEQ ID NO: 104447 - DNA, 80 bp, synthetic construct
  source 1..80: mol_type = other DNA
tctagaaccctttccatagcccaggctacactctttccccatgtgatcgctgatgtgagaattttggaaccaattgagat

SEQ ID NO: 104448 - DNA, 80 bp, synthetic construct
  source 1..80: mol_type = other DNA
ggcggttctggtggtacagatgcgtttgttgtagcaggtcgagttctaacttgccctagccctgatttcaatttcttgtt

SEQ ID NO: 104449 - DNA, 80 bp, synthetic construct
  source 1..80: mol_type = other DNA
cttggtcccacccactgtggagcagaagacacgtccctttagtctgcccaatatacccttgcacttgcagtctaactccc

SEQ ID NO: 104450 - DNA, 80 bp, synthetic construct
  source 1..80: mol_type = other DNA
taaggttatcaacctcactgagttagatggttccccctttctggcttttgaggcccctgcgcccacgggctttcctgact

SEQ ID NO: 104451 - DNA, 80 bp, synthetic construct
  source 1..80: mol_type = other DNA
tgggaacttgtgattggcatgttgaattaagccttaactcaaatagtcaaagttctggcaacccaattgtattaagggac

SEQ ID NO: 104452 - DNA, 80 bp, synthetic construct
  source 1..80: mol_type = other DNA
aaaactgttggggttcactcaccccaagcggccttttcaatagccaggataactatacaccccatcgccgcttggtggag

SEQ ID NO: 104453 - DNA, 80 bp, synthetic construct
  source 1..80: mol_type = other DNA
atggatcaagtttggcagaagcctcccaactggcccccgtagtgtaccccccgggatttggtgaagctgtagtgtacttt

SEQ ID NO: 104454 - DNA, 80 bp, synthetic construct
  source 1..80: mol_type = other DNA
agcatatggagaaactatgtcaagagtttcctcctgggtccaatcccagaattcaagtgttagaagcatgcctccttttc

SEQ ID NO: 104455 - DNA, 80 bp, synthetic construct
  source 1..80: mol_type = other DNA
atagttctgccctcaggactgtttgggttacaccaccaggttcaacttctacttcttcatctgtttcatccgtgcctatg

SEQ ID NO: 104456 - DNA, 80 bp, synthetic construct
  source 1..80: mol_type = other DNA
ggcgtgtttaacactgataggcttcccctattcgcaaacaggagatgatattgttgtaataagaataataatgtgagcat

SEQ ID NO: 104457 - DNA, 80 bp, synthetic construct
  source 1..80: mol_type = other DNA
ataatgtgagcatcttattcaatttggtctaattagtttaataattaggtttaatttggacaattgatgttaaaaaaaaa

SEQ ID NO: 104458 - DNA, 80 bp, synthetic construct
  source 1..80: mol_type = other DNA
gactctataaacagactgtttaaatgtttagagcctgttgatataaatgagatagaatatgtgttgtttgatcatgaagt

SEQ ID NO: 104459 - DNA, 80 bp, synthetic construct
  source 1..80: mol_type = other DNA
atgacagaaacttcagcagaatgacatggttgccaccgattttgcagcaagaatacgcactgaggtacttttcaaagtcg

SEQ ID NO: 104460 - DNA, 80 bp, synthetic construct
  source 1..80: mol_type = other DNA
gatgacgattggaataaggcctgtgtacagattacaaaaccaaaaaattatttagagatgatgaattctgcctatactga

SEQ ID NO: 104461 - DNA, 80 bp, synthetic construct
  source 1..80: mol_type = other DNA
gcattatagtgtatcgcaaagatgtaggctctataccaaaagcaaacttaatacattatctcagttaattagaccaaact

SEQ ID NO: 104462 - DNA, 80 bp, synthetic construct
  source 1..80: mol_type = other DNA
acattctttcaaatcatgaaacgtgtgcactaaacgttcataactgtaaatggtgtcaagttaccagctgttataaaata

SEQ ID NO: 104463 - DNA, 80 bp, synthetic construct
  source 1..80: mol_type = other DNA
gacatgttgtacaccaatccaaatgaaagtgcagttgttcagtgtcaaaatggtaggtgcaccctggacggtgagctgca

SEQ ID NO: 104464 - DNA, 80 bp, synthetic construct
  source 1..80: mol_type = other DNA
ctcttagcgatgtggctttggtgaggtatgtgaacccagagactggacgcaccctctttgaagccaagttgcacaggaat

SEQ ID NO: 104465 - DNA, 80 bp, synthetic construct
  source 1..80: mol_type = other DNA
ggattcctgactgttgctaggaacagcactggacctgtcgtggcccccacaaatgggtattttagatttgattcctgggt

SEQ ID NO: 104466 - DNA, 80 bp, synthetic construct
  source 1..80: mol_type = other DNA
gcataccttcgaccgaagggagagtcacaagtttagtgaaaagattaattttctttttaaatttctcttttaaaaaaaaa

SEQ ID NO: 104467 - DNA, 80 bp, synthetic construct
  source 1..80: mol_type = other DNA
aggggcaaactaattggccagacatcaaggtctccagactcagactcaactgactcagcccctcggagaagggatcaccc

SEQ ID NO: 104468 - DNA, 80 bp, synthetic construct
  source 1..80: mol_type = other DNA
aggggaccatttttggagtggccagtcagagagacacgtcagggagccaagtgggggcaacccgagcccatgaggtgcac

SEQ ID NO: 104469 - DNA, 80 bp, synthetic construct
  source 1..80: mol_type = other DNA
aggggaccatttttggagtggccagtcagagagacacgtcagggagccaagtggaggcaacccgagcccatgaggtgcac

SEQ ID NO: 104470 - DNA, 80 bp, synthetic construct
  source 1..80: mol_type = other DNA
attaacacgaccgatcccaggtatacaccaaaactggggtccatcctcatgtactcagagtcgctagactttgagactgg

SEQ ID NO: 104471 - DNA, 80 bp, synthetic construct
  source 1..80: mol_type = other DNA
tagcagccctgttcataggtcccctgctccttcccagcttgttgcctcatcaaagggtaaattgcaaaatgattctgcta

SEQ ID NO: 104472 - DNA, 80 bp, synthetic construct
  source 1..80: mol_type = other DNA
ctcgcctggggaagtcctactcaatttggaattaggtcccgaattgaatccatatttggcacacctttctagaatgtata

SEQ ID NO: 104473 - DNA, 80 bp, synthetic construct
  source 1..80: mol_type = other DNA
ggagttgcagggcaccacccagctcctccccacggcgatttgctcatttaggggtcggatcaatcagaaagtgagtggag

SEQ ID NO: 104474 - DNA, 80 bp, synthetic construct
  source 1..80: mol_type = other DNA
tggcccccacattccctggtgagcaaattctcttcttcaggtcccacattccccttaaaggaggtgttgcagacccagtt

SEQ ID NO: 104475 - DNA, 80 bp, synthetic construct
  source 1..80: mol_type = other DNA
aagagaaaccagaggagctctctcgacgctggactcggcttgctgaagcgcgcaacagcaagaggcgaatttttgactag

SEQ ID NO: 104476 - DNA, 80 bp, synthetic construct
  source 1..80: mol_type = other DNA
agaaccagaggagctctctcgacgcaggactcggcttgctgaagcgcgcacggcaagaggcgaggggcggcgactgtaga

SEQ ID NO: 104477 - DNA, 80 bp, synthetic construct
  source 1..80: mol_type = other DNA
gaaaaccagaggagctctctcgacgcaggactcggcttgctgaagcgcgcacggcaagaggcgaggggcggcagcaaccc

SEQ ID NO: 104478 - DNA, 80 bp, synthetic construct
  source 1..80: mol_type = other DNA
ctttcaatatcaccacaagcatgagcaatgaagtgaaaacagactatgcactttttagtaaacttgatgtagtgccaaca

SEQ ID NO: 104479 - DNA, 80 bp, synthetic construct
  source 1..80: mol_type = other DNA
agaaaccagaggagatctctcgacgcaggactcggcttgctgaagcgcgcacagcaagaggcgaggtggaggctagaagg

SEQ ID NO: 104480 - DNA, 80 bp, synthetic construct
  source 1..80: mol_type = other DNA
gtacttccactactaatagtacagaagacaggtcaggagacatgaaaaactgctctttcaacatcaccacaagcataaaa

SEQ ID NO: 104481 - DNA, 80 bp, synthetic construct
  source 1..80: mol_type = other DNA
tactaatagtacagaagacaggtcaggagacatgaaaaactgctctttcaacatcaccacaagcataaaagaccagaccc

SEQ ID NO: 104482 - DNA, 80 bp, synthetic construct
  source 1..80: mol_type = other DNA
ggaaaccagagaagatctctcgacgcaggactcggcttgctgaagtgcgcacagcaagaggcggctaaggccagggggaa

SEQ ID NO: 104483 - DNA, 80 bp, synthetic construct
  source 1..80: mol_type = other DNA
ggaaaccagagaagatctctcgacgcaggactcggcttgctgaagtgcgcacagcaagaggcgaggggcggcgactagag

SEQ ID NO: 104484 - DNA, 80 bp, synthetic construct
  source 1..80: mol_type = other DNA
tagaaccagaggagatctctcgacgcaggactcggcttgctgaagcgcgcacagcaagaggcgaggcaccgtacgccaag

SEQ ID NO: 104485 - DNA, 80 bp, synthetic construct
  source 1..80: mol_type = other DNA
gaaagcgaaagttccagagaagttaggactctggtaactagagatccctcagaccactctagactgagtaaaaatctcta

SEQ ID NO: 104486 - DNA, 80 bp, synthetic construct
  source 1..80: mol_type = other DNA
gtagaaccagaggagctctctcgacgcaggactcggcttgctgaagcgcgcacagcaagagccactagcggaggctagaa

SEQ ID NO: 104487 - DNA, 80 bp, synthetic construct
  source 1..80: mol_type = other DNA
aggaacaaggttgtggttgaaaaggtccaaaatgcaacagtccaaaccaacaatgaacttgcaggagcactccaccacct

SEQ ID NO: 104488 - DNA, 80 bp, synthetic construct
  source 1..80: mol_type = other DNA
ttcgccgctgtcccgccaaatttcccagtggaattcttaagcccagcccagattacaatgctcccacatataatagtaga

SEQ ID NO: 104489 - DNA, 80 bp, synthetic construct
  source 1..80: mol_type = other DNA
cccgcaaagcccagatctctaggttcttcttcttcgtctagtagtgtttatagtatgtctacccaattaacttctctaac

SEQ ID NO: 104490 - DNA, 80 bp, synthetic construct
  source 1..80: mol_type = other DNA
atctggctcttctagtaatgcttcttctgcttctacaaaattgacaaatttaagctctggctcctctcaaaacaggacag

SEQ ID NO: 104491 - DNA, 80 bp, synthetic construct
  source 1..80: mol_type = other DNA
cccccccccaaatggtgaggacgtggtttattacaacagtaaaaatgacaccgttgatggcttgcctgacctgaccacag

SEQ ID NO: 104492 - DNA, 80 bp, synthetic construct
  source 1..80: mol_type = other DNA
catcaccagacattgtgggcacaataaacgcgatcttggccagaatcgcggctgctagatcacttctccacaaagctaag

SEQ ID NO: 104493 - DNA, 80 bp, synthetic construct
  source 1..80: mol_type = other DNA
gaagaaatgttcagcaggattagacctgttgtagtgatgatctcaggaagacccggtatagggaaaacccatatggcgag

SEQ ID NO: 104494 - DNA, 80 bp, synthetic construct
  source 1..80: mol_type = other DNA
gcaattggccaaaacaatcgccggcacgatgactggagaccagagagtcggacttgttcctcgcaatggggttgatcatt

SEQ ID NO: 104495 - DNA, 80 bp, synthetic construct
  source 1..80: mol_type = other DNA
gggatgcctacagggaggagagagtggttctttgggacgattacggtatggggaatacaatcaaggatgccctcaccctg

SEQ ID NO: 104496 - DNA, 80 bp, synthetic construct
  source 1..80: mol_type = other DNA
gggatgcctacaggggggagagagtggttctttgggacgattacggtatggggaatacaatcaaggatgccctcaccctg

SEQ ID NO: 104497 - DNA, 80 bp, synthetic construct
  source 1..80: mol_type = other DNA
ccaggcaccatacttgaaatgtgggatggtgagttttaccattactccatatatgtcagcaacggcaaggcgcttggcgt

SEQ ID NO: 104498 - DNA, 80 bp, synthetic construct
  source 1..80: mol_type = other DNA
aaaaagtgaagaaagacttcccaggacaaccggatatgtggcgcgaccacttcaaaccagattcatcccatatcagactg

SEQ ID NO: 104499 - DNA, 80 bp, synthetic construct
  source 1..80: mol_type = other DNA
tccctggcccctcaaggtgggtttgacaagaatggaaacaccccacatggaaaaggaacgatgaagaccctcacccaggg

SEQ ID NO: 104500 - DNA, 80 bp, synthetic construct
  source 1..80: mol_type = other DNA
ctccctcactgctcgagtagccggcttggtgcatgagaggagggacgagtttcagttccaaggggatgaggtgcatcttt

SEQ ID NO: 104501 - DNA, 80 bp, synthetic construct
  source 1..80: mol_type = other DNA
acaactttgatgccaacagagtgtctgcatttaggaagttagcagctgacaataagtacagcctcatggaaactatgaag

SEQ ID NO: 104502 - DNA, 80 bp, synthetic construct
  source 1..80: mol_type = other DNA
gttggttccgccctcaagaatgtcaaaaccctagaagacctaaaggtcgcactcaggactgtaaaattcaaagagtgcga

SEQ ID NO: 104503 - DNA, 80 bp, synthetic construct
  source 1..80: mol_type = other DNA
aatattatacagagggtcaaagtaccgtgtctcatccgatggctgtgggaatgtctcagttactaaagtaaaagacatga

SEQ ID NO: 104504 - DNA, 80 bp, synthetic construct
  source 1..80: mol_type = other DNA
tgtcacagaccaccaatgaggttcactcagccttgatcagattgagacaagcccgggctaggtactacattagttgcttc

SEQ ID NO: 104505 - DNA, 80 bp, synthetic construct
  source 1..80: mol_type = other DNA
caagacctaatttacaccctcatccaggttgccggcgcttccttcgttgtgcacagaatatcaaggaggttctcatggga

SEQ ID NO: 104506 - DNA, 80 bp, synthetic construct
  source 1..80: mol_type = other DNA
gcggtggatcaaaccctctgaggcccttcccgaggatggccaagtcggcctaacggataacactgagaggtgggaggttg

SEQ ID NO: 104507 - DNA, 80 bp, synthetic construct
  source 1..80: mol_type = other DNA
ccgctgctataagcgtcgccaccattgatttgactcccatatcattatactggaggccagtgtacactccaccataccta

SEQ ID NO: 104508 - DNA, 80 bp, synthetic construct
  source 1..80: mol_type = other DNA
aggaatacctccaagacagagaccgcttttatgaagaggtagcggtagctcgtgccactgaagaggacttctgtgaggaa

SEQ ID NO: 104509 - DNA, 80 bp, synthetic construct
  source 1..80: mol_type = other DNA
gaaattgctaagatcagacagcgggtctttaggcctaccaagaagcaaaggaaagaagagcgcagtgtccttggccttgt

SEQ ID NO: 104510 - DNA, 80 bp, synthetic construct
  source 1..80: mol_type = other DNA
ttgaggccccacctagcgtttggtcacgtatagtccccctgggtactggctggggattctgggtttcatcaaatctgctc

SEQ ID NO: 104511 - DNA, 80 bp, synthetic construct
  source 1..80: mol_type = other DNA
ataactaccactcatgtgctaccaaaaggtgttagggaactatttggtgttgacataaaacaagttcaaatacataaatc

SEQ ID NO: 104512 - DNA, 80 bp, synthetic construct
  source 1..80: mol_type = other DNA
aaggcacagtgtgttcaatcctagtgaggagacccacaggggaaatgatccctcttgctgttaggatggggacacatgcc

SEQ ID NO: 104513 - DNA, 80 bp, synthetic construct
  source 1..80: mol_type = other DNA
tgcttctgaccggagcgaatgccaagaacatggacttgggcaccataccaggagactgtggctgtccatacatttacaag

SEQ ID NO: 104514 - DNA, 80 bp, synthetic construct
  source 1..80: mol_type = other DNA
gtgcaccctgacactctcaagggccttgctggagagaaatttccatacacggcatttagcaacaattgttacaatttctg

SEQ ID NO: 104515 - DNA, 80 bp, synthetic construct
  source 1..80: mol_type = other DNA
cccctaaattgagcacaaaaacaaaattctggcgatcatccccagaagcattgccaccaggaacgtacgaacctgcctac

SEQ ID NO: 104516 - DNA, 80 bp, synthetic construct
  source 1..80: mol_type = other DNA
ctgggtggcaaagaccccagggttgaaaaaggaccttcgctccatcaggtcatgagagatcaattgaaacctttcaccgc

SEQ ID NO: 104517 - DNA, 80 bp, synthetic construct
  source 1..80: mol_type = other DNA
gcccaggggaaaaccgccgaatcccactgtccttgaagaagccaagaagaccgttatgaatgtcctcgagcaaaccatag

SEQ ID NO: 104518 - DNA, 80 bp, synthetic construct
  source 1..80: mol_type = other DNA
accctgcaaaaccttggacctatgctcaagcctgcgcttctcttgataaaaccacctccagtggcagtccccaccacctg

SEQ ID NO: 104519 - DNA, 80 bp, synthetic construct
  source 1..80: mol_type = other DNA
aagaagaacgaccactggaacggagaatctttcacgggacccttagctgaccaagcctctaaagccaacctaatgtatga

SEQ ID NO: 104520 - DNA, 80 bp, synthetic construct
  source 1..80: mol_type = other DNA
gggtctgatctgggcactatgatcaggtgtgctagggcctttgggggtctccttgacagtatgaaagagagctgtgtggc

SEQ ID NO: 104521 - DNA, 80 bp, synthetic construct
  source 1..80: mol_type = other DNA
cttaccttgtagagtaggtatgaacatgaatgaagatggccccatcatatttgacaagcactcaaaatacagattccatt

SEQ ID NO: 104522 - DNA, 80 bp, synthetic construct
  source 1..80: mol_type = other DNA
gaagttctcagctgaacccgagctggcccaaatagttgcagaagacctgctagcccctagccaacttgatgttggggact

SEQ ID NO: 104523 - DNA, 80 bp, synthetic construct
  source 1..80: mol_type = other DNA
ttgtgatctccgtgcaggagggtcttccttctggtgtcccttgcacttcacaatggaactcaatagcacattggatcatc

SEQ ID NO: 104524 - DNA, 80 bp, synthetic construct
  source 1..80: mol_type = other DNA
gccaaattgactcagaaattgagggaatatggattagtgcccaccagaccagataagacagaaggccccttagttatcac

SEQ ID NO: 104525 - DNA, 80 bp, synthetic construct
  source 1..80: mol_type = other DNA
ctgagtaggaaatccatatccagaacaactggtttctataaaccataccaatcatggaacaggaaacccctccccacagt

SEQ ID NO: 104526 - DNA, 80 bp, synthetic construct
  source 1..80: mol_type = other DNA
tgaaaacttgcatggactgacatttctgcgaagaactgtcactcgtgacccagcaggttggtttggaaaactggatcaag

SEQ ID NO: 104527 - DNA, 80 bp, synthetic construct
  source 1..80: mol_type = other DNA
actcaattctaagacagctttactggacaagaggcccaaatcatgagaacccctacgaaagcatggtcccccactcacaa

SEQ ID NO: 104528 - DNA, 80 bp, synthetic construct
  source 1..80: mol_type = other DNA
aacgtgccactcaactcatggcccttttgggggaagcctctctccatggaccccaattctacaagaaagtcagcaagatg

SEQ ID NO: 104529 - DNA, 80 bp, synthetic construct
  source 1..80: mol_type = other DNA
ttgaaccagtagcaggtgctgctattgccgcaccagttgctggacaacaaaatataatagatccctggattagaaataat

SEQ ID NO: 104530 - DNA, 80 bp, synthetic construct
  source 1..80: mol_type = other DNA
atttacagtttccccaagaaatgcaccaggggaagtgctcctaaatttgcctttaagccctgatatcaacccatatttgg

SEQ ID NO: 104531 - DNA, 80 bp, synthetic construct
  source 1..80: mol_type = other DNA
cccatttgtcccgaatgtacaatggctatgcaggaggcgtggaggtagaggtggtcctcgctgggaatgcgttcacggcg

SEQ ID NO: 104532 - DNA, 80 bp, synthetic construct
  source 1..80: mol_type = other DNA
ggaaaaatcatctttgccgcagtgccacccaatttccctcctgaaaaccttagcccaagccaaataactatgctccccca

SEQ ID NO: 104533 - DNA, 80 bp, synthetic construct
  source 1..80: mol_type = other DNA
tattatagttgatgttaggcaattggaaccagtgcgcatacccttgccggatgtgcgcaacaatttctaccattattcaa

SEQ ID NO: 104534 - DNA, 80 bp, synthetic construct
  source 1..80: mol_type = other DNA
gagaaaatgattccacattgaggttgattgcaatgctgtatactccccttagagctaataatgctggtgatgatgtcttc

SEQ ID NO: 104535 - DNA, 80 bp, synthetic construct
  source 1..80: mol_type = other DNA
actgtctcctgcagggtgttaacaagaccctctcccgacttcgatttcatatttctggtgcctcctactgttgaatctaa

SEQ ID NO: 104536 - DNA, 80 bp, synthetic construct
  source 1..80: mol_type = other DNA
gtctaagccctttactatcccaatcttgactattgaggagatgactaactccagatttcccgccccattggaaatgatga

SEQ ID NO: 104537 - DNA, 80 bp, synthetic construct
  source 1..80: mol_type = other DNA
ctactggcccgagccacgagattgtggtgcaaccgcagaatgggcgctgcactatcgatggagtgctgctcggcaccaca

SEQ ID NO: 104538 - DNA, 80 bp, synthetic construct
  source 1..80: mol_type = other DNA
caattgtctcctgttaacatctgctctatgaggggtgtcccgacaaagagggataatggaaacaacaactgctttgtgca

SEQ ID NO: 104539 - DNA, 80 bp, synthetic construct
  source 1..80: mol_type = other DNA
tcttgagaacatcaatggaaccccctatgatcctactgaagacatccctgccgtgctgggagcgcctgattttgtgggag

SEQ ID NO: 104540 - DNA, 80 bp, synthetic construct
  source 1..80: mol_type = other DNA
tgttgtatgggacaatcagccaaaggagccccgacaactcaaccagggcccaccccttcaccctcaacactggagatgac

SEQ ID NO: 104541 - DNA, 80 bp, synthetic construct
  source 1..80: mol_type = other DNA
aggtacacccctaagttaggttccatagacatacacattgatgatgtcgatgacatgcaaaacaaccaaactgtgaaaat

SEQ ID NO: 104542 - DNA, 80 bp, synthetic construct
  source 1..80: mol_type = other DNA
gaccccagtgggtttagctggattggaaagaggatcaaccacccaccagtggcaactaccaaggtactccggggtggcca

SEQ ID NO: 104543 - DNA, 80 bp, synthetic construct
  source 1..80: mol_type = other DNA
cccacaacatgcacttggccccatctgtctcccctcttttccctggagagcaaattcttttcttccggtcgacagtcccc

SEQ ID NO: 104544 - DNA, 80 bp, synthetic construct
  source 1..80: mol_type = other DNA
ggctgtgggggttacccggacacaaaaattgactgcttaatcccccaggaatgggtccagcatttctaccaagagagcgc

SEQ ID NO: 104545 - DNA, 80 bp, synthetic construct
  source 1..80: mol_type = other DNA
cccagcgcgcactgatgtggccctgctgagattcatcaacccggatactggcagggttctatttgagtgcaaattacata

SEQ ID NO: 104546 - DNA, 80 bp, synthetic construct
  source 1..80: mol_type = other DNA
aacaagggtacatcactgtggcctattcaggagttcatgatttggttatgccccctaatggatacttcagatttgagtct

SEQ ID NO: 104547 - DNA, 80 bp, synthetic construct
  source 1..80: mol_type = other DNA
tgggtgaatcagtttcacactcttgcccccatgggaacaggttcgggcagaaggcgcatccaataatggcaggagcattc

SEQ ID NO: 104548 - DNA, 80 bp, synthetic construct
  source 1..80: mol_type = other DNA
ttggcaaatttagctggtggtgtggcgtcaaacggaatcgggtcattgatcaatgcaggcgcgaacgccataaatcagag

SEQ ID NO: 104549 - DNA, 80 bp, synthetic construct
  source 1..80: mol_type = other DNA
gattggacattcgccgggatagtggaaacggtcatcctggcagcagagttattcaatgtgttttggactccccctgatgt

SEQ ID NO: 104550 - DNA, 80 bp, synthetic construct
  source 1..80: mol_type = other DNA
ggtggaatatgatttcaacagacagttacaaaatgcatcatttgcccatgacaaggacatgctccaagcacagattcagg

SEQ ID NO: 104551 - DNA, 80 bp, synthetic construct
  source 1..80: mol_type = other DNA
caacaaaacagcttcaacgcgacatgatggccatcaagcaggaggtcttgaccgcgggcggcttttcccctgctgatgcc

SEQ ID NO: 104552 - DNA, 80 bp, synthetic construct
  source 1..80: mol_type = other DNA
gcaagaggggcggttggggcaccaatgacaaaactagttgactggagtggtacaaggtactgggcaccaaattctatgaa

SEQ ID NO: 104553 - DNA, 80 bp, synthetic construct
  source 1..80: mol_type = other DNA
gaccacaggctattccggaacttttagcagccaaccaatctcacaactcgcaactcaaccaaaagttgtgaaacaaccag

SEQ ID NO: 104554 - DNA, 80 bp, synthetic construct
  source 1..80: mol_type = other DNA
ctccagggaaaaaccccccctcagtcccctcaagtggttcttctgtgagttctcttgtgacacaatcaacttccctacag

SEQ ID NO: 104555 - DNA, 80 bp, synthetic construct
  source 1..80: mol_type = other DNA
agttcccctagtagatcagcatctagccaatcaacgagcctcaccattccctctcattcaagaacatcagactgggtccg

SEQ ID NO: 104556 - DNA, 80 bp, synthetic construct
  source 1..80: mol_type = other DNA
cagtcagaatgacaggctgagccctttcatgggtggagcacttcaaacagcctttgtgactcccccatcaagtagggctt

SEQ ID NO: 104557 - DNA, 80 bp, synthetic construct
  source 1..80: mol_type = other DNA
tggactcccatgtttaacacacataggcagccactcttcgcccatcttcgtaggcgaggggagtcacgagtctagtgaaa

SEQ ID NO: 104558 - DNA, 80 bp, synthetic construct
  source 1..80: mol_type = other DNA
gtccaattttatagcctctctgattggggactttgaaatgcaagggccggaagatctcgccgtggagcttgtgcccgtag

SEQ ID NO: 104559 - DNA, 80 bp, synthetic construct
  source 1..80: mol_type = other DNA
tccaggatgagcatgaacattctccttacacggtgccccctctaagtgaaagagaacacaaacccgcaatggaaccatta

SEQ ID NO: 104560 - DNA, 80 bp, synthetic construct
  source 1..80: mol_type = other DNA
tgatgggggggattggaatggttctgggcttcaccgcagaaaagatagggcgcatgctttcttcggccgcctccacttta

SEQ ID NO: 104561 - DNA, 80 bp, synthetic construct
  source 1..80: mol_type = other DNA
tgatggggtggattggaatggttctgggcttcaccgcagaaaagatagggcgcatgctttcttcggccgcctccacttta

SEQ ID NO: 104562 - DNA, 80 bp, synthetic construct
  source 1..80: mol_type = other DNA
agggcttgtaaagacctgggaaactacgccctggacatactcaagctggtcatgaaatggttcttccccaagaaggagga

SEQ ID NO: 104563 - DNA, 80 bp, synthetic construct
  source 1..80: mol_type = other DNA
cgaatcaatagtacacagatttgaaataatcgaggggagagacagaacaatggcctggacagtagtaaacagtatctgca

SEQ ID NO: 104564 - DNA, 80 bp, synthetic construct
  source 1..80: mol_type = other DNA
gtttaaattgtcaaaatggaaaggatagtgattgcccttgcaataatcagcatcgtcaaggctgaccaaatctgcattgg

SEQ ID NO: 104565 - DNA, 80 bp, synthetic construct
  source 1..80: mol_type = other DNA
tgatagctggtctatcattttggatgtgctcaaatggatcactgcagtgcagaatttgcatctagaagtgtgagttcaac

SEQ ID NO: 104566 - DNA, 80 bp, synthetic construct
  source 1..80: mol_type = other DNA
taacactaatgcagaagacctccttatattatggggaattcatcaccctaacgatgcagcagagcaaacaaagctctacc

SEQ ID NO: 104567 - DNA, 80 bp, synthetic construct
  source 1..80: mol_type = other DNA
aaagaggagattcggcaatcatgaagagtgaactggaatatggtgattgtgacaccaaatgccagactccaataggtgct

SEQ ID NO: 104568 - DNA, 80 bp, synthetic construct
  source 1..80: mol_type = other DNA
gcatgcctttccataatgttaatccccttaccattggggaatgccccaaatatatcaagtcggacaggctaattcttgcc

SEQ ID NO: 104569 - DNA, 80 bp, synthetic construct
  source 1..80: mol_type = other DNA
tcaaaaatcccaaaagtgcttaggtctgagctacaagtattcctagctcacaggctattcagcacaatgcagcggatatc

SEQ ID NO: 104570 - DNA, 80 bp, synthetic construct
  source 1..80: mol_type = other DNA
cagtttagtgccatttgttcagtggttcgccgggctttcccccactgtctggctttctatgatgatgtggtactgggggc

SEQ ID NO: 104571 - DNA, 80 bp, synthetic construct
  source 1..80: mol_type = other DNA
ttttgggctttgctgccccttttacacaatgtggatatcctgctttgatgcctctgtacgcgtgtattcaatctaagcag

SEQ ID NO: 104572 - DNA, 80 bp, synthetic construct
  source 1..80: mol_type = other DNA
tgtgtcaaagacttgtgggtcttctgggttttgctgcccctttcacacaatgtggttatcctgctttaaagtctccttgt

SEQ ID NO: 104573 - DNA, 80 bp, synthetic construct
  source 1..80: mol_type = other DNA
ttttgggttttgctgccccttttacacaatgtggttatcttgcgttattgccctcatctatcgatactaattacaagcgg

SEQ ID NO: 104574 - DNA, 80 bp, synthetic construct
  source 1..80: mol_type = other DNA
ttttgggctttgcagctccatttacacaatgtggatatcctgccttaatgcctttgtatgcatgtatacaagctaaacag

SEQ ID NO: 104575 - DNA, 80 bp, synthetic construct
  source 1..80: mol_type = other DNA
cctagtaactaatgtaaccttacatttcaagcaacatgactacaaatcccccccaagtaaccaaacaatactgtgtgaac

SEQ ID NO: 104576 - DNA, 80 bp, synthetic construct
  source 1..80: mol_type = other DNA
tcagagtttgacccggggtctatccagagatacctaaagttactggttaaggcctctggactttacaactccactattga

SEQ ID NO: 104577 - DNA, 80 bp, synthetic construct
  source 1..80: mol_type = other DNA
catgcaatccagagctgtcatcttgaagcatagatctggttcaggccacaagaggtctttgcccaggttctacatagact

SEQ ID NO: 104578 - DNA, 80 bp, synthetic construct
  source 1..80: mol_type = other DNA
gagactgctctttccaccttttgggctaaggactggcctaccccacaagagaccattctatctgacaaacgatgccttag

SEQ ID NO: 104579 - DNA, 80 bp, synthetic construct
  source 1..80: mol_type = other DNA
tactttgaaaataaattgttgttgactgttttttacctaagggaaattataaagagtgtgatgtcggatttggtgtttta

SEQ ID NO: 104580 - DNA, 80 bp, synthetic construct
  source 1..80: mol_type = other DNA
aaatactaaaatgggaacctctaacagggactgctaaacacatagaagaatgctcatgctacggaaaacaggcaggcatt

SEQ ID NO: 104581 - DNA, 80 bp, synthetic construct
  source 1..80: mol_type = other DNA
cctaggactaaacataggcttacacctgaaaccaaattgcaattgctccagtcctccacccgaatcagtaaactcaagtc

SEQ ID NO: 104582 - DNA, 80 bp, synthetic construct
  source 1..80: mol_type = other DNA
aacaatggtgtcaaaggtttttcatatttggatggagacaatacatgggtggggagaactataagcacagcatcacgatc

SEQ ID NO: 104583 - DNA, 80 bp, synthetic construct
  source 1..80: mol_type = other DNA
aaccaactcaaggccagacgatcgtcttaaatactgattggagcggttacagtgggtcttttatagattattgggccgag

SEQ ID NO: 104584 - DNA, 80 bp, synthetic construct
  source 1..80: mol_type = other DNA
ggggagtgctaccgggcgtgtttctatgtagagttgattcgagggagaccgaaagaggacaaagtgtggtggaccagcaa

SEQ ID NO: 104585 - DNA, 80 bp, synthetic construct
  source 1..80: mol_type = other DNA
aaacaataataaacaactattacaatgagacgaatattactcaaataagcaacacaaacgtccacaccgaagaaagggct

SEQ ID NO: 104586 - DNA, 80 bp, synthetic construct
  source 1..80: mol_type = other DNA
agcaggaatttcaacaacctgaccagagggctctgcacaataaattcatggcacatatttgggaaagacaatgcagtgag

SEQ ID NO: 104587 - DNA, 80 bp, synthetic construct
  source 1..80: mol_type = other DNA
tctcctgtgacccagacgaatgccgattttatgctctaagtcaggggactactataaggtggaaacattctaatgggacg

SEQ ID NO: 104588 - DNA, 80 bp, synthetic construct
  source 1..80: mol_type = other DNA
atacatgatcgctcacaataccgatctctggtaagttggcctttatcgtcgccacccacagtgtacaacactagagtaga

SEQ ID NO: 104589 - DNA, 80 bp, synthetic construct
  source 1..80: mol_type = other DNA
atgtattggctggtcaagtgccagctgccacgatgggaaggccaggatgtccatatgcgtatcaggccctaataacaatg

SEQ ID NO: 104590 - DNA, 80 bp, synthetic construct
  source 1..80: mol_type = other DNA
accggaggcctgtcacagagattaacacatgggcccgcaatattctacgaacccaagaatctgagtgtgtttgtcataaa

SEQ ID NO: 104591 - DNA, 80 bp, synthetic construct
  source 1..80: mol_type = other DNA
ggagtgtgcccagtagtatttacagatggatcggccacaggaccagcagaaacaaggatatactatttccagaaagggaa

SEQ ID NO: 104592 - DNA, 80 bp, synthetic construct
  source 1..80: mol_type = other DNA
agtgctgaaatgggaagccctcactggaactgctaaacacattgaagagtgttcatgctacggaaaggaatcaacaatca

SEQ ID NO: 104593 - DNA, 80 bp, synthetic construct
  source 1..80: mol_type = other DNA
gtagccctgttctcactgacaatcctagaccaaatgaccctatggtgggtaaatgcaatgatccctacccagggaacaac

SEQ ID NO: 104594 - DNA, 80 bp, synthetic construct
  source 1..80: mol_type = other DNA
agcaaaagcaggggtcataccatgaacaaccgaacaacgaaaatgaccatcacttttctcatcctcctatttacagtagt

SEQ ID NO: 104595 - DNA, 80 bp, synthetic construct
  source 1..80: mol_type = other DNA
gggattgtttggagcaatagctggttttatagaaggcggatggcaaggaatgattgatggctggtatgggtatcatcaca

SEQ ID NO: 104596 - DNA, 80 bp, synthetic construct
  source 1..80: mol_type = other DNA
accctattggagccattggatgttataaattttgagagcactggtaacttaattgcaccagagtacggattcaaaatatc

SEQ ID NO: 104597 - DNA, 80 bp, synthetic construct
  source 1..80: mol_type = other DNA
gaaaggggaccaaatatgtatcggatatcatgccaacaattccacagaaaaagttgacacaatcttggaacgaaatgtaa

SEQ ID NO: 104598 - DNA, 80 bp, synthetic construct
  source 1..80: mol_type = other DNA
attgtgagaccagatgtcaaacccccctaggggcaataaacacaacattgcctttccacaatattcacccattaacaatt

SEQ ID NO: 104599 - DNA, 80 bp, synthetic construct
  source 1..80: mol_type = other DNA
ggtgaatgccccaagtatgtcaaatcaaatagactggtcttggcgacaggattaagaaatgtccctcaaattgaatcaag

SEQ ID NO: 104600 - DNA, 80 bp, synthetic construct
  source 1..80: mol_type = other DNA
aaagggttttcatttaggtacggtagtggggtgtggatcggtagaaccaagagcactagctctagaagcgggtttgagat

SEQ ID NO: 104601 - DNA, 80 bp, synthetic construct
  source 1..80: mol_type = other DNA
agtttctccacgaagcaggatattgtagcaatcactgattggtcgggctatagtggaagtttcgtgcagcatccagagct

SEQ ID NO: 104602 - DNA, 80 bp, synthetic construct
  source 1..80: mol_type = other DNA
aattgataaggggacggcctaaggagaatacaatatggaccagtggtagtagtatctccttctgcggtgtgagcagcgac

SEQ ID NO: 104603 - DNA, 80 bp, synthetic construct
  source 1..80: mol_type = other DNA
agcatcatcacctatgagaacaatacctgggtgaaccaaacatacctaaacatcagtgtcacgaacttgtctgctgagca

SEQ ID NO: 104604 - DNA, 80 bp, synthetic construct
  source 1..80: mol_type = other DNA
tggcggaaccccaaaagcattagccggtaattcatccctctgccccatcagtggatgggccatatatagcaaagataacg

SEQ ID NO: 104605 - DNA, 80 bp, synthetic construct
  source 1..80: mol_type = other DNA
gcatcaggattgggtctaaaggtgacgtttttgttataagagagccatttatctcgtgctcgcatctggaatgtagaact

SEQ ID NO: 104606 - DNA, 80 bp, synthetic construct
  source 1..80: mol_type = other DNA
ggtgcattattgaacgacaaacattcaaatgggaccgttaaggacagaagtccctacagaacactgatgagctgtcctgt

SEQ ID NO: 104607 - DNA, 80 bp, synthetic construct
  source 1..80: mol_type = other DNA
tatctgggccagataatggagcagtggctgttcttaagtacaatggtataataacagacacagttaaaagctggaagggt

SEQ ID NO: 104608 - DNA, 80 bp, synthetic construct
  source 1..80: mol_type = other DNA
aacatattaagaactcaagaatcagagtgtgcctgcataaatggttcatgctttaccgtgatgactgatggtccgagtaa

SEQ ID NO: 104609 - DNA, 80 bp, synthetic construct
  source 1..80: mol_type = other DNA
gcgtgtttggagacaatccccgtcctaatgatgggacagggagctgtggcccggtgtcttctaacggtgcatacggggtg

SEQ ID NO: 104610 - DNA, 80 bp, synthetic construct
  source 1..80: mol_type = other DNA
caaggaaggctctgtaaccctctgaatccattcgtcagccacaaggagatcgagtctgtgaacaacgctgtggtgatgcc

SEQ ID NO: 104611 - DNA, 80 bp, synthetic construct
  source 1..80: mol_type = other DNA
gggattggagcagattgacaatgtaatgggaatgatcggaatactgcctgacatgactcccagcacagagttgtcactaa

SEQ ID NO: 104612 - DNA, 80 bp, synthetic construct
  source 1..80: mol_type = other DNA
aagcagcccgaggccagtatagcggttttgtgagaacactgtttcagcaaatgagagatgtgcttggaacatttgacact

SEQ ID NO: 104613 - DNA, 80 bp, synthetic construct
  source 1..80: mol_type = other DNA
gcagctgcacctccggaacagagcaggatgcagttctcctctttgaccgtgaatgtgagaggatcgggcatgaggatact

SEQ ID NO: 104614 - DNA, 80 bp, synthetic construct
  source 1..80: mol_type = other DNA
ttggaggctctcaacgggtatctagacaagcataaggacgaagttgacagggcgagtgctgacagtatgataacaaacct

SEQ ID NO: 104615 - DNA, 80 bp, synthetic construct
  source 1..80: mol_type = other DNA
cgtgcacaaggtgcccagattgacactgccttcagctcttactactggctttacaaagctggcgtgactccagaaacctt

SEQ ID NO: 104616 - DNA, 80 bp, synthetic construct
  source 1..80: mol_type = other DNA
tggtactgggcctctctgggaaaaccaggccaagcccggaagttctcgggttagcaaggaaacccactgcttaaagcctc

SEQ ID NO: 104617 - DNA, 80 bp, synthetic construct
  source 1..80: mol_type = other DNA
atgaatacaaatcaaagaataataaccattgggacaatttgcatgatagttggaataatcagcctattgttacagatagg

SEQ ID NO: 104618 - DNA, 80 bp, synthetic construct
  source 1..80: mol_type = other DNA
catatgtaaataacacatgggtgaaccaaacttatgcgaacattagcaacatcaaaattgctactatacaggatgtgacc

SEQ ID NO: 104619 - DNA, 80 bp, synthetic construct
  source 1..80: mol_type = other DNA
ccgatcgtactggccggcaattcatcactttgcccagtaagtggatgggctgtatacagcaaagacaatagcataaggat

SEQ ID NO: 104620 - DNA, 80 bp, synthetic construct
  source 1..80: mol_type = other DNA
gtcggagtgtgtttgtatgaatggttcttgttttacagtattaactgatggcccaagcaatgagcaagcctcttacaaaa

SEQ ID NO: 104621 - DNA, 80 bp, synthetic construct
  source 1..80: mol_type = other DNA
aaacatagtctcattatggattagccactcaattcagaccgaatgggaaaatcacactggagtgtgcaaccaaagtgtca

SEQ ID NO: 104622 - DNA, 80 bp, synthetic construct
  source 1..80: mol_type = other DNA
cctacattgtagaagcacccaattccgataatggtgcatgttacccagggcagtttgccgactacgaggagctaagggaa

SEQ ID NO: 104623 - DNA, 80 bp, synthetic construct
  source 1..80: mol_type = other DNA
tgtaatgtcttcacattatagcagaaggttcactccagaaataaccaaaagacctaaagtaaagaatcaggaaggacgga

SEQ ID NO: 104624 - DNA, 80 bp, synthetic construct
  source 1..80: mol_type = other DNA
cgcaccggggatcctaggcacttatttgcgctatttagtagccaatactacttccacaaatccaccagagttgacaaaac

SEQ ID NO: 104625 - DNA, 80 bp, synthetic construct
  source 1..80: mol_type = other DNA
aagctcaagagaatcaccaagtatcaaagggtcttccatataatctttaaatacttcagacctcacatcaaaaacagcat

SEQ ID NO: 104626 - DNA, 80 bp, synthetic construct
  source 1..80: mol_type = other DNA
cattcacctcaaagatgggatctgttctaagcaagtgaaggcactcatccaacaatcttctgtccacctcacccttaaaa

SEQ ID NO: 104627 - DNA, 80 bp, synthetic construct
  source 1..80: mol_type = other DNA
aagtaagagcatgacaaaaactcagccacacctggactcaataattgacactttactagtagaatcaatgaaaatctccg

SEQ ID NO: 104628 - DNA, 80 bp, synthetic construct
  source 1..80: mol_type = other DNA
taggcagtctgtgttattctgattatgtgtaaaatccactgtaattgtaagctctaatactccttctgtattgatgagca

SEQ ID NO: 104629 - DNA, 80 bp, synthetic construct
  source 1..80: mol_type = other DNA
tgtggtcccatagatccttcaaagatttaaatgtccttgattctgttaatccctgcttgatgagcacagtagcattgcat

SEQ ID NO: 104630 - DNA, 80 bp, synthetic construct
  source 1..80: mol_type = other DNA
atagcatcctctatccagtaagagaaccatccatacccaaactgcaaatcatccctaaacataggtctttctataccttt

SEQ ID NO: 104631 - DNA, 80 bp, synthetic construct
  source 1..80: mol_type = other DNA
gtttaccacctttaaaacaaaagattgaaacgggcctagtgcttctgcgccatcctcagatggcatcatgctcttatgag

SEQ ID NO: 104632 - DNA, 80 bp, synthetic construct
  source 1..80: mol_type = other DNA
acctaccttggtcctctaaactgtaaatcatgttggcagagatttgatagtctggtgaggtgtcatgaccactacctttg

SEQ ID NO: 104633 - DNA, 80 bp, synthetic construct
  source 1..80: mol_type = other DNA
ggaaccatgaaaaactgcctagcgtcctggttgttacaacaatctctcgcacaaatgactcaaagtacacttgttttaaa

SEQ ID NO: 104634 - DNA, 80 bp, synthetic construct
  source 1..80: mol_type = other DNA
aaatttttgcaaacatcccttgtgctaacaacaaactcatcaaccagacttgaatcagaccgctggtgagagtttatgag

SEQ ID NO: 104635 - DNA, 80 bp, synthetic construct
  source 1..80: mol_type = other DNA
atcagaaaacaaaacagtgtaatgttcatcccttttccacttgacaacatgggaaataagtgatagggattctgaattaa

SEQ ID NO: 104636 - DNA, 80 bp, synthetic construct
  source 1..80: mol_type = other DNA
tgtcaatcagcacacagaggtcaagaaatttaattctgggactccatctcatgttttttgagctcatgtcagacataaat

SEQ ID NO: 104637 - DNA, 80 bp, synthetic construct
  source 1..80: mol_type = other DNA
ggaagcagctgatcctcaaaaactttggggtataatcgccttacagactgaatcacatggttcaaactcaccttatcttc

SEQ ID NO: 104638 - DNA, 80 bp, synthetic construct
  source 1..80: mol_type = other DNA
tagcagccttgaactctcaggtttccttgacacataatcacaagggtttaagtgcttgagacctgaattctcattaattt

SEQ ID NO: 104639 - DNA, 80 bp, synthetic construct
  source 1..80: mol_type = other DNA
tccccatcacaggttccgccaagacccaaacacctaactcaaaagaattgcttagtgaaatgcagatatagtcccaaaga

SEQ ID NO: 104640 - DNA, 80 bp, synthetic construct
  source 1..80: mol_type = other DNA
agaggtcttaagaaactaatgtgatcacgatgagcctctgggtgactttgcgtatcacaagtatacagcattatgccatc

SEQ ID NO: 104641 - DNA, 80 bp, synthetic construct
  source 1..80: mol_type = other DNA
atgtttataaactcttgtcacatgttcatctgctgttaaatcctcgagaaccttttttatatacaagtttcctctattct

SEQ ID NO: 104642 - DNA, 80 bp, synthetic construct
  source 1..80: mol_type = other DNA
tatctcttacacatctgctccctagagtcttgcaaaggcctatgaaacctgaagaaatgcaactttgaaaagctgattta

SEQ ID NO: 104643 - DNA, 80 bp, synthetic construct
  source 1..80: mol_type = other DNA
caggcattgtctgaatctgctgctgacagtttctgacagatgccctctttgcaaacaccaactgccaaccaggctgagaa

SEQ ID NO: 104644 - DNA, 80 bp, synthetic construct
  source 1..80: mol_type = other DNA
ttaattgcctctgataaaagcttctgagcacctcttgtgaacttgctgcaaagtttgttttgaagtgttttaatcaatga

SEQ ID NO: 104645 - DNA, 80 bp, synthetic construct
  source 1..80: mol_type = other DNA
agggattctctcctcttggtagcccatcactgacgggtaaaccactttctgtcttagaaccattcttaatgggaacattt

SEQ ID NO: 104646 - DNA, 80 bp, synthetic construct
  source 1..80: mol_type = other DNA
cattcaaatttaaccaattgatattcgccaactcacttaaatcctcttcaaaatcaaatatttctcccaattgaagaata

SEQ ID NO: 104647 - DNA, 80 bp, synthetic construct
  source 1..80: mol_type = other DNA
gcttcctttttatttctattaaaaagatccatgaaaaagtcctcatttaattcaccatttttaagcttatgatgcaactt

SEQ ID NO: 104648 - DNA, 80 bp, synthetic construct
  source 1..80: mol_type = other DNA
cctcacaagccttcttatgatcttggcttcatcaggacataattcctcaataagcctttgaattctataacctctagagc

SEQ ID NO: 104649 - DNA, 80 bp, synthetic construct
  source 1..80: mol_type = other DNA
catccagccagtctttcacatcagtgttggtgtttaacaagaatggatccaatgggaagttggcatatttcaaaagatcc

SEQ ID NO: 104650 - DNA, 80 bp, synthetic construct
  source 1..80: mol_type = other DNA
agtgtcctcctctgaatgcaattcaccaaagaaaccgggacaccatttgcgacagcctgatcagcaattgtgtctattgt

SEQ ID NO: 104651 - DNA, 80 bp, synthetic construct
  source 1..80: mol_type = other DNA
ttcacagagctggtgtggttctttgcacttaacattgtgtaatgctgcagacacaaattttgttaagaggggaacttctt

SEQ ID NO: 104652 - DNA, 80 bp, synthetic construct
  source 1..80: mol_type = other DNA
ccccccacacataaaatctagatttaaattccgctgcaaatcgcccaaccacactttttggactgacaaatttgtttaat

SEQ ID NO: 104653 - DNA, 80 bp, synthetic construct
  source 1..80: mol_type = other DNA
agtccgctcaagtaagagtgaaattccaacaagacaagaacttcttttggatcagtatcaaccagctcacttagtcttct

SEQ ID NO: 104654 - DNA, 80 bp, synthetic construct
  source 1..80: mol_type = other DNA
tatcaacagctccaagctcaccacctccctacgaagagtgacgccccaagacaccagcaggcagcccaacaaagggagcc

SEQ ID NO: 104655 - DNA, 80 bp, synthetic construct
  source 1..80: mol_type = other DNA
atcaaacaaagtgatctgatcatcacttgaggtataagcttctggtctctcaccaaaaatgacacctatgcaatagttga

SEQ ID NO: 104656 - DNA, 80 bp, synthetic construct
  source 1..80: mol_type = other DNA
tgaacctctcactaatcaaaccataaaagtcagaagcattatgcaagattccctgtcccatgtcaatgagactagatata

SEQ ID NO: 104657 - DNA, 80 bp, synthetic construct
  source 1..80: mol_type = other DNA
tgggatggcacaactcccatctcaaaatattctctaaagattctttcagtaacggttgtctctgtacccctaaggagctt

SEQ ID NO: 104658 - DNA, 80 bp, synthetic construct
  source 1..80: mol_type = other DNA
cagcttagatttaacatatgacttcatcattgcactcacaacaggaaagggtacctcaacaagtttatgcatgtgccaag

SEQ ID NO: 104659 - DNA, 80 bp, synthetic construct
  source 1..80: mol_type = other DNA
ttaataatgtgctaacgtgatccttacctgaacgcacatattggtcatcacctagtttgagattctgaaggagcattaaa

SEQ ID NO: 104660 - DNA, 80 bp, synthetic construct
  source 1..80: mol_type = other DNA
aacaaaaatgggcacatcattggtccccacttactgtgatccatgctatagtttaataaaccctctcgtacattaatggt

SEQ ID NO: 104661 - DNA, 80 bp, synthetic construct
  source 1..80: mol_type = other DNA
cattgataagattgcattttcaaattctttatcattattcaaacatgaacctgaaaagaaactacaaaaggattcaaaat

SEQ ID NO: 104662 - DNA, 80 bp, synthetic construct
  source 1..80: mol_type = other DNA
agtcttctatcaatcttgtgaacatctttgtccttaaatctccaatatacagctctctatttcccccaacctgctccttg

SEQ ID NO: 104663 - DNA, 80 bp, synthetic construct
  source 1..80: mol_type = other DNA
taagataatgcaaatttcaatcttccagaatcaggaccaactgaggtgtatgatgttggtgattcttctgagtagaaaca

SEQ ID NO: 104664 - DNA, 80 bp, synthetic construct
  source 1..80: mol_type = other DNA
caagttcttcaaagcagcactcatacatcttgtcaatgatagggccttgcttagagactcagaattgctttctctctcac

SEQ ID NO: 104665 - DNA, 80 bp, synthetic construct
  source 1..80: mol_type = other DNA
acacacagaccgacacacagagaccggggacccaccgcaagacacacacacacgcacgcgagcacacccacacgcacgcg

SEQ ID NO: 104666 - DNA, 80 bp, synthetic construct
  source 1..80: mol_type = other DNA
taattctcacatcctcttccaatttattccagtcaaatttaaagtttaagccttgtcgctgcacatgcctgtatttccct

SEQ ID NO: 104667 - DNA, 80 bp, synthetic construct
  source 1..80: mol_type = other DNA
gagtatgtgtttgcattcatctgcagtaagatcatcttcatacatgagaaccaatcaccctctgaaaaaaactttctaca

SEQ ID NO: 104668 - DNA, 80 bp, synthetic construct
  source 1..80: mol_type = other DNA
aaggttctgtgccatttcatccaggccacattgttccttaatagctgaagtgaagtatagcggtgacaattctttagagc

SEQ ID NO: 104669 - DNA, 80 bp, synthetic construct
  source 1..80: mol_type = other DNA
cctctacagcctcacacacaaacttcatgtcaccatctgtaaggcaagatggatcaaagtcttctactaggtggaaggaa

SEQ ID NO: 104670 - DNA, 80 bp, synthetic construct
  source 1..80: mol_type = other DNA
atttctgacagaatgatcttcctcaaatgagccatttcacctgataggacaacctggagatgatgtagtccttttgtatt

SEQ ID NO: 104671 - DNA, 80 bp, synthetic construct
  source 1..80: mol_type = other DNA
ttgaagcttctccccaccccagcttccatcatctttccgacctcttttgtactgcgttattgtggagttcaccctacctt

SEQ ID NO: 104672 - DNA, 80 bp, synthetic construct
  source 1..80: mol_type = other DNA
ctagagccttgaaaaatcttgtctcttcttccccttcaaaacacacgccctccaaatcattttccattttcttcacctct

SEQ ID NO: 104673 - DNA, 80 bp, synthetic construct
  source 1..80: mol_type = other DNA
gctttcttagtacctatcaccaatttagagactaactttgagaccttatactcatagtctgagtggctcaatttgtactt

SEQ ID NO: 104674 - DNA, 80 bp, synthetic construct
  source 1..80: mol_type = other DNA
ctgcttcctcataaagccttctgaaatctgactcacagcactaacgagcagtttattgaaatcatattctagaagtcgtt

SEQ ID NO: 104675 - DNA, 80 bp, synthetic construct
  source 1..80: mol_type = other DNA
ctccatttagatgtttattaacaaccacacttttgttgctagcaagatccagtgctgttgcacatccagagttagtcatg

SEQ ID NO: 104676 - DNA, 80 bp, synthetic construct
  source 1..80: mol_type = other DNA
ccccccacaccaggtggcgcccccccggtggggacgccccccggggcccggccggagcccagtggagacgcccactagtc

SEQ ID NO: 104677 - DNA, 80 bp, synthetic construct
  source 1..80: mol_type = other DNA
ggatccaggttgctgagtttcttctccctattaaatattaaggtaccattgttgaatgaagacaccatcatgccaaaaac

SEQ ID NO: 104678 - DNA, 80 bp, synthetic construct
  source 1..80: mol_type = other DNA
ctctaagttaacacctggaattacctgctggcagccgatctttttacttgtaaacttcctcatctgttcatagaaaacac

SEQ ID NO: 104679 - DNA, 80 bp, synthetic construct
  source 1..80: mol_type = other DNA
actcttcttcaggagtgatcatctccttagggttgataaaaaagccaaactgacttttaggctcaaagaatttttcaaag

SEQ ID NO: 104680 - DNA, 80 bp, synthetic construct
  source 1..80: mol_type = other DNA
cattttatttgatctgtcaacctatctggggtctcctttgtgattagatgacataagtatgacacattcaacatgaattt

SEQ ID NO: 104681 - DNA, 80 bp, synthetic construct
  source 1..80: mol_type = other DNA
gaactttgcacttaacaacactgtctcgccagtgccaaaaatggttttgattagatacctgagcagcctgtacaccatct

SEQ ID NO: 104682 - DNA, 80 bp, synthetic construct
  source 1..80: mol_type = other DNA
tttcaacaggtgtgattagatcctcttttagcttgtccatcaatgatgttgttgagaagtctgaaaccatggccatcact

SEQ ID NO: 104683 - DNA, 80 bp, synthetic construct
  source 1..80: mol_type = other DNA
aaatacctaatattctgaacttgcttctggtttctctttgttgggttggttaacatcagtaaaactagagtcctcagtgc

SEQ ID NO: 104684 - DNA, 80 bp, synthetic construct
  source 1..80: mol_type = other DNA
ggccggagcccagtggagacgcccactagtcgatttcctcgacccccgattcagtcagccagttgtcacaggacttccct

SEQ ID NO: 104685 - DNA, 80 bp, synthetic construct
  source 1..80: mol_type = other DNA
agtttcaatgtcaatgagacagtctttcaaatcaggacacgatttgatccatgatatcatagtattaatcatgttgtgta

SEQ ID NO: 104686 - DNA, 80 bp, synthetic construct
  source 1..80: mol_type = other DNA
atacctcatctgaaaaaattggtaaaaagtacctctttgggtccgcatagaaggaaatcaagtgaccatctggaccttgt

SEQ ID NO: 104687 - DNA, 80 bp, synthetic construct
  source 1..80: mol_type = other DNA
atagagtaacaccttgaggactccccagtcttctggtatagcaaatggtactcttctgagtctaattttatcacctggtg

SEQ ID NO: 104688 - DNA, 80 bp, synthetic construct
  source 1..80: mol_type = other DNA
gatttcctcgacccccgattcagtcagccagttgtcacaggacttccctttaagtctgaacctgcccccagctgtttcat

SEQ ID NO: 104689 - DNA, 80 bp, synthetic construct
  source 1..80: mol_type = other DNA
gaatacctctttacactccaccacttggtacctcacagaccccaattggttttgtcttaacctggcaactgagctagtct

SEQ ID NO: 104690 - DNA, 80 bp, synthetic construct
  source 1..80: mol_type = other DNA
tcatactgtttgtcagagccaaacagatagatgacaatttccttaaactctgcgcactccttaactgctcaatgtcaggc

SEQ ID NO: 104691 - DNA, 80 bp, synthetic construct
  source 1..80: mol_type = other DNA
tgaaagtcataatcttcaaaccttgtgtaatgcattactggatgagtgccaaccttcatgaagctcctaaactcagtgaa

SEQ ID NO: 104692 - DNA, 80 bp, synthetic construct
  source 1..80: mol_type = other DNA
tagaatattgcattcatgcacaagatgctcagatagtctgtagtgttcaaagctgagtcccactatagacaggcattttt

SEQ ID NO: 104693 - DNA, 80 bp, synthetic construct
  source 1..80: mol_type = other DNA
taatctttgcaataaattcacttattgatattctaaataattcctccagagacaccttcttaaacatccttgatcttttc

SEQ ID NO: 104694 - DNA, 80 bp, synthetic construct
  source 1..80: mol_type = other DNA
ctgttcctcagaaacttaatgtactcttccttggtgctatagaagctcactagtctatcgttcacactactgtagcaaca

SEQ ID NO: 104695 - DNA, 80 bp, synthetic construct
  source 1..80: mol_type = other DNA
gcctacccagtgcttatcaccttttgaaccttttgacttcgattgtttaattaaacaagaaaggcacaagacatccaaat

SEQ ID NO: 104696 - DNA, 80 bp, synthetic construct
  source 1..80: mol_type = other DNA
tcaacaactgtctcctcctagtgtttagtaacttcaagctctttactttattcaacatggaaaggagcctttcatactca

SEQ ID NO: 104697 - DNA, 80 bp, synthetic construct
  source 1..80: mol_type = other DNA
gtgccagcctcaccctccctcttgtacccgttggtctctgctgtggtaaacctcattaaaggacaggattcaactgcctc

SEQ ID NO: 104698 - DNA, 80 bp, synthetic construct
  source 1..80: mol_type = other DNA
tttacttaaggttgagatgtcatcgtcgtagtttagggcctcataaagtccagaatattccttgatcaggtcctcaggtt

SEQ ID NO: 104699 - DNA, 80 bp, synthetic construct
  source 1..80: mol_type = other DNA
acatcactgtgttctttgacttactaaaacagagtctgcaatctttaaaggtgaaccagtctggtacaaatgatagcggc

SEQ ID NO: 104700 - DNA, 80 bp, synthetic construct
  source 1..80: mol_type = other DNA
tgattctctgaaaattccttgctaactttccactttctaggtcccttctaaacctaccaaatagagagtttatgccaaga

SEQ ID NO: 104701 - DNA, 80 bp, synthetic construct
  source 1..80: mol_type = other DNA
gccacctcatcacaactcatgttggggttaatgccatcatgacacattttcataatttcatcattgtgaaatgatcttgc

SEQ ID NO: 104702 - DNA, 80 bp, synthetic construct
  source 1..80: mol_type = other DNA
atctcttagagttttcatggaatctataccagaacgtttgtcaacagtggttttgagagactcacagagtctaaagtact

SEQ ID NO: 104703 - DNA, 80 bp, synthetic construct
  source 1..80: mol_type = other DNA
cacactcttcgaagaccttctcatcctgactagaatattccaggagtttaaacagaaggtctctgaacttgaagttcacc

SEQ ID NO: 104704 - DNA, 80 bp, synthetic construct
  source 1..80: mol_type = other DNA
cactctggcatgaagctgttatcataatcacaacgaccatctactattggaacaagtgtgacacctgcaagagctaggtc

SEQ ID NO: 104705 - DNA, 80 bp, synthetic construct
  source 1..80: mol_type = other DNA
ttcctttatgcttgccagtttatttgtgtcttctatgaatttcttttcaaagctggctggggtgcttctaacaaagcatt

SEQ ID NO: 104706 - DNA, 80 bp, synthetic construct
  source 1..80: mol_type = other DNA
caagaagaataagcgagttgtcaatcagcttatagccgtcaggaacaatgagtggcagtcctgggcacacaattccagat

SEQ ID NO: 104707 - DNA, 80 bp, synthetic construct
  source 1..80: mol_type = other DNA
tctatcagtattgtctcagcagatttgtcgtcatggttgtgtgtgcaaccactcttgtctgcactatctatttctataca

SEQ ID NO: 104708 - DNA, 80 bp, synthetic construct
  source 1..80: mol_type = other DNA
gcgtgataacaatttgagcccctcaatcaacagcattctgggttctctttgtcccagaaagttaagtttttgtcttgata

SEQ ID NO: 104709 - DNA, 80 bp, synthetic construct
  source 1..80: mol_type = other DNA
gcctctcatcctgttctatatagtttaagcacaattccctcaactcagaaatggtctcatccattgcgcatcaaaaaaaa

SEQ ID NO: 104710 - DNA, 80 bp, synthetic construct
  source 1..80: mol_type = other DNA
aacagcataacagatttattcatatgcaactcttgaagagtcacgcctatatctgaaccagatagatgttctccagttct

SEQ ID NO: 104711 - DNA, 80 bp, synthetic construct
  source 1..80: mol_type = other DNA
caccaaccatgggccaaaacaattccaagagagaagaggacaccagcaatgtagacagagctgagattctgccagatgcc

SEQ ID NO: 104712 - DNA, 80 bp, synthetic construct
  source 1..80: mol_type = other DNA
gaatcgatgcagaaggagattgccaagagtatcagcgatcctctcatatccttcaagttctgctaaaaagacctttatgt

SEQ ID NO: 104713 - DNA, 80 bp, synthetic construct
  source 1..80: mol_type = other DNA
ccttagtttccagcttcacaaggatattttgaacaaaactctttccttcaaagagggcacccaattttacagtcagtgga

SEQ ID NO: 104714 - DNA, 80 bp, synthetic construct
  source 1..80: mol_type = other DNA
acaggctcccattcaggaccaactctttcgaaatcaagagacttaatcccatccagtatccatctagagccgttcagttc

SEQ ID NO: 104715 - DNA, 80 bp, synthetic construct
  source 1..80: mol_type = other DNA
ggatcctaggctttttggattgcgcttcctttaagtcaactgagtgctgagttctgtcttgtgaaaggatgggccaaatt

SEQ ID NO: 104716 - DNA, 80 bp, synthetic construct
  source 1..80: mol_type = other DNA
aactcagacccacttgaggtggacctgctgacccaggcaccggcctaggtgaattaactgcaagcctctcatttgagagg

SEQ ID NO: 104717 - DNA, 80 bp, synthetic construct
  source 1..80: mol_type = other DNA
aggtcctgtggtatgtacggccttgaagggtctgacatttacaaaggagtctaccagttcaaatcagtggaatttgacat

SEQ ID NO: 104718 - DNA, 80 bp, synthetic construct
  source 1..80: mol_type = other DNA
actgttgcttggcttgattaggatggattctaacatatttcccccgtctagcaaggctgctcctgctttcacagcagcac

SEQ ID NO: 104719 - DNA, 80 bp, synthetic construct
  source 1..80: mol_type = other DNA
ctccagaggcctgaggcctttcaaacctcatgattttagctttcagcttttcaagatcagctgcaagggacatcagctct

SEQ ID NO: 104720 - DNA, 80 bp, synthetic construct
  source 1..80: mol_type = other DNA
ctccattctgaatcacaatcactgtaatctgacttctgccttcaacaagaaaacctttgaccacacacttatgagcatag

SEQ ID NO: 104721 - DNA, 80 bp, synthetic construct
  source 1..80: mol_type = other DNA
ttttaacaacggcattaccatccaatacaatttgacaatgtctgatgcacaaggtgctctgagtcaatgcagaaccttta

SEQ ID NO: 104722 - DNA, 80 bp, synthetic construct
  source 1..80: mol_type = other DNA
cagcagttgcaaaatgtaatgtgaatcatgatgaagaattctgcgacatgctgcgattaattgattacaacaaggctgct

SEQ ID NO: 104723 - DNA, 80 bp, synthetic construct
  source 1..80: mol_type = other DNA
cggggatcctaggcgttaatttgcgcttctttgtggacaaccttgttatccaaaagattgcctctcaggcacagtgctgt

SEQ ID NO: 104724 - DNA, 80 bp, synthetic construct
  source 1..80: mol_type = other DNA
ctgtgaacatcaatgaaaatctccttaggtgctctgtattgttttggttatgtgtgaaatcaacacttaacgtaaattcc

SEQ ID NO: 104725 - DNA, 80 bp, synthetic construct
  source 1..80: mol_type = other DNA
aatagaccttttgtgtggttgaggaaatactcccacatatctttcaatgtcctaaatgtccttgagtttgccataccctg

SEQ ID NO: 104726 - DNA, 80 bp, synthetic construct
  source 1..80: mol_type = other DNA
ctttattagcatagctgcattgcaaactatatcccccaaacgataagaaaaccatccgtacccgaattgtaggtcagtct

SEQ ID NO: 104727 - DNA, 80 bp, synthetic construct
  source 1..80: mol_type = other DNA
cctcggagggcatcatgtcacggtgagggaaccacgagaagttccccaacgttcgggatgtaaccacaaattctcgaaca

SEQ ID NO: 104728 - DNA, 80 bp, synthetic construct
  source 1..80: mol_type = other DNA
ctctcaggtttcctagcaacatagtcacaagcgttgagttgctttggtaccagtttcacaacctcccttgctttaatagg

SEQ ID NO: 104729 - DNA, 80 bp, synthetic construct
  source 1..80: mol_type = other DNA
cacagatgtataaaaacatatcctcacctttctgaaccctcgaaacatgattatcttgggataaatcttctaaaactctt

SEQ ID NO: 104730 - DNA, 80 bp, synthetic construct
  source 1..80: mol_type = other DNA
tttatataaagattctctttatctttatttcttatgcatctgctccccaaagttttgcagagacctatgaagcctgaaga

SEQ ID NO: 104731 - DNA, 80 bp, synthetic construct
  source 1..80: mol_type = other DNA
aaaattcgcatattttaataaatccaatgtcctcttttgaatgcaattaaccaatgcgacaggtacgccgtttgcaacag

SEQ ID NO: 104732 - DNA, 80 bp, synthetic construct
  source 1..80: mol_type = other DNA
gtcaccagtccccagctcaccccctccctacgaaggatgatcaaccgagaagcccgactgcccccaccagtcccacacac

SEQ ID NO: 104733 - DNA, 80 bp, synthetic construct
  source 1..80: mol_type = other DNA
tagagtgaagagagctctggacactcttcaacagcttcacaaacaaacttcatgtcatcaggtgaaaggcagcatgggtc

SEQ ID NO: 104734 - DNA, 80 bp, synthetic construct
  source 1..80: mol_type = other DNA
acacacgcagacacgcacacacacacacccagacaccacaaaccccggcgaaagccaccgaaacacgacacccaccctca

SEQ ID NO: 104735 - DNA, 80 bp, synthetic construct
  source 1..80: mol_type = other DNA
aaaatcctccaccagatggaatgagatttctgacagaatgatctttctcaaataggatgacttccctgtcaagaccatct

SEQ ID NO: 104736 - DNA, 80 bp, synthetic construct
  source 1..80: mol_type = other DNA
gtaaatgatgcagacccttggcccccttccctctttctaactctttcagttgttcaatagttgttctttttccatagttg

SEQ ID NO: 104737 - DNA, 80 bp, synthetic construct
  source 1..80: mol_type = other DNA
gatattgttgacttcactttattttccatttccttaaagaagagtgtctcctcttccccctcaaaataagtctcatccac

SEQ ID NO: 104738 - DNA, 80 bp, synthetic construct
  source 1..80: mol_type = other DNA
actagtttctttattctcactgtgtcccttttctgagccaaggactaacctagacaccagtttggataccttgtactcat

SEQ ID NO: 104739 - DNA, 80 bp, synthetic construct
  source 1..80: mol_type = other DNA
aaagccaccgaaacacgacacccaccctcagcccagccccccacgcgcgggtggccccccggagggacccccccagggtg

SEQ ID NO: 104740 - DNA, 80 bp, synthetic construct
  source 1..80: mol_type = other DNA
ctcgcgagcgctgctcagtctatgtcctgcaccgatggctcttccagccaatcatcacaggatcttcctttgagcctgta

SEQ ID NO: 104741 - DNA, 80 bp, synthetic construct
  source 1..80: mol_type = other DNA
cattgttaactttagccacttggtaaaagacctccttacattccaccacttggtatctgattgagcccaattgattctgt

SEQ ID NO: 104742 - DNA, 80 bp, synthetic construct
  source 1..80: mol_type = other DNA
aaacttcttatatctactagttgattttcatctgactgaaaagtgtaatcctcaaaccttgtgtagtgcatcactggatg

SEQ ID NO: 104743 - DNA, 80 bp, synthetic construct
  source 1..80: mol_type = other DNA
agtcccttgttttttaaagccctcgaattcactaagtgtgatctggcattcagataccaagtcctcagacaagccatagt

SEQ ID NO: 104744 - DNA, 80 bp, synthetic construct
  source 1..80: mol_type = other DNA
gcccaaaaccaaggcccaccgcagataagcatcttttgattttcaaaatgaagtcttttatagagttcttgaacagctct

SEQ ID NO: 104745 - DNA, 80 bp, synthetic construct
  source 1..80: mol_type = other DNA
tctaatgaaatactcttatttgatttggacctttttctgtttctcagaacctttaggaactcctcctttgtgctacagta

SEQ ID NO: 104746 - DNA, 80 bp, synthetic construct
  source 1..80: mol_type = other DNA
gctcactagcctatcatttacactactataacaaactcccacccagtgtctctcatctgtaagagcttctggatcaccat

SEQ ID NO: 104747 - DNA, 80 bp, synthetic construct
  source 1..80: mol_type = other DNA
cattgagagcagcttttcataaatagtgctatttgctggacaccttctgtgcccctcagtgtttcctgtaacaaacctca

SEQ ID NO: 104748 - DNA, 80 bp, synthetic construct
  source 1..80: mol_type = other DNA
tcaaagggcaagattcaattgcttctctacacaatccatgaatatcatcagcttctgttatgttttcatagaggttggag

SEQ ID NO: 104749 - DNA, 80 bp, synthetic construct
  source 1..80: mol_type = other DNA
aactcttctatcagtgttttggggtcaaccatcctaaaatttctaattagccttcccccctccaggtcccttctgaatct

SEQ ID NO: 104750 - DNA, 80 bp, synthetic construct
  source 1..80: mol_type = other DNA
ccaatctggcacattcttcagtggtgagagtaaagtggaccttgtgatgtgcagttcctgaaggatggcgttaatctctg

SEQ ID NO: 104751 - DNA, 80 bp, synthetic construct
  source 1..80: mol_type = other DNA
cgagaaagtttaacttctgccttgacaatcgttcatcttgccctatgtagttcagacaaagacttcttaattctgaaatg

SEQ ID NO: 104752 - DNA, 80 bp, synthetic construct
  source 1..80: mol_type = other DNA
agtttactaagtgctcacctgttctgaatctgtgcaggaggaggtcaccaagcacatcattagctcttgcataaccttcc

SEQ ID NO: 104753 - DNA, 80 bp, synthetic construct
  source 1..80: mol_type = other DNA
catgggacaggcaaaaaccaaaaagataaggccctctgaggatgaggacagagcagaggtcctgcccgatgcaacctatc

SEQ ID NO: 104754 - DNA, 80 bp, synthetic construct
  source 1..80: mol_type = other DNA
agttcggccaacataactttaagatccttggtctccaaattaaccacaatgttttgaacaaagtttcttccttcaaaaaa

SEQ ID NO: 104755 - DNA, 80 bp, synthetic construct
  source 1..80: mol_type = other DNA
cgggtatcctaggcttattagattgcgcattgcattgtggactgctgtttgtggactgattctagtatcagtaccatggg

SEQ ID NO: 104756 - DNA, 80 bp, synthetic construct
  source 1..80: mol_type = other DNA
cgcacaggctgactagcaagggcatctgctcttgtggtgccttcagagtgccaggtgtaaagacagtttggaagagacgc

SEQ ID NO: 104757 - DNA, 80 bp, synthetic construct
  source 1..80: mol_type = other DNA
cttctggctggcaggtcctgtgctctgtacggcgtctctggttctgacatccacaaagggctctaccagtttaagtttgt

SEQ ID NO: 104758 - DNA, 80 bp, synthetic construct
  source 1..80: mol_type = other DNA
tctctagatcagctgccaaagacatcaattcttccgcgctgagtctgcccacttttagaatgtttttcttggatgtggac

SEQ ID NO: 104759 - DNA, 80 bp, synthetic construct
  source 1..80: mol_type = other DNA
ggaattcaatatgtcacagttgaatctgacaatgcctaatgcatgctcagccaataattctcaccattacatcagcatgg

SEQ ID NO: 104760 - DNA, 80 bp, synthetic construct
  source 1..80: mol_type = other DNA
aacttttgatctctttggacaacgacattatgatgtcctccactgtgtatccgacaaaagcgcaatcaattcgcctagga

SEQ ID NO: 104761 - DNA, 80 bp, synthetic construct
  source 1..80: mol_type = other DNA
gaaagtccggcttggagctgaccttcacaaatgattccatcatcagtcacaatttttgtaacttgactgatggattcaaa

SEQ ID NO: 104762 - DNA, 80 bp, synthetic construct
  source 1..80: mol_type = other DNA
aaaagaaaacctttgaccacacacttatgagtattgtggcaagtttgcatcttagcattagaggggtctccatctacaag

SEQ ID NO: 104763 - DNA, 80 bp, synthetic construct
  source 1..80: mol_type = other DNA
gaaagataatcaaatcagtcgaaatagatgcccccaattaccactatgaggaatgctcctgttatcctgattctagtgaa

SEQ ID NO: 104764 - DNA, 80 bp, synthetic construct
  source 1..80: mol_type = other DNA
atgttcaaaaatcctgcagaaagacctcggaaattgcatgaactaagctcggcattggaaataccctacgatgaactaag

SEQ ID NO: 104765 - DNA, 80 bp, synthetic construct
  source 1..80: mol_type = other DNA
tggtattggtataataaacttttttactttttttttattattaccatgcggtccaaacgctctacaaaacgcactaaacg

SEQ ID NO: 104766 - DNA, 80 bp, synthetic construct
  source 1..80: mol_type = other DNA
atggcgcgctttgacgatccaaagcaacgaccctacaagctaccagatttgtgcacagaattgaatacatcactacaaga

SEQ ID NO: 104767 - DNA, 80 bp, synthetic construct
  source 1..80: mol_type = other DNA
acataaaaaagggtgtaaccgaaaacggttgcaaccaaaaacggtgcatataaaagctttgtggaaaagtgcattacagg

SEQ ID NO: 104768 - DNA, 80 bp, synthetic construct
  source 1..80: mol_type = other DNA
ggaaggaaatagtacgatttcttagatatcaacatgtggattttatatcttttatgatagcattaaaacaatttttacaa

SEQ ID NO: 104769 - DNA, 80 bp, synthetic construct
  source 1..80: mol_type = other DNA
ggcataccaaaacacaattgcatattactgtatggacctccagacacaggaaaatctaattttgccatgagtttaattag

SEQ ID NO: 104770 - DNA, 80 bp, synthetic construct
  source 1..80: mol_type = other DNA
ctttctaggaggtgtagtgctatcatatgttaattctagtagccatttttggttagaacctttggcagatgccaaaatag

SEQ ID NO: 104771 - DNA, 80 bp, synthetic construct
  source 1..80: mol_type = other DNA
tgctttgatagaaaacatcgagctatggtgcaaacaaaatgtcctccactgatagtgacctccaacataaatgctagtac

SEQ ID NO: 104772 - DNA, 80 bp, synthetic construct
  source 1..80: mol_type = other DNA
gataacgaggaggaggagaatggagaccctagcaacacgtttagatgtgtgccaggaaaggcttctagacctatatgaaa

SEQ ID NO: 104773 - DNA, 80 bp, synthetic construct
  source 1..80: mol_type = other DNA
aagatagtaataaactagaggaccaaatagaacattggaaatgcatacgcctggagtgtgcattgcaatacaaagcccgg

SEQ ID NO: 104774 - DNA, 80 bp, synthetic construct
  source 1..80: mol_type = other DNA
gaaatgggatacaaagtgttacagcaccaggcactgcctgcacttgctgtgtcaaagggcaaagggcacaaggccattga

SEQ ID NO: 104775 - DNA, 80 bp, synthetic construct
  source 1..80: mol_type = other DNA
actgcaacttgcattagagacattgcaaaagacagtatacagcaatgaaccgtggacattacaggacacatgcctggaac

SEQ ID NO: 104776 - DNA, 80 bp, synthetic construct
  source 1..80: mol_type = other DNA
ggtggaatgcaccacctactggttgcttaaaaaaacgtggacaaacagtagatgttatatttgatgggcatcaggataac

SEQ ID NO: 104777 - DNA, 80 bp, synthetic construct
  source 1..80: mol_type = other DNA
acaatgcaatatgtaatgtggggatatatttattatcaaaactgtgatggggagggatggactaaggtgtgcagtaatat

SEQ ID NO: 104778 - DNA, 80 bp, synthetic construct
  source 1..80: mol_type = other DNA
agatgcaatgggtatttattatatggatgcagaacacaaagtgtattatgtggattttacaaaggaagcatctaagtatg

SEQ ID NO: 104779 - DNA, 80 bp, synthetic construct
  source 1..80: mol_type = other DNA
gggaatatggacagtgggaggtgcgtatgggcagtagcatcattttttctcctgcatctgtatctagtaccgaagaggca

SEQ ID NO: 104780 - DNA, 80 bp, synthetic construct
  source 1..80: mol_type = other DNA
ttgtcaatatcctctactggcactgctgaacacaccagaccagccaattccacaccacgtaccgacaactccacaaaagc

SEQ ID NO: 104781 - DNA, 80 bp, synthetic construct
  source 1..80: mol_type = other DNA
aatcccgtgcacgccgccgcctagaaaacgagctagagtctacagcacagaccagcaaccacacagcacctcagactccg

SEQ ID NO: 104782 - DNA, 80 bp, synthetic construct
  source 1..80: mol_type = other DNA
tgggctgtgacaacaacaggcacatcagtgacgataacaacaacaaccaaggacggcacacaagtagtggtgacactgca

SEQ ID NO: 104783 - DNA, 80 bp, synthetic construct
  source 1..80: mol_type = other DNA
taacatataattaatgtaaagtttgtgattgtacatactattttgtacaccaaccagccaatactgctgctatttgtata

SEQ ID NO: 104784 - DNA, 80 bp, synthetic construct
  source 1..80: mol_type = other DNA
tagtggggtatgtatggtgagtatggtagtgagtgcatgcaggcctgcagtgactgaggtgaggtgtgtgtgtaggtgtg

SEQ ID NO: 104785 - DNA, 80 bp, synthetic construct
  source 1..80: mol_type = other DNA
tgtagtgtatgcagtaataatgttgtatacagtaagttggttaacatgttggtttttattatccatgttattatggcaat

SEQ ID NO: 104786 - DNA, 80 bp, synthetic construct
  source 1..80: mol_type = other DNA
gcaaggcttcttgaacttgaccttcactttacataaggtgttactgtgcacacctactgtggatgccctgtgtaacctgt

SEQ ID NO: 104787 - DNA, 80 bp, synthetic construct
  source 1..80: mol_type = other DNA
tacaatagtataataaatattgtgtagctatatttgtgtattatggctaaagcaagagccccacgccgaaaacgtgcatc

SEQ ID NO: 104788 - DNA, 80 bp, synthetic construct
  source 1..80: mol_type = other DNA
tgcaacacaattgtatcaaacatgcaaggcctctggcacatgcccgtcagatgtaattcctaaggtagagggtacaacta

SEQ ID NO: 104789 - DNA, 80 bp, synthetic construct
  source 1..80: mol_type = other DNA
ggccgcacagggtatataccccttggacgaccctctactacccttgaaccaggtcctcctgtacgtcccgcaggggctgt

SEQ ID NO: 104790 - DNA, 80 bp, synthetic construct
  source 1..80: mol_type = other DNA
agaaacagtagcaccctctgacccttctattgtgtctttagtagaggaatctagtgttgtggatgttggggcaccaaccc

SEQ ID NO: 104791 - DNA, 80 bp, synthetic construct
  source 1..80: mol_type = other DNA
ctaccattccatcacacggtgggtttgaaatagccacatctagtgatgccacccctgctatattagatgtcacctccact

SEQ ID NO: 104792 - DNA, 80 bp, synthetic construct
  source 1..80: mol_type = other DNA
accacccctattagggtgtctataacatcccatgataatcctatatatacagagccatcattattagaccccccccctcc

SEQ ID NO: 104793 - DNA, 80 bp, synthetic construct
  source 1..80: mol_type = other DNA
agtacaaatggatggtcgtgtgttagtatctacctctactttgcaatcctccactgctgaaaatatacctatggacactt

SEQ ID NO: 104794 - DNA, 80 bp, synthetic construct
  source 1..80: mol_type = other DNA
acattacacacacgtagtggcctgcaacttaaacctcgtgtgcatttttttcaggacttaagtcctattgctcatgtccc

SEQ ID NO: 104795 - DNA, 80 bp, synthetic construct
  source 1..80: mol_type = other DNA
tatatgctgacacggattttgctgacactggtggtttttcctcttctacagtttcacgtagttctgtacaaacagcccta

SEQ ID NO: 104796 - DNA, 80 bp, synthetic construct
  source 1..80: mol_type = other DNA
caaactacatctataccatctcagtatggtaacaccacagttcccctaactacctcatcgccctatacacctatacccac

SEQ ID NO: 104797 - DNA, 80 bp, synthetic construct
  source 1..80: mol_type = other DNA
atcctttaggccctcatcaggtcaggccccatttgttcccgcacgtcctatatttccacaaacacccattgctgttaatg

SEQ ID NO: 104798 - DNA, 80 bp, synthetic construct
  source 1..80: mol_type = other DNA
tggcttaagtggtcatccattattaaataaattggatgatactgaaaatgcacctaaatatgttggtgcaggagctgata

SEQ ID NO: 104799 - DNA, 80 bp, synthetic construct
  source 1..80: mol_type = other DNA
atacaggatggtgatatggtagatataggatttggggccatggattttaaaaccctacaaacctccaaaagtgaggtgcc

SEQ ID NO: 104800 - DNA, 80 bp, synthetic construct
  source 1..80: mol_type = other DNA
ccttgatgtggctacctcaatttgtaaatatcctgattaccttaaaatggctgcagaggcatatggggacagtttatttt

SEQ ID NO: 104801 - DNA, 80 bp, synthetic construct
  source 1..80: mol_type = other DNA
tttacttaaggcgggaacagatgtttgttaggcatatgttaaatagggcaggtaccatgggtgagcctgtacctaatgaa

SEQ ID NO: 104802 - DNA, 80 bp, synthetic construct
  source 1..80: mol_type = other DNA
ttatacattaagaaatcctcaggtaacctggacagttctatttatgctgcaactcccagtggctctatggtaacatctga

SEQ ID NO: 104803 - DNA, 80 bp, synthetic construct
  source 1..80: mol_type = other DNA
ctaacctaacattatgtgctacagcatccacgcaggatagctttaataattctgactttagggagtatattagacatgtg

SEQ ID NO: 104804 - DNA, 80 bp, synthetic construct
  source 1..80: mol_type = other DNA
gttatgtgtggaatgtttgtgtgtcctatttatgttgtgactcgtatgttatatatgttgtatgttttcctgtgttatta

SEQ ID NO: 104805 - DNA, 80 bp, synthetic construct
  source 1..80: mol_type = other DNA
tattgtttcctgtatatatataataaaggctttggttgcaccctatgagtaacttttgtgtgatgttgtttgctacttgc

SEQ ID NO: 104806 - DNA, 80 bp, synthetic construct
  source 1..80: mol_type = other DNA
ttagtagcctttaccttttcacctttggtgtccattttgtaaaatctccattttatataaccgaaaccgttttcggttgc

SEQ ID NO: 104807 - DNA, 80 bp, synthetic construct
  source 1..80: mol_type = other DNA
tgttggcactaaaactgtgttttaagcacttttgtatcgtacatctaatcttttgggcgccgccacatcctgccctggta

SEQ ID NO: 104808 - DNA, 80 bp, synthetic construct
  source 1..80: mol_type = other DNA
gttttgccagcacatctgcacacccacacatttataactgtcagaacaactttactttccattgtgtaaaaacacgccct

SEQ ID NO: 104809 - DNA, 80 bp, synthetic construct
  source 1..80: mol_type = other DNA
ttgcattccaacattgatttatatgtattttacctaataaaacatgctaataggcacatattttagctgtgtaaacttag

SEQ ID NO: 104810 - DNA, 80 bp, synthetic construct
  source 1..80: mol_type = other DNA
taagtgcatagttggcacactaaaacataggtgtatgccaggtacgtgtctgtacaacagtgactaattcaggaaaccga

SEQ ID NO: 104811 - DNA, 80 bp, synthetic construct
  source 1..80: mol_type = other DNA
atgtttcaagatcccagagaaagaccacgaacgatacatgaactatgtgaagctttgaatacacctttgcaatctttgca

SEQ ID NO: 104812 - DNA, 80 bp, synthetic construct
  source 1..80: mol_type = other DNA
agttactaggtagtcagaacagcccgttgcaagacataacaaatcaaagcaacagtcagcagagcacagacgaagtaaac

SEQ ID NO: 104813 - DNA, 80 bp, synthetic construct
  source 1..80: mol_type = other DNA
aatttacaggctaaaaggagagcagtggacagtgttccggacagcgggtatggctatactgaagtggaaactcgtacgcc

SEQ ID NO: 104814 - DNA, 80 bp, synthetic construct
  source 1..80: mol_type = other DNA
agtacaggtagataaacacaatgaacaaaatggcgatagtgtgtgtagtcagggggggtcaagtggatctgtatcagaca

SEQ ID NO: 104815 - DNA, 80 bp, synthetic construct
  source 1..80: mol_type = other DNA
tggaggtggacataggagcacaggcaagtagtgtaaccaaaatatgtgaattgttaaaatgtagtaatgtaaaagcagca

SEQ ID NO: 104816 - DNA, 80 bp, synthetic construct
  source 1..80: mol_type = other DNA
ttattaagcaaatttaaaacagtatatggtgtaagttatacagaattagtacgagtgtttaaaagtgataaaacatgctg

SEQ ID NO: 104817 - DNA, 80 bp, synthetic construct
  source 1..80: mol_type = other DNA
ttcagattgggtatgtgcagcctttggtgttgcaggctctgtagcagaaagtttaaaaacactaatacaaccatattgtt

SEQ ID NO: 104818 - DNA, 80 bp, synthetic construct
  source 1..80: mol_type = other DNA
ttgtttatactatcatattcaatgcttaacatgtaattggggggtactaccactaatgctaatacggtttacatgtgcca

SEQ ID NO: 104819 - DNA, 80 bp, synthetic construct
  source 1..80: mol_type = other DNA
atagaaataatagtgcatatggtgcatgtaaaaaatgtataatattctattcaaaaataatagaatatagacgctacaca

SEQ ID NO: 104820 - DNA, 80 bp, synthetic construct
  source 1..80: mol_type = other DNA
agagcaacaattaaaaaatgcctgtgtacgttactgaatgtgccagacacacagttgttaatagaaccaccaaaattacg

SEQ ID NO: 104821 - DNA, 80 bp, synthetic construct
  source 1..80: mol_type = other DNA
gtgaaacacatggggacacaccagaatggatagtaagacaaacacaattagaacatagttttgaagatacaatatttgat

SEQ ID NO: 104822 - DNA, 80 bp, synthetic construct
  source 1..80: mol_type = other DNA
cgatccatgggcatgtcacaatggctacaacataggtgttcaaaaatagaagatggaggaacgtggaaggacatagcaag

SEQ ID NO: 104823 - DNA, 80 bp, synthetic construct
  source 1..80: mol_type = other DNA
atttctaagatatcaaaatgttaattttattaattttttgcaagtattaaaacagtttttaaaaggaacacctaaacaca

SEQ ID NO: 104824 - DNA, 80 bp, synthetic construct
  source 1..80: mol_type = other DNA
agaagatgcaaaggtggcattattagatgatgctacatatggctgctggctatacatagataaatacctacgtaattttt

SEQ ID NO: 104825 - DNA, 80 bp, synthetic construct
  source 1..80: mol_type = other DNA
tagatggcaatccctgttgtatagatagaaaacatagaagtttaatacaagtaagatgtccaccattaataattacctca

SEQ ID NO: 104826 - DNA, 80 bp, synthetic construct
  source 1..80: mol_type = other DNA
tcgtctgtgtatggtgcaacactggaagcgcgtactaaacgaagtttgtgtaatttgttaataaggtgtcatagatgcca

SEQ ID NO: 104827 - DNA, 80 bp, synthetic construct
  source 1..80: mol_type = other DNA
agaagacaattcattaatgtatttacatagtagagtaacagttataccatttccaaatacatttccatttgacagcaatg

SEQ ID NO: 104828 - DNA, 80 bp, synthetic construct
  source 1..80: mol_type = other DNA
gggaatatgcaatgtattaaccaccaggtggtgccatcgacaacagtgtgtaaagaaaaagcttggcaggcaattgaatt

SEQ ID NO: 104829 - DNA, 80 bp, synthetic construct
  source 1..80: mol_type = other DNA
acatatagcattacagtctttaatgaattcagaatatggaaaagagaaatggactatgagagacacgtgttatgaattgt

SEQ ID NO: 104830 - DNA, 80 bp, synthetic construct
  source 1..80: mol_type = other DNA
atgtgacagagccaaaacactgttttaaaaaagaagggacaacagtaacagttgtgtttgattgtaataaggaaaataca

SEQ ID NO: 104831 - DNA, 80 bp, synthetic construct
  source 1..80: mol_type = other DNA
atggactatattaggtggacatctgtgtattataaaacagatatgggatggtgtaaaacaaatggagaagtggattataa

SEQ ID NO: 104832 - DNA, 80 bp, synthetic construct
  source 1..80: mol_type = other DNA
ggggatatactatatgcatgggtgttgtaaacagtactatgtggactttaaacaagaggctttaaaatatgggactggtt

SEQ ID NO: 104833 - DNA, 80 bp, synthetic construct
  source 1..80: mol_type = other DNA
tgcaatgggatgtacatgtgtgtggtcaggtaatatgttgtcctgaatttgtatctagtacctccggggaccaaatatcc

SEQ ID NO: 104834 - DNA, 80 bp, synthetic construct
  source 1..80: mol_type = other DNA
aataccattgggaccggaagaaaaacagagaattgtggatgaaaagcgacggttccatgaaatagcagggtactggaaag

SEQ ID NO: 104835 - DNA, 80 bp, synthetic construct
  source 1..80: mol_type = other DNA
actgctcaaactgctgaaccactatcaaacaacaccacccagacccccgaaaccacctgtgtgccccggtgcaccgaaga

SEQ ID NO: 104836 - DNA, 80 bp, synthetic construct
  source 1..80: mol_type = other DNA
aaccccggcgccagagacagcaaagcgacgacgacttagtggacccaacacccctgtcaccaccaccagtgttacaaggc

SEQ ID NO: 104837 - DNA, 80 bp, synthetic construct
  source 1..80: mol_type = other DNA
ccagaagttccttggagcatacagacaacgtgttacacagtaacagtggaagcaacaacccgggaaggggcacgtgtagt

SEQ ID NO: 104838 - DNA, 80 bp, synthetic construct
  source 1..80: mol_type = other DNA
gaccagactgtttttatagtacatttaaaaggtgatacaaattgtttaaaatgtttaaggtatagatttaaaaaacataa

SEQ ID NO: 104839 - DNA, 80 bp, synthetic construct
  source 1..80: mol_type = other DNA
accaaggcattgtaacaattacatttgatagtgaaacacaacgtgctagttttcttacaactgttaagataccacagagt

SEQ ID NO: 104840 - DNA, 80 bp, synthetic construct
  source 1..80: mol_type = other DNA
ataacatcaacattgggtataatgtcattgtaatatatattgtaacatatatacatcccacaagccaatatgtgctgcta

SEQ ID NO: 104841 - DNA, 80 bp, synthetic construct
  source 1..80: mol_type = other DNA
actgtatatacataaccattttactacttgtaattgtgtttgtgctttgcgtgtgtgtgtgtttgttgctgtgtcgtttg

SEQ ID NO: 104842 - DNA, 80 bp, synthetic construct
  source 1..80: mol_type = other DNA
ttgccgcttttgctatctatacacgtgtttgcagcccatatattattaattatatgtttttggtttgtggtgtcaacatc

SEQ ID NO: 104843 - DNA, 80 bp, synthetic construct
  source 1..80: mol_type = other DNA
atttacagctacgttttttgtatatatttgtttgttttatatacctgcatttttgttacatttttatactgtaatttcac

SEQ ID NO: 104844 - DNA, 80 bp, synthetic construct
  source 1..80: mol_type = other DNA
ggttgtgcacaaactgctggagaccaaggcgcgaagcaacagaaacacaagtataaataacaatgcatggagacacaatt

SEQ ID NO: 104845 - DNA, 80 bp, synthetic construct
  source 1..80: mol_type = other DNA
tacctaatggtttataaataaacacttcataatggtggctgttcgtgcatcacgacgcaaacgagcatcagcaacagacc

SEQ ID NO: 104846 - DNA, 80 bp, synthetic construct
  source 1..80: mol_type = other DNA
tttacaaaacctgtaaagcagctggcacatgccctcctgatgttatacctaaaattgaaggctctactcttgctgataaa

SEQ ID NO: 104847 - DNA, 80 bp, synthetic construct
  source 1..80: mol_type = other DNA
acaatggagtgggttgggaatatttcttggtggacttggtattggcacaggaacaggtactggtgggcgtactgggtata

SEQ ID NO: 104848 - DNA, 80 bp, synthetic construct
  source 1..80: mol_type = other DNA
ttcctctgggtggtggtggtaggccttctgtggttgatattggccctactaggcctcctataataattgaacctgtgggc

SEQ ID NO: 104849 - DNA, 80 bp, synthetic construct
  source 1..80: mol_type = other DNA
ccaactgaaccttccatagttactttagtagaagaatcaagtattatacaatctggatctccatttcctaattttagtgg

SEQ ID NO: 104850 - DNA, 80 bp, synthetic construct
  source 1..80: mol_type = other DNA
tggggatgggtttgaggtcactacctcctctactacaacccctgctgtgttagatattaccccctcccctggaactgtac

SEQ ID NO: 104851 - DNA, 80 bp, synthetic construct
  source 1..80: mol_type = other DNA
acgttaccagcacaaatatacaaaacccattatatattgaaccacctgtagatattcctcagtctggagaggctttagga

SEQ ID NO: 104852 - DNA, 80 bp, synthetic construct
  source 1..80: mol_type = other DNA
cacatttttactagcacatctactgctggtacacacagttatgaagaaatacctatggaggtgtttgcatctaatactag

SEQ ID NO: 104853 - DNA, 80 bp, synthetic construct
  source 1..80: mol_type = other DNA
ttccgggtcagaacctattagtagtacccctatacctggcatacgtagggttgctgctcctagattatatagcagggcct

SEQ ID NO: 104854 - DNA, 80 bp, synthetic construct
  source 1..80: mol_type = other DNA
atcaacaggttaaggtcactgaccccaattttatttctaaaccttccacatttattacctttgataatcctgcatatgaa

SEQ ID NO: 104855 - DNA, 80 bp, synthetic construct
  source 1..80: mol_type = other DNA
aatatacaggatgttatattagatttggtgccgcaacccgaaattgacctacagtgttacgaacaattggactatgaaca

SEQ ID NO: 104856 - DNA, 80 bp, synthetic construct
  source 1..80: mol_type = other DNA
cctatggacactaccctcacattttctgcagatagccacgtggcccctgatcctgattttttggatattattgcattgca

SEQ ID NO: 104857 - DNA, 80 bp, synthetic construct
  source 1..80: mol_type = other DNA
agcaggttaggtcaaaaggccacacttaaaacacgtagtggtaaacaaattggagctaaggtacattattatcatgacat

SEQ ID NO: 104858 - DNA, 80 bp, synthetic construct
  source 1..80: mol_type = other DNA
aagtcctatacatgctacagaggaagctattgaattacaacctttaattacttcagaacagcactctacaccattgtttg

SEQ ID NO: 104859 - DNA, 80 bp, synthetic construct
  source 1..80: mol_type = other DNA
atgtttatgctgatgctgaccctgcccctacatttacatttccatctactacacctactacaatccctaggttttcttct

SEQ ID NO: 104860 - DNA, 80 bp, synthetic construct
  source 1..80: mol_type = other DNA
acaatattttcaaccactggtagtgcaccctcaaatgttaccatacctctatctacatcatttgatatacctatatataa

SEQ ID NO: 104861 - DNA, 80 bp, synthetic construct
  source 1..80: mol_type = other DNA
cggccctgacatttatgctcctgtaccttcttccacatggccttatattccacctccacccaccaccatgtcacattccg

SEQ ID NO: 104862 - DNA, 80 bp, synthetic construct
  source 1..80: mol_type = other DNA
tagttgcacaagggggtaattattatttatggccttatatttatttaattcataaacgccgccgtaaacgtgtgccttat

SEQ ID NO: 104863 - DNA, 80 bp, synthetic construct
  source 1..80: mol_type = other DNA
cccgagttgtcagcacggatgaatatgtaacacgcaccggcatatattactatgcaggcagctctcgattattaactttg

SEQ ID NO: 104864 - DNA, 80 bp, synthetic construct
  source 1..80: mol_type = other DNA
ggtcatccctatttttcaattcctaaatctggttcaacagcagaaatacctaaagtgtctgcgtaccaatatagggtttt

SEQ ID NO: 104865 - DNA, 80 bp, synthetic construct
  source 1..80: mol_type = other DNA
atttgacagctcagatgaggatgaaacagataatgtgcgtaaccagcaagccagacaagctgaacaagaagcgtgttata

SEQ ID NO: 104866 - DNA, 80 bp, synthetic construct
  source 1..80: mol_type = other DNA
tcgtgttcaccttccagaccctaacaaatttgggttgcctgacccccagttatataatcctgaaacagaacggttggtat

SEQ ID NO: 104867 - DNA, 80 bp, synthetic construct
  source 1..80: mol_type = other DNA
gggcctgtgttggtgtagaggttggcaggggacaaccgttgggtgttgggctaagtgggcatcctttatttaataaattg

SEQ ID NO: 104868 - DNA, 80 bp, synthetic construct
  source 1..80: mol_type = other DNA
atgacactgaaaattcacatcttgccactgctaatgcagacactgataatagggacaacgtgtgtgtagataataaacaa

SEQ ID NO: 104869 - DNA, 80 bp, synthetic construct
  source 1..80: mol_type = other DNA
actggggcgttggcactgtatgtaaaaatgcacagtctcaggtacagcgtggcgattgtccacctttggaacttatttcc

SEQ ID NO: 104870 - DNA, 80 bp, synthetic construct
  source 1..80: mol_type = other DNA
agtgttattgaggatggtgatatgattgatactggctttggtgccatggattttacagctttgcaagctacaaaatgtga

SEQ ID NO: 104871 - DNA, 80 bp, synthetic construct
  source 1..80: mol_type = other DNA
tgtgccacttgatattaatcaatctatttgcaaatatccagattaccttaaaatgtctgcagatacgtatggaaacagca

SEQ ID NO: 104872 - DNA, 80 bp, synthetic construct
  source 1..80: mol_type = other DNA
gtgattctgtaccagtatctatgtatattaaaggcgctggtcaaggtcgtgaacctccaactacttctatatactcagct

SEQ ID NO: 104873 - DNA, 80 bp, synthetic construct
  source 1..80: mol_type = other DNA
acgcctagtggctccatggtgacctctgatgctcaattgtttaataaaccttactggttacagcgtgcccagggtcataa

SEQ ID NO: 104874 - DNA, 80 bp, synthetic construct
  source 1..80: mol_type = other DNA
gaatagaagcggaatgttgtgtatgtaatagtatagtgcagctagctgtacgaagcagtcgacagaacgtccgagcggtg

SEQ ID NO: 104875 - DNA, 80 bp, synthetic construct
  source 1..80: mol_type = other DNA
ccaacctcactattagtactgtatctgcacaatctgcatctgccacttttaaaccatcagattataagcagtttataagg

SEQ ID NO: 104876 - DNA, 80 bp, synthetic construct
  source 1..80: mol_type = other DNA
catggtgaggaatatgaattacagtttatatttcaattgtgtaaaattactcttaccactgatgtaatggcctatatcca

SEQ ID NO: 104877 - DNA, 80 bp, synthetic construct
  source 1..80: mol_type = other DNA
tacaatgaattctactattttggaaaattggaattttggccttaccttgcctcctactgctagtttggaagatgcatata

SEQ ID NO: 104878 - DNA, 80 bp, synthetic construct
  source 1..80: mol_type = other DNA
ggtttatcaaaaattcagctactacatgtcaacgcgatgcccctgcacagcccaaggaggatccatttagtaaattaaaa

SEQ ID NO: 104879 - DNA, 80 bp, synthetic construct
  source 1..80: mol_type = other DNA
gcagaaaatttatgctgcaggctggtatacagcgacgtcctaagttaggcaccaaacgtccagcttcttccttatctgca

SEQ ID NO: 104880 - DNA, 80 bp, synthetic construct
  source 1..80: mol_type = other DNA
tcttcctcctctaccacacgtaaaaaacgcaaacttactaagtaattccacatggttgtgtcagtgtatagttttgtatg

SEQ ID NO: 104881 - DNA, 80 bp, synthetic construct
  source 1..80: mol_type = other DNA
tgtgtaatgtaaggtgtgttgtgtttgtatgtataattgtatgtttcctgtgtgtgtttgtatgtatgtatgtatgatta

SEQ ID NO: 104882 - DNA, 80 bp, synthetic construct
  source 1..80: mol_type = other DNA
tgtgttttcctgtttgtgtggtttactgcatgcttgttatttaataaacaatgaatgtgttgtatttgttatttcttcct

SEQ ID NO: 104883 - DNA, 80 bp, synthetic construct
  source 1..80: mol_type = other DNA
cccgtagggtatagggaagtaacttaggtagtgttttaggtggtgttcctttttggcaaccgaattcggttgcattcaac

SEQ ID NO: 104884 - DNA, 80 bp, synthetic construct
  source 1..80: mol_type = other DNA
gagcagctgctgatgggcgacgtgagtttggtgtgccaccagtgtgctacatactaaacctgcaatggactgcgaaggta

SEQ ID NO: 104885 - DNA, 80 bp, synthetic construct
  source 1..80: mol_type = other DNA
ttcatattatattttgcaggaacggttaatcctttggcacacaacacatcctgcctcctacgcttggcttgcctaaacgt

SEQ ID NO: 104886 - DNA, 80 bp, synthetic construct
  source 1..80: mol_type = other DNA
ggctcacctacattactcacatatcttttaacaatagttgcatacgcactttttctttgattataataaaactgctgtta

SEQ ID NO: 104887 - DNA, 80 bp, synthetic construct
  source 1..80: mol_type = other DNA
ggcacatatttttattttatacatgggtttcactaagtgcatagttggctagcagttttactgttttatgccaactatat

SEQ ID NO: 104888 - DNA, 80 bp, synthetic construct
  source 1..80: mol_type = other DNA
gtctgacacattccttttaacaataaaactgctgttaggcacatattttataagctacttagacacaggtgtggtaacaa

SEQ ID NO: 104889 - DNA, 80 bp, synthetic construct
  source 1..80: mol_type = other DNA
ccgaaatgtgttttgcctttacatgcaactttctttctaataacttttaacaatcatagttttataaaagggtgtaaccg

SEQ ID NO: 104890 - DNA, 80 bp, synthetic construct
  source 1..80: mol_type = other DNA
aaaagggtgtaaccgaaaacggtttcaaccgaaaacggtgcatataaaagtaaaagacacagccatacacaaaaacagct

SEQ ID NO: 104891 - DNA, 80 bp, synthetic construct
  source 1..80: mol_type = other DNA
ggtacagtgtgtatattgcaagaaaacattagaatgggcagatgtatataactttgcaatatgtgatttaagaatagtgt

SEQ ID NO: 104892 - DNA, 80 bp, synthetic construct
  source 1..80: mol_type = other DNA
cagatggggaggggttggggtgtacagggtggttttcagtagaagcaatagtagaaaaacatacaggagaaacaatatca

SEQ ID NO: 104893 - DNA, 80 bp, synthetic construct
  source 1..80: mol_type = other DNA
gaagatgaaatagagtatagtagcgatacaggatcagacctaattggatttatagatgatagtaatattagtgatggggc

SEQ ID NO: 104894 - DNA, 80 bp, synthetic construct
  source 1..80: mol_type = other DNA
agagcaacaggtagcgcaggcattgttccaggcacaagaaacacaagcaaataataaggcagtgcgtgcattaaaacgaa

SEQ ID NO: 104895 - DNA, 80 bp, synthetic construct
  source 1..80: mol_type = other DNA
tccggacagcgggtatggctatactgaagtggaaactcgtacgccagtacaggtagataaacacaatgaacaaaatggcg

SEQ ID NO: 104896 - DNA, 80 bp, synthetic construct
  source 1..80: mol_type = other DNA
atgctgtttcccaatccagaagaacgaccatacaagctacaagcgttatgtgacgaagtgaatatttctatacatgatat

SEQ ID NO: 104897 - DNA, 80 bp, synthetic construct
  source 1..80: mol_type = other DNA
ttacaggtagtcctggcagtaacccagatatgaaaagagatgaattcatagacaaacagcttagtccacaaataaatgta

SEQ ID NO: 104898 - DNA, 80 bp, synthetic construct
  source 1..80: mol_type = other DNA
ttgtcaataagtagcggtagaagtacatctaaacgaagactgtttgaggagcaggacagtggatatggcaatactgaagt

SEQ ID NO: 104899 - DNA, 80 bp, synthetic construct
  source 1..80: mol_type = other DNA
ggaaacttacgagacagaggtaccgggacttggggcaggggcagggtgtttacaaaatgttaatgaagaaggcaaccaaa

SEQ ID NO: 104900 - DNA, 80 bp, synthetic construct
  source 1..80: mol_type = other DNA
gtgtgtcgccacgtgaaagcagtagtgggtccagtagcatttcaaatatggatatagaaacagagagcacacctataaca

SEQ ID NO: 104901 - DNA, 80 bp, synthetic construct
  source 1..80: mol_type = other DNA
gatattacaaatttattacaaagtaataatgcaaaagcaacattgctagcaaaatttaaagaagtatatgggttaagtta

SEQ ID NO: 104902 - DNA, 80 bp, synthetic construct
  source 1..80: mol_type = other DNA
tatggaattagttagaccatataaaagtgataaaacacattgccaagattgggtgtgtgctgtgtttggtgtaatacctt

SEQ ID NO: 104903 - DNA, 80 bp, synthetic construct
  source 1..80: mol_type = other DNA
cacttgcagaaagtttaaaatccttactaacacagtattgtatgtatatacatttgcagtgtttaacatgtacatggggc

SEQ ID NO: 104904 - DNA, 80 bp, synthetic construct
  source 1..80: mol_type = other DNA
ataatagtgttagtattagtaagatttaagtgcaataaaaatagactaacagtgcaaaaattattaagtagtttattaaa

SEQ ID NO: 104905 - DNA, 80 bp, synthetic construct
  source 1..80: mol_type = other DNA
tatatagaaaggataaaccatatggtgtatgtcaaccgtgtttaaaattttattctaaaattagagagtataggcgatat

SEQ ID NO: 104906 - DNA, 80 bp, synthetic construct
  source 1..80: mol_type = other DNA
tgtaacacaagaacgcatgttaattgaacctccaagactacgaagtacaccatgtgcattatattggtatagaactagtt

SEQ ID NO: 104907 - DNA, 80 bp, synthetic construct
  source 1..80: mol_type = other DNA
acaaatgtcaatggcacaatggatacaacatagatgtgatttaactaatgatggtggtaattggaaagatattgtgctat

SEQ ID NO: 104908 - DNA, 80 bp, synthetic construct
  source 1..80: mol_type = other DNA
ttttaagatatcaaaatgtagaatttatgcctttcttaataacattaaaacaatttttaaaaggtattcccaaacaaaac

SEQ ID NO: 104909 - DNA, 80 bp, synthetic construct
  source 1..80: mol_type = other DNA
gtgtagttatttcgtatgtaaattcaactagccatttttggttatcacccttagctgatgcaaaaatggcattattagat

SEQ ID NO: 104910 - DNA, 80 bp, synthetic construct
  source 1..80: mol_type = other DNA
gatgcaacacctggatgctggacgtacatagacaaatatttaagaaatgcattagatggtaatcctatatgtttagatag

SEQ ID NO: 104911 - DNA, 80 bp, synthetic construct
  source 1..80: mol_type = other DNA
agacaatcagtatatggcactacgttagaacaattaactaacaaacagttatatgatattttaataaggtgcggaaaatg

SEQ ID NO: 104912 - DNA, 80 bp, synthetic construct
  source 1..80: mol_type = other DNA
atcaaatacaaatcctaaagcagatgatacttggaaatatttacatagtagaattaaggtgtttacctttttaaatccat

SEQ ID NO: 104913 - DNA, 80 bp, synthetic construct
  source 1..80: mol_type = other DNA
ttccatttgacagtaatgggaacccactataccaacttactaatgaaaactggaaagcattttttacaaaaacgtggtca

SEQ ID NO: 104914 - DNA, 80 bp, synthetic construct
  source 1..80: mol_type = other DNA
gacactgtgcaaacgtttaagtgcgtgtcaggacgcaatcctagaactgtatgaacgtgacagtgtacacctaagtgatc

SEQ ID NO: 104915 - DNA, 80 bp, synthetic construct
  source 1..80: mol_type = other DNA
atattgatcattggaaacacgtgcgacatgaaaatgtattattacataaagcacgtgaaatgggactgcaaactgttaac

SEQ ID NO: 104916 - DNA, 80 bp, synthetic construct
  source 1..80: mol_type = other DNA
aatcaagcggtgccaagccttgcagtatcacgatccaaagggtataatgcaattgaactgcaaatagcactagaaagttt

SEQ ID NO: 104917 - DNA, 80 bp, synthetic construct
  source 1..80: mol_type = other DNA
aaatgaatctttgtataacacagaggaatggacattgcaaaccacaagttgggaaatgtgggttacagaaccaaaacaat

SEQ ID NO: 104918 - DNA, 80 bp, synthetic construct
  source 1..80: mol_type = other DNA
gttttaaaaaggatggaaaaacagtagaggttagatatgactgtgaaaaggacaatagcatgcaatatgtattttggaca

SEQ ID NO: 104919 - DNA, 80 bp, synthetic construct
  source 1..80: mol_type = other DNA
catatatattgttggtatgaaggggggtgggcaaaggtaggtagtaaaatagattataatggtatatattatgaaacaga

SEQ ID NO: 104920 - DNA, 80 bp, synthetic construct
  source 1..80: mol_type = other DNA
tgatgaggaaaaggtatactatacaagatttgatacagatgcaaaacggtacggggtaaaaggaatatgggaagtacata

SEQ ID NO: 104921 - DNA, 80 bp, synthetic construct
  source 1..80: mol_type = other DNA
ccaaaaaccattatgtccactggaaaagcaaaagcatgtagatgaaaaaaaacggtttcatcaaatagcagaacagtgga

SEQ ID NO: 104922 - DNA, 80 bp, synthetic construct
  source 1..80: mol_type = other DNA
tgggtggtcaggtaatatgttgtgctcctgtatctagcgcctgtgaagtatccattcctgaaattgttaacccactgcac

SEQ ID NO: 104923 - DNA, 80 bp, synthetic construct
  source 1..80: mol_type = other DNA
accacaaccaccaacaccaccactacctgcaccaacgttgaaaccggtgtgccatcacggaaacggcaaagacagtgtga

SEQ ID NO: 104924 - DNA, 80 bp, synthetic construct
  source 1..80: mol_type = other DNA
cccggaccagaggcccctggatttgcataacctacatcccaccacagagtcctgtacccagtgtactacacataatgttg

SEQ ID NO: 104925 - DNA, 80 bp, synthetic construct
  source 1..80: mol_type = other DNA
cgccaatagtgcatttaaaaggtgacaaaaacagcttaaaatgttttagatatagattgcataaaggctatgcacattta

SEQ ID NO: 104926 - DNA, 80 bp, synthetic construct
  source 1..80: mol_type = other DNA
tttaaaaatgtaacaacaacatggcattggaccaatactacaaatagtaaatgtggtgtaataacattaatgtttacaac

SEQ ID NO: 104927 - DNA, 80 bp, synthetic construct
  source 1..80: mol_type = other DNA
tgtatcacaacaacaacaatttttacaacatgtaaaaataccacaaactattgtagttacatcaggatacatgtctttgt

SEQ ID NO: 104928 - DNA, 80 bp, synthetic construct
  source 1..80: mol_type = other DNA
aacattggttacacagtatatatgattctttgtatatttgtatttttgttttgtgttggcttttgtttgtgcttgtgtgt

SEQ ID NO: 104929 - DNA, 80 bp, synthetic construct
  source 1..80: mol_type = other DNA
gtcgcttgcagtgtctgtgtatatttacccatggttattagtattgattataataacctttatacatgtatcacaatcat

SEQ ID NO: 104930 - DNA, 80 bp, synthetic construct
  source 1..80: mol_type = other DNA
tgttaaaagtattttttttatatgttttggtattttatattcctatggcacttgtacattaccatgctacattacaagta

SEQ ID NO: 104931 - DNA, 80 bp, synthetic construct
  source 1..80: mol_type = other DNA
acataaacaattttacatatataataaactgcctactatttctagtgtaccatgcgtcgcaagcgtgacacacacatacg

SEQ ID NO: 104932 - DNA, 80 bp, synthetic construct
  source 1..80: mol_type = other DNA
ccggacgctgtacacggtgctggagaccatctgcaactgtggtgtaagatgcatggaaaaaaaacaaccttgcaggacat

SEQ ID NO: 104933 - DNA, 80 bp, synthetic construct
  source 1..80: mol_type = other DNA
aaaaaaacgtgcatctgcaacacaattatataaaacatgtaaacaagcaggtacgtgccctcctgatgtaattcctaagg

SEQ ID NO: 104934 - DNA, 80 bp, synthetic construct
  source 1..80: mol_type = other DNA
tagctgataatatattaaaatatggtagtattggagttttttttggaggattgggaataggtagtgggtctggatcaggg

SEQ ID NO: 104935 - DNA, 80 bp, synthetic construct
  source 1..80: mol_type = other DNA
gggcgtactggatacgttccattatctacaggcacaccatctaaaccagtagaaattccattacaacctatacgaccatc

SEQ ID NO: 104936 - DNA, 80 bp, synthetic construct
  source 1..80: mol_type = other DNA
ggttgttacttctgttgggccttcagattcttctattgtttcattagtggaagaatccagttttatagaggcaggtatac

SEQ ID NO: 104937 - DNA, 80 bp, synthetic construct
  source 1..80: mol_type = other DNA
ctggtcctacatctatagttccttctacttcagggtttgatattactacttctgtaaacagtacacctgctattatagat

SEQ ID NO: 104938 - DNA, 80 bp, synthetic construct
  source 1..80: mol_type = other DNA
gtatctgctattagtgatactacacaaatatctgttacaacatttaaaaatccaacttttactgacccatctgtgttgca

SEQ ID NO: 104939 - DNA, 80 bp, synthetic construct
  source 1..80: mol_type = other DNA
acctcctccacccttagaagcctctggcagacttttattttcaaatgacactgtaactacccattcatatgaaaatatac

SEQ ID NO: 104940 - DNA, 80 bp, synthetic construct
  source 1..80: mol_type = other DNA
ctcttgacacatttgtagttacaacagatcacaatagtattgttagtagtacgcccatcccagggaggcaacctgctgca

SEQ ID NO: 104941 - DNA, 80 bp, synthetic construct
  source 1..80: mol_type = other DNA
cgcttaggattatatggacgtgcaatacaacaggttaaggttgtagaccctgcttttttaactacgcctacacgtttagt

SEQ ID NO: 104942 - DNA, 80 bp, synthetic construct
  source 1..80: mol_type = other DNA
aacatatgacaaccctgcctttgaaggcctgcaggatacaacattagagtttcagcacagtgacttgcataatgctcctg

SEQ ID NO: 104943 - DNA, 80 bp, synthetic construct
  source 1..80: mol_type = other DNA
tactttagacctgaaaccaacaaccgaaattgaccttacatgttacgagtcattggacagctcagaggatgaggatgaaa

SEQ ID NO: 104944 - DNA, 80 bp, synthetic construct
  source 1..80: mol_type = other DNA
attctgattttttagatattgtaaaattacataggcctgctttaacctctagaaaaacaggcatacgtgttagtagattg

SEQ ID NO: 104945 - DNA, 80 bp, synthetic construct
  source 1..80: mol_type = other DNA
ggacaacgtgcaacactttttactagaagtggcaaacgtataggtgctaaagtacatttttatcatgatataagtcctat

SEQ ID NO: 104946 - DNA, 80 bp, synthetic construct
  source 1..80: mol_type = other DNA
acctactgatgatattgaaatgcaacctttagttacaccacaaacacctagtatagtaactggtagtagtattaatgatg

SEQ ID NO: 104947 - DNA, 80 bp, synthetic construct
  source 1..80: mol_type = other DNA
ggttatatgatgtgtttttagaaaatgatgtagaagatactgtagtacaacaaacatatacacctacaagtatacatagt

SEQ ID NO: 104948 - DNA, 80 bp, synthetic construct
  source 1..80: mol_type = other DNA
aatagtttagttagtagtgatgtttctactgcaactgcaaatacaactattccttttagtactgggttagacacacatcc

SEQ ID NO: 104949 - DNA, 80 bp, synthetic construct
  source 1..80: mol_type = other DNA
tggtccagatattgctttaccactaccttctacagaaactatttttacaccaatagtgccattacagcctgctggtccta

SEQ ID NO: 104950 - DNA, 80 bp, synthetic construct
  source 1..80: mol_type = other DNA
tatatatttatgggtcaggttttatattacaccctagttattatttgttaaagcgcaaacgtaaacgtctgtcatattct

SEQ ID NO: 104951 - DNA, 80 bp, synthetic construct
  source 1..80: mol_type = other DNA
tttacagatgtggcgacctactgatgcaaaggtatacctgccccctgtgtctgtgtctaaggttgtgagcacagatgaat

SEQ ID NO: 104952 - DNA, 80 bp, synthetic construct
  source 1..80: mol_type = other DNA
atgtaacaagaacaaatatatattattatgcagggagcacacgtttgttggctgttggacacccatattttcctatcaag

SEQ ID NO: 104953 - DNA, 80 bp, synthetic construct
  source 1..80: mol_type = other DNA
gattctcaaaaacgtaaaaccatagttcctaaagtttcaggtttgcaatacagagtgtttaggcttcgtttaccagatcc

SEQ ID NO: 104954 - DNA, 80 bp, synthetic construct
  source 1..80: mol_type = other DNA
cagacagccatctagacagacaagctgaacgagagtgttacagaatagttactgattgcacgaagtgtcagtgcacagta

SEQ ID NO: 104955 - DNA, 80 bp, synthetic construct
  source 1..80: mol_type = other DNA
atccttttataatcctgataaagagcgcctagtatgggcctgttctggtgtggaggttggacgtggacaacccttaggta

SEQ ID NO: 104956 - DNA, 80 bp, synthetic construct
  source 1..80: mol_type = other DNA
taggtactagtggcaatccatttatgaataaattagatgatactgaaaatgctcctaaatacattgctggacaaaataca

SEQ ID NO: 104957 - DNA, 80 bp, synthetic construct
  source 1..80: mol_type = other DNA
gatggtagagaatgtatgtcagtggattataaacaaacacagttgtgtattttaggttgtaggcctcccttaggggaaca

SEQ ID NO: 104958 - DNA, 80 bp, synthetic construct
  source 1..80: mol_type = other DNA
ttggggtccaggcacgccatgtacttcacaaactgttaatactggtgattgtcccccactggaattaaagaacaccccta

SEQ ID NO: 104959 - DNA, 80 bp, synthetic construct
  source 1..80: mol_type = other DNA
tacaggatggtgatatgatagatgttggctttggagccatggattttaaagctttacaagcaaataaaagtgatgtgcct

SEQ ID NO: 104960 - DNA, 80 bp, synthetic construct
  source 1..80: mol_type = other DNA
attgatatttctaacactacttgtaaatacccagattatttaggcatggctgctgatccctatggtgattctatgtggtt

SEQ ID NO: 104961 - DNA, 80 bp, synthetic construct
  source 1..80: mol_type = other DNA
ttatcttcgtagggaacaaatgtttgttagacacttatttaacagggctggtgataccggtgataaaatcccagatgaac

SEQ ID NO: 104962 - DNA, 80 bp, synthetic construct
  source 1..80: mol_type = other DNA
taatgattaaaggcacaggcaatactgcaacaccatccagttgtgtgttttatcctacacctagtggttccatggtttct

SEQ ID NO: 104963 - DNA, 80 bp, synthetic construct
  source 1..80: mol_type = other DNA
tagaagcactaatttttctgtatgtgtaggtacacaggctagtagctctactacaacgtatgccaactctaattttaagg

SEQ ID NO: 104964 - DNA, 80 bp, synthetic construct
  source 1..80: mol_type = other DNA
tgccttgccattgaaagcaacaaagctgatttaagagtgatagaagatttgcttatgggtgcactaggtattgtgtgccc

SEQ ID NO: 104965 - DNA, 80 bp, synthetic construct
  source 1..80: mol_type = other DNA
caggctattagttgccaacgtcctcaacctcctaaagaaacagatgacccatatgccaagctatccttttgggatgtaga

SEQ ID NO: 104966 - DNA, 80 bp, synthetic construct
  source 1..80: mol_type = other DNA
tcttaaagaaaagttttctgcagaattagaccagtttcctttggggagaaaatttttattacaacttggtatgcgtgcac

SEQ ID NO: 104967 - DNA, 80 bp, synthetic construct
  source 1..80: mol_type = other DNA
gtcctaagttacaagcttctaaacgttctgcatctgctaccacaagtgccacacctaagaaaaaacgtgctaaacgtatt

SEQ ID NO: 104968 - DNA, 80 bp, synthetic construct
  source 1..80: mol_type = other DNA
taataagtgtaatgtgtatgtgttgtttgttgtatgttacatgtgttttgtatgtttgtttgttgtatgttaactgttta

SEQ ID NO: 104969 - DNA, 80 bp, synthetic construct
  source 1..80: mol_type = other DNA
ctagtactgtgtgtatgtgtatgtgcatgtgtataactgtttgtttatatatatgtatgtatttgtgtgtatgtgtatgt

SEQ ID NO: 104970 - DNA, 80 bp, synthetic construct
  source 1..80: mol_type = other DNA
gtatgtgtatgtgtagtaatgtttgtatgtatgtttaataaagtttatatgtgtgttgcatgtgtataactgtttgttta

SEQ ID NO: 104971 - DNA, 80 bp, synthetic construct
  source 1..80: mol_type = other DNA
caactgttccagaaacctataaaagaagatggctgattcaggtaattgggaagggaggtgtacgggatggtttaatgtag

SEQ ID NO: 104972 - DNA, 80 bp, synthetic construct
  source 1..80: mol_type = other DNA
tatgtgtgttgtgttggtttacttgactactgtgcttccattttgtttaggcgccattttacatgcattaaggtaaaaag

SEQ ID NO: 104973 - DNA, 80 bp, synthetic construct
  source 1..80: mol_type = other DNA
ggcaaccgatttcggttgcacagtaaaacatgttttaatgtgttttgctgttttagcaaaatagttgtaatggttttggc

SEQ ID NO: 104974 - DNA, 80 bp, synthetic construct
  source 1..80: mol_type = other DNA
ttcctgcaggcaacttggcagggtttatttccttaacatgtttatcccacgcaaggctatacaggtaaaaggcgccacct

SEQ ID NO: 104975 - DNA, 80 bp, synthetic construct
  source 1..80: mol_type = other DNA
ggcagttactcatttgtctgcaattatttaaacaatgtcttgcacacacattttttacccaccctatcataaaattgctt

SEQ ID NO: 104976 - DNA, 80 bp, synthetic construct
  source 1..80: mol_type = other DNA
ttaagcacatacctatactatgtaaacagtgtactcttggcagaacattgttttttaaatgccaagtaattgttttataa

SEQ ID NO: 104977 - DNA, 80 bp, synthetic construct
  source 1..80: mol_type = other DNA
atgagtaataacgtgttactcatactgcacctaaaaagttaaacctatttggatcacacaaatgacaagttatttcttat

SEQ ID NO: 104978 - DNA, 80 bp, synthetic construct
  source 1..80: mol_type = other DNA
tataaaaaactataatgtactattaaaaaaaagggtgtaaccgaaaacggttttaaccgaaatcggtgcatataaaagta

SEQ ID NO: 104979 - DNA, 80 bp, synthetic construct
  source 1..80: mol_type = other DNA
aaagggtgtaaccgaaaacggttttaaccgaaatcggtgcatataaaagtaggaaagcaaaatacgctacagattgggaa

SEQ ID NO: 104980 - DNA, 80 bp, synthetic construct
  source 1..80: mol_type = other DNA
aaacctggactgtgtgttttgtcaacgtggactgtacagatctgaggtatatgattttgcatttagtgatttgtatattg

SEQ ID NO: 104981 - DNA, 80 bp, synthetic construct
  source 1..80: mol_type = other DNA
aactatgatggaggggatacagatgagtcggaaatggtggattttattgataatgcacatataacaaatatatatgcaca

SEQ ID NO: 104982 - DNA, 80 bp, synthetic construct
  source 1..80: mol_type = other DNA
acaggaaattgcacaggcattgtatcagtcacagcaagcaaatgcagacaatgaggctatacgtgttctaaaacgaaagt

SEQ ID NO: 104983 - DNA, 80 bp, synthetic construct
  source 1..80: mol_type = other DNA
aggacaatagcatgcaatatgtattttggacacatatatattgttggtatgaaggggggtgggcaaaggtaggtagtaaa

SEQ ID NO: 104984 - DNA, 80 bp, synthetic construct
  source 1..80: mol_type = other DNA
tgtatgtgtatgtgtagtaatgtttgtatgtatgtttaataaagtttatatgtgtgttgtgttggtttacttgactactg

SEQ ID NO: 104985 - DNA, 80 bp, synthetic construct
  source 1..80: mol_type = other DNA
atgtctgcacggtgcggctcccaggccaggaccctgtatgaactgtgtgaccagtgcaatattacattgcctacgttgca

SEQ ID NO: 104986 - DNA, 80 bp, synthetic construct
  source 1..80: mol_type = other DNA
gcccatatgtaagtcctatacaatattcagaaccgtctatagacggggacctgagtccaaggctgcatgcaatacggctt

SEQ ID NO: 104987 - DNA, 80 bp, synthetic construct
  source 1..80: mol_type = other DNA
ggcggcggcaaaaaggctaaacggcggttgttccagcgtgtggagcaaagggacagtggctatggctattctgaagtgga

SEQ ID NO: 104988 - DNA, 80 bp, synthetic construct
  source 1..80: mol_type = other DNA
aacaacagagagacaggtagagacagaacatggcggaccggaagataccgtggggggtagtgggagggtgacaacagatg

SEQ ID NO: 104989 - DNA, 80 bp, synthetic construct
  source 1..80: mol_type = other DNA
aggcggaagcagtagaggttgtggaagacggcagtcatgttatagaccactgtagtccgcgcacacaactcatagagctg

SEQ ID NO: 104990 - DNA, 80 bp, synthetic construct
  source 1..80: mol_type = other DNA
tttaaatgcaaggacctaaatgctaagctgtatggtaagtttaaagagctttttggagtggggtttggagacctggtaag

SEQ ID NO: 104991 - DNA, 80 bp, synthetic construct
  source 1..80: mol_type = other DNA
acagtttaaaagtgataaatccacgtgtaccgattgggtgtatgctgtgttcggggttaatcccaccatagccgaaggct

SEQ ID NO: 104992 - DNA, 80 bp, synthetic construct
  source 1..80: mol_type = other DNA
ttcatacactgctgaaaaggcaggcattatatttacatacccaatggacgtcatgcaaatggggtatggtgctgcttgca

SEQ ID NO: 104993 - DNA, 80 bp, synthetic construct
  source 1..80: mol_type = other DNA
ggcgcgacgaatttccacacgccgcatgtccacggtgtctggacctgcacggaaaagtaaaccaatacagaaactttaga

SEQ ID NO: 104994 - DNA, 80 bp, synthetic construct
  source 1..80: mol_type = other DNA
ttgtgtagatataaggtgggtaaaaatagggaaacagttgttagacagctatccaaaatgttaaatgtacctgaaaacca

SEQ ID NO: 104995 - DNA, 80 bp, synthetic construct
  source 1..80: mol_type = other DNA
gatactggtacaaccgcctaaattacaaagtccgcctgcagcattattttggtttagagcaggaatgggtaatgggagcg

SEQ ID NO: 104996 - DNA, 80 bp, synthetic construct
  source 1..80: mol_type = other DNA
aggtgtccggcacaacaccggaatggatagctaaacaaactatgttagaacacagctttgctgacacacagtttagccta

SEQ ID NO: 104997 - DNA, 80 bp, synthetic construct
  source 1..80: mol_type = other DNA
acagacatggtgcagtgggcatatgataacgggcatacagatgagtgtgaaatagcatactattatgcacaaagagcaga

SEQ ID NO: 104998 - DNA, 80 bp, synthetic construct
  source 1..80: mol_type = other DNA
cgtggatgcaaatgcagcagcattcctaaaaagtaacaatcaggccaaatacgttagggattgtgcatccatgtgcaaac

SEQ ID NO: 104999 - DNA, 80 bp, synthetic construct
  source 1..80: mol_type = other DNA
actataggttagcagaaatgaggcgcatgtcaatggctgagtggataaagcatagaggggagaagtgtgatgacggcgac

SEQ ID NO: 105000 - DNA, 80 bp, synthetic construct
  source 1..80: mol_type = other DNA
tggaaacctatagttaaattattacgctatcaacatatagatataatagattttttagctgcattaaaaaaatggctaca

SEQ ID NO: 105001 - DNA, 80 bp, synthetic construct
  source 1..80: mol_type = other DNA
gggtatacctaaaaaaaattgcatttgtattgtgggtcctccagacacaggaaagtcgtgttttggaatgagcctgatgc

SEQ ID NO: 105002 - DNA, 80 bp, synthetic construct
  source 1..80: mol_type = other DNA
actttatgcaaggtacaataatatcatatgttaattcctgtagtcatttttggttgcaatcattagcagatgctaaggta

SEQ ID NO: 105003 - DNA, 80 bp, synthetic construct
  source 1..80: mol_type = other DNA
gttacagcggcatgctgggggtatatggatacacacatgaggaacttattagatggtaacccaaccagcatagatagaaa

SEQ ID NO: 105004 - DNA, 80 bp, synthetic construct
  source 1..80: mol_type = other DNA
tacgcagcctatgcaccaaccgtggaagaagagacaggattaaccattttacaagtaaggattagatgctgcaagtgcca

SEQ ID NO: 105005 - DNA, 80 bp, synthetic construct
  source 1..80: mol_type = other DNA
acataaaccgttagcagtaattaagtgccctccgttactgttaacgtccaatataaatataacacaggacagtaagtacc

SEQ ID NO: 105006 - DNA, 80 bp, synthetic construct
  source 1..80: mol_type = other DNA
aatatttacaaagtagggttcaagtgtttgaatttccaaatccatttccatttgacagcaacggcaatgctgtgtatgaa

SEQ ID NO: 105007 - DNA, 80 bp, synthetic construct
  source 1..80: mol_type = other DNA
attaaatgatgcaaattggaactccttttttaaaaggttggcatccagtttagagctgcaaacacctgaggacgaggatg

SEQ ID NO: 105008 - DNA, 80 bp, synthetic construct
  source 1..80: mol_type = other DNA
gagaatctagccaggcgcctagatttgtgccaggaacagttgttagaactgtatgaacaaaacagcaaagagctacagca

SEQ ID NO: 105009 - DNA, 80 bp, synthetic construct
  source 1..80: mol_type = other DNA
acatatattgcactggaaatatatacgttatgaaagtgcaatatattatacagcaagacaaatgggcattaaacatttag

SEQ ID NO: 105010 - DNA, 80 bp, synthetic construct
  source 1..80: mol_type = other DNA
gccaccaggtggtgccaagtttagatgtttcaaaggctaaagcccatgcagcaattgaaatgcaaatgtgtttagaatcg

SEQ ID NO: 105011 - DNA, 80 bp, synthetic construct
  source 1..80: mol_type = other DNA
ttgcaaaacactgaatataatgtagagccatggacgctgcaggacacaagtcaagaattatggcttgcagaacctaagaa

SEQ ID NO: 105012 - DNA, 80 bp, synthetic construct
  source 1..80: mol_type = other DNA
atgttttaaaaaaggtggcaaaacagtggaagttagatttgactgcactgaaacaaatgcaatgcattatacactgtgga

SEQ ID NO: 105013 - DNA, 80 bp, synthetic construct
  source 1..80: mol_type = other DNA
ccacagtatatgtacaggtggatgatgcatggacaaaggtaaaaggccaggtggactacaaaggcctctcatatacagtg

SEQ ID NO: 105014 - DNA, 80 bp, synthetic construct
  source 1..80: mol_type = other DNA
cacgggtgcacaacatattatgtagactttgcaaaggaagcacaaacgtatgggaaaacagataggtggactgttattgt

SEQ ID NO: 105015 - DNA, 80 bp, synthetic construct
  source 1..80: mol_type = other DNA
caagcctttgtctcctgtggaaaaaaccaaccatattgtgaagaagacgcaattctttaaattaaaagattcgtggacag

SEQ ID NO: 105016 - DNA, 80 bp, synthetic construct
  source 1..80: mol_type = other DNA
gggttcacacgttatatgttctcctagtactatcgaggaacaaggactacccattgttgagactgctgacgccagacccc

SEQ ID NO: 105017 - DNA, 80 bp, synthetic construct
  source 1..80: mol_type = other DNA
cgaccactgccaccgacacccccgacgcccccaccacagcgaccaccgaaacattcagcaccgcccaggcaccgcccaga

SEQ ID NO: 105018 - DNA, 80 bp, synthetic construct
  source 1..80: mol_type = other DNA
aagcgacgaaggaacggatacctgcccatcaccactactgtgggcaaatcactcggaggagagtacgtggacactgcaga

SEQ ID NO: 105019 - DNA, 80 bp, synthetic construct
  source 1..80: mol_type = other DNA
cagaccacgcacgcctgaccctgaaagcgacaacggacacaggaactgtggtggaggttcttctacacctataatacaat

SEQ ID NO: 105020 - DNA, 80 bp, synthetic construct
  source 1..80: mol_type = other DNA
tagaaggtgacgccaattgcttaaagtgttttagatatagactaggaaaagtgtcacatttattttgtaattcctcaact

SEQ ID NO: 105021 - DNA, 80 bp, synthetic construct
  source 1..80: mol_type = other DNA
acatggaggtggaccactgaatccagaaccgacaaaaatgctataataactataacatatagtagtgtacagcaacggtc

SEQ ID NO: 105022 - DNA, 80 bp, synthetic construct
  source 1..80: mol_type = other DNA
tgactttttagctattgtaaaaataccaaaaacaataaaacgtagcttgggtatgttaacactgatgtaatatatgtata

SEQ ID NO: 105023 - DNA, 80 bp, synthetic construct
  source 1..80: mol_type = other DNA
tatgtatatatatggaacaccatctgtgaagggtattgtctagcacgtaccacacaaccagccaatctgctgctattatt

SEQ ID NO: 105024 - DNA, 80 bp, synthetic construct
  source 1..80: mol_type = other DNA
gttaatagagtctacgcttggcatactagtagtctatattgtttttttacttattgcactgttaatctgtgtgtgtgtcc

SEQ ID NO: 105025 - DNA, 80 bp, synthetic construct
  source 1..80: mol_type = other DNA
ctaatctgtatgtgtggagctctatactgtctgctatctccattttgtgctttgtaacatggggtgcactaacatctatt

SEQ ID NO: 105026 - DNA, 80 bp, synthetic construct
  source 1..80: mol_type = other DNA
ggtactgtctacattgctggaagaaatgcatggagaaaggccaacgctcggagacattgtgttaaacttgcaacctgaac

SEQ ID NO: 105027 - DNA, 80 bp, synthetic construct
  source 1..80: mol_type = other DNA
actaacctgtttatcttaatactcttagtgtggtatttgcctgcggtggtccttcacacatttattatatatcacataca

SEQ ID NO: 105028 - DNA, 80 bp, synthetic construct
  source 1..80: mol_type = other DNA
agaccaattgtaacatgttgacctgtcaattggatgatggtgatacctggatggccttatggatgttacttgcgtttata

SEQ ID NO: 105029 - DNA, 80 bp, synthetic construct
  source 1..80: mol_type = other DNA
actgtgttgttactgttattggtgtttcattgtagaaccttatatttatatacgtataccaagtaatactttgtgtagta

SEQ ID NO: 105030 - DNA, 80 bp, synthetic construct
  source 1..80: mol_type = other DNA
aataaacatttttttatattacagtgccttgtaatggtgtccagcaggccccgtaggcgcaagcgggcgtcagctactca

SEQ ID NO: 105031 - DNA, 80 bp, synthetic construct
  source 1..80: mol_type = other DNA
gttatatcaaacatgcaaggcggcgggcacctgtccacctgatgttgttaataaggtggagcaaacaaccgttgcagatc

SEQ ID NO: 105032 - DNA, 80 bp, synthetic construct
  source 1..80: mol_type = other DNA
aaattttaaaatggtggagcatgggagtattttttggcgggcttggcataggttccggctctggcacaggtggcagggct

SEQ ID NO: 105033 - DNA, 80 bp, synthetic construct
  source 1..80: mol_type = other DNA
ggctatgtgcctttgtctacaggttcccgggctgtccctcctaaatctttggtacctgacgttgttgctaggccacctgt

SEQ ID NO: 105034 - DNA, 80 bp, synthetic construct
  source 1..80: mol_type = other DNA
ggttgtggatactgttgcaccctccgatccgtccattgtatctttaattgaggaaagtagtattattcagtcaggtgccc

SEQ ID NO: 105035 - DNA, 80 bp, synthetic construct
  source 1..80: mol_type = other DNA
cgtcccttactattccaacagagggtgggttttcagtaacgtcctccggtacagatgtgcctgccattttagatgtgtcg

SEQ ID NO: 105036 - DNA, 80 bp, synthetic construct
  source 1..80: mol_type = other DNA
tccacaaatactgtgcatgtgacagccaccacacatcacaatcctgtctttactgatccctcggttgtgcagcccatccc

SEQ ID NO: 105037 - DNA, 80 bp, synthetic construct
  source 1..80: mol_type = other DNA
ctgtatgtctaaactgcaacgagcaattagacagctcagactcagaagatgaccatgaacaggaccaactagacagctta

SEQ ID NO: 105038 - DNA, 80 bp, synthetic construct
  source 1..80: mol_type = other DNA
acctgtggaggccggtggtcgcctcatagtgtcgcattccactattactactagtgctgctgaggaaatacctttggaca

SEQ ID NO: 105039 - DNA, 80 bp, synthetic construct
  source 1..80: mol_type = other DNA
cgtttgttgtccatagtgatccattgtccagtacacccgttcctggtacgtctggacggcccaggttgggactgtacagt

SEQ ID NO: 105040 - DNA, 80 bp, synthetic construct
  source 1..80: mol_type = other DNA
aaggccttgcagcaggtggaaattgtggaccctgcctttctgtctacccctcagcgtttaattacatatgacaatccagt

SEQ ID NO: 105041 - DNA, 80 bp, synthetic construct
  source 1..80: mol_type = other DNA
gtttgagaacgtggatgatacattgcagtttgagcagccatccatacatgacgctccggaccctgcgtttatggacatta

SEQ ID NO: 105042 - DNA, 80 bp, synthetic construct
  source 1..80: mol_type = other DNA
ttaccttgcacaggcctgcattaacgtctcggcgtggtgtcatacgctttagcagagtgggtcaacggggcaccatgtac

SEQ ID NO: 105043 - DNA, 80 bp, synthetic construct
  source 1..80: mol_type = other DNA
acacggcgagggacccgcattgggggtcgtgtacacttttttagggacattagtcctattggtgcagctgatgatattga

SEQ ID NO: 105044 - DNA, 80 bp, synthetic construct
  source 1..80: mol_type = other DNA
attgcaccctctagtggcctcggcaccacatacactggagacaccacatacactggaaacaccactggacactactgatg

SEQ ID NO: 105045 - DNA, 80 bp, synthetic construct
  source 1..80: mol_type = other DNA
ccctgtttgatgtgtatgcagacatggatactatagatgatgatgcagcatatgctacattctcattacatcctgccgat

SEQ ID NO: 105046 - DNA, 80 bp, synthetic construct
  source 1..80: mol_type = other DNA
tctactcgtatatctaacacatccatacctcttgccacggtttctgacacattattaacatctggtcctgacatagtgtt

SEQ ID NO: 105047 - DNA, 80 bp, synthetic construct
  source 1..80: mol_type = other DNA
tccttctattcctgcaggtacaccatatttgcctgtgtcaccttctatacctgccatatctgtactaattcacggtacag

SEQ ID NO: 105048 - DNA, 80 bp, synthetic construct
  source 1..80: mol_type = other DNA
cacagtagagagcgtgagcaacccacgcaacaggacctgcaagtaaatttgcaatcatttaaagtagtaactcggtgtgt

SEQ ID NO: 105049 - DNA, 80 bp, synthetic construct
  source 1..80: mol_type = other DNA
attattatttgcatcctgcatactatgtaagaaaacgccgaaagcgcatattagcacatcagtatgtggcaacttaatga

SEQ ID NO: 105050 - DNA, 80 bp, synthetic construct
  source 1..80: mol_type = other DNA
aaatcaagtatatttaccaccgccaacgcctgttgctaccattgttagcacagatgagtatgtgcaacgcaccagtttat

SEQ ID NO: 105051 - DNA, 80 bp, synthetic construct
  source 1..80: mol_type = other DNA
attatcatgctggtagtgccaggttactgactataggacatccatactttgagttaaaaaaaaacaatggtgacatttca

SEQ ID NO: 105052 - DNA, 80 bp, synthetic construct
  source 1..80: mol_type = other DNA
gtgcctaaggtgtctggacatcaatacagggtatttagggtacgtttgcctgacccgaataagtttggtttatctgacac

SEQ ID NO: 105053 - DNA, 80 bp, synthetic construct
  source 1..80: mol_type = other DNA
ctccttgtttaattctgaaacgcagcgccttgtgtgggcatgtgtgggtgtggaggtcggccgtggccagcccctggtgg

SEQ ID NO: 105054 - DNA, 80 bp, synthetic construct
  source 1..80: mol_type = other DNA
ttggtgttagtggccatccatactttaataaggatgaggatgtggaaaactcatctgcctatggcacaggtccggggcag

SEQ ID NO: 105055 - DNA, 80 bp, synthetic construct
  source 1..80: mol_type = other DNA
gatagtagggaaaatgtagctatggattataaacagacacagttatgtatgttgggctgcacacccccaattggggaata

SEQ ID NO: 105056 - DNA, 80 bp, synthetic construct
  source 1..80: mol_type = other DNA
ttggggtaagggcactccgtgcaatgcttctcgggtgacccttggggactgtcctgtattagaattaaaaactgaggtta

SEQ ID NO: 105057 - DNA, 80 bp, synthetic construct
  source 1..80: mol_type = other DNA
tatttgggaatggctgcagaaccgtatggaaatagtttatttttttttctacgcagggaacaaatgtttgttaggcactt

SEQ ID NO: 105058 - DNA, 80 bp, synthetic construct
  source 1..80: mol_type = other DNA
attttgtcagtgtttggtgcgcttagcagtgcattgttccatcactgatataacacagttccagcagttgctgatgggca

SEQ ID NO: 105059 - DNA, 80 bp, synthetic construct
  source 1..80: mol_type = other DNA
ttttaatagggcaggtactactggtgatagtgttccaactgacttatatataacaggtacatctggtcggactcctattg

SEQ ID NO: 105060 - DNA, 80 bp, synthetic construct
  source 1..80: mol_type = other DNA
caggcagtatttattactccacaccaagtggatccttggttacctctgattctcagatatttaacaagccattgtggata

SEQ ID NO: 105061 - DNA, 80 bp, synthetic construct
  source 1..80: mol_type = other DNA
cgtagcactaatttaaccttatgtgctgccacacagtcccccacaccaaccccatataataacagtaatttcaaggaata

SEQ ID NO: 105062 - DNA, 80 bp, synthetic construct
  source 1..80: mol_type = other DNA
tttgcgtcatggggaggagtttgatttgcagtttatttttcagttatgtgtaattaccttaaatgcagaggtgatgacat

SEQ ID NO: 105063 - DNA, 80 bp, synthetic construct
  source 1..80: mol_type = other DNA
atattcatgcaatggatcctacgttgttggaggattggaactttaaaattgctcctccagcctctgcatccttagaggat

SEQ ID NO: 105064 - DNA, 80 bp, synthetic construct
  source 1..80: mol_type = other DNA
acatataggttccttaccaacaaggctattgcctgtcagcgcgatgcgccccccaaggtacgggaggatccatataaaaa

SEQ ID NO: 105065 - DNA, 80 bp, synthetic construct
  source 1..80: mol_type = other DNA
atataaattttgggatgttaatttaacagaaagattttcttcccaattagatcaatttccattaggacgtaagttcctta

SEQ ID NO: 105066 - DNA, 80 bp, synthetic construct
  source 1..80: mol_type = other DNA
tgcaggctggtgtacgcgcagggcctaggtttaaatccaggaagcgccctgccccttcctcgtcttcctctcctaagcca

SEQ ID NO: 105067 - DNA, 80 bp, synthetic construct
  source 1..80: mol_type = other DNA
gtcacccccaaacgtaaaaaaacaaagcgatgagtatggctgcatatgtgtattctggggaatacacccttgcactcccg

SEQ ID NO: 105068 - DNA, 80 bp, synthetic construct
  source 1..80: mol_type = other DNA
cattacatatagtgtgccccaactgtgcagctacagagtgacaacaatggcagactctccaggtacagaggacgtggggg

SEQ ID NO: 105069 - DNA, 80 bp, synthetic construct
  source 1..80: mol_type = other DNA
tatgtgttggtacctttggaatgtatgtatgtattgtttgtgtatgttttgtgtttgttgtgtatgtgtccgtatggtac

SEQ ID NO: 105070 - DNA, 80 bp, synthetic construct
  source 1..80: mol_type = other DNA
tgtgtatgtattgtttgtatgctgtatacttacgttgtggttgtgtgtttaataaagctatatgtgtggtgtggtgtggt

SEQ ID NO: 105071 - DNA, 80 bp, synthetic construct
  source 1..80: mol_type = other DNA
atgtctgtgtcatggcgtcttgttcagtgttcaccatgtactttttgtgtctaaatcctccattttgtactgcgcgaccg

SEQ ID NO: 105072 - DNA, 80 bp, synthetic construct
  source 1..80: mol_type = other DNA
ctttcggtcgcggttggcacacacatacatttgtcagcatatttctattgcatgttacacattgttaggtcaacatgccc

SEQ ID NO: 105073 - DNA, 80 bp, synthetic construct
  source 1..80: mol_type = other DNA
tgccaaaaatgtagtattagggtgaggtttggcacacctttgattgcacttttcctgtactgttactcatcgtattgtat

SEQ ID NO: 105074 - DNA, 80 bp, synthetic construct
  source 1..80: mol_type = other DNA
gcacttccaaacatgcttttaggcacatagttttgcctaataaaaagttagctaatagcagttttggcaaaacataacac

SEQ ID NO: 105075 - DNA, 80 bp, synthetic construct
  source 1..80: mol_type = other DNA
ttgtggttaacatagtacatattactcatggtgcacacctgcggaccgctttcggttgctacatgttttattactttctt

SEQ ID NO: 105076 - DNA, 80 bp, synthetic construct
  source 1..80: mol_type = other DNA
cttattattaataacaattgtactgttagtaaagggtgtaaccgaaaacggtccgaccgaaagcggtacatataaattcc

SEQ ID NO: 105077 - DNA, 80 bp, synthetic construct
  source 1..80: mol_type = other DNA
gtaaagggtgtaaccgaaaacggtccgaccgaaagcggtacatataaattccaacccaaaaaacctgctttggggccagt

SEQ ID NO: 105078 - DNA, 80 bp, synthetic construct
  source 1..80: mol_type = other DNA
aattgattgtgtgttttgcaagacggtcctaaaaacagctgaggtactggcctttgcctttagagagttatatgttgtgt

SEQ ID NO: 105079 - DNA, 80 bp, synthetic construct
  source 1..80: mol_type = other DNA
ctgggtgctcaggatggtttttagtagaagctgtagtggataaacaaacgggggatgctgtatcggaagatgaggatgag

SEQ ID NO: 105080 - DNA, 80 bp, synthetic construct
  source 1..80: mol_type = other DNA
gaggacatagaggatagtggatttgatatgatagattttattgataatagtgttgtggcagaggaacatgtagaactaag

SEQ ID NO: 105081 - DNA, 80 bp, synthetic construct
  source 1..80: mol_type = other DNA
taatgcacaggcacttttacatgtacagcagacatgtgcagatgctgctgacctgtgcgagttaaaacgaaagtacatta

SEQ ID NO: 105082 - DNA, 80 bp, synthetic construct
  source 1..80: mol_type = other DNA
tgtggagcaaagggacagtggctatggctattctgaagtggaaacaacagagagacaggtagagacagaacatggcggac

SEQ ID NO: 105083 - DNA, 80 bp, synthetic construct
  source 1..80: mol_type = other DNA
atgatttataaaataagggagggaccgaaaacggttcgaccgaaagcggtacatataaaagcggatgtagaaaacagtta

SEQ ID NO: 105084 - DNA, 80 bp, synthetic construct
  source 1..80: mol_type = other DNA
agatgtagaggcagtgcaacaattaaaacgaaagtatataggcagtccgtatgtaagtcctgttgcaaacagcgaaccct

SEQ ID NO: 105085 - DNA, 80 bp, synthetic construct
  source 1..80: mol_type = other DNA
gtgtagaaaaggacctaagcccccggctaggggctatatccctaggacggcggtcagctaaagccaaacgacggctgttt

SEQ ID NO: 105086 - DNA, 80 bp, synthetic construct
  source 1..80: mol_type = other DNA
gataaggcccaaccgccaccaaatggccatactgacgtggaagctgcggtggaggtaaataccgaggggacagaacaaac

SEQ ID NO: 105087 - DNA, 80 bp, synthetic construct
  source 1..80: mol_type = other DNA
agaaacagagcaagtgcagacagcatctggggagacaagtacagatagcctaggaaggcagcaaattacagaactaatac

SEQ ID NO: 105088 - DNA, 80 bp, synthetic construct
  source 1..80: mol_type = other DNA
ataacacaaatattcgtgtagcattatttggtatgtttaaagaactgtatggattgagttttatggacctagcacggtcc

SEQ ID NO: 105089 - DNA, 80 bp, synthetic construct
  source 1..80: mol_type = other DNA
tttaaaagtgacagaacagtgtgtacagattgggtaattgcagcatttgggatatatcacggtattacagagggatttaa

SEQ ID NO: 105090 - DNA, 80 bp, synthetic construct
  source 1..80: mol_type = other DNA
aacattattagagccacattgtttgtatggccatattcaatggctaacatgtagatggggtatggtattattattattaa

SEQ ID NO: 105091 - DNA, 80 bp, synthetic construct
  source 1..80: mol_type = other DNA
ctatgcatagtttgcaacttccttgtgccttttgcaagcggacggtgtgtacagcagatatttatgcatttcaatataaa

SEQ ID NO: 105092 - DNA, 80 bp, synthetic construct
  source 1..80: mol_type = other DNA
caagatttaaatgtggcaaaaacagactaacagtaggtaaatgtttaggaatgttattaaatataccagaaacccaaatg

SEQ ID NO: 105093 - DNA, 80 bp, synthetic construct
  source 1..80: mol_type = other DNA
ttaatagatcctccaaaattacggacgcctgctgcagccttgtattggtatagacaagggctgtctaatgcaagtgagat

SEQ ID NO: 105094 - DNA, 80 bp, synthetic construct
  source 1..80: mol_type = other DNA
atttggtacacccccggaatggctgtcaagacaaactgtaatagaatgtagcttagcagacagccagtttgatttatcaa

SEQ ID NO: 105095 - DNA, 80 bp, synthetic construct
  source 1..80: mol_type = other DNA
aaatggtacaatgggcatatgaccataattatgttgatgacagtataattgccctggaatatgcaaaattagctgatata

SEQ ID NO: 105096 - DNA, 80 bp, synthetic construct
  source 1..80: mol_type = other DNA
gatgaaaatgcggctgccttcctaggaagtaattgtcaggctaaatatgtaaaagactgtggaacaatgtgtagacatta

SEQ ID NO: 105097 - DNA, 80 bp, synthetic construct
  source 1..80: mol_type = other DNA
tttaagggcacaaaaaatgcaaatgacaatggcacaatggattaaacatcgttgtgatttagtagaggaagaaggtaatt

SEQ ID NO: 105098 - DNA, 80 bp, synthetic construct
  source 1..80: mol_type = other DNA
ggaaagaaatagtaagattccttagattccaacatgtggattttatatcatttatgatagcattaaagaaatttttacaa

SEQ ID NO: 105099 - DNA, 80 bp, synthetic construct
  source 1..80: mol_type = other DNA
gacctatatgtggtgtggagacacggctttccatatgctgcttgtgcactgtgcctagaactgcacgggcaaataaatta

SEQ ID NO: 105100 - DNA, 80 bp, synthetic construct
  source 1..80: mol_type = other DNA
tagaaggcatcgcgaccgtgcgtgcctgtgggaaacagtagaacaagagtgtggaaagccattggaagaaatatatataa

SEQ ID NO: 105101 - DNA, 80 bp, synthetic construct
  source 1..80: mol_type = other DNA
atagtgaggtatgtatggtatgtatggtaagtatggtagtgagtgcatgcaggcctgcagtgaatgaggtgtgtgtgtag

SEQ ID NO: 105102 - DNA, 80 bp, synthetic construct
  source 1..80: mol_type = other DNA
tgtatgcattaataatgttgtatacagtaagttggttaacatgttggtttttattgtctatggtattatggcaatgtatt

SEQ ID NO: 105103 - DNA, 80 bp, synthetic construct
  source 1..80: mol_type = other DNA
acaacagcatttactttttttcttgtagcctttatgctattgtgggtacctgccctgtgtgtatatgtgcgccttgccag

SEQ ID NO: 105104 - DNA, 80 bp, synthetic construct
  source 1..80: mol_type = other DNA
ggtgctggctgtgccataaacctttgtgcaacgtggaaaaacaacggcacgtagataacggcaggcgattccactgtgtt

SEQ ID NO: 105105 - DNA, 80 bp, synthetic construct
  source 1..80: mol_type = other DNA
gcttcttgaacttgaccttcactttacataaggtgttactgctggatgccctgtgtaacctgattactatagtacaataa

SEQ ID NO: 105106 - DNA, 80 bp, synthetic construct
  source 1..80: mol_type = other DNA
atattgtgtacatatatttgtgtattatggctaaagcaagagccccacgacgaaaacgtgcatctgcaacacaattatat

SEQ ID NO: 105107 - DNA, 80 bp, synthetic construct
  source 1..80: mol_type = other DNA
ggtggctattggaagggtaggtgtctacattgctggaagccataatgcatggaaatgtggccacaattgaggatatagtc

SEQ ID NO: 105108 - DNA, 80 bp, synthetic construct
  source 1..80: mol_type = other DNA
cttgatttaacaccagaaccgtgtgacctgtactgcagagagcaattagaagactctgatgcagaagatgagacagcagt

SEQ ID NO: 105109 - DNA, 80 bp, synthetic construct
  source 1..80: mol_type = other DNA
aaaatggctgcagaggcatatggggacagtttatttttttatttaaggcgggaacagatgtttgttaggcatatgttaaa

SEQ ID NO: 105110 - DNA, 80 bp, synthetic construct
  source 1..80: mol_type = other DNA
cagggcaggtaccatgggtgagcctgtacctaatgacttatacattaagaaatcctcaggtaaccctgacagttctattt

SEQ ID NO: 105111 - DNA, 80 bp, synthetic construct
  source 1..80: mol_type = other DNA
aatacaacctgacaaacaagcatttaaggtgttaagccagtgtggaggtgtgtgttgtaagacagtgcggctatgtgtgt

SEQ ID NO: 105112 - DNA, 80 bp, synthetic construct
  source 1..80: mol_type = other DNA
atgctgcaactcccagtggctctatggtaacatctgaataccaaatatttaataagccctactggttacaacgggcccag

SEQ ID NO: 105113 - DNA, 80 bp, synthetic construct
  source 1..80: mol_type = other DNA
atagcacgcacacaggcataagggtactgcaggaactgcttcatcagggcgcactggaaatagtgtgtcccacctgtgct

SEQ ID NO: 105114 - DNA, 80 bp, synthetic construct
  source 1..80: mol_type = other DNA
taataaagactttggttgcaccctatgagtaacttttgtgtgatgcctggtagccattaccttttcaccttttgtctcca

SEQ ID NO: 105115 - DNA, 80 bp, synthetic construct
  source 1..80: mol_type = other DNA
ttttgtaaaaggttttatataaccgaaaccgttttcggttgctgttggcactaaaactgttttttaagcagtttcatatc

SEQ ID NO: 105116 - DNA, 80 bp, synthetic construct
  source 1..80: mol_type = other DNA
gtacatctaatcttttgggcgccgccacatcctgccctagtagttgtgccagcacatctgcacacccacacatttataac

SEQ ID NO: 105117 - DNA, 80 bp, synthetic construct
  source 1..80: mol_type = other DNA
tgtacaacagtgactaattcaggaaaccgatttcggttacctacccattatcttttttatcattattattaactacaacc

SEQ ID NO: 105118 - DNA, 80 bp, synthetic construct
  source 1..80: mol_type = other DNA
tttgggggcaatgtctgttactgagccccacacggaggagccgcgtaccctagctgatttatgcaaggtatgcaatattc

SEQ ID NO: 105119 - DNA, 80 bp, synthetic construct
  source 1..80: mol_type = other DNA
tcaagaccataacggcatggcggataaccaaggtacagaggaggaggggactgggtgtaatggatggttctttgtggaag

SEQ ID NO: 105120 - DNA, 80 bp, synthetic construct
  source 1..80: mol_type = other DNA
caattgtagaacgtaaaacaggggatattatttcagatgatgagcctgaggatgtggaggacagtgggcttgatatggtg

SEQ ID NO: 105121 - DNA, 80 bp, synthetic construct
  source 1..80: mol_type = other DNA
gactttattgataatagtatatcacaggtagaggggcaggaaaatccacaggcattgttacatgcccaacagctacaggc

SEQ ID NO: 105122 - DNA, 80 bp, synthetic construct
  source 1..80: mol_type = other DNA
agagtcataggtggttggaccactgccaattccaaatcacagataaacaggcaagtcatagttgacaataacagctggtc

SEQ ID NO: 105123 - DNA, 80 bp, synthetic construct
  source 1..80: mol_type = other DNA
acgatgaatgcaatacgcccccggaaaaccaggtaatgtcatctgaaccgattataatagaaaggaacataacagagata

SEQ ID NO: 105124 - DNA, 80 bp, synthetic construct
  source 1..80: mol_type = other DNA
gtgtatttaaataatactactgttgaaaaagaaatctgtccaaaagttgcagaatatataagttggtcgaaaccacagtg

SEQ ID NO: 105125 - DNA, 80 bp, synthetic construct
  source 1..80: mol_type = other DNA
ctagggtgttattcataagagagggaaagattgtccatataagcccattgtcggggagtgctcagcacatagaggaatgt

SEQ ID NO: 105126 - DNA, 80 bp, synthetic construct
  source 1..80: mol_type = other DNA
caaccataatagaaaggaacataacagagatagtgtacttgaatggtactatcatagagagggagagttgtcccaaacca

SEQ ID NO: 105127 - DNA, 80 bp, synthetic construct
  source 1..80: mol_type = other DNA
cttagcaacaaccatgacaatacatttcacgcaaagtgaatacactaattcctctacagacaaaacaattccatgtgaat

SEQ ID NO: 105128 - DNA, 80 bp, synthetic construct
  source 1..80: mol_type = other DNA
aatacggcagccttgagcaacaaagttcttgcagagtacaaagttcctggcgaaattgtaatgtctgtcaaagagatgtt

SEQ ID NO: 105129 - DNA, 80 bp, synthetic construct
  source 1..80: mol_type = other DNA
gtcacctctgcaaatctagaggagattgagaggatgcacgatgatgcagcagcagaacttgagtttgccctttcgggagt

SEQ ID NO: 105130 - DNA, 80 bp, synthetic construct
  source 1..80: mol_type = other DNA
gaagcacaaagcagacactttagtgcagcaaatgagagacaggagtaagcagcctttctccccagatcataatgtggatc

SEQ ID NO: 105131 - DNA, 80 bp, synthetic construct
  source 1..80: mol_type = other DNA
atcataatgtggatcacatatctgaatttctctctgcatgctctagtgacttgtgggcaacagatgaggacctatacaac

SEQ ID NO: 105132 - DNA, 80 bp, synthetic construct
  source 1..80: mol_type = other DNA
atgaatccaaatcagaaaataataacgattggttctatttctcttacccttgccgcaatgtgcttcattatgcaaactgc

SEQ ID NO: 105133 - DNA, 80 bp, synthetic construct
  source 1..80: mol_type = other DNA
cattctggtaactaatgtaacattgcacttcaatcaatgtgaataccattattccccaaacaaccaagtaatattgtgtg

SEQ ID NO: 105134 - DNA, 80 bp, synthetic construct
  source 1..80: mol_type = other DNA
tggtctggagatttgacagtaaactggcattgagacatgtagctcgagagctgcatccggagtggtatgaagaacgctaa

SEQ ID NO: 105135 - DNA, 80 bp, synthetic construct
  source 1..80: mol_type = other DNA
tggtctggagatttgacagcaggctggcccacacacacacagctaaagtgctgcatccggagttttacaaagactgctga

SEQ ID NO: 105136 - DNA, 80 bp, synthetic construct
  source 1..80: mol_type = other DNA
tggtgtggagatttgacagcagactggcatttacacacaaagctcaagagctgcatccggagtacttcaaagatcgctga

SEQ ID NO: 105137 - DNA, 80 bp, synthetic construct
  source 1..80: mol_type = other DNA
tactgatctggagatttgacagtcgcctggcatttagacacgtagctaaagagatgcatccagagttctacaaaggctga

SEQ ID NO: 105138 - DNA, 80 bp, synthetic construct
  source 1..80: mol_type = other DNA
tgatctggagatttgacagtaagctggcattcaagcatgaagcccgagagaggcatccggagttctacaagaactgctga

SEQ ID NO: 105139 - DNA, 80 bp, synthetic construct
  source 1..80: mol_type = other DNA
tggtctggagatttgacagccgcctggcattcagacatgaagctaaagagcggttcccacagttctacaaagactgctga

SEQ ID NO: 105140 - DNA, 80 bp, synthetic construct
  source 1..80: mol_type = other DNA
tactggtctggagatttgacagtaaactggcattgagacacatagcccgagaagaacatccggagtactataaagactga

SEQ ID NO: 105141 - DNA, 80 bp, synthetic construct
  source 1..80: mol_type = other DNA
tgctggtctggagatttgacagttccctggcaagaacacacagagcaagagagctgcatccggagttttacaaagactga

SEQ ID NO: 105142 - DNA, 80 bp, synthetic construct
  source 1..80: mol_type = other DNA
tggtctggagatttgacagcaccctggcactaaaacacagagctcgagaacaacatccggagtggtacaaagactgctga

SEQ ID NO: 105143 - DNA, 80 bp, synthetic construct
  source 1..80: mol_type = other DNA
tggtctggaagtttgacagcagcctggcatatagacatatggctaaagagctgcatccggagttctacaaagactgctga

SEQ ID NO: 105144 - DNA, 80 bp, synthetic construct
  source 1..80: mol_type = other DNA
tggtctggagatttgacagcaccctggcattcagacacagagctaaagagatgcatccggagttctaccagaactgctga

SEQ ID NO: 105145 - DNA, 80 bp, synthetic construct
  source 1..80: mol_type = other DNA
tggtctggagatttgacagtagactggcattcgagcataaagccaaagaactgcatccggagttttacaaagactgctga

SEQ ID NO: 105146 - DNA, 80 bp, synthetic construct
  source 1..80: mol_type = other DNA
aacaagtgctggtatggagatttgatagcaggctggcattcaaacatgaagctcgagagagacatcctgagttctacaaa

SEQ ID NO: 105147 - DNA, 80 bp, synthetic construct
  source 1..80: mol_type = other DNA
tggtatggagatttgatagcaggctggcattcaaacatgaagctcgagagagacatcctgagttctacaaagactgctga

SEQ ID NO: 105148 - DNA, 80 bp, synthetic construct
  source 1..80: mol_type = other DNA
tggtttggagatttgacagccgcctggcatttgtgcacacagctcgagagaagcacccagagttctacaaagactgctga

SEQ ID NO: 105149 - DNA, 80 bp, synthetic construct
  source 1..80: mol_type = other DNA
tggtctggagatttgacagcaaactggcatttagacacatggctcgagaattgcatccggagttctacaaagactgctga

SEQ ID NO: 105150 - DNA, 80 bp, synthetic construct
  source 1..80: mol_type = other DNA
cagagaagtgctggtctggagatttgatagtcacctggcattcaggcaccacgctcgagagctgcatccggagttttaca

SEQ ID NO: 105151 - DNA, 80 bp, synthetic construct
  source 1..80: mol_type = other DNA
tggtctggagatttgatagtcacctggcattcaggcaccacgctcgagagctgcatccggagttttacaaagactgctga

SEQ ID NO: 105152 - DNA, 80 bp, synthetic construct
  source 1..80: mol_type = other DNA
tggtatggagatttgacagtagcctggcacggagacatgtcgcccgagagctgtatccggaatattacaagaactactaa

SEQ ID NO: 105153 - DNA, 80 bp, synthetic construct
  source 1..80: mol_type = other DNA
tggtctggagatttgacagtaaactggccttcacacacgtagctaaagagctgcatccggagttttataaagactgttga

SEQ ID NO: 105154 - DNA, 80 bp, synthetic construct
  source 1..80: mol_type = other DNA
tagtgtggagatttgacagcaggctggcatttgaacacaaagcgcgagtgctgcatccggagttcttcaaagattgctga

SEQ ID NO: 105155 - DNA, 80 bp, synthetic construct
  source 1..80: mol_type = other DNA
ctgtcaatagaacagaatgggaggacaccttaaacaaggtagttggacaactaaggaattactttaatgccacaaacata

SEQ ID NO: 105156 - DNA, 80 bp, synthetic construct
  source 1..80: mol_type = other DNA
tagtctggagatttgacagtcgcctggcatttagacacacagctaaagaactgcacccggaatacttcagagactgctga

SEQ ID NO: 105157 - DNA, 80 bp, synthetic construct
  source 1..80: mol_type = other DNA
tggtctggagatttgacaggagcctagcaaacagacactatgctcgagagctacacccagagttctacaaagactgctga

SEQ ID NO: 105158 - DNA, 80 bp, synthetic construct
  source 1..80: mol_type = other DNA
tggtctggagatttgatagtaaactggcattcaaacacgtagcccgagagctgcatccggagtactacaaagactgctga

SEQ ID NO: 105159 - DNA, 80 bp, synthetic construct
  source 1..80: mol_type = other DNA
gagaagtgctggtctggagatttgacagtcgcctggcattcgaacacacagctcgagcaaaacatccggagttttacaaa

SEQ ID NO: 105160 - DNA, 80 bp, synthetic construct
  source 1..80: mol_type = other DNA
tggtctggagatttgacagtcgcctggcattcgaacacacagctcgagcaaaacatccggagttttacaaagactgctga

SEQ ID NO: 105161 - DNA, 80 bp, synthetic construct
  source 1..80: mol_type = other DNA
tgctggtctggagatttgacagtaaactggcatttacacacaaagcttatgagctgcatccggagttctacaaaaactga

SEQ ID NO: 105162 - DNA, 80 bp, synthetic construct
  source 1..80: mol_type = other DNA
tggtctggagatttgacagcaggctggcattcaagcacatagctcatgagatgcatccggagttctacaagaactgctga

SEQ ID NO: 105163 - DNA, 80 bp, synthetic construct
  source 1..80: mol_type = other DNA
tggtctggagatttgacagtagcctggcatttaaacacagagctaaagagctgcatccggagtactacaaagactgctga

SEQ ID NO: 105164 - DNA, 80 bp, synthetic construct
  source 1..80: mol_type = other DNA
tggtctggagatttgacagccacctggcattaatacacaaagctaaagtgctgcatccggagttttacaaagactgctga

SEQ ID NO: 105165 - DNA, 80 bp, synthetic construct
  source 1..80: mol_type = other DNA
tggtctggagatttgacaggagcctggcagcaacacacaaagctcgagagatgcatccggagtactacaaagactgctga

SEQ ID NO: 105166 - DNA, 80 bp, synthetic construct
  source 1..80: mol_type = other DNA
tggtctggagatttgacagtagcttggcaagaagacacatagcccgagagctgcatccggagtactacaaagactgctga

SEQ ID NO: 105167 - DNA, 80 bp, synthetic construct
  source 1..80: mol_type = other DNA
ctatatgccaacatggaatggatgatccagaaagagaagtgttgaagtggcagtttgactctcgcctggcatttaagcac

SEQ ID NO: 105168 - DNA, 80 bp, synthetic construct
  source 1..80: mol_type = other DNA
tggtctggagatttgacagtcgtctggcatttaaacaccaggctcgagagctgcatccggagtattacaaagactgctga

SEQ ID NO: 105169 - DNA, 80 bp, synthetic construct
  source 1..80: mol_type = other DNA
tggtctggagatttgacagtagactggcattaagacacctagctcatgagaaacatccggagttctacaaagactgctga

SEQ ID NO: 105170 - DNA, 80 bp, synthetic construct
  source 1..80: mol_type = other DNA
tgctggtctggagatttgacagtagcctggcccgaaagcatatagctcgagagctgcatccggagttctacaaagactga

SEQ ID NO: 105171 - DNA, 80 bp, synthetic construct
  source 1..80: mol_type = other DNA
tgctggtatggagatttgacagtagcctagcacggagacacatagcccgagagatacatccggagtattacaagaactaa

SEQ ID NO: 105172 - DNA, 80 bp, synthetic construct
  source 1..80: mol_type = other DNA
tggtatggagatttgacagtaggctggcatttgaacacacagctcgaaggatgcatccagagtactacaaagactgctga

SEQ ID NO: 105173 - DNA, 80 bp, synthetic construct
  source 1..80: mol_type = other DNA
agcagaaataaaaaactgctcgtttcagtccaccacaaaactaagaggttggacaaagaccgtctattcacctttttatg

SEQ ID NO: 105174 - DNA, 80 bp, synthetic construct
  source 1..80: mol_type = other DNA
tggtctggagatttgacagtcggctggcatttgagcacaaagctcgggagctgcatccggagttctacaaagactgttaa

SEQ ID NO: 105175 - DNA, 80 bp, synthetic construct
  source 1..80: mol_type = other DNA
atgtgctagtctggagatttgacagtcacctggcattcagacatgtagcgagagagctgcatccggagtactacaaataa

SEQ ID NO: 105176 - DNA, 80 bp, synthetic construct
  source 1..80: mol_type = other DNA
atagtatgctggcattaaaacacagagctcaagagatgcacccagaattcttcagccaagatcgccacagaagttgctga

SEQ ID NO: 105177 - DNA, 80 bp, synthetic construct
  source 1..80: mol_type = other DNA
ttgctgatgctacgaagtggtcacctggagacaattctgcaaagttccgtaggtttacatctatgttacataatggtctt

SEQ ID NO: 105178 - DNA, 80 bp, synthetic construct
  source 1..80: mol_type = other DNA
taagaaggtatattaaccaaatggaagagcatgacccccatgtgaaggacttccttgcattttttccagatggtcattca

SEQ ID NO: 105179 - DNA, 80 bp, synthetic construct
  source 1..80: mol_type = other DNA
ggggaggtacatggcaattggctgcaaggtaatttaaacaaatgttcatctttatttgctgtagggatgtccctcttatt

SEQ ID NO: 105180 - DNA, 80 bp, synthetic construct
  source 1..80: mol_type = other DNA
atttacgaaaacaacagtctggtaaatcagacatatgtcaatatcagcaacaacaattttgttgctgaacgaacagtaat

SEQ ID NO: 105181 - DNA, 80 bp, synthetic construct
  source 1..80: mol_type = other DNA
atttacgaaaacaacactctgataaaccagacatatcttaacatcagcaacaacaattttgttgctggacagacaacatt

SEQ ID NO: 105182 - DNA, 80 bp, synthetic construct
  source 1..80: mol_type = other DNA
atcaacccagctactcatgcgggaaaacaaatagtgaagcgtattcttgaagaagaatatgatgaagcacttaaaatgac

SEQ ID NO: 105183 - DNA, 80 bp, synthetic construct
  source 1..80: mol_type = other DNA
agcgaaagcaggggataattatatcaaccaagatgaaaataaaactatttgtattattttgcacattcaatgtactgaaa

SEQ ID NO: 105184 - DNA, 80 bp, synthetic construct
  source 1..80: mol_type = other DNA
gaaaagagttcaataatctggagaaaaggattgagaatttgaataagaaagttgatgatgggtttgttgatgtatggaca

SEQ ID NO: 105185 - DNA, 80 bp, synthetic construct
  source 1..80: mol_type = other DNA
agcgaaagcaggggtgaagatgaatccaaatcaaaagataataacaattggttctgtttccctcactattgcaggaatgt

SEQ ID NO: 105186 - DNA, 80 bp, synthetic construct
  source 1..80: mol_type = other DNA
aatattcgttaaggaaggaaagatcgtgcatgttagtccgctgtcgggaagtgctcaacatgtagaagaatgttcctgtt

SEQ ID NO: 105187 - DNA, 80 bp, synthetic construct
  source 1..80: mol_type = other DNA
aaatgaatccaaatcaaaagataattgccattggatcagtctgtatggtagttgggatagtcagcttaatgttgcaggtt

SEQ ID NO: 105188 - DNA, 80 bp, synthetic construct
  source 1..80: mol_type = other DNA
agcaaaagcaggggtttattctgtcaaaatggagaaaatagtgcttctttttgcagcaaccagccttgttaaaagcgatc

SEQ ID NO: 105189 - DNA, 80 bp, synthetic construct
  source 1..80: mol_type = other DNA
agcaaaagcaggggatacttaaatcaaccaagatggaaataaaactgctcgtgttattttgtgccttcaccgcactgaaa

SEQ ID NO: 105190 - DNA, 80 bp, synthetic construct
  source 1..80: mol_type = other DNA
cacacagattgcaattgatggaatcagcaataaagtgaactcgataattgaaaagatgaacactcaatttacttcagtgg

SEQ ID NO: 105191 - DNA, 80 bp, synthetic construct
  source 1..80: mol_type = other DNA
catcagattgaaaaagaattctcagaggtagaaggaagagttcaagaccttgagaaatatgttgaggacactaaaataga

SEQ ID NO: 105192 - DNA, 80 bp, synthetic construct
  source 1..80: mol_type = other DNA
attggactggagtcaaacaaaacggaacaagttctgcgtgcaaaaggggatctagtagtagtttttttagtagattaaat

SEQ ID NO: 105193 - DNA, 80 bp, synthetic construct
  source 1..80: mol_type = other DNA
caaatatcggatctagacccagaataagggacattcctagcagaataagcatctattggacaatagtaaaaccgggagac

SEQ ID NO: 105194 - DNA, 80 bp, synthetic construct
  source 1..80: mol_type = other DNA
atgacaatagcacggcaacgctgtgccttgggcaccatgcagtaccaaacggaacgatagtgaaaacaatcacaaatgac

SEQ ID NO: 105195 - DNA, 80 bp, synthetic construct
  source 1..80: mol_type = other DNA
ggaaattagctcaatagcaggactgatagtagcgctaatctcagcaatagtagtgtggactatagtagctatagaatata

SEQ ID NO: 105196 - DNA, 80 bp, synthetic construct
  source 1..80: mol_type = other DNA
caaaagattggacatctagaattgaagaatggcttggcgcaccctgcaagttcatggcggaatctcccattgccgggagt

SEQ ID NO: 105197 - DNA, 80 bp, synthetic construct
  source 1..80: mol_type = other DNA
gggccaactcataaggcaagaatattagcagaagcaatggcctcagcccaccaagatttaaaaggaggctacacagcagt

SEQ ID NO: 105198 - DNA, 80 bp, synthetic construct
  source 1..80: mol_type = other DNA
cgcaacgggctcggcttagcggagtgcacccgctaagaggcgagaggaactcacaggagggtgagtacattgctggcggt

SEQ ID NO: 105199 - DNA, 80 bp, synthetic construct
  source 1..80: mol_type = other DNA
ccccaccaatggaggaggtagtgaaggggcaggagaatcagaatcagaaccagaatcagaaacagaatcagggaggagac

SEQ ID NO: 105200 - DNA, 80 bp, synthetic construct
  source 1..80: mol_type = other DNA
caggacgagatctatccgtttgcttccctcaaatccctctttgggacagaccaatagtcacagcaaaggtagggggacat

SEQ ID NO: 105201 - DNA, 80 bp, synthetic construct
  source 1..80: mol_type = other DNA
gctgaattaatggcagtattactagcattacaagactcccaagagagggtgaacatagtaacagattcacagtatgtatt

SEQ ID NO: 105202 - DNA, 80 bp, synthetic construct
  source 1..80: mol_type = other DNA
gggcatcatatcctctcaacctacacagagtgactcccctatagtgcagcagattatagaagaattgacaaaaaaggagc

SEQ ID NO: 105203 - DNA, 80 bp, synthetic construct
  source 1..80: mol_type = other DNA
caatagcagtactctggtgcgttcataacaggtataaagttgaagatacacagcaggcagtacagaaattacaggaggtt

SEQ ID NO: 105204 - DNA, 80 bp, synthetic construct
  source 1..80: mol_type = other DNA
atgaaaaacaggaagtctgcagatgccgcgggggacaacactagctcaaggcagacaagtcaaaattacccagtagtaac

SEQ ID NO: 105205 - DNA, 80 bp, synthetic construct
  source 1..80: mol_type = other DNA
ctctcgttacagaccctctcccgacaccagccggaagcagaaacgccaggaggaacaggagaaggaggtggagacgaaga

SEQ ID NO: 105206 - DNA, 80 bp, synthetic construct
  source 1..80: mol_type = other DNA
caggcacaggtggaggcccttgcagcaaggattcttgcaactgttgtacaaggacatcaggacaatcatcttgtggagtt

SEQ ID NO: 105207 - DNA, 80 bp, synthetic construct
  source 1..80: mol_type = other DNA
accacctcttgagcaacttagcatcagggatccggaaagtgaccagttacctgggactgggactgcagactctagggcag

SEQ ID NO: 105208 - DNA, 80 bp, synthetic construct
  source 1..80: mol_type = other DNA
agaacaattgaagcttgcagacaaacaaaagctgtgattcaatattggatacaagaattgcaaactagtgctataagctt

SEQ ID NO: 105209 - DNA, 80 bp, synthetic construct
  source 1..80: mol_type = other DNA
gctagatacccttgcagtagcagttggcaattggactgacaacatcatagaaggaatacaaagaataggaaggggaattc

SEQ ID NO: 105210 - DNA, 80 bp, synthetic construct
  source 1..80: mol_type = other DNA
caatatgctactaaatgccataggaggacaccagggagctttacaagtattgaaggaagtcatcaatgaggaagcatcag

SEQ ID NO: 105211 - DNA, 80 bp, synthetic construct
  source 1..80: mol_type = other DNA
ttaacattccaagaagaattagacaaggctttgaacgcagcttattgtaacatggggaatgcatggagtagaagtagatt

SEQ ID NO: 105212 - DNA, 80 bp, synthetic construct
  source 1..80: mol_type = other DNA
tgcaggatggtcagcagtaagggatagaatgagaagaactccccctaatcctgaaccatgtgcacctggggtaggagagg

SEQ ID NO: 105213 - DNA, 80 bp, synthetic construct
  source 1..80: mol_type = other DNA
tatcccaacagctagcagcaagaggagggataccaagttctcagactcctcaaaacaatgcatcccttgcattcttagaa

SEQ ID NO: 105214 - DNA, 80 bp, synthetic construct
  source 1..80: mol_type = other DNA
tactacatccagcttgtgatcatggctttgaggatgacgagggagaaatactgcaatggaggtttgactcttcattggtc

SEQ ID NO: 105215 - DNA, 80 bp, synthetic construct
  source 1..80: mol_type = other DNA
cgcacccatgttgctttaataactcaccctcacctcttcaacaaagactaagattgctgacactgcgggactttccacca

SEQ ID NO: 105216 - DNA, 80 bp, synthetic construct
  source 1..80: mol_type = other DNA
gagcctgcgcagtagagactgctgatacagcggggactttccagtgtgggagggataagggcggttcggggagtggctaa

SEQ ID NO: 105217 - DNA, 80 bp, synthetic construct
  source 1..80: mol_type = other DNA
ggaacaactagcaaccagcaagaacagatccactggatcactagggctaatggccccgttccagttggagatatctatag

SEQ ID NO: 105218 - DNA, 80 bp, synthetic construct
  source 1..80: mol_type = other DNA
caaattgcagacgaataggcaagtcatagttgaaaaaagtgataggtccggttattctggcatcttctctgttgaaagca

SEQ ID NO: 105219 - DNA, 80 bp, synthetic construct
  source 1..80: mol_type = other DNA
gttggtgatacacccagaataaatgataaatccagcagtagcaattgtctgaaccctaacaacgagaaaggggagcatgg

SEQ ID NO: 105220 - DNA, 80 bp, synthetic construct
  source 1..80: mol_type = other DNA
agaagaacaagacaaggcttaaaaaaggctttactataagataagtggcaaatagtcaaaacgtctaagtagatggcctg

SEQ ID NO: 105221 - DNA, 80 bp, synthetic construct
  source 1..80: mol_type = other DNA
ttcttctactgtaatacaacacagctgtttaatagtgcttggctgctcaatagtactaaaaatacttggcataataataa

SEQ ID NO: 105222 - DNA, 80 bp, synthetic construct
  source 1..80: mol_type = other DNA
caccttacttaaaaaatcgcaaatccaacaaaaaaaaaataaacaagacttattaacattaaataagtaggcaagtttat

SEQ ID NO: 105223 - DNA, 80 bp, synthetic construct
  source 1..80: mol_type = other DNA
atagtaaaaaaaacttgtaaaagtatccgcaacgtacctaaaaaaataagacagagcttaaaaaaggctttactataaaa

SEQ ID NO: 105224 - DNA, 80 bp, synthetic construct
  source 1..80: mol_type = other DNA
taagtgacaaatagtcaaaacgtctaagtaaatagcctgctataaaaaaaaaaatgaggcgagctgagccagcagcaaaa

SEQ ID NO: 105225 - DNA, 80 bp, synthetic construct
  source 1..80: mol_type = other DNA
gaggtaaaagcagcatctcgagacttagaaaaatataaagcactcaccagtaataatacaccagagaataatactgcttg

SEQ ID NO: 105226 - DNA, 80 bp, synthetic construct
  source 1..80: mol_type = other DNA
ttttatgcaacaagaacaataacagaaaatacaagacgagcatattgtaacattagtgcagaaaaataaaataacacttt

SEQ ID NO: 105227 - DNA, 80 bp, synthetic construct
  source 1..80: mol_type = other DNA
atccgcaacatacctaaaaaaataagacaaagcttagaaaaagctttactataaaataagtggcaaatagtcaaaacgtc

SEQ ID NO: 105228 - DNA, 80 bp, synthetic construct
  source 1..80: mol_type = other DNA
taagtagatagcctgctgtaaaaaaaagaataagacgagctaagccagcagcaaaaaaagtaagagcagcatctcaaaac

SEQ ID NO: 105229 - DNA, 80 bp, synthetic construct
  source 1..80: mol_type = other DNA
ttagaaaaatatagagcactcaccagtaataatacaccaaagaataatgctgcttgtgcctaaatagaagcacaagaaga

SEQ ID NO: 105230 - DNA, 80 bp, synthetic construct
  source 1..80: mol_type = other DNA
gaaattacaatgcacagttttaattgtaaaaaagaatttttttactataatacaacaaagctgtttaatagtatttagaa

SEQ ID NO: 105231 - DNA, 80 bp, synthetic construct
  source 1..80: mol_type = other DNA
ccttcagaccaaaaagaaaagatataaaagataattaaagaagtaaattgtacaaatataaagtaataagaattaaacca

SEQ ID NO: 105232 - DNA, 80 bp, synthetic construct
  source 1..80: mol_type = other DNA
agagacagatccagaagattggcaagtaaattattgacacttatctagatcaacctacagagcctgtgcctcttcagcta

SEQ ID NO: 105233 - DNA, 80 bp, synthetic construct
  source 1..80: mol_type = other DNA
ccaccgcttaaaagacttactcttgattatgacaaaaattataaaacttctaagacgcagaaagtaagaactcctgaaat

SEQ ID NO: 105234 - DNA, 80 bp, synthetic construct
  source 1..80: mol_type = other DNA
attagtaaagtctcctgcagtattaaggtcaagaactaaagaatagtgctgttagcttgctaaacgccacagccatagca

SEQ ID NO: 105235 - DNA, 80 bp, synthetic construct
  source 1..80: mol_type = other DNA
gtagctaagaagacagataaagttataaagatattacaaaaagctaataaagctgttatccacatacctgtaagaataag

SEQ ID NO: 105236 - DNA, 80 bp, synthetic construct
  source 1..80: mol_type = other DNA
gatattcttaatctgtagatctaccacacacaagagtacttccctgattagcaaaactacacaccaaagccaaagaccag

SEQ ID NO: 105237 - DNA, 80 bp, synthetic construct
  source 1..80: mol_type = other DNA
taccagtaaatccagataaagtaaaaaaagccaatgaaaaaaagaccaacagcctgttacaccctataagcctgcataga

SEQ ID NO: 105238 - DNA, 80 bp, synthetic construct
  source 1..80: mol_type = other DNA
ataaatgacccagaaaaagaagtgctaaagtaaagatttaatagccgcctggcatttcaccacgtcgcccaagagctaca

SEQ ID NO: 105239 - DNA, 80 bp, synthetic construct
  source 1..80: mol_type = other DNA
tccaaagtactataagaactgctaacaccgaaagatctacaaaagactttccgctaaagactttccaaaaaggcgtagca

SEQ ID NO: 105240 - DNA, 80 bp, synthetic construct
  source 1..80: mol_type = other DNA
tggtaactagagatccctcagacccttttagtcagtgtggaaaatctctagcagtggcgccccgtaaaagtagtagaaga

SEQ ID NO: 105241 - DNA, 80 bp, synthetic construct
  source 1..80: mol_type = other DNA
tggtaactagagatccctcagacccttttagtcagtgtggaaaatctctagcagtggcgcccgaacagggacttgaaagc

SEQ ID NO: 105242 - DNA, 80 bp, synthetic construct
  source 1..80: mol_type = other DNA
tggtaactagagatccctcagacacctttggtcagggtggaaaatctctagcagtggcgcccgaacagggaagagacacc

SEQ ID NO: 105243 - DNA, 80 bp, synthetic construct
  source 1..80: mol_type = other DNA
ttagcaatggaacactggagaaaggagaaatgataaattgctctttccaaatcacttcaggcatacaagatagaacacag

SEQ ID NO: 105244 - DNA, 80 bp, synthetic construct
  source 1..80: mol_type = other DNA
cagtgctaataatatcactagtagcaatggaacactggagaaaggagaagaagaaatgacaaactgctctttcaatatct

SEQ ID NO: 105245 - DNA, 80 bp, synthetic construct
  source 1..80: mol_type = other DNA
gaccaaaagaattcggatggccatcaattagtgtcgaattatttaaaaacgaccttgtaagtggaggtcgctagatggtc

SEQ ID NO: 105246 - DNA, 80 bp, synthetic construct
  source 1..80: mol_type = other DNA
atgcactgaaatagttgtggcaatgctactatttgctatccatactgtccaaaaaagtaccttgtttctgatttgttgtc

SEQ ID NO: 105247 - DNA, 80 bp, synthetic construct
  source 1..80: mol_type = other DNA
tgatggctggtctatctttatggatgtgctccaatgggtcgttacagtgcagaatttgcatttagattcgctagatggtc

SEQ ID NO: 105248 - DNA, 80 bp, synthetic construct
  source 1..80: mol_type = other DNA
ctccaatgggtcgttacagtgcagaatttgcatttagattcgctagatggtcgtgtggagatcgccagatggtcgtctgg

SEQ ID NO: 105249 - DNA, 80 bp, synthetic construct
  source 1..80: mol_type = other DNA
ggccaaatcatgaaacatcactaggggtgagcgcagcttgttcataccagggagcgccctcctttttcagaaatgtggtg

SEQ ID NO: 105250 - DNA, 80 bp, synthetic construct
  source 1..80: mol_type = other DNA
taatactaatcgggaagatctcttgatactgtgggggattcatcattccaacaatgcagaagagcagacaaatctctaca

SEQ ID NO: 105251 - DNA, 80 bp, synthetic construct
  source 1..80: mol_type = other DNA
aaaacccaaccacctacatttcagttggaacatcaactttaaaccagaggttggcaccaaaaatagttactagatcccaa

SEQ ID NO: 105252 - DNA, 80 bp, synthetic construct
  source 1..80: mol_type = other DNA
acctaaaccagcagcagaaaaagtaagagcagcatctaaagacctagaaaaacataaggcaatcacaagtagcaacacag

SEQ ID NO: 105253 - DNA, 80 bp, synthetic construct
  source 1..80: mol_type = other DNA
gattcaggaactaaagaatagtgctattagtttgctcaataccacagcaatagtagtaactaaaagaacagataaaatta

SEQ ID NO: 105254 - DNA, 80 bp, synthetic construct
  source 1..80: mol_type = other DNA
gtaaatggcctactatagagaaaaaaataaaaagaacaagacctaagccagcagcagaagaggtaaaagcagcatctaag

SEQ ID NO: 105255 - DNA, 80 bp, synthetic construct
  source 1..80: mol_type = other DNA
aaactagcatttgaacacaaggccaaagtactgtatccgcaattctacaaagactgctgacaccgagtttctacaaagga

SEQ ID NO: 105256 - DNA, 80 bp, synthetic construct
  source 1..80: mol_type = other DNA
ctttccgctaaagactttccaaaaagaagaacagaagcggaacaggggcagaaccaggagtggctaaccctcagatgctg

SEQ ID NO: 105257 - DNA, 80 bp, synthetic construct
  source 1..80: mol_type = other DNA
aaaataacataacctaaataaaataaaaaaaaaaaattaacaattacacagggttaatatacagcttaatcaaaaaatcg

SEQ ID NO: 105258 - DNA, 80 bp, synthetic construct
  source 1..80: mol_type = other DNA
aaagacaaatccattcaattggtaaacgaattcttagcacttttctaaaacaatctaaaaaacctgtgcctcttcagcta

SEQ ID NO: 105259 - DNA, 80 bp, synthetic construct
  source 1..80: mol_type = other DNA
ccaccgcttaaaaaacttaatcttaattgcaacaagaattgtaaaacttctaaaacgcagggagtggaaaaccatcaagt

SEQ ID NO: 105260 - DNA, 80 bp, synthetic construct
  source 1..80: mol_type = other DNA
atctgtgaaacctcctgcaatattgaattcaggaactaaaaaatagtgctatcagtttgtttaacaccacagcaatagta

SEQ ID NO: 105261 - DNA, 80 bp, synthetic construct
  source 1..80: mol_type = other DNA
gtagctaagaaaacagataaagttataaaaatagtacaaaaaactgttaaaactgttcttaacatacccagaaaagtaaa

SEQ ID NO: 105262 - DNA, 80 bp, synthetic construct
  source 1..80: mol_type = other DNA
aaattagcatttaaacataaggcccaaaagaagcatccaaagttctacaaaaactgctaacaccagactgctgacaccga

SEQ ID NO: 105263 - DNA, 80 bp, synthetic construct
  source 1..80: mol_type = other DNA
agaacagtcccaagcaataatacacctagtgccagcagtgctaggctaaaaaaagaagatgaagaagtaagttttccagt

SEQ ID NO: 105264 - DNA, 80 bp, synthetic construct
  source 1..80: mol_type = other DNA
ccgcatctcaagacctagaaagacataagacaatcacaagcagcaatacagcacagaccaatcctgactgtgcctagcta

SEQ ID NO: 105265 - DNA, 80 bp, synthetic construct
  source 1..80: mol_type = other DNA
gagctttctacaaaggactttccgctaagactttccagagaggcgtaacaagggcaggactaagagtggctaaccctcag

SEQ ID NO: 105266 - DNA, 80 bp, synthetic construct
  source 1..80: mol_type = other DNA
ttccagagaggcgtaacaagggcaggactaagagtggctaaccctcagatgtaagcctcaataaagcttgccttgagtgc

SEQ ID NO: 105267 - DNA, 80 bp, synthetic construct
  source 1..80: mol_type = other DNA
gatactgcatccggagttttataagaactgatgacaccagagactgctgacaatgaattttctacagaagactttctgct

SEQ ID NO: 105268 - DNA, 80 bp, synthetic construct
  source 1..80: mol_type = other DNA
acagattatcagcacttatctaagacaatctaaagaacctgtgcctcttcagctaccaccacttaaaagacttagcctta

SEQ ID NO: 105269 - DNA, 80 bp, synthetic construct
  source 1..80: mol_type = other DNA
attgcagcgaagactgtagaacttctaagacgcaaaaggtaagaagccatcaaatatctctagaacctcctgcagtatta

SEQ ID NO: 105270 - DNA, 80 bp, synthetic construct
  source 1..80: mol_type = other DNA
ccctgccgcccctagagcagtcccaaacaataatacacctagtgtcagcggtgctaagctagaagaagaagatgaagaaa

SEQ ID NO: 105271 - DNA, 80 bp, synthetic construct
  source 1..80: mol_type = other DNA
aagcaatcaaatacctgtgaaacctcctaaaatattaaattcaggagttaaaaaatagtgctattagcttatttgatact

SEQ ID NO: 105272 - DNA, 80 bp, synthetic construct
  source 1..80: mol_type = other DNA
aataccgtagcaatagcaatagctggctagacagatagaattgtaaaaataggacaaaaatttagtaaggctattatcca

SEQ ID NO: 105273 - DNA, 80 bp, synthetic construct
  source 1..80: mol_type = other DNA
agtatctgtagaatcttctgacatattaagttcaggaactgaaacttagtgctgttaacttgcttgataccttagcaata

SEQ ID NO: 105274 - DNA, 80 bp, synthetic construct
  source 1..80: mol_type = other DNA
agactcgcctatgaacacaaggcccgtgtgctgcatccagattactacaagaactgctgacaccgagatttctacaaagg

SEQ ID NO: 105275 - DNA, 80 bp, synthetic construct
  source 1..80: mol_type = other DNA
aagcagaaaacagtagcaataaaagtaataggaatacagataaattggcaaaactagtaaaaataagaaactataatctt

SEQ ID NO: 105276 - DNA, 80 bp, synthetic construct
  source 1..80: mol_type = other DNA
aagaataatattaatgtgtagtgctgcaaaaaacttgtaagttacggtctactataaagtacctgtgtaaaaaaaagcaa

SEQ ID NO: 105277 - DNA, 80 bp, synthetic construct
  source 1..80: mol_type = other DNA
attaaactaaaactttaaaaggggtagccacccaattaaaaaagcactgaaacacaacaacaataatctttaataaaccc

SEQ ID NO: 105278 - DNA, 80 bp, synthetic construct
  source 1..80: mol_type = other DNA
atacaggtaataaaaccttcaaacctgaaaaaaaaaatataaaaaacaattaaaaaagtaaattatataagtataaagta

SEQ ID NO: 105279 - DNA, 80 bp, synthetic construct
  source 1..80: mol_type = other DNA
aaaaattcataattacacacaaataatatatagtttaattaaaaaatcgcaaaaccagcagaaaaaaaataaacagaatt

SEQ ID NO: 105280 - DNA, 80 bp, synthetic construct
  source 1..80: mol_type = other DNA
ggcaaatcaattcaattagtaagcaaattcttagcacttgcctaaaacaatctacagaacctgtgcctcttcagctacca

SEQ ID NO: 105281 - DNA, 80 bp, synthetic construct
  source 1..80: mol_type = other DNA
ccaattaaaaaacttcaccttaattgcagcaagagctgtaaaactcctagaacacagcagtctcaaaaaactaaaactag

SEQ ID NO: 105282 - DNA, 80 bp, synthetic construct
  source 1..80: mol_type = other DNA
agtaaaagggcctcaagtatctgtaaaatcttctggcgtattagaggcagaagctaaaacttagtgctattaacttgttt

SEQ ID NO: 105283 - DNA, 80 bp, synthetic construct
  source 1..80: mol_type = other DNA
aataccttagcaatagtaatagctaagtaaacaaataaagttataaaaataaaacaaaaactttgtaaagctattcttca

SEQ ID NO: 105284 - DNA, 80 bp, synthetic construct
  source 1..80: mol_type = other DNA
catacctaaaaaaatcaaacaaaaagcaaaaagagctttaatataacataaaagccaagtggtcaaaaagcagcatagta

SEQ ID NO: 105285 - DNA, 80 bp, synthetic construct
  source 1..80: mol_type = other DNA
agctgagcaagtgctcgtgatgactcacaaagggcgcgcaggacgatacaaggtagagccataccacggtagagttatcg

SEQ ID NO: 105286 - DNA, 80 bp, synthetic construct
  source 1..80: mol_type = other DNA
gatagtagaccttccaccccatctgcaagtggttcacacacgtctgtggacttaatcacgtttgacagcgttgcagagat

SEQ ID NO: 105287 - DNA, 80 bp, synthetic construct
  source 1..80: mol_type = other DNA
tctactgcaggggataggctcatacctctctgcagaaccgcaaccagttgaatgctataaagtcacctatcctgctccca

SEQ ID NO: 105288 - DNA, 80 bp, synthetic construct
  source 1..80: mol_type = other DNA
ggtgaatggttacgcgtgcgtcgtgggtggacgagtgtttaaaccgctgcacgtagaaggcagaatagacaatgagcaac

SEQ ID NO: 105289 - DNA, 80 bp, synthetic construct
  source 1..80: mol_type = other DNA
tttggcctacatgagtttcatgaacggcaaaacgcagaaatcaataaagatcgacaacctgcatgtgcgcacctcagccc

SEQ ID NO: 105290 - DNA, 80 bp, synthetic construct
  source 1..80: mol_type = other DNA
cataattgccgcatatacaattacactacaggtaatataccgccccttataaacactacaggcagcgcataatgctgtct

SEQ ID NO: 105291 - DNA, 80 bp, synthetic construct
  source 1..80: mol_type = other DNA
agcacctgcgtatagagtggtgcgcggcgacataacaaagagcaatgatgaggttattgttaacgcggcgaacaacaaag

SEQ ID NO: 105292 - DNA, 80 bp, synthetic construct
  source 1..80: mol_type = other DNA
agaccagaaattgtctgaagtgtacatggacattgccagaattatcaacaacgagaggtttactaaagtctccattccgt

SEQ ID NO: 105293 - DNA, 80 bp, synthetic construct
  source 1..80: mol_type = other DNA
caatgactgcagagcgagtttacagattacgtccggcaaagaatgaacaattcgcagtttgttcgtcctttcagttaccg

SEQ ID NO: 105294 - DNA, 80 bp, synthetic construct
  source 1..80: mol_type = other DNA
cgctactgggttcgatgtgcgtacctcctcattgttgagtctagagcagcctacctttccgacaatggttgtcgaagcag

SEQ ID NO: 105295 - DNA, 80 bp, synthetic construct
  source 1..80: mol_type = other DNA
ggtatacatcgagagcttgtgcgcaggttgaacgcagtgctgctaccgaacatccacactttgtttgacatgtctgcaga

SEQ ID NO: 105296 - DNA, 80 bp, synthetic construct
  source 1..80: mol_type = other DNA
ccacttccccctgcgcagcatttatcggcgacgacaacatcgtgagaggggttacatctgacgcgctgatggccgagcgg

SEQ ID NO: 105297 - DNA, 80 bp, synthetic construct
  source 1..80: mol_type = other DNA
aaaatggaaacaataccactgataactatactactggtaataacaacaagcaatgcagacaagatctgcatcggccacca

SEQ ID NO: 105298 - DNA, 80 bp, synthetic construct
  source 1..80: mol_type = other DNA
cccaagtacattggagtcaagagtctcaaactggcagtcggactgagaaatgtgcctgctaggtcaactagaggactgtt

SEQ ID NO: 105299 - DNA, 80 bp, synthetic construct
  source 1..80: mol_type = other DNA
tgatccctgggttttgctcaatgcatcttggttcaactccttcctcacacatgcactgagatagttgtagcaatgctact

SEQ ID NO: 105300 - DNA, 80 bp, synthetic construct
  source 1..80: mol_type = other DNA
tgtaaacaatgctgtagtaatgccagcccatggtccggccaaaagtattctaaacacaagccaaaggggaatccttgagg

SEQ ID NO: 105301 - DNA, 80 bp, synthetic construct
  source 1..80: mol_type = other DNA
tctatgggattcctttcgtcaatccgaaagaggcgaagagacaattgaagaaagcaggtactgatccaaaatggaaaact

SEQ ID NO: 105302 - DNA, 80 bp, synthetic construct
  source 1..80: mol_type = other DNA
tacatagctgaagcgcacactactgaactccagttaccgtctattaattcgtatttcgcgtacttcttgttaacaaaaaa

SEQ ID NO: 105303 - DNA, 80 bp, synthetic construct
  source 1..80: mol_type = other DNA
actccagttaccgtctattaattcgtatttcgcgtacttcttgttaacaaaaaatcaatacaagtctattcacactgatt

SEQ ID NO: 105304 - DNA, 80 bp, synthetic construct
  source 1..80: mol_type = other DNA
ggattctcgtcctcagaaaatctggatggcgccgagtctcactgaatctgacatggattaccacaagatcttgacagcag

SEQ ID NO: 105305 - DNA, 80 bp, synthetic construct
  source 1..80: mol_type = other DNA
gtaaaacattggaaatagttaaaagacaaattgctcggaatcacaaaattccgagtatggtcttcacactcgaagatttc

SEQ ID NO: 105306 - DNA, 80 bp, synthetic construct
  source 1..80: mol_type = other DNA
gttggggactggcgacagacagccggctacaacctggaccaagtccttgaacagggaggtgtgtccagtttgtttcagaa

SEQ ID NO: 105307 - DNA, 80 bp, synthetic construct
  source 1..80: mol_type = other DNA
gagtgttttttcattaaccttcatcttgtaaacgttgagcaaaattgttaaaaatatggcccagtccaagcacggcctga

SEQ ID NO: 105308 - DNA, 80 bp, synthetic construct
  source 1..80: mol_type = other DNA
ccaaggagatgaccatgaagtaccgcatggagggctgcgtggacggccacaagttcgtgatcaccggcgagggcatcggc

SEQ ID NO: 105309 - DNA, 80 bp, synthetic construct
  source 1..80: mol_type = other DNA
taccccttcaagggcaagcaggccatcaacctgtgcgtggtggagggcggccccttgcccttcgccgaggacatcttgtc

SEQ ID NO: 105310 - DNA, 80 bp, synthetic construct
  source 1..80: mol_type = other DNA
cgccgccttcatgtacggcaaccgcgtgttcaccgagtacccccaggacatcgtcgactacttcaagaactcctgccccg

SEQ ID NO: 105311 - DNA, 80 bp, synthetic construct
  source 1..80: mol_type = other DNA
ccggctacacctgggaccgctccttcctgttcgaggacggcgccgtgtgcatctgcaacgccgacatcaccgtgagcgtg

SEQ ID NO: 105312 - DNA, 80 bp, synthetic construct
  source 1..80: mol_type = other DNA
gaggagaactgcatgtaccacgagtccaagttctacggcgtgaacttccccgccgacggccccgtgatgaagaagatgac

SEQ ID NO: 105313 - DNA, 80 bp, synthetic construct
  source 1..80: mol_type = other DNA
cgacaactgggagccctcctgcgagaagatcatccccgtgcccaagcagggcatcttgaagggcgacgtgagcatgtacc

SEQ ID NO: 105314 - DNA, 80 bp, synthetic construct
  source 1..80: mol_type = other DNA
tgctgctgaaggacggtggccgcttgcgctgccagttcgacaccgtgtacaaggccaagtccgtgccccgcaagatgccc

SEQ ID NO: 105315 - DNA, 80 bp, synthetic construct
  source 1..80: mol_type = other DNA
gactggcacttcatccagcacaagctgacccgcgaggaccgcagcgacgccaagaaccagaagtggcacctgaccgagca

SEQ ID NO: 105316 - DNA, 80 bp, synthetic construct
  source 1..80: mol_type = other DNA
tctcggggtgtccgtaactccgatccaaaggattgtcctgagcggtgaaaatgggctgaagatcgacatccatgtcatca

SEQ ID NO: 105317 - DNA, 80 bp, synthetic construct
  source 1..80: mol_type = other DNA
cgccatcgcctccggctccgccttgcccggaggaagcggagctactaacttcagcctgctgaagcaggctggagacgtgg

SEQ ID NO: 105318 - DNA, 80 bp, synthetic construct
  source 1..80: mol_type = other DNA
aggagaaccctggacctatgaggcgggttatattgcctactgctcctcctgaatatatggaggccatataccctgtcagg

SEQ ID NO: 105319 - DNA, 80 bp, synthetic construct
  source 1..80: mol_type = other DNA
tcccgtatgaaggtctgagcggcgaccaaatgggccagatcgaaaaaatttttaaggtggtgtaccctgtggatgatcat

SEQ ID NO: 105320 - DNA, 80 bp, synthetic construct
  source 1..80: mol_type = other DNA
cactttaaggtgatcctgcactatggcacactggtaatcgacggggttacgccgaacatgatcgactatttcggacggcc

SEQ ID NO: 105321 - DNA, 80 bp, synthetic construct
  source 1..80: mol_type = other DNA
gtatgaaggcatcgccgtgttcgacggcaaaaagatcactgtaacagggaccctgtggaacggcaacaaaattatcgacg

SEQ ID NO: 105322 - DNA, 80 bp, synthetic construct
  source 1..80: mol_type = other DNA
agcgcctgatcaaccccgacggctccctgctgttccgagtaaccatcaacggagtgaccggctggcggctgtgcgaacgc

SEQ ID NO: 105323 - DNA, 80 bp, synthetic construct
  source 1..80: mol_type = other DNA
attctggcggaaggaagcggagctactaacttcagcctgctgaagcaggctggagacgtggaggagaaccctggacctat

SEQ ID NO: 105324 - DNA, 80 bp, synthetic construct
  source 1..80: mol_type = other DNA
cgccatcgcctccggctccgccttgcccatggtcttcacactcgaagatttcgttggggactggcgacagacagccggct

SEQ ID NO: 105325 - DNA, 80 bp, synthetic construct
  source 1..80: mol_type = other DNA
acaacctggaccaagtccttgaacagggaggtgtgtccagtttgtttcagaatctcggggtgtccgtaactccgatccaa

SEQ ID NO: 105326 - DNA, 80 bp, synthetic construct
  source 1..80: mol_type = other DNA
aggattgtcctgagcggtgaaaatgggctgaagatcgacatccatgtcatcatcccgtatgaaggtctgagcggcgacca

SEQ ID NO: 105327 - DNA, 80 bp, synthetic construct
  source 1..80: mol_type = other DNA
aatgggccagatcgaaaaaatttttaaggtggtgtaccctgtggatgatcatcactttaaggtgatcctgcactatggca

SEQ ID NO: 105328 - DNA, 80 bp, synthetic construct
  source 1..80: mol_type = other DNA
cactggtaatcgacggggttacgccgaacatgatcgactatttcggacggccgtatgaaggcatcgccgtgttcgacggc

SEQ ID NO: 105329 - DNA, 80 bp, synthetic construct
  source 1..80: mol_type = other DNA
aaaaagatcactgtaacagggaccctgtggaacggcaacaaaattatcgacgagcgcctgatcaaccccgacggctccct

SEQ ID NO: 105330 - DNA, 80 bp, synthetic construct
  source 1..80: mol_type = other DNA
gctgttccgagtaaccatcaacggagtgaccggctggcggctgtgcgaacgcattctggcggaaggaagcggagctacta

SEQ ID NO: 105331 - DNA, 80 bp, synthetic construct
  source 1..80: mol_type = other DNA
acttcagcctgctgaagcaggctggagacgtggaggagaaccctggacctatgaggcgggttatattgcctactgctcct

SEQ ID NO: 105332 - DNA, 80 bp, synthetic construct
  source 1..80: mol_type = other DNA
gctaagggctttcactgaagagggagcaatcgttggagaaatctcaccattgccttcttttccaggacatactaatgagg

SEQ ID NO: 105333 - DNA, 80 bp, synthetic construct
  source 1..80: mol_type = other DNA
ccccccgggtggaccccccgccgggggcccccccgggaggcaaccacaccaacactactctatatcctcaacttctttgg

SEQ ID NO: 105334 - DNA, 80 bp, synthetic construct
  source 1..80: mol_type = other DNA
gatttactgaaacacaaagcataccctttgaactccacccagtcatctatcaactttaggacttcactcaagatttccat

SEQ ID NO: 105335 - DNA, 80 bp, synthetic construct
  source 1..80: mol_type = other DNA
gacgcgattgggcaccatctttttcaacgtttgaacaagatccaccccagaccattgaaccttcagtttcaacctatcta

SEQ ID NO: 105336 - DNA, 80 bp, synthetic construct
  source 1..80: mol_type = other DNA
atcaacaacaatatcaataggggtgacagatccaagttgttttgtgtccattaagaattccttgatgacctctgtgtcaa

SEQ ID NO: 105337 - DNA, 80 bp, synthetic construct
  source 1..80: mol_type = other DNA
cactctccaacaattcttcgcatgttctgcctttgagtcttaacttcccactgcttgactgtatcatgaccctttccttt

SEQ ID NO: 105338 - DNA, 80 bp, synthetic construct
  source 1..80: mol_type = other DNA
gggcccacttggtaccagatgcatcccacctgggaccccaattctgtaagagctgttggtttgaaaacagaggtttagtg

SEQ ID NO: 105339 - DNA, 80 bp, synthetic construct
  source 1..80: mol_type = other DNA
atatcaacataatccacaggcctctgtcttgttaagatcgaaacaatgtcaacatttgtccattgaactctttgttttaa

SEQ ID NO: 105340 - DNA, 80 bp, synthetic construct
  source 1..80: mol_type = other DNA
aagcagcattctaggctcagtctgaaccagaaaagccagtttctgtctagaaagcttttcgttgtctacaaggtattttg

SEQ ID NO: 105341 - DNA, 80 bp, synthetic construct
  source 1..80: mol_type = other DNA
gaatcaaagtgctcagttaagatgggcaacagacatgccaaatcgacaaaagtcgatgaacatcaaagagctcatctagt

SEQ ID NO: 105342 - DNA, 80 bp, synthetic construct
  source 1..80: mol_type = other DNA
taataaattggctttctatgtccccttgtcttagtttgttcctgcagatttgatactcctcttcaattaaacttttgact

SEQ ID NO: 105343 - DNA, 80 bp, synthetic construct
  source 1..80: mol_type = other DNA
cttcctccatcaccaattgtggtgcctgtattgggtttgggtttgtgccagaatgacttgtgggtcagctggtgatgccc

SEQ ID NO: 105344 - DNA, 80 bp, synthetic construct
  source 1..80: mol_type = other DNA
ccaactgaagccactgaacagaacagggctcacctggtaccagacgcatcccatctgggaccccaattctgcaagagctg

SEQ ID NO: 105345 - DNA, 80 bp, synthetic construct
  source 1..80: mol_type = other DNA
tggttcgaataactctgaacacgttctccccttaagtctaagattgcccccacttgattgaatcatcaccctctgccttg

SEQ ID NO: 105346 - DNA, 80 bp, synthetic construct
  source 1..80: mol_type = other DNA
ttactggggtgtgttaatattaaaaccaggatcattttggtcaatagtttaatggtagccagctgttctgacaactctga

SEQ ID NO: 105347 - DNA, 80 bp, synthetic construct
  source 1..80: mol_type = other DNA
atgtttattattatgcctcgagcaatccaaccggctagcaaggaggattagaacgtcaaagacaagaagaagttttcttc

SEQ ID NO: 105348 - DNA, 80 bp, synthetic construct
  source 1..80: mol_type = other DNA
aggttggacctgatagtgcaagtctccaacagtcaggcaggacacatggactcacagacccagagtacaatgcttgtaca

SEQ ID NO: 105349 - DNA, 80 bp, synthetic construct
  source 1..80: mol_type = other DNA
tgagatctttggcattggcaatgtcttcctccattgcagattataatgcttggaccgaattgaggtttgtgcctgtataa

SEQ ID NO: 105350 - DNA, 80 bp, synthetic construct
  source 1..80: mol_type = other DNA
ggcattggcaatgtcttcctccattgcagattataatgcttggaccgaattgaggtttgtgcctgtataatgtacacgtc

SEQ ID NO: 105351 - DNA, 80 bp, synthetic construct
  source 1..80: mol_type = other DNA
cccccggtgggaccccccgccgggggcccccccgggtggagcagaagcacaacccaacctcactcaatgtccacaacatg

SEQ ID NO: 105352 - DNA, 80 bp, synthetic construct
  source 1..80: mol_type = other DNA
atggaggaaggtattgccaatgccaaagatctcatttcaaaataccttgtggataatgagaagctatcaagacaaaaact

SEQ ID NO: 105353 - DNA, 80 bp, synthetic construct
  source 1..80: mol_type = other DNA
agatatccaacagccccagggccagcctcattcccgatgcatcgcacatggggccccaattctgtaaaagctgttggttt

SEQ ID NO: 105354 - DNA, 80 bp, synthetic construct
  source 1..80: mol_type = other DNA
cactcacatcatccacaacatatttaccctgttggcttattgagccagtgaactcaaggtgaatagagaagctttctctg

SEQ ID NO: 105355 - DNA, 80 bp, synthetic construct
  source 1..80: mol_type = other DNA
aaactcacatcttgactcttgatttgaaatcttatggtttgatttagttttgctgagcctggtggtaaagatcccacaga

SEQ ID NO: 105356 - DNA, 80 bp, synthetic construct
  source 1..80: mol_type = other DNA
ttcgaggaagtcttccaaggattccaatttaacatcaatcagacctgatgcaatcaactggttctggttgaaccttgctg

SEQ ID NO: 105357 - DNA, 80 bp, synthetic construct
  source 1..80: mol_type = other DNA
ccctcaccttctgggattgatgacctgtgagggaaccatgtgaaagaccctaaggtccttgtggttgcaacaaatgatct

SEQ ID NO: 105358 - DNA, 80 bp, synthetic construct
  source 1..80: mol_type = other DNA
aacatacgattcaaagtaaacctgcctcatgaagttgtcaactgcatcactagtactgacaaccctttcctctatcattg

SEQ ID NO: 105359 - DNA, 80 bp, synthetic construct
  source 1..80: mol_type = other DNA
cccgcttccacttaactatatgcgataccaaggacagagcctcacagttcacatctaatgccacgcagaggtccaggaac

SEQ ID NO: 105360 - DNA, 80 bp, synthetic construct
  source 1..80: mol_type = other DNA
tctgcaagatgcctctaccaacaaagctgaaggcatcagccaacccgacagcccccccagtcgagggggccagcaccgca

SEQ ID NO: 105361 - DNA, 80 bp, synthetic construct
  source 1..80: mol_type = other DNA
ttaattcttggtgaccacttcatctttgtagatgctaaatcactcatgaatggcaaaatgtgcttctcgaacatagtagg

SEQ ID NO: 105362 - DNA, 80 bp, synthetic construct
  source 1..80: mol_type = other DNA
atacagtctcctcagagaatggatgatgtgaccaacacccactctgtcttctagtagctttgatgctgtaggtttcagtg

SEQ ID NO: 105363 - DNA, 80 bp, synthetic construct
  source 1..80: mol_type = other DNA
ggaagtaatcacacgggttgtgcttgaaaaatgctagaggtttggatgctttcggttccccaaggacccatgcacccaat

SEQ ID NO: 105364 - DNA, 80 bp, synthetic construct
  source 1..80: mol_type = other DNA
tctatagcagttgataatgaaatgcacatgtaatcccataacagaggcctaaagtaactcagtacagtttcaggtccact

SEQ ID NO: 105365 - DNA, 80 bp, synthetic construct
  source 1..80: mol_type = other DNA
tttaacttcatgaggcactctccagaactgcaccccgcaatcattggtcagcatttcaattccattaatttcagatattg

SEQ ID NO: 105366 - DNA, 80 bp, synthetic construct
  source 1..80: mol_type = other DNA
atgaaaatattgattttatgtataggttctccttgtttggccctctgacgcatttgctgcccagtgtcctacatagtccc

SEQ ID NO: 105367 - DNA, 80 bp, synthetic construct
  source 1..80: mol_type = other DNA
acaaatccagaagcaatagaactctgaaaagcagacttatttatagcctcagaaagtaacttctgtgcacctcttgtaaa

SEQ ID NO: 105368 - DNA, 80 bp, synthetic construct
  source 1..80: mol_type = other DNA
aatatatgatcttttgtcgaagcaccattctcaaaggatggtgagcagccaggttcagccaatagagctccaaatcagcc

SEQ ID NO: 105369 - DNA, 80 bp, synthetic construct
  source 1..80: mol_type = other DNA
tctgagggaggctcaacattaagcatctcacaaagatttttcaaagaactcaagtgctcacctgataagtagttagttgt

SEQ ID NO: 105370 - DNA, 80 bp, synthetic construct
  source 1..80: mol_type = other DNA
gaattcctcatgcagctcaccggtttttaatctattgaacaatcttcttaacatggaccttactttgcgacaagattctg

SEQ ID NO: 105371 - DNA, 80 bp, synthetic construct
  source 1..80: mol_type = other DNA
gcacgagattttcgatctgtctcatcactctataagaacgattaccatcaacccaatctcgtacgtcagtctcacaattc

SEQ ID NO: 105372 - DNA, 80 bp, synthetic construct
  source 1..80: mol_type = other DNA
aggcactccattagcaactgattgatcaatgatggtgtcaattgtctctgccaattgatgaggttctttgcatttgatat

SEQ ID NO: 105373 - DNA, 80 bp, synthetic construct
  source 1..80: mol_type = other DNA
catccggatcttgtgacattagtgctgtgagtgtctggtcaaacattgatatttgatcatcactagatgtgtatgcctca

SEQ ID NO: 105374 - DNA, 80 bp, synthetic construct
  source 1..80: mol_type = other DNA
actgaaccaccacagacacaacttatggcgtaatttataaatctctccgaaattaatgcatagaagtctgatgtattatg

SEQ ID NO: 105375 - DNA, 80 bp, synthetic construct
  source 1..80: mol_type = other DNA
caaaataccctggcccatatcaagaatagaactaatgtgggaaggtacacgaccaacctgaaaatttgaatagaagaagt

SEQ ID NO: 105376 - DNA, 80 bp, synthetic construct
  source 1..80: mol_type = other DNA
cttcagtcacagtttgtgttgagcttttcctcaaccccagctgggcttttatataggacttcatcattgcagacaccaca

SEQ ID NO: 105377 - DNA, 80 bp, synthetic construct
  source 1..80: mol_type = other DNA
ttgaagggaatctcaactaatttgtggatgtgccatgttagtagagttgagagataatcacgcccctttatgtcggactg

SEQ ID NO: 105378 - DNA, 80 bp, synthetic construct
  source 1..80: mol_type = other DNA
taagtcttttgacatgaaaactaagttctgcagaactgcaagaaataagaacgggcacatcatagggccccacttactat

SEQ ID NO: 105379 - DNA, 80 bp, synthetic construct
  source 1..80: mol_type = other DNA
tccatactgtaagaaacgtgtgctaaggacacatttagtttcattgagagaattgcattgtcaaactctttttcattgtt

SEQ ID NO: 105380 - DNA, 80 bp, synthetic construct
  source 1..80: mol_type = other DNA
taaacagcttccggatagttgcaagcttagtgcttcaaaataatcttcaataagtctagtgaacatcttggtcctaagat

SEQ ID NO: 105381 - DNA, 80 bp, synthetic construct
  source 1..80: mol_type = other DNA
ctccgatatacaactctctattgccgccaacctgttctttgtaagacagggagaattttaatctgcccgtatcaggtcct

SEQ ID NO: 105382 - DNA, 80 bp, synthetic construct
  source 1..80: mol_type = other DNA
actgaattgtacgattggggtgattcttgactatagaaacacaaattctttaacattgccacagtacaatttgtcaaaga

SEQ ID NO: 105383 - DNA, 80 bp, synthetic construct
  source 1..80: mol_type = other DNA
caaagccttgctaagtgcttctgagttactctctctttcactaatcctagcatcctctgaaagtttgcctgtgttgaact

SEQ ID NO: 105384 - DNA, 80 bp, synthetic construct
  source 1..80: mol_type = other DNA
tgaagttcatgcacctagatttataatgagaataccttcccataagcctatttccattcattagcaacattattgatttg

SEQ ID NO: 105385 - DNA, 80 bp, synthetic construct
  source 1..80: mol_type = other DNA
aagcattggaaatactctgaatcaagatatgtccttgtagccactgccttagtaagctctccgatgggacaacctgtcat

SEQ ID NO: 105386 - DNA, 80 bp, synthetic construct
  source 1..80: mol_type = other DNA
gggtccacaatagaagtatttctccttcaactcacaattattaaaaatggtgtcacagaaatccttgtagaactcctcag

SEQ ID NO: 105387 - DNA, 80 bp, synthetic construct
  source 1..80: mol_type = other DNA
gtagaatctcacgatcaaagtcttcaaccatatgattggaaagttctcctttaatcagtctgatgtagaatttattggac

SEQ ID NO: 105388 - DNA, 80 bp, synthetic construct
  source 1..80: mol_type = other DNA
acaactctttccagatcatccattgaggggcactcactgtctttagagtgagagggcagttttgatggttccctgtactg

SEQ ID NO: 105389 - DNA, 80 bp, synthetic construct
  source 1..80: mol_type = other DNA
atctataacccttgcaactgtttctttcaactgatcaaagtactctgatgctccaccatcaagtatagcctcgtccaagt

SEQ ID NO: 105390 - DNA, 80 bp, synthetic construct
  source 1..80: mol_type = other DNA
cagcattatcaaggcttgctgattgatcttttgagcccaggactaaattgctcattgcttgttggatcttgtaatcataa

SEQ ID NO: 105391 - DNA, 80 bp, synthetic construct
  source 1..80: mol_type = other DNA
tcctgcttattgaggagatatttgcccttccgtgaaaacacctcagttaattgagtaacagccagtgctgtgagtttgtt

SEQ ID NO: 105392 - DNA, 80 bp, synthetic construct
  source 1..80: mol_type = other DNA
gaagtcataatttagtatcctagaaccatcggtatatttgtttacaacgacactcttgttgcttgctaaatctaaggctg

SEQ ID NO: 105393 - DNA, 80 bp, synthetic construct
  source 1..80: mol_type = other DNA
ttgcacacccgctcgttatgaggggattcttcatctctttctttatctccttctctttaaagagagaaccgttattaaag

SEQ ID NO: 105394 - DNA, 80 bp, synthetic construct
  source 1..80: mol_type = other DNA
gaagaagtgagcagtgacagaaactttttggaaacacctggcctcttataaaccagtttttctgcccctgtgcacccatc

SEQ ID NO: 105395 - DNA, 80 bp, synthetic construct
  source 1..80: mol_type = other DNA
cttgctcaagaatttctttgcattgaagaccatttcatccaactcatcctcagtagctacatcctttggatttacattaa

SEQ ID NO: 105396 - DNA, 80 bp, synthetic construct
  source 1..80: mol_type = other DNA
catgcccaaaatctagcttaggctcaagaaacttttcaaagcacttgatctgatctgtcagcctatccggagtttccttt

SEQ ID NO: 105397 - DNA, 80 bp, synthetic construct
  source 1..80: mol_type = other DNA
gtaataaaatgacacatgtaagacacatttaaaatgaatttgaatctattggtcatcatactcttcacatcctgatgtag

SEQ ID NO: 105398 - DNA, 80 bp, synthetic construct
  source 1..80: mol_type = other DNA
cattatgttcaacagtgccctaactaatctataaagtagaaattcagtctctgtaatcaacttttccttcagtttctgta

SEQ ID NO: 105399 - DNA, 80 bp, synthetic construct
  source 1..80: mol_type = other DNA
ttaattctttatgataaaaatcagaaacataagccattataaaatacctaaggttctgtaagagtttttgactacgctta

SEQ ID NO: 105400 - DNA, 80 bp, synthetic construct
  source 1..80: mol_type = other DNA
cttggatgtgcaaggatcaaagttagaatcatctttgttagagaccttatgttggtcatctgatctgctaactcagtaca

SEQ ID NO: 105401 - DNA, 80 bp, synthetic construct
  source 1..80: mol_type = other DNA
gtcttcaacccagctaaccatgacatccacagtcacttgcagaaccttggctgagaagattgctggaaaatacctcttag

SEQ ID NO: 105402 - DNA, 80 bp, synthetic construct
  source 1..80: mol_type = other DNA
gatctgcataaaatgagcaaacttcaccaaagagattgttgttaattgcatagcatttggaacactcacctgtcttttgg

SEQ ID NO: 105403 - DNA, 80 bp, synthetic construct
  source 1..80: mol_type = other DNA
tacagtagctgaaaattttccttacccagagaaaattcctggctgtaagcttccttgcatctgacaacctggtacctggc

SEQ ID NO: 105404 - DNA, 80 bp, synthetic construct
  source 1..80: mol_type = other DNA
cagcccaaattcattttgcctaatttttacagtggatgaagtcttcatagaatttatcaaggctaaactaagtgttgaca

SEQ ID NO: 105405 - DNA, 80 bp, synthetic construct
  source 1..80: mol_type = other DNA
gcctttctagatcagtggaatccttgaggttaacacaacccaatggataggggaacttctcttcttctgtcctttgataa

SEQ ID NO: 105406 - DNA, 80 bp, synthetic construct
  source 1..80: mol_type = other DNA
ctaattgtgggggtgaccccagagatatcaaggtttaaaacatcatcatagactttgggagtcactatattcatgtcgac

SEQ ID NO: 105407 - DNA, 80 bp, synthetic construct
  source 1..80: mol_type = other DNA
cccataggtatctacactaatgccaacatcagccagtgcagaggtagcctttgcaatggtcttctgaatcactgatctca

SEQ ID NO: 105408 - DNA, 80 bp, synthetic construct
  source 1..80: mol_type = other DNA
gtatctggtttttgtccatgcagagggtgtgggatacttcagaggatttgagaacctctgccttgtatctcttctcgatc

SEQ ID NO: 105409 - DNA, 80 bp, synthetic construct
  source 1..80: mol_type = other DNA
cacttcttcagatccctctttgtggactctagagataccagccgatcattcacactcatgaaacaggaccccaaccaacc

SEQ ID NO: 105410 - DNA, 80 bp, synthetic construct
  source 1..80: mol_type = other DNA
ttttaaatcttcatacttatgttccattagatctcttctacttgcaagaaggattaacacatcaaaaaccaacatcaatt

SEQ ID NO: 105411 - DNA, 80 bp, synthetic construct
  source 1..80: mol_type = other DNA
tccgcctcgtgttcaagatcctcaaagatttaaccttatttaaaaatgatctccaacactgcatctgaccatcaacagtg

SEQ ID NO: 105412 - DNA, 80 bp, synthetic construct
  source 1..80: mol_type = other DNA
cccatgtgcttgtcctcctcatttccaatgccagcatacaagaatctcataattggtgatgatcttttgtattgatatac

SEQ ID NO: 105413 - DNA, 80 bp, synthetic construct
  source 1..80: mol_type = other DNA
caagtggtccattgtgtcctctttgatgatggcctcatcatcatacaaaccattaaacttgagcaacaaatcctcttggt

SEQ ID NO: 105414 - DNA, 80 bp, synthetic construct
  source 1..80: mol_type = other DNA
caacttttacaaactgatcctccaattcgccctgtctcattctgtttctgaagatatgatactcctcttcaatttgggcc

SEQ ID NO: 105415 - DNA, 80 bp, synthetic construct
  source 1..80: mol_type = other DNA
ttcacttcatgagctgatagtttattgttaatgccctggtggcaaagggcaatcatttcttcatagtggtttgcacggtt

SEQ ID NO: 105416 - DNA, 80 bp, synthetic construct
  source 1..80: mol_type = other DNA
gtccgttaatacattaaggctttccacaccagacagtctgccagacgtcatggacagggactcacaaagccttgcatact

SEQ ID NO: 105417 - DNA, 80 bp, synthetic construct
  source 1..80: mol_type = other DNA
cagattcctcaaagagtgaattactttcttgagcatactttaacaaagaaaatagtgtttctctcagcttgtcattaacc

SEQ ID NO: 105418 - DNA, 80 bp, synthetic construct
  source 1..80: mol_type = other DNA
cagtctggtatttgctcattataaaaagatgtccttccatcaataagtgggatgagattgatttccacagacttcaaatc

SEQ ID NO: 105419 - DNA, 80 bp, synthetic construct
  source 1..80: mol_type = other DNA
attctttaattgctctagcttcttgagatcctcaatgtatttctgctcaaaatttgctggggatgatctcacaaagcact

SEQ ID NO: 105420 - DNA, 80 bp, synthetic construct
  source 1..80: mol_type = other DNA
caagcaatatcaagacattgcctgttaatttgtatccatcagggacaacaaaacagagagatggtgtcaaaatcccatga

SEQ ID NO: 105421 - DNA, 80 bp, synthetic construct
  source 1..80: mol_type = other DNA
tcatgaagaatgctctcaacggacctgtcctcagtgttgtgttcacatccattggcattgcaagaatccacttcaatgca

SEQ ID NO: 105422 - DNA, 80 bp, synthetic construct
  source 1..80: mol_type = other DNA
tgtttgaacaagaaatgctaatttttgtcttgaaagcctctcattgtctgctagatatttagagaccagatccttaacaa

SEQ ID NO: 105423 - DNA, 80 bp, synthetic construct
  source 1..80: mol_type = other DNA
aagagatcgctcttgttaaggatctggtctctaaatatctagcagacaatgagaggctttcaagacaaaaattagcattt

SEQ ID NO: 105424 - DNA, 80 bp, synthetic construct
  source 1..80: mol_type = other DNA
aggtgtaaatgtggccaacctcttgtcacactcccagagagctcccctattgacaactaacggaaccggctcagcgcagg

SEQ ID NO: 105425 - DNA, 80 bp, synthetic construct
  source 1..80: mol_type = other DNA
ataggagtgacagacccaagttgttttgtgtctattaagaattctttaataacttctgtgtcgacaaaccagggggactt

SEQ ID NO: 105426 - DNA, 80 bp, synthetic construct
  source 1..80: mol_type = other DNA
acccttgtaagttggccctgacagaattagcctccagcagtctggcaaaacacatgaattgacagagccggagtacatca

SEQ ID NO: 105427 - DNA, 80 bp, synthetic construct
  source 1..80: mol_type = other DNA
agccaatgcaccaatcaacatgtcatgtgaactgtcattgagttctctgacaaacacttcaaggtcttgatcttgaatca

SEQ ID NO: 105428 - DNA, 80 bp, synthetic construct
  source 1..80: mol_type = other DNA
tgtcttcctccatcgccaattatggcgcctgtgttgggtttgggtttgtaccagtatggcttgtaagtcagctggtgatg

SEQ ID NO: 105429 - DNA, 80 bp, synthetic construct
  source 1..80: mol_type = other DNA
caacaggcaagctaagtcaactgaagtcaccgagcaaaacagggctcatctggtaccagacgcatcccatctagggcctc

SEQ ID NO: 105430 - DNA, 80 bp, synthetic construct
  source 1..80: mol_type = other DNA
gttatctccactcttggcttctaatgacactctccatatctggatcccattatcccccattactgcctggacaccttgag

SEQ ID NO: 105431 - DNA, 80 bp, synthetic construct
  source 1..80: mol_type = other DNA
agatctttggcgttggcaatgccttcctccattgttgatcaaaatgcttgaatcaagttggaacctgtacctgtgtgatg

SEQ ID NO: 105432 - DNA, 80 bp, synthetic construct
  source 1..80: mol_type = other DNA
cttctatctcataagtattttcctccacttggttaaaatcccgacccataggcacattgtggggagaccctgtcccaagc

SEQ ID NO: 105433 - DNA, 80 bp, synthetic construct
  source 1..80: mol_type = other DNA
tctcagtgactgtgtccagaggaatgacttcacttccttggaggcactcatcttactcgatgttaattggaactcactgg

SEQ ID NO: 105434 - DNA, 80 bp, synthetic construct
  source 1..80: mol_type = other DNA
atcatggggcaaataataaccttttttcaagaggtaccccatgttatagaggaggtgatgaatatagtcctaattgcact

SEQ ID NO: 105435 - DNA, 80 bp, synthetic construct
  source 1..80: mol_type = other DNA
agctgaagtgttttgggaatacagctattgcgaaatgcaatgagaaacatgacgaagagttctgcgacatgttaagactc

SEQ ID NO: 105436 - DNA, 80 bp, synthetic construct
  source 1..80: mol_type = other DNA
gagtgtcatcagttgagaataagttagccctgttgggaaccctgcagattgcagggatttgttagatccagcagtgccta

SEQ ID NO: 105437 - DNA, 80 bp, synthetic construct
  source 1..80: mol_type = other DNA
gctcaacactctacaaaggagtctatgagctgcaagctctcgagttgaacatggagaccctaaacatgacaatgccactg

SEQ ID NO: 105438 - DNA, 80 bp, synthetic construct
  source 1..80: mol_type = other DNA
cttaaagactgggtccatagaaaggacttcacttctttggagacactcattatcacaattgttacctgaccgttgtagag

SEQ ID NO: 105439 - DNA, 80 bp, synthetic construct
  source 1..80: mol_type = other DNA
aatcctaaaaggactttacaacatcaccacatgtgggataattggtctcataacgttccttttattgtgtgggcggtcat

SEQ ID NO: 105440 - DNA, 80 bp, synthetic construct
  source 1..80: mol_type = other DNA
gggcggtcatgctcaacactctacaaaggagtctatgagctgcaaaccctcgagttgaacatggagactctaaacatgac

SEQ ID NO: 105441 - DNA, 80 bp, synthetic construct
  source 1..80: mol_type = other DNA
gcgattctaagagctttctgatatcctcagagccctgacaagtgatgaccatgttccgagggagggcttcaattacggca

SEQ ID NO: 105442 - DNA, 80 bp, synthetic construct
  source 1..80: mol_type = other DNA
attgtaatgacttattggacccaccatttctgggtccttgtggtttgttgtcggattccaggtttaccacggtgttctcc

SEQ ID NO: 105443 - DNA, 80 bp, synthetic construct
  source 1..80: mol_type = other DNA
catgccctcccaacaattgaggttcttgaggcaatgtacggccacccatcacctgatagacaaatcttgtacaatatgtt

SEQ ID NO: 105444 - DNA, 80 bp, synthetic construct
  source 1..80: mol_type = other DNA
aatgccactgtcctgcactaaaaacaactctcatcactatataagggtgggtaataaaacaggacttgagctcacactga

SEQ ID NO: 105445 - DNA, 80 bp, synthetic construct
  source 1..80: mol_type = other DNA
gatgaattggggtacttggctgtgtaaatcaatcccaaatctgttagagcttgaacagcatcattcaggtccacttgtcc

SEQ ID NO: 105446 - DNA, 80 bp, synthetic construct
  source 1..80: mol_type = other DNA
aaactcttacaacaccgtctctacccgtagcacccccattagctccaccagtcatgccgatcatatttaataaagccctt

SEQ ID NO: 105447 - DNA, 80 bp, synthetic construct
  source 1..80: mol_type = other DNA
ctctgatcaagctgttgtgaacttaagtttcccatataaactcctgagctcaggggtctttcagttctgatgaccttaga

SEQ ID NO: 105448 - DNA, 80 bp, synthetic construct
  source 1..80: mol_type = other DNA
cttcacctctttggagacactcattgccacaattgttatctgaccgttgtagagcaacagacggatggaatggcaactgt

SEQ ID NO: 105449 - DNA, 80 bp, synthetic construct
  source 1..80: mol_type = other DNA
ctaacaccagcattcttaatcataagtcctgcaatctttctgatgcacataagagaaacctttatgaccatgcactcatg

SEQ ID NO: 105450 - DNA, 80 bp, synthetic construct
  source 1..80: mol_type = other DNA
ccatcctagcaatcctaaaaggactttacaacatcactacatgtgggataattggtctcataacgtttctcttattgtgt

SEQ ID NO: 105451 - DNA, 80 bp, synthetic construct
  source 1..80: mol_type = other DNA
atggaagactttgtgcgacaatgcttcaatccaatgatcgtcgagcttgcggaaaaggcaatgaaagaatatggggaaga

SEQ ID NO: 105452 - DNA, 80 bp, synthetic construct
  source 1..80: mol_type = other DNA
ttgaggggttttcggctgaatcaagaaaattaattgaaggaagagaccgaatcatggcctggacagtggtgaacagtatg

SEQ ID NO: 105453 - DNA, 80 bp, synthetic construct
  source 1..80: mol_type = other DNA
cttctcattgttcaggcacttagggacaacctggaacctggaacctttgatcttggggggctatatgaagcaatcgagga

SEQ ID NO: 105454 - DNA, 80 bp, synthetic construct
  source 1..80: mol_type = other DNA
tgaaggaagagaccgaatcatggcctggacagtggtgaacagtatgcttctcattgttcaggcacttagggacaacctgg

SEQ ID NO: 105455 - DNA, 80 bp, synthetic construct
  source 1..80: mol_type = other DNA
gaccaagccataatggataagagaattatccttaaagcaaatttctcagttctatttgatcaactagagacgttagtctc

SEQ ID NO: 105456 - DNA, 80 bp, synthetic construct
  source 1..80: mol_type = other DNA
aaactgaaaatagctttgaacagataacatttttgcaagcattgcaactcttacttgaagttgagagtgagataaggact

SEQ ID NO: 105457 - DNA, 80 bp, synthetic construct
  source 1..80: mol_type = other DNA
agatacggaaaatcgaggaattgaagggtaacgctcaacacattgaggagtgttcgtgttatggatcaggagggatgatc

SEQ ID NO: 105458 - DNA, 80 bp, synthetic construct
  source 1..80: mol_type = other DNA
atgaaagcaaaattaatagtcctgttttgtgcactttctgctacatatgcagacacaatatgtataggataccatgcgaa

SEQ ID NO: 105459 - DNA, 80 bp, synthetic construct
  source 1..80: mol_type = other DNA
gtacacagaacgccataaatggtgttacaaataaagtgaattctatcatcgagaaaatgaacactcaattcaccgctgca

SEQ ID NO: 105460 - DNA, 80 bp, synthetic construct
  source 1..80: mol_type = other DNA
gggaaagaattcaacagattagaaaaaaggatggaaaacttgaataaaaaagtagacgatggacttctagacgtttggac

SEQ ID NO: 105461 - DNA, 80 bp, synthetic construct
  source 1..80: mol_type = other DNA
agtagatgtctatcggattctggcgatctattcgactgtcgccagttcactggtgcttttggtctccctgggggcaatca

SEQ ID NO: 105462 - DNA, 80 bp, synthetic construct
  source 1..80: mol_type = other DNA
caattggggaagtgcagcattgccggatggatcttaggaaatccagagtgcgaatcgtcgttttctagaaagtcatggtc

SEQ ID NO: 105463 - DNA, 80 bp, synthetic construct
  source 1..80: mol_type = other DNA
ttacattgcagaaacaccaaatcctgaaaatgggatatgttatccagggtatttctctgactatgaggagcttagagagc

SEQ ID NO: 105464 - DNA, 80 bp, synthetic construct
  source 1..80: mol_type = other DNA
aattgagttcagtatcatcagtcgagagatttgaaatgtttcctaaggaaagctcatggcctaaacacaacgttaccaga

SEQ ID NO: 105465 - DNA, 80 bp, synthetic construct
  source 1..80: mol_type = other DNA
gggaaaacgatgtcatgctctcataatggaaaaagcagtttttacaaaaatttgctgtggctgacggagaaagatggtct

SEQ ID NO: 105466 - DNA, 80 bp, synthetic construct
  source 1..80: mol_type = other DNA
gtacccaaatattagcaatcactatgtgaacaacaaagagaaagaagtccttgtaatatggggtgtgcacaatccttcca

SEQ ID NO: 105467 - DNA, 80 bp, synthetic construct
  source 1..80: mol_type = other DNA
acatggaagatcaaagggcaatctaccgtaaagaaaatgcttatgtttctgtagtgtcctctcattataatagaaggttc

SEQ ID NO: 105468 - DNA, 80 bp, synthetic construct
  source 1..80: mol_type = other DNA
accccagaaattgaaaaaagacctaagataagaaaccaagaagggaggattaattattactggactctactggaaccagg

SEQ ID NO: 105469 - DNA, 80 bp, synthetic construct
  source 1..80: mol_type = other DNA
acaccccagggagctataaacaatagtctccctttccagaacgtacatcctgttgctatcggagaatgccccaagtacat

SEQ ID NO: 105470 - DNA, 80 bp, synthetic construct
  source 1..80: mol_type = other DNA
taaaagtacaagattaaggatggtcacaggactaagaaacattccatccatacaatcaagaggcctatttggggctattg

SEQ ID NO: 105471 - DNA, 80 bp, synthetic construct
  source 1..80: mol_type = other DNA
aaaagattttaaaggaacccccccaaaaaccgagccccggggggctttgtactcacagggccgccccaacactttggaag

SEQ ID NO: 105472 - DNA, 80 bp, synthetic construct
  source 1..80: mol_type = other DNA
ttgtactcacagggccgccccaacactttggaagatcatataggaaacttttctatgaaacgaggaatactggggacggg

SEQ ID NO: 105473 - DNA, 80 bp, synthetic construct
  source 1..80: mol_type = other DNA
atcatataggaaacttttctatgaaacgaggaatactggggacggggagggggcccctaaaaaacggggttttgtttcct

SEQ ID NO: 105474 - DNA, 80 bp, synthetic construct
  source 1..80: mol_type = other DNA
taaagggtaattagtagagggaaaaaagttttccccatggaggaagcagaagcgctatatcgtgaatacacaatagtaca

SEQ ID NO: 105475 - DNA, 80 bp, synthetic construct
  source 1..80: mol_type = other DNA
cccatgcagaataaaacaaatcataagccgaggacaggaagtaggaatcaatgtatgcccctagcggtcgaggcaaagtt

SEQ ID NO: 105476 - DNA, 80 bp, synthetic construct
  source 1..80: mol_type = other DNA
gatgttcatccactgggtcagggttgccaagggcaagggatggcggcaccagcaccagcacagaaaccttcagaccgata

SEQ ID NO: 105477 - DNA, 80 bp, synthetic construct
  source 1..80: mol_type = other DNA
agtttaaaaaaaacctttgcggagccttagatgagacccaggacccttctaacttgtaattaagatccttcccccatcta

SEQ ID NO: 105478 - DNA, 80 bp, synthetic construct
  source 1..80: mol_type = other DNA
gggttcaggttaccattgaaccagaaagaaatgccctgagaaaaaacaacttgtactcccgggctgtggtgatggacgga

SEQ ID NO: 105479 - DNA, 80 bp, synthetic construct
  source 1..80: mol_type = other DNA
catctcggggatctcaatgttagcatcccttggacacataaggtggggaactttacggggctttattcttctacggtacc

SEQ ID NO: 105480 - DNA, 80 bp, synthetic construct
  source 1..80: mol_type = other DNA
gcgcctcattttgggggtcaccattttcttgggaacaaggtcttcagcatggggcagaatctttccaccagcaatcctct

SEQ ID NO: 105481 - DNA, 80 bp, synthetic construct
  source 1..80: mol_type = other DNA
aggacgcggtgttggacctcgaagcaattgagaacaaccatatgaccgctttacttaaagataaggacagcctggcggct

SEQ ID NO: 105482 - DNA, 80 bp, synthetic construct
  source 1..80: mol_type = other DNA
atgatgctctcagaatacaggagcttgctgacacttgccccctaacattaaactgtgatagaattgaaaacaaagggaaa

SEQ ID NO: 105483 - DNA, 80 bp, synthetic construct
  source 1..80: mol_type = other DNA
aatggggaggatgaaccagtggtctcctatagcgtcaaagatggcgtttccgggctgcctgacctctccaccgtcagaca

SEQ ID NO: 105484 - DNA, 80 bp, synthetic construct
  source 1..80: mol_type = other DNA
aattctccccagagccacacttggcccaggtagttgcagaagaccttctttcccccagtgtgatggatgtgggtgacttc

SEQ ID NO: 105485 - DNA, 80 bp, synthetic construct
  source 1..80: mol_type = other DNA
ctgagggacctctgatcatttctgaggatctggatggtttaacctttctgcggagaactgtaacccgtgatccagctggt

SEQ ID NO: 105486 - DNA, 80 bp, synthetic construct
  source 1..80: mol_type = other DNA
attctcctggtgaaatcttgctaaatttggaattaggccctgaattaaatccattcttagcacacctttcaagaatgtat

SEQ ID NO: 105487 - DNA, 80 bp, synthetic construct
  source 1..80: mol_type = other DNA
ccggcggggttgaagtgcaggtactactcgctgggaacgcgttcacagcgggaaaactggtgtttgcagcaatccccccg

SEQ ID NO: 105488 - DNA, 80 bp, synthetic construct
  source 1..80: mol_type = other DNA
tgtgcttttgccccttccagatgttagaaataatttctttcattacaatcagcagcccgagccccgtatgagacttgtag

SEQ ID NO: 105489 - DNA, 80 bp, synthetic construct
  source 1..80: mol_type = other DNA
gtgatcgtgcagccccaaaatggcagatcaacacttgatggtgaattgttgggcaccacgcaactcgtgccctcaaacat

SEQ ID NO: 105490 - DNA, 80 bp, synthetic construct
  source 1..80: mol_type = other DNA
ctgtgcgctacgagggcgcattaacgcccaggtgccagatgatcaccatcaatggaacctacaggtaacaaacacaaatg

SEQ ID NO: 105491 - DNA, 80 bp, synthetic construct
  source 1..80: mol_type = other DNA
ggactcctttcgaccccaccgaagacgtccctgcaccactgggcacaccggatttcctggcgaatatctatggagtcacc

SEQ ID NO: 105492 - DNA, 80 bp, synthetic construct
  source 1..80: mol_type = other DNA
ttaacactgaccactttgatcagtgggccttgcctagttattctggaagattaaccctaaacatgaatttggcaccctct

SEQ ID NO: 105493 - DNA, 80 bp, synthetic construct
  source 1..80: mol_type = other DNA
cattgattgtctactcccccaggaatggattcagcatttttatcaggagtcagccccatcgcccacggacgtggctctaa

SEQ ID NO: 105494 - DNA, 80 bp, synthetic construct
  source 1..80: mol_type = other DNA
ttagatacaccaatcctgacacaggccgcgttttgtttgaagctaaactgcacaggcaaggattcatcacagtggcaaac

SEQ ID NO: 105495 - DNA, 80 bp, synthetic construct
  source 1..80: mol_type = other DNA
ccgctttctccggtgggttcactagctcttcccatgccaggactgttgatctgcccaagaaaacagcagctgcaccagcc

SEQ ID NO: 105496 - DNA, 80 bp, synthetic construct
  source 1..80: mol_type = other DNA
acgatgcctgtttctagacccagttcttctgcttctacagcctctactcgctcaacattggttagcgggtcttctaacct

SEQ ID NO: 105497 - DNA, 80 bp, synthetic construct
  source 1..80: mol_type = other DNA
ggggcgctacaaacagcttacgtgacgcctccttctagtagagcatctagtaatggcacagtctcaaccgtgccgaaaga

SEQ ID NO: 105498 - DNA, 80 bp, synthetic construct
  source 1..80: mol_type = other DNA
tcgctcatctccgtcggagaggggagtcacaagtttagtgaaaagatgatctcttctttctttgaaaatttctgtctttt

SEQ ID NO: 105499 - DNA, 80 bp, synthetic construct
  source 1..80: mol_type = other DNA
tttgaggctttgcctcacatcattgatgaggtcattaacattgtcatcatagtgctcatcataatcacgagcatcaaagc

SEQ ID NO: 105500 - DNA, 80 bp, synthetic construct
  source 1..80: mol_type = other DNA
catgcccaaagccgcaccgcctaaccagtaaaggaatttgcagctgtggtgcgttcaaagtgcccggcgtaaagactgtt

SEQ ID NO: 105501 - DNA, 80 bp, synthetic construct
  source 1..80: mol_type = other DNA
ttattggattgcgctttcctctgaatctgcttagtgttggattttatccagcacaaagatgggtcagatcgtgacaatgt

SEQ ID NO: 105502 - DNA, 80 bp, synthetic construct
  source 1..80: mol_type = other DNA
ttcaaagtgcccggcgtaaagactgtttggaagagacgctaaacaacagcgcctccctgactctccaccttaagtgaggt

SEQ ID NO: 105503 - DNA, 80 bp, synthetic construct
  source 1..80: mol_type = other DNA
aagagacgctaaacaacagcgcctccctgactctccaccttaagtgaggtggagagtcagggaggcccctgggtggtctt

SEQ ID NO: 105504 - DNA, 80 bp, synthetic construct
  source 1..80: mol_type = other DNA
tggagctgaccttcaccaatgattccatcatcagtcacaatttttgcaatttgacctctgctttcaacaagaagcatttt

SEQ ID NO: 105505 - DNA, 80 bp, synthetic construct
  source 1..80: mol_type = other DNA
tgctctgaaccagtgcaggaccttcagaggtagagtcctggatatgttcagaactgcttttggaggagaacacatgagaa

SEQ ID NO: 105506 - DNA, 80 bp, synthetic construct
  source 1..80: mol_type = other DNA
tgattagaaggaggaacctgatccttaacagaggaggtgatgagaacccaagaggcccagtaagcaaggagcacatagaa

SEQ ID NO: 105507 - DNA, 80 bp, synthetic construct
  source 1..80: mol_type = other DNA
tctgaagtctctggacaggtaccccttcttcaattcgcactatcatcacagggcactgttagaggcgcactatgacaaca

SEQ ID NO: 105508 - DNA, 80 bp, synthetic construct
  source 1..80: mol_type = other DNA
aaatgaggaattgatggagaactgcatccagtgcaggaaagtgcagagaaagaagcctcaaaaaggtctattgatacagc

SEQ ID NO: 105509 - DNA, 80 bp, synthetic construct
  source 1..80: mol_type = other DNA
tgcaagacatggtgtgccagccaaactcgactgattacactggccccaaacaagttctaaaaggttattgcaagatagga

SEQ ID NO: 105510 - DNA, 80 bp, synthetic construct
  source 1..80: mol_type = other DNA
ggtactgggggtttgaaatggccaaaatgccaggctttgacttgcattgccgctttaatgaggaaggtgacttcaagtac

SEQ ID NO: 105511 - DNA, 80 bp, synthetic construct
  source 1..80: mol_type = other DNA
atgcagatgctgactcctcaaaccatgggggtaaggtttcagtgaaggtcacggagtgtaaaaatgtggatccatcacaa

SEQ ID NO: 105512 - DNA, 80 bp, synthetic construct
  source 1..80: mol_type = other DNA
tggtgttaagagagatgccacctccagtcgaaacttctgaagacacttgtgacagttgctactctgagtgcttagatagt

SEQ ID NO: 105513 - DNA, 80 bp, synthetic construct
  source 1..80: mol_type = other DNA
cacatacttgtcaggtctaccggatttatgatatccggtgcagtggcatgctctcatggagcatgtgcttcactaacgat

SEQ ID NO: 105514 - DNA, 80 bp, synthetic construct
  source 1..80: mol_type = other DNA
tgtgctgaggggatcatcaattaccagtgtcacacagctctgagtgcatttgttgttgtaacattggtagtgctagcagt

SEQ ID NO: 105515 - DNA, 80 bp, synthetic construct
  source 1..80: mol_type = other DNA
cttaatgtttctaattgtgttgaaaaggtgcttggtgttattcagggtggcacctgccatcttgctggtccctttttcat

SEQ ID NO: 105516 - DNA, 80 bp, synthetic construct
  source 1..80: mol_type = other DNA
ggatagtcaagctggcattctggacatctagaaaactgaaaataagtactgagagaacaatagccaggatcaatgaagaa

SEQ ID NO: 105517 - DNA, 80 bp, synthetic construct
  source 1..80: mol_type = other DNA
atgacacacgagaatgctatgaagcagatcaagattgtcacaacagctccagacaccatgaagttctcctgtggagatga

SEQ ID NO: 105518 - DNA, 80 bp, synthetic construct
  source 1..80: mol_type = other DNA
attgggtggagaccagagggagctagggctgcacatagaatgagagacagagacaggaggcccatacctaggtcagcagt

SEQ ID NO: 105519 - DNA, 80 bp, synthetic construct
  source 1..80: mol_type = other DNA
atacctggcaatcctattacttatcagtgtgacaagtgcttgttcagatcacaccattgctagctcaaagatagttaaat

SEQ ID NO: 105520 - DNA, 80 bp, synthetic construct
  source 1..80: mol_type = other DNA
gtgttgctaagggttccaaaagtgtttgcaccatctcaggactgattaatgtgaaagcaggccctattggctctgaaact

SEQ ID NO: 105521 - DNA, 80 bp, synthetic construct
  source 1..80: mol_type = other DNA
tgtgtcaccttgaaaggacctgactcagctgacaaaaaattcctaaccatcaagaccattgccagtgaattgatttgctc

SEQ ID NO: 105522 - DNA, 80 bp, synthetic construct
  source 1..80: mol_type = other DNA
agaaggccagtcttactggacaagtcagtatggagttgagtgtctaagttcgagaagatgccgtggggtcgccgagtgca

SEQ ID NO: 105523 - DNA, 80 bp, synthetic construct
  source 1..80: mol_type = other DNA
cagatttcaatgggaaaaaggagaaggtctcaatgacaggcatgacaacacagttctttagctggggttccatgactcta

SEQ ID NO: 105524 - DNA, 80 bp, synthetic construct
  source 1..80: mol_type = other DNA
gctctagactttgaaggtataaccggcacaaactcatacagctttctcaggtcttcctcaggaaccttctccttggttga

SEQ ID NO: 105525 - DNA, 80 bp, synthetic construct
  source 1..80: mol_type = other DNA
aacaaagtctctggggctatccataacaaatgatgggacaaacaacatgatggggcctgctattatttactgtgacacca

SEQ ID NO: 105526 - DNA, 80 bp, synthetic construct
  source 1..80: mol_type = other DNA
tgaggccatgtctatggaacctagaaaaggcttcctaggggaaatcaggtgttcctcagaggcagctgctctcacagctc

SEQ ID NO: 105527 - DNA, 80 bp, synthetic construct
  source 1..80: mol_type = other DNA
gatccatttgcagtattcctgcgaggggctttaccacagaccaggaacgggaaaacatttagtagctccatagataaaaa

SEQ ID NO: 105528 - DNA, 80 bp, synthetic construct
  source 1..80: mol_type = other DNA
aagagagggtttcctgtttggccagctttgttaacatcacaggctgctattcttgcaatgagggtgccagagtatgcata

SEQ ID NO: 105529 - DNA, 80 bp, synthetic construct
  source 1..80: mol_type = other DNA
actacaaagccatgtctatagctggaaccttagtggcaatgaacccttttgatgacaggaggcatgaagagacaaattct

SEQ ID NO: 105530 - DNA, 80 bp, synthetic construct
  source 1..80: mol_type = other DNA
tgacaggaggcatgaagagacaaattctgttgttgtcaaccctaaaactggcaggtgggacctctccagttgggcatctg

SEQ ID NO: 105531 - DNA, 80 bp, synthetic construct
  source 1..80: mol_type = other DNA
gttgttgtcaaccctaaaactggcaggtgggacctctccagttgggcatctggtttagtggactggcttgggaggccact

SEQ ID NO: 105532 - DNA, 80 bp, synthetic construct
  source 1..80: mol_type = other DNA
aagaacagcaggcgtcatactcggctacataattctagctattgtatttctaattatgctggtactgtgtgtgccaaagt

SEQ ID NO: 105533 - DNA, 80 bp, synthetic construct
  source 1..80: mol_type = other DNA
atgacttcattaggaatataactacaggtgagcagtccccaagagttgattatgagaagctaaagaagaatgcagaagag

SEQ ID NO: 105534 - DNA, 80 bp, synthetic construct
  source 1..80: mol_type = other DNA
tggtgggaatgattagagctgccctgctcaagaaaaagctataaacaactttatatccagagtgataggacatttgtcat

SEQ ID NO: 105535 - DNA, 80 bp, synthetic construct
  source 1..80: mol_type = other DNA
gacagcaaaataaggggagatgggaaattactggtgatataccctgatctctcaaattaggaatggtggtgggtttggcg

SEQ ID NO: 105536 - DNA, 80 bp, synthetic construct
  source 1..80: mol_type = other DNA
tgggtgagcagcgggatagtctgattggcattgccaagcgcagtgcccaatgtctttaaatacaacatgagagtgaggat

SEQ ID NO: 105537 - DNA, 80 bp, synthetic construct
  source 1..80: mol_type = other DNA
tgtctttcagcttcataattgatcaaaattgttgttggtagtttagtttgtcattagggaaaacatgcaccggtctttgt

SEQ ID NO: 105538 - DNA, 80 bp, synthetic construct
  source 1..80: mol_type = other DNA
ccatgaaatccagcagaaggagaatgagatccaaaaactaagaaatgatctcagagatgccattaagaagggccaagagc

SEQ ID NO: 105539 - DNA, 80 bp, synthetic construct
  source 1..80: mol_type = other DNA
aagatctttgaccaccaagcgacaaaagatgagctccaacatgctaaatcagaaatgcagtctctgagaaagaagatcaa

SEQ ID NO: 105540 - DNA, 80 bp, synthetic construct
  source 1..80: mol_type = other DNA
agactttgaatctattcctcaagcaaagaaatccagcaacagctctgttacacttatgaccacagcagtgttgtcactat

SEQ ID NO: 105541 - DNA, 80 bp, synthetic construct
  source 1..80: mol_type = other DNA
tagggtcctcaatggctgcctctcctgaagcaggaatgaatgcagccacacacataaataatagaccaggtcttggaaag

SEQ ID NO: 105542 - DNA, 80 bp, synthetic construct
  source 1..80: mol_type = other DNA
ttgttctgcttgctcagctggggactttccagaaggcgcggcctgagtgactaagccccgttggggactttccgaagagg

SEQ ID NO: 105543 - DNA, 80 bp, synthetic construct
  source 1..80: mol_type = other DNA
acgaacatctctgacgaggttaacgaaattggaactaaaaaaacacctaacgttactgttaatccaggggcgttcgcgcc

SEQ ID NO: 105544 - DNA, 80 bp, synthetic construct
  source 1..80: mol_type = other DNA
ctgacagatggtttgcttgtgtgctagttgaaccaaatgtgcaaaacacacaaagacaatacgttttagatgggcaaaat

SEQ ID NO: 105545 - DNA, 80 bp, synthetic construct
  source 1..80: mol_type = other DNA
cacaattctaactttggggatatcgcttgtatttattgattatatattaaaatcagttactagaacaatggactttataa

SEQ ID NO: 105546 - DNA, 80 bp, synthetic construct
  source 1..80: mol_type = other DNA
gatgtttaactacagacacaaattcatttgaaacagtagctagtacagaaaaattagctataacggatgttgttgatgga

SEQ ID NO: 105547 - DNA, 80 bp, synthetic construct
  source 1..80: mol_type = other DNA
tgaaaaataatggcaagtttcaaccaggtgtataattggcgtattggtaaattttacaattgatctaaatttcaattatt

SEQ ID NO: 105548 - DNA, 80 bp, synthetic construct
  source 1..80: mol_type = other DNA
aacatctgacatgagaactgagatcataagaatgatggaaagtgccagaccagaagatgtgtctttccaggggcggggag

SEQ ID NO: 105549 - DNA, 80 bp, synthetic construct
  source 1..80: mol_type = other DNA
aagaggaaagaaggcaaagatgggtttccgggcttgtgccaacagttattcatctctggactattctgcactaatcaatg

SEQ ID NO: 105550 - DNA, 80 bp, synthetic construct
  source 1..80: mol_type = other DNA
tgggtggtgacattacaagggtgggattgtttactcacatgggttctagggccatattacgtaattgcactataaattgt

SEQ ID NO: 105551 - DNA, 80 bp, synthetic construct
  source 1..80: mol_type = other DNA
taccttatgatttgatcaaatgatgcattgctgattgatcaaggactaatgaatgtaatcaggatgcatagttgtttaaa

SEQ ID NO: 105552 - DNA, 80 bp, synthetic construct
  source 1..80: mol_type = other DNA
tcatagatccatatagtgttaagtcatagatttaaatcataagtttaagttaggcattggtttaagttaagtttagattt

SEQ ID NO: 105553 - DNA, 80 bp, synthetic construct
  source 1..80: mol_type = other DNA
agatttaggttaagtataggtttgatagagtaaattcatagattttgttccctcaagttaaatttactaaaaatttaatg

SEQ ID NO: 105554 - DNA, 80 bp, synthetic construct
  source 1..80: mol_type = other DNA
aggcccaatcagaatctttcatggggactaacagggcttattttatcaaccgtcagaggcaagtggatgaatcaaagatt

SEQ ID NO: 105555 - DNA, 80 bp, synthetic construct
  source 1..80: mol_type = other DNA
cgcaccggggatcctaggcaatttggttgtctttttttgaggccttgtgcgctgtacttctccaaatgggaaacaagcaa

SEQ ID NO: 105556 - DNA, 80 bp, synthetic construct
  source 1..80: mol_type = other DNA
cacctccaaccggagcagcggacagcatcagacccgcaccctacagtccctgaatctcccaccgacccccaccactccca

SEQ ID NO: 105557 - DNA, 80 bp, synthetic construct
  source 1..80: mol_type = other DNA
taaaaaaaaaaattaagttaaaggtttatgtattaaaaagctgtaaacataaattaatctgttcaccagcaccatgcaac

SEQ ID NO: 105558 - DNA, 80 bp, synthetic construct
  source 1..80: mol_type = other DNA
agctcaagtcagttgggaaggcctataaagtcatatccctaaaatacacaaggaaagtttgtgttcaactcggaacagag

SEQ ID NO: 105559 - DNA, 80 bp, synthetic construct
  source 1..80: mol_type = other DNA
ggattgagccagatgaccacctcaaggaacgatcaagcctgcgatatggaaatgtccttgatgtgaatgccatcgatata

SEQ ID NO: 105560 - DNA, 80 bp, synthetic construct
  source 1..80: mol_type = other DNA
atttaacagcagactagcatttgagcacaaggccaaagaaaagtatccggagtacttcaagaactgctgacatcgagctc

SEQ ID NO: 105561 - DNA, 80 bp, synthetic construct
  source 1..80: mol_type = other DNA
agcaaaagcaggggttacaaaatgaacactcaaatcctggttttcgcccttgtggcagtcatccccacaaatgcagacaa

SEQ ID NO: 105562 - DNA, 80 bp, synthetic construct
  source 1..80: mol_type = other DNA
aagcacccaatcggcaattgatcagataaccggaaagttaaatagactcattgagaaaaccaaccagcaatttgagctaa

SEQ ID NO: 105563 - DNA, 80 bp, synthetic construct
  source 1..80: mol_type = other DNA
tagataatgaattcactgaagtggaaaagcagattggcaatttaattaactggaccaaagacttcatcacagaagtatgg

SEQ ID NO: 105564 - DNA, 80 bp, synthetic construct
  source 1..80: mol_type = other DNA
tcttacaatgctgaacttcttgtggcaatggaaaaccagcacactattgatttggctgattcagagatgaacaagctgta

SEQ ID NO: 105565 - DNA, 80 bp, synthetic construct
  source 1..80: mol_type = other DNA
tgttagggaccattaccggaccacctcaatgcgaccaatttctagaattttcagctgatctaataatcgagagacgagaa

SEQ ID NO: 105566 - DNA, 80 bp, synthetic construct
  source 1..80: mol_type = other DNA
cagacaatgcttctttcccacaaatgacaaaatcatacaaaaacacaaggagagaatcagctctgatagtctggggaatc

SEQ ID NO: 105567 - DNA, 80 bp, synthetic construct
  source 1..80: mol_type = other DNA
caccattcaggatcaaccaccgaacagaccaaactatatgggagtggaaataaactgataacagtcgggagttccaaata

SEQ ID NO: 105568 - DNA, 80 bp, synthetic construct
  source 1..80: mol_type = other DNA
tcatcaatcttttgtgccgagtccaggaacacgaccgcagataaatggccagtccggacggattgattttcattggttga

SEQ ID NO: 105569 - DNA, 80 bp, synthetic construct
  source 1..80: mol_type = other DNA
tcttggatcccaatgatacagttacttttagtttcaatggggctttcatagctccaaatcgtgccagcttcttgagggga

SEQ ID NO: 105570 - DNA, 80 bp, synthetic construct
  source 1..80: mol_type = other DNA
ggaatgctaccacagtggagggactataacaagcagattgccttttcaaaacataaatagcagagcagttggcaaatgcc

SEQ ID NO: 105571 - DNA, 80 bp, synthetic construct
  source 1..80: mol_type = other DNA
caagatatgtaaaacaggaaagtttattattggcaactgggatgaagaacgttcccgaaccttccaaaaaaagggaaaaa

SEQ ID NO: 105572 - DNA, 80 bp, synthetic construct
  source 1..80: mol_type = other DNA
agcaaaagcaggggtctgatctactaaaatggagagaatagtgcttcttcttgcaatagtcagtcttgtcaaaagtgacc

SEQ ID NO: 105573 - DNA, 80 bp, synthetic construct
  source 1..80: mol_type = other DNA
tccttgcaactggactcagaaacgtccctcaaaggaagaaaagaggtctatttggggctatagcgggctttattgaaggg

SEQ ID NO: 105574 - DNA, 80 bp, synthetic construct
  source 1..80: mol_type = other DNA
aaataagtggagttaaattggaatcaatgggggtttatcaaatactgtcaatttattcaacagtggcaagttccctagca

SEQ ID NO: 105575 - DNA, 80 bp, synthetic construct
  source 1..80: mol_type = other DNA
aggacaatccaatcaacagcctctgctacccaggggattttaatgactacgaagaactgaaatacctattgagcagtaca

SEQ ID NO: 105576 - DNA, 80 bp, synthetic construct
  source 1..80: mol_type = other DNA
tcaggagtgagctctgcatgtccatacattgggaggtcctcctttttaagaaatgtggtatggctgatcaaaaagaacaa

SEQ ID NO: 105577 - DNA, 80 bp, synthetic construct
  source 1..80: mol_type = other DNA
acaataccaaccaagaggatcttctaatactgtgggggatccatcatcctaatgacgcagcggaacaaacaaagctctat

SEQ ID NO: 105578 - DNA, 80 bp, synthetic construct
  source 1..80: mol_type = other DNA
agagcggacgaatggaattcttctggacaattttaaagccaaatgatgcaatcaattttgagagtaatgggaacttcata

SEQ ID NO: 105579 - DNA, 80 bp, synthetic construct
  source 1..80: mol_type = other DNA
aagggggactcggcaatcatgaaaagcggcttggcatatggtaactgtgatactaagtgtcaaactccagtgggtgagat

SEQ ID NO: 105580 - DNA, 80 bp, synthetic construct
  source 1..80: mol_type = other DNA
aaactccagtatgcccttccacaatatacaccctcacaccattggggaatgccctaaatacgtgaaatcagataggttgg

SEQ ID NO: 105581 - DNA, 80 bp, synthetic construct
  source 1..80: mol_type = other DNA
actgtaatgacttgttggaccccccatttccaattttctggggcttgttgtcttgctcaaggtccaccacagtattttcc

SEQ ID NO: 105582 - DNA, 80 bp, synthetic construct
  source 1..80: mol_type = other DNA
cccttacgagatggagtcttttcatggtaggtctactctaacttgtacaccaagcaccattctcatcaggacctacacat

SEQ ID NO: 105583 - DNA, 80 bp, synthetic construct
  source 1..80: mol_type = other DNA
atgagggggtgctcttaatagccctagttaacaattatttgagagggagcaaagcaaactgctgggtgagatgtgagtct

SEQ ID NO: 105584 - DNA, 80 bp, synthetic construct
  source 1..80: mol_type = other DNA
ggatctatgttctcatttgtcgccaatgtcatggcgcaaattttcctccgatatctgtcagaaggctgatgctggaagac

SEQ ID NO: 105585 - DNA, 80 bp, synthetic construct
  source 1..80: mol_type = other DNA
atcgcatcagtcgcacgaaggctgatcattgtcgcatcgttcggtagctaaaactgaccgctagcaaatcctagcctagt

SEQ ID NO: 105586 - DNA, 80 bp, synthetic construct
  source 1..80: mol_type = other DNA
tcaaacatcgagccatattctctttgccaatcgactgatctcgaccttttacgacttccgcgacatcttgttctgcgcca

SEQ ID NO: 105587 - DNA, 80 bp, synthetic construct
  source 1..80: mol_type = other DNA
atcgactgatctcgaccttttacgacttccgcgacatcttgttctgcgccatatagatccatgattgggcgcctttgtgt

SEQ ID NO: 105588 - DNA, 80 bp, synthetic construct
  source 1..80: mol_type = other DNA
gaaaacttcctgttaacaggcctattgattggaaagtctgtcaacgtattgtgggtcttttgggttttgctgcccctttt

SEQ ID NO: 105589 - DNA, 80 bp, synthetic construct
  source 1..80: mol_type = other DNA
ccgtacagaccaaccacgagctggccggtgccctacaccacctgaggtgcgccagaattaggtattacgtcaagtgtgtc

SEQ ID NO: 105590 - DNA, 80 bp, synthetic construct
  source 1..80: mol_type = other DNA
gtactgttggaggccaaatgggcatgcttttgacagggtccaacgccaaaagtatggatctaggcactacaccaggtgac

SEQ ID NO: 105591 - DNA, 80 bp, synthetic construct
  source 1..80: mol_type = other DNA
ggctcggacttagcgaccatgatccggtgcgctcgagcattcggaggcttgatggatgaactcaaggcacactgtgttac

SEQ ID NO: 105592 - DNA, 80 bp, synthetic construct
  source 1..80: mol_type = other DNA
agacggtgatcaccaccagaatgaaccccaacaatggtcactcccaaattactcaggtagaactggtcacaatgtgcacc

SEQ ID NO: 105593 - DNA, 80 bp, synthetic construct
  source 1..80: mol_type = other DNA
agtctttgggggcgttgacaggaaggactaattctagggtctctgctcctgctcggagctcccccagtgcactttctaat

SEQ ID NO: 105594 - DNA, 80 bp, synthetic construct
  source 1..80: mol_type = other DNA
gctcctactgccacttctttgcattcaaatcaaactgtttctacgagactaggttcttcagctggttctggtaccggtgt

SEQ ID NO: 105595 - DNA, 80 bp, synthetic construct
  source 1..80: mol_type = other DNA
agtcctaaaggcattgtacatgttgtcaacaagaggaaggcaaacaattaaagaaaacaaggggactagaattaggttta

SEQ ID NO: 105596 - DNA, 80 bp, synthetic construct
  source 1..80: mol_type = other DNA
ccttgtcagcaatgatgcttatctccttgggcgggaaaaagcattaagggagtcacacttggctgagattgatgacttga

SEQ ID NO: 105597 - DNA, 80 bp, synthetic construct
  source 1..80: mol_type = other DNA
gctcttcaggctcattttaaagtttgtaaactaacatcacggtttcaggaaaatttaaagaagtcactaacaatgtatga

SEQ ID NO: 105598 - DNA, 80 bp, synthetic construct
  source 1..80: mol_type = other DNA
tccgtaaacatccggacgctacatacagtaggtgcggctctggcccctggcttaccccccgatgcttggtacactaccca

SEQ ID NO: 105599 - DNA, 80 bp, synthetic construct
  source 1..80: mol_type = other DNA
gagggactgcaggcgttcggggccgtcctcgtagacgcccatcggcgcatcaccgacccggagagggacatccaggactt

SEQ ID NO: 105600 - DNA, 80 bp, synthetic construct
  source 1..80: mol_type = other DNA
tcgaatggcttgggatatgatgatgaattggtcccccgctgtgggtatggtggtggcgcacgtcctgcgtctgccccaga

SEQ ID NO: 105601 - DNA, 80 bp, synthetic construct
  source 1..80: mol_type = other DNA
gcattcccgtcgaagcagaaggtctctgactgtccagacacatggagaaagtacactggccaacaagaaaggagcttggt

SEQ ID NO: 105602 - DNA, 80 bp, synthetic construct
  source 1..80: mol_type = other DNA
ccagatgcatacaatgaggaaatgctccggaagagaaaactaacagtactggaattgcatccgggagctggaaagaccag

SEQ ID NO: 105603 - DNA, 80 bp, synthetic construct
  source 1..80: mol_type = other DNA
tccggactcagatctcgagctcaagcttcgaattctgcagtcgacggtaccgcgggcccgggatccaccggatctagata

SEQ ID NO: 105604 - DNA, 80 bp, synthetic construct
  source 1..80: mol_type = other DNA
gatcagagtagacaaaatgagcataaacagggtgggcagaaacaggaggggcaaaaagagacaagtcaaaagaaagctaa

SEQ ID NO: 105605 - DNA, 80 bp, synthetic construct
  source 1..80: mol_type = other DNA
atgaactgattggccgggcccgcgtctctccaggggcgggatggagcatccgggagactgcttgcctagcaaaatcatat

SEQ ID NO: 105606 - DNA, 80 bp, synthetic construct
  source 1..80: mol_type = other DNA
tggggccagcgcatggctcatgtggctttcggaaattgaaccagccagaatcgcatgtgtcctcattgtcgtgtttttgt

SEQ ID NO: 105607 - DNA, 80 bp, synthetic construct
  source 1..80: mol_type = other DNA
tcgctaacatcagcggctcgtctgatgacaggccttattgctggcactacgcgcctcggccgtgcgggattgtgccagca

SEQ ID NO: 105608 - DNA, 80 bp, synthetic construct
  source 1..80: mol_type = other DNA
ggcctcgaacagctgggcgaggtctgcgcccggtggctcgggcgagcggcgagtcttcagcgcctcgagggcctgtgagg

SEQ ID NO: 105609 - DNA, 80 bp, synthetic construct
  source 1..80: mol_type = other DNA
gcgggtctgaggcagaaaaaggtcacttttgacaggctacaagtcctcgacgaccactacagagaggttgtggacgagat

SEQ ID NO: 105610 - DNA, 80 bp, synthetic construct
  source 1..80: mol_type = other DNA
agggcgttatggttgaacaaaatggtaaattggaaagtcaagtggaaatgcaatttttttcaacttctgtaaatgctatg

SEQ ID NO: 105611 - DNA, 80 bp, synthetic construct
  source 1..80: mol_type = other DNA
ttccaatgagtcagctgattcggaaacgggttccatgagctccatgccccccctcgagggggaacctggagacccagact

SEQ ID NO: 105612 - DNA, 80 bp, synthetic construct
  source 1..80: mol_type = other DNA
gccccaacgccagcatcgtgtatcaggcccatgatgtcatcttgcaccttccaggctgcgtgccttgtgtcaaaaatggg

SEQ ID NO: 105613 - DNA, 80 bp, synthetic construct
  source 1..80: mol_type = other DNA
ctattctccagatgaactcaatcgggtgggagcatgcctcaggaagcttggggctccaccattgagagcttggaggcatc

SEQ ID NO: 105614 - DNA, 80 bp, synthetic construct
  source 1..80: mol_type = other DNA
accagaacaccacagccaaaacccggcacacgagtggtcatgaccacgacagccaactggctgtgggctcttctcgggag

SEQ ID NO: 105615 - DNA, 80 bp, synthetic construct
  source 1..80: mol_type = other DNA
tggctccagtccaaactcctgccgcggttaccgggagtccctttcttctcgtgccaacgcgggtacaagggagtctggcg

SEQ ID NO: 105616 - DNA, 80 bp, synthetic construct
  source 1..80: mol_type = other DNA
cggggaacggggcagaggtggacatcgatactctggacaagtcagccttcaggtgttgcatgatgggaatgagagcagga

SEQ ID NO: 105617 - DNA, 80 bp, synthetic construct
  source 1..80: mol_type = other DNA
gcgtcgatgtgtagcgcgagggaggatgcccacgaagacaccccagacaaggagctgcccgtgcgtggatttgtggaaaa

SEQ ID NO: 105618 - DNA, 80 bp, synthetic construct
  source 1..80: mol_type = other DNA
gggatcccgtatgatacccgctgctttgactcaacggtcactgagagggatatcagaactgaggagtccatttatctgtc

SEQ ID NO: 105619 - DNA, 80 bp, synthetic construct
  source 1..80: mol_type = other DNA
tttgacagactgcaagttctggacagccattaccaggacgtgctcaaggaggtcaaagcagcggcgtcaaaagtgaaggc

SEQ ID NO: 105620 - DNA, 80 bp, synthetic construct
  source 1..80: mol_type = other DNA
ggcactcgcgcaaatgcagagagcttccttcgcggggaaggaagagggccccgggtcgggctcggactcaggagttccct

SEQ ID NO: 105621 - DNA, 80 bp, synthetic construct
  source 1..80: mol_type = other DNA
cgtggctcatggagtcagggtgctggaggacggggtaaattatgcgacagggaatcttcccggttgctctttctctatct

SEQ ID NO: 105622 - DNA, 80 bp, synthetic construct
  source 1..80: mol_type = other DNA
cgcgcggcggttgctgtttaatagcctggtgccggcgcaactcagggggcgtgactttggaggcgaccacacggccaagc

SEQ ID NO: 105623 - DNA, 80 bp, synthetic construct
  source 1..80: mol_type = other DNA
tttgattgggtgacggatcattctggaaaaacagtttggtttgttccaagcgtgaggaatggcaatgagatcgcagcttg

SEQ ID NO: 105624 - DNA, 80 bp, synthetic construct
  source 1..80: mol_type = other DNA
caacagacacggggcctacttggctgtatcatcactagcctcacaggccgggacaaaaatcaggtcgagggagaggttca

SEQ ID NO: 105625 - DNA, 80 bp, synthetic construct
  source 1..80: mol_type = other DNA
ttgctcatggtggtactcattccggagccggagaaacaaagatcccaaacggacaatcagttggccgtgttcctgatctg

SEQ ID NO: 105626 - DNA, 80 bp, synthetic construct
  source 1..80: mol_type = other DNA
tgccaaccaggcagccgtcctaatggggcttggaaaaggatggccactccacagaatggacctcggtgtgccgctgttag

SEQ ID NO: 105627 - DNA, 80 bp, synthetic construct
  source 1..80: mol_type = other DNA
tacacaacaaatcatctctagcgtaggagctaaagacgttaaggtaaagccacaataagcagcttgaagaactggagtaa

SEQ ID NO: 105628 - DNA, 80 bp, synthetic construct
  source 1..80: mol_type = other DNA
tagtgcgggtcgctggcgagcccgtctacgatcaggctctcggggacggtgttatggtgccgcgccgccagccggacgct

SEQ ID NO: 105629 - DNA, 80 bp, synthetic construct
  source 1..80: mol_type = other DNA
ctctcttggcgtttttcaagttcacagcattggccccaactaaggcacttattagccgatggaaagcagtagagaagagc

SEQ ID NO: 105630 - DNA, 80 bp, synthetic construct
  source 1..80: mol_type = other DNA
cccgtcgaggccatgcctacataaaagggcaccagggcccccggggcagacatttggccagtgttttgggtctcgcaccg

SEQ ID NO: 105631 - DNA, 80 bp, synthetic construct
  source 1..80: mol_type = other DNA
agggaggtatcggtgcctgcggagatactaaggaagaccaagaaatttcctcctagcttgcccgtctgggcttcacccag

SEQ ID NO: 105632 - DNA, 80 bp, synthetic construct
  source 1..80: mol_type = other DNA
gcgccgcggcgacagcgccacgaccggcagcggggcctggtgtgggacgacgaggactcggccgacgatagcagcgtgtt

SEQ ID NO: 105633 - DNA, 80 bp, synthetic construct
  source 1..80: mol_type = other DNA
tgttattgctcttggtggctccagcctacagcttcaactgccttggaatgagcaacagagacttcttggagggagtatcc

SEQ ID NO: 105634 - DNA, 80 bp, synthetic construct
  source 1..80: mol_type = other DNA
atacgacggtatccacggtcccgtacgtaccgccgctccgcttgccggtctgccacaggttggctaggcgcgtcaggtgg

SEQ ID NO: 105635 - DNA, 80 bp, synthetic construct
  source 1..80: mol_type = other DNA
caatgcggcggctgcatacgcttgatccggctacctgcccattcgaccaccaagcgaaacatcgcatcgagcgagcacgt

SEQ ID NO: 105636 - DNA, 80 bp, synthetic construct
  source 1..80: mol_type = other DNA
ctgagctccattcttgagcctggataaagcgtttcagcgccaacaaaaacccctctggcgttcatgtcgcataatgaaaa

SEQ ID NO: 105637 - DNA, 80 bp, synthetic construct
  source 1..80: mol_type = other DNA
gaagaaccgcagctcatgcaaagctatggatggaatctggtccacatgaaaagtggagtggacgtgttccataagccagc

SEQ ID NO: 105638 - DNA, 80 bp, synthetic construct
  source 1..80: mol_type = other DNA
ggtttgagtttaccttgcccgaaggaaactactcggaaactatgaccattgatcttatgaataacgccattgtagacaac

SEQ ID NO: 105639 - DNA, 80 bp, synthetic construct
  source 1..80: mol_type = other DNA
ctcatacatgggcttgacccagccctttctagggctgtgtgcatacatgtccacgcaggtgtttggcagaaggagtatac

SEQ ID NO: 105640 - DNA, 80 bp, synthetic construct
  source 1..80: mol_type = other DNA
gcaactctttgattaggcatcataacatggtatattcaaccacctcacgtagcgccagcctccgccaaaagaaggtgaca

SEQ ID NO: 105641 - DNA, 80 bp, synthetic construct
  source 1..80: mol_type = other DNA
gagtcggacctacgaagctaatctcttttcaccgcgtgtgcccccaaaaaagcaagccaatggaacctgcgagcccaatc

SEQ ID NO: 105642 - DNA, 80 bp, synthetic construct
  source 1..80: mol_type = other DNA
aaaaacttgaagttaaaatgtttaatctaacagtaattgagcctccaaccactagagcacctaccacagttaggacaact

SEQ ID NO: 105643 - DNA, 80 bp, synthetic construct
  source 1..80: mol_type = other DNA
tcaatgatccaggagctccgtggaaaatctggatgctccgaatggtctgcctagccattagtgcctacactccgtgggca

SEQ ID NO: 105644 - DNA, 80 bp, synthetic construct
  source 1..80: mol_type = other DNA
gagtctaagtgttgggtcgctgcatctcccaccatagccatacccaacagctcggtgccggttcacgggttccgcaaaca

SEQ ID NO: 105645 - DNA, 80 bp, synthetic construct
  source 1..80: mol_type = other DNA
ggtgcataatattcatctgctgcgcctggtatatcaagggccgtctcgtgcccgcagccacatatggactattgcagcta

SEQ ID NO: 105646 - DNA, 80 bp, synthetic construct
  source 1..80: mol_type = other DNA
ttctcttggccctactttcttgcctgaccatcccggcgtctgccgtagaggtgaggaacgcctccggcttgtacatcgtc

SEQ ID NO: 105647 - DNA, 80 bp, synthetic construct
  source 1..80: mol_type = other DNA
cggcaaattccttgccgatggtggttgctctgggggcgcctatgacatcataatatgtgatgagtgccactcaactgact

SEQ ID NO: 105648 - DNA, 80 bp, synthetic construct
  source 1..80: mol_type = other DNA
gatgtacgtgggtggcgtggaacatcgattagaggcagcctgcaactggaccagaggagaacgctgcgacctctccgatc

SEQ ID NO: 105649 - DNA, 80 bp, synthetic construct
  source 1..80: mol_type = other DNA
agaaaggcccccagactaagtcacccgggtccccgaacaaaaacaaaaaccttgaccgccgccgggtggcgtgcctgttg

SEQ ID NO: 105650 - DNA, 80 bp, synthetic construct
  source 1..80: mol_type = other DNA
agtcagctttcagccccttccttgaaggcgacctgcactacgcacaagccccaccccgatgctgagctcatcgaagccaa

SEQ ID NO: 105651 - DNA, 80 bp, synthetic construct
  source 1..80: mol_type = other DNA
tcggccaacacgaccaaggaggccaggaaggcgcgatgctcgaatatcgtgttgatctgctgcacgaaggccaggattag

SEQ ID NO: 105652 - DNA, 80 bp, synthetic construct
  source 1..80: mol_type = other DNA
gcccacgcccctattgtataggctgggagccgttcagaacgagattaccaccacacatcccatcaccaaatacatcatga

SEQ ID NO: 105653 - DNA, 80 bp, synthetic construct
  source 1..80: mol_type = other DNA
aagctggagaggccgcggccatctttatgacggccacccctccaggcacatctgacccattcccggacaccaattcacca

SEQ ID NO: 105654 - DNA, 80 bp, synthetic construct
  source 1..80: mol_type = other DNA
atcacatctactcgagtgtggctaaaagtgcgtgatgagaagacttccgaatgtgatagtgcaatcattggaacagcaat

SEQ ID NO: 105655 - DNA, 80 bp, synthetic construct
  source 1..80: mol_type = other DNA
ctttctgtaggggtaggcatctacctgctccccaaccgatgagcggggagctaaacactccaggccaataggccatcctg

SEQ ID NO: 105656 - DNA, 80 bp, synthetic construct
  source 1..80: mol_type = other DNA
tacctggtcgggtcacagctcccatgtgaacccgaaccggacgtaacagtgctcacttccatgctcaccgacccctccca

SEQ ID NO: 105657 - DNA, 80 bp, synthetic construct
  source 1..80: mol_type = other DNA
tttgctccaggggacacgccgtaggcttgttcagagcggccgtgtgtgctaggggtgtggccaaatctatcgacttcatc

SEQ ID NO: 105658 - DNA, 80 bp, synthetic construct
  source 1..80: mol_type = other DNA
agtttgtgaaaaaagtgaacagccacgccgccttgggagccatgtttgaagagcaaaaccagtggaagaacgcacgagaa

SEQ ID NO: 105659 - DNA, 80 bp, synthetic construct
  source 1..80: mol_type = other DNA
gttcctggttggccaagcagaggcggcgttggagaacgtggtcatgctcaacgcggcttcggctgcgagttgccaggggc

SEQ ID NO: 105660 - DNA, 80 bp, synthetic construct
  source 1..80: mol_type = other DNA
ttgaccagccagggcgtgaacgccgtggcatattacagaggtctagatgtcgccgttatacccgtgtcaggagacgtggt

SEQ ID NO: 105661 - DNA, 80 bp, synthetic construct
  source 1..80: mol_type = other DNA
cccccacaactcgcccgttggcgatcggcgggaaaaccatgaaaaccaagccactcccgacagccccgatggcgtgggcc

SEQ ID NO: 105662 - DNA, 80 bp, synthetic construct
  source 1..80: mol_type = other DNA
cgcatggtgttgatgacgcatttcttcggaatactccagtcgcaagacatactccacaaagcattggacttcgacatgta

SEQ ID NO: 105663 - DNA, 80 bp, synthetic construct
  source 1..80: mol_type = other DNA
gatgcctcctctagaaggcgaaccaggcgatcccgacttaggatcggggtcgtggtccaccgtcagtgaggaggaggaca

SEQ ID NO: 105664 - DNA, 80 bp, synthetic construct
  source 1..80: mol_type = other DNA
tcctctgctagtcagctttccgcgccatccttgaaagccacatgtaccgcccaccacagttcccctggtcaggacctcat

SEQ ID NO: 105665 - DNA, 80 bp, synthetic construct
  source 1..80: mol_type = other DNA
ggaagtgagtggggtcaaaggatttactcttggaagagacggccatgagaaacccatgaatgtgcaaagtctgggatgga

SEQ ID NO: 105666 - DNA, 80 bp, synthetic construct
  source 1..80: mol_type = other DNA
tttgcgcaagggccaaagccccccctccttcttgggacactatgtggaaatgccttattcgcctcaagcctatgcttaca

SEQ ID NO: 105667 - DNA, 80 bp, synthetic construct
  source 1..80: mol_type = other DNA
gttccgggcacggtttccctgcttttacgccacggcgagctcttatgccggggtgaactccacggccgaggtgcgcggtg

SEQ ID NO: 105668 - DNA, 80 bp, synthetic construct
  source 1..80: mol_type = other DNA
ggtatggaagcagtaacttttgtaaatgttaagtttaggggagatggttataatggaatagtgtttatggccaataccaa

SEQ ID NO: 105669 - DNA, 80 bp, synthetic construct
  source 1..80: mol_type = other DNA
gtacaggcagcactgcttagcataggccgctggacgggcacttacatctatgaccatctcgcccccctcgagacatgggc

SEQ ID NO: 105670 - DNA, 80 bp, synthetic construct
  source 1..80: mol_type = other DNA
aggccggccaggaccaacagacccacggccagcgccccaaaggggttggacatgaaggaggacacgcccgacacggccga

SEQ ID NO: 105671 - DNA, 80 bp, synthetic construct
  source 1..80: mol_type = other DNA
aatacaccacaggagccgaggtaccggtgacttcagagaaggtaaataaaaagtctaaatccacggttttgttgttttca

SEQ ID NO: 105672 - DNA, 80 bp, synthetic construct
  source 1..80: mol_type = other DNA
gcaccctccggggcgcgatctctgacaccatgctcgtgcgggtcgagtgacctctatctggtcacaaggaacgctgatgt

SEQ ID NO: 105673 - DNA, 80 bp, synthetic construct
  source 1..80: mol_type = other DNA
tttctccatacgggacgtcgaggaaaccaatatgataaccctcttggtgaaactggcactgataacggtgtcaggtctct

SEQ ID NO: 105674 - DNA, 80 bp, synthetic construct
  source 1..80: mol_type = other DNA
ttcgggctcgcctggacactatcctgacgccttcatacccaactttgacgcagtgagtgaatctgtggatggctatgatt

SEQ ID NO: 105675 - DNA, 80 bp, synthetic construct
  source 1..80: mol_type = other DNA
agttgtttagtgtactggaccgacaaagaccgattgtgaaagggaaataagcctagggtagttataacaaatttgtattt

SEQ ID NO: 105676 - DNA, 80 bp, synthetic construct
  source 1..80: mol_type = other DNA
cgaaaaatgcgcttccccgccgcctgcccctatccctgcggccacacatttctccggccatgagcgcgggacccccagcc

SEQ ID NO: 105677 - DNA, 80 bp, synthetic construct
  source 1..80: mol_type = other DNA
gcctcaccatgggcggcgatgccctacgagtgccctttttagatttcgcgaccgcgacccccaagcgccaccagaccgtg

SEQ ID NO: 105678 - DNA, 80 bp, synthetic construct
  source 1..80: mol_type = other DNA
aggccgaagtccgcatgactaatgctggcgcacaactcgcgggcggcgcacgtcatagtttcaggtataaaggtcgccct

SEQ ID NO: 105679 - DNA, 80 bp, synthetic construct
  source 1..80: mol_type = other DNA
aattgtagtggcgctttgtcacctgaagaggaacctaattgtcgtccgcctctaactaatatcaaagttgtactttcaac

SEQ ID NO: 105680 - DNA, 80 bp, synthetic construct
  source 1..80: mol_type = other DNA
gccaggaaagaaggcaatgtcaccggagggcatccagtctctagaggcacagcaaaactgagatggctggtcgaacggag

SEQ ID NO: 105681 - DNA, 80 bp, synthetic construct
  source 1..80: mol_type = other DNA
attttgggttttaccaggtaaaaacagaaaccaccatcctcgatgtagacctgagaccagcttcagcatggacgctctat

SEQ ID NO: 105682 - DNA, 80 bp, synthetic construct
  source 1..80: mol_type = other DNA
aagagtttggtaacgcgattggagggagtcacgggggttcgagttacacggtgtatatagataagacccggtgatcaccg

SEQ ID NO: 105683 - DNA, 80 bp, synthetic construct
  source 1..80: mol_type = other DNA
ggagggcgtcttcacgggtctcacccatatagacgcccacttcctatcccagacaaagcagagtggggaaaaccttcctt

SEQ ID NO: 105684 - DNA, 80 bp, synthetic construct
  source 1..80: mol_type = other DNA
cgtcctccgcctcttcctccgccgccccgcgctcgcccctcgccccccagggcgtggaggccaagagggcggcgccgcgc

SEQ ID NO: 105685 - DNA, 80 bp, synthetic construct
  source 1..80: mol_type = other DNA
gacgaccactaccaggacgtgctcaaggaggctaaggccaaggcatccactgtgaaggcagacttgctatccgtcgagga

SEQ ID NO: 105686 - DNA, 80 bp, synthetic construct
  source 1..80: mol_type = other DNA
gccgtcacacaagtagttgactttagtcttgaccccaccttcacaataaccacccagaccgtgcctcaggacgctgtctc

SEQ ID NO: 105687 - DNA, 80 bp, synthetic construct
  source 1..80: mol_type = other DNA
cccacaagccatcatggacatgatcgctggtgctcactggggagtcctggcgggcatagcgtatttctccatggtggtga

SEQ ID NO: 105688 - DNA, 80 bp, synthetic construct
  source 1..80: mol_type = other DNA
aagacaactaaggtaagtgggcggagttatgtgggactataaaatgcttaaaggaattgtaaagttgtttttgttatttt

SEQ ID NO: 105689 - DNA, 80 bp, synthetic construct
  source 1..80: mol_type = other DNA
cccccgcgcggactggaggcggccctcgagcggctgttcgggcgcctccggataaccaacacgattcacggagccgagga

SEQ ID NO: 105690 - DNA, 80 bp, synthetic construct
  source 1..80: mol_type = other DNA
tggcggacgccaggatttgtgcctgcctgtggatgctcatcttgctgggccaggccgaagcagcactggagaagctggtc

SEQ ID NO: 105691 - DNA, 80 bp, synthetic construct
  source 1..80: mol_type = other DNA
ttccagcgacatgccatccccggttcccaaggaggagcccgacggatctgacgcagggtctgaggctgaatcattttctt

SEQ ID NO: 105692 - DNA, 80 bp, synthetic construct
  source 1..80: mol_type = other DNA
gcaactcgtaagacttcagagcggtcacaaccccgcggacggcgacagcctattcccaaggcacgcccgagcggaggacg

SEQ ID NO: 105693 - DNA, 80 bp, synthetic construct
  source 1..80: mol_type = other DNA
gtcgccgcataaggcgtgctcattgttatctgggcgctggtcattaccaccgccgcctccccggccgatatctcgccgcg

SEQ ID NO: 105694 - DNA, 80 bp, synthetic construct
  source 1..80: mol_type = other DNA
gtctggaattgacttcaatgagatgatcttaatgaaaatgaaaaagaaaacatggctcgtgcataagcaatggtttttgg

SEQ ID NO: 105695 - DNA, 80 bp, synthetic construct
  source 1..80: mol_type = other DNA
ctggagagaggaccttctgtcttcacgcagaaagcgtctagccatggcgttagtatgagtgtcgtgcagcctccaggccc

SEQ ID NO: 105696 - DNA, 80 bp, synthetic construct
  source 1..80: mol_type = other DNA
ccgccgccggctccgcccgcgcggcatctcattagcgcccggcgcgggcggcttccgcttccgcccgcgatgctaatgag

SEQ ID NO: 105697 - DNA, 80 bp, synthetic construct
  source 1..80: mol_type = other DNA
ccccccccgctgtgccagaatcctaccaggtgggataccttcatgcccccactggaagcgggaaaagcaccaaggtcccc

SEQ ID NO: 105698 - DNA, 80 bp, synthetic construct
  source 1..80: mol_type = other DNA
atcctggtgcggaacatcactggcggtaaatatgtgcaaatggtgcttctggcactagcccgggggttcaatacttacct

SEQ ID NO: 105699 - DNA, 80 bp, synthetic construct
  source 1..80: mol_type = other DNA
acgtaaagttcccgggtggcggtcagatcgttggtggagtttacgtgctgcctcgcaggggcccaactttgggtgtgcgt

SEQ ID NO: 105700 - DNA, 80 bp, synthetic construct
  source 1..80: mol_type = other DNA
gagagattcgaggcgacacctttgccacggaacctcacgaactggtaataaaacctctggaacaagacagtaaaaaacgg

SEQ ID NO: 105701 - DNA, 80 bp, synthetic construct
  source 1..80: mol_type = other DNA
actgcttgcaacactgcgggggaaacatctcctttgcccgacgctacctcctcttccatcacggtgtggccttccctcgc

SEQ ID NO: 105702 - DNA, 80 bp, synthetic construct
  source 1..80: mol_type = other DNA
atgttctacccgggtgtagtgtttgacatcaccaagtggctgttggcaattcttggacccggctacctccttaaagctgc

SEQ ID NO: 105703 - DNA, 80 bp, synthetic construct
  source 1..80: mol_type = other DNA
agtgttgtgggacacacccagccctccggaagtggaaagagcagttcttgatgatggcatctatagaattttgcaaagag

SEQ ID NO: 105704 - DNA, 80 bp, synthetic construct
  source 1..80: mol_type = other DNA
caggcgacgccccgcaaccagcatatgacctggaactaataacatcatgttcctccaacgtctcagtcgcgcacgacgcg

SEQ ID NO: 105705 - DNA, 80 bp, synthetic construct
  source 1..80: mol_type = other DNA
gcggcgttcacgaaagcaaaacccgacgtcgcgagcagccccgttaggcgccagaagagagggaggcgcgggccctgctc

SEQ ID NO: 105706 - DNA, 80 bp, synthetic construct
  source 1..80: mol_type = other DNA
tttggccattactcttactccttttcctcctgccccaaagggctctagccctggactcaagcgatggcgggactgtgggt

SEQ ID NO: 105707 - DNA, 80 bp, synthetic construct
  source 1..80: mol_type = other DNA
gtccttcctcccgcccctcccgcccccaaacgcaagtggtgtccctcccgcccctcccgcccctcgccacaaacgcttgc

SEQ ID NO: 105708 - DNA, 80 bp, synthetic construct
  source 1..80: mol_type = other DNA
gattcaggactaggcgttgttgaggttacgtcatctgcctccgcggagagagacgacgtgtctgaagcggactcttatag

SEQ ID NO: 105709 - DNA, 80 bp, synthetic construct
  source 1..80: mol_type = other DNA
caagcggcacaacagactggggaatttgcctatggaaaaaaagggcgtttcggagacaaaattgctattcctttggacga

SEQ ID NO: 105710 - DNA, 80 bp, synthetic construct
  source 1..80: mol_type = other DNA
caggacttggtcgggtggccggcgcctgcgggggctaaatctcttgatccctgcacgtgcggttcgtccgacctgtattt

SEQ ID NO: 105711 - DNA, 80 bp, synthetic construct
  source 1..80: mol_type = other DNA
cgttcctgtacttggtcttcacctaccgacagtgccgggaccaggagctctgttgcgtgtacgtggtcaagagccagctc

SEQ ID NO: 105712 - DNA, 80 bp, synthetic construct
  source 1..80: mol_type = other DNA
ccactacacagctagacacaacagtgcagaatagtactgtgttggttaggtacttgctaagggaggaaagtactactaaa

SEQ ID NO: 105713 - DNA, 80 bp, synthetic construct
  source 1..80: mol_type = other DNA
tctggccgcccttgcagcctactgtttatcagtcggctgcgtcgtcattgtggggcacgttgagttgggaggcaagccag

SEQ ID NO: 105714 - DNA, 80 bp, synthetic construct
  source 1..80: mol_type = other DNA
cgctccaacactgtgggtccgcatggtcctgatgacccattttttctccgtcctcatggcccaggacaccctgggtcaag

SEQ ID NO: 105715 - DNA, 80 bp, synthetic construct
  source 1..80: mol_type = other DNA
tggtgctcatgacccacttcttccaaatactccaagcgcaggagcaactagataaggtgctagacttcgatatgtacgga

SEQ ID NO: 105716 - DNA, 80 bp, synthetic construct
  source 1..80: mol_type = other DNA
aaggcttatatcctgcagatttactcaaatatggaacattcccaattgctacaacaaacacagcgatctgtccgaagcct

SEQ ID NO: 105717 - DNA, 80 bp, synthetic construct
  source 1..80: mol_type = other DNA
cgaccaccagggcccggaagcggaaaaccaaaaagccgcccgagcggcccgaggcgaccccgccccccgacgccaacgcg

SEQ ID NO: 105718 - DNA, 80 bp, synthetic construct
  source 1..80: mol_type = other DNA
aatcataccagccagaacctcaagtgggagaggaaaactggcaaaacacagaaaacttctacggaggcagagctcttaaa

SEQ ID NO: 105719 - DNA, 80 bp, synthetic construct
  source 1..80: mol_type = other DNA
aggactggtctactccttgttccggttcttggctaagagacatttgggactgggtttgcactgtcctgtctgacttcaaa

SEQ ID NO: 105720 - DNA, 80 bp, synthetic construct
  source 1..80: mol_type = other DNA
ctagagtacatgaaggtggatcccaacattcagccggacgtaaaaatacgtcccataaaaaaagttgccccaggattagg

SEQ ID NO: 105721 - DNA, 80 bp, synthetic construct
  source 1..80: mol_type = other DNA
gaaaacagactggcttccaatggcagtggcagctatgggagttccacctctaccactttttatttttagcttgaaagaca

SEQ ID NO: 105722 - DNA, 80 bp, synthetic construct
  source 1..80: mol_type = other DNA
ggccttcgtgggcgctggcattgtcggcgcagcggtaggcagcgtgggggtcggcaagatgcttgtagatatacttgccg

SEQ ID NO: 105723 - DNA, 80 bp, synthetic construct
  source 1..80: mol_type = other DNA
ccttgaaggctacctgtaccacccataagacggcatatgactgtgacatggtggatgctaatcttttcatgggaggtgat

SEQ ID NO: 105724 - DNA, 80 bp, synthetic construct
  source 1..80: mol_type = other DNA
ctgcccgaggaggcccgcactgccatacactcgctgactgagagactttacgtaggagggcccatgttcaacagcaaggg

SEQ ID NO: 105725 - DNA, 80 bp, synthetic construct
  source 1..80: mol_type = other DNA
cagcgcatatggacgaccgcgtccgacggagaggccgtggagcttgccagcgagacgctcatgaaacgcgagttgacgag

SEQ ID NO: 105726 - DNA, 80 bp, synthetic construct
  source 1..80: mol_type = other DNA
ttaaatacaaacagacgctatatagcacccgattttattcgcggtttggataaaacagaagacgataataccgataatat

SEQ ID NO: 105727 - DNA, 80 bp, synthetic construct
  source 1..80: mol_type = other DNA
cataccgaatgcgattcgcggcagttataacacgggtcatcccgggaaagttgttggcgcatgccattggcgtgggtact

SEQ ID NO: 105728 - DNA, 80 bp, synthetic construct
  source 1..80: mol_type = other DNA
gcagggtttttgagcatgaaactggaagatgtccttaaggaggaggctaatggccagaggtagccccttggtgaaggtat

SEQ ID NO: 105729 - DNA, 80 bp, synthetic construct
  source 1..80: mol_type = other DNA
accccgacaaacgacgagaggaaattcaccaggtttgccgtcggtggtccatcgagacagacaaactcagtccatctcgg

SEQ ID NO: 105730 - DNA, 80 bp, synthetic construct
  source 1..80: mol_type = other DNA
tgggagcacgtcgtcctgctattcctcctgttggcggacgcgcgcgtttgcgcctgcctgtggatgatgctgctaatatc

SEQ ID NO: 105731 - DNA, 80 bp, synthetic construct
  source 1..80: mol_type = other DNA
cgcctggccaaagctcgagcaattctggagtaagcacatgtggaacttcatcagcggtattcaatacctagcaggacttt

SEQ ID NO: 105732 - DNA, 80 bp, synthetic construct
  source 1..80: mol_type = other DNA
ggccttcaagaaaaaccaccaggagtactagcgttgagctacaaagatcccattgttaccgaaaatggaacccttacact

SEQ ID NO: 105733 - DNA, 80 bp, synthetic construct
  source 1..80: mol_type = other DNA
aattatgacattaccctattttggcttaaaattgaaaattcggctatttacaatgtaaaaaacacaatagaagccaccga

SEQ ID NO: 105734 - DNA, 80 bp, synthetic construct
  source 1..80: mol_type = other DNA
gctctgccaatgagcttttgtgccccaccgactgcttccgtaaacatccggaagctacatatcagcggtgtggatcggga

SEQ ID NO: 105735 - DNA, 80 bp, synthetic construct
  source 1..80: mol_type = other DNA
tagtggaccccatcaatgtggtaggactactgttactcacaaggagtggaaaacggagctggcctcctagtgaagtgctt

SEQ ID NO: 105736 - DNA, 80 bp, synthetic construct
  source 1..80: mol_type = other DNA
gcgtctgagcagctgcaaaccgattaccttttttaaacagggctggggcccgctgaccgatgcgaacattaccggcagca

SEQ ID NO: 105737 - DNA, 80 bp, synthetic construct
  source 1..80: mol_type = other DNA
actgcaatgacagcctgaacaccggcttcattgcggccttgttttacagccaccggttcaattcctcgggatgcccccag

SEQ ID NO: 105738 - DNA, 80 bp, synthetic construct
  source 1..80: mol_type = other DNA
ctgcccttgagaacttggtcatgttaaatgctgcctccgctgcgagctatcacggctgggtgtggtgcatcctttttgtg

SEQ ID NO: 105739 - DNA, 80 bp, synthetic construct
  source 1..80: mol_type = other DNA
cctctgtgagtgctatgacgcaggctgcgcttggtacgagctcacgcctgccgagactacagttagactgcgagcgtaca

SEQ ID NO: 105740 - DNA, 80 bp, synthetic construct
  source 1..80: mol_type = other DNA
gtagatcgcggaacttgggtaaagtcatcgataccctcacctgcggctttgccgacctcatggggtacatccctgtcgta

SEQ ID NO: 105741 - DNA, 80 bp, synthetic construct
  source 1..80: mol_type = other DNA
tcaacgtggtgacctatatatgcgatgatcacatgccgcgggtggtgacgcacacaaacgccacggcctgttcttgttat

SEQ ID NO: 105742 - DNA, 80 bp, synthetic construct
  source 1..80: mol_type = other DNA
gaagtctagcctggagaagctagagcagttttgggcgaagcatatgtggaatttcatcagtggtattcaataccttgctg

SEQ ID NO: 105743 - DNA, 80 bp, synthetic construct
  source 1..80: mol_type = other DNA
ccgtggtcaagaccatgtgaatgcactttctctcgccaggcgtgttataatgagcatatacaaggggctgcttgtgaagc

SEQ ID NO: 105744 - DNA, 80 bp, synthetic construct
  source 1..80: mol_type = other DNA
gtcccttggagtgtttctccttctcatgcaaaggaaaggtattggcaaaatcggtctggggggtgtagtcctgggcgctg

SEQ ID NO: 105745 - DNA, 80 bp, synthetic construct
  source 1..80: mol_type = other DNA
tagcgttctggacttggggggaactggtgcttcttccaaccccttcgcccacctacgtcctcagggccgcttgggcagat

SEQ ID NO: 105746 - DNA, 80 bp, synthetic construct
  source 1..80: mol_type = other DNA
accaactgttcatggatgcgccttaccaccacggggcgctccaccggtgcctccccctcggaggaagagaacaattcagc

SEQ ID NO: 105747 - DNA, 80 bp, synthetic construct
  source 1..80: mol_type = other DNA
gtttcattttcgctatcactataataacacttttcagccgaacggctcggttgtatggctgttatcgttgtattatttgg

SEQ ID NO: 105748 - DNA, 80 bp, synthetic construct
  source 1..80: mol_type = other DNA
gcagggctgaaggactgcacgatgctggtgaacggcgacgacttagttgttatcgccgaaagcggtggcgtggaggagga

SEQ ID NO: 105749 - DNA, 80 bp, synthetic construct
  source 1..80: mol_type = other DNA
aactgggctaaggtcgtggttgtgctgctactgtttgctggggtcgatgcaaccaccatgacctcaggtggagcggcagc

SEQ ID NO: 105750 - DNA, 80 bp, synthetic construct
  source 1..80: mol_type = other DNA
cccccggtgacgaccgctccttcggcggtcggaggctggatgggcgcgagcgtgggagcgggaaaggccccgcgagccga

SEQ ID NO: 105751 - DNA, 80 bp, synthetic construct
  source 1..80: mol_type = other DNA
ggccacgaaaagcccatgaatgtgcagagcctggggtggaacatcatcaccttcaaggacaagactgatgtccatcgcct

SEQ ID NO: 105752 - DNA, 80 bp, synthetic construct
  source 1..80: mol_type = other DNA
tcgaccagggctggggccctatcagctataccaacggaagcggccccgaacaccgcccctactgttggcactacccgcca

SEQ ID NO: 105753 - DNA, 80 bp, synthetic construct
  source 1..80: mol_type = other DNA
accacagtcccgaatacagggacgagaacgtagccagaatattaaggctcatatgaccatgcagactctgctcatattgc

SEQ ID NO: 105754 - DNA, 80 bp, synthetic construct
  source 1..80: mol_type = other DNA
tgtgaccgacaatgtgcacgtgtggactgagcaatacaaattccaacccgagtcgccagccaaacttgcagctgctatta

SEQ ID NO: 105755 - DNA, 80 bp, synthetic construct
  source 1..80: mol_type = other DNA
gccaacccatccccagggcgcgccgaaccgagggccggtcctgggctcagcccgggtacccttggcccctatatgggaat

SEQ ID NO: 105756 - DNA, 80 bp, synthetic construct
  source 1..80: mol_type = other DNA
caccccaacatagaggaggtggccctcggacacgagggtgagatccccttctatgggaaggccattcctctctcagccat

SEQ ID NO: 105757 - DNA, 80 bp, synthetic construct
  source 1..80: mol_type = other DNA
tggaacaccaaatgtgggcgtccattaaagatgagttgaacaccctattcagagagaacggagtggacctgagcgttgtg

SEQ ID NO: 105758 - DNA, 80 bp, synthetic construct
  source 1..80: mol_type = other DNA
ttgtcacccggcgccctcgttgtcggtgtggtctgcgctgcagtattgcgtagacacgtcggcccttccgagggagccac

SEQ ID NO: 105759 - DNA, 80 bp, synthetic construct
  source 1..80: mol_type = other DNA
ggaaagtggctgtcgaggacgtatccctgcaccaagatctgtttgaagttcgggtggcgtgggttggcgaagatgggctc

SEQ ID NO: 105760 - DNA, 80 bp, synthetic construct
  source 1..80: mol_type = other DNA
atgggaagttcctggccgatggaggctgtagtgggggggcctatgacatcatcatttgtgacgagtgccactctaccgat

SEQ ID NO: 105761 - DNA, 80 bp, synthetic construct
  source 1..80: mol_type = other DNA
gtcggcttacggcggtgattttggcgatacgccgaacgatcgccagttctgtatgaacggtctggtctttgccgaccgca

SEQ ID NO: 105762 - DNA, 80 bp, synthetic construct
  source 1..80: mol_type = other DNA
tgtgctacatctgctgccgcaagcgtcccagggcatacaatcatatggtagacccactactcagcttctcttactgagac

SEQ ID NO: 105763 - DNA, 80 bp, synthetic construct
  source 1..80: mol_type = other DNA
gcccgacggcttccgggtagtcgtcctcctcgtactgcagctcctctaggaacagcggcgacggcgccacccgcgaaccg

SEQ ID NO: 105764 - DNA, 80 bp, synthetic construct
  source 1..80: mol_type = other DNA
gtcgaattgagattgattttgactattgcccaggaacgaccgttaccatcagtgaaaactgtggccatcgtggtccatcc

SEQ ID NO: 105765 - DNA, 80 bp, synthetic construct
  source 1..80: mol_type = other DNA
cgcagaggagcgcgaccgccggcgctccttgccgtgatagggcccgggccgggagccgcggcgatggtggtcggtgtcat

SEQ ID NO: 105766 - DNA, 80 bp, synthetic construct
  source 1..80: mol_type = other DNA
tctcttctaatccaagagcaaccaaataaggaacaggcagaaagcaatgagcaagacgctgagctccatgactacctagg

SEQ ID NO: 105767 - DNA, 80 bp, synthetic construct
  source 1..80: mol_type = other DNA
ctggaggtcgtcaccagcacgtgggtgctggtgggcggcgtcctggccgctctggccgcttactgcctgtctacaggcag

SEQ ID NO: 105768 - DNA, 80 bp, synthetic construct
  source 1..80: mol_type = other DNA
tggccaggggagtgaagagggagaggagcgatggaggtaataccgggatgatgaccgagctgacggccagcctgatgaat

SEQ ID NO: 105769 - DNA, 80 bp, synthetic construct
  source 1..80: mol_type = other DNA
aaagcacccactaccactaagcctaccactgtgcccactacacatccaaccaccgcagtcagtacaactattgaaaccac

SEQ ID NO: 105770 - DNA, 80 bp, synthetic construct
  source 1..80: mol_type = other DNA
gcatcctatgggttccaatactctccggcagaacgggtcgattttctcctcaaggcttggggaagtaagaaggacccaat

SEQ ID NO: 105771 - DNA, 80 bp, synthetic construct
  source 1..80: mol_type = other DNA
cgttgggtggccagcccctccgggggccaagtctcttgaaccttgcacctgcgggtccgcagacttatacttggttactc

SEQ ID NO: 105772 - DNA, 80 bp, synthetic construct
  source 1..80: mol_type = other DNA
ggctcgccgacccgagggcaggacctgggctcagcccgggtacccctggcccctctatggcaatgagggcatggcgtgtg

SEQ ID NO: 105773 - DNA, 80 bp, synthetic construct
  source 1..80: mol_type = other DNA
ccagcacatcagtcttatccaaaagaatggtagctggcatgtgaacaggacagcgcttaattgttttgactccctgcgaa

SEQ ID NO: 105774 - DNA, 80 bp, synthetic construct
  source 1..80: mol_type = other DNA
gacacacaccctaaacccacattaccttttcccctcttaatccccctcctcccatcactaattctccccgcccgccctct

SEQ ID NO: 105775 - DNA, 80 bp, synthetic construct
  source 1..80: mol_type = other DNA
cctgtggcaaggagggcagtatcatccctaacagagcggctctacgtaggtggccccatggtgaactccaagggacagtc

SEQ ID NO: 105776 - DNA, 80 bp, synthetic construct
  source 1..80: mol_type = other DNA
ggtggcgtcgtgctcctcttgactattgtcacactgtctccgcattacaagagctggcttgcccggataatatggtggct

SEQ ID NO: 105777 - DNA, 80 bp, synthetic construct
  source 1..80: mol_type = other DNA
ccgtaacatcggaattgaaagtgaagtaccaaatctagacataattgggaaaagaatagaaaaaataaaacaagagcatg

SEQ ID NO: 105778 - DNA, 80 bp, synthetic construct
  source 1..80: mol_type = other DNA
ccagggttgggggcccttgtcatatgccaccataaatggctcatccaatgacaaaccttattgctggcattacccgccca

SEQ ID NO: 105779 - DNA, 80 bp, synthetic construct
  source 1..80: mol_type = other DNA
ggaagttccttgccgacgggggttgttcaggtggtgcctatgatataatcatatgtgatgaatgccatgccatcgatgct

SEQ ID NO: 105780 - DNA, 80 bp, synthetic construct
  source 1..80: mol_type = other DNA
tcttggctttttgaatgaggaccactgggcctctagggggtccagtggatctggagtggagggaataagcctgaactacc

SEQ ID NO: 105781 - DNA, 80 bp, synthetic construct
  source 1..80: mol_type = other DNA
gggtgtataatcaccagcctaactggccgggacaaaaaccaggcggagggtgaggtccagatcgtgtcaactgctgccca

SEQ ID NO: 105782 - DNA, 80 bp, synthetic construct
  source 1..80: mol_type = other DNA
tacaggcagtcgcagcgcatcaccattaataggcgttttagcccgttttgcatttttggatattcggcttgcataaaagc

SEQ ID NO: 105783 - DNA, 80 bp, synthetic construct
  source 1..80: mol_type = other DNA
ggcaatactatgacctgcttcataaaagctgaggcagcctgccgtgcggcaggtataaccaattatgacatgttggtctg

SEQ ID NO: 105784 - DNA, 80 bp, synthetic construct
  source 1..80: mol_type = other DNA
tatcgcttgggcgcggtcagcaatgaagtcaccctcacccaccccgtgaccaagtacatctccacatgcatgcaggcgga

SEQ ID NO: 105785 - DNA, 80 bp, synthetic construct
  source 1..80: mol_type = other DNA
catgagaatatcaggacctaagacctgcttgaatacctggcaggggacattccccatcaactgttacacggagggctcgt

SEQ ID NO: 105786 - DNA, 80 bp, synthetic construct
  source 1..80: mol_type = other DNA
ggcgacggagtctgtaacaccacgtgcccgtgcggcgctcaaattgcgggccatgtcaagaacgggactatgaaaatagt

SEQ ID NO: 105787 - DNA, 80 bp, synthetic construct
  source 1..80: mol_type = other DNA
gtgtaccttgggtatcctgtctgagggtaactccagggtgcgccacaatgtggcctccgactgtggttgcttcatgctag

SEQ ID NO: 105788 - DNA, 80 bp, synthetic construct
  source 1..80: mol_type = other DNA
atgtccagtacatcctcctaaagcttggggctatgacaggcacgtacatctatgaccacctcagccctcttgctgattgg

SEQ ID NO: 105789 - DNA, 80 bp, synthetic construct
  source 1..80: mol_type = other DNA
tttgtacgacgtggtcagcaaactccccccagccgtgatgggaagctcctacggatttcaatactcaccaggacagcgag

SEQ ID NO: 105790 - DNA, 80 bp, synthetic construct
  source 1..80: mol_type = other DNA
gggctaaggtcttggcagttttggtgctttttgcgggagttgacggaaccacgtacgtcggctccgctgtaagtcgcacc

SEQ ID NO: 105791 - DNA, 80 bp, synthetic construct
  source 1..80: mol_type = other DNA
tggaaggcgatagttgtgtgaccataatgtcaaaggacaagccaaccattgatgtcaaaatgatgaacatggaagcagcc

SEQ ID NO: 105792 - DNA, 80 bp, synthetic construct
  source 1..80: mol_type = other DNA
cagtggatgaacaggctcatagcgtttgcctcacgtggcaatcacgtttcaccaacacactatgtgcctgagacagacgc

SEQ ID NO: 105793 - DNA, 80 bp, synthetic construct
  source 1..80: mol_type = other DNA
tacgccatcctgttcatctgtgtggcgtggtatgtgagaggtaggctcccagcagccgccgcctacgcggcgtgcggaat

SEQ ID NO: 105794 - DNA, 80 bp, synthetic construct
  source 1..80: mol_type = other DNA
taaacatattaggaaccagcctgtgatgctggatgtgaccgaggagctgaggcccgatcacttggtgctggcctgcaccc

SEQ ID NO: 105795 - DNA, 80 bp, synthetic construct
  source 1..80: mol_type = other DNA
gaagcccttgagaaagcactcgacttcgacatgtacggagtcacctactctatcactccactggatcttccagacatcat

SEQ ID NO: 105796 - DNA, 80 bp, synthetic construct
  source 1..80: mol_type = other DNA
ggatcgcctcaccaccgacgtgaaggaggcgctggctcagaaggagcggtttctgagggacagcaatctgggatctctgg

SEQ ID NO: 105797 - DNA, 80 bp, synthetic construct
  source 1..80: mol_type = other DNA
tcttcacggaagtggacggcatcaggatacaccgccacgcccctaagtgcaaacccttgctgcgggacgaagtgtcgttc

SEQ ID NO: 105798 - DNA, 80 bp, synthetic construct
  source 1..80: mol_type = other DNA
gccaatcaaccctttgagtaactcgctgttgcgataccataacaaggtgtactgtacaacatcaaagagcgcctcacaga

SEQ ID NO: 105799 - DNA, 80 bp, synthetic construct
  source 1..80: mol_type = other DNA
gcgcttgccgacttcataaagtttgctgagggcaggagaggggctgctgagatgctggtcgtgctgagtgaactcccaga

SEQ ID NO: 105800 - DNA, 80 bp, synthetic construct
  source 1..80: mol_type = other DNA
acccatcactgcattcgaccaagggtggggtcctttggggagtgctaacatctcaggcagctcagaggaccgaccatact

SEQ ID NO: 105801 - DNA, 80 bp, synthetic construct
  source 1..80: mol_type = other DNA
caacatatccggtcccagtgaggacagaccatactgctggcactacccacccaggccctgcaacataaccaaggcattga

SEQ ID NO: 105802 - DNA, 80 bp, synthetic construct
  source 1..80: mol_type = other DNA
gctgtgatgggcgtgggaagtcgaccagatcgaccactgacagcgggaaggtcattcctgaatggtgttgccgctcatgc

SEQ ID NO: 105803 - DNA, 80 bp, synthetic construct
  source 1..80: mol_type = other DNA
ccagtgacagctcgtcggggcagagagattctattgggaccggcagatgactaccgaggcgcagggtggcaattgctcgc

SEQ ID NO: 105804 - DNA, 80 bp, synthetic construct
  source 1..80: mol_type = other DNA
aggccatatcccacatcaactccgtgtggcgagacctcctggaggacagtgtgacacccatagacaccaccatcatggca

SEQ ID NO: 105805 - DNA, 80 bp, synthetic construct
  source 1..80: mol_type = other DNA
aaagagcgtggacatgtacattgaaagagcaggtgacatcacatgggaaaaagatgcggaagtcactggaaacagtcccc

SEQ ID NO: 105806 - DNA, 80 bp, synthetic construct
  source 1..80: mol_type = other DNA
aaacaacaaccaggctgagagcttacttcaacacaccaggcctccctgtctgccaagaccatcttgagttctgggagagc

SEQ ID NO: 105807 - DNA, 80 bp, synthetic construct
  source 1..80: mol_type = other DNA
ccaccacttgagggcgagcctggtgacccagacctgagttccgggtcatggtctacggtcagtgacgaggatgacgtaaa

SEQ ID NO: 105808 - DNA, 80 bp, synthetic construct
  source 1..80: mol_type = other DNA
agcacatgtggaactttgtcagcgggattcagtacttggcgggcttatccaccctgcccggcaacccagccgtggcatca

SEQ ID NO: 105809 - DNA, 80 bp, synthetic construct
  source 1..80: mol_type = other DNA
actgtagatttcagtctggaccccaccttctccatcgagactaccactacaccccaggactcagtgtcccggagccagcg

SEQ ID NO: 105810 - DNA, 80 bp, synthetic construct
  source 1..80: mol_type = other DNA
tgtttgcatcggagcgcacgcgggaaaaaaaatcgaacaggcgtcgatgcgacgccacctcgatcgtgctaaggagggac

SEQ ID NO: 105811 - DNA, 80 bp, synthetic construct
  source 1..80: mol_type = other DNA
tcattgtgctacacccaaacaatgatggaatccatagattggacggactgaaacacatgttcttttctcttacagtatga

SEQ ID NO: 105812 - DNA, 80 bp, synthetic construct
  source 1..80: mol_type = other DNA
ctatcgccatacagacggaggtgaggcggtgcggtggtggggggggcgcgccgcccggtcgcacatcctacccgccaaag

SEQ ID NO: 105813 - DNA, 80 bp, synthetic construct
  source 1..80: mol_type = other DNA
acctgggaggctgcaaactgtggaagctgtacgcacagtgtagcagactagtggttagaggagacccctcccatgacaca

SEQ ID NO: 105814 - DNA, 80 bp, synthetic construct
  source 1..80: mol_type = other DNA
aagtatgctgcataattaccgttcttttatattggagcgatctggcttgttacctagcatgtgctgtgcgcttccttcag

SEQ ID NO: 105815 - DNA, 80 bp, synthetic construct
  source 1..80: mol_type = other DNA
tcgtaggggcagcggtaggcagtgtgggcctggtgaaggttttggtggacatcttggcgggctacggagccggtatctcg

SEQ ID NO: 105816 - DNA, 80 bp, synthetic construct
  source 1..80: mol_type = other DNA
gcagacgtcgttccagctcgtagacggggcgacactcgtgcctccctgctcagcccgagacccattagctatctcaaggg

SEQ ID NO: 105817 - DNA, 80 bp, synthetic construct
  source 1..80: mol_type = other DNA
cctcaaacctaccaggtggcccacctacacgctcccacaggaagtggcaagagcactaaagtgccctcagcatatgctgc

SEQ ID NO: 105818 - DNA, 80 bp, synthetic construct
  source 1..80: mol_type = other DNA
atctacaacaactacctcggcgggcacgccaagcccccgcccgaccgcgtgtacgggctgttccgccaggcggtcgagat

SEQ ID NO: 105819 - DNA, 80 bp, synthetic construct
  source 1..80: mol_type = other DNA
tatcccgcggcgctgtcggccatggccgctaggaaggccagggaagaggccgggtcgctggcggccgcgcccagggccgt

SEQ ID NO: 105820 - DNA, 80 bp, synthetic construct
  source 1..80: mol_type = other DNA
gatactgtccacacgaactcaatcgggtggccggaagcctcaggaaactcggggtacccccggcgtggagacatcgggcc

SEQ ID NO: 105821 - DNA, 80 bp, synthetic construct
  source 1..80: mol_type = other DNA
cagccttgaccccactttcaccatcgagaccacaacagtgcctcaggacgccgtcagcaggagccaacgcagaggccgaa

SEQ ID NO: 105822 - DNA, 80 bp, synthetic construct
  source 1..80: mol_type = other DNA
agtgacaacgaggagcagagtgtagtctgctgctccatgtcatactcgtggaccggtgccctgataacaccatgtagtgc

SEQ ID NO: 105823 - DNA, 80 bp, synthetic construct
  source 1..80: mol_type = other DNA
ccgttggcaattcaggggggcagatggacatcaaaaggcagcatcacagtcctggacatgcatcctggatcgggaaagac

SEQ ID NO: 105824 - DNA, 80 bp, synthetic construct
  source 1..80: mol_type = other DNA
attggcaatatatgcatcatcccctattatgccggtaagatctataacctcgtgatttaaatcggcaatacgtgtttctt

SEQ ID NO: 105825 - DNA, 80 bp, synthetic construct
  source 1..80: mol_type = other DNA
accacatccaaacatcactgaggccgcgctgcctacgaccggggagatccccttctacgggaagaggatccccctggaat

SEQ ID NO: 105826 - DNA, 80 bp, synthetic construct
  source 1..80: mol_type = other DNA
agcgcgcctgccgcagcgtgctcctaaacgcaccgtcggaggccccccagattgtccgcggggcctccgaagacgtccgg

SEQ ID NO: 105827 - DNA, 80 bp, synthetic construct
  source 1..80: mol_type = other DNA
gccaacattacatggacctacgccccttctgtaccggttggggcctatccaaaatgaaatttgcctgacacaccctatca

SEQ ID NO: 105828 - DNA, 80 bp, synthetic construct
  source 1..80: mol_type = other DNA
aaactcctcgagatgctgggtgtcgcttacccccactctggcggccagggacagtgccgttcccacccagacggtcagaa

SEQ ID NO: 105829 - DNA, 80 bp, synthetic construct
  source 1..80: mol_type = other DNA
gtcaccagcacttgggtgctggtgggaggtctcctggcggctttggctgcgtattgcctatctacgggctgcgtagtcat

SEQ ID NO: 105830 - DNA, 80 bp, synthetic construct
  source 1..80: mol_type = other DNA
ggcttggcctgcgtcggtgccccggggcttcccgccttcccgaagaaactcattaccatacccggaaccccaggggacca

SEQ ID NO: 105831 - DNA, 80 bp, synthetic construct
  source 1..80: mol_type = other DNA
cctagagatcaactttgtaagggaaaacaaatcttacacccagaattcaatcacacatgtaatgaacaaaacctcacact

SEQ ID NO: 105832 - DNA, 80 bp, synthetic construct
  source 1..80: mol_type = other DNA
acatggaggaatgcttgtgagaaatccactttcacgaaactccacgcacgaaatgtactggatatctaatggcacaggta

SEQ ID NO: 105833 - DNA, 80 bp, synthetic construct
  source 1..80: mol_type = other DNA
acgagcccggcgtaaccaaatactgctagaacaagccgctctcaccgctacaccacgtaatcaacttaaccctccctctt

SEQ ID NO: 105834 - DNA, 80 bp, synthetic construct
  source 1..80: mol_type = other DNA
tggtccacgtgttccgatcagagtgatagcatcgtctgctgctccatgtcatactcctggactggggccctggtgacccc

SEQ ID NO: 105835 - DNA, 80 bp, synthetic construct
  source 1..80: mol_type = other DNA
gtggggggggaagacagaaacaggaacatagttagaaaacaagaatgcggtgcagccagagaatcacaggagacgaggtg

SEQ ID NO: 105836 - DNA, 80 bp, synthetic construct
  source 1..80: mol_type = other DNA
ctatggggtatcgagcacaggttcaatgccgcttgtaattggactcgtggggagcggtgtgagctggatgatagagacag

SEQ ID NO: 105837 - DNA, 80 bp, synthetic construct
  source 1..80: mol_type = other DNA
agcgttggaatcggtaagatgcttgttgacatacttgccggttatggtgctggggttgccggagcgctcgtggcatttaa

SEQ ID NO: 105838 - DNA, 80 bp, synthetic construct
  source 1..80: mol_type = other DNA
gggacatttatcacagcatgtcccgtgcccgaccccgctatttactcctgtgcctactcctacttagcgtgggggtaggc

SEQ ID NO: 105839 - DNA, 80 bp, synthetic construct
  source 1..80: mol_type = other DNA
ggcaggggccacccaggctggaagattcagtataactccatcggcgccatcttacacgctaaagttgggtgagtatggtg

SEQ ID NO: 105840 - DNA, 80 bp, synthetic construct
  source 1..80: mol_type = other DNA
cacatggtgtcccagcggttaatgtggccatgcttataacccccaacccgaccattgaaacaagtggtggcggattcata

SEQ ID NO: 105841 - DNA, 80 bp, synthetic construct
  source 1..80: mol_type = other DNA
tcctatgcaattgggtcccaactcccatgtgaacccgagccggatgtcatggtcgtcacatcactgctggtcgacccatc

SEQ ID NO: 105842 - DNA, 80 bp, synthetic construct
  source 1..80: mol_type = other DNA
acgcagctttccatacttccatgttcattttccaccatgccagccttatcaactggcctcattcacctgcatcagaacat

SEQ ID NO: 105843 - DNA, 80 bp, synthetic construct
  source 1..80: mol_type = other DNA
ctttatacgcgggccgccctgcgacacaatcacccgtccgtggtttcgaatctacacgacaggcccgcagacgcggctaa

SEQ ID NO: 105844 - DNA, 80 bp, synthetic construct
  source 1..80: mol_type = other DNA
ggatcagctgctttgtgcgcatgccccgggtgcagctcgcgtttcggttcatgggccccgaggacgccgttcgcacgcgg

SEQ ID NO: 105845 - DNA, 80 bp, synthetic construct
  source 1..80: mol_type = other DNA
ctagggtggtagcagcagaaatggcggaggccttgaaaggactcccggtgaggtatttgacaccagcagtgcaaagagaa

SEQ ID NO: 105846 - DNA, 80 bp, synthetic construct
  source 1..80: mol_type = other DNA
gcggacgtcatcccagcacggaggcgcggggatcgacgtggagctttgctctccccgaggcctctttcaacattaaaggg

SEQ ID NO: 105847 - DNA, 80 bp, synthetic construct
  source 1..80: mol_type = other DNA
aagaaggtgattacctggggtgctgactcagccgcgtgtggcgacatcatcgaaggcctaccggtttcggctaggttggg

SEQ ID NO: 105848 - DNA, 80 bp, synthetic construct
  source 1..80: mol_type = other DNA
acccgggtgcgtgccctgtgtccgcaccggtaacaggtcccaatgctggcatgccgcaacacctacgctagccgtgccta

SEQ ID NO: 105849 - DNA, 80 bp, synthetic construct
  source 1..80: mol_type = other DNA
gaatccaccgtgtcctctgccttggcggagctcgctgaaaaaacttttggtagctccgggtcatcggccgctgatagcgg

SEQ ID NO: 105850 - DNA, 80 bp, synthetic construct
  source 1..80: mol_type = other DNA
gcgcagtttttctaccaataaggtcgtaacgatgacatccagggcgcaatagtttaaagtttccagaataagattgtaat

SEQ ID NO: 105851 - DNA, 80 bp, synthetic construct
  source 1..80: mol_type = other DNA
cggttcaggaggtactcctcgcgatccttccagtaatcttcggcaggaaagccacgctggtctgcgcggtaagaacccag

SEQ ID NO: 105852 - DNA, 80 bp, synthetic construct
  source 1..80: mol_type = other DNA
caggccgtgcgggtcaaacagataggccgtgtcgccgtcccggtagagccccatgcccagggtgccgatggtcaggagcg

SEQ ID NO: 105853 - DNA, 80 bp, synthetic construct
  source 1..80: mol_type = other DNA
ccccaacccgtgtggtgcttaaggaaatggagcgtgccttgaatggaaagagggtcaggttccattctcctgcagttgga

SEQ ID NO: 105854 - DNA, 80 bp, synthetic construct
  source 1..80: mol_type = other DNA
tgacgagatggaggagtgcgcttccaggaccgccctcatcgaggaggggcatcggatagctgagatgctaaagtctaaaa

SEQ ID NO: 105855 - DNA, 80 bp, synthetic construct
  source 1..80: mol_type = other DNA
tggggtcagggccctggaagacggggtgaattacgcaacagggaatcttcctggttgctctttttctatcttccttttgg

SEQ ID NO: 105856 - DNA, 80 bp, synthetic construct
  source 1..80: mol_type = other DNA
tgttccccgacctgggagtgcgcgtctgtgagaaacgggcgttgtacgacctggcgcagaaactgccaactgccctgatg

SEQ ID NO: 105857 - DNA, 80 bp, synthetic construct
  source 1..80: mol_type = other DNA
cccttggcgctggggtcatggtcctcttcggcttctttaccttgtcaccttggtataagcattggatcggccgcctcatg

SEQ ID NO: 105858 - DNA, 80 bp, synthetic construct
  source 1..80: mol_type = other DNA
acagagctgctgacaatggaggtggtgaaactaggggagatacttttctcaccaccgaacagctgagagccgctggcaag

SEQ ID NO: 105859 - DNA, 80 bp, synthetic construct
  source 1..80: mol_type = other DNA
tagccgcttgtcggaacatcgagtccttccgcataggatggggctccctcgagtatgaggagaatgtcactaatgatgcg

SEQ ID NO: 105860 - DNA, 80 bp, synthetic construct
  source 1..80: mol_type = other DNA
atggggccagcgactttggatgaggaacaccagagtggaacagtctgcaagagagatcagagtgaccgaggctggggaaa

SEQ ID NO: 105861 - DNA, 80 bp, synthetic construct
  source 1..80: mol_type = other DNA
cctcttggcctgccgcccaggtttatcaggaaaaccccgccccgaccacagtccttctgccacgcgacgcggaagccgaa

SEQ ID NO: 105862 - DNA, 80 bp, synthetic construct
  source 1..80: mol_type = other DNA
agttttacgcgcgcaagatttacaagacgccgtacgtgcccatagacaaggaggtgaagatagacagcttttacatgcgc

SEQ ID NO: 105863 - DNA, 80 bp, synthetic construct
  source 1..80: mol_type = other DNA
aaagtaagatattccaattactccttttttgtacaggcggtagttagggctgcattactatcgatcagcacgtctcgttt

SEQ ID NO: 105864 - DNA, 80 bp, synthetic construct
  source 1..80: mol_type = other DNA
ctcccagctgttcaccttctcgccccgccagcatcagacagtacaggactgcaattgttccatctatcctggccacgtat

SEQ ID NO: 105865 - DNA, 80 bp, synthetic construct
  source 1..80: mol_type = other DNA
tttacagtatcccacagaaacgctccaggtaaatactatgaggcgcgcccgggccctgattaattctacttccccgtcga

SEQ ID NO: 105866 - DNA, 80 bp, synthetic construct
  source 1..80: mol_type = other DNA
aggcggcggcgagacgcctagcccggggttcacccccctctcaggcaagttcttccgctagccagctgtctgcgccatcg

SEQ ID NO: 105867 - DNA, 80 bp, synthetic construct
  source 1..80: mol_type = other DNA
acagatccctcaagtatagcagcaagaggatacatttcaacaagggttgagatgggcgaggcggctgccatcttcatgac

SEQ ID NO: 105868 - DNA, 80 bp, synthetic construct
  source 1..80: mol_type = other DNA
gtggtcttcggaaccggtgagtacaccggaatcgccgggatgaccgggtcctttcttggattaacccgctcaatgcccgg

SEQ ID NO: 105869 - DNA, 80 bp, synthetic construct
  source 1..80: mol_type = other DNA
gggatagcccaacaatttaaggagaaggtcgtcggccttctcgcacaagctgaccaaagggctgctgatatcaagcctat

SEQ ID NO: 105870 - DNA, 80 bp, synthetic construct
  source 1..80: mol_type = other DNA
atgctaaggtcctgattgaactggaaccacccttcggagactcatacatagtggtaggcagaggagaacaacagatcaat

SEQ ID NO: 105871 - DNA, 80 bp, synthetic construct
  source 1..80: mol_type = other DNA
caaggccattaaccacatcaactccgtgtgggaggacttgctggaagacaacacaacccctattccaacaacaatcatgg

SEQ ID NO: 105872 - DNA, 80 bp, synthetic construct
  source 1..80: mol_type = other DNA
ccatcttggggcccaaacgacccccggcggagatctcgcaatttgggtaaggtcatcgataccctcacgtgcggattcgc

SEQ ID NO: 105873 - DNA, 80 bp, synthetic construct
  source 1..80: mol_type = other DNA
accccaacattgaggaggtagccctaggccacgagggcgagatccccttctatgggaaagccatcccccttgccaacata

SEQ ID NO: 105874 - DNA, 80 bp, synthetic construct
  source 1..80: mol_type = other DNA
ctggagcgctcgtcgccttcaagatcatgtgcggggagaagccgacagccgaagacctagtaaacctcctgccttcaata

SEQ ID NO: 105875 - DNA, 80 bp, synthetic construct
  source 1..80: mol_type = other DNA
atcacgttcactgtgaatcaaacatcccgcctcttaatgaggagaatgaggcgcccgacaggcaaggtgactcttgaagc

SEQ ID NO: 105876 - DNA, 80 bp, synthetic construct
  source 1..80: mol_type = other DNA
ccctggagagcatgcctacgctgaccgcggccccggtcggcctcgagacgcgcatctcgtggaccgaaattctggcccaa

SEQ ID NO: 105877 - DNA, 80 bp, synthetic construct
  source 1..80: mol_type = other DNA
acggcgtgcgtttacatcgatatgcccccccatgcaaacctctgttgagggatgaggtatccttttccgtaggtctctcc

SEQ ID NO: 105878 - DNA, 80 bp, synthetic construct
  source 1..80: mol_type = other DNA
aaactccacaagaagtacctcatctggtttttcaacaacactactcttgcagtagttaacacctgtgacaacgacggtgt

SEQ ID NO: 105879 - DNA, 80 bp, synthetic construct
  source 1..80: mol_type = other DNA
ggagggggtctttcacaccttgtggcataccacgaagggagcagctctaatgagcggtgaaggccgccttgatccgtatt

SEQ ID NO: 105880 - DNA, 80 bp, synthetic construct
  source 1..80: mol_type = other DNA
ttgactagccaaggcgtcaacgccgtggcatactacagaggactagacgtcgccgtcatacccgcgacaggagatgtggt

SEQ ID NO: 105881 - DNA, 80 bp, synthetic construct
  source 1..80: mol_type = other DNA
cgggggtgtttggcagccacagacgcccggtgtttgtgtcgcgccagtacatgcggtccatgcccaggccatccaaaaac

SEQ ID NO: 105882 - DNA, 80 bp, synthetic construct
  source 1..80: mol_type = other DNA
tccgacgcctcgccctctccggaggaggttggcggaattggcacggacgacaggggcccagcagagtacggtggagttgg

SEQ ID NO: 105883 - DNA, 80 bp, synthetic construct
  source 1..80: mol_type = other DNA
ggatcatatagttctatgccccctctcgagggggagcctggggatcccgacctgagctcaggatcgtggtccacagttag

SEQ ID NO: 105884 - DNA, 80 bp, synthetic construct
  source 1..80: mol_type = other DNA
aatctgcgtcctcggagggggcgcggggggcgtagctttcggccggccagtcggcggcggcggtgtcggcggagggagtc

SEQ ID NO: 105885 - DNA, 80 bp, synthetic construct
  source 1..80: mol_type = other DNA
tcattctgcaatcggcttgcataacgctgaccacgttcataagcacttgttgggcgataatcgttacccaatctggataa

SEQ ID NO: 105886 - DNA, 80 bp, synthetic construct
  source 1..80: mol_type = other DNA
aagcaactgggacaggtcatgctcctggttttgtgtgcagttcaactgttgttaatgagaacatcatgggccttgtgtga

SEQ ID NO: 105887 - DNA, 80 bp, synthetic construct
  source 1..80: mol_type = other DNA
tctaccccaaataatcaaggacgccatccagcagcgcttgagaacagccgtgctggcacccacacgagtggtagcagcag

SEQ ID NO: 105888 - DNA, 80 bp, synthetic construct
  source 1..80: mol_type = other DNA
gtggtgggcacgaccgacagacgtggagtgcctacttacacgtggggggagaatgagacggatgttttcctattgaacag

SEQ ID NO: 105889 - DNA, 80 bp, synthetic construct
  source 1..80: mol_type = other DNA
caggtcgggtttgttgaggcaatcgcagcgcagagggatcaggatgcgacgctgcccgcgttgcatgatagggtaactcg

SEQ ID NO: 105890 - DNA, 80 bp, synthetic construct
  source 1..80: mol_type = other DNA
atggaactttagagctaaattatgatgatccatttaaagtggaaaacaacaagcttagcattaaagctggtcatggttta

SEQ ID NO: 105891 - DNA, 80 bp, synthetic construct
  source 1..80: mol_type = other DNA
tcggccctaagacttgcagcaacacctggcgtgggtcgttccccatcaacgcccacactacgggcccttgcacaccctcc

SEQ ID NO: 105892 - DNA, 80 bp, synthetic construct
  source 1..80: mol_type = other DNA
accgggacaggatcgagatgcaccccctcctgttttccaccacagagctcgcggtcctgccatgctcctttagcaccatg

SEQ ID NO: 105893 - DNA, 80 bp, synthetic construct
  source 1..80: mol_type = other DNA
agccatagtccgtgaggccataaaaaggaagctgcgcacattaattctggctcccacaagggttgtcgcttccgaaatgg

SEQ ID NO: 105894 - DNA, 80 bp, synthetic construct
  source 1..80: mol_type = other DNA
tcatgacttgtatgtctgccgacctggaggtgatcacaagcacttgggtactggttggtggggtcgttgctgccctagct

SEQ ID NO: 105895 - DNA, 80 bp, synthetic construct
  source 1..80: mol_type = other DNA
gatttgttgcaggacgtgggtgggaatgaacctttgaacctgagcttgaaacgccccaggaactaggcgcagctgtgctt

SEQ ID NO: 105896 - DNA, 80 bp, synthetic construct
  source 1..80: mol_type = other DNA
ggcgcagggcagcctgcaggagctcggtccccagacgcgggagaaacaggcaccggcgcgccgaaaacccgggcatggcg

SEQ ID NO: 105897 - DNA, 80 bp, synthetic construct
  source 1..80: mol_type = other DNA
gcgaaaaattcaaaatgtggggtgcggagcctgtttccgcgccggcgcgcgggtataagaacggagccccggagtccacg

SEQ ID NO: 105898 - DNA, 80 bp, synthetic construct
  source 1..80: mol_type = other DNA
acgcaaattgcccgtagctgtaatggggtcagcatatggtttccaatattcgcccgctcaaagggtggagtatctcctca

SEQ ID NO: 105899 - DNA, 80 bp, synthetic construct
  source 1..80: mol_type = other DNA
tcgggataggatagaaatgagcccactactcttctccaccacgcaactcgccatcttgccgtgctcttttactacgatgc

SEQ ID NO: 105900 - DNA, 80 bp, synthetic construct
  source 1..80: mol_type = other DNA
gagagggcatgctgtgggaatcttcagggcagctgtatgctctagaggggtagcgaaatccatcgacttcatccccgtgg

SEQ ID NO: 105901 - DNA, 80 bp, synthetic construct
  source 1..80: mol_type = other DNA
cctagctggaccccggtcttggtacaatagaataccaggctactcggaacaagtgaggggaccctggaagtacacaccca

SEQ ID NO: 105902 - DNA, 80 bp, synthetic construct
  source 1..80: mol_type = other DNA
gaggaaagtctgccccgtgggcactgatttttattcgggatcgcttgaggaggcccgggcaacggcccgggcaacggtgg

SEQ ID NO: 105903 - DNA, 80 bp, synthetic construct
  source 1..80: mol_type = other DNA
gataaccccattaaacttaaatttccatttaatgatgagggtcgattcataaccattgtaaaagcagcaggttccgaggc

SEQ ID NO: 105904 - DNA, 80 bp, synthetic construct
  source 1..80: mol_type = other DNA
agtctcggatcaggaggattctgttatctgctgctccatgtcatactcctggacaggggccctcataacaccatgtggtg

SEQ ID NO: 105905 - DNA, 80 bp, synthetic construct
  source 1..80: mol_type = other DNA
gtctccgttgctcatgacaacaatggacagagatactactacctcacacgggacccagctatcccactgtctcgggctgc

SEQ ID NO: 105906 - DNA, 80 bp, synthetic construct
  source 1..80: mol_type = other DNA
cagtcaccaccggacgaacccgatgattcggaagcgggatctgtgtcgtccatgcccccccttgagggggagcctggaga

SEQ ID NO: 105907 - DNA, 80 bp, synthetic construct
  source 1..80: mol_type = other DNA
tcgcggggcccgtcccttcaaccactttaagcgcagcatgtatcgcgccggccgctttcactgggagcgctttccggacg

SEQ ID NO: 105908 - DNA, 80 bp, synthetic construct
  source 1..80: mol_type = other DNA
gagctttggccgcagcgcacaggtcatgcacgacccctttgggtggcagccgtttcccgccgcgaatagcccctgggccc

SEQ ID NO: 105909 - DNA, 80 bp, synthetic construct
  source 1..80: mol_type = other DNA
actttgccaagcttgagcagttctgggcaaaacacatgtggaactttgtcagcggcattcaatatcttgctggtctgtct

SEQ ID NO: 105910 - DNA, 80 bp, synthetic construct
  source 1..80: mol_type = other DNA
gaggagcggggggtgcgcggtgacgtgtggatgaggaacaggagttgttgcgcggtgagttgtcgctgtgagttgtgttg

SEQ ID NO: 105911 - DNA, 80 bp, synthetic construct
  source 1..80: mol_type = other DNA
ctctcagctccctctctaaggtcactcagaccgacgtgctctaagcacgctgacctggagatggtagatagatccctcat

SEQ ID NO: 105912 - DNA, 80 bp, synthetic construct
  source 1..80: mol_type = other DNA
acgaggtacccagcgatgatgatttttatgttccctcgcttcacgaactgtatgatattgatgtggagtctgccggtgag

SEQ ID NO: 105913 - DNA, 80 bp, synthetic construct
  source 1..80: mol_type = other DNA
gaggacgtcctcgccgcccgccacaaacgggagctcctcggtggcctcgctgccaacaaaccgcacgtcggtgtggccgg

SEQ ID NO: 105914 - DNA, 80 bp, synthetic construct
  source 1..80: mol_type = other DNA
tgcggcggcactccggggcatgggcttgaatgcagtggccttttatagagggcttgatgtctccatcataccaacacaag

SEQ ID NO: 105915 - DNA, 80 bp, synthetic construct
  source 1..80: mol_type = other DNA
tcgggttgtcctgagcgcttaagcaaatgccgaccactgcacgcttttgaccagggttgggggccgctctcatatgccaa

SEQ ID NO: 105916 - DNA, 80 bp, synthetic construct
  source 1..80: mol_type = other DNA
ctcttcaactgggcggtgaagacaaaacgcaaactcactccattagctgacgctgaccggctggacttgtccagctggtt

SEQ ID NO: 105917 - DNA, 80 bp, synthetic construct
  source 1..80: mol_type = other DNA
aaaccccatgaggggccggggcgccacggcgtccgcggcggccggtggcccgcggcgcgtcaggcgccataggtgccgac

SEQ ID NO: 105918 - DNA, 80 bp, synthetic construct
  source 1..80: mol_type = other DNA
tgattttgaattgatcaataaagaatcacttacttgaaatctgaaaccaggtctctgtccatgttttctgtcagcagcac

SEQ ID NO: 105919 - DNA, 80 bp, synthetic construct
  source 1..80: mol_type = other DNA
tgtttcagcgttgggttgcatacctacacgatagggtcaaggctcccatgtgagcccgagcctgatgtggcagtactaac

SEQ ID NO: 105920 - DNA, 80 bp, synthetic construct
  source 1..80: mol_type = other DNA
cagttcaattttgtgcatttatacacgatctcagacatagcgctaacgccgtagcttcctgtatgcgttctcttagacag

SEQ ID NO: 105921 - DNA, 80 bp, synthetic construct
  source 1..80: mol_type = other DNA
gcgatgggtgatgctggggagcagggccgggtccacctggtgtcgcaggagagacgctcgcatgaaccggtgcgcgtcga

SEQ ID NO: 105922 - DNA, 80 bp, synthetic construct
  source 1..80: mol_type = other DNA
ccacgcccatgcagccatgttatgggtcatacgctagaccaacaaacgaaaaaggaggtcaagccaagctggtaaaaaat

SEQ ID NO: 105923 - DNA, 80 bp, synthetic construct
  source 1..80: mol_type = other DNA
ctacccctacagactatggcattacccatgtactgtcaactacaccatcttcaagatcaggatgtatgtcggtggggtcg

SEQ ID NO: 105924 - DNA, 80 bp, synthetic construct
  source 1..80: mol_type = other DNA
gtgcctatcccggggcccggctattgcagggctctctggagggtatccgctgaggagtacgtcgaggtggtgcggcacaa

SEQ ID NO: 105925 - DNA, 80 bp, synthetic construct
  source 1..80: mol_type = other DNA
cgcttggactggtacttttgtctatgaccacctcgcccccctttctgactgggctagcgacggactgcgcgatctggcag

SEQ ID NO: 105926 - DNA, 80 bp, synthetic construct
  source 1..80: mol_type = other DNA
ggtcctgtggtcaacccgggtacccttggcccctttatgccaatgagggcctcgggtgcgcagggtggttgctctccccc

SEQ ID NO: 105927 - DNA, 80 bp, synthetic construct
  source 1..80: mol_type = other DNA
ccagtgcggcggagaggtgacacccggggcgcccttttgagccccaggccgatctccgtcctcaaggtgtcttctggagg

SEQ ID NO: 105928 - DNA, 80 bp, synthetic construct
  source 1..80: mol_type = other DNA
acagaacgttaagttcccgggcggcgggcagatcgttggtggagtatacgtgctgccacgcaggtgcccacgtttgggtg

SEQ ID NO: 105929 - DNA, 80 bp, synthetic construct
  source 1..80: mol_type = other DNA
gcccagctagcagcccccggtgctgctaccgcctttgtgggcgctggtttaaccggcgccgccatcggcagtgttggact

SEQ ID NO: 105930 - DNA, 80 bp, synthetic construct
  source 1..80: mol_type = other DNA
cgcggctctcgacctacttggggccccactgacccccggcaccgctcgcgaaacctcggtaaggtgatcgacaccatgac

SEQ ID NO: 105931 - DNA, 80 bp, synthetic construct
  source 1..80: mol_type = other DNA
cccgagctccagaaagcgcacgagcgacagggtgttgcaatacgaccccagcagggcgtcgaactcgacgtcgtacaggc

SEQ ID NO: 105932 - DNA, 80 bp, synthetic construct
  source 1..80: mol_type = other DNA
cccagttgcttaaaatcaaacgcacgctcgccgggggcgcctgcgtcggccattaccgacgcctgcgtcggcacccccga

SEQ ID NO: 105933 - DNA, 80 bp, synthetic construct
  source 1..80: mol_type = other DNA
ctgtctaccatggcgctggctcaaagaccctagccggcccaaaaggtccagtcacccaaatgtacaccaatgtggatcag

SEQ ID NO: 105934 - DNA, 80 bp, synthetic construct
  source 1..80: mol_type = other DNA
acgggttggccgtggccgcgaaggcccgggacgggtcgctctggccgtggtcgtacatgagggcggtgacatccccctcc

SEQ ID NO: 105935 - DNA, 80 bp, synthetic construct
  source 1..80: mol_type = other DNA
agctcatagagtctaacctcctatggtggcgggagatgggcggtaacatcaccagggttgagtcagagaacaaggtagtg

SEQ ID NO: 105936 - DNA, 80 bp, synthetic construct
  source 1..80: mol_type = other DNA
gaaaggaagttttaaaatgagcggctccatggaagggaacgctgtgagttttaagggtggggtgtttagcccatatttga

SEQ ID NO: 105937 - DNA, 80 bp, synthetic construct
  source 1..80: mol_type = other DNA
aatattacagacaagggtttgcaaattggaacagatgaaaccaaagaggatgatgaagatgagatatatgctgacaaaac

SEQ ID NO: 105938 - DNA, 80 bp, synthetic construct
  source 1..80: mol_type = other DNA
ctatcgcccggagcccttgtagtgggggtggtatgcgctgcgatcttgaggcgccatgtgggccctggtgaaggtgccgt

SEQ ID NO: 105939 - DNA, 80 bp, synthetic construct
  source 1..80: mol_type = other DNA
atcatctgctctggctgagcttgccactaagacctttggcagctctacaacctcaggcgtgacaagtggtgaagcggccg

SEQ ID NO: 105940 - DNA, 80 bp, synthetic construct
  source 1..80: mol_type = other DNA
gccttttcactgcacacatactctccccacgaactctcacgggtggcagcgactctcagaaaacttggagcgcctcccct

SEQ ID NO: 105941 - DNA, 80 bp, synthetic construct
  source 1..80: mol_type = other DNA
tccctgcagcttatgcgtcgcagggttacaaggtcctcgtactaaacccgtcggtggccgctacgctgagctttggagcc

SEQ ID NO: 105942 - DNA, 80 bp, synthetic construct
  source 1..80: mol_type = other DNA
ctgtaaatactttatcaattgtaaatagacagcataagcatgtatataggtataggtttatagtggcatttaatgatgtt

SEQ ID NO: 105943 - DNA, 80 bp, synthetic construct
  source 1..80: mol_type = other DNA
gctcgaacagcagcatcacctggcagctcactaacgcagttctccaccttcccggatgcgtcccatgtgagaatgacaac

SEQ ID NO: 105944 - DNA, 80 bp, synthetic construct
  source 1..80: mol_type = other DNA
gccggggagagggcccgcggcgcatttaaggcgttgttgtgttgactttgcctcttctggcgggttggtgcggtgctgtt

SEQ ID NO: 105945 - DNA, 80 bp, synthetic construct
  source 1..80: mol_type = other DNA
tgggatccaaagcatggcatactaccaatgacacgtacatggttgccggaacccccggaacatataggacgggcacgtcg

SEQ ID NO: 105946 - DNA, 80 bp, synthetic construct
  source 1..80: mol_type = other DNA
agaaaccaatcagtcccttcccccatttacccatttccccaattctcataaatcattggaattaatcattcaataaagat

SEQ ID NO: 105947 - DNA, 80 bp, synthetic construct
  source 1..80: mol_type = other DNA
agcctctgagagccgaaactgacgacgtcgagctctcggtggctgcagagtgtttcaagaagcctcccaaatatcctcca

SEQ ID NO: 105948 - DNA, 80 bp, synthetic construct
  source 1..80: mol_type = other DNA
cagcccccagatgcccacgggcatctcatgcgcggtgaacgaagcggccatggcccgcctcggagccgagctcaaatcgc

SEQ ID NO: 105949 - DNA, 80 bp, synthetic construct
  source 1..80: mol_type = other DNA
tctttaacatccttgggggttgggtagccacacacctagcgggacctgcagcatcctctgcatttgtggtgagtggtttg

SEQ ID NO: 105950 - DNA, 80 bp, synthetic construct
  source 1..80: mol_type = other DNA
gtattttcccctttgaagtgctgccacaatcaggacactgaaggcatttaagggcgtacagtttcggagccaaaaaaaca

SEQ ID NO: 105951 - DNA, 80 bp, synthetic construct
  source 1..80: mol_type = other DNA
ccagccgcgtggacggcgccagcccatccccaaagatcggcgctccaccggcaagtcctggggaaagccaggatatccct

SEQ ID NO: 105952 - DNA, 80 bp, synthetic construct
  source 1..80: mol_type = other DNA
ccgtctcccaggcgttggcagagctcgcccagaagacgttcccatcctcttcagcttcatcgcaaggagattcgggagca

SEQ ID NO: 105953 - DNA, 80 bp, synthetic construct
  source 1..80: mol_type = other DNA
ctggcgttgccccagagggcgtacgctttggaccaggagatggccgcgtcatgtggaggcatcgtccttataggcctgat

SEQ ID NO: 105954 - DNA, 80 bp, synthetic construct
  source 1..80: mol_type = other DNA
tgcgcttatgatggaatccacagacttcagctggcttttctaagaattcgcaaatgctgtgtaccggcttttttaattct

SEQ ID NO: 105955 - DNA, 80 bp, synthetic construct
  source 1..80: mol_type = other DNA
gaagccccggaaatgcctgccctctatgagaagaagttggcattgtatcttctgcttgcccttagcttggcctctgttgc

SEQ ID NO: 105956 - DNA, 80 bp, synthetic construct
  source 1..80: mol_type = other DNA
agggctggacgtctccgtgataccaactcagggagatgtggtggtcgtcgccaccgatgccctcatgacggggtatactg

SEQ ID NO: 105957 - DNA, 80 bp, synthetic construct
  source 1..80: mol_type = other DNA
ggatcggtcgttatgtcgcgcgggccgtacgcgaatgccgcgtctggggcgttcgccgtcgggtgcgccgtgctgggctt

SEQ ID NO: 105958 - DNA, 80 bp, synthetic construct
  source 1..80: mol_type = other DNA
tgccggcatgtatggcggtgccaaaaggcgttccagccagcatcctgttcgtgtgcgagggcattaccgcgctccctggg

SEQ ID NO: 105959 - DNA, 80 bp, synthetic construct
  source 1..80: mol_type = other DNA
acgatgtttgtgccgggcaaggtcggcgggatgagggccacgaacgccagcacggcctgggtggtcatgctgcccataag

SEQ ID NO: 105960 - DNA, 80 bp, synthetic construct
  source 1..80: mol_type = other DNA
tgtttgggactgggtgtgcacggtgttgagtgacttcaagacctggctccagtccaagctcctgccgcggttaccgggtg

SEQ ID NO: 105961 - DNA, 80 bp, synthetic construct
  source 1..80: mol_type = other DNA
aagaacaaagtgtggtgtgttgctccatgtcctattcttggacgggggcgctcatcacgccatgcgctgctgaggaagaa

SEQ ID NO: 105962 - DNA, 80 bp, synthetic construct
  source 1..80: mol_type = other DNA
aagaccaagcttaaactcactccaatcccagccgcgtcccagttggacttgtccagctggttcgttgctggttacagcgg

SEQ ID NO: 105963 - DNA, 80 bp, synthetic construct
  source 1..80: mol_type = other DNA
agaaaaaccaaaagaaacaccaaccgccggccacaggacgttaagttcccaggcggcggccagatcgttggtggagttta

SEQ ID NO: 105964 - DNA, 80 bp, synthetic construct
  source 1..80: mol_type = other DNA
gaccgccgcccaccccgaacccggaccgtcgccccgccgcgcggcccgggttcgggtggcacggtgtgccggaggagaac

SEQ ID NO: 105965 - DNA, 80 bp, synthetic construct
  source 1..80: mol_type = other DNA
caaaatacgtcgttcgatgggagtgggtggtactcttattcctgctcttagcggacgccagagtctgcgcctgcttgtgg

SEQ ID NO: 105966 - DNA, 80 bp, synthetic construct
  source 1..80: mol_type = other DNA
ggtgacccaggtggtggacttcagcctagaccctaccttctcaattgagaccactactgtcccccaagatgccgtggccc

SEQ ID NO: 105967 - DNA, 80 bp, synthetic construct
  source 1..80: mol_type = other DNA
ggcagatgttcgcctttagacccagagtgcatatgactgtccaggaatgcaattgctccatctacaccggccacgtcacc

SEQ ID NO: 105968 - DNA, 80 bp, synthetic construct
  source 1..80: mol_type = other DNA
cgcgtcgggtgcggtcccctcgagggcgcgcatcaggttctccaggagcacggggaagcgccgcgtcacctcccctagcc

SEQ ID NO: 105969 - DNA, 80 bp, synthetic construct
  source 1..80: mol_type = other DNA
catgcatgtctgcggacctggaagtgatcactagcacatgggtgattgctggtggggtccttgcagcattggcagcctac

SEQ ID NO: 105970 - DNA, 80 bp, synthetic construct
  source 1..80: mol_type = other DNA
tatcgacggtttccatatggggattggtggcgacgactcctggagcccgtcagtatcggcggaattacagctgagcgccg

SEQ ID NO: 105971 - DNA, 80 bp, synthetic construct
  source 1..80: mol_type = other DNA
tcaacgaccgactccaacaggcacggtaatggacatcatatctaggaaagaccaaagaggcagtggacaggtaggaactt

SEQ ID NO: 105972 - DNA, 80 bp, synthetic construct
  source 1..80: mol_type = other DNA
accatggtgagcaagggcgaggagctgttcaccggggtggtgcccatcctggtcgagctggacggcgacgtaaacggcca

SEQ ID NO: 105973 - DNA, 80 bp, synthetic construct
  source 1..80: mol_type = other DNA
atcgccgaagagtcggagcccgctggtgcggctgggcttccgacgccccccgtggaccccacgacacccaccccaacgcc

SEQ ID NO: 105974 - DNA, 80 bp, synthetic construct
  source 1..80: mol_type = other DNA
tatggacagtaaaacatgtgaacatgtggtcattaaagcgggtcaacgtcaaggaacggccaccgaggcaaccgtgttaa

SEQ ID NO: 105975 - DNA, 80 bp, synthetic construct
  source 1..80: mol_type = other DNA
cttcgtgtttgtcattctggccaggctcgccaaccgcgtcgagcgtggcgtcgcggagatcgactacgcgacccttggtg

SEQ ID NO: 105976 - DNA, 80 bp, synthetic construct
  source 1..80: mol_type = other DNA
tttgagaatggtgaggaaagactcagtcgcatggccgtcagcggagacgattgtgtggtgaagccactcgatgatcggtt

SEQ ID NO: 105977 - DNA, 80 bp, synthetic construct
  source 1..80: mol_type = other DNA
tccttggtcacagccgggcatgggcaggttgacaatttttcactgggagtcttgggaatggcattgttcctggaggaaat

SEQ ID NO: 105978 - DNA, 80 bp, synthetic construct
  source 1..80: mol_type = other DNA
tgaccgcgaggatggtgtccttgatgacctccatctcccggaaggcctggtcggtggcctcggggagagccaccaccaag

SEQ ID NO: 105979 - DNA, 80 bp, synthetic construct
  source 1..80: mol_type = other DNA
tgtatgcaccaggggtgtagcaaaagccctacagttcataccagtggaaactcttagcacacaggctaggtctccatctt

SEQ ID NO: 105980 - DNA, 80 bp, synthetic construct
  source 1..80: mol_type = other DNA
cgcaccctgaggattttggaaatggtttctgattggctgcagagaggaccaagagagttctgcatcaaggttctctgccc

SEQ ID NO: 105981 - DNA, 80 bp, synthetic construct
  source 1..80: mol_type = other DNA
tcaaacagaaggccataggccttatgagcatcgctggcaagcaggcccaggaagcagcaccaatggtccagtcaaatttt

SEQ ID NO: 105982 - DNA, 80 bp, synthetic construct
  source 1..80: mol_type = other DNA
atgcacttgcggcgcttcagacctgtatctggtcacgaggcacgcggatgtcattccagtgcgccggcgtggagatggca

SEQ ID NO: 105983 - DNA, 80 bp, synthetic construct
  source 1..80: mol_type = other DNA
aggtcgccgtccccccacagagacgcgttcgccgcggcctcttcgagctgctcctcctggtccgcaagacgatcgtccgc

SEQ ID NO: 105984 - DNA, 80 bp, synthetic construct
  source 1..80: mol_type = other DNA
ctgagcaatttaaacaaaaggtcctcggtctcatccaaaccacgaccaagcaagcagaggagcttaagccggcggtgcgc

SEQ ID NO: 105985 - DNA, 80 bp, synthetic construct
  source 1..80: mol_type = other DNA
tgtgctatatcgccgtcgtggccggggtggtgcttgtggcgcttcgctacgaacaggagattcagcggcgcctgtttgat

SEQ ID NO: 105986 - DNA, 80 bp, synthetic construct
  source 1..80: mol_type = other DNA
agacagaacctccagcttgtgcataccaacgggagttggcacatcaataggacagctttaaactgcaatgacagcttgaa

SEQ ID NO: 105987 - DNA, 80 bp, synthetic construct
  source 1..80: mol_type = other DNA
ggaggtactttaccaacaatttgatgagatggaggaatgttccaggcacattccgtatctggcagagggacaacaaatcg

SEQ ID NO: 105988 - DNA, 80 bp, synthetic construct
  source 1..80: mol_type = other DNA
acgggtcatcgcatggcatgggatatgatgatgaactggtcccctacggcagcgttggtggtagctcagctgctccggat

SEQ ID NO: 105989 - DNA, 80 bp, synthetic construct
  source 1..80: mol_type = other DNA
ccgtgtcccgagtcctagccgacctggcagatgccaggttcaagaccgacgcgccatccattgaaggccgagattctgtg

SEQ ID NO: 105990 - DNA, 80 bp, synthetic construct
  source 1..80: mol_type = other DNA
tgatggacagtctcgacgccaagcagtggtccgtggcgcaggcgctcccgtgtctggagcccacccaccccctccggcga

SEQ ID NO: 105991 - DNA, 80 bp, synthetic construct
  source 1..80: mol_type = other DNA
gcggccgcgcatcagggcggccagagggattcccgcggccgccaggcactcgctggatatgatgacgtgaaccaaagacg

SEQ ID NO: 105992 - DNA, 80 bp, synthetic construct
  source 1..80: mol_type = other DNA
cccccgaaactaggaagtgcggttccagaaggagtaataaaacctgtgcctcagcgggtgactgggaggcgtagatgtgc

SEQ ID NO: 105993 - DNA, 80 bp, synthetic construct
  source 1..80: mol_type = other DNA
tagacgccattttacacggaaatgatgttttttgggcgttgtttgtgcaaattttgtgttttaggcgcgaaaactgaaat

SEQ ID NO: 105994 - DNA, 80 bp, synthetic construct
  source 1..80: mol_type = other DNA
ccacctggcccccctcgccacctgggctagtgatggtctcagagatctggctgtagctgtggaaccggttgttttctcca

SEQ ID NO: 105995 - DNA, 80 bp, synthetic construct
  source 1..80: mol_type = other DNA
ttgggaggacttgctggaggacactactacaccaattcctactaccatcatggcgaagaacgaggtgtttagcgtaaacc

SEQ ID NO: 105996 - DNA, 80 bp, synthetic construct
  source 1..80: mol_type = other DNA
ggggtggaccagccctcctggtactaggtctctagacccttgtacgtgtggcgctgttgacctctatctcgtcacccgaa

SEQ ID NO: 105997 - DNA, 80 bp, synthetic construct
  source 1..80: mol_type = other DNA
acaaacccatgtcaggtcgattgtaactgcggatcggcctaactaaggcgtggttggtgcgacggtccgggacacccgag

SEQ ID NO: 105998 - DNA, 80 bp, synthetic construct
  source 1..80: mol_type = other DNA
tgtgagacaaaaccaggaatctatcgaatcatgactagaggaattttgggcactttccaagccggagtcggtgtgatgca

SEQ ID NO: 105999 - DNA, 80 bp, synthetic construct
  source 1..80: mol_type = other DNA
gatccatcttgacgagtcatctgcatctacggcgctcttggagctggcaaagaaatcttttccatcatcaaagccccagg

SEQ ID NO: 106000 - DNA, 80 bp, synthetic construct
  source 1..80: mol_type = other DNA
tatgttattgacattcctccgcctaagtgtgacattacttcacgttacttaggcatacaggctactggggaagattattg

SEQ ID NO: 106001 - DNA, 80 bp, synthetic construct
  source 1..80: mol_type = other DNA
aggtttgtccactttacccgggaatccagccgtagcatccatgatgtcctttacagcatctctcacaagccccttaccaa

SEQ ID NO: 106002 - DNA, 80 bp, synthetic construct
  source 1..80: mol_type = other DNA
ttcaaggcttggctcaaagctaagcttgtgccctccctaccgggtgtccctttcttctcgtgtcagagggggttcaggtg

SEQ ID NO: 106003 - DNA, 80 bp, synthetic construct
  source 1..80: mol_type = other DNA
cctcaggtaatcacagctttgaattgcaactggcagatgatcaatctaatcaacaggatcaacaaattccatcaactacc

SEQ ID NO: 106004 - DNA, 80 bp, synthetic construct
  source 1..80: mol_type = other DNA
gttgggccgagcacctgcagcaacacttggcacggaacgtttcccatcaacgcctacaccacgggccccggtgtgcccac

SEQ ID NO: 106005 - DNA, 80 bp, synthetic construct
  source 1..80: mol_type = other DNA
cactgtcttgatgggacttggaaaaggatggccattgtcaagaatggacttaggggtgcctttactggctctgggatgtt

SEQ ID NO: 106006 - DNA, 80 bp, synthetic construct
  source 1..80: mol_type = other DNA
cccacccaaactgactcgttagaatctcattttcaacatgacatgcagcgttcacacgtaactcctagtgaaaatatact

SEQ ID NO: 106007 - DNA, 80 bp, synthetic construct
  source 1..80: mol_type = other DNA
cgcctggacccgcggccgcccacggtggtggagatggaagatgcaactcttccgccgcccaagggcgagaagcggccgcg

SEQ ID NO: 106008 - DNA, 80 bp, synthetic construct
  source 1..80: mol_type = other DNA
ttcagaaagccaaaaaagaagcacaggagatccgtggagccgacttcaagcccaatcctcaagacttggaaatcgtgccc

SEQ ID NO: 106009 - DNA, 80 bp, synthetic construct
  source 1..80: mol_type = other DNA
cgcggctcagctggccgcccgacagctccacctcgccgagcgcctgcttggcggccgacgcgtagtgccggatgtagtcg

SEQ ID NO: 106010 - DNA, 80 bp, synthetic construct
  source 1..80: mol_type = other DNA
ggtctgtgggcctgtttactgttttactcccagcccagtggttatcggcactaccgacaagaagggcttccccacctaca

SEQ ID NO: 106011 - DNA, 80 bp, synthetic construct
  source 1..80: mol_type = other DNA
acaataaacgccaagtgtgaaaagaggggggcttccgtgaggagcaccacagagagtggcaaggtgattccggaatggtg

SEQ ID NO: 106012 - DNA, 80 bp, synthetic construct
  source 1..80: mol_type = other DNA
gcccatccccaaagatcggcgctccactggcaagtcctggggaaaaccaggatacccttggcccctgtacgggaatgagg

SEQ ID NO: 106013 - DNA, 80 bp, synthetic construct
  source 1..80: mol_type = other DNA
ctctgtgagtgctatgatgctggggcagcctggtatgagctcacgcctgctgagactacggggagactccgggcttattt

SEQ ID NO: 106014 - DNA, 80 bp, synthetic construct
  source 1..80: mol_type = other DNA
ggcaaagcttgcctggcttgaggaacgtggatacgccaccctcaagggagaggtggtagatcttggatgtggaaggggcg

SEQ ID NO: 106015 - DNA, 80 bp, synthetic construct
  source 1..80: mol_type = other DNA
tttccaacaaacactaggatgtctcgctttagtgggtggactggcataccaattagtggaaacgtacgctcctactaccg

SEQ ID NO: 106016 - DNA, 80 bp, synthetic construct
  source 1..80: mol_type = other DNA
ggagctgctgcgcacagcacctacaggattgccagtctcctttcacctggaccgaaccagcagctgcagcttgttaacag

SEQ ID NO: 106017 - DNA, 80 bp, synthetic construct
  source 1..80: mol_type = other DNA
agggccgaagcgctcctgcaagtgtgggtcccccctctcaacgttcgtggtggccgtgatgccatcatcctcctcacgtg

SEQ ID NO: 106018 - DNA, 80 bp, synthetic construct
  source 1..80: mol_type = other DNA
ccctctattggggagaagcaggtgtctaacctacctggaaacgcggcgtctttgttgaacgacaccggggcgccctcgac

SEQ ID NO: 106019 - DNA, 80 bp, synthetic construct
  source 1..80: mol_type = other DNA
cttatcccgcgctaaatcttcctcccaaagtaatgcgctctgttatggatcaagtgcttattaagcgagcagagcccatt

SEQ ID NO: 106020 - DNA, 80 bp, synthetic construct
  source 1..80: mol_type = other DNA
ctgtccttaaagcgccccaagtgctcctgagatcatagtaataaagttattgacccttaccctgtgtttatttcttgggc

SEQ ID NO: 106021 - DNA, 80 bp, synthetic construct
  source 1..80: mol_type = other DNA
atcctccttcttgtcgcgggagtggacgcaaccacttattcctccggctcagctgcgggtagcaccactttaggcttggc

SEQ ID NO: 106022 - DNA, 80 bp, synthetic construct
  source 1..80: mol_type = other DNA
gaccccaagacccccagcaccccgtgagtcctcggcgggtccctccgcggccgtctctcgttgccccgcctttccgcctt

SEQ ID NO: 106023 - DNA, 80 bp, synthetic construct
  source 1..80: mol_type = other DNA
gaagaaggtcatcacttggggggcggacaccgctgcatgcggcgacatcctggctggtctccctgtctctgctcgtcgtg

SEQ ID NO: 106024 - DNA, 80 bp, synthetic construct
  source 1..80: mol_type = other DNA
gtcacctggggcattggttgtggaggttgtctgtgctgccattttgcggcgtcacgtgggccctagcgagggagctgctc

SEQ ID NO: 106025 - DNA, 80 bp, synthetic construct
  source 1..80: mol_type = other DNA
atagaagcactgcacagattccaactgcaatggggggggggtctggtgaggacccctttctcaaggaactccagccatga

SEQ ID NO: 106026 - DNA, 80 bp, synthetic construct
  source 1..80: mol_type = other DNA
atgccaccacttgagggcgaacccggagaccctgatcttagttctgggtcttggtccacggtcagtgaggaagaagacag

SEQ ID NO: 106027 - DNA, 80 bp, synthetic construct
  source 1..80: mol_type = other DNA
ggcgcgcggcgatgtatgaggaaggtcctcctccctcctacgagagcgtggtgagcgcggcgccagtggcggcggcgctg

SEQ ID NO: 106028 - DNA, 80 bp, synthetic construct
  source 1..80: mol_type = other DNA
ggctactgcaactccccctgggagcgttaccgtaccgcactctaacattgaagaagtggccttaaccaatgatggagaga

SEQ ID NO: 106029 - DNA, 80 bp, synthetic construct
  source 1..80: mol_type = other DNA
ttctggctttacaagaattttcagtcctggtggcaagcaggatatcatgctaatcaacaccaacggcagctggcacataa

SEQ ID NO: 106030 - DNA, 80 bp, synthetic construct
  source 1..80: mol_type = other DNA
gtgtagccgtgcccctcaggttggacacgcagagccttgtgggcacttatgtaatcacggccgtgttgttgttggccgtg

SEQ ID NO: 106031 - DNA, 80 bp, synthetic construct
  source 1..80: mol_type = other DNA
tgttaacggaaagatggaatatggatctgcaccaggacccctgaacggccgggatacgtcgcggggccccggcgcgtttt

SEQ ID NO: 106032 - DNA, 80 bp, synthetic construct
  source 1..80: mol_type = other DNA
gattttgcaggtttaagccatgaatattaaaaagctctgtaagggcgccctccaccgccatccgcaggcagtacttcata

SEQ ID NO: 106033 - DNA, 80 bp, synthetic construct
  source 1..80: mol_type = other DNA
tacattatatggtggcttacttacctgttagccagggttgaggcatgtctccagacatggatccctcctcttaacccccg

SEQ ID NO: 106034 - DNA, 80 bp, synthetic construct
  source 1..80: mol_type = other DNA
ctcctcagcgatgattcgcaccgcccgcagcatgagacgccttgtcctccgggcacagcagcgcaccctgatctcactta

SEQ ID NO: 106035 - DNA, 80 bp, synthetic construct
  source 1..80: mol_type = other DNA
acgagtttgagatcaagcgttcagttgacggagagggctacaacgttgcccaatgcaacatgaccaaagactggttcttg

SEQ ID NO: 106036 - DNA, 80 bp, synthetic construct
  source 1..80: mol_type = other DNA
tcaaagacccttgccggcccgacgggccccattatccagatgtacaccaatgtggaccaagacctagtgggctggccggc

SEQ ID NO: 106037 - DNA, 80 bp, synthetic construct
  source 1..80: mol_type = other DNA
agggcccacacccctgttgtataggctcgggtcggttcaaaatgaaatcaccaccacacacccggtcacaaaatacatca

SEQ ID NO: 106038 - DNA, 80 bp, synthetic construct
  source 1..80: mol_type = other DNA
tccccagtgagagttcccaattacaacatgattattatggatgaagcacattttaccgatccagctagcatagcggccag

SEQ ID NO: 106039 - DNA, 80 bp, synthetic construct
  source 1..80: mol_type = other DNA
gggactgagagccttgaatctggatgtgtacagaatcctgctcctgatgatcggagtgggtagcttgataagagagaaga

SEQ ID NO: 106040 - DNA, 80 bp, synthetic construct
  source 1..80: mol_type = other DNA
gcccgcatgtatggaggagctaaaacaaggtctagccaacatccagtgcgcgtacgcggacattaccgagctccatgagg

SEQ ID NO: 106041 - DNA, 80 bp, synthetic construct
  source 1..80: mol_type = other DNA
gcgtgagagtgctggaggacggggtaaactatgcgacagggaatttgcccggttgctctttctctatcttcctgttagct

SEQ ID NO: 106042 - DNA, 80 bp, synthetic construct
  source 1..80: mol_type = other DNA
tgctgaatggagcggctgtgttgaatggcatccggaactggtgaatgagggtggagagatcagcctgcgggtccgccagg

SEQ ID NO: 106043 - DNA, 80 bp, synthetic construct
  source 1..80: mol_type = other DNA
catctcccgtggagggaaagcggccgtttgcggccgatatctcttcaattgggcggtgaagaccaagctcaaactcactc

SEQ ID NO: 106044 - DNA, 80 bp, synthetic construct
  source 1..80: mol_type = other DNA
gcgtcgggccccgtgatccagatgtacaccaatgtggatcaggacttggtgggctggccagcgcctcagggagcacgctc

SEQ ID NO: 106045 - DNA, 80 bp, synthetic construct
  source 1..80: mol_type = other DNA
agagccgtggcccatggagaacctaatgtcaatgtagctagcctgataactccaaatccatccatggagacaactggagg

SEQ ID NO: 106046 - DNA, 80 bp, synthetic construct
  source 1..80: mol_type = other DNA
cccctcaccccacacagggcgggttcaggcgtgcccggcagccagtagcctctggcagatctgacagacgtgtgcgataa

SEQ ID NO: 106047 - DNA, 80 bp, synthetic construct
  source 1..80: mol_type = other DNA
cacgacgtcgtggttgtgttactgggcaaacacttggggactgtaggtttctgtgggtgccgaccctaggcgctatggtg

SEQ ID NO: 106048 - DNA, 80 bp, synthetic construct
  source 1..80: mol_type = other DNA
tcgcgtctgcggtccggtgtactgcttcacgcccagccccgtggtcgtggggacgaccgaccggagaggtcaccccacct

SEQ ID NO: 106049 - DNA, 80 bp, synthetic construct
  source 1..80: mol_type = other DNA
tctcaatactccaaagccaggaagcccttgagaaagcactcgacttcgatatgtacggagtcacttactctatcactccg

SEQ ID NO: 106050 - DNA, 80 bp, synthetic construct
  source 1..80: mol_type = other DNA
tggttacggagcgggggtatctggtgccctcgtcgcttttaagatcatgagcggcgaggcgcctgcgctcgaggacatgg

SEQ ID NO: 106051 - DNA, 80 bp, synthetic construct
  source 1..80: mol_type = other DNA
agaattggatggggtgcgcctgcataggttcgcgcccccgtgcaagcccttattacgggacgaggtgtcgttcagagttg

SEQ ID NO: 106052 - DNA, 80 bp, synthetic construct
  source 1..80: mol_type = other DNA
tgcgctacatcatagcagttgggatcactttccatttggaattgggaccagagaccatggttcttgtgatgctgcaggcg

SEQ ID NO: 106053 - DNA, 80 bp, synthetic construct
  source 1..80: mol_type = other DNA
cggccggtcatccgcggcgtccgcggctcgggcctgggtgttgtgcagcagctggccgtcgttgcggttgaagtccgcgg

SEQ ID NO: 106054 - DNA, 80 bp, synthetic construct
  source 1..80: mol_type = other DNA
gccggcggtcggggtgatcgccatttcaaataaaaggcacgagttccccgaataccaccggcgtgtgatgatttcgccct

SEQ ID NO: 106055 - DNA, 80 bp, synthetic construct
  source 1..80: mol_type = other DNA
tctgtgagggtctcttcacgggtctcacccacatagacgcccacttcttgtcccagacgaagcaggctggggaaaacttc

SEQ ID NO: 106056 - DNA, 80 bp, synthetic construct
  source 1..80: mol_type = other DNA
ggagatcatcgctggagcgcattggggtgtgctatttggccttgcctatttttccatgcagggagcgtggatgaaggtca

SEQ ID NO: 106057 - DNA, 80 bp, synthetic construct
  source 1..80: mol_type = other DNA
gatgttactcatatcccaggcggaggcagctttagagaaccttgtactgcttaacgcagcgtctttggccgggacgcgcg

SEQ ID NO: 106058 - DNA, 80 bp, synthetic construct
  source 1..80: mol_type = other DNA
cgattccggggagtaggcatccgcgccgcaggccccgcagacggtctcgcattccacgagccaggtgagctctggccgtt

SEQ ID NO: 106059 - DNA, 80 bp, synthetic construct
  source 1..80: mol_type = other DNA
cacagccgtcacgggaaatcttgtcaattcggtcaatgtgctctcacgaaagcttcttgcgagattcggggagacaaggg

SEQ ID NO: 106060 - DNA, 80 bp, synthetic construct
  source 1..80: mol_type = other DNA
caagtaacacctaatgtggctgtaaaacatcacggcgcgctcactcaaaacctgcgaacacacgttgacatgatcgtagt

SEQ ID NO: 106061 - DNA, 80 bp, synthetic construct
  source 1..80: mol_type = other DNA
tcgcccgaggcgtgggcctctgaccaggcctggtcttgcgtgacgagagcctcctccgggccgtggacgcgcccgggcgc

SEQ ID NO: 106062 - DNA, 80 bp, synthetic construct
  source 1..80: mol_type = other DNA
agtcgcactttttaaaaaagtgtggtaacatgtccattttggtttcgccaagtaacaacacgggctggggactgggtgcc

SEQ ID NO: 106063 - DNA, 80 bp, synthetic construct
  source 1..80: mol_type = other DNA
ctcgtcgtggaggccgcggcgctttgttcggccatgtacgtgggcgatctttgcggggatgtcttcctggtgtggcaact

SEQ ID NO: 106064 - DNA, 80 bp, synthetic construct
  source 1..80: mol_type = other DNA
gagaacaaatggaaatcggcacgtgaggctgttgaagatggtaggttttgggagctggttgacaaggaaagaaatctcca

SEQ ID NO: 106065 - DNA, 80 bp, synthetic construct
  source 1..80: mol_type = other DNA
agatcctgtaatatatgattcaaaatttgaaaagcaactgggacaggttatgctcctggttttgtgtgcagttcaacttt

SEQ ID NO: 106066 - DNA, 80 bp, synthetic construct
  source 1..80: mol_type = other DNA
ggcaagtcttcacctttagacctaggttccacgaaaccgtacaggagtgtaattgttccatctacaccggccacatcacc

SEQ ID NO: 106067 - DNA, 80 bp, synthetic construct
  source 1..80: mol_type = other DNA
gcgccaaagccctggcaccaccaccgagctgggacaccatgtggaagtgcctgttgcgcttaaagcccacattacacgga

SEQ ID NO: 106068 - DNA, 80 bp, synthetic construct
  source 1..80: mol_type = other DNA
acacgcggacgcggggggggggggaagacccgcccaccccacccacgaaacacagaggacgcacctcggttgcctctgac

SEQ ID NO: 106069 - DNA, 80 bp, synthetic construct
  source 1..80: mol_type = other DNA
tgctggctcctggcatgagactgctctacctggacacgtatagaatcactctcatcatcatcggcatctgcagcctgata

SEQ ID NO: 106070 - DNA, 80 bp, synthetic construct
  source 1..80: mol_type = other DNA
taggcggcagtgcgcgctactggtggatcgacccccgcgccgccgcggccctgacggcggcggttgtggcgtgcctcggg

SEQ ID NO: 106071 - DNA, 80 bp, synthetic construct
  source 1..80: mol_type = other DNA
tcacctgcggagcggagcaggtctactggtcgcttccagacatgatgcaggatcctgtcactttccgctccactagacaa

SEQ ID NO: 106072 - DNA, 80 bp, synthetic construct
  source 1..80: mol_type = other DNA
tctcacccatggagaagaaagtgatcacttggggtgccgacacagcagcatgcggtgacatcatcgcaggcctaccggtg

SEQ ID NO: 106073 - DNA, 80 bp, synthetic construct
  source 1..80: mol_type = other DNA
gtatacgctgaccccatggctttgaaggatttcaaggagtttgccagtggaaggaagagtataactctcgacatcctaac

SEQ ID NO: 106074 - DNA, 80 bp, synthetic construct
  source 1..80: mol_type = other DNA
ctgtatacgcagatccttcctatcaaccagaacctcaaattggcgaatctcagtggaacgaagctgatgctaatgcggca

SEQ ID NO: 106075 - DNA, 80 bp, synthetic construct
  source 1..80: mol_type = other DNA
ggacagggtcgaaatgagtcccctcctgttctcgacaacagagctcgcaatcctgccttgctcctttaccaccatgccgg

SEQ ID NO: 106076 - DNA, 80 bp, synthetic construct
  source 1..80: mol_type = other DNA
ataaccaaatacatcatggcctgcatgtcagcggacctcgaagtggtgaccagcacatgggttttggtcggtggcgtcct

SEQ ID NO: 106077 - DNA, 80 bp, synthetic construct
  source 1..80: mol_type = other DNA
actgctgttgttgaattttccacctacagagaaacgtatgccaagcggccttacaatttctcatacccgtttaacgacct

SEQ ID NO: 106078 - DNA, 80 bp, synthetic construct
  source 1..80: mol_type = other DNA
aagagctatgctgcctgtgagccccgtccaaggacgtaaaatgaagtcaggccgaaagccacggattgagcaagccgtgc

SEQ ID NO: 106079 - DNA, 80 bp, synthetic construct
  source 1..80: mol_type = other DNA
gcctggaggctgcacgacactccaccatcaatcactcccctgtgaggaacttctgtcttcacgcggaaagcgtctagcca

SEQ ID NO: 106080 - DNA, 80 bp, synthetic construct
  source 1..80: mol_type = other DNA
tccgaaaaccttatgagccgcgtttccatacgactgcatccataggcagaaacaattgctgttctgttggcatccgctgc

SEQ ID NO: 106081 - DNA, 80 bp, synthetic construct
  source 1..80: mol_type = other DNA
gttctttctgaaatgaaggaggcttttcacggcctggacgtgaaattccacacacaggctttttccgctcacggcagcgg

SEQ ID NO: 106082 - DNA, 80 bp, synthetic construct
  source 1..80: mol_type = other DNA
gaactgcggctatcgcaggtgtcgtgccagcggcgtcctgaccactagctgcggtaacacccttacctgctacatcaagg

SEQ ID NO: 106083 - DNA, 80 bp, synthetic construct
  source 1..80: mol_type = other DNA
gagcgatcaaagtgttacggggtttcaagaaagaaatctcaaacatgttgaacataatgaacaggaggaaaagatctgtg

SEQ ID NO: 106084 - DNA, 80 bp, synthetic construct
  source 1..80: mol_type = other DNA
gtactacggctggacttgctagtcttttctcaccaggcgccaagcagaacatccagctggtcaacaccaacggcagttgg

SEQ ID NO: 106085 - DNA, 80 bp, synthetic construct
  source 1..80: mol_type = other DNA
cgactacggacgccaagctgaactacctgtcgcggacgcagcggctggcctccctcctgacgtacgccgggcctataaaa

SEQ ID NO: 106086 - DNA, 80 bp, synthetic construct
  source 1..80: mol_type = other DNA
tcagaagcctgcatgtcgtgtggtcggtcgtagtccaacgtgcctcccccacccaccacacagccggtccccacgccgac

SEQ ID NO: 106087 - DNA, 80 bp, synthetic construct
  source 1..80: mol_type = other DNA
caggacctcgtcggctggccggcgccccctggggcgcgctccctggcaccatgcacctgcggcagctcggacctctactt

SEQ ID NO: 106088 - DNA, 80 bp, synthetic construct
  source 1..80: mol_type = other DNA
gccaactctctgctccgtccctaaaggccacgtgcaccgcccaccaagactctcctggtgcagatctcatagaggctaac

SEQ ID NO: 106089 - DNA, 80 bp, synthetic construct
  source 1..80: mol_type = other DNA
tactgtccccgcttcggcagtccattatgccaacaagtccggcacatatcatcttaccaatgactgtccgaacagcagca

SEQ ID NO: 106090 - DNA, 80 bp, synthetic construct
  source 1..80: mol_type = other DNA
gtcctgggcccagcccgggtacccttggcccctctacgggaatgagggctgtggttgggcaggatggctcttgccccccc

SEQ ID NO: 106091 - DNA, 80 bp, synthetic construct
  source 1..80: mol_type = other DNA
atggttagaagagagaggctacgcgacactcaagggagaagtcgtggaccttggctgtggaagggggggctggtcatatt

SEQ ID NO: 106092 - DNA, 80 bp, synthetic construct
  source 1..80: mol_type = other DNA
gagtgtggagaggggacgggattaacaccacgacctgcccctgcggtgccatcataactggtcatgtgaagaatggaacc

SEQ ID NO: 106093 - DNA, 80 bp, synthetic construct
  source 1..80: mol_type = other DNA
cacctccaccaaaacattgtggacgtccagtatttgtacgggatctcacctgcagtcatatcttgggcaatcaagtggga

SEQ ID NO: 106094 - DNA, 80 bp, synthetic construct
  source 1..80: mol_type = other DNA
tcgtgttgatgcgcatgatggggattttatggcacgccgtagccggcactgctagaagtcccgtgttgaagtctttctgg

SEQ ID NO: 106095 - DNA, 80 bp, synthetic construct
  source 1..80: mol_type = other DNA
gagctgagggttagccgcgaggaaagagctccataggtcaagggctagcagagtttgcaagcggtcgcgaaactcgcgaa

SEQ ID NO: 106096 - DNA, 80 bp, synthetic construct
  source 1..80: mol_type = other DNA
aggccggcgctgcattcgccgtgttcacgcagacgttttcgtagacccgcatccatggtatttcctcgtagacacgcccc

SEQ ID NO: 106097 - DNA, 80 bp, synthetic construct
  source 1..80: mol_type = other DNA
tggccgctgctcctgctcctactggcgttaccaccacgagcttacgccttggaccgggagatggctgcatcgtgcggtgg

SEQ ID NO: 106098 - DNA, 80 bp, synthetic construct
  source 1..80: mol_type = other DNA
gggtggtggggttgggcggtattacctttattaatgttagatttgctggagacaaatttaaaggtactttgtttgaagcc

SEQ ID NO: 106099 - DNA, 80 bp, synthetic construct
  source 1..80: mol_type = other DNA
gcagccactgttatgcaaaaggcatatcatgccaaggttgtgaaggtagccaggccctcccgagatggaggatgcatcat

SEQ ID NO: 106100 - DNA, 80 bp, synthetic construct
  source 1..80: mol_type = other DNA
ggcaagagagcactcacacccccagcgagtgatctgaaatattcatggaagacatgggggaaagcaaaaatcttcacccc

SEQ ID NO: 106101 - DNA, 80 bp, synthetic construct
  source 1..80: mol_type = other DNA
cagagctgaggccatcgtccaggtttgggtgccttccctgcatgtccgcggaggccgagacggagtgatcgtcttggtga

SEQ ID NO: 106102 - DNA, 80 bp, synthetic construct
  source 1..80: mol_type = other DNA
acgcactatgtgccggagagcgatgcagctgctcgcgtcactgccatacttagcagcctcaccgtaacccagctcctgag

SEQ ID NO: 106103 - DNA, 80 bp, synthetic construct
  source 1..80: mol_type = other DNA
cgccgaacatgatcgactatttcggacggccgtatgaaggcatcgccgtgttcgacggcaaaaagatcactgtaacaggg

SEQ ID NO: 106104 - DNA, 80 bp, synthetic construct
  source 1..80: mol_type = other DNA
accagttaatgctggatgctttgggagacagaacgcgctacttttccttgtggaattccgcagtggacagttacgaccct

SEQ ID NO: 106105 - DNA, 80 bp, synthetic construct
  source 1..80: mol_type = other DNA
tcatgctgctcttcgctggcgtagatggcgacacctacgtctccggagggaccgctggccgcaccgccctgggtgttgcc

SEQ ID NO: 106106 - DNA, 80 bp, synthetic construct
  source 1..80: mol_type = other DNA
aacactatcaccccggagcacttcaagagtaaacttcacatcccgaccacatacaggcaaagtaatggcattaccgcgag

SEQ ID NO: 106107 - DNA, 80 bp, synthetic construct
  source 1..80: mol_type = other DNA
tggcagtgtgggcctgggaagagtcctagtggacattcttgctggctatggggctggtgtggcgcgggccctcgtggcct

SEQ ID NO: 106108 - DNA, 80 bp, synthetic construct
  source 1..80: mol_type = other DNA
cttgcaagcttgaccctacggccagcaaggtcattacgtcgctcaccgacaggctatactgcggcggccccatgtacaat

SEQ ID NO: 106109 - DNA, 80 bp, synthetic construct
  source 1..80: mol_type = other DNA
caggagaggtttgcggacctgtgtattgttttacacctagccctgtggtcattggaactacggataggaaggggctcccc

SEQ ID NO: 106110 - DNA, 80 bp, synthetic construct
  source 1..80: mol_type = other DNA
catcgacccgaacatacggtcaggtgtcagaaccgttaccaccggtgcgccgatcacatactctacctatgggaaattcc

SEQ ID NO: 106111 - DNA, 80 bp, synthetic construct
  source 1..80: mol_type = other DNA
tgggacctgccactttggctgaagagcaccagagcggcacagtgtgtaagagggaccagagtgatcgaggctggggtaat

SEQ ID NO: 106112 - DNA, 80 bp, synthetic construct
  source 1..80: mol_type = other DNA
cattaagctgcaatcttgaataattcccaaataattttccgcttgccacccgcgcaacacatccattaaaatttcttgta

SEQ ID NO: 106113 - DNA, 80 bp, synthetic construct
  source 1..80: mol_type = other DNA
cccgaaacccgcaaggcaatatctgctctcactgagaggctctacgtgggcggccccatgtataacagcagaggggacct

SEQ ID NO: 106114 - DNA, 80 bp, synthetic construct
  source 1..80: mol_type = other DNA
acatgattctccaaagcagtctcggtaacgacctcagggtcgatggagccagcgtcaggtttgacagcattaacctgtat

SEQ ID NO: 106115 - DNA, 80 bp, synthetic construct
  source 1..80: mol_type = other DNA
acctagattctgtaatatttgattcaaaatttgaaaaacaactgggacaggttatgctcctggttttgtgcgcagtccaa

SEQ ID NO: 106116 - DNA, 80 bp, synthetic construct
  source 1..80: mol_type = other DNA
tgctgactctctgctacgtgctgaccgggaggtcagctgatctagaacttgagaagtccgctgacatcaaatggaatgat

SEQ ID NO: 106117 - DNA, 80 bp, synthetic construct
  source 1..80: mol_type = other DNA
ctaatgatggttcagctcattacagagtttcagtgtatgacccagtacagaaaaaaaaggttatgaaaatacagccacat

SEQ ID NO: 106118 - DNA, 80 bp, synthetic construct
  source 1..80: mol_type = other DNA
ttaaagccagactgctgcctctcgaggaagcttgtgggttaacaccaccccattccgcccgttccaagtatggatacggc

SEQ ID NO: 106119 - DNA, 80 bp, synthetic construct
  source 1..80: mol_type = other DNA
ccagggttaagtcctggttatctgaaaatggagaagaaaggcttggccgcatggcagtaagcggagatgactgcgtggtg

SEQ ID NO: 106120 - DNA, 80 bp, synthetic construct
  source 1..80: mol_type = other DNA
tggtgatcagccatgattcctaggttcttcctatttaacatcctcttctgtctcttcaacgtgtgcgctgccttcgcggc

SEQ ID NO: 106121 - DNA, 80 bp, synthetic construct
  source 1..80: mol_type = other DNA
agatatacgagtgggtgcctcctctgcaggttcgcggaggccgtgatgccgtcatactgctcacatgtctcctgcacccc

SEQ ID NO: 106122 - DNA, 80 bp, synthetic construct
  source 1..80: mol_type = other DNA
cgtcccgcacccgagaccccggcccggctgccctcaccaccgaagcccacctcgtcactgtggggtgttcccagcccgcg

SEQ ID NO: 106123 - DNA, 80 bp, synthetic construct
  source 1..80: mol_type = other DNA
gcctgtaatcgagtctaatatcaccaagctagagcagttttgggcccgacacatgtggaacttcataagcggcatccagt

SEQ ID NO: 106124 - DNA, 80 bp, synthetic construct
  source 1..80: mol_type = other DNA
cccgaactcgagcatagtctatgaagccgatcatcacatcttgcacctcccgggatgcgttccttgcgtgagggctggga

SEQ ID NO: 106125 - DNA, 80 bp, synthetic construct
  source 1..80: mol_type = other DNA
agagtttcttcgcgggcaggccgcggcgctgacggacctcggggtgacccacgccaacaacacgttcgccccgcagccta

SEQ ID NO: 106126 - DNA, 80 bp, synthetic construct
  source 1..80: mol_type = other DNA
acgcccgattccttccccctcgccccatctcccccctcccccgctcccggaagtttcccgcccgtcactcaccaaacagt

SEQ ID NO: 106127 - DNA, 80 bp, synthetic construct
  source 1..80: mol_type = other DNA
acagcaaagggcaatcctgcggatacaggcgttgtcgcgcgagcggagtgctcaccaccagcatgggcaatactctcacg

SEQ ID NO: 106128 - DNA, 80 bp, synthetic construct
  source 1..80: mol_type = other DNA
caggtccaggtttgcatggttaggcgggttggatcggtacatcgatccaacaagaataacatgtttgttacaaacggtcc

SEQ ID NO: 106129 - DNA, 80 bp, synthetic construct
  source 1..80: mol_type = other DNA
actgtcgcgatatactaaagtactttaagatgagctacccccagttcctggccctctttgtccgctgccacaccgacctc

SEQ ID NO: 106130 - DNA, 80 bp, synthetic construct
  source 1..80: mol_type = other DNA
aaactagccctttcacttggaagagggctaacaattaccgcgaacggacagttagaaagcacccagagcgtgcagactaa

SEQ ID NO: 106131 - DNA, 80 bp, synthetic construct
  source 1..80: mol_type = other DNA
atcaccgccgctgtgttggtgaaaacatacagccaggtcaaaacccactctattttcaaggtgctcgactgtggcttcga

SEQ ID NO: 106132 - DNA, 80 bp, synthetic construct
  source 1..80: mol_type = other DNA
tgttacaattgcgattgctaatgatgtaattgaagtaggcgtttttcaggcggcggatggtggcaagaaggaccaggtcc

SEQ ID NO: 106133 - DNA, 80 bp, synthetic construct
  source 1..80: mol_type = other DNA
tcctccgtatcctcgctttaggaacaactttaggtggggtacacacgcgccgtgcatttccttccacaccccccctcccc

SEQ ID NO: 106134 - DNA, 80 bp, synthetic construct
  source 1..80: mol_type = other DNA
gtggaccgcactgaagcacgcagggctaggcgcgagaacaacatagtgggaggacatccagtctcgcgagggtcagcaaa

SEQ ID NO: 106135 - DNA, 80 bp, synthetic construct
  source 1..80: mol_type = other DNA
actgttgatgagatgaccaattctagatttcccacccccctggaaagattgcacacgggcccaaacaattctctggttgt

SEQ ID NO: 106136 - DNA, 80 bp, synthetic construct
  source 1..80: mol_type = other DNA
tgcgatgcattaacgctggatatgggattatggaagtccatcctgaccgatccccgggtgaaaataatgcgatcaactgc

SEQ ID NO: 106137 - DNA, 80 bp, synthetic construct
  source 1..80: mol_type = other DNA
ctgctttgcctactcctgctaacggtgggggtaggcatctttctcttgccagcacgataggctggtaagataacactcca

SEQ ID NO: 106138 - DNA, 80 bp, synthetic construct
  source 1..80: mol_type = other DNA
aactgggctaatccaccttcaccagaacgttgtagacgtgcagtatctctatggagtctcctcgacagtcgtgtcgtggg

SEQ ID NO: 106139 - DNA, 80 bp, synthetic construct
  source 1..80: mol_type = other DNA
tataaaggtggggtggtagtgctgaggctgatttactttagtatggagttggaagctgtgctgcaaagttatcagggcgt

SEQ ID NO: 106140 - DNA, 80 bp, synthetic construct
  source 1..80: mol_type = other DNA
ataaaagctaaactcctacaatactctgggatcccgtgtcgtcgcactcgcaacgagaccttcaacctcaccaaccagac

SEQ ID NO: 106141 - DNA, 80 bp, synthetic construct
  source 1..80: mol_type = other DNA
acctctggttgagtcgtggaagcaaccggattacgaacccccggttgtacacgggtgcgctctacctcctagtaaccagc

SEQ ID NO: 106142 - DNA, 80 bp, synthetic construct
  source 1..80: mol_type = other DNA
gggcagaggaaggctaggcatttacaggtatgtctctactggtgagcgagcttcaggaatgtttgacagtgtggtgctct

SEQ ID NO: 106143 - DNA, 80 bp, synthetic construct
  source 1..80: mol_type = other DNA
tacctgctgcagtactcgctcatcaagctgccttatttcatcagggcgcgcgccctgctgagggcgtgcctgctagcgaa

SEQ ID NO: 106144 - DNA, 80 bp, synthetic construct
  source 1..80: mol_type = other DNA
aagcaaaatactggtgccccgactcaatggaatacaattgccccaatctcagtccaagagaagagccagatgacatagat

SEQ ID NO: 106145 - DNA, 80 bp, synthetic construct
  source 1..80: mol_type = other DNA
tgggcactaaagtgggagtatgtagtcctagccttcctggttctggctgacgcacgcatttgtgcttgcttatggctaat

SEQ ID NO: 106146 - DNA, 80 bp, synthetic construct
  source 1..80: mol_type = other DNA
agtgtccccaggaaatggctggatgatcaaggaaacagcctgcctcagcaaagcttacgcaaacatgtggtcactgatgt

SEQ ID NO: 106147 - DNA, 80 bp, synthetic construct
  source 1..80: mol_type = other DNA
ttgctctcttctcatgtctgacttgccccgccgccggactggagtataggaactcgtctgatctctacacacttaccaac

SEQ ID NO: 106148 - DNA, 80 bp, synthetic construct
  source 1..80: mol_type = other DNA
gtcccaccgactgcttcaggaagcacccagatgcgacatatgggaagtgcgggtcaggaccgtggctaacacctaggtgc

SEQ ID NO: 106149 - DNA, 80 bp, synthetic construct
  source 1..80: mol_type = other DNA
gggctatgtaacgccccccgaggacggcaaggaaccagtggccgcactcagcgaacccaactatttgggagtggaggacg

SEQ ID NO: 106150 - DNA, 80 bp, synthetic construct
  source 1..80: mol_type = other DNA
ggccccatccactgttttttctttgcggtgtacaaggactcgcagcactcccttccgctggttaccgagctccgcaactt

SEQ ID NO: 106151 - DNA, 80 bp, synthetic construct
  source 1..80: mol_type = other DNA
gtccacggctgtgctctgcccccccagaaacccgctcctattccgccgcctagacggaagaaggttgtgcgtctcgatga

SEQ ID NO: 106152 - DNA, 80 bp, synthetic construct
  source 1..80: mol_type = other DNA
tttgccgacctcatggggtacattcctgtcgttggcgccccggtcggaggcgtcgccagagctctggcacatggtgttag

SEQ ID NO: 106153 - DNA, 80 bp, synthetic construct
  source 1..80: mol_type = other DNA
cagctcatccgcatgatggaaggagaaggagtcataggaccagctgactcacaggaccctcgcctgaaaagggtggaaac

SEQ ID NO: 106154 - DNA, 80 bp, synthetic construct
  source 1..80: mol_type = other DNA
ctgatgatgcaaggccacgggactgatcttgaagtaccccgccatgagcgcgtaggtcagcgcgttctccccggccgcgc

SEQ ID NO: 106155 - DNA, 80 bp, synthetic construct
  source 1..80: mol_type = other DNA
agctctactatagcgagcgtgcatacaacaacccaggccagaatccgaatgtatgtggggtataataacgcgcatggtgt

SEQ ID NO: 106156 - DNA, 80 bp, synthetic construct
  source 1..80: mol_type = other DNA
gcccagactcaccatctggtgaagcgccggggcctccgggccccggagggctactttacccccatcgccgtggacctgtg

SEQ ID NO: 106157 - DNA, 80 bp, synthetic construct
  source 1..80: mol_type = other DNA
gtgaggactaagctcaaactcactccattgcacgatgcttccaggcttgacttgtcaggatggtttgtatcgggcttcag

SEQ ID NO: 106158 - DNA, 80 bp, synthetic construct
  source 1..80: mol_type = other DNA
tcagtatttcattgcacgggcagaggccatcttgcatgtatgggtgcccccattgcaggttcgaggaggacgtgatgcgg

SEQ ID NO: 106159 - DNA, 80 bp, synthetic construct
  source 1..80: mol_type = other DNA
cacttgttacatcaaggccacggcagctgctaggtccgcgggcgtccggaacccggactttctcgcctgcggagatcatc

SEQ ID NO: 106160 - DNA, 80 bp, synthetic construct
  source 1..80: mol_type = other DNA
accaggacgcggtgcgcccgcacggccgcatccaccgtcgacgcagggtctgccgttgcgacggcggcgctgccggcgtt

SEQ ID NO: 106161 - DNA, 80 bp, synthetic construct
  source 1..80: mol_type = other DNA
gtccactactctgcccctcggggcatgctgtgggcatcttccgggctgctgtgtgcacccggagggttgcgaaggcggtg

SEQ ID NO: 106162 - DNA, 80 bp, synthetic construct
  source 1..80: mol_type = other DNA
ggaacagggctttgctatatgtacttatataaaagatggattttggggaatcttcgccgatttacatacgcgcaatgtat

SEQ ID NO: 106163 - DNA, 80 bp, synthetic construct
  source 1..80: mol_type = other DNA
gtcagggtgcgccctccctccggggaggccgacaccagtcccaccgcctaggcggaagagggttgtccagctcgatgact

SEQ ID NO: 106164 - DNA, 80 bp, synthetic construct
  source 1..80: mol_type = other DNA
gtgccattcttcacgttcccggatgtgtcccatgcgagctgcgaggcaataagtccgggtgctggataccggtcacaccc

SEQ ID NO: 106165 - DNA, 80 bp, synthetic construct
  source 1..80: mol_type = other DNA
ggtcgacatgagccccctcctgttctccaccactcaattagctatcctcccatgcacatttaccaacatgcctgcattgt

SEQ ID NO: 106166 - DNA, 80 bp, synthetic construct
  source 1..80: mol_type = other DNA
cactggagaggcccacctagctgaagagaacgaaggggacaatgcgtgcaagcgcacttattctgatagaggctggtgca

SEQ ID NO: 106167 - DNA, 80 bp, synthetic construct
  source 1..80: mol_type = other DNA
tcttcgggtggcccactgctatgcccccagggtcatgccgtcggtatattccgagcggcagtatgtacccggggcgtggc

SEQ ID NO: 106168 - DNA, 80 bp, synthetic construct
  source 1..80: mol_type = other DNA
cgcagatggcgccaatgatgccagccagcccagacaagaggccaatacagatgtgcgaataaatactgagtccgcaatgg

SEQ ID NO: 106169 - DNA, 80 bp, synthetic construct
  source 1..80: mol_type = other DNA
tccagaacctccaccttgggcggggaacgggccccgccgccgtcctccggcccgacggcttccgggtagtcgtcctcctc

SEQ ID NO: 106170 - DNA, 80 bp, synthetic construct
  source 1..80: mol_type = other DNA
ggcccgtgcgacagtcagatcacccgcatcatccgacaggcccaggtccacgttgacgagttttccccgcatccagaatc

SEQ ID NO: 106171 - DNA, 80 bp, synthetic construct
  source 1..80: mol_type = other DNA
gagtcgtcctcctcggagcaggtcgaccaggatcccgagtctttccacggagtcgggagctgcctcccccggccttggga

SEQ ID NO: 106172 - DNA, 80 bp, synthetic construct
  source 1..80: mol_type = other DNA
gcgttagtcggacgaaaaaaaaaaccttgaaatagcacagacacccccgtattttgaatttttatgtaagggtcacaatc

SEQ ID NO: 106173 - DNA, 80 bp, synthetic construct
  source 1..80: mol_type = other DNA
ctccgtctccgcgccccacccgagggccccccgctcgtcgcggtctgggctcgtggtgtgcggcggcccgtcggtgtggc

SEQ ID NO: 106174 - DNA, 80 bp, synthetic construct
  source 1..80: mol_type = other DNA
ctcgtcttctttgtctgcgacgattttgctccgtagtaagggcgtaatataaccactctcgcaaacacagcagaattctt

SEQ ID NO: 106175 - DNA, 80 bp, synthetic construct
  source 1..80: mol_type = other DNA
gctctctcaacaggcttgattcatctccaccagaacatcgtcgacgtccagtacctctatggcattagctcaactgtggt

SEQ ID NO: 106176 - DNA, 80 bp, synthetic construct
  source 1..80: mol_type = other DNA
ggttggttgctcaaggagcttggagcaaaagatggcggcaggttatacgccgatgacactgctggatgggacacccgaat

SEQ ID NO: 106177 - DNA, 80 bp, synthetic construct
  source 1..80: mol_type = other DNA
gcctttctgccaaagcgcgaggaggacgcaggctttgacattctcatccaccgagccgtgaccgtcccggccaacggcgc

SEQ ID NO: 106178 - DNA, 80 bp, synthetic construct
  source 1..80: mol_type = other DNA
tctacccggttgctccttttctatcttcctcctagctcttctatcttgcatctcaattccagtctctgctgtgcaagtca

SEQ ID NO: 106179 - DNA, 80 bp, synthetic construct
  source 1..80: mol_type = other DNA
ccacctatgggaagttcctagcggatggaggatgctcaggaggagcgtatgacattatcatttgtgatgagtgccattca

SEQ ID NO: 106180 - DNA, 80 bp, synthetic construct
  source 1..80: mol_type = other DNA
ggaggagcagccgcgtaagcaggagcaggaggaggagaacttaaccacccacgagcaacccaaaattgagcaggacctgg

SEQ ID NO: 106181 - DNA, 80 bp, synthetic construct
  source 1..80: mol_type = other DNA
aagaaggggccatgcatacagcactcacaggagccacagaaatccaaatgtcgtcaggaaacttgctcttcactggacat

SEQ ID NO: 106182 - DNA, 80 bp, synthetic construct
  source 1..80: mol_type = other DNA
tgggatagcttccggcatcaatggagtggtagatttggctaatcaggctgtgcagaaaaagataaacagtcgtttggacc

SEQ ID NO: 106183 - DNA, 80 bp, synthetic construct
  source 1..80: mol_type = other DNA
ccaagtgccgacttcggggtagaccaggggccccccactgaaacttctgagcccgaccgccccatcgcggatgatcagtc

SEQ ID NO: 106184 - DNA, 80 bp, synthetic construct
  source 1..80: mol_type = other DNA
tagctactttcacataaccggcggcgatgactgacaaccacctggacctcgagatggacggccaggcctccgagcagcgc

SEQ ID NO: 106185 - DNA, 80 bp, synthetic construct
  source 1..80: mol_type = other DNA
aacccggttttgtttctgtggcctcccgacggatgcgcgtgtccttactccgtcttggtgggtgggtggctgtgtatggc

SEQ ID NO: 106186 - DNA, 80 bp, synthetic construct
  source 1..80: mol_type = other DNA
gtaagcgacgaaatcactaaagacggcataaaggttggaacagataccgcaaccacccaacaaagcatttacgccgataa

SEQ ID NO: 106187 - DNA, 80 bp, synthetic construct
  source 1..80: mol_type = other DNA
cgttgacttcagtctggaccccaccttctccattgagacacgcacgactccccaggacgcggtggcccgaagccaacgca

SEQ ID NO: 106188 - DNA, 80 bp, synthetic construct
  source 1..80: mol_type = other DNA
gccccctgtgctttctcctatttgtgaacctattggtggtgaatgtatgccacagttgtgttctgaagatatggatttgt

SEQ ID NO: 106189 - DNA, 80 bp, synthetic construct
  source 1..80: mol_type = other DNA
cggcgatgtcgtcgtttgcgctacggacgcccttatgactggttatacgggcgatttcgatagcgtaatcgactgtaacg

SEQ ID NO: 106190 - DNA, 80 bp, synthetic construct
  source 1..80: mol_type = other DNA
gcggctgagggccgtcgacacgcgcacctcctcgcggctgcgaaccatcttgttggcctcgagcggcggaatcattatgg

SEQ ID NO: 106191 - DNA, 80 bp, synthetic construct
  source 1..80: mol_type = other DNA
tgcagtagatctaagtgtcgtggttgagaagccaaaaggaatgtacaaatcagcaccacagagattggcactcacatctg

SEQ ID NO: 106192 - DNA, 80 bp, synthetic construct
  source 1..80: mol_type = other DNA
tgatcggcccctcgactttgaaatgtacggggccacttactctgtcactccgctggatttaccagctatcattgaaagac

SEQ ID NO: 106193 - DNA, 80 bp, synthetic construct
  source 1..80: mol_type = other DNA
aatagaaatgagcccacttttgttctcgaccactgagttatctatattgccctgctcctttacaaccacgcctgcgctat

SEQ ID NO: 106194 - DNA, 80 bp, synthetic construct
  source 1..80: mol_type = other DNA
ttggaggaggcgtgccagttgactccaccccattctgcaagatccaagtatggattcggggccaaggaggtccgcagctt

SEQ ID NO: 106195 - DNA, 80 bp, synthetic construct
  source 1..80: mol_type = other DNA
ctggtagtgcgtggtgcccgagactccatcatcattcttgcagccattacttggcctcacgtggtgtttgaggtgacaaa

SEQ ID NO: 106196 - DNA, 80 bp, synthetic construct
  source 1..80: mol_type = other DNA
atgaatttgaaataaagcgttctgtggatggggagggatacaatgtggcccagtgcaatatgactaaggattggttccta

SEQ ID NO: 106197 - DNA, 80 bp, synthetic construct
  source 1..80: mol_type = other DNA
taggggaagccctccaagcattggctgttaagagctttggccaacatccccctagcggcgactcaggccattccacggtg

SEQ ID NO: 106198 - DNA, 80 bp, synthetic construct
  source 1..80: mol_type = other DNA
aaagaacctcctgctgaacaaaaaaaacagtttcaattacaagttgcagaaactgatcaaaacgaatcaaaaattccctc

SEQ ID NO: 106199 - DNA, 80 bp, synthetic construct
  source 1..80: mol_type = other DNA
aaaatggtcaaccatctaaagaacaagacataacaatggctttctttgatctaaagcaagctgatgcaggaggtaataaa

SEQ ID NO: 106200 - DNA, 80 bp, synthetic construct
  source 1..80: mol_type = other DNA
tcaaccactggatcttaactctatgtgcactgtctgaagtcactggcttgtcccccgatgtgatacaatcacaatcttat

SEQ ID NO: 106201 - DNA, 80 bp, synthetic construct
  source 1..80: mol_type = other DNA
gcggagtacggtcagtaacccgcctggagcaccagatgtgggagagcatcagagatgaattgaatgcattgctacatgat

SEQ ID NO: 106202 - DNA, 80 bp, synthetic construct
  source 1..80: mol_type = other DNA
ggagtggtcgagcacaggctggaagcggcctgcaactggacgcggggcgaacgctgtgatctggaagacagggacaggtc

SEQ ID NO: 106203 - DNA, 80 bp, synthetic construct
  source 1..80: mol_type = other DNA
gatgtacggggctgtttattctgtcactccactggacttaccagctatcattgaacgactccatggcctaagcgcgttct

SEQ ID NO: 106204 - DNA, 80 bp, synthetic construct
  source 1..80: mol_type = other DNA
cactgatgctcccacacacagcaaccggtgggttcccaggttttatgttgtacgccggcatatgcttgcatgtatccttg

SEQ ID NO: 106205 - DNA, 80 bp, synthetic construct
  source 1..80: mol_type = other DNA
acacttggggggagaatgagacagatgtcttcttgttgaacagcacccgaccaccgcgagggtcatggttcggctgcacg

SEQ ID NO: 106206 - DNA, 80 bp, synthetic construct
  source 1..80: mol_type = other DNA
tggaaaaattgcagttgaagggaacaacctatggcgtctgttcaaaggctttcaagtttcttgggactcccgcagacaca

SEQ ID NO: 106207 - DNA, 80 bp, synthetic construct
  source 1..80: mol_type = other DNA
aacaaccacgcagacaactactagggaaacaacacagcctactactgtacccactacacatccaaccaccacagtcagta

SEQ ID NO: 106208 - DNA, 80 bp, synthetic construct
  source 1..80: mol_type = other DNA
ctggtcgtcggggtcgtgtgcgcagcaatactgcgtcggcatgtgggcccgggagaggtggctgtgcagtggatgaaccg

SEQ ID NO: 106209 - DNA, 80 bp, synthetic construct
  source 1..80: mol_type = other DNA
tcaactttcgccgcagtttcccacctggaaccagagtgcctaccgccttttgacgtgtatttgattctcacctttgtttg

SEQ ID NO: 106210 - DNA, 80 bp, synthetic construct
  source 1..80: mol_type = other DNA
ggagtgtgggtcggcggagtggggatccgtgggtgcggtacccttcagggccaccgcccatacatcgtcggtcgcccgat

SEQ ID NO: 106211 - DNA, 80 bp, synthetic construct
  source 1..80: mol_type = other DNA
gtgttgttcagtcagtgaggccctggtctcctcctcacatcgtggtaaacgggccctgcgatatggatgatggcggagcg

SEQ ID NO: 106212 - DNA, 80 bp, synthetic construct
  source 1..80: mol_type = other DNA
aaacttcctcgttgcgggggtttggctggctgttgctgtaaggaacgaggcggtgagcatccaaatggacgagggttttg

SEQ ID NO: 106213 - DNA, 80 bp, synthetic construct
  source 1..80: mol_type = other DNA
cctgttacataaaagctctagctgcttgtcgagctgcgaagctccaagccgctgagctccttgtctgcggggacgatttg

SEQ ID NO: 106214 - DNA, 80 bp, synthetic construct
  source 1..80: mol_type = other DNA
ctgccatgaatgaaagaaatgctgttcagccaagtattgttttgtacagtgaggatgttaatatggaaactcctgatact

SEQ ID NO: 106215 - DNA, 80 bp, synthetic construct
  source 1..80: mol_type = other DNA
aggaggtgtgtggaccagtatactgtttcactcctagccccgtggtagtagggacgaccgatcagctcggtgcgcccaca

SEQ ID NO: 106216 - DNA, 80 bp, synthetic construct
  source 1..80: mol_type = other DNA
cagtggtagacgggatcgtggctactgacgtgccagaacttgagcgagctacccccatgatgcaaaagaaagttggacaa

SEQ ID NO: 106217 - DNA, 80 bp, synthetic construct
  source 1..80: mol_type = other DNA
atgagtttgaaatcaagcgcactgtggacggggaaggatacaacgtggcacaatgcaacatgaccaaagactggttcctg

SEQ ID NO: 106218 - DNA, 80 bp, synthetic construct
  source 1..80: mol_type = other DNA
aagaagtcggatcccgagatggagacctcatgtacgctgatgacacagccggatgggatacgaggatcacagaggacgac

SEQ ID NO: 106219 - DNA, 80 bp, synthetic construct
  source 1..80: mol_type = other DNA
tcgtgataacacctcactcaggagaagagcacgctgtaggtaatgacacaggaaaacatggcaaggaaattaaaataaca

SEQ ID NO: 106220 - DNA, 80 bp, synthetic construct
  source 1..80: mol_type = other DNA
atggcgaggcgtggcgcggaagtgagcagcccgacccacccggaggcccgcggacacggggcgtgcgccaagcacccccc

SEQ ID NO: 106221 - DNA, 80 bp, synthetic construct
  source 1..80: mol_type = other DNA
tcgtcagtggcctggtgggggctgccgtgggcagcataggcctgggtaaggtgctggtggacatcctggcaggatatggt

SEQ ID NO: 106222 - DNA, 80 bp, synthetic construct
  source 1..80: mol_type = other DNA
cggctggttaacgggttcaaacccctggtgcggcggtccgcccgcctgtatcgcatcctgggggttctggtccacctgcg

SEQ ID NO: 106223 - DNA, 80 bp, synthetic construct
  source 1..80: mol_type = other DNA
cgccaatacattcgcgtccctctttacaacggggccgtctcagaacatccaaatcataaacaccaacggcagctggcata

SEQ ID NO: 106224 - DNA, 80 bp, synthetic construct
  source 1..80: mol_type = other DNA
attgagatctatgggcttgaacgccgttgcattctacaggggcatagacgtatccgtcatccctacagccggtgacgtgg

SEQ ID NO: 106225 - DNA, 80 bp, synthetic construct
  source 1..80: mol_type = other DNA
cgtggtggtggataaacacgatcctaccgactaccggggtggtgtccctgggctgttaaagaaaggaaaggacatgaaaa

SEQ ID NO: 106226 - DNA, 80 bp, synthetic construct
  source 1..80: mol_type = other DNA
aacaggcacggtaatggacattatatctaggaaagaccaaagaggcagcggacaggtgggaacttatggtctgaacacat

SEQ ID NO: 106227 - DNA, 80 bp, synthetic construct
  source 1..80: mol_type = other DNA
atcccggccccggggaatccccgtcccccaacatgtccagatcgaaatcgtctagcgcgtcggcatgcgccatcgccacg

SEQ ID NO: 106228 - DNA, 80 bp, synthetic construct
  source 1..80: mol_type = other DNA
gccgcctggtacttgaagggcaagtgggctccaggggctgtctatgccctctacggggcgtggccgctgctcttgctact

SEQ ID NO: 106229 - DNA, 80 bp, synthetic construct
  source 1..80: mol_type = other DNA
tccgtcactgtgtcccatcctaacatcgaggaggttgctctgtccaccaccggagagatccctttttacggcaaggctat

SEQ ID NO: 106230 - DNA, 80 bp, synthetic construct
  source 1..80: mol_type = other DNA
gaagagttttctgtactcgaacgtggctctgtacctgcccgactcctacaagtacacgccggccaacgtcacgctgccca

SEQ ID NO: 106231 - DNA, 80 bp, synthetic construct
  source 1..80: mol_type = other DNA
tacctccattctcggcatcggaacggtccttgatcaagcagagacagccggggtcagactaactgtgctggctacggcca

SEQ ID NO: 106232 - DNA, 80 bp, synthetic construct
  source 1..80: mol_type = other DNA
gaagctcctgaaatgcctgccctttatgagaagaaactggctctatatctccttcttgctctcagcctagcttctgttgc

SEQ ID NO: 106233 - DNA, 80 bp, synthetic construct
  source 1..80: mol_type = other DNA
ctgcagcccgcgtcacccagatactgacatctttgactgtgacttcccttctcagaaaactccataagtggatcaacgaa

SEQ ID NO: 106234 - DNA, 80 bp, synthetic construct
  source 1..80: mol_type = other DNA
tgggaaatgtatgggtgggattctggcaaccaggagatgagcagaactacacggtcactgtccatggtagcgatggaaat

SEQ ID NO: 106235 - DNA, 80 bp, synthetic construct
  source 1..80: mol_type = other DNA
tacaggccggcgccaccacccttccggtcagcccgtaatacatgcccgctgccaccatctccaacggcttcaggaccaaa

SEQ ID NO: 106236 - DNA, 80 bp, synthetic construct
  source 1..80: mol_type = other DNA
cgtagcggggcctcccgttcgcggccccgggccgtggcccggtcgccggcggcgtcggctgcgtcgtcgtactcgtcccc

SEQ ID NO: 106237 - DNA, 80 bp, synthetic construct
  source 1..80: mol_type = other DNA
gtcgagtggagattgactttgattactgtccagggacaacggtcactctgagtgagagctgcgggcatcgtggacctgcc

SEQ ID NO: 106238 - DNA, 80 bp, synthetic construct
  source 1..80: mol_type = other DNA
cgccgccacgcggcgccggaaccggtcgcggtcggcccgctcgcgcgcccaggacccccgtcgggccaggcgcgcggccg

SEQ ID NO: 106239 - DNA, 80 bp, synthetic construct
  source 1..80: mol_type = other DNA
agaagaaggtgatagtttggggagctgacactgcggcatgcggtgacatcatcagggggttgccagtctcggctaggcta

SEQ ID NO: 106240 - DNA, 80 bp, synthetic construct
  source 1..80: mol_type = other DNA
ccctggatacatacgtgaacattggggcgcggtggtctccagatcccatggacaacgttaatccctttaaccaccaccgc

SEQ ID NO: 106241 - DNA, 80 bp, synthetic construct
  source 1..80: mol_type = other DNA
tatgaaaccgtgatggcagcagcggcagcccaaccttctacactggaagcaccctacgtgcctccccgatacttgggtcc

SEQ ID NO: 106242 - DNA, 80 bp, synthetic construct
  source 1..80: mol_type = other DNA
ctcagtaataccatgctacgtcaccacggcatggtttacagaaccacatcaaaatcagcctccgcgagggcaaagaaagt

SEQ ID NO: 106243 - DNA, 80 bp, synthetic construct
  source 1..80: mol_type = other DNA
ggggcgtcatgttcggcttggcctacttctctatgcagggagcgtgggcgaaagtcgttgtcatccttctgttggccgcc

SEQ ID NO: 106244 - DNA, 80 bp, synthetic construct
  source 1..80: mol_type = other DNA
cccagtccttcctcgccaccaccgtgaacggggttctctggacagtctaccatggcgcaggctcaaagactttgtcaggc

SEQ ID NO: 106245 - DNA, 80 bp, synthetic construct
  source 1..80: mol_type = other DNA
actcttctgggtgccctgaacgccttagcagctgcaagcctctgacctacttcgaacaaggttggggtcccattacagac

SEQ ID NO: 106246 - DNA, 80 bp, synthetic construct
  source 1..80: mol_type = other DNA
gtgtggcagcctaattggcacaagagcccgagccacgtgggcagaaaacatccaggtggctatcaaccaagtcagagcaa

SEQ ID NO: 106247 - DNA, 80 bp, synthetic construct
  source 1..80: mol_type = other DNA
tgctagaggacaatgtacaacctatacctactaccataatggcaaaaaatgaggtgttttgcgtggacacttcaaaaggg

SEQ ID NO: 106248 - DNA, 80 bp, synthetic construct
  source 1..80: mol_type = other DNA
ggagtttacttgctgccgcgcaggggccccaggttgggtgtgcgcacagcgagaaagacttccgagcggtcgcaacctcg

SEQ ID NO: 106249 - DNA, 80 bp, synthetic construct
  source 1..80: mol_type = other DNA
agtgggaacaggcaaaaacaggagctggtgcagaccaaaatcaaaaagaaactcgcacttacggcgtagccgccactggc

SEQ ID NO: 106250 - DNA, 80 bp, synthetic construct
  source 1..80: mol_type = other DNA
gcgtttgcttacgacggttctcaagccgcctcgattggcctcgtggttgttgccgctctgaccatcttcactctcacacc

SEQ ID NO: 106251 - DNA, 80 bp, synthetic construct
  source 1..80: mol_type = other DNA
cactcggacccttcagagacattggtgccacacacccaaagaaaagtacaattgatctcactcttgggagaggcttcact

SEQ ID NO: 106252 - DNA, 80 bp, synthetic construct
  source 1..80: mol_type = other DNA
actctttatttttctgagtctaccacttctattgcacttaactgttcttgtcgtaaccaactcgttcagtggcgcgctaa

SEQ ID NO: 106253 - DNA, 80 bp, synthetic construct
  source 1..80: mol_type = other DNA
ccagagttaccaggtggcacatctacatgcacccactgggagtggcaagagcacgaaggtgccggccgcttacgcagctc

SEQ ID NO: 106254 - DNA, 80 bp, synthetic construct
  source 1..80: mol_type = other DNA
agctgcacgtactagcccctgtcaacagcattggaatttaacttactgtcccccaccagtgtcgccctttgtgatcaata

SEQ ID NO: 106255 - DNA, 80 bp, synthetic construct
  source 1..80: mol_type = other DNA
ccgcagccagcgccggggcaggaccgggagagggaggttgggcatatataggtatgtctcttccggtgagagagcgtcgg

SEQ ID NO: 106256 - DNA, 80 bp, synthetic construct
  source 1..80: mol_type = other DNA
gaaagccacgtgcgccgcccacgacacgccgggttccgacctcattgaagcaaatcttctctggggttccaacgtcaccc

SEQ ID NO: 106257 - DNA, 80 bp, synthetic construct
  source 1..80: mol_type = other DNA
cattgtgggtttgggagtgaaaagcctaaaacgccgccggtgctattaaagtggaaccaagctaaatacccttgttgtat

SEQ ID NO: 106258 - DNA, 80 bp, synthetic construct
  source 1..80: mol_type = other DNA
tgacctgcatgtctacagacttagaggtggtcacgagcacatgggtactagtggggggggtcctcgctgcccttgcagcc

SEQ ID NO: 106259 - DNA, 80 bp, synthetic construct
  source 1..80: mol_type = other DNA
gaccgcgagctgatgctgagcctgcgccgggcgctggtagggggcgctacaggcgaggagtcctacttcgacatggtggc

SEQ ID NO: 106260 - DNA, 80 bp, synthetic construct
  source 1..80: mol_type = other DNA
ctgggtgtatgggattatgtctgccttagtttttgtatcctctgtagtttccttaaaactttatacgcttattaatttta

SEQ ID NO: 106261 - DNA, 80 bp, synthetic construct
  source 1..80: mol_type = other DNA
ctccgccagaagaaagtgacctttgaccgcgtccaaattgtggacgcgcactaccataatgtactacaggagatgaaact

SEQ ID NO: 106262 - DNA, 80 bp, synthetic construct
  source 1..80: mol_type = other DNA
acatgggcagacccatcatacaaatgtcacaataatggcagcctcactattcatgctttcaatattacatccggccaata

SEQ ID NO: 106263 - DNA, 80 bp, synthetic construct
  source 1..80: mol_type = other DNA
ttgaaaagaggagaaacaacacatcatgccgtgtccagaggcagcgcaaaacttcaatggttcgtggagaggaacatggt

SEQ ID NO: 106264 - DNA, 80 bp, synthetic construct
  source 1..80: mol_type = other DNA
ggtcataggatggcatgggacatgatgatgaactggtctcctaccgtgacttatgtggtctccagtgccttgagaacgcc

SEQ ID NO: 106265 - DNA, 80 bp, synthetic construct
  source 1..80: mol_type = other DNA
tcgaatgtatggaggcgccaaaacaaggtccagccaacatccagtgcgcgtgcgcggtcattatcgagcgccttggggag

SEQ ID NO: 106266 - DNA, 80 bp, synthetic construct
  source 1..80: mol_type = other DNA
ctcgaataccaactgaagagccatcttatgaagaggtgcgtgtaaacacgcacccccaaggagccgccctgctccgcctc

SEQ ID NO: 106267 - DNA, 80 bp, synthetic construct
  source 1..80: mol_type = other DNA
cttgccgggtgttagtctctgtctctccgggtctcctcctcccgccgggccgccgctccgtcgctcgcagtgccggggtg

SEQ ID NO: 106268 - DNA, 80 bp, synthetic construct
  source 1..80: mol_type = other DNA
ccaatcttacagttgtagcttacaaaaatttaactgacagaactattaaggcatatagctatgagaacaaagatgattat

SEQ ID NO: 106269 - DNA, 80 bp, synthetic construct
  source 1..80: mol_type = other DNA
ttttataacagctccttgatgtatgcggttttggcgtatctgtcatctgtatatacacgaccacaaggtggggggtatat

SEQ ID NO: 106270 - DNA, 80 bp, synthetic construct
  source 1..80: mol_type = other DNA
gtaggcatcttcttgctccccgcccgatagagcggcacacactaggtacactccatagctaactgttccttttttttttt

SEQ ID NO: 106271 - DNA, 80 bp, synthetic construct
  source 1..80: mol_type = other DNA
tattatcataagttcgactctactgggtgtccccaaaggctcaacagctgcaagcccatcactttcttcaagcaagggtg

SEQ ID NO: 106272 - DNA, 80 bp, synthetic construct
  source 1..80: mol_type = other DNA
tggatgaactctacaggtttcacaaagacttgtggcggcccgccttgtcagataagtccgggcgactacaacagctcggc

SEQ ID NO: 106273 - DNA, 80 bp, synthetic construct
  source 1..80: mol_type = other DNA
gagcgaaggttgagataacgcccaattcaccaagagccgaagccactctggggggttttggaagcctaggacttgattgt

SEQ ID NO: 106274 - DNA, 80 bp, synthetic construct
  source 1..80: mol_type = other DNA
ctaagactttggccggccctaagggcccagtatgccagatgtataccaatgtggaccaggatatggtaggctggcctgcg

SEQ ID NO: 106275 - DNA, 80 bp, synthetic construct
  source 1..80: mol_type = other DNA
gaatgagggttgcggttgtgcgggatggctcctgtccccccgcggctctcgcccgaactggggcccaaatgacccccggc

SEQ ID NO: 106276 - DNA, 80 bp, synthetic construct
  source 1..80: mol_type = other DNA
cacaggcgcttcatagtcgccgattcccgaaacttcatcacccccgagttcccccgggacttttggatgtcgcccgtctt

SEQ ID NO: 106277 - DNA, 80 bp, synthetic construct
  source 1..80: mol_type = other DNA
ccccccacgcagaggcgccgccgcgccccccgtgacgggcgtggcgtctcacgcagccccccagccggccgcggctcgga

SEQ ID NO: 106278 - DNA, 80 bp, synthetic construct
  source 1..80: mol_type = other DNA
gagccagggcggtcagagctaggctcattgctcagggaggcaaacacgctgtatgcggtcggtacctcttcaactgggcg

SEQ ID NO: 106279 - DNA, 80 bp, synthetic construct
  source 1..80: mol_type = other DNA
acggcctactggagtgtcactgtcgctgcaacctatgcaccccgcaccgctccctggtctgcaattcgcaactacttagc

SEQ ID NO: 106280 - DNA, 80 bp, synthetic construct
  source 1..80: mol_type = other DNA
cgaccagccgcgcgactatctcgcgggccaggggcgttgggagcgggaccggaaaccgcagcgtgaggtccagcgactcc

SEQ ID NO: 106281 - DNA, 80 bp, synthetic construct
  source 1..80: mol_type = other DNA
gtgtccgttgccacctaccaaggcccctccaataccacctccacggagaaagagggcgattgtcctgacagagtccaccg

SEQ ID NO: 106282 - DNA, 80 bp, synthetic construct
  source 1..80: mol_type = other DNA
ccaccgcaaacaactgcaatttaggatttacacaacgattcttctgtgacaaaatcaacacaggttctttgctggcaaag

SEQ ID NO: 106283 - DNA, 80 bp, synthetic construct
  source 1..80: mol_type = other DNA
ctttaactcttacacctccttttgttcccggtccatacttgtgcattggcacaggaagagggcctagctgctttaatcgc

SEQ ID NO: 106284 - DNA, 80 bp, synthetic construct
  source 1..80: mol_type = other DNA
caggtttgtaactccgggggaacggccctcgggcatgttcgattcctcggtcctgtgcgagtgctatgacgcgggctgtg

SEQ ID NO: 106285 - DNA, 80 bp, synthetic construct
  source 1..80: mol_type = other DNA
ccatatgattgggcgcgtaaatggaattcgcgccactcgaaaccaaattttgctggagcaagctgccctgacctccaccc

SEQ ID NO: 106286 - DNA, 80 bp, synthetic construct
  source 1..80: mol_type = other DNA
aactagattgcaagaaaaaactacttagactcgtactgttgtatgtatccagcggcggcggcgcgcatcgaagctatgtc

SEQ ID NO: 106287 - DNA, 80 bp, synthetic construct
  source 1..80: mol_type = other DNA
tgaccaatagacagcagaagatcccggcgcaatatgcgctgtcggccgaggaagaaaggattctgagatatgtgcagcag

SEQ ID NO: 106288 - DNA, 80 bp, synthetic construct
  source 1..80: mol_type = other DNA
aaaaaccggaattgcagttatgattggcctgatcgccagcgtaggagcagttaccctctctaacttccaagggaaggtga

SEQ ID NO: 106289 - DNA, 80 bp, synthetic construct
  source 1..80: mol_type = other DNA
ccatgggatgtcattcccatggtcacacaaatagccatgactgacaccacaccctttggacaacagagggtgtttaaaga

SEQ ID NO: 106290 - DNA, 80 bp, synthetic construct
  source 1..80: mol_type = other DNA
ctaggggtagtagttcaagcggacagtgggtgtgtggtcagctggaagactaaagaactgaaatgtggcagtggaatttt

SEQ ID NO: 106291 - DNA, 80 bp, synthetic construct
  source 1..80: mol_type = other DNA
agctcagtcggtttgcgggccggtctactgctttactcctagccctgttgtcgtgggcaccaccgacaggcagggcgtac

SEQ ID NO: 106292 - DNA, 80 bp, synthetic construct
  source 1..80: mol_type = other DNA
agagagggctacaggacccaaatggaagggccatggcatagtgaagagcttgaaattcggtttgaggaatgcccaggcac

SEQ ID NO: 106293 - DNA, 80 bp, synthetic construct
  source 1..80: mol_type = other DNA
aaaccgacagtcgtggctgtcgctggcctgcagggccttcgcgctgtatacggctccccggtggaagtactccttgatcg

SEQ ID NO: 106294 - DNA, 80 bp, synthetic construct
  source 1..80: mol_type = other DNA
ttgccccgcgagaatggctagctgtagaccccttgccgatttcgaccagggctggggcccgatcagctacgccaacggaa

SEQ ID NO: 106295 - DNA, 80 bp, synthetic construct
  source 1..80: mol_type = other DNA
cagcaatgtgtcggtcgcgcatgacgcaactgggaagagggtctattacctgacccgcgaccccacaactcccctcgctc

SEQ ID NO: 106296 - DNA, 80 bp, synthetic construct
  source 1..80: mol_type = other DNA
ccctccataagaactactactagcagtggtagactggtcacagactggtgctgccggagctgcacccttccccctttgag

SEQ ID NO: 106297 - DNA, 80 bp, synthetic construct
  source 1..80: mol_type = other DNA
tcattttgtgtatatacaacggcaaaacctaaatctgtataagtgtttaattgcttatggcgatttttacgatatataca

SEQ ID NO: 106298 - DNA, 80 bp, synthetic construct
  source 1..80: mol_type = other DNA
gagaagaaaattattacatggggggcagacaccgcggcctgcggcgacatccttgcaggtctccctgtgtcggcacggag

SEQ ID NO: 106299 - DNA, 80 bp, synthetic construct
  source 1..80: mol_type = other DNA
ccgtccaaggacgttaaaagaagtcaggccactacaagtgccatagcttgagtaaactatgcagcctgtagctccacctg

SEQ ID NO: 106300 - DNA, 80 bp, synthetic construct
  source 1..80: mol_type = other DNA
gcggtttattacagagccagtcccttgagcggggatgcgtcatagacgagatactgcgcgaagtgggtctcccgcgcgtg

SEQ ID NO: 106301 - DNA, 80 bp, synthetic construct
  source 1..80: mol_type = other DNA
acgaggatattctcgagcaggcggccgagcgcctgggcgagtttgcttacggcaagcgcaaccgccttgcgcccctgaag

SEQ ID NO: 106302 - DNA, 80 bp, synthetic construct
  source 1..80: mol_type = other DNA
acaggaggccatcaaaactaaagccgcacacacctgaagcaaaactgattacagtttgtagtgggtctaacttaacatta

SEQ ID NO: 106303 - DNA, 80 bp, synthetic construct
  source 1..80: mol_type = other DNA
ccccacggcaacacgtcagtgagagtggcgacgggaaaatggtcgatcccgacgtagggcactctgtcaaactttgtgag

SEQ ID NO: 106304 - DNA, 80 bp, synthetic construct
  source 1..80: mol_type = other DNA
tgaaatcacttttatggtggggttgaattcctacgcgataggatctcaactcccctgtgagccagaaccagatgttgctg

SEQ ID NO: 106305 - DNA, 80 bp, synthetic construct
  source 1..80: mol_type = other DNA
cctagaagtcgtcaccagcacttgggtgctggtgggcggcgttctggccgctctggccgcgtactgcctggcgacgggca

SEQ ID NO: 106306 - DNA, 80 bp, synthetic construct
  source 1..80: mol_type = other DNA
tacagggtttgatgcagcaagcctccaagcaagcacaggacatacaacccgccgtacaagcgacgtggcccaagctagaa

SEQ ID NO: 106307 - DNA, 80 bp, synthetic construct
  source 1..80: mol_type = other DNA
agcagccgcaggcaacggtgaagaagaacatgaaacagaggagaaaactgctacttatacttttgccaatgctcctgtaa

SEQ ID NO: 106308 - DNA, 80 bp, synthetic construct
  source 1..80: mol_type = other DNA
gggcctgcttacctcttaagggccgctttgacacatgtgccgtacttcgtcagagctcacgctctgataagggtatgcgc

SEQ ID NO: 106309 - DNA, 80 bp, synthetic construct
  source 1..80: mol_type = other DNA
ctctgaaacatgctttaggttagcctgaaaaataaaaatatgttaaattaaagatgcctggcaaacgggtggaaaaacaa

SEQ ID NO: 106310 - DNA, 80 bp, synthetic construct
  source 1..80: mol_type = other DNA
ctcacacttaagggaacatcctacaagatgtgtaccgacaaaatgtcttttgtcaagaacccaactgacactggacatgg

SEQ ID NO: 106311 - DNA, 80 bp, synthetic construct
  source 1..80: mol_type = other DNA
gaagtaagtttgccacacaaccttttcggcttcaactataccatcaagaaaaacaccaccaccaccctccttacctgccg

SEQ ID NO: 106312 - DNA, 80 bp, synthetic construct
  source 1..80: mol_type = other DNA
ctgaccatcctttccctgactccgatgtacaagagactagtcatcctgaccctttggtggctccagtactttctgaccat

SEQ ID NO: 106313 - DNA, 80 bp, synthetic construct
  source 1..80: mol_type = other DNA
ttacttggcaggagctggactggctttttcactcataaagaatgcacaaacccccaggaggggaaccgggaccgcaggag

SEQ ID NO: 106314 - DNA, 80 bp, synthetic construct
  source 1..80: mol_type = other DNA
aataaatgattcaaacagcaaagcatctttattatttattttttcgcgcgcggtaggccctggtccacctctcccgatca

SEQ ID NO: 106315 - DNA, 80 bp, synthetic construct
  source 1..80: mol_type = other DNA
tatacacacgtttgtcactattattaaccatcttctagatgctcataatgatttttcaagtccatcattgaaatttactg

SEQ ID NO: 106316 - DNA, 80 bp, synthetic construct
  source 1..80: mol_type = other DNA
ggaacagcatacgttactcggagctggcgcctctatacgacaccacccgggtttacctggtggacaacaagtcggcggac

SEQ ID NO: 106317 - DNA, 80 bp, synthetic construct
  source 1..80: mol_type = other DNA
gccaacatatcaggcccatctgaggataagccctactgctggcattacgctcccagaccgtgctctatagtgcctgcggg

SEQ ID NO: 106318 - DNA, 80 bp, synthetic construct
  source 1..80: mol_type = other DNA
tcaaaattgctccccaaaatgcctggccttcccttcatctcttgccaaaagggatacaggtgtgtgtgggccggcacggg

SEQ ID NO: 106319 - DNA, 80 bp, synthetic construct
  source 1..80: mol_type = other DNA
gaagcaacagtgtgcccactgggtggccctcgcggacatacaaaaatcggtccgtgtggttaaagagcagcacagttagc

SEQ ID NO: 106320 - DNA, 80 bp, synthetic construct
  source 1..80: mol_type = other DNA
ctgggctaaggttctgattgtgatgttactctttgctggcgttgacgcgaacacccgcacgctggggggagtggcaagcc

SEQ ID NO: 106321 - DNA, 80 bp, synthetic construct
  source 1..80: mol_type = other DNA
ggctcatggttcggctgcacgtggatgaactccactggtttcaccaagacttgtggcgcgccaccttgccgcaccagagc

SEQ ID NO: 106322 - DNA, 80 bp, synthetic construct
  source 1..80: mol_type = other DNA
accaccgccttagctacaagctgcccgccaagcgccaaaaactgctgcttatggtgggagaaagacccatcaccgtcact

SEQ ID NO: 106323 - DNA, 80 bp, synthetic construct
  source 1..80: mol_type = other DNA
tgtggaccttatggttggtgccgcggcgttttgttcggccttgtacatcggggacctttgtggtggtgttttcctggtgg

SEQ ID NO: 106324 - DNA, 80 bp, synthetic construct
  source 1..80: mol_type = other DNA
tccctagcagaaggcatagtgttgtcatctgctgctcttgggcccctaatagagggaaacacaagcttgctatggaatgg

SEQ ID NO: 106325 - DNA, 80 bp, synthetic construct
  source 1..80: mol_type = other DNA
gaccgtccagcccgcgcagaccgtccagcccgcgcagcccgcgcagcccgtccagcccgcgcagcccgtccagcccgcgc

SEQ ID NO: 106326 - DNA, 80 bp, synthetic construct
  source 1..80: mol_type = other DNA
cgggctgcgtggtcatcattggccgcgtatgtgtgaatcaacggacggtagtggctcctgacaaggaggtcctgtatgag

SEQ ID NO: 106327 - DNA, 80 bp, synthetic construct
  source 1..80: mol_type = other DNA
gtacttgttgcaggccagtctgctgcgggtgccgtactttgtgagggcacacgcacttctccgggcgtgcatgctcttcc

SEQ ID NO: 106328 - DNA, 80 bp, synthetic construct
  source 1..80: mol_type = other DNA
gtgtctaagtgttggctgccagccacgctcaccatcgcggtgccgaacgcttccgtacctgtccatgggttccgcaagca

SEQ ID NO: 106329 - DNA, 80 bp, synthetic construct
  source 1..80: mol_type = other DNA
gtggttatttcccccccaataaaccgatgttatttgcctatatgcgtgtgttggatccctttgtgatcgttcgtcattcc

SEQ ID NO: 106330 - DNA, 80 bp, synthetic construct
  source 1..80: mol_type = other DNA
cggctctcgcccgacgtggggcccaaacgacccccggcgtaggtctcgcaacttgggtaaggtcatcgatacccttactt

SEQ ID NO: 106331 - DNA, 80 bp, synthetic construct
  source 1..80: mol_type = other DNA
gggccaaggttcttgctgtccttctcctctttgcgggtgttgatgcgactactggcatcggttatgcagtaagtcgtgcc

SEQ ID NO: 106332 - DNA, 80 bp, synthetic construct
  source 1..80: mol_type = other DNA
tttaccataacaacacagaccgtgccccaggacgccgtctcgcgtagccagcggcgaggacggaccggcagaggaaggtt

SEQ ID NO: 106333 - DNA, 80 bp, synthetic construct
  source 1..80: mol_type = other DNA
taccaggcctgctccctgcccgaggaggcccgcactgccatacactcgctgactgagagactttacgtaggagggcccat

SEQ ID NO: 106334 - DNA, 80 bp, synthetic construct
  source 1..80: mol_type = other DNA
gttcaacagctctgggtgccccgaaagactctcctcgtgcaaacgactggatgacttcacccagggatggggcaagctca

SEQ ID NO: 106335 - DNA, 80 bp, synthetic construct
  source 1..80: mol_type = other DNA
gcttggatcccactttcaccattgagacgacgaccgtgccccaggactcagtgtcgcgctcgcagcggcgaggcaggact

SEQ ID NO: 106336 - DNA, 80 bp, synthetic construct
  source 1..80: mol_type = other DNA
tcaggtcggcgtgcaggaggcggacggcccacgtctcgatgtcggacgacacggcatcgcgcaaggcggcgtccggcccg

SEQ ID NO: 106337 - DNA, 80 bp, synthetic construct
  source 1..80: mol_type = other DNA
aagaaggtgacctttgaccgagttcagcttgtggaccaacactatcatgacaccctaaaggagattaagctccgagcctc

SEQ ID NO: 106338 - DNA, 80 bp, synthetic construct
  source 1..80: mol_type = other DNA
ccgggtcagccgccagcccggaggtcacccccacatcgaccccaaaccccaacaatgtcacacaaaacaaaaccatcccc

SEQ ID NO: 106339 - DNA, 80 bp, synthetic construct
  source 1..80: mol_type = other DNA
tggctctcgtcccaactggggccccaatgacccccggcggaggtcacgtaacttgggtaaggtcatcgataccctaacct

SEQ ID NO: 106340 - DNA, 80 bp, synthetic construct
  source 1..80: mol_type = other DNA
acagatggagggagaaggaatttttaaaagcattcagcgcctgacagtcacagaagaaatcgctgtacagaactggttag

SEQ ID NO: 106341 - DNA, 80 bp, synthetic construct
  source 1..80: mol_type = other DNA
aaggacttttttgtttagtaaaacaagctacactcacttatgagttattatcaggcaaagaacaccagttaagctatgtg

SEQ ID NO: 106342 - DNA, 80 bp, synthetic construct
  source 1..80: mol_type = other DNA
cgcatctggtctagagtacaggaacacgtctggcctatacatacttaccaacgattgctccaacgggagcattgtgtatg

SEQ ID NO: 106343 - DNA, 80 bp, synthetic construct
  source 1..80: mol_type = other DNA
cacattgttgtgtgacataggggagtcgtcaccaaatcccacgatagaagcaggacgaacactcagagtcctcaacttag

SEQ ID NO: 106344 - DNA, 80 bp, synthetic construct
  source 1..80: mol_type = other DNA
actccctactggggtagtgtgaaagaagacaggatcacctatggtgggccatggaagtttgacaggaagtggaatggtct

SEQ ID NO: 106345 - DNA, 80 bp, synthetic construct
  source 1..80: mol_type = other DNA
gatcggagggtggtccccaccttcacttggggtgagaacgagacagacgtcttcctcctgaacagcactcggccgccccg

SEQ ID NO: 106346 - DNA, 80 bp, synthetic construct
  source 1..80: mol_type = other DNA
ctaacatgctacctgaaggcgcaagcagcgtgcagagcagccaagctcaaagactttgacatgttggtctgcggagacga

SEQ ID NO: 106347 - DNA, 80 bp, synthetic construct
  source 1..80: mol_type = other DNA
gggtcccaccatgcgagaggggcaagcgtaccccgccaactacccctatcccctgattggggccaccgccgtacccagcc

SEQ ID NO: 106348 - DNA, 80 bp, synthetic construct
  source 1..80: mol_type = other DNA
attggcacaaggcaggcagttcgctgggaaaggcttttaccactaccctgaaaggtgcccagaggttagctgcccttggc

SEQ ID NO: 106349 - DNA, 80 bp, synthetic construct
  source 1..80: mol_type = other DNA
ttgagatctctcggacttaatgccgtcgctttctacaggggtgtggacgtgtcagtgatccctacagcggtggatgtcgt

SEQ ID NO: 106350 - DNA, 80 bp, synthetic construct
  source 1..80: mol_type = other DNA
cgtggaagtggacaagtaggcacctatggattaaacacttttaccaacatggaagcacagctcattaggcaaatggaagg

SEQ ID NO: 106351 - DNA, 80 bp, synthetic construct
  source 1..80: mol_type = other DNA
ggtattctggttggtatagcgtacttcagtatgcaagctaactgggccaaggtcatcctggtcctgttcctctttgctgg

SEQ ID NO: 106352 - DNA, 80 bp, synthetic construct
  source 1..80: mol_type = other DNA
cccatatgccagatgtacaccaatgtggacctggaccttgtgggatggccctctccgcagggctcccgttccctgacccc

SEQ ID NO: 106353 - DNA, 80 bp, synthetic construct
  source 1..80: mol_type = other DNA
atcaacaggaccgcattgaactgcaatgactcattgcaaactggtttccttgctgccctgttctaccggcgacagtacaa

SEQ ID NO: 106354 - DNA, 80 bp, synthetic construct
  source 1..80: mol_type = other DNA
aggggtgacggccaaactcctctcagttgaggaagcatgtagcctcactcctccgcactcagctcgatcgaagtttgggt

SEQ ID NO: 106355 - DNA, 80 bp, synthetic construct
  source 1..80: mol_type = other DNA
cccgccgttaactgtcaccaataacaacacacttatcctacgctactcctcccctttaatcctaactgacaataatttaa

SEQ ID NO: 106356 - DNA, 80 bp, synthetic construct
  source 1..80: mol_type = other DNA
gagagagagcgaggaacatccagactctgcccggaatatttaagacaaaggatggggacattggagcggttgcgctggat

SEQ ID NO: 106357 - DNA, 80 bp, synthetic construct
  source 1..80: mol_type = other DNA
ggccagcagatcgccgaacagttcagacaaaaggtgttgggactccttcaggcgagcgctaagcaggcagaagaactaaa

SEQ ID NO: 106358 - DNA, 80 bp, synthetic construct
  source 1..80: mol_type = other DNA
tccctatgtagctccgccctttgtgtcttctgacgggttacaggaaaaacccccgggagttttagcactcaagtacactg

SEQ ID NO: 106359 - DNA, 80 bp, synthetic construct
  source 1..80: mol_type = other DNA
actgtaaatggatgcgctcctggttgtgcgctggccaatgtgcgcttcaaactcagacggctggtactgaactgggcgtc

SEQ ID NO: 106360 - DNA, 80 bp, synthetic construct
  source 1..80: mol_type = other DNA
ccaccttacacggtcctacccccctcctttacaggattggggccgtaagcaatgaagtgacactaacccacccggtcaca

SEQ ID NO: 106361 - DNA, 80 bp, synthetic construct
  source 1..80: mol_type = other DNA
cgtgatggatgaagcacatttcaccgatccagccagcatagcggccagggggtacatttcaactagagtggaactaggtg

SEQ ID NO: 106362 - DNA, 80 bp, synthetic construct
  source 1..80: mol_type = other DNA
tctcgggtatggtggaacggggtatttgatttaaccatggagctatttaaagtggtgaggtatgatgagtcaaaggttcg

SEQ ID NO: 106363 - DNA, 80 bp, synthetic construct
  source 1..80: mol_type = other DNA
acttatggtctgaacacattcaccaacatggaagcccagttagtcagacagatggaaggagaaggcgtgttgtcgaagac

SEQ ID NO: 106364 - DNA, 80 bp, synthetic construct
  source 1..80: mol_type = other DNA
ggagccgggggaccccgatctcagcgacgggtcttggtctaccgtgagcgtggaggacagtgaggacgtcgtctgctgct

SEQ ID NO: 106365 - DNA, 80 bp, synthetic construct
  source 1..80: mol_type = other DNA
ggttccaactaccgctcatgaggtgcgcaacgcatccggggtatatcatctcaccaatgactgttccaactcgagcatca

SEQ ID NO: 106366 - DNA, 80 bp, synthetic construct
  source 1..80: mol_type = other DNA
tcggggaagacggtggttagctcgtctggcacgattctgacctgccagccccggttatgcagggtgatgaggtcaacgct

SEQ ID NO: 106367 - DNA, 80 bp, synthetic construct
  source 1..80: mol_type = other DNA
acactaacaggacctccatatgatcatgtcgattggtatggtccgactcaccaactttgtaatggtgatgagactttaca

SEQ ID NO: 106368 - DNA, 80 bp, synthetic construct
  source 1..80: mol_type = other DNA
gttcgctcaatcaacaagcgtatacaccaccacccctcccaacgattatcatgtcaggcggcacgaagcccgcgataacc

SEQ ID NO: 106369 - DNA, 80 bp, synthetic construct
  source 1..80: mol_type = other DNA
gcaacagggaatcttcctggttgctccttttctatcttcctcctggcacttctctcgtgcctaactgtccccgcctcggc

SEQ ID NO: 106370 - DNA, 80 bp, synthetic construct
  source 1..80: mol_type = other DNA
tggggccggacggaccgcccgtccgcgtacgggacctgggtgcgcgttcgcgtgttccgccctccgtcgctgaccatcca

SEQ ID NO: 106371 - DNA, 80 bp, synthetic construct
  source 1..80: mol_type = other DNA
accatgctcctcatgctgctgcccacagccctggcgttccatctgaccacccgagggggagagccgcacatgatagttag

SEQ ID NO: 106372 - DNA, 80 bp, synthetic construct
  source 1..80: mol_type = other DNA
cacaaaatacatcgtccgatgggagtgggtaatactcttattcctgctcttagcggacgccagggtttgcgcctgcttat

SEQ ID NO: 106373 - DNA, 80 bp, synthetic construct
  source 1..80: mol_type = other DNA
agagagatcgtggatctcatgtgtcatgcaaccttcacaacaagacttttatcatcaaccagggttccaaattacaacct

SEQ ID NO: 106374 - DNA, 80 bp, synthetic construct
  source 1..80: mol_type = other DNA
agaccgccatctggagggtggcggccacggagtatgcggaggtgacgcgacacgggtcctacgcgtatgtgacaggactg

SEQ ID NO: 106375 - DNA, 80 bp, synthetic construct
  source 1..80: mol_type = other DNA
agtcggtaggatcgtcctaaacggaaagccggcagtcatacctgaccgagaagtcctctaccaggcatttgacgagatgg

SEQ ID NO: 106376 - DNA, 80 bp, synthetic construct
  source 1..80: mol_type = other DNA
cggtgccgaatgcctccgtccctgtccaaggattccgcaggcatgtggaccttatggttggtgcggcggccttctgctct

SEQ ID NO: 106377 - DNA, 80 bp, synthetic construct
  source 1..80: mol_type = other DNA
cccaccacctaggaggaagaggaagacagtatgccttgatgagtccacagtatcccaagctctcgcgcaacttgccgaga

SEQ ID NO: 106378 - DNA, 80 bp, synthetic construct
  source 1..80: mol_type = other DNA
accttggcaggtcccaaagggcctgtatgtcaaatgtacaccaatgtagaccaggatctggccggctggccgtcacctcc

SEQ ID NO: 106379 - DNA, 80 bp, synthetic construct
  source 1..80: mol_type = other DNA
tgcaagcaacatggcccaagctagagcaattctgggccaagcacatgtggaacttcatcagtggcatccagtaccttgcg

SEQ ID NO: 106380 - DNA, 80 bp, synthetic construct
  source 1..80: mol_type = other DNA
agaatatacaactcatcaacaccaatggtagctggcacataaacaggactgctttgaactgcaatgattccctcaatacg

SEQ ID NO: 106381 - DNA, 80 bp, synthetic construct
  source 1..80: mol_type = other DNA
ggtacgaactcagtttgtagcgaaaccatctgtcgcgttgcatcataaattaaaagctcgcgcacagcttcgtacttctg

SEQ ID NO: 106382 - DNA, 80 bp, synthetic construct
  source 1..80: mol_type = other DNA
cgtggtgcatgggtgtcctctgcctccggcctctacgacccctgtcccgcctccgcgcaggaaacggacaatacaactag

SEQ ID NO: 106383 - DNA, 80 bp, synthetic construct
  source 1..80: mol_type = other DNA
cctgatgcacgcccccgcgtttgagaccgccggcacgtacctgcggctcgtgaagataaacgactggacggagattacac

SEQ ID NO: 106384 - DNA, 80 bp, synthetic construct
  source 1..80: mol_type = other DNA
actcgcaccaccacagagagcggaaagttgataacagattggtgctgcaggagctgcaccttaccaccactgcgctacca

SEQ ID NO: 106385 - DNA, 80 bp, synthetic construct
  source 1..80: mol_type = other DNA
tcacttactctatcactccacttgatctccctttaatcatccaacgccttcatggcatggctgctttttcactccatgga

SEQ ID NO: 106386 - DNA, 80 bp, synthetic construct
  source 1..80: mol_type = other DNA
aatagagaccacaaccgtccctcaggacgcggtttcccgctcccagcggaggggccgcactggcaggtggaggttaggaa

SEQ ID NO: 106387 - DNA, 80 bp, synthetic construct
  source 1..80: mol_type = other DNA
gtcttcgggtggaccggtgctttgccctaggggccacgctgtcgggattttccgggcagctgtgtgctctcggtgcgtgg

SEQ ID NO: 106388 - DNA, 80 bp, synthetic construct
  source 1..80: mol_type = other DNA
tcaaagcacaaccccatggggttctcatatgacacgaggtgctttgactcgacagtcaccgagcgcgacattcgcaccga

SEQ ID NO: 106389 - DNA, 80 bp, synthetic construct
  source 1..80: mol_type = other DNA
ggggagggctggggccggggaggggcggtggtgtgtagcgcgagcgatgtgttgagacggggtacgtctggaggagcggg

SEQ ID NO: 106390 - DNA, 80 bp, synthetic construct
  source 1..80: mol_type = other DNA
ggcgacaggagatgggctccaacatcaccagggtcgagtctgaagacaaggtggtgatactggactcttttgagcccctt

SEQ ID NO: 106391 - DNA, 80 bp, synthetic construct
  source 1..80: mol_type = other DNA
cgcaacgagttgtcattgccctgttagtcttggctgttggcccagcctattcggctcactgtataggaataaccgacagg

SEQ ID NO: 106392 - DNA, 80 bp, synthetic construct
  source 1..80: mol_type = other DNA
cccgttcgcgaggacgcagcgtgaagacgccgccggtcatctcccggtaatggagcgggtccccgttgggcagcgatagg

SEQ ID NO: 106393 - DNA, 80 bp, synthetic construct
  source 1..80: mol_type = other DNA
cggaatgccccgcgtgttgtccttgattggactgaagagggcaatgttgagcctgatcgacggcaaggggccaatacgat

SEQ ID NO: 106394 - DNA, 80 bp, synthetic construct
  source 1..80: mol_type = other DNA
gccccgctcttgaacggggcgcgcaccagcagcttcgggagcagggtaggccgcagcagcacgtgcaggctggtgtcgca

SEQ ID NO: 106395 - DNA, 80 bp, synthetic construct
  source 1..80: mol_type = other DNA
gttccgcggcatttccgcggaccacttcgaggcggaggtggtggagcgcaccgacgtgtactactacgagacgcgccccg

SEQ ID NO: 106396 - DNA, 80 bp, synthetic construct
  source 1..80: mol_type = other DNA
cccctcaaaagggggccgcaagcccgctcgccttatagtctaccctgatctgggagtacgggtctgtgagaaacgtgctc

SEQ ID NO: 106397 - DNA, 80 bp, synthetic construct
  source 1..80: mol_type = other DNA
gtggccgcggcccgttggtcgaacccccggccccgcccatccgcgccatctgccatgggcgtggcgtgagggcgtgtgcg

SEQ ID NO: 106398 - DNA, 80 bp, synthetic construct
  source 1..80: mol_type = other DNA
gtggaatcaggtcaacaaccagaatggagaatctattgtggaagcaaatagccaatgagctgaactacatattatgggaa

SEQ ID NO: 106399 - DNA, 80 bp, synthetic construct
  source 1..80: mol_type = other DNA
tgggagtgggctatttcagcatgcaatccagctgggccaaagtcatcttggtcctattcctctttgcaggggtagatgct

SEQ ID NO: 106400 - DNA, 80 bp, synthetic construct
  source 1..80: mol_type = other DNA
gatatggcgcgggcgtggcgggagccctcgtggcctttaaggtcatgagtggcgaaactcccaccaccgaggacttggtt

SEQ ID NO: 106401 - DNA, 80 bp, synthetic construct
  source 1..80: mol_type = other DNA
gatcctccatctgccggggtgcgtgccctgcgtccgggaggacaacacctctcggtgctgggtatcgctcacccccactt

SEQ ID NO: 106402 - DNA, 80 bp, synthetic construct
  source 1..80: mol_type = other DNA
cacggggtgccgatgaaccccggcggccggcaacgcggggtccctgcgagaggcacagatgcttacggtcaggtgctccg

SEQ ID NO: 106403 - DNA, 80 bp, synthetic construct
  source 1..80: mol_type = other DNA
ccgaggacaggtgcgcagcaggcgtagcattaacgcatccacgcggcccagttgctgcatcgttggcgaatagagctggc

SEQ ID NO: 106404 - DNA, 80 bp, synthetic construct
  source 1..80: mol_type = other DNA
gcttgtctgtgggcagcgttgtcatcaccggaagagtcattctatctgggcagcctgcagttatccccgatcgggaggtg

SEQ ID NO: 106405 - DNA, 80 bp, synthetic construct
  source 1..80: mol_type = other DNA
cccgcggaggcggcgggccatagtcctggaccaaagctccgtggaggaagctcttaaggagttggccataaaaagctttg

SEQ ID NO: 106406 - DNA, 80 bp, synthetic construct
  source 1..80: mol_type = other DNA
ttagccctatggaaaccaaagtcatcacttggggcgccgacacagcagcctgcggagacatcttgtgtgggctgcctgta

SEQ ID NO: 106407 - DNA, 80 bp, synthetic construct
  source 1..80: mol_type = other DNA
gccgaagctcgaacaattctggcagaaacatctgtggaacttcatcagcggcatacagtacctcgctggcctatccacat

SEQ ID NO: 106408 - DNA, 80 bp, synthetic construct
  source 1..80: mol_type = other DNA
gggcgtactggcaggtggaagccaggggtgtacaggtatgtctcgcaaggggaacggccatctggcatgttcgatactgt

SEQ ID NO: 106409 - DNA, 80 bp, synthetic construct
  source 1..80: mol_type = other DNA
aaccaacactacatggacccacgccccttctgtatcggttggggcctatccaaaatgaaacctgcttgacacaccccgtc

SEQ ID NO: 106410 - DNA, 80 bp, synthetic construct
  source 1..80: mol_type = other DNA
acgaggccggcaaccttacatcacaaaatataaccaccgtcactgagccattaaaaaaaacaaagtccaacataagcctg

SEQ ID NO: 106411 - DNA, 80 bp, synthetic construct
  source 1..80: mol_type = other DNA
tgagacccagcatggaactgtcctagtgcaagtcaaatatgaaggaacagacgcgccatgcaagatccccttctcgatcc

SEQ ID NO: 106412 - DNA, 80 bp, synthetic construct
  source 1..80: mol_type = other DNA
caaccggactgatccacctccaccagaacattgtagacgttcagtatctctatggagtctcttcggccgtagtgtcgtgg

SEQ ID NO: 106413 - DNA, 80 bp, synthetic construct
  source 1..80: mol_type = other DNA
ccctcttaatccccctcctcccatcactaattctcccccccccccctctcacccctacccttctatttttttctcttttc

SEQ ID NO: 106414 - DNA, 80 bp, synthetic construct
  source 1..80: mol_type = other DNA
taactctgatcattgtcattctgtgctacatctgctgccgcaagcgtcccagggcttacaatcatatggtagacccacta

SEQ ID NO: 106415 - DNA, 80 bp, synthetic construct
  source 1..80: mol_type = other DNA
tcaccgtgacccagctcctaaggcggctgcaccagtggataagctcggattgcaccactccgtgctctggttcctggcta

SEQ ID NO: 106416 - DNA, 80 bp, synthetic construct
  source 1..80: mol_type = other DNA
cgagatcatgttacccgcgtcgagggctggatgtggaaaaacaagctcttgacagttgctgtcgtggctttggcttggct

SEQ ID NO: 106417 - DNA, 80 bp, synthetic construct
  source 1..80: mol_type = other DNA
acagagaagccagacccccggaaagttggggaaaggatacggagattgagggaagaataccaacaaacgtggacgtatga

SEQ ID NO: 106418 - DNA, 80 bp, synthetic construct
  source 1..80: mol_type = other DNA
gagtttctggactacatgccttcaatgaagagattcaggaaggaggaggagtcggagggagccatttggtaaacgtagga

SEQ ID NO: 106419 - DNA, 80 bp, synthetic construct
  source 1..80: mol_type = other DNA
gcgtatcgtatttgcattatggttagcgcgtgcacgcgcggcactggccgcggctcccacggtgtaaatgcttctggcat

SEQ ID NO: 106420 - DNA, 80 bp, synthetic construct
  source 1..80: mol_type = other DNA
aggtctctctacagagctgtataggtgtgacggtccgggacacccaagcccgccgcccctgtgtacagtggctgcggcga

SEQ ID NO: 106421 - DNA, 80 bp, synthetic construct
  source 1..80: mol_type = other DNA
atatttctgggatcactaacgtcatagttgtgttccaggatgagatcgtcataggccatttttacaaagcgcgggcggag

SEQ ID NO: 106422 - DNA, 80 bp, synthetic construct
  source 1..80: mol_type = other DNA
ctgaccgggaagtcctgtatgaggcatttgatgagatggaggagtgtgcctccagggctgcccttatagaagaggggcaa

SEQ ID NO: 106423 - DNA, 80 bp, synthetic construct
  source 1..80: mol_type = other DNA
gcgttagtggtgtgggtgatctgtgcggcaatccttcgccgtcacgtgggacagggggaaggcgcggtccaatggatgaa

SEQ ID NO: 106424 - DNA, 80 bp, synthetic construct
  source 1..80: mol_type = other DNA
cctctctcaaacaaaacaatcgggggagaacttcgcgtacttggtggcctatcaggccacagtgtgtgcgcgggctcagg

SEQ ID NO: 106425 - DNA, 80 bp, synthetic construct
  source 1..80: mol_type = other DNA
gagagtgcagtctgcgatagtgccccaggtggactgggtcaacaaaggcaaaacatcgccccacgcggccataaccctgg

SEQ ID NO: 106426 - DNA, 80 bp, synthetic construct
  source 1..80: mol_type = other DNA
ggacttgattgtgaaccgaggacaggccttgacttttcagatttgtattacttgactatgaataacaagcactggttggt

SEQ ID NO: 106427 - DNA, 80 bp, synthetic construct
  source 1..80: mol_type = other DNA
cggtgtattgcttcaccccaagccctgtggtcgtgggcacaacggaccgcggggggacaccaactttcacttggtgtgcc

SEQ ID NO: 106428 - DNA, 80 bp, synthetic construct
  source 1..80: mol_type = other DNA
gacttattggatgactctgataccccattgccgacaaccatcatggcaaaaaacgaagtgttcgcagtggagccgtctaa

SEQ ID NO: 106429 - DNA, 80 bp, synthetic construct
  source 1..80: mol_type = other DNA
cctttttaatatcttaggaggttgggtggcttcgcagatcgcaactccgacagcctccacggcattcgttgtgagcggtt

SEQ ID NO: 106430 - DNA, 80 bp, synthetic construct
  source 1..80: mol_type = other DNA
ccgcgctatgcgccatatctaccgaggcctacgaggcttttatacacagcccctccgagagaccgtgcgcgagtttgtgg

SEQ ID NO: 106431 - DNA, 80 bp, synthetic construct
  source 1..80: mol_type = other DNA
acttgcggcttcgccgacctcatgggatacatcccgattgtaggcgcccccgtgggtggcgtcgccagagctctggctca

SEQ ID NO: 106432 - DNA, 80 bp, synthetic construct
  source 1..80: mol_type = other DNA
ccaacactatatccggaacctcggatctgatctttgccgatccatcgcagcttcatgacgaactttcacttctttttggt

SEQ ID NO: 106433 - DNA, 80 bp, synthetic construct
  source 1..80: mol_type = other DNA
acgtggtctcaggaaagagtgtggacatgtacattgaaagagcaggtgacatcacatgggaaaaagatgcggaagtcact

SEQ ID NO: 106434 - DNA, 80 bp, synthetic construct
  source 1..80: mol_type = other DNA
gattatgaacaacaaaaaatatatctatataatctaacaataattgaaccgccaactactaaagcacccaccacagttag

SEQ ID NO: 106435 - DNA, 80 bp, synthetic construct
  source 1..80: mol_type = other DNA
tcggactacgtctgggcttaccggtctcttcaggtccgggcccaggcaaaacattcaactcatcaacaccaacggcagct

SEQ ID NO: 106436 - DNA, 80 bp, synthetic construct
  source 1..80: mol_type = other DNA
cgcggcaggacggggactagcaggctcactcactcggctacctcgcggaccaccaggctccccgcgcccgccccccccaa

SEQ ID NO: 106437 - DNA, 80 bp, synthetic construct
  source 1..80: mol_type = other DNA
aattccaccggatgcccgcaacgattgtcctcttgtaagccactcacacatttccatcaagggtggggctccatctctta

SEQ ID NO: 106438 - DNA, 80 bp, synthetic construct
  source 1..80: mol_type = other DNA
gctcagggttcgggccccatcagttacgccgatgagcgtccctccgaccagcgcccatactgttggcactaccctccccg

SEQ ID NO: 106439 - DNA, 80 bp, synthetic construct
  source 1..80: mol_type = other DNA
ctatggaagggctattcccctggagttcatcaagggcggcagacatctaatgttttgccattcaaagaagaaatgcgacg

SEQ ID NO: 106440 - DNA, 80 bp, synthetic construct
  source 1..80: mol_type = other DNA
ttgggtatgtttgatgaaattttagaaacgtttttaacagacgtagataatagtaaagtcaactgcatatctcgtagtga

SEQ ID NO: 106441 - DNA, 80 bp, synthetic construct
  source 1..80: mol_type = other DNA
cctgggccccgggacaccccccatgcgggctcggctccccgccgcggcctgggttggcgtcgggaccatcatcggaggag

SEQ ID NO: 106442 - DNA, 80 bp, synthetic construct
  source 1..80: mol_type = other DNA
atgtgaaggacacagcttgcctggccaaagcatatgcacagatgtggctactcctatacttccatcgcagggacttgcgt

SEQ ID NO: 106443 - DNA, 80 bp, synthetic construct
  source 1..80: mol_type = other DNA
acctgggcacagcctgggtatccctggcccctctacgggaatgagggctgcggctggatgggatggctcctgtccccccg

SEQ ID NO: 106444 - DNA, 80 bp, synthetic construct
  source 1..80: mol_type = other DNA
ggaagacggtttggtttgtgcctagtgtcaagatggggaatgagattgccctttgcctacaacgtgctggaaagaaagta

SEQ ID NO: 106445 - DNA, 80 bp, synthetic construct
  source 1..80: mol_type = other DNA
agacttgcttgaacctctggcaaggaaccttccccattaattgttacacagaagggccttgcgtgccaaagcccccccct

SEQ ID NO: 106446 - DNA, 80 bp, synthetic construct
  source 1..80: mol_type = other DNA
ggcaactcgtagcaaataggcgactgatgtacgaagagaagacacacaggcgccacccggcgctggtcggggggatgttg

SEQ ID NO: 106447 - DNA, 80 bp, synthetic construct
  source 1..80: mol_type = other DNA
cggcatggccgtgctccgctgcacccgcgcctatctgtatcacaggcggcaccacaccaaattttttatgcgcatgcgcg

SEQ ID NO: 106448 - DNA, 80 bp, synthetic construct
  source 1..80: mol_type = other DNA
ggggagacacctcatcttttgtcactcaaagaaaaagtgcgacgagctcgctggaaagctggttgcattgggcatcaatg

SEQ ID NO: 106449 - DNA, 80 bp, synthetic construct
  source 1..80: mol_type = other DNA
gcggctttgccgacctcatggggtaccttcctgtcgtaggcgccccccttggtggcgtcgcggctgctctagcacatggt

SEQ ID NO: 106450 - DNA, 80 bp, synthetic construct
  source 1..80: mol_type = other DNA
atccctccacccatttcttttaagtcccacccactaaaacgtgggtataaaatgtgtattggggtaggcggacagtccca

SEQ ID NO: 106451 - DNA, 80 bp, synthetic construct
  source 1..80: mol_type = other DNA
ttcccttttcgaggacagcaaactgttgtgctatagccaacgatatggcaactgcagaatcctggctgctgtttccctct

SEQ ID NO: 106452 - DNA, 80 bp, synthetic construct
  source 1..80: mol_type = other DNA
cgaacaatagcatcgtttttgaggcggagaccattatactgcatcttccaggctgtgttccatgtatcaaggtggggaat

SEQ ID NO: 106453 - DNA, 80 bp, synthetic construct
  source 1..80: mol_type = other DNA
atctcgtcctggtcttgggagcggccttctttcagatggcagcttcagacctggagttgacaattccaggtttgttgaac

SEQ ID NO: 106454 - DNA, 80 bp, synthetic construct
  source 1..80: mol_type = other DNA
gcgacgagaaagacttcagagcggtcgcaaccccgcggcaggcgtcagcctattcccaaggcgcgtcagtcgcagggccg

SEQ ID NO: 106455 - DNA, 80 bp, synthetic construct
  source 1..80: mol_type = other DNA
aaaactgcctatcaacgcactgagcaactcgttactgcgtcaccacaatctcgtgtactccaccacctcacgcagtgctt

SEQ ID NO: 106456 - DNA, 80 bp, synthetic construct
  source 1..80: mol_type = other DNA
gtattagtactcaacccctcagtggcggcgacgctcgggttcggttcctacatgagcaaagcttatggaatagaccccaa

SEQ ID NO: 106457 - DNA, 80 bp, synthetic construct
  source 1..80: mol_type = other DNA
gggtgcggttgcacaggtacgctccggcgtgcaaacctctcctccgggatgaggtcacattccaggtcgggctccaccaa

SEQ ID NO: 106458 - DNA, 80 bp, synthetic construct
  source 1..80: mol_type = other DNA
ggcgtgacggtcgacagcatcgggatgctaccccgctttatccccgaaaaccagcgcaccgtcgccctatacagcttaaa

SEQ ID NO: 106459 - DNA, 80 bp, synthetic construct
  source 1..80: mol_type = other DNA
gtcgtggtccacagtctctgatcaagaggattctgtcatctgctgctccatgtcatactcctggacgggggccctcataa

SEQ ID NO: 106460 - DNA, 80 bp, synthetic construct
  source 1..80: mol_type = other DNA
acagcggggaggacatttatcacagcgtgtcctatgcccgaccccgcatattactcctttgcctactcctactaaccgta

SEQ ID NO: 106461 - DNA, 80 bp, synthetic construct
  source 1..80: mol_type = other DNA
gcccatcattgagaacaacaacagtgtcagggaagctgatacacgagtggtgttgccgctcgtgcacacttcctcccttg

SEQ ID NO: 106462 - DNA, 80 bp, synthetic construct
  source 1..80: mol_type = other DNA
agttaactcctggctgggcaacatcatcatgttcgcccctacgctatgggcgagaatgatcctcatgactcacttcttct

SEQ ID NO: 106463 - DNA, 80 bp, synthetic construct
  source 1..80: mol_type = other DNA
aaatttaactcctcggggtgcccagctcggctttcttattgtaagccccttgcgagtttccgccaaggatggggcccgtt

SEQ ID NO: 106464 - DNA, 80 bp, synthetic construct
  source 1..80: mol_type = other DNA
cgtggtcgtagggactacagaccgcaggggatctccgacatacaggtgggtggagaatgagaccgatgtcttcctactgg

SEQ ID NO: 106465 - DNA, 80 bp, synthetic construct
  source 1..80: mol_type = other DNA
tctaagaagaccccaatggggttctcctatgacaccagatgctttgactcaacggtcacggagcgcgacatacgtactga

SEQ ID NO: 106466 - DNA, 80 bp, synthetic construct
  source 1..80: mol_type = other DNA
gggacctctaggggtcagtaacatcagcggcccctccgaccaaaggccgtattgctgggactacgctccccgcgcgtgcg

SEQ ID NO: 106467 - DNA, 80 bp, synthetic construct
  source 1..80: mol_type = other DNA
taggggtgtatgggctggcacgggagtcatgactactcggtgtccgtgcggagcaaacatctcgggccatgtccgcatgg

SEQ ID NO: 106468 - DNA, 80 bp, synthetic construct
  source 1..80: mol_type = other DNA
tctcagcgccatcacttaaggccacgtgcacaacgcacggtcctcatcctgacgcggagctgatcgaggcgaatttgctg

SEQ ID NO: 106469 - DNA, 80 bp, synthetic construct
  source 1..80: mol_type = other DNA
tagcgcattttcactccatagttactctccaggtgagatcaatagggtggcttcgtgcctcaggaagcttggggtaccac

SEQ ID NO: 106470 - DNA, 80 bp, synthetic construct
  source 1..80: mol_type = other DNA
tgtcttacaacaggaaaaacaacccttataagcataagacggactacggccatgccggcgtgaccgtaaaaaaactggtc

SEQ ID NO: 106471 - DNA, 80 bp, synthetic construct
  source 1..80: mol_type = other DNA
ccgtgtaccacggagcgggcagcaagtccatcagcggcccgagaggacctgtctgtcagatgtataccaacgtcgaccaa

SEQ ID NO: 106472 - DNA, 80 bp, synthetic construct
  source 1..80: mol_type = other DNA
ccatggttattcgccaggggaactcaatcgcgtggcagcaggcctcagaaagcttggggctccaccgttgagagcctggc

SEQ ID NO: 106473 - DNA, 80 bp, synthetic construct
  source 1..80: mol_type = other DNA
tggcgctggttctcggtggtgtaggggttaaacgcgaaggccgtatccagggcgagggtgaccgcctcggcgttggccgc

SEQ ID NO: 106474 - DNA, 80 bp, synthetic construct
  source 1..80: mol_type = other DNA
ggtgctatgacagcaggtatcttcctgtttttcatgcaagggaaaggaatagggaaattgtcaatgggtttgataaccat

SEQ ID NO: 106475 - DNA, 80 bp, synthetic construct
  source 1..80: mol_type = other DNA
ccctgcacttcccatatgggctcggccagattacaaccccccactgcttgagacatggaaagcaccggattatgatcccc

SEQ ID NO: 106476 - DNA, 80 bp, synthetic construct
  source 1..80: mol_type = other DNA
aagtttaatgcagaaactgaatgtgcttattcgattacctttgaattcacatgggcaaaaacctttgaggatgtgcagtt

SEQ ID NO: 106477 - DNA, 80 bp, synthetic construct
  source 1..80: mol_type = other DNA
caaggtgcagctcatccgcatgatggagggagagggcgtgatcgggccatcagactcacaggatcctcgacttttacgtg

SEQ ID NO: 106478 - DNA, 80 bp, synthetic construct
  source 1..80: mol_type = other DNA
cttctttgcccatcaggccatgtggttgggttgtttcgtgcggcagtttgcacgcgcggggtcgccaaagcccttgactt

SEQ ID NO: 106479 - DNA, 80 bp, synthetic construct
  source 1..80: mol_type = other DNA
tgtacgtgggagtggtcgagcacaggctggaagttgcttgcaactggacgcggggcgagcgttgcgatctggacgacagg

SEQ ID NO: 106480 - DNA, 80 bp, synthetic construct
  source 1..80: mol_type = other DNA
agtgggatacctccatgcccccactggcagcgggaagagcaccaaagtccctgcagcgtacgccgcccagggatacaagg

SEQ ID NO: 106481 - DNA, 80 bp, synthetic construct
  source 1..80: mol_type = other DNA
agggcacacaaagaggcactggcagaactgccagattccctggaaacgcttctcctgattggaatgctatgcgtcatgtc

SEQ ID NO: 106482 - DNA, 80 bp, synthetic construct
  source 1..80: mol_type = other DNA
ggtggagtgatcaaagaggtgcccgttgacgagctcgaagaagcgatgggtgatgctggggagcagggccgggtccacct

SEQ ID NO: 106483 - DNA, 80 bp, synthetic construct
  source 1..80: mol_type = other DNA
tggtcagatgttctctttccagccgcgacgccactggaccacgcaggactgcaattgttccatctacgcggggcacatca

SEQ ID NO: 106484 - DNA, 80 bp, synthetic construct
  source 1..80: mol_type = other DNA
caggtccaaagagcggccagcgcggtgcttgggagacacatgcgcccgaggacgctcaccgccgccagcgcctgggcgtg

SEQ ID NO: 106485 - DNA, 80 bp, synthetic construct
  source 1..80: mol_type = other DNA
tctgcgtggattcctgtggtagggtgtctgccagagggtgtacgtttgttgcatgttggaaaggggtggtgtggcgaaac

SEQ ID NO: 106486 - DNA, 80 bp, synthetic construct
  source 1..80: mol_type = other DNA
cccatggaacccgagagccggcctggaccctcgggaatgaatgttgtacaggtggctgaactgtttccagaactgagacg

SEQ ID NO: 106487 - DNA, 80 bp, synthetic construct
  source 1..80: mol_type = other DNA
gggcctcgcgactcagtgattgttcttgcagtcctggtctgtccagacctagtatttgacatcacaaaatatcttctggc

SEQ ID NO: 106488 - DNA, 80 bp, synthetic construct
  source 1..80: mol_type = other DNA
atctccaccaaaatatcgtggacgtgcagtacttgtacggcctatcaccagccattgtgaagtacgtcgtcaagtgggaa

SEQ ID NO: 106489 - DNA, 80 bp, synthetic construct
  source 1..80: mol_type = other DNA
gcgctcttggcaggatttatggcttacatgattgggcaaacaggaatccagcgaactgttttctttgtcctaatgatgct

SEQ ID NO: 106490 - DNA, 80 bp, synthetic construct
  source 1..80: mol_type = other DNA
cacagtccgtttgtggccccgtctactgcttcaccccgagccctgtggtggtgggaactaccgaccgcaagggcctaccc

SEQ ID NO: 106491 - DNA, 80 bp, synthetic construct
  source 1..80: mol_type = other DNA
gagccttgggaggactgggaactagctttgaatatgtttgccaaagtggctcttcgcccagacactatttataccattaa

SEQ ID NO: 106492 - DNA, 80 bp, synthetic construct
  source 1..80: mol_type = other DNA
gaggtaaagacccgggcgtctacagtgagtgcaaagctcctcagcgtagaggaagcctgcagtctcacaccaccccattc

SEQ ID NO: 106493 - DNA, 80 bp, synthetic construct
  source 1..80: mol_type = other DNA
tgtacttggttacccgcgatgctgatgtcatccctgctcggcgcaggggggactctacagcgagcttgctcagtcctagg

SEQ ID NO: 106494 - DNA, 80 bp, synthetic construct
  source 1..80: mol_type = other DNA
agctgaaaccaatcatgcatcatgggtcttttcccaattccctgtggccattgacatgctgtacaccagcccaactgaaa

SEQ ID NO: 106495 - DNA, 80 bp, synthetic construct
  source 1..80: mol_type = other DNA
gatcaggttcccgtgtcacctgcagttcatttaaaagattaacattaggctcaaaaccccgatcccgaatctccatgcgt

SEQ ID NO: 106496 - DNA, 80 bp, synthetic construct
  source 1..80: mol_type = other DNA
ggacctagttcagactcgggactatcaatagccagtcccgttccacctgccccaacaacaccagacgacgcctgctcaga

SEQ ID NO: 106497 - DNA, 80 bp, synthetic construct
  source 1..80: mol_type = other DNA
caagactgaacatgacatttaccaatctagcaaagccatcaaccatatcaccttgatgactgaacatgacatttaccaat

SEQ ID NO: 106498 - DNA, 80 bp, synthetic construct
  source 1..80: mol_type = other DNA
tcccagaccaaacaagagggtcagaactacgcctacctcacggcgtatcaggctactgtatgcgcccgggcgaaagctcc

SEQ ID NO: 106499 - DNA, 80 bp, synthetic construct
  source 1..80: mol_type = other DNA
agccttcacggaggctatgaccaggtactctgctccccccggtgacgcgccacagcctacctacgacttggagctaatta

SEQ ID NO: 106500 - DNA, 80 bp, synthetic construct
  source 1..80: mol_type = other DNA
ggaagttcttggctgacgggggctgcggagcaggggcatatgacatcattatctgtgatgaatgccattccactgatgct

SEQ ID NO: 106501 - DNA, 80 bp, synthetic construct
  source 1..80: mol_type = other DNA
ccagtgggttaccgaggattgccctatcccatgtagtggctcgtggcttcgggatgtatgggagtgggtctgtaccatcc

SEQ ID NO: 106502 - DNA, 80 bp, synthetic construct
  source 1..80: mol_type = other DNA
attttttacaccttaactgtggtttgctcccagacctccaagcctccccaaagacatgtatcttgcagatttactcgtat

SEQ ID NO: 106503 - DNA, 80 bp, synthetic construct
  source 1..80: mol_type = other DNA
gtgtccggtggctcggaaactgcctccaccgggcccacgatcaccgcgggagcggtgacgaacgcgagcgaggcccccac

SEQ ID NO: 106504 - DNA, 80 bp, synthetic construct
  source 1..80: mol_type = other DNA
caacaagtcgaacaacctggtccatacacgctaagcatgaatggatgacgacggaagacatgctggcagtctggaacagg

SEQ ID NO: 106505 - DNA, 80 bp, synthetic construct
  source 1..80: mol_type = other DNA
gggtggttggggtgcgggggtgggcggaggaagcaagaaaacggtcggcgaacacaacatcggtaaaacggattcccgca

SEQ ID NO: 106506 - DNA, 80 bp, synthetic construct
  source 1..80: mol_type = other DNA
cagtagcctactaccggggtctggacgtttccgtcattccatccacaggagacgccgtcgttgtggcgactgacgccctg

SEQ ID NO: 106507 - DNA, 80 bp, synthetic construct
  source 1..80: mol_type = other DNA
cgctgggttcggggggcccggggggcggtggtgggtgtgcgtccgacccctacggacccagctggtggcgtagtcgcccg

SEQ ID NO: 106508 - DNA, 80 bp, synthetic construct
  source 1..80: mol_type = other DNA
atcgcgcgggtgccgtactcaaaaacatgcaccacctgcgcggcgtcgggcagtgcgctggtcagcgaggccctggcgtg

SEQ ID NO: 106509 - DNA, 80 bp, synthetic construct
  source 1..80: mol_type = other DNA
gggataaactatgcgacagggaatttacccggttgctctttttctatcttcctcttagctcttttgtcttgcctcacaac

SEQ ID NO: 106510 - DNA, 80 bp, synthetic construct
  source 1..80: mol_type = other DNA
tcacgttcagcccgcgtcgccatcaaacggtccagacctgcaactgctcgctgtacccaggacaccttacaggacatcga

SEQ ID NO: 106511 - DNA, 80 bp, synthetic construct
  source 1..80: mol_type = other DNA
tcatgggagttatgaaacaaagcaaactggatcagcctcttcgatgatcaatggcgtagtaaaactcctcacaaaaccat

SEQ ID NO: 106512 - DNA, 80 bp, synthetic construct
  source 1..80: mol_type = other DNA
cactgcagagaaaggaggaagagctcacagaatggccctggaggaactgccagatgctcttcagacaattgccttgattg

SEQ ID NO: 106513 - DNA, 80 bp, synthetic construct
  source 1..80: mol_type = other DNA
ccccggcgaaggtcacgtaatttgggtaaggtcatcgataccctcacttgtggctttgccgacctcatggggtacattcc

SEQ ID NO: 106514 - DNA, 80 bp, synthetic construct
  source 1..80: mol_type = other DNA
gagatcttctgctctgcacaaccagccacacggcacagtgcgccgacaatggtggctggtggtgcgagaacacaggatct

SEQ ID NO: 106515 - DNA, 80 bp, synthetic construct
  source 1..80: mol_type = other DNA
gcggatctgcagacttatacttggttacccgcgaagccgatgtcatccctgcgcgacgcaggggagactctacagcggcc

SEQ ID NO: 106516 - DNA, 80 bp, synthetic construct
  source 1..80: mol_type = other DNA
gtgtgcgcgcgctaaagccccccccccgtcatgggacaacatgtggaagtgtcttctgcggctaaagcctatgcttgtgg

SEQ ID NO: 106517 - DNA, 80 bp, synthetic construct
  source 1..80: mol_type = other DNA
gcaaatgcaacagatggcaatggtctcaaaaatgctttgcaacaggaaaatgggcaaacagaaaatgatcaaaaatcaaa

SEQ ID NO: 106518 - DNA, 80 bp, synthetic construct
  source 1..80: mol_type = other DNA
cgacaggagacgacgagcacactcgtgtccggagagtggatcgcttcccgcagccagcggatcagcgcggtagtttttcc

SEQ ID NO: 106519 - DNA, 80 bp, synthetic construct
  source 1..80: mol_type = other DNA
gtattgggtaagtcgagcttcaggcaatgtggtacattcagtgaatatgaccagccaggtgcttctggggagaatggaga

SEQ ID NO: 106520 - DNA, 80 bp, synthetic construct
  source 1..80: mol_type = other DNA
tgacagtagtgtgctagacctaggagggacagggaacccatttgctcatttgcgtccgcaaggtcaactagggcggttgt

SEQ ID NO: 106521 - DNA, 80 bp, synthetic construct
  source 1..80: mol_type = other DNA
agaatactgtttacacgccaagctctccaacacgaaagtagaggctcgttgccccaccaccgggccagctacgcttccag

SEQ ID NO: 106522 - DNA, 80 bp, synthetic construct
  source 1..80: mol_type = other DNA
tggcagactgcgccaggaacgagtagttggagtactgcaccttggcggctcccggggagggcgagggcttgggttgcttc

SEQ ID NO: 106523 - DNA, 80 bp, synthetic construct
  source 1..80: mol_type = other DNA
ggaacggatggtccctgcaagattcccatcacctcagtcgcttcactcaatgacctgactccagttggaagactcgtaac

SEQ ID NO: 106524 - DNA, 80 bp, synthetic construct
  source 1..80: mol_type = other DNA
tgccgctactgcgtgctccgctctttacatcggagacctgtgcggtggcgtatttttggttggtcagatgttctctttcc

SEQ ID NO: 106525 - DNA, 80 bp, synthetic construct
  source 1..80: mol_type = other DNA
acgcctcggggtgtccggaccgcatgagttcctgcaagcccctgacctatttcgatcagggctggtgccccattagctac

SEQ ID NO: 106526 - DNA, 80 bp, synthetic construct
  source 1..80: mol_type = other DNA
ccaccctcgtgggatcagatgtggaagtgtttgacacgactcaaacccaccttacacggccccactcctctgctgtacag

SEQ ID NO: 106527 - DNA, 80 bp, synthetic construct
  source 1..80: mol_type = other DNA
ctgtcatctcttggcctcaatgctgtagcctattacagaggactagacgtttcggtgataccgctgtctggggacgtcgt

SEQ ID NO: 106528 - DNA, 80 bp, synthetic construct
  source 1..80: mol_type = other DNA
acggaaaatctggtgtattgggcgggtttttgcaacttttggccattttggcgcgaaaactgagtaatgaggacgtggga

SEQ ID NO: 106529 - DNA, 80 bp, synthetic construct
  source 1..80: mol_type = other DNA
cttttcactccatggttactccccaggtgaacttaacagggtggctgcaagcctcagacaacttggggccccaccgctaa

SEQ ID NO: 106530 - DNA, 80 bp, synthetic construct
  source 1..80: mol_type = other DNA
gccgagctgagcccgctcctacataccaccacgcagtgggccatattgccgtgctctttcacacccacacccgctcttag

SEQ ID NO: 106531 - DNA, 80 bp, synthetic construct
  source 1..80: mol_type = other DNA
atttgaaatgtacaaaagaacagacatcattgaggtggaccgagacatggcacgacgacacttggcagagggaaaggtgg

SEQ ID NO: 106532 - DNA, 80 bp, synthetic construct
  source 1..80: mol_type = other DNA
tcgtgttgatgcgcatgatggggatcttgtggcatgccgtagctggcactgcgagaaaccccgtattgaaggcgttctgg

SEQ ID NO: 106533 - DNA, 80 bp, synthetic construct
  source 1..80: mol_type = other DNA
ctcgaccgctgcacgtccatatttcggctcgagcggggctgaagcaggaaatcaaagcttgcagtctggaactgtccatg

SEQ ID NO: 106534 - DNA, 80 bp, synthetic construct
  source 1..80: mol_type = other DNA
tataccacccgaggctttgcgaacttgtttacatccggaccggctcagaagatccagcttataaacaccaacggcagctg

SEQ ID NO: 106535 - DNA, 80 bp, synthetic construct
  source 1..80: mol_type = other DNA
atggcgcccatcacggcctattcccagcagacacggggcctacttggctgcatcgtcactagcctcaccggccgggacaa

SEQ ID NO: 106536 - DNA, 80 bp, synthetic construct
  source 1..80: mol_type = other DNA
cgtccggcccctccggacccagcgggtggcggaggcgcccgcgcaggccccgggccggacaaaaccgccccggaaacgtg

SEQ ID NO: 106537 - DNA, 80 bp, synthetic construct
  source 1..80: mol_type = other DNA
cggtgcacatgctttacatgtgtttagtcgaggttaaaaaacgtctaggccccccgaaccacggggacgtggttttcctt

SEQ ID NO: 106538 - DNA, 80 bp, synthetic construct
  source 1..80: mol_type = other DNA
acctctctcacttgtcccacagactgcttcaggaaacatccgcgtgccacatactccgcttgcggatctggtccgtggtt

SEQ ID NO: 106539 - DNA, 80 bp, synthetic construct
  source 1..80: mol_type = other DNA
caagaatatctctggaatttaccatcttaccaatgactgccctaattctagcattgtttatgaggcgggtgatatcattc

SEQ ID NO: 106540 - DNA, 80 bp, synthetic construct
  source 1..80: mol_type = other DNA
ctctgaaggcgctaaccagtggatgaacaggctaatagcctttgcctccaggggcaaccatgtctctcctacacactatg

SEQ ID NO: 106541 - DNA, 80 bp, synthetic construct
  source 1..80: mol_type = other DNA
ttgattttcattttactgacagctgtcgctccttcaatgacaatgcgctgcataggaatatcaaatagagacttcgtgga

SEQ ID NO: 106542 - DNA, 80 bp, synthetic construct
  source 1..80: mol_type = other DNA
ttacccctcggtgcttggtggactacccgtacaggctgtggcattatccatgcactgttaatttcaccatacacaaggtc

SEQ ID NO: 106543 - DNA, 80 bp, synthetic construct
  source 1..80: mol_type = other DNA
tgtactcgagccggccggagccgcggctaacgtggtattggcactcccgtctcgacccagcctacaaaaatccaggatac

SEQ ID NO: 106544 - DNA, 80 bp, synthetic construct
  source 1..80: mol_type = other DNA
tcgccgtcgccacgttgtctccccgcgggaacgtcagggcctcggggtcagggacggccgaaaacgttacccaggcccgg

SEQ ID NO: 106545 - DNA, 80 bp, synthetic construct
  source 1..80: mol_type = other DNA
tgacgcagctggcaaaagggtctactacctgacccgagaccctgaaactcctctggcacgagccgcctgggagacagtca

SEQ ID NO: 106546 - DNA, 80 bp, synthetic construct
  source 1..80: mol_type = other DNA
ctgcttatgcccagcaaacacgaggcctcctgggcgccatagtggtgagtatgacggggcgtgacaggacagaacaggcc

SEQ ID NO: 106547 - DNA, 80 bp, synthetic construct
  source 1..80: mol_type = other DNA
taaatagtgtaaataaataaaaacaggtaagtcaggccaatcagttttgccaccggatgtcaggtaaacggtgctgtctg

SEQ ID NO: 106548 - DNA, 80 bp, synthetic construct
  source 1..80: mol_type = other DNA
cttggctggcatggcatgttgctaccaacaccagcaatgtgctggatcggagctggacctggcaagggccggagggaaat

SEQ ID NO: 106549 - DNA, 80 bp, synthetic construct
  source 1..80: mol_type = other DNA
caccccatgcagagtttcctgtagacgacgcccagctgttgattgcatagaagatttacttgaggaggatccgacggatg

SEQ ID NO: 106550 - DNA, 80 bp, synthetic construct
  source 1..80: mol_type = other DNA
ggctgggcaacaatcaattctgcataaaagtactcaacccatacatgccatctgtgattgagaagatggaaaacttgcaa

SEQ ID NO: 106551 - DNA, 80 bp, synthetic construct
  source 1..80: mol_type = other DNA
tgagcactcatcggggggtaagtacgtcagatgcgctatagtcctgtagatgaactgcactatctctatgacactcactc

SEQ ID NO: 106552 - DNA, 80 bp, synthetic construct
  source 1..80: mol_type = other DNA
gagttgacggggccagcatacgcttcgacagcatcaacctgtatgctaactttttccccatggcccacaacacagcttcc

SEQ ID NO: 106553 - DNA, 80 bp, synthetic construct
  source 1..80: mol_type = other DNA
ggcaacttagatctctcggcctgaacgccgtcgctttctaccggggtgtggatgtatcggtcattcccacatcaggtgac

SEQ ID NO: 106554 - DNA, 80 bp, synthetic construct
  source 1..80: mol_type = other DNA
gaggacgggattaattatgcaacgggcaatttgccaggttgctccttttctatcttccttcttgctttgctttcctgcct

SEQ ID NO: 106555 - DNA, 80 bp, synthetic construct
  source 1..80: mol_type = other DNA
aagtggacggcgtgaggatacacaggtatgctccgccctgtcggcctctcatcagagatgagatatcattttccgtgggg

SEQ ID NO: 106556 - DNA, 80 bp, synthetic construct
  source 1..80: mol_type = other DNA
ggtgcatgaagggaaaggcccccggaagcttgcttccgggaggagggaagagagaaattggcagctctcttcaggaaatt

SEQ ID NO: 106557 - DNA, 80 bp, synthetic construct
  source 1..80: mol_type = other DNA
ttatgtagtgggggctactgctgacaacctaaaatgcccctgccaagtcccagcaccagaatttttcaccgaggtggatg

SEQ ID NO: 106558 - DNA, 80 bp, synthetic construct
  source 1..80: mol_type = other DNA
gacaggaaatggggggtaacatcacgcgggtagagtcagaaaataaaattgtggtcttggactcctttgaaccactcaaa

SEQ ID NO: 106559 - DNA, 80 bp, synthetic construct
  source 1..80: mol_type = other DNA
ggtgtgaggaccatcaccaccggtgcccccataacatactccacgtacggcaaatttcttgctgacggtggttgtagtgg

SEQ ID NO: 106560 - DNA, 80 bp, synthetic construct
  source 1..80: mol_type = other DNA
gcgggccagttggtgacatttagaccacgacgccactggaccactcaggattgcaattgttccatctacgctgggcacat

SEQ ID NO: 106561 - DNA, 80 bp, synthetic construct
  source 1..80: mol_type = other DNA
gactcagggccaggtcctggtacacggcgaggttggatcgccgcccgagaagctgaagcagggggcacggcccgcatgcg

SEQ ID NO: 106562 - DNA, 80 bp, synthetic construct
  source 1..80: mol_type = other DNA
gacacatggaagatagagaaagcctctttcattgaagtaaaaaactgccactggccaaaatcacacaccctctggagcaa

SEQ ID NO: 106563 - DNA, 80 bp, synthetic construct
  source 1..80: mol_type = other DNA
ccgggctctgctgcgccgcgccagacgcacgggccgccgggccatgatgcgagccgcgcgccgcgccgccgccgcaccca

SEQ ID NO: 106564 - DNA, 80 bp, synthetic construct
  source 1..80: mol_type = other DNA
cgcccaaatgtggagcttgatgtatttccacaggcgtgacctcaggctggcggcgaatgccatttgctcggcagtgccat

SEQ ID NO: 106565 - DNA, 80 bp, synthetic construct
  source 1..80: mol_type = other DNA
tcaactctgtcggcatgatcgcccaatagcaccgatgaaataaaatgcgtggtgtgcatgaggatcattttttgaaacag

SEQ ID NO: 106566 - DNA, 80 bp, synthetic construct
  source 1..80: mol_type = other DNA
cgctggcaggagttccgctggccagtgtggaaggccagaaataccacctgaaaagcggccatgtcacttgtgatgtagga

SEQ ID NO: 106567 - DNA, 80 bp, synthetic construct
  source 1..80: mol_type = other DNA
tcccagcccgcgttgggatgacggattcccctggcggtgtggcccccgcctcccccgtggaggacgcgtcggacgcgtcc

SEQ ID NO: 106568 - DNA, 80 bp, synthetic construct
  source 1..80: mol_type = other DNA
ccgtgtaagcctcttattcgggaggaggccaacttccaggtcgggctgcactcatacgtcgtgggatcacaactgccctg

SEQ ID NO: 106569 - DNA, 80 bp, synthetic construct
  source 1..80: mol_type = other DNA
acatggcaccaggatacgaatcacccctacaggacctggaactaccacggaagctatgaagtgaaaccaaccggctcagc

SEQ ID NO: 106570 - DNA, 80 bp, synthetic construct
  source 1..80: mol_type = other DNA
agagtagaactgggagatgccgcggcaatctttatgactgccaccccgccaggttcatccgaccctttcccagaatcaaa

SEQ ID NO: 106571 - DNA, 80 bp, synthetic construct
  source 1..80: mol_type = other DNA
gttacaaggtgcaaaccaatgggccatggatgcaagtccccctggaagtaaaaagggaagtctgtccagggacaagcgtg

SEQ ID NO: 106572 - DNA, 80 bp, synthetic construct
  source 1..80: mol_type = other DNA
atgtctgcggcggtgccggccggggccgccacgtacgccccgtacggattggcggcttcgacggtgtcgcggttaaggcc

SEQ ID NO: 106573 - DNA, 80 bp, synthetic construct
  source 1..80: mol_type = other DNA
tttggatcaatggagcaacagcgacagccacctgtcgtgggagtacatgctggattacatggcgatggctctgtggaggg

SEQ ID NO: 106574 - DNA, 80 bp, synthetic construct
  source 1..80: mol_type = other DNA
aagagcacccgtgttccggcggcgtacgctagccagggctacaaggtgttggtcttgaacccatcggtggcggcaacgct

SEQ ID NO: 106575 - DNA, 80 bp, synthetic construct
  source 1..80: mol_type = other DNA
acaacttttgacgggccacggtgggctcggacaccggggcggccatctcgcggcgccgatctgtaccgcggccggagtat

SEQ ID NO: 106576 - DNA, 80 bp, synthetic construct
  source 1..80: mol_type = other DNA
catcaacaggacagctttgaactgcgatgacagcctcaacaccgggttcttagcgggcctgttctattaccacaagttca

SEQ ID NO: 106577 - DNA, 80 bp, synthetic construct
  source 1..80: mol_type = other DNA
gagtggtggctcccgggcttgtagactgctacattaaccttggggcgcgctggtctctggactacatggacaacgttaat

SEQ ID NO: 106578 - DNA, 80 bp, synthetic construct
  source 1..80: mol_type = other DNA
cagcggcctaaaccgccgccggcggcgggccatgcgcaggcgcctaagtggcgggttcctgcctgcgcttatccccataa

SEQ ID NO: 106579 - DNA, 80 bp, synthetic construct
  source 1..80: mol_type = other DNA
gggacggggctcacttctccaactgagacttcagacccggcccctcttatcgcagatgacaaatctgacgatgggtcatt

SEQ ID NO: 106580 - DNA, 80 bp, synthetic construct
  source 1..80: mol_type = other DNA
agacgacctcgtcgttatctgtgagagcgcgggtacccaggaggatgcggcgagcctacgagtcttcacggaggctatga

SEQ ID NO: 106581 - DNA, 80 bp, synthetic construct
  source 1..80: mol_type = other DNA
ggcttgagccagcgcgtccaggataaacacgctctcgtctagatcaaagcgcagggaggccgcgcatggcgaaaagtggt

SEQ ID NO: 106582 - DNA, 80 bp, synthetic construct
  source 1..80: mol_type = other DNA
gccaaatctattgacttcatcccggttgaatctctcgacatcgctagacggacgcccagtttttctgacaacagcacgcc

SEQ ID NO: 106583 - DNA, 80 bp, synthetic construct
  source 1..80: mol_type = other DNA
gaccgctgcgttctgttcagccatgtacgtgggtgatctttgtgggggaattttcctgctgggccaactcgtcaccttca

SEQ ID NO: 106584 - DNA, 80 bp, synthetic construct
  source 1..80: mol_type = other DNA
gggattaactatgcaacagggaatctgcccggttgctctttctctatcttcttgcttgctctcctgtcttgcatctcagt

SEQ ID NO: 106585 - DNA, 80 bp, synthetic construct
  source 1..80: mol_type = other DNA
gactagaggttagaggagaccccgttgtggaaaaagcatcaaaacttaacagcatactgacacctgggacagactaggag

SEQ ID NO: 106586 - DNA, 80 bp, synthetic construct
  source 1..80: mol_type = other DNA
gccgcgatgaaggcacttgcgcagatgcagaaagcgcccttcgcgagggcggcagagagctctggaacggcctcggattc

SEQ ID NO: 106587 - DNA, 80 bp, synthetic construct
  source 1..80: mol_type = other DNA
aggtggtggatttcagcctagaccccacatttacaatcgagaccaccacagtcccacaggatgctgtggcaaggagtcag

SEQ ID NO: 106588 - DNA, 80 bp, synthetic construct
  source 1..80: mol_type = other DNA
gcaccattgtgacaagcctcactggcagagacaccaatgagaactgcggtgagatccaggtattgtccacagccacgcag

SEQ ID NO: 106589 - DNA, 80 bp, synthetic construct
  source 1..80: mol_type = other DNA
ctctaggcgctggcgtgattgcgctggtcacccttttaacactcctgccaacctacaaattatttctggccaaggtgctg

SEQ ID NO: 106590 - DNA, 80 bp, synthetic construct
  source 1..80: mol_type = other DNA
agtaggactacacgattacccggtggggtcgcaattaccttgcgagcctgaaccggatgtagctgtgttgacgtccatgc

SEQ ID NO: 106591 - DNA, 80 bp, synthetic construct
  source 1..80: mol_type = other DNA
ctttaactgggcagtgaagaccaagctcaaactcactccattggctgcggcaagccagcttgatttgtcaggctggtttg

SEQ ID NO: 106592 - DNA, 80 bp, synthetic construct
  source 1..80: mol_type = other DNA
tgctggtgttatggagtggaaaatgtcagagtggcctatggaagatgtgatgcggtagggcgatcaaaacgctccaggag

SEQ ID NO: 106593 - DNA, 80 bp, synthetic construct
  source 1..80: mol_type = other DNA
gccttactaaatatactggaaccttgccccaaagagttggacttgcgattgatctttatgcattgggccaagcactctta

SEQ ID NO: 106594 - DNA, 80 bp, synthetic construct
  source 1..80: mol_type = other DNA
gggggggcgcatgcccgtaccacgttcggcttcgcgtccctcctttcatccgggccgactcagaacattcagcttgtgaa

SEQ ID NO: 106595 - DNA, 80 bp, synthetic construct
  source 1..80: mol_type = other DNA
gacctgtgcggctaccgtagatgccgcgcgagcggcgtctacactaccagcttcggaaacacactgacgtgctatcttaa

SEQ ID NO: 106596 - DNA, 80 bp, synthetic construct
  source 1..80: mol_type = other DNA
aaatggaaccgtgatggatgttatatccagacgtgaccagagaggaagtggacaggtcggaacttatggcttaaatactt

SEQ ID NO: 106597 - DNA, 80 bp, synthetic construct
  source 1..80: mol_type = other DNA
gcattacccctgcactgtcaacttcaccttgcataaggtcaggatgttcgtgggtggcattgagcaccggtttgccgccg

SEQ ID NO: 106598 - DNA, 80 bp, synthetic construct
  source 1..80: mol_type = other DNA
ctttattctcgtggttcttttgtactttgtttgctgcaaagccagaaaaaaatctaggagacccatctacaggccagtaa

SEQ ID NO: 106599 - DNA, 80 bp, synthetic construct
  source 1..80: mol_type = other DNA
cacatcgtagtcatgctcatgcagataaaggcaggtaagttccggaaccaccacagaaaaagacaccatttttctctcaa

SEQ ID NO: 106600 - DNA, 80 bp, synthetic construct
  source 1..80: mol_type = other DNA
cttttgagataatggatttggaaaaaagatacgtcttaggccgcctgatcacagtcaacccaattgtaacagaaaaagac

SEQ ID NO: 106601 - DNA, 80 bp, synthetic construct
  source 1..80: mol_type = other DNA
cttctgttagctggcctggcaatgaccgtctgcttacccccaacgagtttgagatcaagcgttcagttgacggagagggc

SEQ ID NO: 106602 - DNA, 80 bp, synthetic construct
  source 1..80: mol_type = other DNA
agctcacgtcaaaagaactactcatggccacaattggaattgtcctcatagctcagtgcgacgtcccagggacaatcttg

SEQ ID NO: 106603 - DNA, 80 bp, synthetic construct
  source 1..80: mol_type = other DNA
catggcacataaaccgcacagccctaaactgcaatgattctttagagactggttttattgcggggttaatatactacaac

SEQ ID NO: 106604 - DNA, 80 bp, synthetic construct
  source 1..80: mol_type = other DNA
gctcgcgtgactactatactatcatccctgactgtgacatcccttctcagacgcctccacaagtggatcaacgaggactg

SEQ ID NO: 106605 - DNA, 80 bp, synthetic construct
  source 1..80: mol_type = other DNA
ggtagctcaggttgaggcggctttgtccaacctaatcaacatcaacgctgcttcagccgctggcactcaaagcttctggt

SEQ ID NO: 106606 - DNA, 80 bp, synthetic construct
  source 1..80: mol_type = other DNA
gcctcacacacatcgatgcccacttcctctcgcaaaccaaacaagcaggggagaatctcgcatacttggtggcttaccaa

SEQ ID NO: 106607 - DNA, 80 bp, synthetic construct
  source 1..80: mol_type = other DNA
ggtccacgccacggtccactcgggcaaaaaccgagtcggcacggcccacggttctcccacccacgcgtctggggtcttga

SEQ ID NO: 106608 - DNA, 80 bp, synthetic construct
  source 1..80: mol_type = other DNA
ggcgtgagggtcctggaggacgggataaactatgcaacagggaatctacccggttgctctttttctatcttcctactagc

SEQ ID NO: 106609 - DNA, 80 bp, synthetic construct
  source 1..80: mol_type = other DNA
ccaatggatcgcgtcggctatagtcctggagttttttatgatggtgttgcttataccagaacccgaaaagcagagaaccc

SEQ ID NO: 106610 - DNA, 80 bp, synthetic construct
  source 1..80: mol_type = other DNA
catacctgaagacggggtgtagtacagatcctcgtactcatcgcgcggaacctcccgcggacccgacttcacggagcggc

SEQ ID NO: 106611 - DNA, 80 bp, synthetic construct
  source 1..80: mol_type = other DNA
attgccccagacagtattcgacctactagtagggggccactggggtgtaatggcaggccttgcttatttttctatgcagg

SEQ ID NO: 106612 - DNA, 80 bp, synthetic construct
  source 1..80: mol_type = other DNA
gtgccccgggaggtctcgtagaccgtgcaacatgagcacatctcctaaacctcaaagaaaaaccaaaagaaacaccaacc

SEQ ID NO: 106613 - DNA, 80 bp, synthetic construct
  source 1..80: mol_type = other DNA
ctggttcaccgagagtggtttatggatctgaacctgccatggagcagtgctggaagcaccacgtggaggaatcgggaaac

SEQ ID NO: 106614 - DNA, 80 bp, synthetic construct
  source 1..80: mol_type = other DNA
ttttcgcggggcacttaaaatgtagacttaagatggacaaattggaactcaaggggatgagctatgcaatgtgcacgaat

SEQ ID NO: 106615 - DNA, 80 bp, synthetic construct
  source 1..80: mol_type = other DNA
ggccccaaggagcgggggccgtggactcttctgaaacgcctgcctatctaccaggacatccgcgacgaaaacctggcgcg

SEQ ID NO: 106616 - DNA, 80 bp, synthetic construct
  source 1..80: mol_type = other DNA
gcgtatgcgtattcgccaacggaggcgtgcgtgcttatgcgcggcgcgtttcttctgtctccagggaatccgaggccagg

SEQ ID NO: 106617 - DNA, 80 bp, synthetic construct
  source 1..80: mol_type = other DNA
cggtttctgggggacgccgtcgaccgcgagcccgcgctcatgctggagtacttctgtcggtgcgcccgcgaggagagcaa

SEQ ID NO: 106618 - DNA, 80 bp, synthetic construct
  source 1..80: mol_type = other DNA
gaggtggacggccagattgaccattcctgcggttttgggggtcctacttgtgctgatgcttggtggtatcacttacactg

SEQ ID NO: 106619 - DNA, 80 bp, synthetic construct
  source 1..80: mol_type = other DNA
catgcttgtagccttactaggtgctatgacagcaggtatcttcctgtttttcatgcaaggtaaaggaatagggaaattgt

SEQ ID NO: 106620 - DNA, 80 bp, synthetic construct
  source 1..80: mol_type = other DNA
ttttgggagatggtggatgaggagcgcgaggcacacctgcgggaggaatgtcacacttgcatttacaacatgatgggaaa

SEQ ID NO: 106621 - DNA, 80 bp, synthetic construct
  source 1..80: mol_type = other DNA
gcgtgccgaaacctccgcctaacttcaaaaacgctatctggagggtagcggcggcggagtatgcggaggtgacaatgcgc

SEQ ID NO: 106622 - DNA, 80 bp, synthetic construct
  source 1..80: mol_type = other DNA
ttatccatacaggctatggcactacccgtgcactgtcaactttaccattttcaaggtgagaatgtacgtggggggagtcg

SEQ ID NO: 106623 - DNA, 80 bp, synthetic construct
  source 1..80: mol_type = other DNA
acgaccaagcaagcagaggaactgaaaccagcgattcactcggcttggccgaaggtggagcagttctggcagaaacactt

SEQ ID NO: 106624 - DNA, 80 bp, synthetic construct
  source 1..80: mol_type = other DNA
catggttgcgccttacctccttcggccgcaactcccattccgccaccgcggaggaagaagttggttcaacttgactcttc

SEQ ID NO: 106625 - DNA, 80 bp, synthetic construct
  source 1..80: mol_type = other DNA
ggaactcgagtgcatgcatcgttttttctccgacatcaccacattgcgcaaaattgaggaatgtcttcactacactttcc

SEQ ID NO: 106626 - DNA, 80 bp, synthetic construct
  source 1..80: mol_type = other DNA
aggccagtcctgcggatacagacgatgccgcgccagcggggtactcaccactagcatgggaaacactctcacgtgctatg

SEQ ID NO: 106627 - DNA, 80 bp, synthetic construct
  source 1..80: mol_type = other DNA
caactcttcggggtgtccgaagcgtttggccgcttgccgcgacatcacttccttccggattggctggggagacttggagt

SEQ ID NO: 106628 - DNA, 80 bp, synthetic construct
  source 1..80: mol_type = other DNA
ctaccctgaccttggcgtccggatctgcgagaaacgggcgctgtatgacatagctcaacagctacccgtcgccctcatgg

SEQ ID NO: 106629 - DNA, 80 bp, synthetic construct
  source 1..80: mol_type = other DNA
ggcttagcttattattctatgcagggtaactgggccaaggtcgccattattatggtcatgttttcgggggttgatgccac

SEQ ID NO: 106630 - DNA, 80 bp, synthetic construct
  source 1..80: mol_type = other DNA
ctaggggaagatggaggagcagccgcgtaagcaggagcaggaggaggacttaaccacccacgagcaaccaaaaatcgagc

SEQ ID NO: 106631 - DNA, 80 bp, synthetic construct
  source 1..80: mol_type = other DNA
aagggatcccccggtgaaataattgtggagacgcccttgagggcaggattggacccttccctagctacccttctcccaaa

SEQ ID NO: 106632 - DNA, 80 bp, synthetic construct
  source 1..80: mol_type = other DNA
cagacagggaggtcttataccagcagtatgatgagatggaagaatgcgcagcctatgctccatacattgaacaagcgcaa

SEQ ID NO: 106633 - DNA, 80 bp, synthetic construct
  source 1..80: mol_type = other DNA
acagcagaggcggcacgccgtaggctgggaagggggtcaccgccctccttggccagctcttcagcgagccagctatctgc

SEQ ID NO: 106634 - DNA, 80 bp, synthetic construct
  source 1..80: mol_type = other DNA
cagtccaatttcggtggccaatggttccttagccttggccgccgctgctcctcttaacaccacaggatccaccttaggtc

SEQ ID NO: 106635 - DNA, 80 bp, synthetic construct
  source 1..80: mol_type = other DNA
ctcttcgggttgccctgaacggttgagtaggtgtcggccgctaagtgcatttgaccaaggttggggccctctgacatacg

SEQ ID NO: 106636 - DNA, 80 bp, synthetic construct
  source 1..80: mol_type = other DNA
gtggccccctcacaggagggctctggggatgcacctacaacaggtgatgacgatacgggctcgaaccccgagtcctacag

SEQ ID NO: 106637 - DNA, 80 bp, synthetic construct
  source 1..80: mol_type = other DNA
gtttccgcgaggctaggtagggaagttctgcttggccccgccgatggctacacctcaaagaggcgggacgtcgcttgcgg

SEQ ID NO: 106638 - DNA, 80 bp, synthetic construct
  source 1..80: mol_type = other DNA
gtcacgcagaagttaccacaggccgtgatgggttcagcatacggattccagtactcccccacccagagggttgagtacct

SEQ ID NO: 106639 - DNA, 80 bp, synthetic construct
  source 1..80: mol_type = other DNA
agcagttgtaggtcaatcacagatttccgacaggggtggggcccgctggggtatgcaaatatctcgggtccctctgaaga

SEQ ID NO: 106640 - DNA, 80 bp, synthetic construct
  source 1..80: mol_type = other DNA
acagatcgtgtttgacatcttcgcgggcggccattggggcgttatgggggctttgctgtactacagcatggctactaatt

SEQ ID NO: 106641 - DNA, 80 bp, synthetic construct
  source 1..80: mol_type = other DNA
gaccaacgcccctattgctggcactaccccccaaaaccgtgcggtattgtgcctgcaaagagcgtgtgcggcccagtgta

SEQ ID NO: 106642 - DNA, 80 bp, synthetic construct
  source 1..80: mol_type = other DNA
ttggggcccgacggcgtagtggaggaagacctgcttattctcggggagcttcgctttgtggtggaccaggtcccccacac

SEQ ID NO: 106643 - DNA, 80 bp, synthetic construct
  source 1..80: mol_type = other DNA
ggctttgtagtaacacgtggcatggctccttccccataaacgctagtaccaccggaccttcagtcccggtgccagcgccc

SEQ ID NO: 106644 - DNA, 80 bp, synthetic construct
  source 1..80: mol_type = other DNA
cgcgttgcgcaggtacacggcggccgcgttgtctagcagcggggaggccccgcggccgaggtaaaagttttggtggaggt

SEQ ID NO: 106645 - DNA, 80 bp, synthetic construct
  source 1..80: mol_type = other DNA
caaggagacgtggtggttgtcgccaccgacgccctaatgactggatttaccggtgactttgactctgtcatcgactgcaa

SEQ ID NO: 106646 - DNA, 80 bp, synthetic construct
  source 1..80: mol_type = other DNA
aagcgttaagaccgttttcgttccacacgcggctgtagaccacgtcgccaacagtgtttcgggcgcgcatcaccacttgt

SEQ ID NO: 106647 - DNA, 80 bp, synthetic construct
  source 1..80: mol_type = other DNA
agacacgtactctggcataaaggccaatggccaaacctggactgcagacgacaattatgccgacagaggggcagaaattg

SEQ ID NO: 106648 - DNA, 80 bp, synthetic construct
  source 1..80: mol_type = other DNA
gttaccagccccctgacgaccaaccaaactattttttttaacatactcggggggtgggttgctacccattttgcgtggcc

SEQ ID NO: 106649 - DNA, 80 bp, synthetic construct
  source 1..80: mol_type = other DNA
tcgtgttggctctcttggcgttcttcaggttcacagcaattgctccgactcgagcagtgctggatcgatggagaggtgtg

SEQ ID NO: 106650 - DNA, 80 bp, synthetic construct
  source 1..80: mol_type = other DNA
cctgggttgggaccccgaaactaaattagtgactccgggagtgtatactaacgaggcttttcatccagatatagtattgc

SEQ ID NO: 106651 - DNA, 80 bp, synthetic construct
  source 1..80: mol_type = other DNA
cattacgtcgttggcgtaacgcaagacaacatcaagtgcccctgccaggtccctgctccagagtttttcaccgaagtgga

SEQ ID NO: 106652 - DNA, 80 bp, synthetic construct
  source 1..80: mol_type = other DNA
actgtcctgcctcacaacgcccgcctctgctgtgcatcatcgcaacgtgtcgggcatataccacctcacgaatgactgtc

SEQ ID NO: 106653 - DNA, 80 bp, synthetic construct
  source 1..80: mol_type = other DNA
ccctgttagagtccaagtggcaaaagctggaagttttctggcgcaaacatatgtggaactttgtcagtggcattcaatac

SEQ ID NO: 106654 - DNA, 80 bp, synthetic construct
  source 1..80: mol_type = other DNA
ggagagcattgctctccccgagacccatttcgaccttgaaggggtcctcggggtggccggtgctctgccctaggagccac

SEQ ID NO: 106655 - DNA, 80 bp, synthetic construct
  source 1..80: mol_type = other DNA
ctggggtagctgggtggggtttgtgcagagcaatcagggaccgcagccagcgcatacaatcgcgctcccgtccgtttgtc

SEQ ID NO: 106656 - DNA, 80 bp, synthetic construct
  source 1..80: mol_type = other DNA
cagtggattgcaaaagaaaagcaaaatggaccacctcagacagaaaaaaatgttacaaaaacatttggagtggctgccat

SEQ ID NO: 106657 - DNA, 80 bp, synthetic construct
  source 1..80: mol_type = other DNA
ggagaatgcctgagcacttcatgactaagaccatggaggccttcgacaccatgtatgtggtagcgacggctgaaaaaggc

SEQ ID NO: 106658 - DNA, 80 bp, synthetic construct
  source 1..80: mol_type = other DNA
cggaggccatgaccaggtattcggcccctcccggcgatgatccacgcccggagtacgaccttgagctgataacatcttgc

SEQ ID NO: 106659 - DNA, 80 bp, synthetic construct
  source 1..80: mol_type = other DNA
tccgacttcaagacatggctttctgctaagatcatgccagcacttcccgggctgccctttatttcttgtcaaaagggata

SEQ ID NO: 106660 - DNA, 80 bp, synthetic construct
  source 1..80: mol_type = other DNA
tcgggaataatcaacttgggcaaagggtcttcgacgttttccttccaaaattgtcgtaccagctgcagggcgcttataac

SEQ ID NO: 106661 - DNA, 80 bp, synthetic construct
  source 1..80: mol_type = other DNA
cgacgagaaaaacttctgaacggtcccagcccagaggtagacgccaaccaataccgaaagtgcgtcaccaaacgggccgt

SEQ ID NO: 106662 - DNA, 80 bp, synthetic construct
  source 1..80: mol_type = other DNA
agagattttgtagaaggagtctcaggtggagcatgggtcgatctggtgctagaacatggagggtgtgttacaaccatggc

SEQ ID NO: 106663 - DNA, 80 bp, synthetic construct
  source 1..80: mol_type = other DNA
agacctcaacgcggggcaccttcagcttgagagcaagagtgcggatttgggaactgtccagggagtccaggaaggcctcg

SEQ ID NO: 106664 - DNA, 80 bp, synthetic construct
  source 1..80: mol_type = other DNA
gccaacttttggcgaaaatgagacgttgatcggcacgtaagaggttccaactttcaccataatgaaataagatcactacc

SEQ ID NO: 106665 - DNA, 80 bp, synthetic construct
  source 1..80: mol_type = other DNA
cgtcaaaccaatgggaaaagtcgtcgatctcggctgtgggagaggaggatggagctactattgtgcaaccttgaaacacg

SEQ ID NO: 106666 - DNA, 80 bp, synthetic construct
  source 1..80: mol_type = other DNA
cggccctcctgtcacctggggctttggttgtaggcgtagtctgtgcagcggtactgcggcgccacattggtccatctgag

SEQ ID NO: 106667 - DNA, 80 bp, synthetic construct
  source 1..80: mol_type = other DNA
catccattcactcactgagaggctctacgtaggtggccccatgctgaatagtaaggggcagtcctgcgggtacaggcgct

SEQ ID NO: 106668 - DNA, 80 bp, synthetic construct
  source 1..80: mol_type = other DNA
cagaaaatggaatgctgctgttgaatcacggactagtatttatacatgacagccatgccgcatccgagatgatattgagg

SEQ ID NO: 106669 - DNA, 80 bp, synthetic construct
  source 1..80: mol_type = other DNA
cgagaactgcggtgaaatccaggtgctgtccacggcgacgcagtccttcttgggcacttcaatcaacggcgtcatgtgga

SEQ ID NO: 106670 - DNA, 80 bp, synthetic construct
  source 1..80: mol_type = other DNA
atgggtgccaatttcaaagctgagagggttatagaccccagacgctgcatgaaaccagtcatactaacagatggtgagga

SEQ ID NO: 106671 - DNA, 80 bp, synthetic construct
  source 1..80: mol_type = other DNA
tgatgtgttacgctatgtcaatctggtgggggcggcctttgcagaatccaactcaggaggagatgtggtgcatctggcgc

SEQ ID NO: 106672 - DNA, 80 bp, synthetic construct
  source 1..80: mol_type = other DNA
ggcgcgggcccggttcgaggcctcgggcgccccggcgcccgtgtgggcgcccgagctgggcgacgcggcgcagcagtacg

SEQ ID NO: 106673 - DNA, 80 bp, synthetic construct
  source 1..80: mol_type = other DNA
caccctccgggccatcaccggcaacgtgagcgccatcctcgcccgcaacgggggcatcgggctgtgcatgcaggcgttca

SEQ ID NO: 106674 - DNA, 80 bp, synthetic construct
  source 1..80: mol_type = other DNA
gaaggaagaacgttacgtgttctaaaaatggtggaaccatggctcagaggaaaccaattctgcataaaaatcctaaatcc

SEQ ID NO: 106675 - DNA, 80 bp, synthetic construct
  source 1..80: mol_type = other DNA
agctggtatttggcatacaactacggagacccagaaaaaggagttcggtcatggactctactaacaactccagatgtgac

SEQ ID NO: 106676 - DNA, 80 bp, synthetic construct
  source 1..80: mol_type = other DNA
tgaacccctctgtggctgccactctgggtttcggcgcgtacatgtccaaggcccatggaattgacccaaacatcagaacc

SEQ ID NO: 106677 - DNA, 80 bp, synthetic construct
  source 1..80: mol_type = other DNA
ggtggaggcctttccacagagcaatgcagtcatccaagatgaggaaagagacattcctgagagatcatggaactcaggct

SEQ ID NO: 106678 - DNA, 80 bp, synthetic construct
  source 1..80: mol_type = other DNA
aaagaagcaacaacaacatcgaagaaagtcctgagacgcgcgagctaagaaaacgcatttttcccactctatatgctatt

SEQ ID NO: 106679 - DNA, 80 bp, synthetic construct
  source 1..80: mol_type = other DNA
tattcatgatattgacagtggcagccaatgagatgggattactggaaaccacaaagaaggacctggggattggtcatgca

SEQ ID NO: 106680 - DNA, 80 bp, synthetic construct
  source 1..80: mol_type = other DNA
gggtgtggagtgggtgggtggggagtggcaaggaagaaacaagcccgaccaccagacagaaaatgtaaccatacccaaac

SEQ ID NO: 106681 - DNA, 80 bp, synthetic construct
  source 1..80: mol_type = other DNA
cctgtggtcctttgccctgctgctcctggtgttgccccagcaggcttacgccctggatgtcgctgagcagagccaaatcg

SEQ ID NO: 106682 - DNA, 80 bp, synthetic construct
  source 1..80: mol_type = other DNA
ctcagttctttggcttatgatgcttgtgtcccaagctgaggcggctctggagaatctcatcgtccttaatgccgcctctg

SEQ ID NO: 106683 - DNA, 80 bp, synthetic construct
  source 1..80: mol_type = other DNA
ggcagacatcctgacgctgagctacttgaagctaaccttctctggagacaggaggtgggtggaaacatcactagggtcga

SEQ ID NO: 106684 - DNA, 80 bp, synthetic construct
  source 1..80: mol_type = other DNA
ctggtcctatttcgcaacacaactacaggcccgggtaccacacccaaacggcaggaccctggcacttaggaaaattggag

SEQ ID NO: 106685 - DNA, 80 bp, synthetic construct
  source 1..80: mol_type = other DNA
tacggtgggaaagctagtaacgaccagcggccgtattgctggcactatgccccacgcccgtgcggtatcgtgccggcgaa

SEQ ID NO: 106686 - DNA, 80 bp, synthetic construct
  source 1..80: mol_type = other DNA
acatcgtgctcatccaatgtgtcagtcgcccacgacgggcaggggaagcgggtctactacctgacccgtgaccccacaac

SEQ ID NO: 106687 - DNA, 80 bp, synthetic construct
  source 1..80: mol_type = other DNA
ggcctggtcaacatagatggtcacttcttatctcagaccaagcagtcgggtgagaacttcccctatttggttgcctacca

SEQ ID NO: 106688 - DNA, 80 bp, synthetic construct
  source 1..80: mol_type = other DNA
cctccaccagaacatcgtggacgtacaatacttgtacggggtagggtcgagcgttgtgtcctgggccatcaagtgggagt

SEQ ID NO: 106689 - DNA, 80 bp, synthetic construct
  source 1..80: mol_type = other DNA
caccagaacatcgtggacgtgcagtacctctacgggttgagctcggtagtcacatcttgggccttgaagtgggagtacgt

SEQ ID NO: 106690 - DNA, 80 bp, synthetic construct
  source 1..80: mol_type = other DNA
acggagctggtgtctcaggcgccttggtggcttttaagatcatgggaggagaactccccactgctgaggacatggtcaac

SEQ ID NO: 106691 - DNA, 80 bp, synthetic construct
  source 1..80: mol_type = other DNA
cctctcctgtgtccgtcaggtcacgtggtcgggctctttcgcgccgccgtctgcacacggggtgtggccaaagctctgga

SEQ ID NO: 106692 - DNA, 80 bp, synthetic construct
  source 1..80: mol_type = other DNA
agctccacagggccgggcttgcgtcgacggaagtccggtgcagggcgttgttctggtcaaggagggtcattacgttgacg

SEQ ID NO: 106693 - DNA, 80 bp, synthetic construct
  source 1..80: mol_type = other DNA
agtggcgctggtcagttggtaccggaggttaatgcctccgaccctcctgcaatggatcctgtagcaggttcttcgacagc

SEQ ID NO: 106694 - DNA, 80 bp, synthetic construct
  source 1..80: mol_type = other DNA
aacggcaacgtgtacgcggaccgcctcaacaaccgcctgcagctgggcatgctgatccccggagccgtcccttcggaggc

SEQ ID NO: 106695 - DNA, 80 bp, synthetic construct
  source 1..80: mol_type = other DNA
ttgcaatagatttggaccctgtggtttacgatgcaaaatttgaaaaacagctaggccaaataatgttgttgatactttgc

SEQ ID NO: 106696 - DNA, 80 bp, synthetic construct
  source 1..80: mol_type = other DNA
attctgtgttactcatagcgcgtaatatttgtctagggccgcggggactttgaccgtttacgtggagactcgcccaggtg

SEQ ID NO: 106697 - DNA, 80 bp, synthetic construct
  source 1..80: mol_type = other DNA
gatgatcgctttgccacttcgctccactttctcaacgccatgccaaaggtccgcaaagacattcaagagtggaaaccatc

SEQ ID NO: 106698 - DNA, 80 bp, synthetic construct
  source 1..80: mol_type = other DNA
gcaatgacggcgactttaagaatttatccggttgaaaacatagaccatgtttttggagcaacgtttaagaacccgatcgc

SEQ ID NO: 106699 - DNA, 80 bp, synthetic construct
  source 1..80: mol_type = other DNA
tcactgtcacgcaggtcgtcgacttcagtctggaccctactttttccatagagacaaccactgtcccccaagacgccgtg

SEQ ID NO: 106700 - DNA, 80 bp, synthetic construct
  source 1..80: mol_type = other DNA
gtggttagaggagacccctccctaaacataacgcagcagcggggcccaacaccaggggaagctgtaccttggtggtaagg

SEQ ID NO: 106701 - DNA, 80 bp, synthetic construct
  source 1..80: mol_type = other DNA
gcgaggatgatcctgatgacacacttcttctcaatcctcgtagcccaggagcagttggaaaaggccctagattgtgagat

SEQ ID NO: 106702 - DNA, 80 bp, synthetic construct
  source 1..80: mol_type = other DNA
tggagaacatggaaacaaccatgagatcccccgtgttcactgacaattcatcacccccagcagtgcccagcacataccag

SEQ ID NO: 106703 - DNA, 80 bp, synthetic construct
  source 1..80: mol_type = other DNA
gaacgcgatatccgcactgaggagtcgatttaccaatgctgccagttagatcccacagcccgtaaagtcatatcatcact

SEQ ID NO: 106704 - DNA, 80 bp, synthetic construct
  source 1..80: mol_type = other DNA
aggctacataggtacgctccaccctgcaaacctctccttagggatgaggtaacattcagcgtgggcttatccacctacgt

SEQ ID NO: 106705 - DNA, 80 bp, synthetic construct
  source 1..80: mol_type = other DNA
accccttggcaattccaatcacaatgaccttatggtacatgtggcaagtgaaaacacaaagatcaggagccctgtgggac

SEQ ID NO: 106706 - DNA, 80 bp, synthetic construct
  source 1..80: mol_type = other DNA
cacctccaccaaaatgttgtggacgtgcagtacctctatggactttctccggccattacgaggcacatcgtgaagtggga

SEQ ID NO: 106707 - DNA, 80 bp, synthetic construct
  source 1..80: mol_type = other DNA
gctgcgccagaagaaggttaccttcgacaggctgcaggtcctggatgaccactacaaggctgttgttaaggagataaagg

SEQ ID NO: 106708 - DNA, 80 bp, synthetic construct
  source 1..80: mol_type = other DNA
ccttgcggacatacaaaaattggtccgtgtgattaaaaagcagtacagcaagctcctgtcttctcccggcaaaaatcaca

SEQ ID NO: 106709 - DNA, 80 bp, synthetic construct
  source 1..80: mol_type = other DNA
ccaggtcaccatctttctctgacaattcaacccctcctgctgtcccacagagctatcaagtaggatatctacatgctccg

SEQ ID NO: 106710 - DNA, 80 bp, synthetic construct
  source 1..80: mol_type = other DNA
cacacccgcagaggaaagtccaaaaaaattctacagaaagatatcaagcaaagaggaaattaaaacaggggggcttgaaa

SEQ ID NO: 106711 - DNA, 80 bp, synthetic construct
  source 1..80: mol_type = other DNA
tacaaagtacattgtcagatgggaatgggtggttctcttgtttctgctcctcgcagacgcccggatttgtgcctgtttct

SEQ ID NO: 106712 - DNA, 80 bp, synthetic construct
  source 1..80: mol_type = other DNA
tcgccacgctcccaagtgtaaaccattgctgagggaggaggtgtccttctccgtgggcctcaactcgtttgtagtggtgt

SEQ ID NO: 106713 - DNA, 80 bp, synthetic construct
  source 1..80: mol_type = other DNA
caggccttctcccctgtatcccccgcgtctcctgttggagacgccgccgggaacgatcaacgggaagaccagcggtctat

SEQ ID NO: 106714 - DNA, 80 bp, synthetic construct
  source 1..80: mol_type = other DNA
gtggaacctaacatcagaactggggtcaggaccatcacaacaggaggcccaatcacctactccacctacggcaagttcct

SEQ ID NO: 106715 - DNA, 80 bp, synthetic construct
  source 1..80: mol_type = other DNA
taacctggccccaggcgactgggttatcaaagccaacccggctgggtgcaaagcccctcattccgactcgggatggtccc

SEQ ID NO: 106716 - DNA, 80 bp, synthetic construct
  source 1..80: mol_type = other DNA
ccggcgcgcgggtataagaacggggccccggagtccacggacataccgcccggctcgatcgctgccgcgccgcagggtga

SEQ ID NO: 106717 - DNA, 80 bp, synthetic construct
  source 1..80: mol_type = other DNA
acgagggggaggactttttaaaggagttaaccttgagtttaatgtctcgtcgccatcatgagtctgtttggtgggctgat

SEQ ID NO: 106718 - DNA, 80 bp, synthetic construct
  source 1..80: mol_type = other DNA
attattctcgaggacaacaacgaggttgaggtcatcactagagtcggagaaaggaaacagctcagaccaagatggttgga

SEQ ID NO: 106719 - DNA, 80 bp, synthetic construct
  source 1..80: mol_type = other DNA
cgatctcatggggtatatccccgtcctaggaggccctttaggtggcgtcgcggcagccctagcgcatggcgttagggcta

SEQ ID NO: 106720 - DNA, 80 bp, synthetic construct
  source 1..80: mol_type = other DNA
gtgctgtaacgggccgggacggggcggggcgcttgtgaaacccgaagacgcaataaacggcaacgacctgattaagtttt

SEQ ID NO: 106721 - DNA, 80 bp, synthetic construct
  source 1..80: mol_type = other DNA
tcacagtgacctatcgtattggattgagagcaaaaagaatggaacatggcagctggagcgagccgttatgggagaagtga

SEQ ID NO: 106722 - DNA, 80 bp, synthetic construct
  source 1..80: mol_type = other DNA
tgcgcggaggagttgtgtttgtggacgaagtaccgaaaggtcttaccggaaaactcgacgcaagaaaaatcagagagatc

SEQ ID NO: 106723 - DNA, 80 bp, synthetic construct
  source 1..80: mol_type = other DNA
ttatgatcccgatgtcaggatcattgaaaatcatggtgtggaagatgaacttccaaactattgcttccccttggacggtg

SEQ ID NO: 106724 - DNA, 80 bp, synthetic construct
  source 1..80: mol_type = other DNA
ccccgggtgcgtcccgtgtgagaggatgggaaatacatctcggtgctggataccggtctcaccaaacgtggccgtgcggc

SEQ ID NO: 106725 - DNA, 80 bp, synthetic construct
  source 1..80: mol_type = other DNA
cactactcccttcgggcagcagcgagtgttcaaagagaaggtggacacgaaagctcctgaaccgccagaaggagtgaagt

SEQ ID NO: 106726 - DNA, 80 bp, synthetic construct
  source 1..80: mol_type = other DNA
gggaaatcagggcgtacagcctggagctgtccatggtatcagtcagagagaaaagcatgtccgcggggacagcgcgcaag

SEQ ID NO: 106727 - DNA, 80 bp, synthetic construct
  source 1..80: mol_type = other DNA
taggagacgaatactgttatggaggacacacaaatgaagatgacaccaactctgctcattggactgaagctcgcatcatg

SEQ ID NO: 106728 - DNA, 80 bp, synthetic construct
  source 1..80: mol_type = other DNA
tcccagcagcggtcgggtattggttaacactgaaatacgcgaagcgcggaggagtgttttgggacacgccttctccaaaa

SEQ ID NO: 106729 - DNA, 80 bp, synthetic construct
  source 1..80: mol_type = other DNA
ggtaagttaaaaacaaatctttaattgcctgtaagtcatataagggggtttccaacgtattgtaacttgtgtccgtttgt

SEQ ID NO: 106730 - DNA, 80 bp, synthetic construct
  source 1..80: mol_type = other DNA
gtctggaatgtttgactcggttgttctctgtgagtgctatgatgcgggctgctcgtggtacgatctgcagcccgctgaga

SEQ ID NO: 106731 - DNA, 80 bp, synthetic construct
  source 1..80: mol_type = other DNA
agagcacaatggaaatgagatcgtcgacgtcatgtgccatgcaaccctcacccataggctgatgtctcctcatagggtgc

SEQ ID NO: 106732 - DNA, 80 bp, synthetic construct
  source 1..80: mol_type = other DNA
aggtcgtcaccagcacctgggtactggtggggggcattcttgctgctttggctgcgtactgtcttactacaggcagcgta

SEQ ID NO: 106733 - DNA, 80 bp, synthetic construct
  source 1..80: mol_type = other DNA
ggttttgggagatggttgatgaagagagggaaaaccatctgcgaggagagtgtcacacatgtatctacaacatgatggga

SEQ ID NO: 106734 - DNA, 80 bp, synthetic construct
  source 1..80: mol_type = other DNA
cagcccccctctagcagtggtctcggccactctataaagggggacaccccgagcgccgtgggtgatccatccccggatga

SEQ ID NO: 106735 - DNA, 80 bp, synthetic construct
  source 1..80: mol_type = other DNA
tcaatggagttgtagacatagccaatcaggctgtacaaaaacagattgcaaaccgcttagagccgcggcccgacgaagta

SEQ ID NO: 106736 - DNA, 80 bp, synthetic construct
  source 1..80: mol_type = other DNA
tggcgtccaatggcattcagtacactgacagaaaatggtgctttgatggaccacgcacaaatgccatactagaagataac

SEQ ID NO: 106737 - DNA, 80 bp, synthetic construct
  source 1..80: mol_type = other DNA
agcactcacagccccgcatatcccaccctggagctcaatctggcccaacagccgcttttgcgggtccagagggcaacgcg

SEQ ID NO: 106738 - DNA, 80 bp, synthetic construct
  source 1..80: mol_type = other DNA
cgatgccttaacccccgtcgctaatcgtaccccacctgaacaacttagaaaatgcaaattccaacaaccatggacattcc

SEQ ID NO: 106739 - DNA, 80 bp, synthetic construct
  source 1..80: mol_type = other DNA
tctattcaggcatttgcatacacactagaaagcagttcactagcctccacgccaccacccacaccgcctccccgcagaaa

SEQ ID NO: 106740 - DNA, 80 bp, synthetic construct
  source 1..80: mol_type = other DNA
atgatgggaggcttaatcctggctcaccccaacgggaaaaggagttggccggcgagtgaggtcttaactggagttggact

SEQ ID NO: 106741 - DNA, 80 bp, synthetic construct
  source 1..80: mol_type = other DNA
accgggctaggcaagcccgcgggttgcgcggggttcccgtggaggtctaggctccctgggcacccgtggaggtcgtggtg

SEQ ID NO: 106742 - DNA, 80 bp, synthetic construct
  source 1..80: mol_type = other DNA
agtgcgagcactggcgccgtgcccgactccgcgccggccccgtggccgcggcccgttggtcgaacccccggccccgccca

SEQ ID NO: 106743 - DNA, 80 bp, synthetic construct
  source 1..80: mol_type = other DNA
ccagtgatccagtctaacttcgctaaacttgagcagttttgggcgaacgacatgtggaatttcatcagcggcattcaata

SEQ ID NO: 106744 - DNA, 80 bp, synthetic construct
  source 1..80: mol_type = other DNA
gtccacactgccagggaaccccgccgtggggtccctcatggctttctctgctgctgtcaccagcccccttactacatctc

SEQ ID NO: 106745 - DNA, 80 bp, synthetic construct
  source 1..80: mol_type = other DNA
ggccgttgtccttggctggatgctgggcagcaacactggacaaaaagttatttttacagtgcttttgctcctcgttgctc

SEQ ID NO: 106746 - DNA, 80 bp, synthetic construct
  source 1..80: mol_type = other DNA
gtcaacgtatcaggcccatcagaggataagccctattgctggcattacgcgcccaagccttgctcaatcgtggaagcccg

SEQ ID NO: 106747 - DNA, 80 bp, synthetic construct
  source 1..80: mol_type = other DNA
catgggatacatcccgctcataggcgcccccgtgggtggcgtcgccagggctctggcgcatggcgtcagggctgtggagg

SEQ ID NO: 106748 - DNA, 80 bp, synthetic construct
  source 1..80: mol_type = other DNA
cttgggctgtatcatcaccagcctcactggtcgggacaaaaatcaagtggagggagagatccagattgtatccaccacaa

SEQ ID NO: 106749 - DNA, 80 bp, synthetic construct
  source 1..80: mol_type = other DNA
ctctccagctatgtgatagggtcgcagctcccctgcgagccagagcccgacgttatggtactcacctctatgctgactga

SEQ ID NO: 106750 - DNA, 80 bp, synthetic construct
  source 1..80: mol_type = other DNA
ggtcatcctggcccgcctcgccaaccgcgtcgagcgcggcgtgtcggagatcgactacacgaccgtggaggttggggccg

SEQ ID NO: 106751 - DNA, 80 bp, synthetic construct
  source 1..80: mol_type = other DNA
tactagtgtcggaattgttggcctcctgctgaccacagctatggcagcggaggtcactagacgtgggagtgcatactata

SEQ ID NO: 106752 - DNA, 80 bp, synthetic construct
  source 1..80: mol_type = other DNA
accaacacctctcctgtacaggctcggcgccgttcaaaatgagattgttaccacacatccaatcaccaaatacatcatga

SEQ ID NO: 106753 - DNA, 80 bp, synthetic construct
  source 1..80: mol_type = other DNA
tgcaggtcctccagcgaggcggggttgctggtcagggtgtacgggtactgccccagttgggcctggacgtgattcccgcg

SEQ ID NO: 106754 - DNA, 80 bp, synthetic construct
  source 1..80: mol_type = other DNA
atttcgagatgtacggggcagtatattcggtcaatccattagacctaccggccataattgagaggctacatgggctcgaa

SEQ ID NO: 106755 - DNA, 80 bp, synthetic construct
  source 1..80: mol_type = other DNA
aagatccatcgcacataaccgtcgagacggccaagcgccggcttgatcgtgggtcacccccctcacttgcaagctcttct

SEQ ID NO: 106756 - DNA, 80 bp, synthetic construct
  source 1..80: mol_type = other DNA
tttgctcgaattttatccagtaaggtcgaatccgctgcatttaccttgtgtacccgtaacctctcaggggggtgtccttt

SEQ ID NO: 106757 - DNA, 80 bp, synthetic construct
  source 1..80: mol_type = other DNA
tggcagagcccgaatctcccaaggagcagggtggtccttgcgggagacggcctgtttggggaagtcttacgctcaaatgt

SEQ ID NO: 106758 - DNA, 80 bp, synthetic construct
  source 1..80: mol_type = other DNA
tctgcgccgtcgctcaaagcgacttgcaccacccatcatgagtccccagacgccgacctcatagaagctaatctcttgtg

SEQ ID NO: 106759 - DNA, 80 bp, synthetic construct
  source 1..80: mol_type = other DNA
caacggcgcggccggacagggaggggtaggcctggaatttatcggtttgtctcgcccggtgagagaccttcgggtatgtt

SEQ ID NO: 106760 - DNA, 80 bp, synthetic construct
  source 1..80: mol_type = other DNA
actatgtccccgagagcgacgcggcagcaaaagtaacagcattgctgagctctctaaccgtcacccgattgcttcgccgg

SEQ ID NO: 106761 - DNA, 80 bp, synthetic construct
  source 1..80: mol_type = other DNA
cgaaccccgggtcggcgaggacgttggagtggatgccctccagggccgggaagcggatcttggtggccgcggccaggtga

SEQ ID NO: 106762 - DNA, 80 bp, synthetic construct
  source 1..80: mol_type = other DNA
cacctttgtcatctgcatcgcttggcacgtcaggggcaggctgccggccgctgccacctacgccgcatgcgggttgtggc

SEQ ID NO: 106763 - DNA, 80 bp, synthetic construct
  source 1..80: mol_type = other DNA
aaaagtcaaacgtttacttctacatatatgcaaggcgacatcgctaaacccatgacaatgaaagtctcgtttaatgccgc

SEQ ID NO: 106764 - DNA, 80 bp, synthetic construct
  source 1..80: mol_type = other DNA
tctgggtctgtgccaccagcctggttgtccgtggccccacggtcagtctggtatcaaactcatttgtggacgccggggcc

SEQ ID NO: 106765 - DNA, 80 bp, synthetic construct
  source 1..80: mol_type = other DNA
tgataacttcactcacggagcggctttactgtggtggtcctatgttcaacagcaagggacaacactgcggttaccgccgc

SEQ ID NO: 106766 - DNA, 80 bp, synthetic construct
  source 1..80: mol_type = other DNA
atgaaaccgtgctatgggtcttttgctaaacctactaatgtgaaaggcggacaggcaaaagtgaaaacagaagaaggcaa

SEQ ID NO: 106767 - DNA, 80 bp, synthetic construct
  source 1..80: mol_type = other DNA
tgcagttactggactgtcattatgactcagccttaaaggacgttaagctggccgcctccaaagttagcgcgcggctcctc

SEQ ID NO: 106768 - DNA, 80 bp, synthetic construct
  source 1..80: mol_type = other DNA
aaggtcaatcggtatctagcagcgctgttgctaatgctttaggattcatgcctaatgtaagtgcttaccctagaccaaac

SEQ ID NO: 106769 - DNA, 80 bp, synthetic construct
  source 1..80: mol_type = other DNA
cgtagagcgcactccccgaccaacagggtcgcgatgagctcaacggcaaaccactccttttcctttatggtcttaacggc

SEQ ID NO: 106770 - DNA, 80 bp, synthetic construct
  source 1..80: mol_type = other DNA
ctgacgcagcccttcttgggcttgtgtgccttcatggcaacccgaatattcgggcgaaggagcatcccagtgaatgaagc

SEQ ID NO: 106771 - DNA, 80 bp, synthetic construct
  source 1..80: mol_type = other DNA
cccggctgcgtacgcggcccaaggctacaaggtgctagtgctcaacccctccgtcgcagcgacattgggttttggggcat

SEQ ID NO: 106772 - DNA, 80 bp, synthetic construct
  source 1..80: mol_type = other DNA
tactgattccactaccattttaggcattggcacagtcctggaccaggcggagactgctggagcgcggctagtcgtgctcg

SEQ ID NO: 106773 - DNA, 80 bp, synthetic construct
  source 1..80: mol_type = other DNA
actactattggtcacagtgctgccaggaccacgggtagttttgccaacttgtttacccgaggccccaagcagaaccttca

SEQ ID NO: 106774 - DNA, 80 bp, synthetic construct
  source 1..80: mol_type = other DNA
caagggtataaagtactagtactaaacccttcggttgccgccactctgggttttggagcatacatgtctaaggcctatgg

SEQ ID NO: 106775 - DNA, 80 bp, synthetic construct
  source 1..80: mol_type = other DNA
ggacggggtgaattatgcaacagggaaccttcctggttgctccttttctatcttcctcttagcacttctctcgtgcttga

SEQ ID NO: 106776 - DNA, 80 bp, synthetic construct
  source 1..80: mol_type = other DNA
gccatcctccccccagcagtgactccggccaccgcacaggagagagcaccaccgacagccccggagacataccgacgggt

SEQ ID NO: 106777 - DNA, 80 bp, synthetic construct
  source 1..80: mol_type = other DNA
ctccgatagaaggtggtgctttgatggggaaaggaacaaccaggtgttggaggagaacatggacgtggagatctggacaa

SEQ ID NO: 106778 - DNA, 80 bp, synthetic construct
  source 1..80: mol_type = other DNA
caacagacgcgcggcctgatggggacgatcgtcactagcctcactggccgtgacaagaatgaggtagagggtgagataca

SEQ ID NO: 106779 - DNA, 80 bp, synthetic construct
  source 1..80: mol_type = other DNA
ttgtgagctggaaaaacaaagaactgaaatgtggcagcgggatttttatcacagacaacgtgcatacatggacagaacaa

SEQ ID NO: 106780 - DNA, 80 bp, synthetic construct
  source 1..80: mol_type = other DNA
tgggacgtcctccccacggtgacacagatggcaatgacagacacgactccatttggacaacagcgtgtttttaaagaaaa

SEQ ID NO: 106781 - DNA, 80 bp, synthetic construct
  source 1..80: mol_type = other DNA
ttgaaaaaacggaaaacttaccggaattatggactacggcttttacttcaactcatttagtccgcgcggccatgaatcaa

SEQ ID NO: 106782 - DNA, 80 bp, synthetic construct
  source 1..80: mol_type = other DNA
caccaaataatacccctggagatgttttatttgatctacaattaggacctcaattaaatcccttcctagccctactagcc

SEQ ID NO: 106783 - DNA, 80 bp, synthetic construct
  source 1..80: mol_type = other DNA
accggcctgactcgcatagacgcccacttcttgtcccaagccaaacaacaaggcctgaatcttgcatacctggtagctta

SEQ ID NO: 106784 - DNA, 80 bp, synthetic construct
  source 1..80: mol_type = other DNA
ttcgctgcggcgacatgtggatctgatggtgggcacggctaccttgtgctcagccctctacgttggagacctctgcggtg

SEQ ID NO: 106785 - DNA, 80 bp, synthetic construct
  source 1..80: mol_type = other DNA
cctgacgacgcgcaggttggctggcatcttttcccccggagcccagcagaatattcaactgatcaatagcaatggcagtt

SEQ ID NO: 106786 - DNA, 80 bp, synthetic construct
  source 1..80: mol_type = other DNA
ccaactgcagtatgataatcgacggagacgtggcgcgcggtcatttgcgtgacctcgagggcgctacgtccaccggcgcc

SEQ ID NO: 106787 - DNA, 80 bp, synthetic construct
  source 1..80: mol_type = other DNA
atatcaccgcggagacagcagcccggcgcctcgcacgggggtcccctccatctttggctagttcctcggcaagccagctc

SEQ ID NO: 106788 - DNA, 80 bp, synthetic construct
  source 1..80: mol_type = other DNA
tcccgcatgtactcccgcacgtacagctcggcgagcgtgttgctgaggaggggctggtacgcgatgaggaagccccccgt

SEQ ID NO: 106789 - DNA, 80 bp, synthetic construct
  source 1..80: mol_type = other DNA
aattggttgaaggtaatcgctgtgttattcctgtttgcaggggtagaggcaaccaccaccgtcggcagagcggccggccg

SEQ ID NO: 106790 - DNA, 80 bp, synthetic construct
  source 1..80: mol_type = other DNA
ctgtgatgtgggccttgaaaaactcaagatgaaaggaatgacatacacggtctgtgagggatcaaagtttgcttggaaga

SEQ ID NO: 106791 - DNA, 80 bp, synthetic construct
  source 1..80: mol_type = other DNA
ggtccaccgttagtgacagcgaggagcagagcgtggtctgctgttctatgtcgtactcttggaccggcgccctgataaca

SEQ ID NO: 106792 - DNA, 80 bp, synthetic construct
  source 1..80: mol_type = other DNA
gtactcggtgtagtcgtcgggaaacatgcaggtccacagcgcggccaaagcggcgctcggcagacacatgcgcccgagga

SEQ ID NO: 106793 - DNA, 80 bp, synthetic construct
  source 1..80: mol_type = other DNA
gcgtaccgcgattcatagcctgaccgaacgtctgtatgtgggcggcccgatgctgaacagcaaaggccagacctgcggct

SEQ ID NO: 106794 - DNA, 80 bp, synthetic construct
  source 1..80: mol_type = other DNA
ccgtaaagaagccatcactgaagttgaccgctcagcagcaaaacacgctaggaaggaaaggaatatcactggagggcatc

SEQ ID NO: 106795 - DNA, 80 bp, synthetic construct
  source 1..80: mol_type = other DNA
taacggggcaatagttgaggtagatacaagcgacagagttgcttttagatgtcgaatgcagggtatgggcccaggcgtgg

SEQ ID NO: 106796 - DNA, 80 bp, synthetic construct
  source 1..80: mol_type = other DNA
acgatgggcagtaacatcacgagggtggaatctgagaccaaggtggtcattctggactcttttgacccattgaaggcaga

SEQ ID NO: 106797 - DNA, 80 bp, synthetic construct
  source 1..80: mol_type = other DNA
gcatgcatgtcagctgatctggaagtaaccaccagcacctgggtgttgcttggaggggtccttgcggccctagcggccta

SEQ ID NO: 106798 - DNA, 80 bp, synthetic construct
  source 1..80: mol_type = other DNA
ggatagagcatcggctggacgcggcctgcaactggactagaggggagccctgcaacttggaacacagggaccgcacggag

SEQ ID NO: 106799 - DNA, 80 bp, synthetic construct
  source 1..80: mol_type = other DNA
agggtgcccactgggtggccctcgcggacatacaaaaatcggtccgtgtggttaaagagcagcacagagagatcatgtct

SEQ ID NO: 106800 - DNA, 80 bp, synthetic construct
  source 1..80: mol_type = other DNA
gcaactcgttgctacgccatcacaatctggtgtattccaccacttcacgcagtgcttgccaaaggcagaagaaagtcaca

SEQ ID NO: 106801 - DNA, 80 bp, synthetic construct
  source 1..80: mol_type = other DNA
atgagatggaagagtgcgccgcccacatcccctacctcgagcaggggatgcatttggcggagcagttcaggcagaaagct

SEQ ID NO: 106802 - DNA, 80 bp, synthetic construct
  source 1..80: mol_type = other DNA
tgggtagcgtggtaataactgggagagttatgctctcggggcaacccgctgtcatacccgaccgagaagtgctctatcag

SEQ ID NO: 106803 - DNA, 80 bp, synthetic construct
  source 1..80: mol_type = other DNA
catgaagatcgtgggccctaagacttgcatgaacacatggcagggaacctttccaatcaattgctacaccgagggtcagt

SEQ ID NO: 106804 - DNA, 80 bp, synthetic construct
  source 1..80: mol_type = other DNA
tctcaactgcaatgactcgcttaacaccgggtttatagcggcccttttctacgcacacaagttcaactcttcgggatgct

SEQ ID NO: 106805 - DNA, 80 bp, synthetic construct
  source 1..80: mol_type = other DNA
ccagcgccgaactacacgttcgcgttatggagggtgtcggcagaggagtatgtggaggtaaggcggctggtggatttcca

SEQ ID NO: 106806 - DNA, 80 bp, synthetic construct
  source 1..80: mol_type = other DNA
ttggtctcacttccagagcaacctgggcccagaacatatccacagcaattcaacaggtgagaagccttataggcaatgaa

SEQ ID NO: 106807 - DNA, 80 bp, synthetic construct
  source 1..80: mol_type = other DNA
cggacagactcaagcacacacgggggagcgctcttgtctcagggcaatgtttttattggtcaaactcaggcaaacagaaa

SEQ ID NO: 106808 - DNA, 80 bp, synthetic construct
  source 1..80: mol_type = other DNA
ccttagccataatgggagatgcttacggcttccagtattcgcccaagcaacgggtggatcgactgctcagcatgtggcgc

SEQ ID NO: 106809 - DNA, 80 bp, synthetic construct
  source 1..80: mol_type = other DNA
gggacggtttcatcctgtgtgtgctgctgtgctatccaggccttgtctttgacatcacaaaatggttgctggtcatgatg

SEQ ID NO: 106810 - DNA, 80 bp, synthetic construct
  source 1..80: mol_type = other DNA
gtttaccaagacctgcggcgcaccaccttgccgcattaggagagatttcaatgccagcgaggacttgttatgtccaacgg

SEQ ID NO: 106811 - DNA, 80 bp, synthetic construct
  source 1..80: mol_type = other DNA
aacagtattgtgtatgaggccgacgacgtcattctacacacacccggctgcgtgccttgtgttcaaaccgacaacacatc

SEQ ID NO: 106812 - DNA, 80 bp, synthetic construct
  source 1..80: mol_type = other DNA
ccgcgtttccccgcttatggggataaagaggatgttgaacagtttgttggacgggagaggaccaatacgtttcgtactgg

SEQ ID NO: 106813 - DNA, 80 bp, synthetic construct
  source 1..80: mol_type = other DNA
tctgactccaacgtgtcccaagtcctggccgacttggcgcatgccaggttcaaggccgacacgcaatccattgaaggcca

SEQ ID NO: 106814 - DNA, 80 bp, synthetic construct
  source 1..80: mol_type = other DNA
aggcaggagatgggcggcaacatcaccagggttgagtcagagaacaaagtggtgattctggactccttcgatccgcttgt

SEQ ID NO: 106815 - DNA, 80 bp, synthetic construct
  source 1..80: mol_type = other DNA
ctgttaagttatgtatttatgagattacaatcattgaaattccaacaaccaaagctccaaccacagttaggacaactagg

SEQ ID NO: 106816 - DNA, 80 bp, synthetic construct
  source 1..80: mol_type = other DNA
agcaactcattgttgcgataccacaacaaagtgtactgtactacatcaaagagcgcctcactgagggctaaaaaggtaac

SEQ ID NO: 106817 - DNA, 80 bp, synthetic construct
  source 1..80: mol_type = other DNA
tggccaagcagctgacctcacaaggcattaatgccgtcgcattttatagaggtgttgacgtagctgttatccccacctca

SEQ ID NO: 106818 - DNA, 80 bp, synthetic construct
  source 1..80: mol_type = other DNA
cagctctcggcgccatctctcaaagccacatgcaccgtgcatgcagaccatcctgatgccgagctgattgaggcgaattt

SEQ ID NO: 106819 - DNA, 80 bp, synthetic construct
  source 1..80: mol_type = other DNA
acgtggcagtgccacgagacggctcaaagtcctaatttttattgtgtgctcagctcgtttgagggtatttaaacacagcc

SEQ ID NO: 106820 - DNA, 80 bp, synthetic construct
  source 1..80: mol_type = other DNA
agcccgtgaccctgcagcaggtgctgccgagccgcgggatcaagcgcgagggcgagaacatgtacccgaccatgcagatc

SEQ ID NO: 106821 - DNA, 80 bp, synthetic construct
  source 1..80: mol_type = other DNA
cccgcgactccggtgagttttgctactttgaattgcccgaggatcatatcgagggcccggcgcacggcgtccggcttacc

SEQ ID NO: 106822 - DNA, 80 bp, synthetic construct
  source 1..80: mol_type = other DNA
gaggcctgcgacctgacgcccccacattctgccagatccaagtttggctatggggcaaaagacgttcggagccactcccg

SEQ ID NO: 106823 - DNA, 80 bp, synthetic construct
  source 1..80: mol_type = other DNA
ccgtctgtgggcctgtatactgcttcacccctagccctgtggttctcgggactacggataggcagggagcccccactttc

SEQ ID NO: 106824 - DNA, 80 bp, synthetic construct
  source 1..80: mol_type = other DNA
gcgaccgccaccccccgagacccgccgattttggtgtttacgaacgagtttgacgcggacgcccccccaagcaagcggtg

SEQ ID NO: 106825 - DNA, 80 bp, synthetic construct
  source 1..80: mol_type = other DNA
gctgcctgggaaacagtcaaacactcccctgtcaattcatggctgggaaacatcatccagtatgccccaaccatatgggt

SEQ ID NO: 106826 - DNA, 80 bp, synthetic construct
  source 1..80: mol_type = other DNA
ctggtcccactccactcttataccgcttgggggccgtctccaacgaggtcatcttcacgcaccccatcaccaagtacata

SEQ ID NO: 106827 - DNA, 80 bp, synthetic construct
  source 1..80: mol_type = other DNA
tcgctgggacggcagtcggcagtgtaggcctgggtaagattctggttgacatcctcgcaggctacggtgccggcgtggcc

SEQ ID NO: 106828 - DNA, 80 bp, synthetic construct
  source 1..80: mol_type = other DNA
aagccgtggaggatccaaagttttgggagatggtggatgaggagcgtgaggcgcatctccgtggagaatgcaacacctgc

SEQ ID NO: 106829 - DNA, 80 bp, synthetic construct
  source 1..80: mol_type = other DNA
gtggacgcagaaacccatgtcacgggtgccgttacgggctacaccgtccgcggtgtcaccagcatattttcacccggtgc

SEQ ID NO: 106830 - DNA, 80 bp, synthetic construct
  source 1..80: mol_type = other DNA
cgatgaaggctttccacctggacgataagtcggtggaaggggcggtcgttcataatgtaattggtggatgagaagtaggt

SEQ ID NO: 106831 - DNA, 80 bp, synthetic construct
  source 1..80: mol_type = other DNA
actcttcaggatgtccacagcgccttagttcgtgcaaacccctttctgattacgatcaggggtggggtcccatcacctat

SEQ ID NO: 106832 - DNA, 80 bp, synthetic construct
  source 1..80: mol_type = other DNA
ctatctaccaatcgtgtgacttgcagcccgaggcgcgcgcggcaatacggtcactcacccagcgcctatactgtggaggc

SEQ ID NO: 106833 - DNA, 80 bp, synthetic construct
  source 1..80: mol_type = other DNA
cgcgacgaggaagacttccgaacggtcccagccgcgtggaaggcgccagcccatccccaaggaccggcgcaccaccggca

SEQ ID NO: 106834 - DNA, 80 bp, synthetic construct
  source 1..80: mol_type = other DNA
tgccaccgctaagctgtgaggcggtgcgggctgggacagccgtttcccgggcaacgacatgcctggtttctgggacttcc

SEQ ID NO: 106835 - DNA, 80 bp, synthetic construct
  source 1..80: mol_type = other DNA
aggccaccgtgtgtgccagggctaaggccccgcctccatcctgggacaccatgtggaagtgtttaatccggcttaagccc

SEQ ID NO: 106836 - DNA, 80 bp, synthetic construct
  source 1..80: mol_type = other DNA
ttgctttacccccagtccggttgtggtgggcaccacggaccgtaagggtcttccgacctatacctggggagaaaacagca

SEQ ID NO: 106837 - DNA, 80 bp, synthetic construct
  source 1..80: mol_type = other DNA
ccgcccacaggacgtcaagttcccgggtggcggtcagatcgttggtggagtttacttgttgccgcgcaggggccccaggt

SEQ ID NO: 106838 - DNA, 80 bp, synthetic construct
  source 1..80: mol_type = other DNA
catagcaactgtgcctacgtgacggggttgactacagacaacttgaaggtcccctgccaattgcccgcaccagagttctt

SEQ ID NO: 106839 - DNA, 80 bp, synthetic construct
  source 1..80: mol_type = other DNA
ggcggtagcggacgcacggcggacacaataacaaacagaccgcggacacggagggagtcggttgggttgggcgtggacgc

SEQ ID NO: 106840 - DNA, 80 bp, synthetic construct
  source 1..80: mol_type = other DNA
tactcaccagcgcagcgggtcgatttccttgttaagacgtgggagtccaaaaagactcccatgggcttttcctatgacac

SEQ ID NO: 106841 - DNA, 80 bp, synthetic construct
  source 1..80: mol_type = other DNA
gggccgaggtcccgtgcaacccttacctgcgcatacaaaacaccggcgtgtcggtgctgtttcaggggttttttcatcgc

SEQ ID NO: 106842 - DNA, 80 bp, synthetic construct
  source 1..80: mol_type = other DNA
gcgcgacaaggaagacttctgagcgatcccagccgcgtggacgacgccagcccatcccgaaagatcggcgctccaccggc

SEQ ID NO: 106843 - DNA, 80 bp, synthetic construct
  source 1..80: mol_type = other DNA
gatgatacaaaaaaaatgccctctataagaatcattagtatatatttttctgcaacggatgggttgtcccgtaccttttc

SEQ ID NO: 106844 - DNA, 80 bp, synthetic construct
  source 1..80: mol_type = other DNA
ctacccggagacaccaggagctcttgcctcggccataaaggagacctttgaggagggaacttgtggcatagtgccccaaa

SEQ ID NO: 106845 - DNA, 80 bp, synthetic construct
  source 1..80: mol_type = other DNA
gtagacgtaatgtgccatgccactctgacccatagactaatgtcaccaaacagagtgcccaattacaacttattcgtgat

SEQ ID NO: 106846 - DNA, 80 bp, synthetic construct
  source 1..80: mol_type = other DNA
gcccgagctcctcttctatcactgcgagccgcccggcggcgcggtattgtaccccttctttctgctcaacaaacagaaga

SEQ ID NO: 106847 - DNA, 80 bp, synthetic construct
  source 1..80: mol_type = other DNA
aatcttgtgacttaccatcagaagcccgcagagtgatctcttcactgacgaaccgcttgtactgtggaggcccaatgttt

SEQ ID NO: 106848 - DNA, 80 bp, synthetic construct
  source 1..80: mol_type = other DNA
ctcaaaaggattgctttcaggccaaggacccatgaaattggtgatggccttcatagcatttctaagatttctagccatac

SEQ ID NO: 106849 - DNA, 80 bp, synthetic construct
  source 1..80: mol_type = other DNA
gccccgacgcacccccccaacgggtgctggcgcaaccacgcccatatctgctacgccaatcttatcgcgggtagggtcgt

SEQ ID NO: 106850 - DNA, 80 bp, synthetic construct
  source 1..80: mol_type = other DNA
cttgcgggcgctgccattggtagtattgggttggagaaggtcattgttgacattctggctggctacggggccggcgttgc

SEQ ID NO: 106851 - DNA, 80 bp, synthetic construct
  source 1..80: mol_type = other DNA
ctcaaacaaaacaagcaggggagaactatccttacctcgtagcgtaccaggccactgtgtgcgctagggcccaggcccct

SEQ ID NO: 106852 - DNA, 80 bp, synthetic construct
  source 1..80: mol_type = other DNA
gcaacatattaatgtcatcgagacaaatggtagctggcatgtcaacaggacagcactcaactgctttgacacctaccgca

SEQ ID NO: 106853 - DNA, 80 bp, synthetic construct
  source 1..80: mol_type = other DNA
ttgggccaaggtactcttggttcttttcctctttgctggagtagacgccgacacgcatgtcaccggaggcactgcgggca

SEQ ID NO: 106854 - DNA, 80 bp, synthetic construct
  source 1..80: mol_type = other DNA
caaatacattcaagccctaatgctcaaactcggagctcttacaggcacctacatctatgaccatctctctcccctgtctg

SEQ ID NO: 106855 - DNA, 80 bp, synthetic construct
  source 1..80: mol_type = other DNA
gggggtaatgatcagggcgatcggaacggcctggttcgggagaatggacgccttgctgggtcctgcggccccgagagccc

SEQ ID NO: 106856 - DNA, 80 bp, synthetic construct
  source 1..80: mol_type = other DNA
tagctgcctactgtttaacagtgggtagcgttgtcatctgcgggagagtaatcacatccggcagaccagcagttgtgcct

SEQ ID NO: 106857 - DNA, 80 bp, synthetic construct
  source 1..80: mol_type = other DNA
aacgggacaccgcatggcgtgggacatgatgatgaactggtcgccaacagccaccatgatcctggcatatctgatgcgca

SEQ ID NO: 106858 - DNA, 80 bp, synthetic construct
  source 1..80: mol_type = other DNA
acctggcttaaagcaaaacttgtaccatcgctccccggcgtcccttttctctcgtgccagcgagggtttagaggcgtctg

SEQ ID NO: 106859 - DNA, 80 bp, synthetic construct
  source 1..80: mol_type = other DNA
gactgttgggcaggtcccaagtaggagtgggagtcttccaagacggcgtgttccacacaatgtggcacgtcaccagggga

SEQ ID NO: 106860 - DNA, 80 bp, synthetic construct
  source 1..80: mol_type = other DNA
tcccaggagacgtcggacagtggttgtgaccgaaagtaccgtgggagaggctcttcgggagttggccattaagagctttg

SEQ ID NO: 106861 - DNA, 80 bp, synthetic construct
  source 1..80: mol_type = other DNA
cagaggcagtcatgggagcatcttatggcttccaatactcgcccaaggctcgagtggactacctcttgaaattgtggcgc

SEQ ID NO: 106862 - DNA, 80 bp, synthetic construct
  source 1..80: mol_type = other DNA
gcccaccgccgccgccccccggccccggcccccaccgcccggcgtgggcccggtgtgcgggtctgaccgctcccacgccc

SEQ ID NO: 106863 - DNA, 80 bp, synthetic construct
  source 1..80: mol_type = other DNA
ggatgcttatcctgcttggtcaagccgaagcagccctggagaggctgatcgttctgcacgcggcaagcgccgccagcgcg

SEQ ID NO: 106864 - DNA, 80 bp, synthetic construct
  source 1..80: mol_type = other DNA
cgcagattccattcgggtggccgctgtggcctcacctgaccaacctttacacggtggcccggaacgggaggccacagcgc

SEQ ID NO: 106865 - DNA, 80 bp, synthetic construct
  source 1..80: mol_type = other DNA
agctcctgatctagactccggctcctggtccacatgttccgaggaggggggttctgaagtttgttgctccatgtcctact

SEQ ID NO: 106866 - DNA, 80 bp, synthetic construct
  source 1..80: mol_type = other DNA
cctcccccgagtcttcggaatgtcttggcggccgtcaagaactgttatcccgaggcacggatgagcggccacggttgcct

SEQ ID NO: 106867 - DNA, 80 bp, synthetic construct
  source 1..80: mol_type = other DNA
catacaaggtggcatcagaagggtacagttatgcggataggagatggtgctttgaaggagtgaaaaacaaccaaatactg

SEQ ID NO: 106868 - DNA, 80 bp, synthetic construct
  source 1..80: mol_type = other DNA
agccacacaactcatggctttgctgggcgaggcatccctgcatggaccacagttctacaagaaagtgagcaagatggtca

SEQ ID NO: 106869 - DNA, 80 bp, synthetic construct
  source 1..80: mol_type = other DNA
ggcatagaccctaacgtccgcaccggggtaaggaccattaccaccggcggaaaaatcacctactccacttatggcaagtt

SEQ ID NO: 106870 - DNA, 80 bp, synthetic construct
  source 1..80: mol_type = other DNA
gtgtcttcactggattgactcacattgatgcccacttcctttcgcagaccaagcaggcaggagagaattttccgtatctc

SEQ ID NO: 106871 - DNA, 80 bp, synthetic construct
  source 1..80: mol_type = other DNA
aatgccgcgccccacgagatctctgcgagcgcatggccgcggccctgcgcgagtccccgggcgcgtcgttccgcggcatc

SEQ ID NO: 106872 - DNA, 80 bp, synthetic construct
  source 1..80: mol_type = other DNA
gggcaacaccatgacgtgctacataaaagcacaagcagcgtgtcgcgcagcaggcctcaccaattttgacatgctggttt

SEQ ID NO: 106873 - DNA, 80 bp, synthetic construct
  source 1..80: mol_type = other DNA
ttccggatcctggctccgcgatgtttgggattgggtttgcaccatccttactgactttaaaaattggctgtcctgcaaat

SEQ ID NO: 106874 - DNA, 80 bp, synthetic construct
  source 1..80: mol_type = other DNA
gcgcggcgtgcggtgggccgcggaggtgtccttggatgatgcatctaaaagcggtgacgcgggcgagcccccggaggtag

SEQ ID NO: 106875 - DNA, 80 bp, synthetic construct
  source 1..80: mol_type = other DNA
tctcctccgagccggacgcgggcgaccgcggcgccccagaagaagaaggcctcgagggccaggcccgggtcccgcccgcg

SEQ ID NO: 106876 - DNA, 80 bp, synthetic construct
  source 1..80: mol_type = other DNA
ccttgtccactggcctgatccacctgcaccagaacatcgttgatgtccaatacctgtacgggatatccccagccattaca

SEQ ID NO: 106877 - DNA, 80 bp, synthetic construct
  source 1..80: mol_type = other DNA
ttcctaaaagactgatattagttccacatagcgtttgttcgtttaaagtaaaatgcgagttggttggttgactccccata

SEQ ID NO: 106878 - DNA, 80 bp, synthetic construct
  source 1..80: mol_type = other DNA
gtgttataaaatgtttctggccaaacttatatggtggctgcagtacttcataaccaggaccgaggcaggattgcatgagt

SEQ ID NO: 106879 - DNA, 80 bp, synthetic construct
  source 1..80: mol_type = other DNA
gcgcgccggtggtcgcgcgcgtcgcggcctggatcagggaggcatgctctccctccggttggttggcggcccggcgcacc

SEQ ID NO: 106880 - DNA, 80 bp, synthetic construct
  source 1..80: mol_type = other DNA
tttcgatacgtgagcgatagggaaactccacgttggtgtccaaaggacacgtttattgttctgtcagctgggtatttaat

SEQ ID NO: 106881 - DNA, 80 bp, synthetic construct
  source 1..80: mol_type = other DNA
ccctagtggtcggggtcatatgcgccgcggttttgcggcgccatatcggcccgggcgaggtggccgtgcagtggatgaac

SEQ ID NO: 106882 - DNA, 80 bp, synthetic construct
  source 1..80: mol_type = other DNA
tgaggttaccaaaatcctcctcgccgcaattggtcccttatacctgttgcagcacgcgcttctgcgggtgccgtactatg

SEQ ID NO: 106883 - DNA, 80 bp, synthetic construct
  source 1..80: mol_type = other DNA
gatgtcctacacatggacaggcgccttgatcacgccatgcgccgcggaggaaagcaagctgcccatcaatgcgttgagca

SEQ ID NO: 106884 - DNA, 80 bp, synthetic construct
  source 1..80: mol_type = other DNA
ttcttcattttatgaaggaaacaaactctgcgatgactccgacaacaggacgcacacatttccccacccttcactacaat

SEQ ID NO: 106885 - DNA, 80 bp, synthetic construct
  source 1..80: mol_type = other DNA
cattttaaccattaacgaggatgggcaggagctaaagaggataaagagggagcggagggcttctgaggctacagaggagg

SEQ ID NO: 106886 - DNA, 80 bp, synthetic construct
  source 1..80: mol_type = other DNA
cagagagccaaggtaacgaggaggacgagcggaacctgagagccttcacggaggctatgaccaggtattcagcccctccc

SEQ ID NO: 106887 - DNA, 80 bp, synthetic construct
  source 1..80: mol_type = other DNA
ctcgctactccgctaccataacaaggtatattccaccacctcgaagagcgctgctgtgagggctaaaaaggtaacattcg

SEQ ID NO: 106888 - DNA, 80 bp, synthetic construct
  source 1..80: mol_type = other DNA
cacaggacaccgcatggcatgggatatgatgatgaactggtccccaacgaccacgatgatcgtagcgtacctcatgcgca

SEQ ID NO: 106889 - DNA, 80 bp, synthetic construct
  source 1..80: mol_type = other DNA
tcagaaccaactttgcaagggcaacatctatgccatggagattaacctccaggccaacctgtggaagagttttctgtact

SEQ ID NO: 106890 - DNA, 80 bp, synthetic construct
  source 1..80: mol_type = other DNA
cgaaggcgtttatatgtactggctatggaacctaatttaatagggctatgtcccgccggatggcatgctcggatacttgg

SEQ ID NO: 106891 - DNA, 80 bp, synthetic construct
  source 1..80: mol_type = other DNA
ggcacatcaacaggacggccttaaattgctttgactcttacaacacgggcttccttgcggctctctttgcctataagccc

SEQ ID NO: 106892 - DNA, 80 bp, synthetic construct
  source 1..80: mol_type = other DNA
agctgcccgtgccctggcccaccctcgtgaccaccctgacctacggcgtgcagtgcttcagccgctaccccgaccacatg

SEQ ID NO: 106893 - DNA, 80 bp, synthetic construct
  source 1..80: mol_type = other DNA
gctgaagtcaaaacttgtacctgctctgcctggcattcccttcctctcgtgtcaacgggggtttagggtggtctggcgag

SEQ ID NO: 106894 - DNA, 80 bp, synthetic construct
  source 1..80: mol_type = other DNA
gataatacagccagaaaatatcaaatatgaagttggagtatttgtccatggaaccacaacagccgagaaccatggaaact

SEQ ID NO: 106895 - DNA, 80 bp, synthetic construct
  source 1..80: mol_type = other DNA
gtgccattgatattggcaggcaagagctccggtgtggaagtggagtgtttatccacaacgatgtggaagcctggatggat

SEQ ID NO: 106896 - DNA, 80 bp, synthetic construct
  source 1..80: mol_type = other DNA
ccatgaggatcttgggtcccaagctgtgtagtaacacctggcacggctccttccccataaatgctagcaccaccggacct

SEQ ID NO: 106897 - DNA, 80 bp, synthetic construct
  source 1..80: mol_type = other DNA
cggaggtatttttcgacgaaaagacccacctcctccgtctcggcggcctgggccggcagcgacgcctcgggatcccggca

SEQ ID NO: 106898 - DNA, 80 bp, synthetic construct
  source 1..80: mol_type = other DNA
ctgagagcgaaggtgtcgaggaggactgccgagcacttagagctttcacggaagctatgacaaggtactcggcgcccccc

SEQ ID NO: 106899 - DNA, 80 bp, synthetic construct
  source 1..80: mol_type = other DNA
atgcctcagaaaacttggggtgccgcccttgcgagcctggagacaccgggccagaagtgtccgcgccaaacttttgtccc

SEQ ID NO: 106900 - DNA, 80 bp, synthetic construct
  source 1..80: mol_type = other DNA
agggaatcgccgggggtgccgtgcgtccccgaggactgacatctcgcgtccaccaccccgcatttaagtatcaccccagt

SEQ ID NO: 106901 - DNA, 80 bp, synthetic construct
  source 1..80: mol_type = other DNA
gcggtaactcaggttgttgatttcagcctggaccccaccttcactattgagaccacaacggtcccccaggacgcagtgtc

SEQ ID NO: 106902 - DNA, 80 bp, synthetic construct
  source 1..80: mol_type = other DNA
gtcgtccgcgcggcccacgcagtagcgaaacagcaggcttcgggccgtcggctcgttcacccgcccgaacatcaccgccg

SEQ ID NO: 106903 - DNA, 80 bp, synthetic construct
  source 1..80: mol_type = other DNA
tagggatcggtaccgtcttagatcaagcggagacggctggagcacgcctcacagtcctagctaccgctactccccctggt

SEQ ID NO: 106904 - DNA, 80 bp, synthetic construct
  source 1..80: mol_type = other DNA
tccgggaaacataaagctgcctgataataaaaacacctacgagtacatgaatggccgtgttacagccccggggttggtgg

SEQ ID NO: 106905 - DNA, 80 bp, synthetic construct
  source 1..80: mol_type = other DNA
ccaggcaacggtgtgcgctagagcgaaagctccccccccgtcgtgggatacgatgtggaaatgtctgcagaggcttaaac

SEQ ID NO: 106906 - DNA, 80 bp, synthetic construct
  source 1..80: mol_type = other DNA
tagatgggacgagaccgggcgattcccaaacccgaccaccgcttccaagaccggtaagaaggagcgacagggatacaagt

SEQ ID NO: 106907 - DNA, 80 bp, synthetic construct
  source 1..80: mol_type = other DNA
cgggcctcggaacccacccgaaacggccaacggacgtctgagccaggcctggctatccggagaaacagcacacgacttgg

SEQ ID NO: 106908 - DNA, 80 bp, synthetic construct
  source 1..80: mol_type = other DNA
gtcccacccccccggcgaccaccgcgaccgcggccgtagcaggcgccggcgctagccagccacagccacagacagagatg

SEQ ID NO: 106909 - DNA, 80 bp, synthetic construct
  source 1..80: mol_type = other DNA
gagaccgatgtcctcatgatgggaagcctgcgaccccctgtggggtggtggtatggctgcacgtggatgaacagtaccgg

SEQ ID NO: 106910 - DNA, 80 bp, synthetic construct
  source 1..80: mol_type = other DNA
aggatgcgtcacaaccatggcccagggaaaaccaaccttggattttgaactgaccaagacaacagccaaggaagtggctc

SEQ ID NO: 106911 - DNA, 80 bp, synthetic construct
  source 1..80: mol_type = other DNA
tcaggcgggccactcttgtgctcgtctggacacctggtcggaatcttccgtgccgcggtatgtacgcggtgggtagcaaa

SEQ ID NO: 106912 - DNA, 80 bp, synthetic construct
  source 1..80: mol_type = other DNA
aggactttccacgctacctgggaatcctgccgtggctgcaatgatggcgttcagcgccgcactcactagcccgctgccca

SEQ ID NO: 106913 - DNA, 80 bp, synthetic construct
  source 1..80: mol_type = other DNA
ggagacgtggtgcgcgggcgcccccaggacccggaggccgcggcatcccccgctcccttcgttgcggtgacaaacatcgg

SEQ ID NO: 106914 - DNA, 80 bp, synthetic construct
  source 1..80: mol_type = other DNA
taaccacatcaactccgtgtgggaggacttgctggacgacacaaccacccctattccaactactatcatggccaaaaacg

SEQ ID NO: 106915 - DNA, 80 bp, synthetic construct
  source 1..80: mol_type = other DNA
accatcaactttgacgagcgctcgcggtggggcggtcagctgaaaaccatcatgcataccaacatgcccaacgtgaacga

SEQ ID NO: 106916 - DNA, 80 bp, synthetic construct
  source 1..80: mol_type = other DNA
aaagccagaatatgcggcatatacctcttcaactgggcggtcaaaaccaagctcaaactcactccactgccttctgctgc

SEQ ID NO: 106917 - DNA, 80 bp, synthetic construct
  source 1..80: mol_type = other DNA
aaaccacccaggattgtaactgctctatctacactggtcacatcacagggcacaggatggcatgggatatgatgatgaac

SEQ ID NO: 106918 - DNA, 80 bp, synthetic construct
  source 1..80: mol_type = other DNA
ggcgagctgcacgtgggtctgttgtgggtagaggtgtgcgtggagggccccggcctcaccgcccccccacaggcggcgcg

SEQ ID NO: 106919 - DNA, 80 bp, synthetic construct
  source 1..80: mol_type = other DNA
gcgacgctgggctttacaggcttatttcagaccggggccaagcagaatatccacctgattaacaccaacgggagttggca

SEQ ID NO: 106920 - DNA, 80 bp, synthetic construct
  source 1..80: mol_type = other DNA
gaagagtcagtcagtgacaaatcaaaaggaaaaacttcttcaaaagagaaaaaaactcaaaaaaataactctcagagaaa

SEQ ID NO: 106921 - DNA, 80 bp, synthetic construct
  source 1..80: mol_type = other DNA
ttgcccgccgctgccaaactcgacctgtcgagttggtttacggtaggcgctggcgggggggacatttatcacagcgtgtc

SEQ ID NO: 106922 - DNA, 80 bp, synthetic construct
  source 1..80: mol_type = other DNA
aggtgggcaacgaaacccagggcattaccgcggaaattaccccgcaggcgagcaccaccgaagcgattctgccggaatat

SEQ ID NO: 106923 - DNA, 80 bp, synthetic construct
  source 1..80: mol_type = other DNA
cgaacgccgctgtcacagccaatcagcgcgccccatccccaaattttcacgccttatttgcatattaactcacacaaaaa

SEQ ID NO: 106924 - DNA, 80 bp, synthetic construct
  source 1..80: mol_type = other DNA
gacagcaccaaccggaatgccgatggggactggcaagcggccgtagctattcgcgggtgcggagtcgttcaactgaacat

SEQ ID NO: 106925 - DNA, 80 bp, synthetic construct
  source 1..80: mol_type = other DNA
agacaacgtaaagtgcccttgccaggttccatcacctgaatttttcacagaggtggacggggtgcgtctccatagatacg

SEQ ID NO: 106926 - DNA, 80 bp, synthetic construct
  source 1..80: mol_type = other DNA
gagaccccgcgttgaacagagcacggcccaacctgattgaagctgtagatcaggggaaggactagaggttagtggagacc

SEQ ID NO: 106927 - DNA, 80 bp, synthetic construct
  source 1..80: mol_type = other DNA
tgatcaggtagagcttcaacctcccccccagggggggggggtagctcccggttcgggctcgtggtcttggtctacttgct

SEQ ID NO: 106928 - DNA, 80 bp, synthetic construct
  source 1..80: mol_type = other DNA
gctacgatccagatgttagaattatcgagaaccatggaactgaggatgaattgccaaattattgttttcctcttggcgga

SEQ ID NO: 106929 - DNA, 80 bp, synthetic construct
  source 1..80: mol_type = other DNA
ggagggatttaatggcacagtgtttgcttctaccactcaattaaccttgcatggtgtgttttttcaaaattgcagcggta

SEQ ID NO: 106930 - DNA, 80 bp, synthetic construct
  source 1..80: mol_type = other DNA
ccacccaagcgggggggtttgacgccgagacccgtcgggtttcctgggaaaccctggtcgctcacggcccgagcctctac

SEQ ID NO: 106931 - DNA, 80 bp, synthetic construct
  source 1..80: mol_type = other DNA
ggggatagcgtcttgttggagcggggtcgtcgccgcagccactgtacacaggcgcggcgtgcttgggtgtcccggaccgt

SEQ ID NO: 106932 - DNA, 80 bp, synthetic construct
  source 1..80: mol_type = other DNA
ttcgtgtttgcatgctcgcgcgttcagtggcaggggggaagtatgtgcagatgatcctattgaccatcggccggtggttc

SEQ ID NO: 106933 - DNA, 80 bp, synthetic construct
  source 1..80: mol_type = other DNA
cagtagggggaacgcaaggccgcgccgccagcacgctcacgtccctctttaaacctgggccgtctcagagaatccagctt

SEQ ID NO: 106934 - DNA, 80 bp, synthetic construct
  source 1..80: mol_type = other DNA
gcctttaaataatgatgaggatcacgctcattggacagaagcaaaaatgctccttgacaatataaacacaccagaaggga

SEQ ID NO: 106935 - DNA, 80 bp, synthetic construct
  source 1..80: mol_type = other DNA
agagatgacatctgactggttgcaccgaggacctagagagttctgcattaaagttctctgcccttacatgcccaaggtta

SEQ ID NO: 106936 - DNA, 80 bp, synthetic construct
  source 1..80: mol_type = other DNA
cacaacccctatttcgacaacaatcatggccaaaaatgaggttttctctgtcaacccccagaaaggcggccgaaagccag

SEQ ID NO: 106937 - DNA, 80 bp, synthetic construct
  source 1..80: mol_type = other DNA
agaggcgactcccgttgtagtacagcacgttgaggtctggcagccctccggggtttctggcgctggggttcaggtcccgg

SEQ ID NO: 106938 - DNA, 80 bp, synthetic construct
  source 1..80: mol_type = other DNA
cgcgctctcagcggcggggcaggactggtaggggcaggagaggcatctacaggtttgtgactccaggagaacggccctcg

SEQ ID NO: 106939 - DNA, 80 bp, synthetic construct
  source 1..80: mol_type = other DNA
cgccgccacggcgtacgggtcatagacgccctgcgcgttacacaccacgggcagggagacgaacaaccccccggcgctgg

SEQ ID NO: 106940 - DNA, 80 bp, synthetic construct
  source 1..80: mol_type = other DNA
taccgccgaaagttcaattccagcggttgtcctgagaggcttgctaggtgccgtcccctcgacagttggcctcagggttt

SEQ ID NO: 106941 - DNA, 80 bp, synthetic construct
  source 1..80: mol_type = other DNA
ttcttccatgccccccctggaggtggagcctggggatccggatctcagcgacgggtcatggtcgacggtcagtagcgagg

SEQ ID NO: 106942 - DNA, 80 bp, synthetic construct
  source 1..80: mol_type = other DNA
tttatgaaggggtttaaggacgcccctcaaagcgttggccgagccagcggttcaagacaactggtgccggaggttaatac

SEQ ID NO: 106943 - DNA, 80 bp, synthetic construct
  source 1..80: mol_type = other DNA
tgttagggctctcgaagacggggtcaattatgcaacggggaaccttcccggttgctccttttctatcttcctcctggcac

SEQ ID NO: 106944 - DNA, 80 bp, synthetic construct
  source 1..80: mol_type = other DNA
tctgtggccctgtgtattgcttcacaccatcgccagtagtcgtaggcactactgatgataagggcgtgccaaccttcacc

SEQ ID NO: 106945 - DNA, 80 bp, synthetic construct
  source 1..80: mol_type = other DNA
tagcaggggcagcctgctttcgccccggcccatttcctatttgaaaggctcctcgggtggtccgttgttgtgccccgcgg

SEQ ID NO: 106946 - DNA, 80 bp, synthetic construct
  source 1..80: mol_type = other DNA
cggtgagcgctttcgcggccgtatattccgcggtttctgcacccgcgtatcgctcgatggcacgctggggtctctttggg

SEQ ID NO: 106947 - DNA, 80 bp, synthetic construct
  source 1..80: mol_type = other DNA
aagagaaattgcccatcagtccgttgagcaattccctcatacggcaccataacatggtgtactctaccacctcacgcagc

SEQ ID NO: 106948 - DNA, 80 bp, synthetic construct
  source 1..80: mol_type = other DNA
gaacgcacacgaacaccatggggtgtataatcagggccgtggtatcgatagcggggaacggttaatgcaacccacacaaa

SEQ ID NO: 106949 - DNA, 80 bp, synthetic construct
  source 1..80: mol_type = other DNA
tgttgcatccttccatcatcccgacgccgggctaccgcggcacccggtactacgccagccgccggcgcccagccagcaaa

SEQ ID NO: 106950 - DNA, 80 bp, synthetic construct
  source 1..80: mol_type = other DNA
gcgccacttccgccagcgcgccaccgtgtttctcgtcccccggcgccacggcaagacctggtttctggtgcccctcatcg

SEQ ID NO: 106951 - DNA, 80 bp, synthetic construct
  source 1..80: mol_type = other DNA
catatttttttcaaaaatcacaagatccccgtgtcctgccgagccaaccgcacccgcgcagatgaactttttactttaag

SEQ ID NO: 106952 - DNA, 80 bp, synthetic construct
  source 1..80: mol_type = other DNA
tttgaaaagactgagaaccgtctgcatgatgcataatgcggacgggcggcatgctgaaacccattactcctaaaactgct

SEQ ID NO: 106953 - DNA, 80 bp, synthetic construct
  source 1..80: mol_type = other DNA
accattgatctaatgaataacgccattattgagcactacctgttagtaggaagacaaaatggagtgctggaaagcgacat

SEQ ID NO: 106954 - DNA, 80 bp, synthetic construct
  source 1..80: mol_type = other DNA
tttgatgataaaggtgaattagtggcctggtataaaaacaatgataagcgcaccctttggacaactctggatccatctcc

SEQ ID NO: 106955 - DNA, 80 bp, synthetic construct
  source 1..80: mol_type = other DNA
gccctgccatcaactcgtcccactccagtgcctcccccccgcaggaagaaaacaattttgctcgatgggtcgaacgtgtc

SEQ ID NO: 106956 - DNA, 80 bp, synthetic construct
  source 1..80: mol_type = other DNA
tgagttcctggatacgtctttgttgagtgaagaccaagggtccccggactcggaacctgaaagaaagttcaacagaatca

SEQ ID NO: 106957 - DNA, 80 bp, synthetic construct
  source 1..80: mol_type = other DNA
ggacaccgccgacgccacagccccaatacctgaggaagagctcgctgattcggagacgggttccatgtcttccatgcccc

SEQ ID NO: 106958 - DNA, 80 bp, synthetic construct
  source 1..80: mol_type = other DNA
gaagccgcgcagggtttttcctcactgttcacccagggctcccgccagaacttgcagctcattaacaccaatgggagctg

SEQ ID NO: 106959 - DNA, 80 bp, synthetic construct
  source 1..80: mol_type = other DNA
tgcggttgggcagggtggctcctgtccccccgcggctctcgccctaattgtggccctaatgacccccggcggaggtcccg

SEQ ID NO: 106960 - DNA, 80 bp, synthetic construct
  source 1..80: mol_type = other DNA
tactacgttcccaccaaacccccttgtatggcatttggaaagagctgagaccgcagcaactgcagaaaggccgtttgggg

SEQ ID NO: 106961 - DNA, 80 bp, synthetic construct
  source 1..80: mol_type = other DNA
catgcaaaaagaacatggaaggaaaagtcgtgcagccagaaaatttggaatacaccatcgtgataacacctcactcagga

SEQ ID NO: 106962 - DNA, 80 bp, synthetic construct
  source 1..80: mol_type = other DNA
gcaacagagacttcttagagggagtgtctggagcaacatgggtggatttggttctcgaaggcgacagctgtgtgaccatc

SEQ ID NO: 106963 - DNA, 80 bp, synthetic construct
  source 1..80: mol_type = other DNA
ctatctcctctgtccgactgggcgtctgacggcttgcgagatctagctgtcgccgtagagcccgtcatcttttctcctat

SEQ ID NO: 106964 - DNA, 80 bp, synthetic construct
  source 1..80: mol_type = other DNA
caccgagcggttatacgtaggaggccccatgtttaattctcggggccaatcctgcggctaccgccggtgcagggccagcg

SEQ ID NO: 106965 - DNA, 80 bp, synthetic construct
  source 1..80: mol_type = other DNA
gaaccaaacatggcagatcgaaaaagcatcactcatagaagtcaagacatgcctctggccaaagacccacacattatgga

SEQ ID NO: 106966 - DNA, 80 bp, synthetic construct
  source 1..80: mol_type = other DNA
aagccttataggcgatgaagaatttctggactacatgccttcgatgaagagattcaggaaggaggaggagtcagagggag

SEQ ID NO: 106967 - DNA, 80 bp, synthetic construct
  source 1..80: mol_type = other DNA
aaattatggaggtgacagccaagtggttatggggtttcctttccagaaacaaaaaacccagaatctgcacaagagaggag

SEQ ID NO: 106968 - DNA, 80 bp, synthetic construct
  source 1..80: mol_type = other DNA
aacacaatcggggcgtcggcgtcccaaatttacttcaaacgacattgatatgcgtacagccctttgaacatccacgtggg

SEQ ID NO: 106969 - DNA, 80 bp, synthetic construct
  source 1..80: mol_type = other DNA
ctccatggccttagcgcattttcactccacagctactctccaggtgaaatcaatagggtggccgcatgcctcaggaaact

SEQ ID NO: 106970 - DNA, 80 bp, synthetic construct
  source 1..80: mol_type = other DNA
ggattggcctagacccggcagtgctgagtcccaggtgccctgcctgcccggctctgttgacctgtacctcgtcacccgga

SEQ ID NO: 106971 - DNA, 80 bp, synthetic construct
  source 1..80: mol_type = other DNA
ccgcccgcttgggtcaggaggtgctgctgggcccagcagacgagtacacttccaaggggtggaaacttcttgcgcccatc

SEQ ID NO: 106972 - DNA, 80 bp, synthetic construct
  source 1..80: mol_type = other DNA
tggatgcaggaaatgacccagaagacattgactgttggtgtgacaaacaacccatgtatgttcactatggaaggtgcaca

SEQ ID NO: 106973 - DNA, 80 bp, synthetic construct
  source 1..80: mol_type = other DNA
tgaaatcaatagggtggccgcatgcctcagaaaacttggggtcccgcccttgcgagcttggagacaccgggcccggagcg

SEQ ID NO: 106974 - DNA, 80 bp, synthetic construct
  source 1..80: mol_type = other DNA
tactgtttgtaaatactagttttaatggagactactttggtataagaaaggatgggtttggaatgaaacagtacaatctt

SEQ ID NO: 106975 - DNA, 80 bp, synthetic construct
  source 1..80: mol_type = other DNA
gtgtcggtcgtggtggaaaggcaccgggagaaggctgcggcctcgttccaggagaacccagtgtccccaacagacccggg

SEQ ID NO: 106976 - DNA, 80 bp, synthetic construct
  source 1..80: mol_type = other DNA
tctgaaacgcacgggggagggtgagatgcatgtactcgtgttggcggaccagatccaggcgccaaaaggtgtaaatgtgt

SEQ ID NO: 106977 - DNA, 80 bp, synthetic construct
  source 1..80: mol_type = other DNA
ccacgctacgttgactcaccggttgatgtctccacaccgagtccccaactacaacctatttgtgatggatgaagcccact

SEQ ID NO: 106978 - DNA, 80 bp, synthetic construct
  source 1..80: mol_type = other DNA
atgtcagtaggtgctgggtccagatcacccccacactgtcagccccgagcctcggagcggtcacggctcctcttcggagg

SEQ ID NO: 106979 - DNA, 80 bp, synthetic construct
  source 1..80: mol_type = other DNA
gggtccggcatagtgggctgggctctgaagtgggaggttgttgtcctcgtgttcctccttttggcggatgcccgcgtgtg

SEQ ID NO: 106980 - DNA, 80 bp, synthetic construct
  source 1..80: mol_type = other DNA
ggtagctggctgcgggacgtgtgggactgggtaagcaccatcttacaagactttctggcgtggatgaaggctaaagtact

SEQ ID NO: 106981 - DNA, 80 bp, synthetic construct
  source 1..80: mol_type = other DNA
gttatcgtgccttactacaccagcctcagcaattcaagtcaggaatgcctctgggatctaccaccttaccaatgactgct

SEQ ID NO: 106982 - DNA, 80 bp, synthetic construct
  source 1..80: mol_type = other DNA
caatggctgtggactatttggcaaaggaagtatagacacgtgtgccaacttcacctgctccctgaaagcgatgggccgga

SEQ ID NO: 106983 - DNA, 80 bp, synthetic construct
  source 1..80: mol_type = other DNA
ggactggtgtacggactgtcaccaccggggatcccatcacctactccacttatggcaagttcctcgcagacggaggctgc

SEQ ID NO: 106984 - DNA, 80 bp, synthetic construct
  source 1..80: mol_type = other DNA
ccatagcgggcacccaattaggcttgtggttacaatcgcagtgcagggggatcagtatcatcttggcctgatcctgtctg

SEQ ID NO: 106985 - DNA, 80 bp, synthetic construct
  source 1..80: mol_type = other DNA
atgcaacaaatgccaatggcctcaaaaatgctttgcaacaggatggtgaatcagaaaatgatcaagaatcaaaaattcca

SEQ ID NO: 106986 - DNA, 80 bp, synthetic construct
  source 1..80: mol_type = other DNA
cctcacgcagtgcttgccaaaggcagaagaaagtcacatttgacagactgcaggttctggacagctattaccaggacgtg

SEQ ID NO: 106987 - DNA, 80 bp, synthetic construct
  source 1..80: mol_type = other DNA
cttgtctacattgcctggtaaccctgccgtcgcagccctgatgtcattctcagcctcgctaaccagcccaatgacaacag

SEQ ID NO: 106988 - DNA, 80 bp, synthetic construct
  source 1..80: mol_type = other DNA
aaagacaccatttttctctcaaacatgtctgcgggttcctgcattaaacacaaaataaaataacaaaaaaaaacatttaa

SEQ ID NO: 106989 - DNA, 80 bp, synthetic construct
  source 1..80: mol_type = other DNA
acgcttcaaagcgtgtgactgaaatactgggttccctgaccatcaccagcctgttgaggagactgcactcctgggtcacg

SEQ ID NO: 106990 - DNA, 80 bp, synthetic construct
  source 1..80: mol_type = other DNA
aggctatgaccagatactcggctcctccaggggacgaaccgcatcccgagtacgacctggagctcataacatcatgctca

SEQ ID NO: 106991 - DNA, 80 bp, synthetic construct
  source 1..80: mol_type = other DNA
cttctgatctatctcaacatcagctacaaggcaccgagcgccgaagtatgtagctggtggtggggaagaacacaggatct

SEQ ID NO: 106992 - DNA, 80 bp, synthetic construct
  source 1..80: mol_type = other DNA
taaacacatgtggaattttatcagcggggtgcaatatctcgccggactgtccacgttgcctggtaatccagctgttgcat

SEQ ID NO: 106993 - DNA, 80 bp, synthetic construct
  source 1..80: mol_type = other DNA
gtcgtctccccgcgggaacgtaagcccctcgcggtccggcgcggccgcgaatgttacccaggcccgggaccgcaacagcg

SEQ ID NO: 106994 - DNA, 80 bp, synthetic construct
  source 1..80: mol_type = other DNA
gccccccggggaccccccacatccagaatatgacttggagctcataacatcctgctcctccaatgtatcggttgcgcttg

SEQ ID NO: 106995 - DNA, 80 bp, synthetic construct
  source 1..80: mol_type = other DNA
tctcctgagcgacacccaagggtgcagcttactcgcgatagtcgtgcggcgtttgtgcctcggcaaaatatgtttcgaga

SEQ ID NO: 106996 - DNA, 80 bp, synthetic construct
  source 1..80: mol_type = other DNA
aagttgcagcagggcgtcccggcagccggcgggcgattggtcgtaatccaggataaagacgtgcatgggacggaggcgtt

SEQ ID NO: 106997 - DNA, 80 bp, synthetic construct
  source 1..80: mol_type = other DNA
ttcgaaccatgagatgtactgggtcagtggagccgctgggaatgtggtacacgctgtaaacatgaccagtcaagtcttgc

SEQ ID NO: 106998 - DNA, 80 bp, synthetic construct
  source 1..80: mol_type = other DNA
ctggcgatcctccgcctccaccctaatctcttcgccacgggcaaatttggccagagcctggactctatacagaagcggtt

SEQ ID NO: 106999 - DNA, 80 bp, synthetic construct
  source 1..80: mol_type = other DNA
ggcatagatcccaacatccgcaccggggtgagaaccatcaccactggtggaaaaatcacctattccacctatggcaaatt

SEQ ID NO: 107000 - DNA, 80 bp, synthetic construct
  source 1..80: mol_type = other DNA
tgaagatcgctggtcctaggacgtgcagtaatgtctggcatggcaccttcccgataaatgccaccacgactggacctagt

SEQ ID NO: 107001 - DNA, 80 bp, synthetic construct
  source 1..80: mol_type = other DNA
aaaggcgcgccagccccagggcaggcactgggctcagcccggatacccttggcctctttatggaagcgaaggctgtgggt

SEQ ID NO: 107002 - DNA, 80 bp, synthetic construct
  source 1..80: mol_type = other DNA
ctggcctccaagcttaggggtatgggtctcaatgcggtcgaatactacagaggtcttgatgtttctgttatcccggccac

SEQ ID NO: 107003 - DNA, 80 bp, synthetic construct
  source 1..80: mol_type = other DNA
atcctaccagctgatgttggatgcactgggagacagaagtcgctacttttctatgtggaatcaagccgtagatagttatg

SEQ ID NO: 107004 - DNA, 80 bp, synthetic construct
  source 1..80: mol_type = other DNA
tgctacatttgaggctgattactatggttcaaacaacaacagcgaatcaaaacactacagagtcaaggttttcaaacaaa

SEQ ID NO: 107005 - DNA, 80 bp, synthetic construct
  source 1..80: mol_type = other DNA
tgcttgtccgcaatatcatcggtggcaaatatgtccaagccctgttgttgaggattggcgcttggacaggcacctacttg

SEQ ID NO: 107006 - DNA, 80 bp, synthetic construct
  source 1..80: mol_type = other DNA
acgggggagggtgagatgcatgtactcgtgttggcggaccagatccaggcgccaaaaggtgtaaatgtgttccgtggagc

SEQ ID NO: 107007 - DNA, 80 bp, synthetic construct
  source 1..80: mol_type = other DNA
cgtccctgagtccgacgcggcacgccgcgtgaccaccatactatcatccctcactgtgacatcccttctcagacgcctcc

SEQ ID NO: 107008 - DNA, 80 bp, synthetic construct
  source 1..80: mol_type = other DNA
tacatgagccctgaacaaaggaagctggcctgggctataatggaaatgacatacaagaacaaagtggttaaggtgctgag

SEQ ID NO: 107009 - DNA, 80 bp, synthetic construct
  source 1..80: mol_type = other DNA
acttacggatggaatctcgtacggctacaaagtggcgtggatgtgttttttacacctccagagaaatgtgacactttgct

SEQ ID NO: 107010 - DNA, 80 bp, synthetic construct
  source 1..80: mol_type = other DNA
gcgggacatctacctatcctgcaacttggactcagaagccagagtcgccatacagtctctcactgagaggctatatgtgg

SEQ ID NO: 107011 - DNA, 80 bp, synthetic construct
  source 1..80: mol_type = other DNA
ttgcgggctcgccgacctcatggggtatatccccgtcctaggtggtcccttaggtggcgtcgcggcagccttagcgcatg

SEQ ID NO: 107012 - DNA, 80 bp, synthetic construct
  source 1..80: mol_type = other DNA
tgctgctgctattcgccggcgtcgacgcgagtactacgtcactgggggaaccgccggccgcgccacggctggatttacta

SEQ ID NO: 107013 - DNA, 80 bp, synthetic construct
  source 1..80: mol_type = other DNA
agctcgccacgaagaccttcggcagctccgaaccgtcggccgccgatagcggcatggcgaccgctcctcccgaccagtcc

SEQ ID NO: 107014 - DNA, 80 bp, synthetic construct
  source 1..80: mol_type = other DNA
ctgggggcccggtttctggaatttgaggctctaggattcttgaatgaagaccactggcttggcagagaaaattcaggagg

SEQ ID NO: 107015 - DNA, 80 bp, synthetic construct
  source 1..80: mol_type = other DNA
ggccagccgcacgcgggccgccgggtacctggatgtgcttcttaccgttcgtctcgctcgctcccaacacggacagtctg

SEQ ID NO: 107016 - DNA, 80 bp, synthetic construct
  source 1..80: mol_type = other DNA
acggagaggtcgcggggtctatgggctgcggcatcttggtcatactgaccatcatgacattgtctccacggtacaagtac

SEQ ID NO: 107017 - DNA, 80 bp, synthetic construct
  source 1..80: mol_type = other DNA
accttcacggtcccctcctgtgccgccacctcggaagaagcggacggtggtcctcaccgaatcaaccgtatccactgcct

SEQ ID NO: 107018 - DNA, 80 bp, synthetic construct
  source 1..80: mol_type = other DNA
tgatccgtctcaaacccacccttcatgggccaacacccttgctatacagactgggcgccgttcagaatgaaatcaccctg

SEQ ID NO: 107019 - DNA, 80 bp, synthetic construct
  source 1..80: mol_type = other DNA
tagggctcttgaggacggagtgaactatgcaacagggaatcttcctggttgctctttttctatctttctccttgctctct

SEQ ID NO: 107020 - DNA, 80 bp, synthetic construct
  source 1..80: mol_type = other DNA
aacaatcaagcagacgtggttatgtataccgaaaatattcatctggaaactccagacactcatgtggtgtacaagccagg

SEQ ID NO: 107021 - DNA, 80 bp, synthetic construct
  source 1..80: mol_type = other DNA
cgcccgtgaccacacgggtaaacgagtatattacctgaccagagacccgaccactcctttcgccagagctgcctgggaga

SEQ ID NO: 107022 - DNA, 80 bp, synthetic construct
  source 1..80: mol_type = other DNA
gtgaaggagaccgcctgcttggccaagtcctacgcccaaatgtggttgcttctctacttccataggagagacctacgtct

SEQ ID NO: 107023 - DNA, 80 bp, synthetic construct
  source 1..80: mol_type = other DNA
catcgtccaacagcacggtggagtccaaagcagagctctgcaaaaacacaatacagtcaagctctccacgggttttcgcc

SEQ ID NO: 107024 - DNA, 80 bp, synthetic construct
  source 1..80: mol_type = other DNA
gtcgtggcaacagatgctctaatgacgggcttcaccggcgactttgactcggtgatcgactgtaatacatgtgtcaccca

SEQ ID NO: 107025 - DNA, 80 bp, synthetic construct
  source 1..80: mol_type = other DNA
gtcttgtttggacgttttttatgcgggaacaagggggcttaccggttacactgtccgctcgctatggggttcgtctgtct

SEQ ID NO: 107026 - DNA, 80 bp, synthetic construct
  source 1..80: mol_type = other DNA
catttcttcggaatactccaagcccaggaggagctcgggagagcactggacttcgacatttacggagtcacatattcaat

SEQ ID NO: 107027 - DNA, 80 bp, synthetic construct
  source 1..80: mol_type = other DNA
tgagcgcgttctcgcttcacggttactctccaactgagctcaacagagtggcggtggctctcagaaagcttgggatcccc

SEQ ID NO: 107028 - DNA, 80 bp, synthetic construct
  source 1..80: mol_type = other DNA
gaggttcagatcgtgtcaactgctgcccagaccttcttagcaacctgcatcaacggggtgtgctggaccgtctaccacgg

SEQ ID NO: 107029 - DNA, 80 bp, synthetic construct
  source 1..80: mol_type = other DNA
gggcgtcctagcaggccttgcgttctttgggatgcaggccaactgggctaaggtggttctgattctgtttctctttgcgg

SEQ ID NO: 107030 - DNA, 80 bp, synthetic construct
  source 1..80: mol_type = other DNA
aataaaaaggatcaaggaggagcataattcaacatggcactatgatgacgaaaacccctacaaaacgtgggcttaccatg

SEQ ID NO: 107031 - DNA, 80 bp, synthetic construct
  source 1..80: mol_type = other DNA
atcaaatgggagtacgtagtacttgcatttttattgctggctgacgcgcgtgtgtgcgcatgtctttggctgatgttact

SEQ ID NO: 107032 - DNA, 80 bp, synthetic construct
  source 1..80: mol_type = other DNA
ggcaccctgggcctggaatgcagcccgcgcaccggcctggattttaacgaaatggaaaccattctgctgaccatggaaac

SEQ ID NO: 107033 - DNA, 80 bp, synthetic construct
  source 1..80: mol_type = other DNA
aactacattacgcccccagcggttttgcgccaccttggctttcgaggggttctctttcaacgctcgttgcccactttcgc

SEQ ID NO: 107034 - DNA, 80 bp, synthetic construct
  source 1..80: mol_type = other DNA
gagcggcattaacatggaaacctgcaccctgattgcgatggaaaccgatctgggcgaaatggaaacctgcgatgataccg

SEQ ID NO: 107035 - DNA, 80 bp, synthetic construct
  source 1..80: mol_type = other DNA
ttggccagcttttcaccctctcccctaggcgccactggacaacacaagactgtaattgctccatctacccaggacatgtg

SEQ ID NO: 107036 - DNA, 80 bp, synthetic construct
  source 1..80: mol_type = other DNA
agaaggccgaactgggaggccatgaaggcccctggctttagccaggagggtggagagggaaaattggcattccctctcag

SEQ ID NO: 107037 - DNA, 80 bp, synthetic construct
  source 1..80: mol_type = other DNA
gattcattcgagcctctgagagccgaaactgacgataccgagctctcggtagctgcagagtgtttcaagaaacctcccaa

SEQ ID NO: 107038 - DNA, 80 bp, synthetic construct
  source 1..80: mol_type = other DNA
tcgtctgcggcgacgaccttgtcgttatctgtgagagtgcgggggttcaggaggatgaggccaacctgagagccttcacg

SEQ ID NO: 107039 - DNA, 80 bp, synthetic construct
  source 1..80: mol_type = other DNA
cagtcttaaaggacgtcaagcaggcagcctccacggttagcgctaagctcctctccatcgaggaggcatgtgcgctgacc

SEQ ID NO: 107040 - DNA, 80 bp, synthetic construct
  source 1..80: mol_type = other DNA
cctcatgtggtggaaccagtacactatatgtagatgcgaggccgcccttcaagtgtgggtcccccccttacttgcacgcg

SEQ ID NO: 107041 - DNA, 80 bp, synthetic construct
  source 1..80: mol_type = other DNA
ggtggcggctgagatggaagaggcattgcgaggtctcccagtgaggtatcaaacccctgctattaaggctgaacacacag

SEQ ID NO: 107042 - DNA, 80 bp, synthetic construct
  source 1..80: mol_type = other DNA
gtgcggggggtgtgtttattccgtggggcggccgtgtgcctcgcagcccgtggagattgccaagtttggtctggtcgttc

SEQ ID NO: 107043 - DNA, 80 bp, synthetic construct
  source 1..80: mol_type = other DNA
cggccgttatttctgcataggagcaggcgggcatccttgtcagcggcattggaaattagtttttcgtccaacgctggttt

SEQ ID NO: 107044 - DNA, 80 bp, synthetic construct
  source 1..80: mol_type = other DNA
tggcataggcacagtcctggaccaagcggagaccgctggagtgcgcctcaccgtgctcgcgactgctactccgccagggt

SEQ ID NO: 107045 - DNA, 80 bp, synthetic construct
  source 1..80: mol_type = other DNA
gggaaagccatccccctggaatacatcaagggggggagacatctgatattctgccactcaaagaagaagtgtgatgagct

SEQ ID NO: 107046 - DNA, 80 bp, synthetic construct
  source 1..80: mol_type = other DNA
gcttgcgagtgccccgggaggtctcgtagaccgtgcaccatgagcacgaatcctaaacctcaaagaaaaaccaaacgtaa

SEQ ID NO: 107047 - DNA, 80 bp, synthetic construct
  source 1..80: mol_type = other DNA
agttctacacctatacctacaaccatcatggctaagaatgaggtgttctgtgtggaccccaggaagggtggtcgtaagcc

SEQ ID NO: 107048 - DNA, 80 bp, synthetic construct
  source 1..80: mol_type = other DNA
atgactggatattcgaacggcttgcacgcagaagtagacctcgtatgtgcagcagagaagaattcattgcaaaggtgaaa

SEQ ID NO: 107049 - DNA, 80 bp, synthetic construct
  source 1..80: mol_type = other DNA
ttacatcttgcagtacagcctgcttaagacgccatatttcgtgcgagcgcacattctcctgcgcgtttgcatgttccttc

SEQ ID NO: 107050 - DNA, 80 bp, synthetic construct
  source 1..80: mol_type = other DNA
tttgaacacagaatcctactacatcatgtcagtgggttccaagcactttctggtgcacagagaatggttcaatgacttgg

SEQ ID NO: 107051 - DNA, 80 bp, synthetic construct
  source 1..80: mol_type = other DNA
aactccaagggtcaatcatgcggataccgcagatgccgagcgagtggcgtgttgaccactagcatgggcaataccctcac

SEQ ID NO: 107052 - DNA, 80 bp, synthetic construct
  source 1..80: mol_type = other DNA
agcattcgttactcagagttggcgccgctatatgacaccacccgggtttatctagtggataacaaatcggcagacattgc

SEQ ID NO: 107053 - DNA, 80 bp, synthetic construct
  source 1..80: mol_type = other DNA
acaggaaacaggagacacaactccaagtgcatactctatgtcattttcatgggactggtctggccacaactacattaatg

SEQ ID NO: 107054 - DNA, 80 bp, synthetic construct
  source 1..80: mol_type = other DNA
ctggtaaaccagcacacagggatactggatactggcaagagccaccttgtcggttacttcttcagctctaagactgtcaa

SEQ ID NO: 107055 - DNA, 80 bp, synthetic construct
  source 1..80: mol_type = other DNA
aggcgtttcacccagacatagtactcttgcctggatgcggcgttgactttacagagagcagattaagtaacgttcttggc

SEQ ID NO: 107056 - DNA, 80 bp, synthetic construct
  source 1..80: mol_type = other DNA
cccatctgggcgcgccctgattacaacccgcctctacttgaatcatggaagaggcaagactacgaccccccggtcgtgca

SEQ ID NO: 107057 - DNA, 80 bp, synthetic construct
  source 1..80: mol_type = other DNA
tacgtcgggggcccactgaccaattcaaaaggggaaaactgtggctatcgtcggtgtcgcgcaagcggcgtcctgactac

SEQ ID NO: 107058 - DNA, 80 bp, synthetic construct
  source 1..80: mol_type = other DNA
atatagatgcccactttctatcccagacaaagcagagtggggagaactttccttacctggtagcgtaccaagccaccgtg

SEQ ID NO: 107059 - DNA, 80 bp, synthetic construct
  source 1..80: mol_type = other DNA
tggtagacccgtaattgtttttcgtacgcgcgcggctgtacgcgtgttcccgcatgaccgcctcggagggcgaggtcgtg

SEQ ID NO: 107060 - DNA, 80 bp, synthetic construct
  source 1..80: mol_type = other DNA
ccaggtggtcgacagtcattactatgatgtcctaaaggagatcaaaatccgagcgtctactgtgaaggctcgtttgcttt

SEQ ID NO: 107061 - DNA, 80 bp, synthetic construct
  source 1..80: mol_type = other DNA
tacccatacaccggaaagggcatccaacaaagcatcgcgtatgtccccgcttttatgttcttcaccaacagattgtgtca

SEQ ID NO: 107062 - DNA, 80 bp, synthetic construct
  source 1..80: mol_type = other DNA
cgccaggcccagaggcggagcagcgcacgatggacccccgacctgggctacatgcgccagtgtatcaatcagctgtttcg

SEQ ID NO: 107063 - DNA, 80 bp, synthetic construct
  source 1..80: mol_type = other DNA
ccaggagccgctcgccctcgcgccacgcgtactctagcagcaactccagggtgaccgacagcggggtgagaaaggccccg

SEQ ID NO: 107064 - DNA, 80 bp, synthetic construct
  source 1..80: mol_type = other DNA
cggaggcggagtcttccatgcgggtgaccccgacgcccctaagcggctgcacgagcgccaggtcggcgacgacacgctcg

SEQ ID NO: 107065 - DNA, 80 bp, synthetic construct
  source 1..80: mol_type = other DNA
ccttgtggtactgcctgatagggtgcttgcgagtgccccgggaggtctcgtagaccgtgcaccatgagcacaaatcctaa

SEQ ID NO: 107066 - DNA, 80 bp, synthetic construct
  source 1..80: mol_type = other DNA
tcagaagccctccagcaactggccatcaagacctttggccagcccccctcgagcggtgatgcaggctcgtccacggaggc

SEQ ID NO: 107067 - DNA, 80 bp, synthetic construct
  source 1..80: mol_type = other DNA
gccttccttctccggagtccctctcgatcggcggcgggcccctgtgttcgttgctgccgcgcccccggttttataaagac

SEQ ID NO: 107068 - DNA, 80 bp, synthetic construct
  source 1..80: mol_type = other DNA
tttggaagagaggcgcaagcttatgatggctgtagtgctagtaactgtggagctggagtgtctgcgccgctttttcaccg

SEQ ID NO: 107069 - DNA, 80 bp, synthetic construct
  source 1..80: mol_type = other DNA
gcgaggtgcaggtgttgtccacctcaacgcagaccttcctggggaccaatgtgggcggtgtcatgtggtgaccttatcac

SEQ ID NO: 107070 - DNA, 80 bp, synthetic construct
  source 1..80: mol_type = other DNA
gactccgacgaacaaagtgtggtctgctgctccatgtcttactcctggactggcgctataataacaccttgtagcgccga

SEQ ID NO: 107071 - DNA, 80 bp, synthetic construct
  source 1..80: mol_type = other DNA
ccgggagcactggttgtaggggtcgtctgtgccgcagttctgcgacgccatgtgggtcctagtgagggtgctgctcagtg

SEQ ID NO: 107072 - DNA, 80 bp, synthetic construct
  source 1..80: mol_type = other DNA
aatttaaactcctctcagaggacaaagtgccctgggaccagatagtaatgacatccctagccctcgtgggagcagccata

SEQ ID NO: 107073 - DNA, 80 bp, synthetic construct
  source 1..80: mol_type = other DNA
atataactgggaggaaaatgagacagatgtgctcatcctcaactcgaccaggcccccggccggggcttggttcgggtgcg

SEQ ID NO: 107074 - DNA, 80 bp, synthetic construct
  source 1..80: mol_type = other DNA
tgagtcatggattttgagaaaccctgggtacgcattggtggctgctgtaattggatggatgttagggagcaacacaacac

SEQ ID NO: 107075 - DNA, 80 bp, synthetic construct
  source 1..80: mol_type = other DNA
agcgcagctctccgtcagaaaaaggtaacttttgacagacagcaggtcgttgaccaacattattatgacactcttaagga

SEQ ID NO: 107076 - DNA, 80 bp, synthetic construct
  source 1..80: mol_type = other DNA
ataccactatgatgcagactactccaggtgggactcaacacagcagagggctgtactgggtgcagccatggaagtaatgg

SEQ ID NO: 107077 - DNA, 80 bp, synthetic construct
  source 1..80: mol_type = other DNA
tggccatcaagtccctcaccgagaggctttatgtcggaggccctcttaccaattcaaggggggaaaactgcggctatcgc

SEQ ID NO: 107078 - DNA, 80 bp, synthetic construct
  source 1..80: mol_type = other DNA
tgcatgtacactatggtaaaaaccctgtgtggtctcagggaacttctcccctttaattaaagttatctgattaataaagc

SEQ ID NO: 107079 - DNA, 80 bp, synthetic construct
  source 1..80: mol_type = other DNA
ttcccccggtgtcggggccgctcatgatgcccgacggaagcccttggcccggatcggcgcccctcccatccaacagggtg

SEQ ID NO: 107080 - DNA, 80 bp, synthetic construct
  source 1..80: mol_type = other DNA
cccccggtggcctaccccccgtccctcctccacggaggaaacggacggtagtgcttaccgagtcgagcgtctctggcgct

SEQ ID NO: 107081 - DNA, 80 bp, synthetic construct
  source 1..80: mol_type = other DNA
atgtttgactccgtcgtcctctgcgaggcgtacgatacaggctgcgcctggtacgagctgacaccttctgagaccacggt

SEQ ID NO: 107082 - DNA, 80 bp, synthetic construct
  source 1..80: mol_type = other DNA
ctcgacggaccccgcccgacggcccgcgcctcgcgtgcgtggtcggccgcgtcgttgccgtcgtcgtcctcgtcctcgtc

SEQ ID NO: 107083 - DNA, 80 bp, synthetic construct
  source 1..80: mol_type = other DNA
gcatactatagagggttggacgtctccataataccagctcagggagatgtggtggtcgtcgccaccgacgccctcatgac

SEQ ID NO: 107084 - DNA, 80 bp, synthetic construct
  source 1..80: mol_type = other DNA
cgggcaggtccaggttctgtcctccgtcacacaatccttcttggggacatctatttcggtggttctctggacggtatatc

SEQ ID NO: 107085 - DNA, 80 bp, synthetic construct
  source 1..80: mol_type = other DNA
ctgccggatgctctccagacaattgccttgattgccttattgagtgtgatgaccatgggagtattctttctcctcatgca

SEQ ID NO: 107086 - DNA, 80 bp, synthetic construct
  source 1..80: mol_type = other DNA
aaatccaaactccttccccagctgcccggcatccccttcctgtcctgccaacgcgggtataagggtgtgtggcgaggcga

SEQ ID NO: 107087 - DNA, 80 bp, synthetic construct
  source 1..80: mol_type = other DNA
cgccagcagcgcgcggccgacctggcggccgagtccgtgaccggtggatgcggcagccgccctgcgggtgcggacctgct

SEQ ID NO: 107088 - DNA, 80 bp, synthetic construct
  source 1..80: mol_type = other DNA
cgccatcgtgcgcagcgcggccaccaccggaagccccttcatcatgtttaaggacgcggtaaaccgccactacatctacg

SEQ ID NO: 107089 - DNA, 80 bp, synthetic construct
  source 1..80: mol_type = other DNA
tttccccggctccacgaggccctgggtcactttaggcgcggggcgctggcggcggttcagctgttgtttcccgcggcccg

SEQ ID NO: 107090 - DNA, 80 bp, synthetic construct
  source 1..80: mol_type = other DNA
tgtgggacgacacgcccgcagcccccccccgccatggcggagggaagccttactgtttatttgtaatcggacgatgaggc

SEQ ID NO: 107091 - DNA, 80 bp, synthetic construct
  source 1..80: mol_type = other DNA
gtcaaaacctactctattttcaagatgctcgactgtggcttcgagcagtggctctacgcgtacatccagcataagaatca

SEQ ID NO: 107092 - DNA, 80 bp, synthetic construct
  source 1..80: mol_type = other DNA
gccgtgaagtgggagtacgttgtcctggctttcttggtgcttgctgacgcgcgcatttgcgcctgcctgtggatgatatt

SEQ ID NO: 107093 - DNA, 80 bp, synthetic construct
  source 1..80: mol_type = other DNA
gccctggtgtttctggggagctgtatttgctttatacacagatgtcaacgccgctaccgacgctcccgtcgcccgattta

SEQ ID NO: 107094 - DNA, 80 bp, synthetic construct
  source 1..80: mol_type = other DNA
aggcgaggggaccggcgggctgctctgctgtcaccaaggcctctctccactctcaagggctcgtccggcgtgccagtgtt

SEQ ID NO: 107095 - DNA, 80 bp, synthetic construct
  source 1..80: mol_type = other DNA
aggaggtgaaggagcgagcatctggggtgaagggtcgcctgctctctttcgaggaagcatgctctcttgtccccccccac

SEQ ID NO: 107096 - DNA, 80 bp, synthetic construct
  source 1..80: mol_type = other DNA
tctggaatcaatggagttgtagacatagctaatcaagctgtgcagaaacagattgccaaccgtttagagccgcgacccga

SEQ ID NO: 107097 - DNA, 80 bp, synthetic construct
  source 1..80: mol_type = other DNA
gaagacccgaggcatgcacccgcacttacgcccgtgcccacccccgccccggcgcccaccccgcccgcacacctgcccgc

SEQ ID NO: 107098 - DNA, 80 bp, synthetic construct
  source 1..80: mol_type = other DNA
tccacgggacgcgccttttataaccccggtggtcattcccaacgatcacatgcaatctaactggctcccctctccccccc

SEQ ID NO: 107099 - DNA, 80 bp, synthetic construct
  source 1..80: mol_type = other DNA
gctaccgtctgcgcgagagccaaagctccccccccctcatgggatacgatgtggaagtgtctactcaggcttaagcccac

SEQ ID NO: 107100 - DNA, 80 bp, synthetic construct
  source 1..80: mol_type = other DNA
tcgtgatacggcacgcaggcatttggccgaagggaaggtggacaccggggtggcggtctccaggtggaccgcaaagttaa

SEQ ID NO: 107101 - DNA, 80 bp, synthetic construct
  source 1..80: mol_type = other DNA
ctcttcaactgggcagtgaagaccaagctcaaactcactccaatacctggcgcgggcacccttgacttgtctgggtggtt

SEQ ID NO: 107102 - DNA, 80 bp, synthetic construct
  source 1..80: mol_type = other DNA
ggccagccggatgatgctgactctgggacggggcttacctctccaactgagacaaccaacccggatccttccatcgcgga

SEQ ID NO: 107103 - DNA, 80 bp, synthetic construct
  source 1..80: mol_type = other DNA
cccatttgggtaacaaggcccttggtcatgccagacgaaaaggatccattggagctttttattaacctcaccattttgcg

SEQ ID NO: 107104 - DNA, 80 bp, synthetic construct
  source 1..80: mol_type = other DNA
aagtgggaataccttgtcctcgcattcctggtgttagcggatgcgcgcatttgcgcctgtctgtggctgatgctgatgat

SEQ ID NO: 107105 - DNA, 80 bp, synthetic construct
  source 1..80: mol_type = other DNA
tggcacagttacaaccccgcatccgaacatttcggaggtggcgttgcctacgacgggggagatccccttctacgggaagg

SEQ ID NO: 107106 - DNA, 80 bp, synthetic construct
  source 1..80: mol_type = other DNA
ggcgcgcgagtcgaagacatagtcgttgcaggtgcgcacgaggtactggtatccgactagaaagtgcggcggcggctggc

SEQ ID NO: 107107 - DNA, 80 bp, synthetic construct
  source 1..80: mol_type = other DNA
gagatcaccggaaccagccccaggcttgatgttgaccttgactcacatggcaacttcaagctcctgaacgaccctggagc

SEQ ID NO: 107108 - DNA, 80 bp, synthetic construct
  source 1..80: mol_type = other DNA
caaatcattgaaagactccatggccttagcgcatttacactccatagttactctccaggtgaaatcaatagggtggccgc

SEQ ID NO: 107109 - DNA, 80 bp, synthetic construct
  source 1..80: mol_type = other DNA
aacagcatcttggccagcagggccggagagaacccgcacagcatggccaggtgctcgccggcgaactcctgggttccgcc

SEQ ID NO: 107110 - DNA, 80 bp, synthetic construct
  source 1..80: mol_type = other DNA
cagtatatgccgacaagacatatcaacccgaacctcaagtaggcgagagtcaatggaacgcgcctttgcctaacaacgca

SEQ ID NO: 107111 - DNA, 80 bp, synthetic construct
  source 1..80: mol_type = other DNA
tggcgccgtggtcaccttcaaaatcatgagcggcgagatgccatccacagaggacttggtgaacctgctcccggccattc

SEQ ID NO: 107112 - DNA, 80 bp, synthetic construct
  source 1..80: mol_type = other DNA
gccagtgccttgcgagcgttcacggacgccatgaccaggtactcggcacctcctggagacgagcctcacgcggagtatga

SEQ ID NO: 107113 - DNA, 80 bp, synthetic construct
  source 1..80: mol_type = other DNA
tggctcaaagccaagttagtgcccgccctgcctggaattcccttcctctcgtgtcagcgagggttccgcgggacctggcg

SEQ ID NO: 107114 - DNA, 80 bp, synthetic construct
  source 1..80: mol_type = other DNA
tagcgcaacaagccgctccaaaccgtccaaattacattgcttttagggacaattttattggactaatgtattacaacagc

SEQ ID NO: 107115 - DNA, 80 bp, synthetic construct
  source 1..80: mol_type = other DNA
tcggtgattggagaagagaagtatgtggactacatgggctccttaaggagatatgaagacaccactgtagtggaggacac

SEQ ID NO: 107116 - DNA, 80 bp, synthetic construct
  source 1..80: mol_type = other DNA
aggcttgagatggactttgatttctgcgaaggaactacagtggtggtgactgaagactgtggaaatagaggaccctcctt

SEQ ID NO: 107117 - DNA, 80 bp, synthetic construct
  source 1..80: mol_type = other DNA
ctgggagcacgctttctggagttcgaagcccttggtttcatgaatgaagaccactggtttagtagagagaattcactcag

SEQ ID NO: 107118 - DNA, 80 bp, synthetic construct
  source 1..80: mol_type = other DNA
tgctctgatagtctcgcgtgcccaaggcccgtgatcggggtacttcgccgccgcgacccgccacccggtgtgcgcgatgt

SEQ ID NO: 107119 - DNA, 80 bp, synthetic construct
  source 1..80: mol_type = other DNA
tcggtcgctgcgacgttgggctttgggagctacatgtccaaggcgcacggcatcgacccgaacatccggtctggtgtcag

SEQ ID NO: 107120 - DNA, 80 bp, synthetic construct
  source 1..80: mol_type = other DNA
agtggtttccaccgcgacacaatctttcctggcgacctgcatcaacggcgtgtgttggactgtctaccatggtgccggca

SEQ ID NO: 107121 - DNA, 80 bp, synthetic construct
  source 1..80: mol_type = other DNA
attatcaaacccacaatgctggtgtgcggcgacgacctggtggtcatctcagagagtcaggggatcgaggaggatgagcg

SEQ ID NO: 107122 - DNA, 80 bp, synthetic construct
  source 1..80: mol_type = other DNA
accggggccttcgtcagtcttttctcccctggccccacccagaatctgcagcttgttaatagcaacggcagttggcacat

SEQ ID NO: 107123 - DNA, 80 bp, synthetic construct
  source 1..80: mol_type = other DNA
atctgcagcttggtaagaggggtcacgcatggcagatactgccaaatgatgctactgaaactaggggccctcactggtac

SEQ ID NO: 107124 - DNA, 80 bp, synthetic construct
  source 1..80: mol_type = other DNA
gcccttgccgcctgcaaggcggcagggattactgagcccattatgctggtgtgtggagacgacctggttgtcatttcgga

SEQ ID NO: 107125 - DNA, 80 bp, synthetic construct
  source 1..80: mol_type = other DNA
tgggcatcggcaccgtgctggaccaagctgagactgcaggcgtgcggcttaccgtgttggccacggctactccccctggc

SEQ ID NO: 107126 - DNA, 80 bp, synthetic construct
  source 1..80: mol_type = other DNA
catagctctcacgtttctcgcagttggaggagtcctgctcttcctctccgtgaatgtgcacgctgacactgagtgtgcca

SEQ ID NO: 107127 - DNA, 80 bp, synthetic construct
  source 1..80: mol_type = other DNA
gccttcccaaaaagggcgcgtgcccaggctttgagttgcactcgcaccgtagtggcatcaaaaggtgaccgtgcccggtc

SEQ ID NO: 107128 - DNA, 80 bp, synthetic construct
  source 1..80: mol_type = other DNA
ggtattcacggagcgacaggtggacgcgggtcttggggcccgcgcgggtacacacggtgtatgcgacgttcccaccgcgg

SEQ ID NO: 107129 - DNA, 80 bp, synthetic construct
  source 1..80: mol_type = other DNA
ccacgagtctgtaccaaagaagagttcatcaacaaggttcgtagcaatgcagcattaggggcaatatttgaagaggaaaa

SEQ ID NO: 107130 - DNA, 80 bp, synthetic construct
  source 1..80: mol_type = other DNA
ggataggacgtcgggccatgcgccgagcggctgcttctgccagtgcaggtcgggcccgtcgtcaggccgcccgtcaggcc

SEQ ID NO: 107131 - DNA, 80 bp, synthetic construct
  source 1..80: mol_type = other DNA
ccctgacaaggaaatcctatatgaggccttcgatgagatggaagagtgcgcctccaaagccgctctcattgaggaaggac

SEQ ID NO: 107132 - DNA, 80 bp, synthetic construct
  source 1..80: mol_type = other DNA
tttccgcagggcgcacaacacagcttccacccttgaagccatggttagaaatgacaccaaggatcagtcctttaaggact

SEQ ID NO: 107133 - DNA, 80 bp, synthetic construct
  source 1..80: mol_type = other DNA
gcaccactctccacttgggcgagcgacggcttgcgcgatctagctgtcgccgtagagcctatcatattctcgcccatgga

SEQ ID NO: 107134 - DNA, 80 bp, synthetic construct
  source 1..80: mol_type = other DNA
gttcagctgctggacagtcattatgattcagtcttaaaggacgttaagttggctgcctccaaagttagcgctcagctcct

SEQ ID NO: 107135 - DNA, 80 bp, synthetic construct
  source 1..80: mol_type = other DNA
acacatcacagcggagacggcagcacgccgcctcgcgcgcgggtctcccccatccctcgccagctcctcagcaagccagc

SEQ ID NO: 107136 - DNA, 80 bp, synthetic construct
  source 1..80: mol_type = other DNA
caggtgcccgtgcggagcagacattgctggacatgtcaaaaacgggtccatgaggatcgttggcccgagaacctgcagca

SEQ ID NO: 107137 - DNA, 80 bp, synthetic construct
  source 1..80: mol_type = other DNA
ctgttctgttctccgcatgcaattatgcatgcgaaaatctcggcattgatggacacaagtacatcggatctcgtacaagt

SEQ ID NO: 107138 - DNA, 80 bp, synthetic construct
  source 1..80: mol_type = other DNA
acgtcgtgtgttgctcgatgtcatactcgtggacgggggcgcttgtcacaccatgcgctgctgaggagaccaaactaccc

SEQ ID NO: 107139 - DNA, 80 bp, synthetic construct
  source 1..80: mol_type = other DNA
ttgattacctgagcggcaagaacaatttcatcaaatccattaatattgtgtcctactatatacaactctacaaatcttgg

SEQ ID NO: 107140 - DNA, 80 bp, synthetic construct
  source 1..80: mol_type = other DNA
ggtgttagggtcctggaagacacggtaaattatgcaacagggaacttgcctggttgctctttttctatcttcttgcttgc

SEQ ID NO: 107141 - DNA, 80 bp, synthetic construct
  source 1..80: mol_type = other DNA
tcaccatgaggctactatcaccaattagagtgccaaattacaacctgattatcatggatgaagcccatttcacagaccca

SEQ ID NO: 107142 - DNA, 80 bp, synthetic construct
  source 1..80: mol_type = other DNA
cgtgggtggagtcctagccgcgctcgcagcctactgcttgtcagtgggctgtgttgtcatctgtggcaggataactttga

SEQ ID NO: 107143 - DNA, 80 bp, synthetic construct
  source 1..80: mol_type = other DNA
atgttggaaaggggtggtggggcgaaacaagagtcaaatgtctgtaaagaagtgtgtgtttgaacgttgcattatggcca

SEQ ID NO: 107144 - DNA, 80 bp, synthetic construct
  source 1..80: mol_type = other DNA
gggacgaggataaggacgacgacgaggacggggacgaggacggagacgaggacggggacgagcgcgaggaggtcgcgcgc

SEQ ID NO: 107145 - DNA, 80 bp, synthetic construct
  source 1..80: mol_type = other DNA
ctcagggaacggggcagaggtggtcatcgacaccctggacaaggccgccttcaggtgttgcatgatgggaatgagagccg

SEQ ID NO: 107146 - DNA, 80 bp, synthetic construct
  source 1..80: mol_type = other DNA
accgggccgtacctggggacaacccgggtacccctggcccctgtatgggaatgagggctgcgggtgtgcaggttggctcc

SEQ ID NO: 107147 - DNA, 80 bp, synthetic construct
  source 1..80: mol_type = other DNA
ccgcagtgccccaaacctaccaggtcgcacatctgcatgcaccaacaggaagcggcaagagcaccaaggtcccggcggcg

SEQ ID NO: 107148 - DNA, 80 bp, synthetic construct
  source 1..80: mol_type = other DNA
gaggtctcgtagaccgtgcatcatgagcacagatccaaaaccccaaagaaaaaccaaaagaaacactaacccccgcccac

SEQ ID NO: 107149 - DNA, 80 bp, synthetic construct
  source 1..80: mol_type = other DNA
cgcaacatggaaccgtcgctgtattcgtccaatcggcctttcattaaccgcctaatggactacctgcatcgcgcggcagc

SEQ ID NO: 107150 - DNA, 80 bp, synthetic construct
  source 1..80: mol_type = other DNA
aagcagcgctgcagatctgggtcccccccctcaacccccgcggagggcgcgacggcttcattctcgtcgtgtgcatgctc

SEQ ID NO: 107151 - DNA, 80 bp, synthetic construct
  source 1..80: mol_type = other DNA
atacttggtgggctcccagctaccatgcgaacctgaaccagacgtggcggtgctaacatcaatgctcaccgacccctccc

SEQ ID NO: 107152 - DNA, 80 bp, synthetic construct
  source 1..80: mol_type = other DNA
gaaatgtaggcttaagatggacaaattggaactcaaggggatgagctatgcaatgtgcttgaatacctttgtgttgaaga

SEQ ID NO: 107153 - DNA, 80 bp, synthetic construct
  source 1..80: mol_type = other DNA
agaagctggtcatcttgcacgctgcgagcgcagctagctgcaatggcttcctatattttgtcatctttttcgtggctgct

SEQ ID NO: 107154 - DNA, 80 bp, synthetic construct
  source 1..80: mol_type = other DNA
actccacatacggcaagttcctcgccgatgggggttgttctggaggcgcctatgacgtgatcatctgcgatgaatgtcac

SEQ ID NO: 107155 - DNA, 80 bp, synthetic construct
  source 1..80: mol_type = other DNA
tgacctacgagaccgtgtctggaacgccgttggagactgcagcctccgccgccgcttcagccgctgcagccaccgcccgc

SEQ ID NO: 107156 - DNA, 80 bp, synthetic construct
  source 1..80: mol_type = other DNA
gtgcaatgcaacggctgcatgggtaacatatggcacatgctcacagagtggagagaggagaagagaaaagagatcagtgg

SEQ ID NO: 107157 - DNA, 80 bp, synthetic construct
  source 1..80: mol_type = other DNA
ggggttttttcatcgcccacacaacgcccccggggtcgcgattacgccagagcggaccaatgtgatcctgggctccaccg

SEQ ID NO: 107158 - DNA, 80 bp, synthetic construct
  source 1..80: mol_type = other DNA
gccaaacatcaggactggggtcaggactataacaacaggagggcccatcacctattccacctatggtaagtttttggcag

SEQ ID NO: 107159 - DNA, 80 bp, synthetic construct
  source 1..80: mol_type = other DNA
ttgacgccgagatgtctggttgactacccatatcgcctgtggcactatccttgtaccataaactacaccctcttcaaaat

SEQ ID NO: 107160 - DNA, 80 bp, synthetic construct
  source 1..80: mol_type = other DNA
taaagatggcctcgggccccgcggcccgaagcaggctcacaaaccggcccccgtccccgggctgcgtctcggggtccgcc

SEQ ID NO: 107161 - DNA, 80 bp, synthetic construct
  source 1..80: mol_type = other DNA
tccatgataaacggagtcgtgaaacttctcactaaaccatgggatgtagtgcccatggtgacacagatggcaatgacaga

SEQ ID NO: 107162 - DNA, 80 bp, synthetic construct
  source 1..80: mol_type = other DNA
aacaggcttgagatggccatgtggagaagctcggtatcagaactgaatcttgcgctggcggaaggagatgcaaacctcac

SEQ ID NO: 107163 - DNA, 80 bp, synthetic construct
  source 1..80: mol_type = other DNA
tacattttgcagtacagcctgctcaagacgccgtacttcgtgcgagcgcacatccttttgcgcgcttgcttgtttgtgcg

SEQ ID NO: 107164 - DNA, 80 bp, synthetic construct
  source 1..80: mol_type = other DNA
tccggcatcgcaaactgcacccggtgccgggcagccacatccagcgcaaaaaccttcgtgtagacttccgttgaactgat

SEQ ID NO: 107165 - DNA, 80 bp, synthetic construct
  source 1..80: mol_type = other DNA
acggggtagtggacattgcaaaccaggccgtgcagcgcgagataaacagccgcctgaacccgcggccgcccacggtagtg

SEQ ID NO: 107166 - DNA, 80 bp, synthetic construct
  source 1..80: mol_type = other DNA
atcctgcaactgcgcgtccgtcagcagcaggagcgggccgccaaggagctcctcgatgccatcaacatccaccagtgcaa

SEQ ID NO: 107167 - DNA, 80 bp, synthetic construct
  source 1..80: mol_type = other DNA
tatcacagcgtgtcccgagcccgaccccgcctattactcctgtgcctactcctactcaccgtaggggtaggcatctttct

SEQ ID NO: 107168 - DNA, 80 bp, synthetic construct
  source 1..80: mol_type = other DNA
tttgtcttaaatacacccgccatgagcatctctggacccccaacgacgtttattttatataggttacatggggtcaggcg

SEQ ID NO: 107169 - DNA, 80 bp, synthetic construct
  source 1..80: mol_type = other DNA
ggtgttgtcatcgcactggcccttttgacgttgtctccgcattacaaacagtggttagctcgggggatttggtggctcca

SEQ ID NO: 107170 - DNA, 80 bp, synthetic construct
  source 1..80: mol_type = other DNA
cagtgctgtgacctggacgccgatgcccgcaaggccataaccgccctcacggagagactctacgtgggcggtcccatgca

SEQ ID NO: 107171 - DNA, 80 bp, synthetic construct
  source 1..80: mol_type = other DNA
cacccagagccttacgtccctctttacacctgggccatctcagacaatccaacttataaacactaacggcagctggcaca

SEQ ID NO: 107172 - DNA, 80 bp, synthetic construct
  source 1..80: mol_type = other DNA
gctctctcgacaaaaaggcccttaatcacatcaagggcgtgtggcaagacttactggatgactctgataccccattgccg

SEQ ID NO: 107173 - DNA, 80 bp, synthetic construct
  source 1..80: mol_type = other DNA
cagggccgtgggcaccgcctggtccacgtactgcagggcctcgagctcggccatgacgcgctcggtggccgcgcggtacg

SEQ ID NO: 107174 - DNA, 80 bp, synthetic construct
  source 1..80: mol_type = other DNA
gacggccagtcatgctggtacgggatggtaatcagacggtcttagctgtttcctgaagccaaaatcacatactccttgga

SEQ ID NO: 107175 - DNA, 80 bp, synthetic construct
  source 1..80: mol_type = other DNA
taacttgctatccgtagaggaagcttgcagcctgacgcccccacattcagccaaatccaagtttggctatggggcaaaag

SEQ ID NO: 107176 - DNA, 80 bp, synthetic construct
  source 1..80: mol_type = other DNA
gaccacacgagggggagagccgcacatgatagttagtaagcaggaaagaggaaagtcactcttgtttaagacctctgcag

SEQ ID NO: 107177 - DNA, 80 bp, synthetic construct
  source 1..80: mol_type = other DNA
cagccacatgaccctgcatggttgcagtttttttggctttaacaatatgtgtgcagaggtctggggtgctgctaagatta

SEQ ID NO: 107178 - DNA, 80 bp, synthetic construct
  source 1..80: mol_type = other DNA
atgcggatagtgggacctaagctttgcagtaacacctggcgtaacaccttccctatcaactcttcaacaacggggcctag

SEQ ID NO: 107179 - DNA, 80 bp, synthetic construct
  source 1..80: mol_type = other DNA
aagcctggggcaagcccgggtacccttggcccctgtatggtaacgagggctgtggctgggcagtgtggctcctgtccccc

SEQ ID NO: 107180 - DNA, 80 bp, synthetic construct
  source 1..80: mol_type = other DNA
acgtccgttgccatgccagaaaggccgtagcccacatcaactccgtgtggaaagaccttctggaagacagtgtaacacca

SEQ ID NO: 107181 - DNA, 80 bp, synthetic construct
  source 1..80: mol_type = other DNA
aaccccttttgggcaacaaagagtgtttaaggagaaggtggataccagaacaccacaaccaaaaccaggcacacgaatga

SEQ ID NO: 107182 - DNA, 80 bp, synthetic construct
  source 1..80: mol_type = other DNA
tgcgtcccatcaggctgttgaggttgcgcatgagcgcgacaatttccgccggcgcgacatcggaccggaggtatttttcg

SEQ ID NO: 107183 - DNA, 80 bp, synthetic construct
  source 1..80: mol_type = other DNA
actccagcatcgtgtacgagatggaaggtgcgatcctccacttgccggggtgtgtgccttgcgttcgggaaggcaacacc

SEQ ID NO: 107184 - DNA, 80 bp, synthetic construct
  source 1..80: mol_type = other DNA
gaaggtgatggaagagtcatcctgggggaaccctcagccatcacggctgccagcgctgctcagcggagaggacgcatagg

SEQ ID NO: 107185 - DNA, 80 bp, synthetic construct
  source 1..80: mol_type = other DNA
tccaggactctgttaactttacctttcctacttacaaaccagaagctcaacgacaacaccgcttttccagaagcattttc

SEQ ID NO: 107186 - DNA, 80 bp, synthetic construct
  source 1..80: mol_type = other DNA
ggctatgttaagacctgtggagcccccccgtgcaccactcggccgctcggtaacaacacgctggtgtgccctaccgactg

SEQ ID NO: 107187 - DNA, 80 bp, synthetic construct
  source 1..80: mol_type = other DNA
cattcccgtcgtcggcgccccagtgggcggcgttgccagagctcttgcgcacggcgtgagagtcctggaggacgggataa

SEQ ID NO: 107188 - DNA, 80 bp, synthetic construct
  source 1..80: mol_type = other DNA
ctctcgagctgtcaccactatactgagctcccttactattaccagcctacttcgcaggcttcatgaatggatcagcggag

SEQ ID NO: 107189 - DNA, 80 bp, synthetic construct
  source 1..80: mol_type = other DNA
cctacggtaagttccttgcagatgggggttgctccgggggagcatacgatgtgattatctgtgatgaatgtcatgcccac

SEQ ID NO: 107190 - DNA, 80 bp, synthetic construct
  source 1..80: mol_type = other DNA
tgcaccaacaaggcaggtgtcggacttgtgtgtacaacatgatggggaaaagagagaagaagctgtcagagtttgggaaa

SEQ ID NO: 107191 - DNA, 80 bp, synthetic construct
  source 1..80: mol_type = other DNA
acattagaaggtcctccaggaatacctattgactggctcggaccaactaatcagctttgtaaaggaaaagaaattttaca

SEQ ID NO: 107192 - DNA, 80 bp, synthetic construct
  source 1..80: mol_type = other DNA
ctcgggagccgatcgtcttcagctactttgagctgccggacgagcaccctcagggaccggctcacgggttgaaactcgag

SEQ ID NO: 107193 - DNA, 80 bp, synthetic construct
  source 1..80: mol_type = other DNA
gatggtgagccgcgaacacgcggcgacctcgcgggccagggcggcggagcacgcggtgaacttaaccgccgtggcggcca

SEQ ID NO: 107194 - DNA, 80 bp, synthetic construct
  source 1..80: mol_type = other DNA
ctcctcccgccgtcccacagagctaccaagtagggtatcttcatgccccgaccggtagtggcaagagcacaaaggtcccg

SEQ ID NO: 107195 - DNA, 80 bp, synthetic construct
  source 1..80: mol_type = other DNA
cggagccgcgcgagatatggcccgcgctggagtttcaataccggagatcatgcaagctggtggctggaccaatgtaaata

SEQ ID NO: 107196 - DNA, 80 bp, synthetic construct
  source 1..80: mol_type = other DNA
cctacaacccccctcgcgagagccgcgtgggagacagcaagacacactccagtcaattcctggctaggcaacataatcat

SEQ ID NO: 107197 - DNA, 80 bp, synthetic construct
  source 1..80: mol_type = other DNA
gtgcaagagctcgcgctccacccccctcttgggacactatgtggaaatgcctcaccaggctcaagcccactctgaacggt

SEQ ID NO: 107198 - DNA, 80 bp, synthetic construct
  source 1..80: mol_type = other DNA
agtcccccgggccgggttcggtggaactgtaaggggacggcgggttaatagacaatgaccacgttcggatcgcgcagagc

SEQ ID NO: 107199 - DNA, 80 bp, synthetic construct
  source 1..80: mol_type = other DNA
cagcaagggccaggcttgcggatataggcgttgccgcgcaagcggggtattcaccacaagtctggggaacaccatgactt

SEQ ID NO: 107200 - DNA, 80 bp, synthetic construct
  source 1..80: mol_type = other DNA
ggcatcgggcaccgggatggccgccgcgacggccgacgatgaggggtcggccgccaccatcctcaagcaggccatcgccg

SEQ ID NO: 107201 - DNA, 80 bp, synthetic construct
  source 1..80: mol_type = other DNA
ctacatgggcttgaggccttctcgctgcacacatactctcctcacgaactcacaagggtggcagctgctctcagaaaact

SEQ ID NO: 107202 - DNA, 80 bp, synthetic construct
  source 1..80: mol_type = other DNA
caggagctctagtggcattcaagatcatgtgcggtgaaactccgtcagtggaagatatggtcaacttactaccggccctt

SEQ ID NO: 107203 - DNA, 80 bp, synthetic construct
  source 1..80: mol_type = other DNA
aaaatgtggctctcgttggtaaaacaagggggtatggttcacggttctgttgctttaaaagcattgaaaggaaccctatt

SEQ ID NO: 107204 - DNA, 80 bp, synthetic construct
  source 1..80: mol_type = other DNA
ccaatcatggatgaggaaagagaaatccctgagcgctcgtggaattcaggtcatgaatgggtcacggacttcaaagggaa

SEQ ID NO: 107205 - DNA, 80 bp, synthetic construct
  source 1..80: mol_type = other DNA
tcccttttgctcccaccacttccacaaaatctttatgaaggatggccgttcactggtcgttccatgcagaaaccaggatg

SEQ ID NO: 107206 - DNA, 80 bp, synthetic construct
  source 1..80: mol_type = other DNA
tgtacaagatccagcatttgtgtatgcctttactgctgcaaaagaggcctgcgccgatttaaataaccagctccgctctg

SEQ ID NO: 107207 - DNA, 80 bp, synthetic construct
  source 1..80: mol_type = other DNA
agagagaactcaagtgtggggatggcatcttcgtctttagagattcagatgactggctgaacaagtattcatactatcca

SEQ ID NO: 107208 - DNA, 80 bp, synthetic construct
  source 1..80: mol_type = other DNA
ctaggttgtgggcgaggaggatggagttactatgcagccacgctcaaaggcgtccaagaagtcagaggctatacgaaagg

SEQ ID NO: 107209 - DNA, 80 bp, synthetic construct
  source 1..80: mol_type = other DNA
cacaggcgggccaaaaagtaccttgccggtacttaacggctcttcctttgtgatttacaacagtttcaaccaagacggag

SEQ ID NO: 107210 - DNA, 80 bp, synthetic construct
  source 1..80: mol_type = other DNA
agttggggtcattggaagaccagtccccccccgcagaggggccggaaattttagagtcagactctaaatcatggtccacg

SEQ ID NO: 107211 - DNA, 80 bp, synthetic construct
  source 1..80: mol_type = other DNA
acggagcgctggcgtcgcacatcgtgatcgccacgctgatgcaccacggggtgctcccggcggccccgggtgacgtcccc

SEQ ID NO: 107212 - DNA, 80 bp, synthetic construct
  source 1..80: mol_type = other DNA
ggctcgcagctcccgtgtgagcccgagccggatgtagttgtcgtcacctccatgctgactgacccttcacatatcagcgc

SEQ ID NO: 107213 - DNA, 80 bp, synthetic construct
  source 1..80: mol_type = other DNA
tgcgctccacggacgcgttggcgctggccccgggcggcgggggcgtgaggtttggaggcttgcggctctgctcgcggagt

SEQ ID NO: 107214 - DNA, 80 bp, synthetic construct
  source 1..80: mol_type = other DNA
gctaacgcagcactgggagcttggtctgatgagcaaaacaaatgggcaagtgcgaaggaagcagtggaagatcctgcttt

SEQ ID NO: 107215 - DNA, 80 bp, synthetic construct
  source 1..80: mol_type = other DNA
gatgggattggtggctttcgtgatgactctcgctacggcactgctgtgggcggcagaagtgcctgggacgcagatcgctg

SEQ ID NO: 107216 - DNA, 80 bp, synthetic construct
  source 1..80: mol_type = other DNA
tcctctagaatacatcaaaggtggcagacacctgatcttttgtcattcaaagaagaaatgcgacgaattggccgggcaac

SEQ ID NO: 107217 - DNA, 80 bp, synthetic construct
  source 1..80: mol_type = other DNA
cgaacggccacgacagtggcataggttgggtggtggtccgacatagcctcggcgtacgtcgggaggcccgacaagaggtc

SEQ ID NO: 107218 - DNA, 80 bp, synthetic construct
  source 1..80: mol_type = other DNA
tgtgttgtccgacccattgatgacaggtttggcctggctctgtcccatcttaatgccatgtcaaaggtgcgaaaagacat

SEQ ID NO: 107219 - DNA, 80 bp, synthetic construct
  source 1..80: mol_type = other DNA
agatataatttgtccatatcgcaatgttttctcggtttgcgcgttccttttccagcgatgatagaacgcgtaaatcttat

SEQ ID NO: 107220 - DNA, 80 bp, synthetic construct
  source 1..80: mol_type = other DNA
cggcgttagagaacttgatagtcctcaacgccgcttccctagccgggatacatggtatcgtccctttcttcatctttttt

SEQ ID NO: 107221 - DNA, 80 bp, synthetic construct
  source 1..80: mol_type = other DNA
caatgagatcctgcttgggccagccgattcagaaacagctaaggggtggagactccttgcccctatcaccgcatacgcac

SEQ ID NO: 107222 - DNA, 80 bp, synthetic construct
  source 1..80: mol_type = other DNA
gcaggcctgaaagactgcactatgctggtctgcggcgacgacttggtcgtcatcgcggaaagcgagagcgtataggagga

SEQ ID NO: 107223 - DNA, 80 bp, synthetic construct
  source 1..80: mol_type = other DNA
acgcgctccaacgccgccgcgcacgcgaccagcgcgtcctcgctgggacacggcagggtgaccccggtccggaccagctc

SEQ ID NO: 107224 - DNA, 80 bp, synthetic construct
  source 1..80: mol_type = other DNA
cccccgcacggactgtgtggcctataacccggccggcgtcatgggaagctgctggaaatccaaggacctgcgttcggctc

SEQ ID NO: 107225 - DNA, 80 bp, synthetic construct
  source 1..80: mol_type = other DNA
acatcgcagtgttgggtcccggtttcccccaccttggctgtcaaggacgtcatgacgtcgcccaaggggttccgcaccca

SEQ ID NO: 107226 - DNA, 80 bp, synthetic construct
  source 1..80: mol_type = other DNA
tgacatgggaaaagttaggaaagatatacagcaatgggaaccttcaagaggatggaatgattggacacaagtgcctttct

SEQ ID NO: 107227 - DNA, 80 bp, synthetic construct
  source 1..80: mol_type = other DNA
gcttaaatactttcaccaatatggaggtccaactaataagacaaatggaatctgaaggaatctttttacccagcgaattg

SEQ ID NO: 107228 - DNA, 80 bp, synthetic construct
  source 1..80: mol_type = other DNA
caaacgggtctactacctgacccgagaccctgaaatccccctggcacgtgctgcctgggagacagttcgccacactccag

SEQ ID NO: 107229 - DNA, 80 bp, synthetic construct
  source 1..80: mol_type = other DNA
taatggaattgcagtatacagggacgcatggtccttgcaaaatccccataacctcagttgcttcactcaatgatatgact

SEQ ID NO: 107230 - DNA, 80 bp, synthetic construct
  source 1..80: mol_type = other DNA
cccggggaggccgagcgccacggaagctgtacgcgtggtttaacggactagaggttagaggagacccctcccatattctc

SEQ ID NO: 107231 - DNA, 80 bp, synthetic construct
  source 1..80: mol_type = other DNA
caagaggcaaccacgtgtcaccaacgcactacgtgcctgagactgacgcgtcaaaaaatgtgactcagatactcacttct

SEQ ID NO: 107232 - DNA, 80 bp, synthetic construct
  source 1..80: mol_type = other DNA
cagggaccacaatgtggtagctgacagcgcgtcgctcaagcattgttagtagagatgagagtctgaaaaacagaaagcat

SEQ ID NO: 107233 - DNA, 80 bp, synthetic construct
  source 1..80: mol_type = other DNA
actgagaacagccgtgctagcaccaactagggttgtggctgctgagatggctgaagccctgagaggactgcctatccggt

SEQ ID NO: 107234 - DNA, 80 bp, synthetic construct
  source 1..80: mol_type = other DNA
ggcacattaagggtaaagtggttcccttggccacttactcgtgtctcggtctgtgggccttcagtctcctactcttggca

SEQ ID NO: 107235 - DNA, 80 bp, synthetic construct
  source 1..80: mol_type = other DNA
gcgaggtctgtgtgtggcccagtgtactgtttcacccccagcccggtagtagtgggcacgaccgacagacgtggagtgcc

SEQ ID NO: 107236 - DNA, 80 bp, synthetic construct
  source 1..80: mol_type = other DNA
aggatgtcgtgtgctgctcaatgtcttactcttggacaggcgcacttatcaccccgtgtgccgcggaagagcaaaaattg

SEQ ID NO: 107237 - DNA, 80 bp, synthetic construct
  source 1..80: mol_type = other DNA
cgcccaccttatgggcaaggatgattctgatgactcacttcttctccatccttctagcccaggaacaacttgaaaaagcc

SEQ ID NO: 107238 - DNA, 80 bp, synthetic construct
  source 1..80: mol_type = other DNA
ccgttttacagatggctcttacttgccgaatgcgcatacccattccaggatacagaggaagatctcatcggaggagaggg

SEQ ID NO: 107239 - DNA, 80 bp, synthetic construct
  source 1..80: mol_type = other DNA
ggactcgatattgttcatattaaccatggggatgttatacgtataccgttatttccggtacaacttttcatgcccgatgt

SEQ ID NO: 107240 - DNA, 80 bp, synthetic construct
  source 1..80: mol_type = other DNA
cacgtggatcttctcgtcggttcggcagctttatgctcagcactttacatcggagacctctgcggtggcgtgtttctggt

SEQ ID NO: 107241 - DNA, 80 bp, synthetic construct
  source 1..80: mol_type = other DNA
aacatgcgcacgtgatgtaggctggtcagcacggcgtcgctgtgatgaagcagcgcccggcgggtccgctgtaactgctg

SEQ ID NO: 107242 - DNA, 80 bp, synthetic construct
  source 1..80: mol_type = other DNA
gggccaaagtcctctgcatcctgttcctgttcgctggtgtggatgctaccacccgcaccaccggagcacaggcggcgcgc

SEQ ID NO: 107243 - DNA, 80 bp, synthetic construct
  source 1..80: mol_type = other DNA
gtatctgatgatggtggtgaagacgatagcgacgatgatgggtctacgccatcggatgtaattgaatttcgggattccga

SEQ ID NO: 107244 - DNA, 80 bp, synthetic construct
  source 1..80: mol_type = other DNA
aaaattcagtaatataaataataccacaaatccaaatgaagctgataaacaaatcacagttaagttgttgtttgatgcaa

SEQ ID NO: 107245 - DNA, 80 bp, synthetic construct
  source 1..80: mol_type = other DNA
aggaagggggagatgaaggtccgctgattagttctcgatcaagttctccgtttcctagcttaacaagtattaacagtgga

SEQ ID NO: 107246 - DNA, 80 bp, synthetic construct
  source 1..80: mol_type = other DNA
agatatcacagcaaagggtttgcaaattggtgttgacacgactgaaaacaagaatgagcctatttatgcaaatgaaatat

SEQ ID NO: 107247 - DNA, 80 bp, synthetic construct
  source 1..80: mol_type = other DNA
caagcaagtcatcacaaaaatcctatggtggctccaatacttccttacgaggtcggaagcggagctgcaagtctgggtcc

SEQ ID NO: 107248 - DNA, 80 bp, synthetic construct
  source 1..80: mol_type = other DNA
cgcccgcccgagtccgagtccggggcccggcgcggcgccgccctcttggcccccaccccctgggtggcgagtggcgagcg

SEQ ID NO: 107249 - DNA, 80 bp, synthetic construct
  source 1..80: mol_type = other DNA
gtcttccggcggaccggtgctatgccctaggggccacgcagtcggaatcttccgagcggcagtgtgctccagggtggtag

SEQ ID NO: 107250 - DNA, 80 bp, synthetic construct
  source 1..80: mol_type = other DNA
aagccatgcaaatagttcaataaagactccggaaacatcacggagtaatgaacaagcggcctctgaaacatgctttaggt

SEQ ID NO: 107251 - DNA, 80 bp, synthetic construct
  source 1..80: mol_type = other DNA
tctcccggcagctcctaagcgccgttgactacattcaccgccagggcattatccaccgcgacattaagaccgaaaatatt

SEQ ID NO: 107252 - DNA, 80 bp, synthetic construct
  source 1..80: mol_type = other DNA
tcgcaatacccccggagagatccttctgagaataccattaggccccaacctcaatcctttccttgcacatttgtcccgca

SEQ ID NO: 107253 - DNA, 80 bp, synthetic construct
  source 1..80: mol_type = other DNA
aatggagaactcctcacttaaaaaacattactggaactttagaaatgggaactcaactaatgcaaatccatacacaaatg

SEQ ID NO: 107254 - DNA, 80 bp, synthetic construct
  source 1..80: mol_type = other DNA
gtgctctccccccccccaagaaggccccgacgcctcccccaaggagacgccggacagtgggtctgagcgagagcaccaca

SEQ ID NO: 107255 - DNA, 80 bp, synthetic construct
  source 1..80: mol_type = other DNA
cgagaaagtgttaaccattgtaaatgctttgttggatagcaaagccatccgcaaagatgaggctggtttaatatacaacg

SEQ ID NO: 107256 - DNA, 80 bp, synthetic construct
  source 1..80: mol_type = other DNA
gcccagcacccaactacactcgtgcactatggcgcgtggctgccaacagctacgttgaggtgcgccgagtaggggacttc

SEQ ID NO: 107257 - DNA, 80 bp, synthetic construct
  source 1..80: mol_type = other DNA
gtcttgaaggacgttaagctagcggcctccaaagttagcgccaaccttctctcagtggaggatgcttgtgcattgacccc

SEQ ID NO: 107258 - DNA, 80 bp, synthetic construct
  source 1..80: mol_type = other DNA
cttgcctaccagctttggcaatacagtaacctgttacatcaaggccactgccgccagcagggccgcgggtctcaaaaacc

SEQ ID NO: 107259 - DNA, 80 bp, synthetic construct
  source 1..80: mol_type = other DNA
ctctgatccaagccacattacagcagaaacggcgggtcggcgtctcgccagaggctcccccccgtcgttggccagctcat

SEQ ID NO: 107260 - DNA, 80 bp, synthetic construct
  source 1..80: mol_type = other DNA
accttgccgggcaacccggcggtcgcctcactgatgtccttctcagcttccttgaccagcccgatgtcgacctctacaac

SEQ ID NO: 107261 - DNA, 80 bp, synthetic construct
  source 1..80: mol_type = other DNA
ggtggttgatttcagcctggaccctacctttacaattgagactaccactgtcccacaagacgccgtggtcagaagccaac

SEQ ID NO: 107262 - DNA, 80 bp, synthetic construct
  source 1..80: mol_type = other DNA
acgaaagctcctgaaccgccagaaggagtgaagtatgtgctcaatgaaaccaccaattggttgtgggcgttcctagccag

SEQ ID NO: 107263 - DNA, 80 bp, synthetic construct
  source 1..80: mol_type = other DNA
ctaaacagttgacatcgcttggcctaaatgccgtcgcattctacagaggtgtcgatgtggcagtgattccagcagccggc

SEQ ID NO: 107264 - DNA, 80 bp, synthetic construct
  source 1..80: mol_type = other DNA
ttgaccacctattgcctcactggcctatggcccttctgcctactgctcatggcactgccccggcaggcttatgcctatga

SEQ ID NO: 107265 - DNA, 80 bp, synthetic construct
  source 1..80: mol_type = other DNA
aaaaatggtttccggggcgggggtgatgagctgcgaggagagcaggtttcttaacagctgggacttgccgcacccggttg

SEQ ID NO: 107266 - DNA, 80 bp, synthetic construct
  source 1..80: mol_type = other DNA
gtgagtgctacgacgccgggtgcgcctggtacgagctgacgccagccgagacaaccactaggctgagggcctatttcaac

SEQ ID NO: 107267 - DNA, 80 bp, synthetic construct
  source 1..80: mol_type = other DNA
ccagccgtgccccagacctaccaagttgggtacctccatgcacccacgggcagcggaaagagcaccaaagtccctgtggc

SEQ ID NO: 107268 - DNA, 80 bp, synthetic construct
  source 1..80: mol_type = other DNA
gtgctatgacgcgggttgcgcttggtacgagcttacgcccgccgagaccacagttaggttacgggcataccttaacaccc

SEQ ID NO: 107269 - DNA, 80 bp, synthetic construct
  source 1..80: mol_type = other DNA
agccagcgtccaaggtatgcgggcccgtgtattgcttcacgcccagccctgtagtagtcgggacgaccaactcccaggga

SEQ ID NO: 107270 - DNA, 80 bp, synthetic construct
  source 1..80: mol_type = other DNA
cttactcctttgcctactcctacttagtgtgggggtaggcatctttttactccccgctcggtagagcggcacacactagc

SEQ ID NO: 107271 - DNA, 80 bp, synthetic construct
  source 1..80: mol_type = other DNA
ttgactttgaaatgtacggggccacttattctgtcactccgctggatctgccagcaatcattgaaagactccatggtcta

SEQ ID NO: 107272 - DNA, 80 bp, synthetic construct
  source 1..80: mol_type = other DNA
ccgcatccgcgtcttgggggtccacgttaaagacaccccagaacgcacccccatcgcccccgcagaccgcgaacttcacc

SEQ ID NO: 107273 - DNA, 80 bp, synthetic construct
  source 1..80: mol_type = other DNA
tggggttggggtgggggcgcggacaggcggctgacagtcaaatgcccgcgggggtgagcagatgtcgtgggcgtggccac

SEQ ID NO: 107274 - DNA, 80 bp, synthetic construct
  source 1..80: mol_type = other DNA
tgcaggcatttcaggggccctcgtggcttttaagatcatgagcggcgagaagccctcggttgaagacgtcgtgaatctcc

SEQ ID NO: 107275 - DNA, 80 bp, synthetic construct
  source 1..80: mol_type = other DNA
cttttcgacgaaaaggcccacctcctccgtctcggcggcctgggccgacagggacgtgtcggggtcctggcagcgcagct

SEQ ID NO: 107276 - DNA, 80 bp, synthetic construct
  source 1..80: mol_type = other DNA
ggacaggcgccctgatcacaccgtgcgccgcggaggaaagcaagctgcccatcaatgctttgagcaactctttgctgcgt

SEQ ID NO: 107277 - DNA, 80 bp, synthetic construct
  source 1..80: mol_type = other DNA
ggacaactagggaaacaaccacccagacaactaccagtcaaacaacacagcctactacagttagtacaactatggaggac

SEQ ID NO: 107278 - DNA, 80 bp, synthetic construct
  source 1..80: mol_type = other DNA
aaccctgccgggtaatccagctgtggcgtcccttatggcattctccgccgctttgacttctcccctagccacatccacca

SEQ ID NO: 107279 - DNA, 80 bp, synthetic construct
  source 1..80: mol_type = other DNA
tttcaccgatggagaagagggtcattgtttggggcgctgacactattgcctgtggtgatatattatctggccttcctgtc

SEQ ID NO: 107280 - DNA, 80 bp, synthetic construct
  source 1..80: mol_type = other DNA
ccacaggctgatgtcagcggcaatcaaagaccagaaagctgtgcatgctgatatgggctattggatagagagctcaaaaa

SEQ ID NO: 107281 - DNA, 80 bp, synthetic construct
  source 1..80: mol_type = other DNA
taccaacagaggataaaaagcaagaccaggacaacgcagaggcaaacgaggaacaagtcgggcggggggacgaaaggcat

SEQ ID NO: 107282 - DNA, 80 bp, synthetic construct
  source 1..80: mol_type = other DNA
cccaccggccccgcgtccgatacaacaaacgcgaccgcacgcctccccacgcaccccccactcatccgttccggtggctt

SEQ ID NO: 107283 - DNA, 80 bp, synthetic construct
  source 1..80: mol_type = other DNA
cctgacgccgtgcacatgcggtgcttcggatctgtacttggtcacgaggcacgcggatgtcatcccagtgcggcgtcgag

SEQ ID NO: 107284 - DNA, 80 bp, synthetic construct
  source 1..80: mol_type = other DNA
cacaaatcctaaacctcaaagacaaaccaaacgtaacaacaaccgtcgcccacaggacgttaagttcccgggtggcggtc

SEQ ID NO: 107285 - DNA, 80 bp, synthetic construct
  source 1..80: mol_type = other DNA
gaattaatgatggccaccataggaatcacactcctttcccaaagcaccataccagagaccattcttgaactgactgatgc

SEQ ID NO: 107286 - DNA, 80 bp, synthetic construct
  source 1..80: mol_type = other DNA
cgtactgttttttatttaaatttacacgctcgacgttgccccggttcggtgatcaccgggtcttatctatatacaccgtg

SEQ ID NO: 107287 - DNA, 80 bp, synthetic construct
  source 1..80: mol_type = other DNA
taatttattttacacacattccccgccccgccctaggttcccccacccccaacccctcacagcatatccaacgtcaggtc

SEQ ID NO: 107288 - DNA, 80 bp, synthetic construct
  source 1..80: mol_type = other DNA
atctatggagctgccttcagtggggtttcatggaccatgaaaatcctcataggagtcattatcacatggataggaatgaa

SEQ ID NO: 107289 - DNA, 80 bp, synthetic construct
  source 1..80: mol_type = other DNA
acgtgacggcggaagcggctaagcgcaggctagacagagggtccccgccctcgctagccagctcctcagcaagccagctc

SEQ ID NO: 107290 - DNA, 80 bp, synthetic construct
  source 1..80: mol_type = other DNA
ctagaaatcttggctgccccttgatgacaggagcttttttaagctgttcaaaggtcagatcgtcaggactaaccagacca

SEQ ID NO: 107291 - DNA, 80 bp, synthetic construct
  source 1..80: mol_type = other DNA
accattgattgtgaagcaagatcaggaatcaacacggaggattattatgtcttcactgtcaaggagaagtcatggctagt

SEQ ID NO: 107292 - DNA, 80 bp, synthetic construct
  source 1..80: mol_type = other DNA
aattcaaagatgatgttggagctcgacccaccatttggggattcttacattgtcataggagtcggggacaagaaaatcac

SEQ ID NO: 107293 - DNA, 80 bp, synthetic construct
  source 1..80: mol_type = other DNA
tgacgaagaccagtatgaggactgatgggccgtaccttttgatagatgcagcgaccggcgatcaccacggacgggacccc

SEQ ID NO: 107294 - DNA, 80 bp, synthetic construct
  source 1..80: mol_type = other DNA
cgttctgtgtgtcgcgatgtctctgcgcgcagtctggcatctggggcttttgggaagcctcgtggtggctgttcttgccg

SEQ ID NO: 107295 - DNA, 80 bp, synthetic construct
  source 1..80: mol_type = other DNA
tgtgcgcgtgccagggccccccccccatcatgggacagtatgtggaagtgtcttatacggctcaagcccgtactcactgg

SEQ ID NO: 107296 - DNA, 80 bp, synthetic construct
  source 1..80: mol_type = other DNA
cccactaacgtcaaaggcggacaggcaaaacaaaaaactactgaacaactgcaaaaccagcaggttgaatatgatattga

SEQ ID NO: 107297 - DNA, 80 bp, synthetic construct
  source 1..80: mol_type = other DNA
gataaaaataacccgctcggtcggacgtacaccacgttaataaatagacctacaatggcaaatctacgggactttttata

SEQ ID NO: 107298 - DNA, 80 bp, synthetic construct
  source 1..80: mol_type = other DNA
catcatgctcctcaaatgtctccgtagcgcatgacaactcggggaagaggtattactatctcacccgagacccagaaatc

SEQ ID NO: 107299 - DNA, 80 bp, synthetic construct
  source 1..80: mol_type = other DNA
aaaacgtgggaaaaggaggtcagcgacggattggatgagctggttgctggtcatcactctgttggggatgacgcttgctg

SEQ ID NO: 107300 - DNA, 80 bp, synthetic construct
  source 1..80: mol_type = other DNA
cacattgacaccatcgtgatgtccgctacgctctgctccgccctgtacgtgggggatgtctgcggggcagtgatgatcgc

SEQ ID NO: 107301 - DNA, 80 bp, synthetic construct
  source 1..80: mol_type = other DNA
ttttttaaccggccccacggcgccccggggggcgcgatcacggcggagcagaccaacgtgattctgcactccaccgagac

SEQ ID NO: 107302 - DNA, 80 bp, synthetic construct
  source 1..80: mol_type = other DNA
tggagtctcttgagaccaccatgaggtccccggtcttcaccgacaactctacgccccccgcggtgccccaaacctaccaa

SEQ ID NO: 107303 - DNA, 80 bp, synthetic construct
  source 1..80: mol_type = other DNA
gcgtgcccaaacccgctccaaatttcaaaaccgctatctggagggtggcggcatcagaatatgcggaggtaacgcagcac

SEQ ID NO: 107304 - DNA, 80 bp, synthetic construct
  source 1..80: mol_type = other DNA
gcgcggtgatgttggcttctcaagtcttcatcatctcgccccagcatcataagtttgtccaggactgtaactgttcggat

SEQ ID NO: 107305 - DNA, 80 bp, synthetic construct
  source 1..80: mol_type = other DNA
tctagtatgatgaggcgaaccgtgctaggcggagcggtggtgtatccggagggtcctcctccttcgtacgagagcgtgat

SEQ ID NO: 107306 - DNA, 80 bp, synthetic construct
  source 1..80: mol_type = other DNA
gtccgggacgcgaacacgcccatccaggggttccgtaaacacgtggacctcatggtgggcgcggctgcgttctgttcagc

SEQ ID NO: 107307 - DNA, 80 bp, synthetic construct
  source 1..80: mol_type = other DNA
ggagattgctttgggtggcatgatgggaggtctgtggaagtacctgaacgcagtgtccctttgcatcctgacaataaacg

SEQ ID NO: 107308 - DNA, 80 bp, synthetic construct
  source 1..80: mol_type = other DNA
tagaggaggcatgtgcgctgacccccccccattccgcaagatcgaagtatgggttcggggcaaaggaggttcgcagcttg

SEQ ID NO: 107309 - DNA, 80 bp, synthetic construct
  source 1..80: mol_type = other DNA
gtaagaactgggaacgtctcgcgctgctggatccctttaacacctactgtagctgtcccctacctcggggctccacttac

SEQ ID NO: 107310 - DNA, 80 bp, synthetic construct
  source 1..80: mol_type = other DNA
tcccgccttccggacctgctctcgcctatcttctttggctctcggtgcgattcgtcaggcagcggccttgtcgaatctcg

SEQ ID NO: 107311 - DNA, 80 bp, synthetic construct
  source 1..80: mol_type = other DNA
ccggactacgagccacccgtggtccacgggtgcgcgttgccaccagcaaagccccccccggtgccgccaccgcgccggaa

SEQ ID NO: 107312 - DNA, 80 bp, synthetic construct
  source 1..80: mol_type = other DNA
gcacatgtggaaaagctcccatagcgccccctccactttcataattaggcagaccttcataatagaaacaaatcctgctg

SEQ ID NO: 107313 - DNA, 80 bp, synthetic construct
  source 1..80: mol_type = other DNA
gtgtctccaccattggccggatacacatcaaccaacgtgcaatcattgcccctgacaaagaggtcctttacgaggctttt

SEQ ID NO: 107314 - DNA, 80 bp, synthetic construct
  source 1..80: mol_type = other DNA
tcgtcaaacgtctccgtcgcccgcgacgctactggacagagatattactacctcaccagagactgtaccactccacttgc

SEQ ID NO: 107315 - DNA, 80 bp, synthetic construct
  source 1..80: mol_type = other DNA
tccaagtggacgtaaaggctaaacccttcagggtgaatctcctctataaacattccagcaccttcaaccatgcccaaata

SEQ ID NO: 107316 - DNA, 80 bp, synthetic construct
  source 1..80: mol_type = other DNA
acgatatcgggcttttgatgcgatcgtccccgcccgcccagagagtgtgggacgcccgacggcgcgggaagagaaaaacc

SEQ ID NO: 107317 - DNA, 80 bp, synthetic construct
  source 1..80: mol_type = other DNA
ctcatcatcatcgtccaggcgaccgcgcaccgactggctacgggccgcatcgggcccggggcgctgccgggacgctcggc

SEQ ID NO: 107318 - DNA, 80 bp, synthetic construct
  source 1..80: mol_type = other DNA
ggtcgtgagcaggttccgggtggtcggcgccgtggcccgggccttggtggtgaggtcgcgcgcgtagaagccgtcgacct

SEQ ID NO: 107319 - DNA, 80 bp, synthetic construct
  source 1..80: mol_type = other DNA
tccgggtgcccagcaacgcctgcaactcatcaacaccaatgggtcctggcacataaaccggactgccctgaactgcaacg

SEQ ID NO: 107320 - DNA, 80 bp, synthetic construct
  source 1..80: mol_type = other DNA
ccagatatgtgtgctcttgttgatctccccaatcgaatttcatatattaaactgggggacactaccagtacgtgctgcgt

SEQ ID NO: 107321 - DNA, 80 bp, synthetic construct
  source 1..80: mol_type = other DNA
tgatggacgtgatatcaagagaagatcaaagggggagtggacaggtggtcacttatgctcttaacactttcacgaacatc

SEQ ID NO: 107322 - DNA, 80 bp, synthetic construct
  source 1..80: mol_type = other DNA
aatcctgtggctaccggcgatgccgggctagtggagttttcaccaccagcatggggaacaccattacgtgttatgtgaag

SEQ ID NO: 107323 - DNA, 80 bp, synthetic construct
  source 1..80: mol_type = other DNA
aagacgccgcgtttccaggtaggttagacacctgcttctccccaatagaggggggtggacccaaacgacaggtggcgctc

SEQ ID NO: 107324 - DNA, 80 bp, synthetic construct
  source 1..80: mol_type = other DNA
gtggcagtccatagtgacttgtcgtactggattgagagtcgctacaacgacacatggaaacttgagagggcagtctttgg

SEQ ID NO: 107325 - DNA, 80 bp, synthetic construct
  source 1..80: mol_type = other DNA
cccgagcagaagctatcctgcacatttgggctcctcccctgcgggtcagaggggcgcgtgactctgtcatcttgttgacg

SEQ ID NO: 107326 - DNA, 80 bp, synthetic construct
  source 1..80: mol_type = other DNA
ccatggctcagaggaaaccaattttgcataaaaattctaaatccctatatgccgagtgtggtagaaactttggagcaaat

SEQ ID NO: 107327 - DNA, 80 bp, synthetic construct
  source 1..80: mol_type = other DNA
ttggttgatgctgatgatatcacaggtggaagcagccttagagaaccttgtcacgctaaacgccgtcactgctgccggga

SEQ ID NO: 107328 - DNA, 80 bp, synthetic construct
  source 1..80: mol_type = other DNA
gtgggcgctggcattgctggtgcggccgtcggcagcataggccttgggaaggtgctcgtggacatcatggcgtgctatgg

SEQ ID NO: 107329 - DNA, 80 bp, synthetic construct
  source 1..80: mol_type = other DNA
cacgggaagctggctgtggaatttacaaacaaacacgcctccggatttagttggcgtgccatggcgaagtcaggcggcgc

SEQ ID NO: 107330 - DNA, 80 bp, synthetic construct
  source 1..80: mol_type = other DNA
cagcctgtaccccagcatcatccaggcccacaacctgtgcttcagcacgctctccctgagggccgacgcagtggcgcacc

SEQ ID NO: 107331 - DNA, 80 bp, synthetic construct
  source 1..80: mol_type = other DNA
gcctgtccacgacctcccaaaaaacaacatggcttccggtgctattgggatctcttggatgcaaaccactaaccatgttt

SEQ ID NO: 107332 - DNA, 80 bp, synthetic construct
  source 1..80: mol_type = other DNA
gcacccaaggggccgtgcgggagtttctccgcggtcaggcggcggcgctgacggaccttggtctggcccacgcaaacaac

SEQ ID NO: 107333 - DNA, 80 bp, synthetic construct
  source 1..80: mol_type = other DNA
cgaagaccctagctggcccaaagggtcccatcacccaaatgtacaccaatgtagaccaagatcttgttggctggcaggcg

SEQ ID NO: 107334 - DNA, 80 bp, synthetic construct
  source 1..80: mol_type = other DNA
gaggaacccattccagaagcttacaacgccgacatgttaaggaagaggcagctgacagtccttgacctccaccccggagc

SEQ ID NO: 107335 - DNA, 80 bp, synthetic construct
  source 1..80: mol_type = other DNA
cacttaaagacaaagacgataaagtaattggatctgctgtaaatgtaagacttggaaaagatggtggtcttgattttaat

SEQ ID NO: 107336 - DNA, 80 bp, synthetic construct
  source 1..80: mol_type = other DNA
gtgagcggagaggaaacagatttcttttttggaggataacaacttaacttgattgcgaacagttttttagcagggaatta

SEQ ID NO: 107337 - DNA, 80 bp, synthetic construct
  source 1..80: mol_type = other DNA
cctcactaacattgtgcatgttcatattttcacattctaagtaccgagagttctcctctacaacagcactgccgcggtcc

SEQ ID NO: 107338 - DNA, 80 bp, synthetic construct
  source 1..80: mol_type = other DNA
gtcctggtcctggctctgcgagtagttggtgatgcggctggcgttggccgtgagccacttttcaatagtcaggccgggct

SEQ ID NO: 107339 - DNA, 80 bp, synthetic construct
  source 1..80: mol_type = other DNA
gataaccgacagagatttcattgaaggtgtccatgggggcacttgggtgtcagccactctggagcaggacaaatgcgtga

SEQ ID NO: 107340 - DNA, 80 bp, synthetic construct
  source 1..80: mol_type = other DNA
gaagggatacacaaaaggaggacctggacatgaggaacctatcccaatggcgacctatggatggaacctagtaaagctac

SEQ ID NO: 107341 - DNA, 80 bp, synthetic construct
  source 1..80: mol_type = other DNA
tccattgctgcactccaccactgagtgggcggtgttaccatgctccttctccgacctaccggcattgtctactgggctat

SEQ ID NO: 107342 - DNA, 80 bp, synthetic construct
  source 1..80: mol_type = other DNA
gcctgaggaggtatgaagacaccattgtagttgaggacactgttttgtaaataataaagctgtattgagtagttgtatag

SEQ ID NO: 107343 - DNA, 80 bp, synthetic construct
  source 1..80: mol_type = other DNA
gtttaactccacggggtgcagcgaacgcatcagtgcatgccgggatcttgggtccttccgggtgcgatggggtgctctca

SEQ ID NO: 107344 - DNA, 80 bp, synthetic construct
  source 1..80: mol_type = other DNA
catgctgcgatatgtgattgctgtgggggtgacatttcaccttgagctagggccagaaatcgtggctttgatgctgcttc

SEQ ID NO: 107345 - DNA, 80 bp, synthetic construct
  source 1..80: mol_type = other DNA
cttcagcctatttgcgcaaatttattccagaggactatcacgcccaccaaattaagttctacgaagaccaatcccgacct

SEQ ID NO: 107346 - DNA, 80 bp, synthetic construct
  source 1..80: mol_type = other DNA
cgaccccgctccaacaagacgctatcccgggaaaggcacgctctttataattcttttttatttcccatctacgtgcggat

SEQ ID NO: 107347 - DNA, 80 bp, synthetic construct
  source 1..80: mol_type = other DNA
cgagcgcgacgtcctccgtgtcgggtcgggcggcttctggccgcggcgctcgcgcctgtggtgcggcgtggaccacgccc

SEQ ID NO: 107348 - DNA, 80 bp, synthetic construct
  source 1..80: mol_type = other DNA
tatttttaagactagacggtggtgttatgccacgttttacactaaacgctagcccatgtgcatgtcccgcggtagggtat

SEQ ID NO: 107349 - DNA, 80 bp, synthetic construct
  source 1..80: mol_type = other DNA
cccagcacaggcaggctcgtccgacttccgcatacaccccatcctaccgcgtgcttccgcacccccgcccacgcgtgtac

SEQ ID NO: 107350 - DNA, 80 bp, synthetic construct
  source 1..80: mol_type = other DNA
aggtgacgcgtaaaccaaacttcaatatgaagatcggggcgtataagcgacttccaccttgttatatttgaaccttccgg

SEQ ID NO: 107351 - DNA, 80 bp, synthetic construct
  source 1..80: mol_type = other DNA
aaagagcgatacgaagacatttctccacccccctgtaatacccgtaaataaaggtaagtccacaaacaaaagcactgtat

SEQ ID NO: 107352 - DNA, 80 bp, synthetic construct
  source 1..80: mol_type = other DNA
cttacctgaggacatcaaatatgaagttggggtttttgttcacggatcaacggactcaaccagtcatggaaattattcta

SEQ ID NO: 107353 - DNA, 80 bp, synthetic construct
  source 1..80: mol_type = other DNA
ccgtgatggatgttatatccagacgtgatcagagaggaagtggacaggtcggaacttatggcttaaatactttcaccaat

SEQ ID NO: 107354 - DNA, 80 bp, synthetic construct
  source 1..80: mol_type = other DNA
aagcttccatatcaaacataaccacggcaacaagatgtccaacgcaaggagagccttacctcaaagaggaacaagatcaa

SEQ ID NO: 107355 - DNA, 80 bp, synthetic construct
  source 1..80: mol_type = other DNA
agaatgttccgggaagggagagatgtggcagacttcatccagtatgcttccggtcgtaggagcgccatggacatcctgac

SEQ ID NO: 107356 - DNA, 80 bp, synthetic construct
  source 1..80: mol_type = other DNA
ccgccccgggccccccgcgtccgcggccgcgtcgggacccgcgcgcccccgcgcggccgtggccccgtgcgtgcgagcgc

SEQ ID NO: 107357 - DNA, 80 bp, synthetic construct
  source 1..80: mol_type = other DNA
cggctcccgacctagattccggctcttgggaaacgtgctccgaggaggagggttctgaaatttgttgctccatgtcctac

SEQ ID NO: 107358 - DNA, 80 bp, synthetic construct
  source 1..80: mol_type = other DNA
caagaaatttccaatcgctctgccagtttgggcgcgggctgactataatccaccattggttgaaacgtggaaacggcccg

SEQ ID NO: 107359 - DNA, 80 bp, synthetic construct
  source 1..80: mol_type = other DNA
agctatccgcaaagatgaagcgggtttaatatacaacgctttgttagagcgggtggcgcgctacaatagtactaacgttc

SEQ ID NO: 107360 - DNA, 80 bp, synthetic construct
  source 1..80: mol_type = other DNA
tagcctttaagatcatgagtggcgagaggcccacaacagaagacctcgtcaacctcctgcctgccatcttgagccctggt

SEQ ID NO: 107361 - DNA, 80 bp, synthetic construct
  source 1..80: mol_type = other DNA
atgaacaggatgtggatctaggcagtggaacaagaaatgtgggcattgagaccgaaaaacccaatcttgaaattataggg

SEQ ID NO: 107362 - DNA, 80 bp, synthetic construct
  source 1..80: mol_type = other DNA
cgagggccagggggtgtacaacgtcgtccggtccagcgaggcgaccacccggcagctgcaggcggcgatctttcacgcgc

SEQ ID NO: 107363 - DNA, 80 bp, synthetic construct
  source 1..80: mol_type = other DNA
acaataggggtaggcatcttcctgttaccagctcgataggctggtaatttacactccatattctgtttttattttttttt

SEQ ID NO: 107364 - DNA, 80 bp, synthetic construct
  source 1..80: mol_type = other DNA
tcagaggccgagtggtcccattcactgcttactccctgctcggcctatggtcctttgccctactgctcctggtgttgcct

SEQ ID NO: 107365 - DNA, 80 bp, synthetic construct
  source 1..80: mol_type = other DNA
ggaaatagaggaccctctttaagaacgaccactgcctctggaaaactcataacagaatggtgctgccgatcctgcacact

SEQ ID NO: 107366 - DNA, 80 bp, synthetic construct
  source 1..80: mol_type = other DNA
acccgctgttttgactcaacggtcaccgagaatgatatccgtgtggaagagaccatctaccaatgttgtgacctggaccc

SEQ ID NO: 107367 - DNA, 80 bp, synthetic construct
  source 1..80: mol_type = other DNA
ccgacccgccccaaaatagcccgcgcgtcgacgggacccaggtatcccccctgccgggcctgcggaggaccgcgtggaac

SEQ ID NO: 107368 - DNA, 80 bp, synthetic construct
  source 1..80: mol_type = other DNA
ctgagcctgcgccggcggccccccgcgtccccgcccgcggacgcgccgcgcgggaaggtgcgcctcccctccgacccgcc

SEQ ID NO: 107369 - DNA, 80 bp, synthetic construct
  source 1..80: mol_type = other DNA
cgactaccaagcgctcaagtcatttaaagagtttgcagcagggaagagatcagcgctgggcatgatggaggtcatgggta

SEQ ID NO: 107370 - DNA, 80 bp, synthetic construct
  source 1..80: mol_type = other DNA
tcgctcgcctcatatggtggaaccaatacatgatatgtagatgtgaggctaccttgcaggtgtgggttcctacattgctc

SEQ ID NO: 107371 - DNA, 80 bp, synthetic construct
  source 1..80: mol_type = other DNA
gtttggacacctccgcaccacttacaattacctcaggcgccctaacagtggcaaccaccgctcctctgatagttactagc

SEQ ID NO: 107372 - DNA, 80 bp, synthetic construct
  source 1..80: mol_type = other DNA
cggtttctatctactgcatttgtaatcacccaggattgcatgaaagcctttgctgtcttatgtgtactgagtttaataaa

SEQ ID NO: 107373 - DNA, 80 bp, synthetic construct
  source 1..80: mol_type = other DNA
taacaactcaagaccgcctacaggcaactggtttgggtgcacctggatgaacgggaccggcttcaccaaaacgtgcggcg

SEQ ID NO: 107374 - DNA, 80 bp, synthetic construct
  source 1..80: mol_type = other DNA
atgaacagacatatcaagaaataactagtgttagccgagcgctgggtcaggaggacactggcagtttagaggcaacatta

SEQ ID NO: 107375 - DNA, 80 bp, synthetic construct
  source 1..80: mol_type = other DNA
ggccgcacagactcgtagtagacccgaatctccacgtttccccgccgccggatcatggtcgccgccccggtgcggtggcc

SEQ ID NO: 107376 - DNA, 80 bp, synthetic construct
  source 1..80: mol_type = other DNA
gacaaggacagttccaaatggaaggctcgccctacacagttttaccagtttgtttagaaaaaaagcagattttgggaaaa

SEQ ID NO: 107377 - DNA, 80 bp, synthetic construct
  source 1..80: mol_type = other DNA
ggtcccccaccctggccctggtgacatcacaggtgctgcgtataccacagaccatctttgacatggtggtaggggcccac

SEQ ID NO: 107378 - DNA, 80 bp, synthetic construct
  source 1..80: mol_type = other DNA
cttacacagccctgttcagtggagtctcttgggtgatgaaaattggaataggtgtcctcacttggatagggttgaattca

SEQ ID NO: 107379 - DNA, 80 bp, synthetic construct
  source 1..80: mol_type = other DNA
cggggtccaggaggacgcggccaatctgagagtcttcacggaggctatgaccagatattccgccccccccggggacccgc

SEQ ID NO: 107380 - DNA, 80 bp, synthetic construct
  source 1..80: mol_type = other DNA
caaaggagaggcaggacaggcagaggcaagcacggggagtacaggtacgtctcgcaaggggaacgaccgtcaggcatgtt

SEQ ID NO: 107381 - DNA, 80 bp, synthetic construct
  source 1..80: mol_type = other DNA
gtggggtatcgacagagtgccagccctgggaccgaaccccgcgtttatgaacaaacgacccaacacccgtgcgttttatt

SEQ ID NO: 107382 - DNA, 80 bp, synthetic construct
  source 1..80: mol_type = other DNA
aggtatatgtcaacatttacagtaatatattaaaggttaaatttataaaacactcacgtttgtgttgtgacttgacgcga

SEQ ID NO: 107383 - DNA, 80 bp, synthetic construct
  source 1..80: mol_type = other DNA
gcgggtcgcacgccccgcctccgcgcaggatcgtgtggacgaaaaaaagctcgggttggccaagaatcccggccaagagg

SEQ ID NO: 107384 - DNA, 80 bp, synthetic construct
  source 1..80: mol_type = other DNA
cctctctaacagaggttgggagttctattgaagtggttgggtatttgattttaggggtggtcctgggtgcgtgcatagcg

SEQ ID NO: 107385 - DNA, 80 bp, synthetic construct
  source 1..80: mol_type = other DNA
aagctggtacctgtcctatacctacggggaccccgagaaggtggtgcagtcgtggacgctgctcaccaccccggacgtca

SEQ ID NO: 107386 - DNA, 80 bp, synthetic construct
  source 1..80: mol_type = other DNA
ctccaaaaaggctgaagaagctggaagatgaactgaattatggatggaagaaatggggaaaaaccttatttgtggaacct

SEQ ID NO: 107387 - DNA, 80 bp, synthetic construct
  source 1..80: mol_type = other DNA
cattctatggcaaggccatccccctagaatacatcaaggggggcaggcatctgatcttttgccactcaaagaagaaatgc

SEQ ID NO: 107388 - DNA, 80 bp, synthetic construct
  source 1..80: mol_type = other DNA
gttcgcgttatggagggtgtctgcagaggagtacgtagaagtaaagcggtcaggggatttccattacatcacgggtgtga

SEQ ID NO: 107389 - DNA, 80 bp, synthetic construct
  source 1..80: mol_type = other DNA
gtgagatgcatgtactcgtgttggcgaaccagatccaggcgccaaaaggtgtaaatgtgttccggggagctggccaccag

SEQ ID NO: 107390 - DNA, 80 bp, synthetic construct
  source 1..80: mol_type = other DNA
gccgaagccgtttttcagggatgaagtgtcgtttagcgtgggccttaataccttcgtggtcgggtctcagcttccctgtg

SEQ ID NO: 107391 - DNA, 80 bp, synthetic construct
  source 1..80: mol_type = other DNA
gttacgtattctgtcgctccactggacctaccagcaatcattcaacgactccatggaatggctgctttttcactccataa

SEQ ID NO: 107392 - DNA, 80 bp, synthetic construct
  source 1..80: mol_type = other DNA
cgcgcatacccgaggacgcactggtcgcaccactgtagacgatgttattgactcggtagtggccgatgctcgcaagtatc

SEQ ID NO: 107393 - DNA, 80 bp, synthetic construct
  source 1..80: mol_type = other DNA
tcaatatgtcaggctgtttggagcggatggggtcttgtaagaccctcaaccaatttcagcagggttggtggcctcttgaa

SEQ ID NO: 107394 - DNA, 80 bp, synthetic construct
  source 1..80: mol_type = other DNA
gccctggttgacacctcggtgcatggtagactacccataccggctttggcattacccatgtacagtcaattttacattgt

SEQ ID NO: 107395 - DNA, 80 bp, synthetic construct
  source 1..80: mol_type = other DNA
caacttgcggttgctcaacgggcggcgaaggggaagtccacgcctacatggaggtagagtcataatcgtgcatcaggata

SEQ ID NO: 107396 - DNA, 80 bp, synthetic construct
  source 1..80: mol_type = other DNA
ggtaccccgggcacgcggtgagcatccggtctatgagccggtagtgcaggtgggcggacgtgccgggaaagatgacgtac

SEQ ID NO: 107397 - DNA, 80 bp, synthetic construct
  source 1..80: mol_type = other DNA
tggatgtcgacaaaaaaccctcgaccagcatcgaggtgcaaaccgacccctggctcccagcctccaccgctaccgtctcc

SEQ ID NO: 107398 - DNA, 80 bp, synthetic construct
  source 1..80: mol_type = other DNA
gggttgctcgtctgggacctcgggcatgcccatacacgcacaacacggacgccgcaccggatgggacgtcgtaaggtggc

SEQ ID NO: 107399 - DNA, 80 bp, synthetic construct
  source 1..80: mol_type = other DNA
catcatcccgacgccgggctaccgcggcacccggtactacgccagccgcaggcgcccagccgccaaacgccgccgccgca

SEQ ID NO: 107400 - DNA, 80 bp, synthetic construct
  source 1..80: mol_type = other DNA
aggccgaggcagccctagaaaacctggtgaggctcaacgcgatcgccgccgccagcaactccggcgtacactggggtctt

SEQ ID NO: 107401 - DNA, 80 bp, synthetic construct
  source 1..80: mol_type = other DNA
tgctctcatgcttgcttacacccacagccgggctggagtaccgtaatgcctctggactctacatggtgaccaacgactgt

SEQ ID NO: 107402 - DNA, 80 bp, synthetic construct
  source 1..80: mol_type = other DNA
cagcaagagactcaaagctaaccttagcacttacaaaatgtggtagtcaaattttggccactgtatctttacttgttgtt

SEQ ID NO: 107403 - DNA, 80 bp, synthetic construct
  source 1..80: mol_type = other DNA
tctcggaggttcgctccggccctgcccatctgggcacggccggactacaaccccccgttgttggagacgtggaaaaagcc

SEQ ID NO: 107404 - DNA, 80 bp, synthetic construct
  source 1..80: mol_type = other DNA
acgttaagcttagcttcctcaaagaatctgtctttgtcggtccacgtagactaacagttttttaattagagagcagatct

SEQ ID NO: 107405 - DNA, 80 bp, synthetic construct
  source 1..80: mol_type = other DNA
aaagtactggtgctcaacccctctgttgctgcaacattgggcttcggagcttacatgtccaaggcccacggggtcgaccc

SEQ ID NO: 107406 - DNA, 80 bp, synthetic construct
  source 1..80: mol_type = other DNA
tgtggcgcggggccttggttgacacctcgatgcttggttgactatccataccggctttggcattacccatgtacactcaa

SEQ ID NO: 107407 - DNA, 80 bp, synthetic construct
  source 1..80: mol_type = other DNA
cggcgtcccactctagaatcggttgggaccgcttcgtgggcggagttatccgccggttggctgcgcgccgccccggcctg

SEQ ID NO: 107408 - DNA, 80 bp, synthetic construct
  source 1..80: mol_type = other DNA
gccctcagtcgacccaagcgcggaaccgaccgcccccgcaaccactactccccccgacgagatggccacacaagccgcaa

SEQ ID NO: 107409 - DNA, 80 bp, synthetic construct
  source 1..80: mol_type = other DNA
gcaggatccgctgtgagcgtatatagggcgtctgcgcgtagaacccagccaaagacccccagacacggagaggagtcttt

SEQ ID NO: 107410 - DNA, 80 bp, synthetic construct
  source 1..80: mol_type = other DNA
ccaccggtcttatccatctgcaccagaatatcgtggatgttcagtacctctacggaatctccccgatagtgatatcgtgg

SEQ ID NO: 107411 - DNA, 80 bp, synthetic construct
  source 1..80: mol_type = other DNA
gctgctgtttggcgcgcaccacggcgtccttggtatcggccaggtcctgtcgggtcacgaatgcgacgtagtcggcgtac

SEQ ID NO: 107412 - DNA, 80 bp, synthetic construct
  source 1..80: mol_type = other DNA
tgttcaaaccatttcacggaactgatcatgaaggacggcaggacgttggtggtcccgtgtcgtggacaagacgagttgat

SEQ ID NO: 107413 - DNA, 80 bp, synthetic construct
  source 1..80: mol_type = other DNA
gctgactccccaaaaagactgtcagcagccattggaaaggcatgggaggagggagtgtgtggaattcgatcagccacgcg

SEQ ID NO: 107414 - DNA, 80 bp, synthetic construct
  source 1..80: mol_type = other DNA
gaggaggaggatgcggggtactgacgcctccgtgatgtgtttttagatgtcccagcaagccccggaccccgccataaggg

SEQ ID NO: 107415 - DNA, 80 bp, synthetic construct
  source 1..80: mol_type = other DNA
cttcgtgcccattgagaacatggaaacaacaatgcggtctccctctttcaccgataattcggcaccaccagctgtgcccc

SEQ ID NO: 107416 - DNA, 80 bp, synthetic construct
  source 1..80: mol_type = other DNA
ggtgtattgggcgggtttttgtaactttttggttattttggcgcgaaaattgagtaatgcggaagttgaacgaactctgg

SEQ ID NO: 107417 - DNA, 80 bp, synthetic construct
  source 1..80: mol_type = other DNA
ttttttttatattttcttagatgcatccagttctgcgacaaatgcgaccccagcccagggtaactacggcctcagcagcg

SEQ ID NO: 107418 - DNA, 80 bp, synthetic construct
  source 1..80: mol_type = other DNA
gggtgtactgtcatgccacgaacagccacgatgtaacatcaccacaggcaatgagaggagtgtgatatgcacagtagtca

SEQ ID NO: 107419 - DNA, 80 bp, synthetic construct
  source 1..80: mol_type = other DNA
ataccgcctaggctcggtcaccaatgaggttactctcactcaccccgtaaccaagtacatcgccacatgcatgcaagctg

SEQ ID NO: 107420 - DNA, 80 bp, synthetic construct
  source 1..80: mol_type = other DNA
aactcgaccccctcgaagttagaagacgattcaaaacgatggacgaagactgagtttccctatcgttgccagcatgagca

SEQ ID NO: 107421 - DNA, 80 bp, synthetic construct
  source 1..80: mol_type = other DNA
aagccactgtggtcctccgggacgttttctggatggccgacatttccccaggcgcttttgcgccttgtgtaaaagcgcgg

SEQ ID NO: 107422 - DNA, 80 bp, synthetic construct
  source 1..80: mol_type = other DNA
cgcggggtcaagcgcgagggcgagagcatgtacccgaccatgcagatcatggtgcccaagcgccggcgcgtggaggacgt

SEQ ID NO: 107423 - DNA, 80 bp, synthetic construct
  source 1..80: mol_type = other DNA
cgccgcccgggctctgctgcgccgcgccagacgcacgggccgccgggccatgatacgagccgcgcgccgcgctgccactg

SEQ ID NO: 107424 - DNA, 80 bp, synthetic construct
  source 1..80: mol_type = other DNA
tgtgacccaggacgaactgaagtgcccttgccaggtaccttcaccggagttcttcacagaggtagacggagtgagattac

SEQ ID NO: 107425 - DNA, 80 bp, synthetic construct
  source 1..80: mol_type = other DNA
actggtctgctccatgcagtacgtcgtggttgagagacatctgggactgggtttgcaccgtgttatctgacttcaaaaca

SEQ ID NO: 107426 - DNA, 80 bp, synthetic construct
  source 1..80: mol_type = other DNA
cacaactgccatgcgagcccgagcccgacgtggctgtcctaacctctatgctaactgacccatcacacattacagcagaa

SEQ ID NO: 107427 - DNA, 80 bp, synthetic construct
  source 1..80: mol_type = other DNA
gcaagacgaccgggggcagacgggggaggccgcgcgtggtcgacggctgctgcccgccgtcgtctctccgatggtgtcga

SEQ ID NO: 107428 - DNA, 80 bp, synthetic construct
  source 1..80: mol_type = other DNA
cggttgtgtcaggctgcgcgcttcctccacagggtttaccccctgttccaccaccgaggaagaaaaaacttgtccagctg

SEQ ID NO: 107429 - DNA, 80 bp, synthetic construct
  source 1..80: mol_type = other DNA
aggcctgggtaaggtgctggtggacatcctggcaggatatggtgcgggcatttcggtggccctcgtcgcattcaagatca

SEQ ID NO: 107430 - DNA, 80 bp, synthetic construct
  source 1..80: mol_type = other DNA
ttgctccgtgtgtgcgccttggtgaagcgtctcatgggaggtaggtatattcaggtagctctaattacccttgggagatg

SEQ ID NO: 107431 - DNA, 80 bp, synthetic construct
  source 1..80: mol_type = other DNA
gggccgtggttatgaggaggccccggcgtgcgcgttcccgctgctcggccgagggcgcgcccgccaggaacggcgcccgg

SEQ ID NO: 107432 - DNA, 80 bp, synthetic construct
  source 1..80: mol_type = other DNA
ccgaactccagcatcgtttatgaggcggacaccatgattctacacctcccagggtgtgtcccgtgtgtcaaagcaggtaa

SEQ ID NO: 107433 - DNA, 80 bp, synthetic construct
  source 1..80: mol_type = other DNA
actcctggggtgtaaatgagtctgatgtattcctgctggaaagcccgaggccccctgcagggtggtggttcggctgtact

SEQ ID NO: 107434 - DNA, 80 bp, synthetic construct
  source 1..80: mol_type = other DNA
tgcgcgattgccactatgtgacaggggtaactactgacaacatcaagtgcccgtgccaggtcccagcaccagaattcttc

SEQ ID NO: 107435 - DNA, 80 bp, synthetic construct
  source 1..80: mol_type = other DNA
gttacactggaggcagtagcagattcatgaagattcctttgttgctaatactcccacacaccccggaccgcaatgtccag

SEQ ID NO: 107436 - DNA, 80 bp, synthetic construct
  source 1..80: mol_type = other DNA
atggagtcataatgcccaacggctcatacataagcgcgatagtgcagggtgaaaggatggatgagccgatcccagccgga

SEQ ID NO: 107437 - DNA, 80 bp, synthetic construct
  source 1..80: mol_type = other DNA
atctgtctatcttctagacttctttcttggtggctccatcttagccctagtcacggctagctgtgaaaggtccgtgagcc

SEQ ID NO: 107438 - DNA, 80 bp, synthetic construct
  source 1..80: mol_type = other DNA
tactgtttatcagtgggctgcgtggtaatctgcggtagaatcaccaccagtggcaaaccagtgatagttccagatcggga

SEQ ID NO: 107439 - DNA, 80 bp, synthetic construct
  source 1..80: mol_type = other DNA
ggacaactagggaaacaactgcacagcctactacaaatcccaccactcagacaactactagtccaacaacacagcccact

SEQ ID NO: 107440 - DNA, 80 bp, synthetic construct
  source 1..80: mol_type = other DNA
tccgctctctcgacgcaagggctcttaaacacgtcaagagtgtgtggcaggacttactggaggactgtgatacccctata

SEQ ID NO: 107441 - DNA, 80 bp, synthetic construct
  source 1..80: mol_type = other DNA
tggttcctggtggacgacccctcgccggcggctaagtcggccgttgcggcccaggagtcgtgcgaccgccccgggctggc

SEQ ID NO: 107442 - DNA, 80 bp, synthetic construct
  source 1..80: mol_type = other DNA
cctgttttgatctcggctggaactctgttgaggcattcacatacacactagagaacagttcactagcctccacgccacca

SEQ ID NO: 107443 - DNA, 80 bp, synthetic construct
  source 1..80: mol_type = other DNA
caatgggagggaagtacgtgcaaatgctggtgctgacagtcggccggtggttcaacacctacctgtacgaccacctatcc

SEQ ID NO: 107444 - DNA, 80 bp, synthetic construct
  source 1..80: mol_type = other DNA
agtacatcgtgctcgccttcctgatgcttgcggacgctcgggtctgctcgtgtctttggatgctgatgcttgtagcgcag

SEQ ID NO: 107445 - DNA, 80 bp, synthetic construct
  source 1..80: mol_type = other DNA
catacccctggtggccctcacactgacatcctacctgggactgacgcagcccttcttgggcttgtgtgccttcatggcaa

SEQ ID NO: 107446 - DNA, 80 bp, synthetic construct
  source 1..80: mol_type = other DNA
cggcctcacacatatcgatgcccatttcctctcccagacaaagcaagctggagagaacttcccatatctggtggcctacc

SEQ ID NO: 107447 - DNA, 80 bp, synthetic construct
  source 1..80: mol_type = other DNA
gacccactcccctcctctacagattggggtctgtgcaaaatgaagtgacactcacccatccagttacaaaatacatcatg

SEQ ID NO: 107448 - DNA, 80 bp, synthetic construct
  source 1..80: mol_type = other DNA
gtcgagtatctgctcgagcagctgaataacctcaccgaaaccgtctcccccaacactgacgtccgtacgtattccggaaa

SEQ ID NO: 107449 - DNA, 80 bp, synthetic construct
  source 1..80: mol_type = other DNA
cgttgtcatctgtggcaggattgtggtatcaggaaaacctgcggtggtgcctgaccgagaggtcttgtaccagcaattcg

SEQ ID NO: 107450 - DNA, 80 bp, synthetic construct
  source 1..80: mol_type = other DNA
tgtggaaagcattttggatttgattcaagaggaagaaagagaacaaacagtgcctgttgatctgtcagtgaaacgcccta

SEQ ID NO: 107451 - DNA, 80 bp, synthetic construct
  source 1..80: mol_type = other DNA
tcttttcccccatggagaaaaagatcattacgtggggtgcagacaccgctgcgtgtggcgacatcttgaggggtctccct

SEQ ID NO: 107452 - DNA, 80 bp, synthetic construct
  source 1..80: mol_type = other DNA
ctcggatggttggagagaacaaagagtgacctaagccatctaatgggaaggagagaggagggggcaaccataggattctc

SEQ ID NO: 107453 - DNA, 80 bp, synthetic construct
  source 1..80: mol_type = other DNA
agctaacaactggcagaagcttgagaccttctggcacaagcatatgtggaactttgtgagcgggatccaatacctagcag

SEQ ID NO: 107454 - DNA, 80 bp, synthetic construct
  source 1..80: mol_type = other DNA
actttgaaatgtacggggctacctattcagtcactccgctggatttaccagctatcattgaaagactccatggtttggcc

SEQ ID NO: 107455 - DNA, 80 bp, synthetic construct
  source 1..80: mol_type = other DNA
catgtttgactcagttgtcctctgtgagtgctatgacgcgggctgctcgtggtacgatctgcagcccgccgagaccacag

SEQ ID NO: 107456 - DNA, 80 bp, synthetic construct
  source 1..80: mol_type = other DNA
gagaagaaagtcatcacttggggcgctgatacagtcgcgtgcggtgacataatcgctggactcccggtttcagctaggaa

SEQ ID NO: 107457 - DNA, 80 bp, synthetic construct
  source 1..80: mol_type = other DNA
gcataggtacggtgctggatcaagcagagacagctggggtgcggctgacagtgctggcaacagcgaccccccccggcagc

SEQ ID NO: 107458 - DNA, 80 bp, synthetic construct
  source 1..80: mol_type = other DNA
ccagagcaaaggatccaccagcgggaactaggaagatcatgaaagttgtcaacaggtggctgttccgccacctggccaga

SEQ ID NO: 107459 - DNA, 80 bp, synthetic construct
  source 1..80: mol_type = other DNA
gattgtctcggaagcccccaacacccgccagtaagtcatcggctcgggtacgtagacgatatcgtcgcgcgaacccaggg

SEQ ID NO: 107460 - DNA, 80 bp, synthetic construct
  source 1..80: mol_type = other DNA
acacaacaaaaaatggtgactttacaaaattgtgtgatggattaaatggaccaaaaaatctgtgtaattatcagaactta

SEQ ID NO: 107461 - DNA, 80 bp, synthetic construct
  source 1..80: mol_type = other DNA
acgctgtccgtgtggagctgatataactggacatgtcaagaatgggtcgatgcgtgtcgtcggccctcggacctgcagta

SEQ ID NO: 107462 - DNA, 80 bp, synthetic construct
  source 1..80: mol_type = other DNA
tgggggacttccactatgtcacagggacgactgatgacgggttgaaatgcccatgtcaggtcccactaccagagtttttc

SEQ ID NO: 107463 - DNA, 80 bp, synthetic construct
  source 1..80: mol_type = other DNA
ttctggcagatgggggttgctctggcggggcttatgatgtcatcatctgtgacgagtgtcattcaacagaccctaccaca

SEQ ID NO: 107464 - DNA, 80 bp, synthetic construct
  source 1..80: mol_type = other DNA
tagaggcgttactgtatgtttggataccatctttgcatgttcgcggaggtcgggacgccattattcttctcacctgcctg

SEQ ID NO: 107465 - DNA, 80 bp, synthetic construct
  source 1..80: mol_type = other DNA
ctctcatatttgtcagcattgtcactgccgctcacggacaaacagtcgtctctatccctctaggacataattacactctc

SEQ ID NO: 107466 - DNA, 80 bp, synthetic construct
  source 1..80: mol_type = other DNA
gtgaggaactactgtcttcacgcagaaagcgtctagccatggcgttagtatgagtgtcgtgcagcctccaggaccccccc

SEQ ID NO: 107467 - DNA, 80 bp, synthetic construct
  source 1..80: mol_type = other DNA
ttgactcccagatgtttggtccactacccttataggttgtggcattacccgtgcactgtcaactttaccatcttcaaagt

SEQ ID NO: 107468 - DNA, 80 bp, synthetic construct
  source 1..80: mol_type = other DNA
tgtcttgttttcatctgctgtgcctggtatgtgcgaggccggctggtccctggtgtcacttatggactactccaaatgtg

SEQ ID NO: 107469 - DNA, 80 bp, synthetic construct
  source 1..80: mol_type = other DNA
tatgatgctaaaatggatatgccttcctattacttggtaattgtggggatagtcatggtctgctcatgcactttctttgc

SEQ ID NO: 107470 - DNA, 80 bp, synthetic construct
  source 1..80: mol_type = other DNA
gaatgaggagcagatcacactggactttgattattgcccaggcactaccgtgacgattagcgagcattgtgggaagaggg

SEQ ID NO: 107471 - DNA, 80 bp, synthetic construct
  source 1..80: mol_type = other DNA
gacccaagcatagagagccaggcacaaaaacacaggcggggtgggacacatgccttcttggagtacgtgggtcattggcg

SEQ ID NO: 107472 - DNA, 80 bp, synthetic construct
  source 1..80: mol_type = other DNA
aatgaccgctgaaagtgaagtggtcatgtctgatgttgttcttttggagaaaactcttggggtcgttgctaaacctcagg

SEQ ID NO: 107473 - DNA, 80 bp, synthetic construct
  source 1..80: mol_type = other DNA
atgttgtgacttggcccccgaagccagacaggccataaggtcgctcacagagcggctttacatcgggggccccctgacta

SEQ ID NO: 107474 - DNA, 80 bp, synthetic construct
  source 1..80: mol_type = other DNA
tgggatctaacatcactagggttgagtctgagagcaaggtggtcattctggactcattcgacccacttgtggccgaaact

SEQ ID NO: 107475 - DNA, 80 bp, synthetic construct
  source 1..80: mol_type = other DNA
gtccgcatggttctcatgacacatttcttcggaatgctccagtcccaagaaacactccatcaagcactcgacttcgatct

SEQ ID NO: 107476 - DNA, 80 bp, synthetic construct
  source 1..80: mol_type = other DNA
gcggcgacggtcaaggcgagggttggagaccgtggttggggaatgaatccctccccttcaccgacaaccccccgggtaac

SEQ ID NO: 107477 - DNA, 80 bp, synthetic construct
  source 1..80: mol_type = other DNA
cccgggtataaattccggaaggggacacgggctaccctcactatcgagggcgcttggtcgggaggccgcatcgaacgcac

SEQ ID NO: 107478 - DNA, 80 bp, synthetic construct
  source 1..80: mol_type = other DNA
cgacgaggaagacttccgagcgatcccagccccgagggaggcgccaacctataccaaaggcgcgtcccaatacgggccgg

SEQ ID NO: 107479 - DNA, 80 bp, synthetic construct
  source 1..80: mol_type = other DNA
atgtatgaggatttggagggcggcaacattcctgctctattagatgtggaaaagtacgaagctagcataaaagaagcaca

SEQ ID NO: 107480 - DNA, 80 bp, synthetic construct
  source 1..80: mol_type = other DNA
gaacccaagaaccgaaagaaggcacgaagaaactaatgaaaatcacagcagagtggctgtggaaagaactagggaagaaa

SEQ ID NO: 107481 - DNA, 80 bp, synthetic construct
  source 1..80: mol_type = other DNA
cttcttctgagggcaatttgtcacagggttaagggcaatttgtcacagacaggactgtcatttgagggtgatttgtcaca

SEQ ID NO: 107482 - DNA, 80 bp, synthetic construct
  source 1..80: mol_type = other DNA
atgccaaaggtgatagaaaagatggaaacactgcaacgccgctttggaggtggactggtgcgtgttcctctgtcacgcaa

SEQ ID NO: 107483 - DNA, 80 bp, synthetic construct
  source 1..80: mol_type = other DNA
cgagacgcggatgaggtttattttacgttagacccggaaataagttacagtaccgatcttcgcattgcaaaggttatgga

SEQ ID NO: 107484 - DNA, 80 bp, synthetic construct
  source 1..80: mol_type = other DNA
tctcagcactatcacttaaggggacgtgcacgacgcacggccctcatcctgatgctgagctgatcgaagctaacctactg

SEQ ID NO: 107485 - DNA, 80 bp, synthetic construct
  source 1..80: mol_type = other DNA
aaaatgtaaatttggaaactccagattcccatgttgtttacaaagcaggaacttcagacgaaagctctgaaattaatttg

SEQ ID NO: 107486 - DNA, 80 bp, synthetic construct
  source 1..80: mol_type = other DNA
accaactacagtcatggcaaaaaacgaggtgttcacggtggtaccatctaagggggggaaaaagcctgccaggctaatag

SEQ ID NO: 107487 - DNA, 80 bp, synthetic construct
  source 1..80: mol_type = other DNA
gtttcccgcagccaacgtcgcggccgaacgggtcgaggtagactcggtacgtaccgatatgtcgcctccggtgaaagacc

SEQ ID NO: 107488 - DNA, 80 bp, synthetic construct
  source 1..80: mol_type = other DNA
cccgggctggctacggtccggtccaccctgcccatttcgtacgactacagcgagtacatctgtcggttgaccggatatcc

SEQ ID NO: 107489 - DNA, 80 bp, synthetic construct
  source 1..80: mol_type = other DNA
ggggcccatactagtcttgcttgttttactttcgcttttggaaccgggttctgccaattacgatccatgtctagacttcg

SEQ ID NO: 107490 - DNA, 80 bp, synthetic construct
  source 1..80: mol_type = other DNA
ccattctgtgggggggcatactcatgctgggcttgcttgttacagggcttgttagagtggaggaaatcgtgcgctatatc

SEQ ID NO: 107491 - DNA, 80 bp, synthetic construct
  source 1..80: mol_type = other DNA
attgcgtggatgattttgagagctgtgagttttactaacacgtcaaacgtcgtggttccattgttggccctcctaacacc

SEQ ID NO: 107492 - DNA, 80 bp, synthetic construct
  source 1..80: mol_type = other DNA
tgctcagctccctcaccatcaccagcctgctcaaacgagcactggcgtgggcgcagacggattactctgcgccctgcgcc

SEQ ID NO: 107493 - DNA, 80 bp, synthetic construct
  source 1..80: mol_type = other DNA
ccaggtaggcgccgtcgagctcgtgggccacgggctcgtccgcgagctgttcggcggcgtggtcggtggtttcctccggg

SEQ ID NO: 107494 - DNA, 80 bp, synthetic construct
  source 1..80: mol_type = other DNA
aagatgtgcaggagaggatcagtgcgctgcgggaacagtatggcgagacctggcacatggacagagagcacccgtacagg

SEQ ID NO: 107495 - DNA, 80 bp, synthetic construct
  source 1..80: mol_type = other DNA
tcaatgggataagctcgtgaattcggtcccctgggagagtgcactatgctggtttgcggtggcgatctggtcgtcatcgc

SEQ ID NO: 107496 - DNA, 80 bp, synthetic construct
  source 1..80: mol_type = other DNA
acaccgcacacgctggtcgagcgggggctgcaatcggccctgaagtatgaggagttttacctaaagcgttttggcgtgca

SEQ ID NO: 107497 - DNA, 80 bp, synthetic construct
  source 1..80: mol_type = other DNA
aaaaaggtgaccttcgaccgcgtacaactgttggacaatcattacaatgaagtcttaaaggagatcaaggctcgagcatc

SEQ ID NO: 107498 - DNA, 80 bp, synthetic construct
  source 1..80: mol_type = other DNA
agcggttgccaagaggttccatctgccaggtatcaggcaaggatatgggctcactgagactacatcagctattctgatta

SEQ ID NO: 107499 - DNA, 80 bp, synthetic construct
  source 1..80: mol_type = other DNA
aagaggtggacagccaagatcagcattcctgctattctggtcgctcttgcagtcctagtgcttgggggcatcacttacac

SEQ ID NO: 107500 - DNA, 80 bp, synthetic construct
  source 1..80: mol_type = other DNA
tcagacttaccaagtggggtatttacatgctcccaccggtagtgggaaaagcacaaaggtcccggcagcgtacgcctctc

SEQ ID NO: 107501 - DNA, 80 bp, synthetic construct
  source 1..80: mol_type = other DNA
ctatcagtttgagtacgaaagtctgttgcgccgtagtgcgctagcggccactaacgaccgatgcgtcaccctagaaaagt

SEQ ID NO: 107502 - DNA, 80 bp, synthetic construct
  source 1..80: mol_type = other DNA
tccccccggagtgctttctttgcgcctttcagaacctttggttacctcacacggcatgcttgcgctaaaaatgggcagcg

SEQ ID NO: 107503 - DNA, 80 bp, synthetic construct
  source 1..80: mol_type = other DNA
agaccaaagggggagcggacaagttgtcacttacgctcttaacacatttaccaacctagtggtgcaactcattcggaata

SEQ ID NO: 107504 - DNA, 80 bp, synthetic construct
  source 1..80: mol_type = other DNA
tgaagcatgttgtaaacccaaaagttttaagtagtcgctgtaaacgggtgaattgatcgcgttttaagcaaatgcttata

SEQ ID NO: 107505 - DNA, 80 bp, synthetic construct
  source 1..80: mol_type = other DNA
atcaaaagaccagactgaatgattgggacttcgtggtgacaacagacatttcagaaatgggagctaactttaaagcagat

SEQ ID NO: 107506 - DNA, 80 bp, synthetic construct
  source 1..80: mol_type = other DNA
ggggttgacgcggagacccgcacctcgggtgcaacgatggcccaagcggcttacgggctcaccagtcttttcacttacgg

SEQ ID NO: 107507 - DNA, 80 bp, synthetic construct
  source 1..80: mol_type = other DNA
cgcttgtcttcctgccgcgggctggacgattttcgcatcgggtggggaaccctagagtacgagaccaacgtcaccaacga

SEQ ID NO: 107508 - DNA, 80 bp, synthetic construct
  source 1..80: mol_type = other DNA
gggagggctggggaaacaggagcggtgggttgccgacgggtgacgtgacgtgtggatgaggtgagttgctgttggttgtg

SEQ ID NO: 107509 - DNA, 80 bp, synthetic construct
  source 1..80: mol_type = other DNA
agtggctgctcaaaaccaaatttgcaagggcaatatttatgccatggagattaacctccaggccaacctgtggaagagtt

SEQ ID NO: 107510 - DNA, 80 bp, synthetic construct
  source 1..80: mol_type = other DNA
gcccccgtgccacatcaacccggtccccgatcccaacaatcggaactctaccgagctggtgtgccccactgactgcttcc

SEQ ID NO: 107511 - DNA, 80 bp, synthetic construct
  source 1..80: mol_type = other DNA
ggcctctttagcgtgggttccaaacagaacatccagttaatcaatgccaatggcagctggcacataaaccggaccgccct

SEQ ID NO: 107512 - DNA, 80 bp, synthetic construct
  source 1..80: mol_type = other DNA
agccgtcgtttgcccaagcaccgacgccgcgatccacagtgggaggagttcctccgtccggccacaaccctacgcgcggg

SEQ ID NO: 107513 - DNA, 80 bp, synthetic construct
  source 1..80: mol_type = other DNA
ctgtggtagacggcatcgtggccacggacgttccagagctagagcgtaccacacccatcatgcagaagaaggttggacaa

SEQ ID NO: 107514 - DNA, 80 bp, synthetic construct
  source 1..80: mol_type = other DNA
gggcccaagacatgcagtaacgtctggcgtggcacgttccctatcaatcctaccacgactggccccagcgtgcctatccc

SEQ ID NO: 107515 - DNA, 80 bp, synthetic construct
  source 1..80: mol_type = other DNA
ttagcgaccgcaaccccccccggtagcgttaccgtcccacattccaacatagaggaggtggccctgactaatgacgggga

SEQ ID NO: 107516 - DNA, 80 bp, synthetic construct
  source 1..80: mol_type = other DNA
ccttgccaactcccttctccggagttcttctcttgggtggacggagtccagatccataggttcgctcccacaccaaagcc

SEQ ID NO: 107517 - DNA, 80 bp, synthetic construct
  source 1..80: mol_type = other DNA
gcaggtaagtctcgctggccccgtaaagatgcagagccgcggccgtcaagtccgcaggagccgcgggttccgggcccgac

SEQ ID NO: 107518 - DNA, 80 bp, synthetic construct
  source 1..80: mol_type = other DNA
cttctagcccaggagcagcttgaaaaagccctagattgtcagatctacggggcctgttactccattgagccacttgacct

SEQ ID NO: 107519 - DNA, 80 bp, synthetic construct
  source 1..80: mol_type = other DNA
taaataaataaaataggtaagtcaggccaattaattttgccaccggatgtcaggtaaacggtgctgtctgtaacctggcc

SEQ ID NO: 107520 - DNA, 80 bp, synthetic construct
  source 1..80: mol_type = other DNA
taccaggcatgcagacgtcattcccgcccgtagacggggcgacactcgcgcctccttgctcagcccgagacccatcagtt

SEQ ID NO: 107521 - DNA, 80 bp, synthetic construct
  source 1..80: mol_type = other DNA
gaaaaacagcgcaaaaaagaccatcaaagctaaagccggcaactattgaggcaatgctggttacagtgactgccgggtct

SEQ ID NO: 107522 - DNA, 80 bp, synthetic construct
  source 1..80: mol_type = other DNA
actgggtgtcctcaaaggctcagcagctgcaagcccatcacttcctttaggcaagggtgtggctccttgacagatgctaa

SEQ ID NO: 107523 - DNA, 80 bp, synthetic construct
  source 1..80: mol_type = other DNA
cacagtgtgcaagagggaccagagtgatcgaggttggggcaatcactgtgggttgtttggaaagggtagcattgtggcct

SEQ ID NO: 107524 - DNA, 80 bp, synthetic construct
  source 1..80: mol_type = other DNA
ctacggccacaccccccgggtcagtgacaaccccccatcccgatatagaagaggtaggcctcgggcgtgagggtgagatc

SEQ ID NO: 107525 - DNA, 80 bp, synthetic construct
  source 1..80: mol_type = other DNA
ttataacatggataggaatgaactcccggagcacctcaatgtcaatcacattagtcatggtgggactagtaacattatac

SEQ ID NO: 107526 - DNA, 80 bp, synthetic construct
  source 1..80: mol_type = other DNA
cacgccgcctggccaaagctagagcagttctggcataagcacctatggaacttcatcagtggcatccagtacctggctgg

SEQ ID NO: 107527 - DNA, 80 bp, synthetic construct
  source 1..80: mol_type = other DNA
atgaactcatagggagagctagaatctctcaaggggctggatgggcattgaaagagacagcctgtctagggaaagcctat

SEQ ID NO: 107528 - DNA, 80 bp, synthetic construct
  source 1..80: mol_type = other DNA
cgaagcccgcaaggctataaagtctctcactgacagactctacgtcggaggcccccttactaattccagaggggagagct

SEQ ID NO: 107529 - DNA, 80 bp, synthetic construct
  source 1..80: mol_type = other DNA
cctattttaggcaagaataaacatattgacgtcaacccaagtggttccgtgtgatgttcttggcgcgcgcggcgggtggg

SEQ ID NO: 107530 - DNA, 80 bp, synthetic construct
  source 1..80: mol_type = other DNA
tggtattgatgacccatttcttctccatactccagagccaggaagcccttgaaaaagcactcgacttcgacatgtacggg

SEQ ID NO: 107531 - DNA, 80 bp, synthetic construct
  source 1..80: mol_type = other DNA
gccaaacccaaagttaacagcactgggtgcttggagcggctggccagctgccgccccatcacctatttcgctcaggggta

SEQ ID NO: 107532 - DNA, 80 bp, synthetic construct
  source 1..80: mol_type = other DNA
agcatgtggcccccgtaagtggggtccgggtaaaacaacagccgcgggtcgcacgccccgcctccgcgcaggatcgtgtg

SEQ ID NO: 107533 - DNA, 80 bp, synthetic construct
  source 1..80: mol_type = other DNA
agcctgacgcccccccactcagccagatccaaatttggctatggggcgaaggatgtccgaagccattcccgcaaggccat

SEQ ID NO: 107534 - DNA, 80 bp, synthetic construct
  source 1..80: mol_type = other DNA
acagactgttggtatgccatggaaatacgtcctgttcatgaccagggagggcttgtccgctcaatggtggtggcagacaa

SEQ ID NO: 107535 - DNA, 80 bp, synthetic construct
  source 1..80: mol_type = other DNA
gttgtatcttgtcccggcagctcccgccgaccgcgccgcggccccccggtgggccggacgccgcgaggcgcaggatggac

SEQ ID NO: 107536 - DNA, 80 bp, synthetic construct
  source 1..80: mol_type = other DNA
gaggtctgtcgggcccagacgcaccgagagcgaatccgtccacggagtcccggtctgggttttatggggcccggccctcg

SEQ ID NO: 107537 - DNA, 80 bp, synthetic construct
  source 1..80: mol_type = other DNA
tcctgagatacgatgagaccaagtccagggtgcgcgcttgcgagtgcggtggcagacacaccaggatgcagccagtggcc

SEQ ID NO: 107538 - DNA, 80 bp, synthetic construct
  source 1..80: mol_type = other DNA
ttaattaatataccgccaatgccgcggattcaagacggccatcgccgatttcccatatatgaaactatttcatcttggat

SEQ ID NO: 107539 - DNA, 80 bp, synthetic construct
  source 1..80: mol_type = other DNA
ttgcagtgacacaggtcgtcgactttagcctagatcccacattttccattgagaccacaactgttccccaggatgcagtg

SEQ ID NO: 107540 - DNA, 80 bp, synthetic construct
  source 1..80: mol_type = other DNA
agcccctggacgcccgcgaccggcgcacggatgtcgtgatcacgggcacccgcgcccccagaccgatggccgggaccgtg

SEQ ID NO: 107541 - DNA, 80 bp, synthetic construct
  source 1..80: mol_type = other DNA
acatgggtgtgctggctggtcaggcctctcagttaaatgctgtggtcgacttgcaagacagaaataccgagctgtcttat

SEQ ID NO: 107542 - DNA, 80 bp, synthetic construct
  source 1..80: mol_type = other DNA
gtttagggtgtggtgtagggccacaagctccagctctccggcggcgttgatcgtggggatgacgcccgtggcgtagtggt

SEQ ID NO: 107543 - DNA, 80 bp, synthetic construct
  source 1..80: mol_type = other DNA
tcttgccgatggtggttgttccgggggcgcctatgacatcatcatttgtgacgaatgccattcaactgatcccactactg

SEQ ID NO: 107544 - DNA, 80 bp, synthetic construct
  source 1..80: mol_type = other DNA
agacgggagtccgcgtcgccctcgccctggtcgccgcctttgccctcggcatggccgtgctccgctgcacccgcgcctat

SEQ ID NO: 107545 - DNA, 80 bp, synthetic construct
  source 1..80: mol_type = other DNA
ggtcccgaggcccggtcacgcagatgtactccagcgccgagggagacctcgtaggatggcccagcccctccggtgccaga

SEQ ID NO: 107546 - DNA, 80 bp, synthetic construct
  source 1..80: mol_type = other DNA
cggccggtcgcgagactgggggcgtacactggatggcctttgcctggaacccgcactcaaaaacatgctacctatttgag

SEQ ID NO: 107547 - DNA, 80 bp, synthetic construct
  source 1..80: mol_type = other DNA
ataagcatgtatataggtataggtttatagtggtatttaatgatgttagtgtaaatagtcaagaaaattttaaggaggaa

SEQ ID NO: 107548 - DNA, 80 bp, synthetic construct
  source 1..80: mol_type = other DNA
ggtagtggacaagttggcacctatggcctcaacactttcaccaatatgggagcccaattaatcagacagatggagggaga

SEQ ID NO: 107549 - DNA, 80 bp, synthetic construct
  source 1..80: mol_type = other DNA
ggccatgtctccggaccgcacaacggccgcgccgtcaaaggtgcacacccgaaccacgggagccagggccaaggtgtctc

SEQ ID NO: 107550 - DNA, 80 bp, synthetic construct
  source 1..80: mol_type = other DNA
gggacatgatgatgaactggagccctaccaccgctctggtcctatcgcaaattatgagagtacccgccgccctagttgac

SEQ ID NO: 107551 - DNA, 80 bp, synthetic construct
  source 1..80: mol_type = other DNA
tcgggccgctggcaactcgccccacgacccgactcacctcaaagggacgacccttggttccgacgcctcaacataccccg

SEQ ID NO: 107552 - DNA, 80 bp, synthetic construct
  source 1..80: mol_type = other DNA
cacaacaccccactcccccacagacagacatcaaaaaaagacacgagccaaaccattgtatttatttataaagactacac

SEQ ID NO: 107553 - DNA, 80 bp, synthetic construct
  source 1..80: mol_type = other DNA
atacgtacatatttctttttttttccagtacaaccatatccggtgtataatggaagcccatttggcaaatgaaaccaaac

SEQ ID NO: 107554 - DNA, 80 bp, synthetic construct
  source 1..80: mol_type = other DNA
ccgcgcgtcggccgtgcaagccagactcctctcgttggaggaggcctgcgatctcacgccaccgcattcggcccgatcaa

SEQ ID NO: 107555 - DNA, 80 bp, synthetic construct
  source 1..80: mol_type = other DNA
tcgctgtccatgtggagccgacattaccggacatgtcaaaaacgggtcgatgaggatagttggtcctaagctttgtagca

SEQ ID NO: 107556 - DNA, 80 bp, synthetic construct
  source 1..80: mol_type = other DNA
cgcgggtatagatcgacggggacgccgaccgactccccgcctccgggacagacacgcacgacgcgccgccagtaatgctc

SEQ ID NO: 107557 - DNA, 80 bp, synthetic construct
  source 1..80: mol_type = other DNA
ggagaccagagaggacccatcagggtgccagagatggacctaggagtgggaactcgctgtgtcgtcctggcagaagacaa

SEQ ID NO: 107558 - DNA, 80 bp, synthetic construct
  source 1..80: mol_type = other DNA
tgggtgtcggccacgcctaccttagcgatccccaatgcgagcgcgcccattcagggattccgctcgcatgtggacatgat

SEQ ID NO: 107559 - DNA, 80 bp, synthetic construct
  source 1..80: mol_type = other DNA
gccctaactcgagtattgtgtacgaggcggccgatgccatcctgcacactccggggtgtgtcccttgcgttcgcgagggt

SEQ ID NO: 107560 - DNA, 80 bp, synthetic construct
  source 1..80: mol_type = other DNA
ttggtggcgtatcaagccactgtctgcgcccgcgcgcaggcacccccaccaagttgggatgaaatgtggaaatgcctcat

SEQ ID NO: 107561 - DNA, 80 bp, synthetic construct
  source 1..80: mol_type = other DNA
gaacaacacttttaatgggaagtactatggtattagaaaggatgggtttggaatgaaacagtacaatcttaaggttattg

SEQ ID NO: 107562 - DNA, 80 bp, synthetic construct
  source 1..80: mol_type = other DNA
gacccctctcatattacggcggaggcggcggcaaggcgcttagcacggggctcccctccttcagaggccagctcctctgc

SEQ ID NO: 107563 - DNA, 80 bp, synthetic construct
  source 1..80: mol_type = other DNA
ataatgaacgctttgacatcccctgctgctcattttcttatgtaacagaacaataaaatattgttgttttgatttataac

SEQ ID NO: 107564 - DNA, 80 bp, synthetic construct
  source 1..80: mol_type = other DNA
cagcactgaggaaaccagcgtcgtttgctgttcaatgtcatattcgtggacgggagctctcatcacaccgtgcgctgctg

SEQ ID NO: 107565 - DNA, 80 bp, synthetic construct
  source 1..80: mol_type = other DNA
gccgggccaaccgcaccgcggccgataggaagctcaggcttaaaaacggagccgacatacctgatatcacgtcgctggag

SEQ ID NO: 107566 - DNA, 80 bp, synthetic construct
  source 1..80: mol_type = other DNA
ataaaagctgaactaagaacctactttgaaatcccttgtcgtcatcctcggaacaagaccgtcttctttaccaaccagac

SEQ ID NO: 107567 - DNA, 80 bp, synthetic construct
  source 1..80: mol_type = other DNA
aaattgccagcttgccaacgtacctttcctctagggctaagctcgcccttgacaacatagtcatgctccacacaacagaa

SEQ ID NO: 107568 - DNA, 80 bp, synthetic construct
  source 1..80: mol_type = other DNA
gttctggtggtcatcgtcccccgtctgccaggagggctcatcgggaatctcgggtcgccccatgcacgtaaaacacgggc

SEQ ID NO: 107569 - DNA, 80 bp, synthetic construct
  source 1..80: mol_type = other DNA
tggacagaacagtacaagttccaaccagaatccccttcaaaactagcttcagctatccagaaagctcaagaagagggaat

SEQ ID NO: 107570 - DNA, 80 bp, synthetic construct
  source 1..80: mol_type = other DNA
tgatgaactggtcccccacggcggccctcctgttaagccaggtgctccgggtccctggagccatttgggatatgattgcc

SEQ ID NO: 107571 - DNA, 80 bp, synthetic construct
  source 1..80: mol_type = other DNA
tcttcattcagccgccgcactgtgcgcttacctcctttgccatgcttgattagcaccggtgggttgctgaaacccaccat

SEQ ID NO: 107572 - DNA, 80 bp, synthetic construct
  source 1..80: mol_type = other DNA
ggtggtgccgggcgtggagcgtgggcacgggccctcccgcggcgccgccccctccggcgccgccccgctcccctccgccg

SEQ ID NO: 107573 - DNA, 80 bp, synthetic construct
  source 1..80: mol_type = other DNA
gatgcatgcgaggggaaatcagatgcattttggcctgaatttttaggttagcaatgttgccaccgagatcacgtctggtg

SEQ ID NO: 107574 - DNA, 80 bp, synthetic construct
  source 1..80: mol_type = other DNA
aagcgccattgtgcaaggagagagaatggaagaaccggcaccggctggcttcgaacctgaaatgttgaggaagaaacaga

SEQ ID NO: 107575 - DNA, 80 bp, synthetic construct
  source 1..80: mol_type = other DNA
ggggtgctgggcgctataatcgtcagcctaaccggccgggacaaaaatgaagccgagggtgaggtgcaggtcctatccac

SEQ ID NO: 107576 - DNA, 80 bp, synthetic construct
  source 1..80: mol_type = other DNA
acccccggcaccgctctagaaatctaggcaaggtgattgacaccatgacctgcggttttgccgacctcatggggtacatc

SEQ ID NO: 107577 - DNA, 80 bp, synthetic construct
  source 1..80: mol_type = other DNA
acctggggtcagcctgggtacgcatggcccctgtatgggaatgagggctgcggatgggcagcgtggctcctgtctccccg

SEQ ID NO: 107578 - DNA, 80 bp, synthetic construct
  source 1..80: mol_type = other DNA
gagtcattaaacgatctcctgaacacgaggatgtacgtaccatacaccaactacgtggaacattttttgacgaactagca

SEQ ID NO: 107579 - DNA, 80 bp, synthetic construct
  source 1..80: mol_type = other DNA
taggttgcgggcttacttcaatacaccaggtctacccgtttgtcaagaccatcttgagttttgggagagcgtcttcacag

SEQ ID NO: 107580 - DNA, 80 bp, synthetic construct
  source 1..80: mol_type = other DNA
ccactttgtggtaggcgctactaaccaagacctaaagtgtccctgccaagtaccggctccggagtttttcactgaggtgg

SEQ ID NO: 107581 - DNA, 80 bp, synthetic construct
  source 1..80: mol_type = other DNA
atcacgtcgactcgagtgtggttgaagatcagggaggagcgcacggatgaatgtgatggcgccatcattggcacggccgt

SEQ ID NO: 107582 - DNA, 80 bp, synthetic construct
  source 1..80: mol_type = other DNA
cggtcaccgaatggcatgggacatgatgatgaactggtcacctacgacggccctgctaatggcccaaatactacggattc

SEQ ID NO: 107583 - DNA, 80 bp, synthetic construct
  source 1..80: mol_type = other DNA
aggggggagaactgcggctatcgcaggtgccgtgcgagcggcgtactgacgactagctgtggtaataccctcacctgcta

SEQ ID NO: 107584 - DNA, 80 bp, synthetic construct
  source 1..80: mol_type = other DNA
ctctcctacttttcccagggctggggccccatcagttacaccaatggcaccagcagcgaccaccgcccttattgctggca

SEQ ID NO: 107585 - DNA, 80 bp, synthetic construct
  source 1..80: mol_type = other DNA
tgcggagcctgagggtcgctggcttttggacctggttaatatccttcagagcattgtggtacaggagcgcagtctaagcc

SEQ ID NO: 107586 - DNA, 80 bp, synthetic construct
  source 1..80: mol_type = other DNA
caatacttcatagccaggattgaggctgtggtacactgctatgttccatccttgagggtcaggggttcccgggactccct

SEQ ID NO: 107587 - DNA, 80 bp, synthetic construct
  source 1..80: mol_type = other DNA
gctgacccacacgctgctttccaccgccgttaacaacatgatgctgcgggaccgctggagcctggtggccgagcggcggc

SEQ ID NO: 107588 - DNA, 80 bp, synthetic construct
  source 1..80: mol_type = other DNA
tgaagaggaggacgagcgcgaaccttcagtgccatcagagtatctcctccccaagaaaaagttcccacaggctctaccag

SEQ ID NO: 107589 - DNA, 80 bp, synthetic construct
  source 1..80: mol_type = other DNA
ggattgatcctaacatcaggactggcgtcagaaccatcacaactgggggagctatcacctattccacttatggcaagttc

SEQ ID NO: 107590 - DNA, 80 bp, synthetic construct
  source 1..80: mol_type = other DNA
gcttttgcatcgcgagggaaccacgtttctcccacacactatgtgcctgaaagcgacgcagcggctcgtgtcactgctat

SEQ ID NO: 107591 - DNA, 80 bp, synthetic construct
  source 1..80: mol_type = other DNA
cggagatgattgcgtggtgaaaccaattgacgacaggttcgcaacagccttaacagctctgaatgacatgggaaaagtaa

SEQ ID NO: 107592 - DNA, 80 bp, synthetic construct
  source 1..80: mol_type = other DNA
cgacaagccttcactagacatatcactagaaacagttgccattgatggacctgctgaggcaaggaaggtgtgctacagtg

SEQ ID NO: 107593 - DNA, 80 bp, synthetic construct
  source 1..80: mol_type = other DNA
gatgaacttgaagcagacattgttatgtatgctgagaatgtgcatctggaaactccagacacgcatgtggtgtacaaacc

SEQ ID NO: 107594 - DNA, 80 bp, synthetic construct
  source 1..80: mol_type = other DNA
gaagctcacaatgacaaacgtgctgacccagcttttgtgtgcagacaaggagtggtggacaggggctggggcaacggctg

SEQ ID NO: 107595 - DNA, 80 bp, synthetic construct
  source 1..80: mol_type = other DNA
ggatataacattacaaaagaaggacttcagattggaattgatgaaactaaagaagatccaaacaacaaaatttatgcaga

SEQ ID NO: 107596 - DNA, 80 bp, synthetic construct
  source 1..80: mol_type = other DNA
gaaaagacgtgccagagtggaaaccctcctcgggatggcacgattggcagcaagtgcctttctgctcaaaccactttcag

SEQ ID NO: 107597 - DNA, 80 bp, synthetic construct
  source 1..80: mol_type = other DNA
acctggggtgctgacaccgccgcgtgcggcgacatcatcaaaggcttgccagtttcggctagattgggcagagaggttct

SEQ ID NO: 107598 - DNA, 80 bp, synthetic construct
  source 1..80: mol_type = other DNA
tccccatttgggcgcggcctgactacaacccaccgctgcttgagacgtggagggctccagattatgaaccaccacaggtc

SEQ ID NO: 107599 - DNA, 80 bp, synthetic construct
  source 1..80: mol_type = other DNA
gcaccgctatgccccaccctgtaagcctttgctgcgggacgaagtgaccttcagcgtagggcttaacacatttgtagtgg

SEQ ID NO: 107600 - DNA, 80 bp, synthetic construct
  source 1..80: mol_type = other DNA
tgagcaagaaagagggaggagccatgtacgccgacgacacagcaggatgggacacaagaatcacactagaagacctaaaa

SEQ ID NO: 107601 - DNA, 80 bp, synthetic construct
  source 1..80: mol_type = other DNA
tttggtagtggaggtggtttgcgccgctatcctgcggcgtcacgtgggtcctggcgagggggcggtccagtggatgaacc

SEQ ID NO: 107602 - DNA, 80 bp, synthetic construct
  source 1..80: mol_type = other DNA
ccaggacccgcatgtcgtcgtcatctttttcggccgcctctgcggcgtgggtcttgggtgcggagggagccggtggttgg

SEQ ID NO: 107603 - DNA, 80 bp, synthetic construct
  source 1..80: mol_type = other DNA
ctatgctatggggtcacagctcccttgcgagcctgagcccgatgtgacggtgctcacgtccatgctctctgacccgagcc

SEQ ID NO: 107604 - DNA, 80 bp, synthetic construct
  source 1..80: mol_type = other DNA
atgatgctcgccgagcagttcaagcagaaggcccttggcctcctgcaaaccgcgtcccgccaggcagaggtcattacccc

SEQ ID NO: 107605 - DNA, 80 bp, synthetic construct
  source 1..80: mol_type = other DNA
gaatggcagaagcagagatggtgatacatcaccaacatgttcaagattgtgatgaatcagttctgaccaggctggaggca

SEQ ID NO: 107606 - DNA, 80 bp, synthetic construct
  source 1..80: mol_type = other DNA
tcgggggccctcgtcgcattcaagatcatgtctggcgagaagccctctatggaagatgtcatcaatctactgcctgggat

SEQ ID NO: 107607 - DNA, 80 bp, synthetic construct
  source 1..80: mol_type = other DNA
cctcgcaggagcagcggttggcagcgtgggtttaggcaagatactggttgacatcctcgccggctacggtgctggtgtag

SEQ ID NO: 107608 - DNA, 80 bp, synthetic construct
  source 1..80: mol_type = other DNA
cactgtcgtcctttgcgaagcctacgatgttggctgcgcgtggtatgagttaacaccatcagaaaccaccgttaggctgc

SEQ ID NO: 107609 - DNA, 80 bp, synthetic construct
  source 1..80: mol_type = other DNA
ccctcgtttgggtgtgcgcgcgacgaggaagacttcggaacgatcccagcccagaggcaggcgccaaccaatacctaagg

SEQ ID NO: 107610 - DNA, 80 bp, synthetic construct
  source 1..80: mol_type = other DNA
gcagacgctgctccgcctggcctgcgaggtgcgccaggtcggcgaccgccagccgcggtttaccgccaccagcatcgcgc

SEQ ID NO: 107611 - DNA, 80 bp, synthetic construct
  source 1..80: mol_type = other DNA
tagagctgataacatcctgctcttctaatgtgtctgtggcttttgacccacgaggttgccgcaggtactacctaactaga

SEQ ID NO: 107612 - DNA, 80 bp, synthetic construct
  source 1..80: mol_type = other DNA
actacccttacaggttgtggcactacccctgcactgtgaacttcaccatacacaaggtccgtatgtttgtgggcggcgtg

SEQ ID NO: 107613 - DNA, 80 bp, synthetic construct
  source 1..80: mol_type = other DNA
agccttggcgctgtatacggccccccggtaaaagtactccttaaccgcgccctcgatcgcccgacgggcctgggtccgca

SEQ ID NO: 107614 - DNA, 80 bp, synthetic construct
  source 1..80: mol_type = other DNA
gatcttctgcttagcacaaccagccacaaggcacagtgcgccgatataggtggctggtggggaactagaccacaggatct

SEQ ID NO: 107615 - DNA, 80 bp, synthetic construct
  source 1..80: mol_type = other DNA
gagggttgagtacttgctcaaaatgtggcggtcaaagaaggtgcccatgggcttttcttacgacaccagatgttttgatt

SEQ ID NO: 107616 - DNA, 80 bp, synthetic construct
  source 1..80: mol_type = other DNA
cgcggtccctggatctccagatacggaggggagtctttttgttgttttttgtagatgcatccggtgttgcgacagatgcg

SEQ ID NO: 107617 - DNA, 80 bp, synthetic construct
  source 1..80: mol_type = other DNA
atgtggacctcctggtgggtaccgctgctttttgctcggcgatgtatgtgggtgacgtgtgcggtgccgtctttctcgtg

SEQ ID NO: 107618 - DNA, 80 bp, synthetic construct
  source 1..80: mol_type = other DNA
cgcccatgaccacctgggccgcagatgggctgagagacctggctgtcgccgtagagccggtaatttttagccctatggaa

SEQ ID NO: 107619 - DNA, 80 bp, synthetic construct
  source 1..80: mol_type = other DNA
accacccaccatgactcccctgacgctgacttgatcgaggccaacctcttgtggaggcaagagatgggcagcaacatcac

SEQ ID NO: 107620 - DNA, 80 bp, synthetic construct
  source 1..80: mol_type = other DNA
tgcggatcacagggaaggcgtcggcgaaggaggcagagagcgtcggaaggcggcgagtgagggaaagagggagaccggcg

SEQ ID NO: 107621 - DNA, 80 bp, synthetic construct
  source 1..80: mol_type = other DNA
tctccgtccggacgggacatttcagatcggcggcgccggccgctcttcattcacgcctcgtcaggcaatcctaactctgc

SEQ ID NO: 107622 - DNA, 80 bp, synthetic construct
  source 1..80: mol_type = other DNA
gccctagcggcttgcaaggctgcggggatagttgcgcctaccatgctggtatgcggcgacgacttggttgttatctcaga

SEQ ID NO: 107623 - DNA, 80 bp, synthetic construct
  source 1..80: mol_type = other DNA
gcgtcgcgggtgaggcgcagctcgttgttctcgcccagctgcccctcgatcagcgggccctggtcttcgtaccgaaagct

SEQ ID NO: 107624 - DNA, 80 bp, synthetic construct
  source 1..80: mol_type = other DNA
ctacatctatgatcaccttgctcccttgtccgactgggctgctgatggccttaaggacttagcggtagcccttgagccgg

SEQ ID NO: 107625 - DNA, 80 bp, synthetic construct
  source 1..80: mol_type = other DNA
ccagtggatgaacaggctcatagcatttgcctcaaggggcaaccacgtatcaccgacacactacgtacctgagacagacg

SEQ ID NO: 107626 - DNA, 80 bp, synthetic construct
  source 1..80: mol_type = other DNA
aacagacccgtcccacattacagcagaggcggcagctaggcgattagccaggggatctcccccctcacaggccagctctt

SEQ ID NO: 107627 - DNA, 80 bp, synthetic construct
  source 1..80: mol_type = other DNA
tcgcggagggccggagaatggaaggcgaggtgatgcaggaggaggatcgggactccccatcttctgcccttccatcctcc

SEQ ID NO: 107628 - DNA, 80 bp, synthetic construct
  source 1..80: mol_type = other DNA
cgccccgagaccagtcgcccgaagacaccccccaccattatcgggccgctggcaactcgccccacgacccgactcacctc

SEQ ID NO: 107629 - DNA, 80 bp, synthetic construct
  source 1..80: mol_type = other DNA
atggaggtggccgcgtcgtgtggcggcgtcgtccttgtcgggttgatggtgctgactctgtcaccgcattacaagcgcta

SEQ ID NO: 107630 - DNA, 80 bp, synthetic construct
  source 1..80: mol_type = other DNA
tgtagttccggaaggagtagtgaaacctgtacctcagcgggtgactgggaggcgacgtgctgtggaaagtattttggatt

SEQ ID NO: 107631 - DNA, 80 bp, synthetic construct
  source 1..80: mol_type = other DNA
aaactgggctacatattaagggacatttccaagatacccggaggagccatgtatgctgatgacacggctggttgggacac

SEQ ID NO: 107632 - DNA, 80 bp, synthetic construct
  source 1..80: mol_type = other DNA
cgccccgcgcccccccacgcagaggcgccgccgcgccccccgtgacgggcgtggcgtctcacgcagcccgccagccggcc

SEQ ID NO: 107633 - DNA, 80 bp, synthetic construct
  source 1..80: mol_type = other DNA
ttgtacaatcgatcaggaaagggattcaaagctcactttagtattaacaaaatgtggcagtcaaattttggctaatgtct

SEQ ID NO: 107634 - DNA, 80 bp, synthetic construct
  source 1..80: mol_type = other DNA
cagaaggttggggcccacgcgatgaaggctttccacctggacgataagtcggtggaaggggcggtcgttcataatgtaat

SEQ ID NO: 107635 - DNA, 80 bp, synthetic construct
  source 1..80: mol_type = other DNA
aaacgcaccgtcggaggccccccagattgtccgcggggcctccgaagacgtccggaaacaaccctacaacctgaccatcg

SEQ ID NO: 107636 - DNA, 80 bp, synthetic construct
  source 1..80: mol_type = other DNA
ccaaaagcagctccggttgtgcagccccctccggtggcgaccgccgtgcgccgcgtccccgcccgccgccaggcccagaa

SEQ ID NO: 107637 - DNA, 80 bp, synthetic construct
  source 1..80: mol_type = other DNA
gccagaaacccctccagggccgaaaggtagtgcgtgcagtgcgagggcgtgaacccagcgtcgatcagggtgttgatcac

SEQ ID NO: 107638 - DNA, 80 bp, synthetic construct
  source 1..80: mol_type = other DNA
cggcggcggagcaggtggtcgtcctacaggcccagcgcacagcggctgccgctgccctggagaacgccgccatgcaggcg

SEQ ID NO: 107639 - DNA, 80 bp, synthetic construct
  source 1..80: mol_type = other DNA
gtggtggaacctggcaagaacgttaaaaacgtccagacgaaaccaggggtgttcaaaacacctgaaggagaaattggtgc

SEQ ID NO: 107640 - DNA, 80 bp, synthetic construct
  source 1..80: mol_type = other DNA
tattgtctgattttaagacttggctgaaggccaaactattgccccggatgcccggcatcccctttttctcctgtcaaaag

SEQ ID NO: 107641 - DNA, 80 bp, synthetic construct
  source 1..80: mol_type = other DNA
gacagaggccggtacccagaccatcaattttgacgatcgctccaggtggggcggcgacctgaaaaccattttgcgcacca

SEQ ID NO: 107642 - DNA, 80 bp, synthetic construct
  source 1..80: mol_type = other DNA
cggcgagccaagtcacgaacccccagtttgtcgacaggctgtaccgctggcagccggatctgcggtggcgccctaccgca

SEQ ID NO: 107643 - DNA, 80 bp, synthetic construct
  source 1..80: mol_type = other DNA
ccgcccctcgaactcgttgccgcaggccaacttggccttgtgaagctgcagctcgtcgcgatggtcggcgcgggtgtggc

SEQ ID NO: 107644 - DNA, 80 bp, synthetic construct
  source 1..80: mol_type = other DNA
agcctgcgggatgtggcccttgctcctcctgctcctcgccttgccccagagagcgtacgcgttcgacggggagacggctg

SEQ ID NO: 107645 - DNA, 80 bp, synthetic construct
  source 1..80: mol_type = other DNA
gatagccgagatgttgaagtccaagatccaaggcttgctgcagcaggcctctaagcaggcccaggacatacaacccgcta

SEQ ID NO: 107646 - DNA, 80 bp, synthetic construct
  source 1..80: mol_type = other DNA
ctgcagcaggtaaaacaccgccgggtagttgcggtcgtcgaacgccccgcgaacggcggcgatggtggcgtgggccatgg

SEQ ID NO: 107647 - DNA, 80 bp, synthetic construct
  source 1..80: mol_type = other DNA
cccggctgcgtcccagttggacttgtccagctggtttgttgctggatacagcgggggagacatatatcacagcttgtctc

SEQ ID NO: 107648 - DNA, 80 bp, synthetic construct
  source 1..80: mol_type = other DNA
gacctaccaagtagggtacctccacgcccccaccgggagtggtaagagcacgaaggtgcctgcggcgtacgcgtcccaag

SEQ ID NO: 107649 - DNA, 80 bp, synthetic construct
  source 1..80: mol_type = other DNA
caccaagtgcgcctgttcttgggcggaattgagcacaggttcgctgcggcctgcaattggactcgaggcgagcggtgtga

SEQ ID NO: 107650 - DNA, 80 bp, synthetic construct
  source 1..80: mol_type = other DNA
accatgccgcaatgctggacgtagacttacatccagcttcagcctggaccctctatgcagtggccacaacaattatcact

SEQ ID NO: 107651 - DNA, 80 bp, synthetic construct
  source 1..80: mol_type = other DNA
attgcctggcgactggatgcgtttccatcatcggccgcttgcacgtcaaccagcgagtcgtcgttgcgccggataaggag

SEQ ID NO: 107652 - DNA, 80 bp, synthetic construct
  source 1..80: mol_type = other DNA
cacgtgaacgttcttttcgccccggaggctgcacagaaagtccaccagctgcgcgttggcggtggcgtccatggcgatga

SEQ ID NO: 107653 - DNA, 80 bp, synthetic construct
  source 1..80: mol_type = other DNA
gaggcgcgcgagttaagaaaacgcatttttcccactctatatgctatttttcagcagagccgaggccaagaacacgaact

SEQ ID NO: 107654 - DNA, 80 bp, synthetic construct
  source 1..80: mol_type = other DNA
cggttcagctcctgtttcccgcggcccgcgtggaccccgacgcatatccctgttattttttcaaaagcgcatgtcggccc

SEQ ID NO: 107655 - DNA, 80 bp, synthetic construct
  source 1..80: mol_type = other DNA
ccacctccaccaaaacatcgtggacgtccagtacctttacggtgttggatctgccgtggtttcatgggcactcaaatggg

SEQ ID NO: 107656 - DNA, 80 bp, synthetic construct
  source 1..80: mol_type = other DNA
ctaaccgtagcccaggtaatccagatcgccataccggcgtccatcatcgcctttgtgtttctgggcagctgtatctgctt

SEQ ID NO: 107657 - DNA, 80 bp, synthetic construct
  source 1..80: mol_type = other DNA
aatcgtcctttactcccaaccaggcctacctgaccttgcagagcagctcttcggagcctcgctccggaggcattggaacc

SEQ ID NO: 107658 - DNA, 80 bp, synthetic construct
  source 1..80: mol_type = other DNA
agtactcatactatccagaagatcctgtgaagcttgcatcaatagtgaaagcctcttttgaagaagggaagtgtggccta

SEQ ID NO: 107659 - DNA, 80 bp, synthetic construct
  source 1..80: mol_type = other DNA
tgtgtgtacatacgcgggagttgggttctccggaagaacttgcacgatcctgcgtgatatgggcatcgacacgcttgtgc

SEQ ID NO: 107660 - DNA, 80 bp, synthetic construct
  source 1..80: mol_type = other DNA
gggtgtggccaaagccgtggactttgtgccggtcgagtctcttgaaaccaccatgagatccccggtcttttctgacaatt

SEQ ID NO: 107661 - DNA, 80 bp, synthetic construct
  source 1..80: mol_type = other DNA
tctttacagggttaacccacatagacggtcatttcctatcccagaccaagcaatcgggtgagaatttcccgtatcttgtt

SEQ ID NO: 107662 - DNA, 80 bp, synthetic construct
  source 1..80: mol_type = other DNA
acgaggggcgttgcaaaatctctacagttcataccagtagaggccctgaattcacagaccaggtctccatcctttagtga

SEQ ID NO: 107663 - DNA, 80 bp, synthetic construct
  source 1..80: mol_type = other DNA
aggcttatgcttatgatgcatccgtgcacggacagatgggcgcggccttgctgttactgatcaccctctttacactcacc

SEQ ID NO: 107664 - DNA, 80 bp, synthetic construct
  source 1..80: mol_type = other DNA
gttgctgcactccaccactgaattcgccatcttgccctgtacgttctcagacctaccagccctgtcaaccggcctgctgc

SEQ ID NO: 107665 - DNA, 80 bp, synthetic construct
  source 1..80: mol_type = other DNA
ggtcggctgtccagcgtcgtcgccctagaggctgtccgccgggcgtgatgttttccgcatctacgacccccgaacagccc

SEQ ID NO: 107666 - DNA, 80 bp, synthetic construct
  source 1..80: mol_type = other DNA
gttcccttttgctcgcatcatttccacaaattaggaatgaaggacgggaggacattgattgtaccatgtaggaaccaaga

SEQ ID NO: 107667 - DNA, 80 bp, synthetic construct
  source 1..80: mol_type = other DNA
cctgaaagccacatgtgccgcccaccacagttcccctggacaggacctcatcgaagccaatcttctatggggtactaatg

SEQ ID NO: 107668 - DNA, 80 bp, synthetic construct
  source 1..80: mol_type = other DNA
caacatgatccttctcgggcctgccgacgactggaaggggaaaggttggtcgttacttgctcccatcacagcttacgctc

SEQ ID NO: 107669 - DNA, 80 bp, synthetic construct
  source 1..80: mol_type = other DNA
cccacacacatggcgtagctgctatggggggaacagatatcacagcaaagggtttgcaaattggtgttgacacgactgaa

SEQ ID NO: 107670 - DNA, 80 bp, synthetic construct
  source 1..80: mol_type = other DNA
acaggattacccttgtcatcattggaatttgcagcctcatagcagagcgtcgtcggtcagccgccaagaaaaaaggggcc

SEQ ID NO: 107671 - DNA, 80 bp, synthetic construct
  source 1..80: mol_type = other DNA
cgcggttctcggccgtcttggggcccaaatgatccccggcgtaggtctcgcaatttgggtaaagtcatcgacaccctgac

SEQ ID NO: 107672 - DNA, 80 bp, synthetic construct
  source 1..80: mol_type = other DNA
taaattctggaatcagcatcttaggaagggggccatcaacgttttctccccacagccgtcgtacaagttgcaaagctccc

SEQ ID NO: 107673 - DNA, 80 bp, synthetic construct
  source 1..80: mol_type = other DNA
gtggccggtgttgagcataggtttgatgctgcctgcaactggactcgcggggaccggtgtgagttggaggacagggacag

SEQ ID NO: 107674 - DNA, 80 bp, synthetic construct
  source 1..80: mol_type = other DNA
ggtgatgactgtgttgtcaaaccattggatgatagattttccactgctttgcatttcttgaacgccatgtcaaaggtgag

SEQ ID NO: 107675 - DNA, 80 bp, synthetic construct
  source 1..80: mol_type = other DNA
ccagcggggttcttactactagcatgggaaataccatcacgtgctacattaaagcttccgcggcctgtaaggccgccggg

SEQ ID NO: 107676 - DNA, 80 bp, synthetic construct
  source 1..80: mol_type = other DNA
tttcgttccttccccctccccccgcgtcagacaaaccctaaccaccgcttaagcggcccccgcgaggtccgaagactcat

SEQ ID NO: 107677 - DNA, 80 bp, synthetic construct
  source 1..80: mol_type = other DNA
tgtctcggcgcgcctgggacgggaggtgctgttgggcccggccgatgattataaaacaatggtgtggcgattgctatccc

SEQ ID NO: 107678 - DNA, 80 bp, synthetic construct
  source 1..80: mol_type = other DNA
tgattcctcctcttttaccttttcctatattgcccaagaaaatgaggacgaagacaaataaaatgttttaaaatgaattc

SEQ ID NO: 107679 - DNA, 80 bp, synthetic construct
  source 1..80: mol_type = other DNA
ccttgaaaatcaactggtacaagaagggaagctctattgggaagatgtttgaggccactgctagaggtgcaaggcgcatg

SEQ ID NO: 107680 - DNA, 80 bp, synthetic construct
  source 1..80: mol_type = other DNA
cacattaataggactgccttgaactgtaatgatagcttaagtacaggcttcatcaccgctctgttttatacccgtagtgt

SEQ ID NO: 107681 - DNA, 80 bp, synthetic construct
  source 1..80: mol_type = other DNA
tccgcggccccgcgggagatccgcgtcctccacagcctgggcgtggactatgtcagctttttcgagaagaaggcgtcgcg

SEQ ID NO: 107682 - DNA, 80 bp, synthetic construct
  source 1..80: mol_type = other DNA
gggctgcttgggaaacagctcggcacactccagtaaactcgtggttggggaacattattatgtacgcccctgccatctgg

SEQ ID NO: 107683 - DNA, 80 bp, synthetic construct
  source 1..80: mol_type = other DNA
cttcacgctcacaccacactataagtggatgctcgtccagttgttgtggtggtgtcagtatttcatagcccgaatagagg

SEQ ID NO: 107684 - DNA, 80 bp, synthetic construct
  source 1..80: mol_type = other DNA
ggggtcctagcaggactggcctttttctccatgcagggcaattgggctaaagtcatcttggtcctctttctcttcgcagg

SEQ ID NO: 107685 - DNA, 80 bp, synthetic construct
  source 1..80: mol_type = other DNA
atgtacaatctctggaagatgaagactggacgcagggggagagcgaatgggaagaccctgggtgaggtctggaaaaggga

SEQ ID NO: 107686 - DNA, 80 bp, synthetic construct
  source 1..80: mol_type = other DNA
cggcagaccagcgagccccggccccggcccgcgccccgccgccacacccacggcacccccccccgccgcccaccccggtg

SEQ ID NO: 107687 - DNA, 80 bp, synthetic construct
  source 1..80: mol_type = other DNA
ggcatgtttagttctggcccttcccagagcatccagttagtcaacaccaatggcagctggcacataaaccggaccgccct

SEQ ID NO: 107688 - DNA, 80 bp, synthetic construct
  source 1..80: mol_type = other DNA
tgggttcactaagacatgcggtgcaccaccttgccgcattagggtggatcacaacgacaccctcgatctattgtgcccca

SEQ ID NO: 107689 - DNA, 80 bp, synthetic construct
  source 1..80: mol_type = other DNA
ataatttggtgtattctaccacctcgcgcagcgccagccagaggcagaagaaagttacatttgacagactgcaagtcctg

SEQ ID NO: 107690 - DNA, 80 bp, synthetic construct
  source 1..80: mol_type = other DNA
taccagcccgagcgagacaaggtttttaccatggatggggagtttcggctgcgcggagaggaaaggaagaactttgttga

SEQ ID NO: 107691 - DNA, 80 bp, synthetic construct
  source 1..80: mol_type = other DNA
acagccaaggcgcggtggggggcgtggtggtgaacgatgagagaaacacgggggggaggtgtccggggggaggcgtgcgg

SEQ ID NO: 107692 - DNA, 80 bp, synthetic construct
  source 1..80: mol_type = other DNA
aggccggcatgcccaccacgcgcatcatcgcgccgctggccacgggtgtaatgaaacccgccacccttgacctgcctcca

SEQ ID NO: 107693 - DNA, 80 bp, synthetic construct
  source 1..80: mol_type = other DNA
tctacagggctgatccacctccatcagaacatcgtggacgtccaatacctttacggtataggcccggccatcacatcatt

SEQ ID NO: 107694 - DNA, 80 bp, synthetic construct
  source 1..80: mol_type = other DNA
cccgtattaatagtgtagctgcagtttgtcattaccgaccagttaacagtttgcgaacctggctgaacagtttctgtgta

SEQ ID NO: 107695 - DNA, 80 bp, synthetic construct
  source 1..80: mol_type = other DNA
acaaaaaaccctcgaccagcatcgaggtgcagaccgacccctggctcccagctacttctaccgccaccgcatccacttct

SEQ ID NO: 107696 - DNA, 80 bp, synthetic construct
  source 1..80: mol_type = other DNA
agatttccaatcaatgccaccaccaccggccctagcgtgcccataccatcgcccaactaccgcagggccctgtggagggt

SEQ ID NO: 107697 - DNA, 80 bp, synthetic construct
  source 1..80: mol_type = other DNA
cgagggaggatgcccacgaagacaccccagacaaggagctgcctgtgcgtggatttgtggaagacgcggaagccgggacg

SEQ ID NO: 107698 - DNA, 80 bp, synthetic construct
  source 1..80: mol_type = other DNA
ggtggggggggctgctttctgctccgcgatgtacattggagacctgtgcggcgccgtgtttttggcgtgccaaatgttca

SEQ ID NO: 107699 - DNA, 80 bp, synthetic construct
  source 1..80: mol_type = other DNA
gcggcactggaaaagctggttgtcctgcacgctgccagcgcagctagttcccatggcttactatacttcatcctcttctt

SEQ ID NO: 107700 - DNA, 80 bp, synthetic construct
  source 1..80: mol_type = other DNA
cgagggcggagccgcggcccgaatcatctcatattgttgttcctcggggcgcgttccccaaccgcacagcaccccgagca

SEQ ID NO: 107701 - DNA, 80 bp, synthetic construct
  source 1..80: mol_type = other DNA
ggcattggtggtgggagttgtgtgcgcggcgattctgcggcgacacgtagggcccggcgaggtggccgtgcagtggatga

SEQ ID NO: 107702 - DNA, 80 bp, synthetic construct
  source 1..80: mol_type = other DNA
ctctgtccccgagcacccactgtgcccaacaggcacgagggcgagctgcccctgccttatataccccccccgccacaccc

SEQ ID NO: 107703 - DNA, 80 bp, synthetic construct
  source 1..80: mol_type = other DNA
tccagactaagcccggagtgtttaagacaccagaaggagaaattggggcagttacgctagactatcccactggaacgtca

SEQ ID NO: 107704 - DNA, 80 bp, synthetic construct
  source 1..80: mol_type = other DNA
ggttcaagcatttaatggagatatgattgatccttttcagttaggccttctggtgatgtttctggccacccaggaggtct

SEQ ID NO: 107705 - DNA, 80 bp, synthetic construct
  source 1..80: mol_type = other DNA
ccgggcaggtattgctcgcagaccctgcgtggggctgtggaggggacggcctccatgaagcgacatttactctgctcgcg

SEQ ID NO: 107706 - DNA, 80 bp, synthetic construct
  source 1..80: mol_type = other DNA
gcgtaaagtgattagcagcctgaccgaacgtctgtattgcggcggcccgatgtttaacagcaaaggcgcgcagtgcggct

SEQ ID NO: 107707 - DNA, 80 bp, synthetic construct
  source 1..80: mol_type = other DNA
tattaagtgggagtacattgtcctcgccttccttgtgctagctgacgcgcgcatctgtgcgtgtctttggcttatgttgc

SEQ ID NO: 107708 - DNA, 80 bp, synthetic construct
  source 1..80: mol_type = other DNA
gaattcactcagtggagtggaaggagaaggactacacaaacttggatacatactcagagacatatcaaagattccggggg

SEQ ID NO: 107709 - DNA, 80 bp, synthetic construct
  source 1..80: mol_type = other DNA
gttgtgctgctactctttgctggcgtcgacgcaacgacccaactcacggcaggttccagcgcccgtcatatgcagagggt

SEQ ID NO: 107710 - DNA, 80 bp, synthetic construct
  source 1..80: mol_type = other DNA
tttgctggcgtcgatgcgagcacatacacctccgggggagccgctgcccgggaagcgtttggattcgtcaaacttttcag

SEQ ID NO: 107711 - DNA, 80 bp, synthetic construct
  source 1..80: mol_type = other DNA
cgcacgtggagccgcctgctgcagatctcgggcggaacctgggacgtgcgcctgcgaaacgcaatccgggaggtcgaggc

SEQ ID NO: 107712 - DNA, 80 bp, synthetic construct
  source 1..80: mol_type = other DNA
ggttgagtgagggtttacatcatttgacgcggacgggcgcctggtggcagtggcggttcgggacccgcctgaagaggagg

SEQ ID NO: 107713 - DNA, 80 bp, synthetic construct
  source 1..80: mol_type = other DNA
gaggggtggagccaagggacgcacactaggggaagtttggaaggagagactcaaccacatgacgaaggaagaatttacca

SEQ ID NO: 107714 - DNA, 80 bp, synthetic construct
  source 1..80: mol_type = other DNA
tgtcaccaggagccctggttgtgggggtcgtttgtgccgctgtcttacggcgtcacgtcggcccatcagagggagcgaac

SEQ ID NO: 107715 - DNA, 80 bp, synthetic construct
  source 1..80: mol_type = other DNA
acattaggaggtccaaaaagccatcacaacaagagaaacggatactatacacagacaaaaggaccctggagtgaaggaga

SEQ ID NO: 107716 - DNA, 80 bp, synthetic construct
  source 1..80: mol_type = other DNA
acccaaacaccaatccctacaaccatcatggcaaagaacgaagtcttctgcgtggatacgtcgaagggagggcgtaaacc

SEQ ID NO: 107717 - DNA, 80 bp, synthetic construct
  source 1..80: mol_type = other DNA
ccggcggcgcagcatctgcgggtcggcctcttggccgggtggtgcggacgcccgggcgcgagcgtctagggcgcgaagat

SEQ ID NO: 107718 - DNA, 80 bp, synthetic construct
  source 1..80: mol_type = other DNA
caccccaccccattccaccccaggaagtgcgaatgggtttacatgcctcagatatgaagttcttcgacttgtttttgaat

SEQ ID NO: 107719 - DNA, 80 bp, synthetic construct
  source 1..80: mol_type = other DNA
gccgctcctgcacaatgccccccttaaggttcttaggagaagatgggtgctggtatgggatggagattaggcccttgagt

SEQ ID NO: 107720 - DNA, 80 bp, synthetic construct
  source 1..80: mol_type = other DNA
aggggtttcaggaggaagctgggttgacatagtcttagaacatggaagttgtgtgacgacgatggcgaaaaacaaaccaa

SEQ ID NO: 107721 - DNA, 80 bp, synthetic construct
  source 1..80: mol_type = other DNA
ggacgccgcgcggccgtcggtaggcccgctcgcacgagcagcctgaccgaacgcaggcgcgtgctgttggccggcgtgag

SEQ ID NO: 107722 - DNA, 80 bp, synthetic construct
  source 1..80: mol_type = other DNA
ttgcacccttgactggttttgggagatctgggattgggtctgcaccgtactgagtgacttcaagacgtggctaaaggcca

SEQ ID NO: 107723 - DNA, 80 bp, synthetic construct
  source 1..80: mol_type = other DNA
tagtgggagatatgtccccagcggcgcttcctgggttattgtttacgcttcccgctgaaccccccgggaccaacttggta

SEQ ID NO: 107724 - DNA, 80 bp, synthetic construct
  source 1..80: mol_type = other DNA
aggatgaacgggaggtttccgtgcccgcagaaatcctgcgaaagtctcggaaattcaccccggccctgcccatttgggca

SEQ ID NO: 107725 - DNA, 80 bp, synthetic construct
  source 1..80: mol_type = other DNA
atcacgtacaagtgtcctcttctcaggcagaatgagccagaagacatagactgttggtgcaactccacgtccacgtgggt

SEQ ID NO: 107726 - DNA, 80 bp, synthetic construct
  source 1..80: mol_type = other DNA
caaactacaacctatttgtcatggacgaagcgcacttcacggatccagccagcatcgcagctagaggatacatctccacc

SEQ ID NO: 107727 - DNA, 80 bp, synthetic construct
  source 1..80: mol_type = other DNA
caaacccagcggcggccatgctggacttgtccagctggttcaccgtcggctacagcgggggagacatttatcacagcgtg

SEQ ID NO: 107728 - DNA, 80 bp, synthetic construct
  source 1..80: mol_type = other DNA
atgtggaagcaaataaccaatgagctaaactatgttctctgggaaggaggacatgatctcactgtagtggctggggacgt

SEQ ID NO: 107729 - DNA, 80 bp, synthetic construct
  source 1..80: mol_type = other DNA
cgtgctcacgcactcttgcgcgtgtgcctactagtgcggcgcgtgttgggaggtaaatatatccaagcaatgctcttgag

SEQ ID NO: 107730 - DNA, 80 bp, synthetic construct
  source 1..80: mol_type = other DNA
gaacgtgtcgcgttgctggacgccagtaacacctacagtggctgtcgcatacgcgggcgccccgcttgagtctttccggc

SEQ ID NO: 107731 - DNA, 80 bp, synthetic construct
  source 1..80: mol_type = other DNA
agaagcccacaacgagaagcgagctgatagtagctatgtgtgcaaacaaggcttcactgaccgtgggtggggcaacggat

SEQ ID NO: 107732 - DNA, 80 bp, synthetic construct
  source 1..80: mol_type = other DNA
gtgcgggtaccgtagatgccgcgcaagcggcgtatacaccacaagcttcgggaacacactgacgtgcttcctcaaggcta

SEQ ID NO: 107733 - DNA, 80 bp, synthetic construct
  source 1..80: mol_type = other DNA
acgccacaggaacacttccgcatactgtttcacatatcgtcacttccgccgcaccgcgcccggcctccgaccccacacgt

SEQ ID NO: 107734 - DNA, 80 bp, synthetic construct
  source 1..80: mol_type = other DNA
agatgtgcagcaatgtctggaataataggttccccatcaacgccatcacaactggccctagcgtgcccgtgccagagccc

SEQ ID NO: 107735 - DNA, 80 bp, synthetic construct
  source 1..80: mol_type = other DNA
tatgccaccgcttgaggtggagcccggagatcccgactttagttcggggtcttggtctacggtcagtgaggagggcgaca

SEQ ID NO: 107736 - DNA, 80 bp, synthetic construct
  source 1..80: mol_type = other DNA
gtaaagaccaagctcaaactcactccaatacctgatgcagccaggcttgacttgtcaggctggttcatatcaggcttcag

SEQ ID NO: 107737 - DNA, 80 bp, synthetic construct
  source 1..80: mol_type = other DNA
agccttggcgagttctcccagggctggggcccgctcggggttgctaacatcactgacccccttggtaacaggccctactg

SEQ ID NO: 107738 - DNA, 80 bp, synthetic construct
  source 1..80: mol_type = other DNA
atgccccggagctgctcgcacagcgagctttcgtgcgctccgccgccgaggctcgaggccgcgcacacaaacccggcccg

SEQ ID NO: 107739 - DNA, 80 bp, synthetic construct
  source 1..80: mol_type = other DNA
catggacgggggctctcgtaacaccttgcgcagccgaggaaacgaagctgccgatcagccccctgagcaactccttactg

SEQ ID NO: 107740 - DNA, 80 bp, synthetic construct
  source 1..80: mol_type = other DNA
cgtcgttggtcagggcgttggctcgatggcgtgcgaggacgggcgagtggctcaacggcgggtgcggtggcccggtgcgg

SEQ ID NO: 107741 - DNA, 80 bp, synthetic construct
  source 1..80: mol_type = other DNA
tacaacccctacctcgccccagtcgggacgcaacagaagccgaccgggccaacccagcgccatacgtactatagcgaatg

SEQ ID NO: 107742 - DNA, 80 bp, synthetic construct
  source 1..80: mol_type = other DNA
cggtgtcaagaggcactgccaaacttcggtggcttgttgaaaggcggttccttgagccaattggaaaggtcatagaccta

SEQ ID NO: 107743 - DNA, 80 bp, synthetic construct
  source 1..80: mol_type = other DNA
aatggtgctgcagggagtgcacaatgcccccactgtcgttccgggctaaagatggttgttggtatggaatggagataagg

SEQ ID NO: 107744 - DNA, 80 bp, synthetic construct
  source 1..80: mol_type = other DNA
ggaccacgtcgtccggcgagacgccacgagccgcaggatggactcgtagtggagcgacggcgccccgttgcggagcagat

SEQ ID NO: 107745 - DNA, 80 bp, synthetic construct
  source 1..80: mol_type = other DNA
ttctccatggcaggcaactgggccaaagtcgtgttaatcctcctcctcatggctggagtagacgctggcactcatatctc

SEQ ID NO: 107746 - DNA, 80 bp, synthetic construct
  source 1..80: mol_type = other DNA
gcgtaggctggctagggggtcacccccctccgaggccagctcctctgccagccagctgtcagcgccgtccctaaaagcaa

SEQ ID NO: 107747 - DNA, 80 bp, synthetic construct
  source 1..80: mol_type = other DNA
cttctgcctgccatcctatcccccggagcattggttgtcggcgtgatatgcgctgcagtgttacgcaggcatgtggggcc

SEQ ID NO: 107748 - DNA, 80 bp, synthetic construct
  source 1..80: mol_type = other DNA
ggagacagtccgacacactccagtcaattcctggttgggaaacatcatagtctacgctcccacaatatgggtgcgcatga

SEQ ID NO: 107749 - DNA, 80 bp, synthetic construct
  source 1..80: mol_type = other DNA
tgcagcatctggtcggccgtgccgcgctcaaacgccccgaggacggcctggacgttgcgagcgagctgttggatggcgcg

SEQ ID NO: 107750 - DNA, 80 bp, synthetic construct
  source 1..80: mol_type = other DNA
gggatggtggggcgaatgcggagggcacccaacaacaccgggctaaccaggaaatccgtggccccggcccgcaataaaga

SEQ ID NO: 107751 - DNA, 80 bp, synthetic construct
  source 1..80: mol_type = other DNA
aagtaacccgactccaagcctgaagcccgcaacgcagcagcagattcttccagtaacggaaaccaaacggggcgtcaaaa

SEQ ID NO: 107752 - DNA, 80 bp, synthetic construct
  source 1..80: mol_type = other DNA
cgcccaaggtcagtcaactaaagattatgacattgacctggctttctttgactcacctggaggaaatacaacagctggtg

SEQ ID NO: 107753 - DNA, 80 bp, synthetic construct
  source 1..80: mol_type = other DNA
agcggcgctcggccgtctcaaactcccccacgagcgcccgccgcaggctcgccagatgttccgtcggcacggccggaccc

SEQ ID NO: 107754 - DNA, 80 bp, synthetic construct
  source 1..80: mol_type = other DNA
aaccaggcgagctcagggtgttttgggtcaaaaaccagattgcctccgtgttttttgatgcgtttcttacctcgtgtttc

SEQ ID NO: 107755 - DNA, 80 bp, synthetic construct
  source 1..80: mol_type = other DNA
tcccaactaccctgtgagccagaacctgatgtgaccgtcctaacgtcaatgctgtcagaccctgctcacatcacggcaga

SEQ ID NO: 107756 - DNA, 80 bp, synthetic construct
  source 1..80: mol_type = other DNA
acccggagggtccatggcgcgtcggggtttggtgtggcggtgctaaagtgcagctttctggccagcccctgcgcgtgtgt

SEQ ID NO: 107757 - DNA, 80 bp, synthetic construct
  source 1..80: mol_type = other DNA
tgaaggatggcaggagaattgtagtgccttgccgggatcaagatgagctggttggcagggggagagtgtctccagggaat

SEQ ID NO: 107758 - DNA, 80 bp, synthetic construct
  source 1..80: mol_type = other DNA
cctgtggcagtaatgggaccatcatacggtttccagtactcgcccaagcaacgcgtagactacctccttagcttgtggcg

SEQ ID NO: 107759 - DNA, 80 bp, synthetic construct
  source 1..80: mol_type = other DNA
cgtgacgctcttcatagaggaatgcttgagaagaagagtcacacgcaagcacatgatcatggccattcttgtgactctgg

SEQ ID NO: 107760 - DNA, 80 bp, synthetic construct
  source 1..80: mol_type = other DNA
attggtttaatgcatctttgggactttgtagaagcttatgtacataatccagcaagtaaacccctaactgcccagctgtt

SEQ ID NO: 107761 - DNA, 80 bp, synthetic construct
  source 1..80: mol_type = other DNA
tggacctcctcgtgggtgctgcagtgctctgttcttcgatgtatatcggagacctgtgtggaggtgcatttttggtaggg

SEQ ID NO: 107762 - DNA, 80 bp, synthetic construct
  source 1..80: mol_type = other DNA
acatgatgggaaaacgtgagaaaaaattaggagagtttggtagggccaagggaagccgagcgatctggtacatgtggctg

SEQ ID NO: 107763 - DNA, 80 bp, synthetic construct
  source 1..80: mol_type = other DNA
aggggactggggagtgtccacttgataaacgccgaacaggagtcttcacggtggcagagtttgtgatgggaatgaggacc

SEQ ID NO: 107764 - DNA, 80 bp, synthetic construct
  source 1..80: mol_type = other DNA
agcttgccgttaaaaccttcggcagctctacaacttcgggcgtgacaagcggtgaaaagaccgaaccgtcctcgccgccc

SEQ ID NO: 107765 - DNA, 80 bp, synthetic construct
  source 1..80: mol_type = other DNA
caatcggcatggccaaagctcgaggcattctggcagaaacatctgtggaatttcgttagcgggatacagtatctcgctgg

SEQ ID NO: 107766 - DNA, 80 bp, synthetic construct
  source 1..80: mol_type = other DNA
acaaccaaccaaaccatgttctttaacatcctcgggggttgggtagccacacacctagcgggacctgcagcatcttctgc

SEQ ID NO: 107767 - DNA, 80 bp, synthetic construct
  source 1..80: mol_type = other DNA
tgacttaagcatggtggttgagaagcagagtggcgtatataaatcagccccgaaacgcttggccgctaccagtgaaaaac

SEQ ID NO: 107768 - DNA, 80 bp, synthetic construct
  source 1..80: mol_type = other DNA
gctgggcgtggtgcctaaaaatgtctttcagtagcaagctgattgccaggggcaggcccttggtgtaagtgtttacaaag

SEQ ID NO: 107769 - DNA, 80 bp, synthetic construct
  source 1..80: mol_type = other DNA
ttacacaatggatgctgacgacacaccccccaacctccaaatatctccaactgcaggacctttgcgttcccaccacaata

SEQ ID NO: 107770 - DNA, 80 bp, synthetic construct
  source 1..80: mol_type = other DNA
aggcggctccgagcaggtatactggtctctacccgatatgatgcaagatccggtgacttttcgctcctcgcgtcaagtta

SEQ ID NO: 107771 - DNA, 80 bp, synthetic construct
  source 1..80: mol_type = other DNA
cggaaggtgacattcgaccgcgtccaactacttgatcaacactatcatgacactttgaaggaggttaaggcgcgagcgtc

SEQ ID NO: 107772 - DNA, 80 bp, synthetic construct
  source 1..80: mol_type = other DNA
catggagccggcagtaagaccctctgcggcccgaaaggccccgtcaatcaaatgtacaccaatgttgaccaggacctggt

SEQ ID NO: 107773 - DNA, 80 bp, synthetic construct
  source 1..80: mol_type = other DNA
cagttccgtatggaacgccacgaccgccattggactctgccacgtcatgcgcggaggctggctatcatgtctgtccatca

SEQ ID NO: 107774 - DNA, 80 bp, synthetic construct
  source 1..80: mol_type = other DNA
caaccctctcaagaaccaacaagaaaagaagctggccactaaatgaggctatcatggcagtcggaatggtgagcatttta

SEQ ID NO: 107775 - DNA, 80 bp, synthetic construct
  source 1..80: mol_type = other DNA
cgactctggtggctgtttgtggggtcggaaccataggatgaacaaaccaccccgtaccacccgcacccaagggtgcgggt

SEQ ID NO: 107776 - DNA, 80 bp, synthetic construct
  source 1..80: mol_type = other DNA
atcgcgtatcacggcatggggcgtttgacctccggcgtcgggacggcggccctgctagttgtcgcggtgggactccgcgt

SEQ ID NO: 107777 - DNA, 80 bp, synthetic construct
  source 1..80: mol_type = other DNA
tacccccatgagggactgggcagcgtccggtctgcgtgacttggcggtggctacagaacccatcatattctccgctatgg

SEQ ID NO: 107778 - DNA, 80 bp, synthetic construct
  source 1..80: mol_type = other DNA
acggtaacggtctgaaatccaatgatgtttacatcagcagcatcgctcaaggtagcgttgagaaaagccgaccagaaatg

SEQ ID NO: 107779 - DNA, 80 bp, synthetic construct
  source 1..80: mol_type = other DNA
ttgtggcccctccttttgttagtattggctctgccccgcagggcttatgcttacaatggagaggaggcagcctcacttgg

SEQ ID NO: 107780 - DNA, 80 bp, synthetic construct
  source 1..80: mol_type = other DNA
gaactaaatcacatcctaactgagaatgacgtgaaggttaccatcatgactggggatattaagggaattttgcagcaagg

SEQ ID NO: 107781 - DNA, 80 bp, synthetic construct
  source 1..80: mol_type = other DNA
acttggaagagcggcgcaagctcatgatggccgtggtgctagttactgtggaaatggagtgtcttcgccgcttcttcact

SEQ ID NO: 107782 - DNA, 80 bp, synthetic construct
  source 1..80: mol_type = other DNA
tagacatctttgctggtgggcactggggtattgtcggcgctctgatgtactacagcatggttaccaactgggctaaagtc

SEQ ID NO: 107783 - DNA, 80 bp, synthetic construct
  source 1..80: mol_type = other DNA
agtgtttcacgtagtatctcatccccgccgcccctggcctgtttttgagcacaacatgcttatgcgctgtactgtgcatt

SEQ ID NO: 107784 - DNA, 80 bp, synthetic construct
  source 1..80: mol_type = other DNA
aagcggagctggccccctagtgaagtactcacagctgttggcctgatatgcgcattggctggagggttcgccaaggcgga

SEQ ID NO: 107785 - DNA, 80 bp, synthetic construct
  source 1..80: mol_type = other DNA
caagcaccccgaagccacttataccaaatgtggctccggcccttggctcactcccaggtgcctagtgcattacacataca

SEQ ID NO: 107786 - DNA, 80 bp, synthetic construct
  source 1..80: mol_type = other DNA
tccccaaatatatcgactggctgacgtgcctggggctggtccccatattacgcaagcgacaagaaggtggtgtgacgcag

SEQ ID NO: 107787 - DNA, 80 bp, synthetic construct
  source 1..80: mol_type = other DNA
ggctcgtggcatattaacagcactgccctgaattgcaacgattccctaaataccgggttcatagcagggcttttgtacta

SEQ ID NO: 107788 - DNA, 80 bp, synthetic construct
  source 1..80: mol_type = other DNA
agccgtttactactatatcatccaccgagagaggcgcctgtcccccttccccgcgctagtccggctcgtaggccggtaca

SEQ ID NO: 107789 - DNA, 80 bp, synthetic construct
  source 1..80: mol_type = other DNA
tcaggatctcaattagtaacaagaataggagatggcttacgatttgataatggggttataaaagcacatgttgccgggtg

SEQ ID NO: 107790 - DNA, 80 bp, synthetic construct
  source 1..80: mol_type = other DNA
gaccaagggcccgctccgcgatcgccacgtcctccatgaccacgtcgctctcggccatgctccgaatggcctgggagacg

SEQ ID NO: 107791 - DNA, 80 bp, synthetic construct
  source 1..80: mol_type = other DNA
ctggcctgatacatctgcaccagaacgttgtggacgtgcaatacctatacggagtcagcccagccatcacctcctgggtc

SEQ ID NO: 107792 - DNA, 80 bp, synthetic construct
  source 1..80: mol_type = other DNA
catagtgactagcctcaccggacgtgacaaaaatcaggtggagggtgagattcaaatcatgtccactgccagccaaacct

SEQ ID NO: 107793 - DNA, 80 bp, synthetic construct
  source 1..80: mol_type = other DNA
gtgagtggcttagcggtggcagcggtaggcagcgtgggcctggggaagatcctggtcgacattctcgccgggtacggcgc

SEQ ID NO: 107794 - DNA, 80 bp, synthetic construct
  source 1..80: mol_type = other DNA
ccgcgtacagccgccggcgctcccgcacgtccgcggcggcccgcgtcgcgatgtcgccccagctctccggcccctgcgcc

SEQ ID NO: 107795 - DNA, 80 bp, synthetic construct
  source 1..80: mol_type = other DNA
ttacatagtgggagctacagctgacaatcttaaatgcccgtgccaagttcctgcaccggagttctttactgaggtggatg

SEQ ID NO: 107796 - DNA, 80 bp, synthetic construct
  source 1..80: mol_type = other DNA
tcatccccgagtatgatgacagggagccgtctgtgccggcggagtgccataggcccactaggcctaagtaccctccagca

SEQ ID NO: 107797 - DNA, 80 bp, synthetic construct
  source 1..80: mol_type = other DNA
tgcgcgggcgaaagccccccccccctcatgggacactatgtggaaatgtctcacacgcctaaagcctatgctcacggggc

SEQ ID NO: 107798 - DNA, 80 bp, synthetic construct
  source 1..80: mol_type = other DNA
gggtacctgcatgctcctaccggaagcgggaagagtaccaaggttcctgcggcgtatgctgctcaggggtataaagtact

SEQ ID NO: 107799 - DNA, 80 bp, synthetic construct
  source 1..80: mol_type = other DNA
gaggaccaggcacggtggcccgtcggcgagagggcgctcggcgatgagcgccgacaggcgcgggagctgcgccgccagac

SEQ ID NO: 107800 - DNA, 80 bp, synthetic construct
  source 1..80: mol_type = other DNA
cgaggacattgactgctggtgtgatgttgaagaggtgtgggtgcattacggcagatgcacgcgcatgggacattcaaggc

SEQ ID NO: 107801 - DNA, 80 bp, synthetic construct
  source 1..80: mol_type = other DNA
gcagcattgggaaagctttggcaaccacatggaaaggagcccaacggctagccgttttgggggacacagcgtgggacttc

SEQ ID NO: 107802 - DNA, 80 bp, synthetic construct
  source 1..80: mol_type = other DNA
tattgatgacccactttttctcaatactccagagccaggaagcccttgagaaagcactcgacttcgatatgtacggagtc

SEQ ID NO: 107803 - DNA, 80 bp, synthetic construct
  source 1..80: mol_type = other DNA
tctctcaaccttgcctgggaacccagctgtggcctctctgatgtctttctctgccgctctcaccagtccgatggccacct

SEQ ID NO: 107804 - DNA, 80 bp, synthetic construct
  source 1..80: mol_type = other DNA
tggaggcaggaggtaggcggcaacattaccagagtagagtctgagaacaaggtcatcgtactcgactccttcgaccccat

SEQ ID NO: 107805 - DNA, 80 bp, synthetic construct
  source 1..80: mol_type = other DNA
acgcatagcagaaatgctaaagtcaaaaattcaaggcctgcttcagcaagcctcgaagcaggctcaagacatacaacctg

SEQ ID NO: 107806 - DNA, 80 bp, synthetic construct
  source 1..80: mol_type = other DNA
acagccttggccattgcctacctggtggggagcaacatgacgcaacgagttgtcattgccctgctagtcttggctgttgg

SEQ ID NO: 107807 - DNA, 80 bp, synthetic construct
  source 1..80: mol_type = other DNA
taccagcagcttttggatactggctgaccctgaaaaccacgaagaggggaggcgtcttctgggacacaccatctcccaaa

SEQ ID NO: 107808 - DNA, 80 bp, synthetic construct
  source 1..80: mol_type = other DNA
ataggccgcatgttaaacatcttgaataggagaagaaggtcaacaatgacattgctgtgtttgattcccaccgtaatggc

SEQ ID NO: 107809 - DNA, 80 bp, synthetic construct
  source 1..80: mol_type = other DNA
ggttcttcgatgtgccacacccaaggatgcgttggaggcgatttcgggcagcagcccgggagagcgcagcaggggacgct

SEQ ID NO: 107810 - DNA, 80 bp, synthetic construct
  source 1..80: mol_type = other DNA
agaacttgatataggctggaaggcctggggtaagagtttgctttttgcggcggaattggccaattcaacgtttgtggttg

SEQ ID NO: 107811 - DNA, 80 bp, synthetic construct
  source 1..80: mol_type = other DNA
ttcaccggactgactcatatagatgcccacttcttgtcacagacaaaacagcagggcctaaattttgcatacttagtggc

SEQ ID NO: 107812 - DNA, 80 bp, synthetic construct
  source 1..80: mol_type = other DNA
tgagacgccatcatcatttacaaattcgggcagatggcgccactggcgccggccagctggtaccggaggttaatacagct

SEQ ID NO: 107813 - DNA, 80 bp, synthetic construct
  source 1..80: mol_type = other DNA
ggctgccaaaacttttagtgacccatctacatctggtgtcgctagtggcgatacagccacagcatcatcgccaacctcct

SEQ ID NO: 107814 - DNA, 80 bp, synthetic construct
  source 1..80: mol_type = other DNA
tgggattgcggaggtggcgccggatgccctctgggacgtcatacgccaggccgtgggtgttggtctcggccgagttgaca

SEQ ID NO: 107815 - DNA, 80 bp, synthetic construct
  source 1..80: mol_type = other DNA
tctcgcggacgtgctgcacgacgggctgtcggatcgacgaaaagtagttggcccccagagccgggtggaccaggtggacc

SEQ ID NO: 107816 - DNA, 80 bp, synthetic construct
  source 1..80: mol_type = other DNA
ttcactcggatgggttgactgctttcggaagctcccgttgtatccattaattaaacgttcggtacacgtctggtgtgtgt

SEQ ID NO: 107817 - DNA, 80 bp, synthetic construct
  source 1..80: mol_type = other DNA
tccactcgagtatattaagggcggcagacacctgattttctgccactcaaagaagaaatgtgatgagttggccggccaac

SEQ ID NO: 107818 - DNA, 80 bp, synthetic construct
  source 1..80: mol_type = other DNA
cacaaaccttttgtagagggaacctaccagtgccgacacggaccttgtgttcacaacttccatttggtgaaccttaccag

SEQ ID NO: 107819 - DNA, 80 bp, synthetic construct
  source 1..80: mol_type = other DNA
tttaagatcatgtctggcgagaagccctctgtggaggacgtggtcaacttgctgcccgccatcctttctcctggtgccct

SEQ ID NO: 107820 - DNA, 80 bp, synthetic construct
  source 1..80: mol_type = other DNA
ttacaaaaaatggtggctacgtcagtggaatagcgcaaacaaatgcagaaccagacggaccgacaccggaattggaagaa

SEQ ID NO: 107821 - DNA, 80 bp, synthetic construct
  source 1..80: mol_type = other DNA
gatggcgcgcccggaggcgcatgagcgtcgtgtgtacgcaggcgtggcgcgtgtcgaaggtgcacaggttgcagggcacg

SEQ ID NO: 107822 - DNA, 80 bp, synthetic construct
  source 1..80: mol_type = other DNA
gtcgtgcgcctccagcagggcgtcggcctccttgcggaccgagtcgttctcgggcgacgggtgtggctgcccgtcgcccc

SEQ ID NO: 107823 - DNA, 80 bp, synthetic construct
  source 1..80: mol_type = other DNA
cgtgtgcagcacggacgcgctcatgacggggtttaccggcgactttgattctgtcatagactgcaacaccaccgtcacgc

SEQ ID NO: 107824 - DNA, 80 bp, synthetic construct
  source 1..80: mol_type = other DNA
ggctatagatcttagggtttgatttttgtccctatcggcccgttcttttgcggcaatattgagttgcacatattcgcgtg

SEQ ID NO: 107825 - DNA, 80 bp, synthetic construct
  source 1..80: mol_type = other DNA
ttgttcaggtggggcctatgacgttatcatgtgtgatgaatgccactccactgactccaccacaatcctagggataggga

SEQ ID NO: 107826 - DNA, 80 bp, synthetic construct
  source 1..80: mol_type = other DNA
cggcgatgagcgcggacaggcgcgggagctgtgccgccagacacgcgttttcgatcgggttcaggtcggcgtgcaggagg

SEQ ID NO: 107827 - DNA, 80 bp, synthetic construct
  source 1..80: mol_type = other DNA
gtctcgatggcccgccgggcgtcctcgatcaccccggaagccgcatccgcgtcttgggggtccacgttaaagacacccca

SEQ ID NO: 107828 - DNA, 80 bp, synthetic construct
  source 1..80: mol_type = other DNA
ggtgcggtggcccaggctcttgacggtcgccacaaacacgctgctggcgaccgccgccccgccctccgcaatgatgcccc

SEQ ID NO: 107829 - DNA, 80 bp, synthetic construct
  source 1..80: mol_type = other DNA
tgggaggtatcagtgggtgacagagtcttttaaaagacgtgtcccggggccctcgagacgcgcaacttttggccacacag

SEQ ID NO: 107830 - DNA, 80 bp, synthetic construct
  source 1..80: mol_type = other DNA
cggtgaggaagacttccgaacggtcccagcccagagggaggcgccagcccataccaaaggcgcgccaaccaacgggccgg

SEQ ID NO: 107831 - DNA, 80 bp, synthetic construct
  source 1..80: mol_type = other DNA
ccggcggcgccgcggccaggactacttccagctttgtgagcctgtttgccccgggcccgagccagcatctgactttagtg

SEQ ID NO: 107832 - DNA, 80 bp, synthetic construct
  source 1..80: mol_type = other DNA
gcggaagggcattggaaagataggtctgggaggcgttgtcttgggagtcgcgaccttcttctgttggatggctgaagttc

SEQ ID NO: 107833 - DNA, 80 bp, synthetic construct
  source 1..80: mol_type = other DNA
ttgggatgacggattcccctggcggtgtggcccccgcctcccccgtggaggacgcgtcggacgcgtccctcgggcagccg

SEQ ID NO: 107834 - DNA, 80 bp, synthetic construct
  source 1..80: mol_type = other DNA
aggacctggttacctccttaggagtgtcctcacaagcacgccatacttcgtcagagcgcaagcgctgttgaggatatgtg

SEQ ID NO: 107835 - DNA, 80 bp, synthetic construct
  source 1..80: mol_type = other DNA
acacattcaccaacattgccgtccagcttattagactgatggaagctgaaggagtgattgggcaggaacatctggaaagt

SEQ ID NO: 107836 - DNA, 80 bp, synthetic construct
  source 1..80: mol_type = other DNA
tcttgccagcccttctctcacccggagcactagtcgtgggcgtagtctgcgcagccattttgcggcgccacgttggcccc

SEQ ID NO: 107837 - DNA, 80 bp, synthetic construct
  source 1..80: mol_type = other DNA
tttccagatctggcctatgcttctactcatcttagcgctgcccgagagggcacgtgcaatggacaaccatgtagcaggga

SEQ ID NO: 107838 - DNA, 80 bp, synthetic construct
  source 1..80: mol_type = other DNA
acccttcgagtccttgagatggtggaagactggctgcacagagggcccaaggaattctgtgtgaaagttttgtgccccta

SEQ ID NO: 107839 - DNA, 80 bp, synthetic construct
  source 1..80: mol_type = other DNA
tgccaagtttacctgtgccaaatccatgagtctatttgaggttgatcagaccaaaattcagtatgtcattagggcacagc

SEQ ID NO: 107840 - DNA, 80 bp, synthetic construct
  source 1..80: mol_type = other DNA
gtatacaaaccctatggacacccccgacctcaaatcctaactgcaccgtttacaccgaaagcgattccttacttagtctc

SEQ ID NO: 107841 - DNA, 80 bp, synthetic construct
  source 1..80: mol_type = other DNA
cagctccgtcactcaaagcaacctgcaccaccggcggtgttcatccggatgcggagttaattgaggccaacctgctttgg

SEQ ID NO: 107842 - DNA, 80 bp, synthetic construct
  source 1..80: mol_type = other DNA
tcggctgacctggaggtcgtcacgagtacctgggtgctcgtcggcggcgttctggctgctttagccgcgtattgcctatc

SEQ ID NO: 107843 - DNA, 80 bp, synthetic construct
  source 1..80: mol_type = other DNA
agctggtacttggcatacaactacggagactcagaaaaaggggtccggtcttggactctcttaactaccccagatgtcac

SEQ ID NO: 107844 - DNA, 80 bp, synthetic construct
  source 1..80: mol_type = other DNA
gcaacaagcaacaaaacaagctcaggatgtacagcccgccgttcagacggcctggcctaagttagagcaattctgggcta

SEQ ID NO: 107845 - DNA, 80 bp, synthetic construct
  source 1..80: mol_type = other DNA
cataactgcggagaccgcgggtcgacgcctcaaacggggatccccaccctctctagccagttcatctgcaagtcaattat

SEQ ID NO: 107846 - DNA, 80 bp, synthetic construct
  source 1..80: mol_type = other DNA
cggaatccgtcgcaggttggggatgagtattgctatggcggacacacgaatgaggatgactccaactttgctcattggac

SEQ ID NO: 107847 - DNA, 80 bp, synthetic construct
  source 1..80: mol_type = other DNA
cggaatgttgacggagtctatttggagtatggccgttgtgggaaacaggagggctcacggacaagacgctcggtgctgat

SEQ ID NO: 107848 - DNA, 80 bp, synthetic construct
  source 1..80: mol_type = other DNA
cgagttcgttccggtcgaaagcctggagaccacagcacgttcgcccgtgttcaccgacaacagcacgccccctgcggtcc

SEQ ID NO: 107849 - DNA, 80 bp, synthetic construct
  source 1..80: mol_type = other DNA
atgaggataatgtcaccaatccagaggatatgagaccctattgctggcactacccaccaaggcagtgtggcgtggtctcc

SEQ ID NO: 107850 - DNA, 80 bp, synthetic construct
  source 1..80: mol_type = other DNA
gttgctcctgaatgtaactgctgaagacctggggaaaactttttcagtgggaactgggaattgcaccacgaatattctgg

SEQ ID NO: 107851 - DNA, 80 bp, synthetic construct
  source 1..80: mol_type = other DNA
tcctaagatggtgcgggtccggtctacccgggaaacgcagccccgggccccaaccccgtcggtcccaagcccaaatgcaa

SEQ ID NO: 107852 - DNA, 80 bp, synthetic construct
  source 1..80: mol_type = other DNA
gggaaagcagaactggaagagggagcctaccgcatcaaacaacgaggtatttttggatactcacaaataggagcaggagt

SEQ ID NO: 107853 - DNA, 80 bp, synthetic construct
  source 1..80: mol_type = other DNA
gccacagcgcgttggcggaatcgatgtgggccgtcggggcgcaggcgccgcctcctcccggagggtcggtaatcctggat

SEQ ID NO: 107854 - DNA, 80 bp, synthetic construct
  source 1..80: mol_type = other DNA
gccaagcttgtgcccactctcccgggtatccccttcatctcgtgtcagcggggtttcaggtgcgtttggcgaggcgatgg

SEQ ID NO: 107855 - DNA, 80 bp, synthetic construct
  source 1..80: mol_type = other DNA
catacccgttgtcggcgcccctgttggaggcgtcgccagagcccttgcccacggggtgagggtcctggaggacgggatta

SEQ ID NO: 107856 - DNA, 80 bp, synthetic construct
  source 1..80: mol_type = other DNA
gggtgggtttgagcaccggcttaccgccgcttgtaactggaccagggtggagcgctgcgatatcgaggatcgcgaccgca

SEQ ID NO: 107857 - DNA, 80 bp, synthetic construct
  source 1..80: mol_type = other DNA
gtggtgtgtggcaggtacgttcaggcttgcctgttgaagctgggagcttggacgggcacttacatctatgaccatctggc

SEQ ID NO: 107858 - DNA, 80 bp, synthetic construct
  source 1..80: mol_type = other DNA
ttgctgacgcccaactcgcgcctgttgctgctgctaatagcgcccttcacggacagtggcagcgtgtcccgggacacata

SEQ ID NO: 107859 - DNA, 80 bp, synthetic construct
  source 1..80: mol_type = other DNA
ccctgtttagaagaagacatcttacaaaaggccccagctttaactttaaattctccaaaagtgacttcgaggttgcaaca

SEQ ID NO: 107860 - DNA, 80 bp, synthetic construct
  source 1..80: mol_type = other DNA
tcacgacgtcaaccaactacctgaggccgtgggagccgcttatggcttccaatactccccagcgcagcgggtggaatttc

SEQ ID NO: 107861 - DNA, 80 bp, synthetic construct
  source 1..80: mol_type = other DNA
gttctgccactacccggcagaagaaggtaaccttcgaccgcatgcaagtggtggacaaccattacaatgaagtactcaag

SEQ ID NO: 107862 - DNA, 80 bp, synthetic construct
  source 1..80: mol_type = other DNA
agtagaaatctcgccggcgagcagagcattcatgtcgatgtttgtaaaagcgtgcgcagtattcgcatcgttgcatgggc

SEQ ID NO: 107863 - DNA, 80 bp, synthetic construct
  source 1..80: mol_type = other DNA
ctcgggcagccggaggagggggcgccctgccaggtggtcctgcagggcgccgaacttaatggaatcctacaggcgtttgc

SEQ ID NO: 107864 - DNA, 80 bp, synthetic construct
  source 1..80: mol_type = other DNA
ccgaggccgggctggcggtggctggaacgggtttccgggccaggtgggactgttttggcccgctccccttgttaacccaa

SEQ ID NO: 107865 - DNA, 80 bp, synthetic construct
  source 1..80: mol_type = other DNA
agggaggtcggcacttaatattctgccattcaaagaagaagtgcgatgagcttgctaagcaactcacctcacttggtctc

SEQ ID NO: 107866 - DNA, 80 bp, synthetic construct
  source 1..80: mol_type = other DNA
aagtccattgcacttacgttcctggcggtgggaggaatcctactattcctatcagccaacgtccatgcagacactggctg

SEQ ID NO: 107867 - DNA, 80 bp, synthetic construct
  source 1..80: mol_type = other DNA
ttcttctacgcatcccttttgggggtgtgtgtagcccttatttcgttagcttatcatgcgtgtttccggttatttactcg

SEQ ID NO: 107868 - DNA, 80 bp, synthetic construct
  source 1..80: mol_type = other DNA
cacggtgtgagagtaatcgaggacggcgtgaactatgcaacagggaatcttcctggttgctctttctctatcttcctctt

SEQ ID NO: 107869 - DNA, 80 bp, synthetic construct
  source 1..80: mol_type = other DNA
agatcgttggatggcaaagtttgatttcagcgccttttttcccacgatatactgcgctatgttccccatgcattttagat

SEQ ID NO: 107870 - DNA, 80 bp, synthetic construct
  source 1..80: mol_type = other DNA
gaggcgtcggcgggcctcacaatgggcggcgatgccctacgagtgccctttttagatttcgcgaccgcgacccccaagcg

SEQ ID NO: 107871 - DNA, 80 bp, synthetic construct
  source 1..80: mol_type = other DNA
cctggttggaaaatgaatctgacgtgtttctgctgcaaactaccagaccccctggtggggggtggttcgggtgcacctgg

SEQ ID NO: 107872 - DNA, 80 bp, synthetic construct
  source 1..80: mol_type = other DNA
ggccaccaacgattgctccaacaacagcattacgtggcaaattcagggcgcggtactccatgttcctggttgcatcccct

SEQ ID NO: 107873 - DNA, 80 bp, synthetic construct
  source 1..80: mol_type = other DNA
tgcgccctaccccccacacctcaggcaccagtgcccccacctcggaggcgccgcgccagagtcctgactcaggacaatgt

SEQ ID NO: 107874 - DNA, 80 bp, synthetic construct
  source 1..80: mol_type = other DNA
ggtcttacccacattgatgcgcacttcctatcccagaccaaacagcaaggtgtaaatttcccatatctggtggcctacca

SEQ ID NO: 107875 - DNA, 80 bp, synthetic construct
  source 1..80: mol_type = other DNA
gcccaagttccggacaaggcgtggagcactgggtatgagtggatcaccaacttcacagggaggactgtgtggtttgtccc

SEQ ID NO: 107876 - DNA, 80 bp, synthetic construct
  source 1..80: mol_type = other DNA
gtgagcggtatggctggtgctgccgtgggcagcatcggtttgggcagggttattgttgacatcctagcagggtatggagc

SEQ ID NO: 107877 - DNA, 80 bp, synthetic construct
  source 1..80: mol_type = other DNA
cccaaacgggggatttcggcgtattccccgggtggccctgcataccccggtcccgtcggaccaggctcgcaaggcgtact

SEQ ID NO: 107878 - DNA, 80 bp, synthetic construct
  source 1..80: mol_type = other DNA
ctagccggacgtgacggataggccgttaaggggtggaggcttctcgctcccatcactgcctacgcccagcaaacacggtg

SEQ ID NO: 107879 - DNA, 80 bp, synthetic construct
  source 1..80: mol_type = other DNA
acgccaatgttaccatgctacgggtcttacgccaaaccaacaaatgaaaagggtggtcaggccaatcttataacaaacgg

SEQ ID NO: 107880 - DNA, 80 bp, synthetic construct
  source 1..80: mol_type = other DNA
ggagaagaaagttatcacctggggcgcggatacagccgcgtgcggtgacatcatatccgggctcccagtctcggccagga

SEQ ID NO: 107881 - DNA, 80 bp, synthetic construct
  source 1..80: mol_type = other DNA
tccagaccctagctataagagggctctgtggcgggtgtccgcggaggattatgtcgaggtcctgcgtgtagggagctacc

SEQ ID NO: 107882 - DNA, 80 bp, synthetic construct
  source 1..80: mol_type = other DNA
gaggaccccagtgtggtctgctgttctatgtcatattcatggacaggagctcttatcaccccctgtgctgcagaggagga

SEQ ID NO: 107883 - DNA, 80 bp, synthetic construct
  source 1..80: mol_type = other DNA
ctcttccgcgcggccgtctgcacccgtggtgtcgccaaagccatagactttgtgcctgtggagagtatggagactacgat

SEQ ID NO: 107884 - DNA, 80 bp, synthetic construct
  source 1..80: mol_type = other DNA
tataatcatcttacccccatgtcagattgggccagcgacggcctacgcgatctggccattgctgtagagccaatcatctt

SEQ ID NO: 107885 - DNA, 80 bp, synthetic construct
  source 1..80: mol_type = other DNA
ggtggtgtgacgcagggtctgagggcgtttctcaagcagcacccgctgacccgccagctggccacggtcgcggaggccgc

SEQ ID NO: 107886 - DNA, 80 bp, synthetic construct
  source 1..80: mol_type = other DNA
aatcccctgagcaactcactactgcgacaccacaacatggtgtacgccacgacctccaagtcggccaccacccggcaaaa

SEQ ID NO: 107887 - DNA, 80 bp, synthetic construct
  source 1..80: mol_type = other DNA
ggttccaatactcccccgctcaacgggtcgatttcctgctgcgtgcgtggaaagaaaagaaggaacctatggggttctct

SEQ ID NO: 107888 - DNA, 80 bp, synthetic construct
  source 1..80: mol_type = other DNA
atggtcgacggttagcagtggggctgacacggaggatgtcgtgtgctgctcaatgtcttattcctggactggcgcactca

SEQ ID NO: 107889 - DNA, 80 bp, synthetic construct
  source 1..80: mol_type = other DNA
cgagtccgcggtccaccatacccgcctcctcgaggaccacggccagggaacacagataatccaggcgggcccagagagga

SEQ ID NO: 107890 - DNA, 80 bp, synthetic construct
  source 1..80: mol_type = other DNA
atgggacacgccgtgggtattttcagggccgcggtgtgcacccgtggggttgagaaggcagtggacttcgtgcccgttga

SEQ ID NO: 107891 - DNA, 80 bp, synthetic construct
  source 1..80: mol_type = other DNA
cattggattttgaactgataaaaacagaagccaaacaacctgccactctaaggaagtactgtatagaagcaaagctgacc

SEQ ID NO: 107892 - DNA, 80 bp, synthetic construct
  source 1..80: mol_type = other DNA
ttcttcttctaaaagacgaataatttcagccaccgtgtggcgcacttcaagcgcgaaagcctccggggcttcttcttcct

SEQ ID NO: 107893 - DNA, 80 bp, synthetic construct
  source 1..80: mol_type = other DNA
ccatcaagggagggcgacatctaatcttctgccactcgaagaaaaagtgcgatgaactcgcgacagccctccgaggaatg

SEQ ID NO: 107894 - DNA, 80 bp, synthetic construct
  source 1..80: mol_type = other DNA
ataaagtgggagtacgttgtgctcctcttcttgctgctagcagatgctcgcatttgtgcctgcttgtggatgatgcttct

SEQ ID NO: 107895 - DNA, 80 bp, synthetic construct
  source 1..80: mol_type = other DNA
caggtgagctcgggctgcttggggtcaaaaaccagttttcccccgttctttttgatgcgcttcttacctcgcgtctccat

SEQ ID NO: 107896 - DNA, 80 bp, synthetic construct
  source 1..80: mol_type = other DNA
ttcgccccggccctacccatttgggcgcggccggattacaaccccccgttgctggagacgtggaaaaaaccggactacga

SEQ ID NO: 107897 - DNA, 80 bp, synthetic construct
  source 1..80: mol_type = other DNA
gagctttcacggaagctatgaccaggtactcggctcctcctggagacgaaccacggccggagtacgatcttgagctgatc

SEQ ID NO: 107898 - DNA, 80 bp, synthetic construct
  source 1..80: mol_type = other DNA
taatatgctgaaacgcgcgagaaaccgcgtgtcaactggttcacagttggcgaagagattctcaaaaggattgctttcag

SEQ ID NO: 107899 - DNA, 80 bp, synthetic construct
  source 1..80: mol_type = other DNA
ggcccagtcatgtgcccttccgggcacgtggtgggtgttttcagggctgccgtgtgcacgcggggtgtcgcgaaggcgct

SEQ ID NO: 107900 - DNA, 80 bp, synthetic construct
  source 1..80: mol_type = other DNA
caccatcatcttagttatgttctcaggggtcgatgcccatagggccattggcagccacgtgggacatcaaaccggtttgt

SEQ ID NO: 107901 - DNA, 80 bp, synthetic construct
  source 1..80: mol_type = other DNA
atccaatgctaccgggaacatagtgtcatcagtgaacatgatttcaaggatgttgattaacagattcacaatgaaacaca

SEQ ID NO: 107902 - DNA, 80 bp, synthetic construct
  source 1..80: mol_type = other DNA
cgccaccggacacagcgccaggggcaggttgccgttgaccacgcgccaggtggcctggatcgcccccggaccggccgtgg

SEQ ID NO: 107903 - DNA, 80 bp, synthetic construct
  source 1..80: mol_type = other DNA
aacaggccctttaaacatttgcgtatgcaccggcccagccagtcggacaccggaacccaccagaggcggaagccgccttc

SEQ ID NO: 107904 - DNA, 80 bp, synthetic construct
  source 1..80: mol_type = other DNA
cttgagcaaaccgtgctgcctgtagctccatcgtggggatgtagctccatcgtggggatgtagctccatcgtgtggatgt

SEQ ID NO: 107905 - DNA, 80 bp, synthetic construct
  source 1..80: mol_type = other DNA
ggaatggcgaggggacggcgtgatgcacaccacgtgtccctgcggcgcagagttagctggccacatcaagaacggctcga

SEQ ID NO: 107906 - DNA, 80 bp, synthetic construct
  source 1..80: mol_type = other DNA
catggtgtgttttttcaaaattgcagcggtgtttgcgtggattcctggggtagggtgtctgccagaggttgtacgtttgt

SEQ ID NO: 107907 - DNA, 80 bp, synthetic construct
  source 1..80: mol_type = other DNA
agtcgacccaaccttccgccggccgtcattggcacaggctggacagcaaaagggcagatcacagtgctggatatgcaccc

SEQ ID NO: 107908 - DNA, 80 bp, synthetic construct
  source 1..80: mol_type = other DNA
ggacaaaactcatgtatccagctgggaagaagtcccatacctaggaaaaagggaagatcaatggtgtggatccctgatag

SEQ ID NO: 107909 - DNA, 80 bp, synthetic construct
  source 1..80: mol_type = other DNA
gtcagagctattgaagacggggttaactttgcaacagggaatcttcctggttgctctttctctatcttccttctagctct

SEQ ID NO: 107910 - DNA, 80 bp, synthetic construct
  source 1..80: mol_type = other DNA
tcagcatcatccatggtgaacggagtggttaggctgctaacaaaaccttgggacgtcattcccatggtgacacagatggc

SEQ ID NO: 107911 - DNA, 80 bp, synthetic construct
  source 1..80: mol_type = other DNA
gcgaaggcatcgtgtgggccgcggtcatgtttcgtccggacgtggtgtttgacataaccaaatggctcctagcaattcta

SEQ ID NO: 107912 - DNA, 80 bp, synthetic construct
  source 1..80: mol_type = other DNA
atgagaatcactgggccaaagacctgtagcaacacctggcacgggaccttccccatcaatgcttacaccactggccccgg

SEQ ID NO: 107913 - DNA, 80 bp, synthetic construct
  source 1..80: mol_type = other DNA
ggtacattccgctcatcggcgcccctgtcgggggcgtcgcaagagccctagctcatggcgttagggctctcgaggacgga

SEQ ID NO: 107914 - DNA, 80 bp, synthetic construct
  source 1..80: mol_type = other DNA
tctatggaaatggggtattgattggacagggcgaatatgttagtggcatcatccaaggggaaaggacagaagaaccaatt

SEQ ID NO: 107915 - DNA, 80 bp, synthetic construct
  source 1..80: mol_type = other DNA
ttcacaggattgactcacatagatgcccacttcttgtcccagacgaagcaggggggcgagaactttgcctacctcgtggc

SEQ ID NO: 107916 - DNA, 80 bp, synthetic construct
  source 1..80: mol_type = other DNA
gtgtccgtggccactgataataccgggagccggtattactacctcactcgtgatccagctactccactgtcgcgggcggc

SEQ ID NO: 107917 - DNA, 80 bp, synthetic construct
  source 1..80: mol_type = other DNA
gacagatgcatcccgagcagtgaccgacatacttagttcccttaccatcactagtctcttgcgtaaactccatcactgga

SEQ ID NO: 107918 - DNA, 80 bp, synthetic construct
  source 1..80: mol_type = other DNA
cagatgtggaagtgcttgatccgtctcaagcccacccttcatgggccaacacctctgctatacagactgggcgctgttca

SEQ ID NO: 107919 - DNA, 80 bp, synthetic construct
  source 1..80: mol_type = other DNA
aggcttccccttcgtcgatgttggagtgtcagctctcttgctagcagccggatgctggggacaagtcaccctcacagtga

SEQ ID NO: 107920 - DNA, 80 bp, synthetic construct
  source 1..80: mol_type = other DNA
ggcccctctcgcccacggccaccacgtgtactgccagcgagtcaatggcgtgatggtgctttccgacaagacgcccgggt

SEQ ID NO: 107921 - DNA, 80 bp, synthetic construct
  source 1..80: mol_type = other DNA
gtcagaccacgctacggcgtgccactctgcggagagtgcagtctgcgatagtgccccaggaggactgggttaacaaaggc

SEQ ID NO: 107922 - DNA, 80 bp, synthetic construct
  source 1..80: mol_type = other DNA
gcccacttggtcacgctgtgggccttttccgggctgccgtgtgtacacggggtgtggcgaaagcacttgaattcgttcct

SEQ ID NO: 107923 - DNA, 80 bp, synthetic construct
  source 1..80: mol_type = other DNA
atgccatctgcaggagcgaggctgccttgcaagtgtgggtcccttctctggttgttcgaggcagtcgggacagtgtgatc

SEQ ID NO: 107924 - DNA, 80 bp, synthetic construct
  source 1..80: mol_type = other DNA
gaagacgaggtgtttaggaaaagaaacttaacaataatggacctacatccaggatcggggaaaacaagaagatatcttcc

SEQ ID NO: 107925 - DNA, 80 bp, synthetic construct
  source 1..80: mol_type = other DNA
taacaacataggtacagcttatgaagaagctgttggttttatgccaaacacaacagcatacccaaaactgcctaatcctc

SEQ ID NO: 107926 - DNA, 80 bp, synthetic construct
  source 1..80: mol_type = other DNA
ggcttgtccacactacctggcaatccagccgtagcagccctgatgtccttttcggcatcactgaccagtccattaacaac

SEQ ID NO: 107927 - DNA, 80 bp, synthetic construct
  source 1..80: mol_type = other DNA
cactaagacttgcggcgctccaccttgccgcatacgaccagacttcaactccaccaaggacttgctgtgccccactgatt

SEQ ID NO: 107928 - DNA, 80 bp, synthetic construct
  source 1..80: mol_type = other DNA
ggggagccaggcgaccctgatctcagctcagggtcatggtcaacagtcagcgatgagggtgatagtgtagtgtgctgctc

SEQ ID NO: 107929 - DNA, 80 bp, synthetic construct
  source 1..80: mol_type = other DNA
tatgaggtaattctgggcggatgcaagtgaaattaggtcattttggcgcgaaaactggatgaggaagtgaaaagcgaaaa

SEQ ID NO: 107930 - DNA, 80 bp, synthetic construct
  source 1..80: mol_type = other DNA
agtgggagcagaaaaaaactactggtggaggcaatgacatggaaacgcatacttatggcgttgcagccatgggtggagaa

SEQ ID NO: 107931 - DNA, 80 bp, synthetic construct
  source 1..80: mol_type = other DNA
aacatatcgcggtgctggataccagtcacacctaacgtcgccgtgagggagcgcggggcgcttaccaaaggtctgcggac

SEQ ID NO: 107932 - DNA, 80 bp, synthetic construct
  source 1..80: mol_type = other DNA
aacaaaaaacagtcagtgtccatcagcagcccaaggattttcacgttgtccatattcttcaaacagcacaggtcggtggt

SEQ ID NO: 107933 - DNA, 80 bp, synthetic construct
  source 1..80: mol_type = other DNA
ataggggcttggacgggcacctacatctatgaccacttaacccccatttccacttgggctagcgacggactacgcgatct

SEQ ID NO: 107934 - DNA, 80 bp, synthetic construct
  source 1..80: mol_type = other DNA
gatggtactgctcattccagagccagacagacaacgcactccgcaggacaaccagctggcatatgtggtgataggtttgt

SEQ ID NO: 107935 - DNA, 80 bp, synthetic construct
  source 1..80: mol_type = other DNA
aatctgggaacatttttgccatggaaatcaatttggcggccaatctctggcgcagcttcttatactccaatgtagctttg

SEQ ID NO: 107936 - DNA, 80 bp, synthetic construct
  source 1..80: mol_type = other DNA
ttgtgagcattctggccagttctctccttagaaatgatgtgcccatggctggaccattagtggccgggggcttgctgata

SEQ ID NO: 107937 - DNA, 80 bp, synthetic construct
  source 1..80: mol_type = other DNA
tttcacattgttcaagatgaggatgttcgtgggcgggtttgaacaccggatcaccgccgcttgcaattggaccaggtgcg

SEQ ID NO: 107938 - DNA, 80 bp, synthetic construct
  source 1..80: mol_type = other DNA
cgatacttagtccttgttggaacagcttttgcggaaatgaacactggaggtgatgtgatccacctggcacttgttgctgt

SEQ ID NO: 107939 - DNA, 80 bp, synthetic construct
  source 1..80: mol_type = other DNA
ggtagatggacttgaactcaggaagcttggggaagtttcttgggaagaagaagctgagatcagtggaagttctgcccgtt

SEQ ID NO: 107940 - DNA, 80 bp, synthetic construct
  source 1..80: mol_type = other DNA
ggggcgggggtgggcacgggcgtaagtgcgggtgcatgccttgggtcttctcttctctctcctgcttcctcgcacccgtc

SEQ ID NO: 107941 - DNA, 80 bp, synthetic construct
  source 1..80: mol_type = other DNA
agttaggccattctagagcccccgggtataactcgggaggagcggggaagacaattggcaatcttccccgggatttttcc

SEQ ID NO: 107942 - DNA, 80 bp, synthetic construct
  source 1..80: mol_type = other DNA
cgcgtcgccaaacgggccgtacctgggcacaacccgggtacccctggcccctgtatgggaacgagggctgtggttgggca

SEQ ID NO: 107943 - DNA, 80 bp, synthetic construct
  source 1..80: mol_type = other DNA
actgatgttgacggggttagactacaccgctacgcccctccatgcaagcccttgttgagggaagaggtgacctttagcgt

SEQ ID NO: 107944 - DNA, 80 bp, synthetic construct
  source 1..80: mol_type = other DNA
cccagctcccttgtgagcctgaaccggacgtggttgtggtaacatccatgctgacagatccatcccacgtgactgcagaa

SEQ ID NO: 107945 - DNA, 80 bp, synthetic construct
  source 1..80: mol_type = other DNA
aatcatctgacattgcttcgctgaattaccaaaacgatcacagcaactttttaactactgtggtgcagaataacgactac

SEQ ID NO: 107946 - DNA, 80 bp, synthetic construct
  source 1..80: mol_type = other DNA
caaaactcatgtcagcggccataaaagacaacagagccgtccatgccgacatgggttactggatagaaagtgcactcaat

SEQ ID NO: 107947 - DNA, 80 bp, synthetic construct
  source 1..80: mol_type = other DNA
tagtggcatgggataaaaaaaatgaccagcgcaccctttggacaactccagacccatcaccaaattgcaaagtggaaact

SEQ ID NO: 107948 - DNA, 80 bp, synthetic construct
  source 1..80: mol_type = other DNA
ttgttccagtccaactacagcgacccaccctaacagagatgaccaacacaaccaacgcggccgccgctaccggacttaca

SEQ ID NO: 107949 - DNA, 80 bp, synthetic construct
  source 1..80: mol_type = other DNA
gatgtcgggtccaaactcccgacaccaccagctggcatggtataaatcaccggtgcgccccccaaaccatgtccggcagg

SEQ ID NO: 107950 - DNA, 80 bp, synthetic construct
  source 1..80: mol_type = other DNA
cagtcttgcggttataggcgttgtcgcgcaagcggagtgctcaccactagcatggggaacactatcacgtgctacgtgaa

SEQ ID NO: 107951 - DNA, 80 bp, synthetic construct
  source 1..80: mol_type = other DNA
ctctttgaagaggtgttgagaggaaaatttgggaagaaacacatgattgcaggggttttctttacgtttgtgctccttct

SEQ ID NO: 107952 - DNA, 80 bp, synthetic construct
  source 1..80: mol_type = other DNA
gggcctcccacatccatttggtcatccatcgtatccgaacgctgattggacaggagaaatacactgactacctaacagtc

SEQ ID NO: 107953 - DNA, 80 bp, synthetic construct
  source 1..80: mol_type = other DNA
aagaagcctgcaggctgacacccccacactcggccagatccaagtttggctatggggcaaaggacgtccggaacctatcc

SEQ ID NO: 107954 - DNA, 80 bp, synthetic construct
  source 1..80: mol_type = other DNA
agctcggctcggcagggaagtcctgctagggcccgcggatgactacaggtccatgggatggcaactcctggctcccatca

SEQ ID NO: 107955 - DNA, 80 bp, synthetic construct
  source 1..80: mol_type = other DNA
tcaactgcaatgacagcttgcagacggggttcattgctgccctgttttacaccagtaggttcaacagctccggctgcccc

SEQ ID NO: 107956 - DNA, 80 bp, synthetic construct
  source 1..80: mol_type = other DNA
gatcccaacttccctgtgaaccagaaccggacgtggccgtgttaacatccatgcttacagacccatcccacatcaccgcg

SEQ ID NO: 107957 - DNA, 80 bp, synthetic construct
  source 1..80: mol_type = other DNA
ggtggacagatacaagtatttgcctgagacccccaagtctctggccaaaatagttcacaaagcacataaggaaggcattt

SEQ ID NO: 107958 - DNA, 80 bp, synthetic construct
  source 1..80: mol_type = other DNA
ccggatggcatggtaggctggtaatggatgggcgtggcccgggggggggaaggaaaaagaataaaggaggtagtgtcgga

SEQ ID NO: 107959 - DNA, 80 bp, synthetic construct
  source 1..80: mol_type = other DNA
caggaggtgcatatgacatcataatatgtgacgaatgtcactcggtggacgccacctcgatcctaggcatagggactgtc

SEQ ID NO: 107960 - DNA, 80 bp, synthetic construct
  source 1..80: mol_type = other DNA
acatgtcgacatgatcgtaatggcagctacggtctgctcggccttgtacgtggaggacgcgtgcggggccgtgatgatcg

SEQ ID NO: 107961 - DNA, 80 bp, synthetic construct
  source 1..80: mol_type = other DNA
aggttcgcccctgtgaccttgtatacccttttgcggatgtggccccttctcctgctggtgctagctttgcctcgcagggc

SEQ ID NO: 107962 - DNA, 80 bp, synthetic construct
  source 1..80: mol_type = other DNA
tcgctgacctcaataaacgtccaagccagtgcgttgttcaccttggccagaggcttcccttttgtggacgttggtgtgtc

SEQ ID NO: 107963 - DNA, 80 bp, synthetic construct
  source 1..80: mol_type = other DNA
cacaccacccagcgaggccgagcgcctgtgtcatctgcaggagatccttgcccagatgtacggaaaccaggactacccca

SEQ ID NO: 107964 - DNA, 80 bp, synthetic construct
  source 1..80: mol_type = other DNA
catgtcatactcctggaccggggcgttgataactccctgtagtccagaagaggaaaagttaccaataaaccctctgagta

SEQ ID NO: 107965 - DNA, 80 bp, synthetic construct
  source 1..80: mol_type = other DNA
ctcgcggcggccctccggggccagggcttgaacgcagtggcctactataggtggcttgacgtttccgtaataccagctca

SEQ ID NO: 107966 - DNA, 80 bp, synthetic construct
  source 1..80: mol_type = other DNA
ggatgacccccatggggaacatgctgttcgaccagggcaccctagtgggcgccctggacttccgcagcctgcggtctcgg

SEQ ID NO: 107967 - DNA, 80 bp, synthetic construct
  source 1..80: mol_type = other DNA
cacgaacgacgtggaagtgctggacgaatgtctggccgagtactgcacctcgctgcgaaccagcccgggtgtgctaatat

SEQ ID NO: 107968 - DNA, 80 bp, synthetic construct
  source 1..80: mol_type = other DNA
ggccggcggcgcgggacctgcgccgcacggtgctggcctcgggccgcgtgttcggcccggtggtcttcgcgcgcgtggag

SEQ ID NO: 107969 - DNA, 80 bp, synthetic construct
  source 1..80: mol_type = other DNA
agccgctttcagagtcagacctacctttgcagtggggttgcttttaagaaaacttacttcaaaggaattgttgatggcaa

SEQ ID NO: 107970 - DNA, 80 bp, synthetic construct
  source 1..80: mol_type = other DNA
catgggagggcgatcgcaatctagctcccgagggtgtgaatgatgatggcatcgaatgatgtcagcgctccgactgacgg

SEQ ID NO: 107971 - DNA, 80 bp, synthetic construct
  source 1..80: mol_type = other DNA
ttccaggaggtgattaggcgctgcggggaacgtggtccacgacacggtccgctcgggcaaaaaccgatcgggcaggcgcc

SEQ ID NO: 107972 - DNA, 80 bp, synthetic construct
  source 1..80: mol_type = other DNA
acgcttcccaaacagtgaccaggatactcagctccttgactatcaccagcttgctccgcaggatacacgagtggatcagc

SEQ ID NO: 107973 - DNA, 80 bp, synthetic construct
  source 1..80: mol_type = other DNA
caccgcggcccaaaagagttttgtatcaaggtgctgtgcccatacatgcccaaagtgatcgagaagatggaggttctgca

SEQ ID NO: 107974 - DNA, 80 bp, synthetic construct
  source 1..80: mol_type = other DNA
tccggtttggggtccgggagggcgtcgccgtttcgggaggcaggccccagcgtaacctgggggggcggcgtgtgtgggtg

SEQ ID NO: 107975 - DNA, 80 bp, synthetic construct
  source 1..80: mol_type = other DNA
atgtaatataggaacatgggagaatgtaaatgcaacgtttttacacgacaacgttaaaataacgacaacggtcagagacg

SEQ ID NO: 107976 - DNA, 80 bp, synthetic construct
  source 1..80: mol_type = other DNA
ggtttgcgccacggatgcccttatgacaggcttcactggtgacttcgactctgttatagactgcaacacgtctgttatac

SEQ ID NO: 107977 - DNA, 80 bp, synthetic construct
  source 1..80: mol_type = other DNA
ctgcggcccgaaggggcctgtctgccagatgtataccaatgttgaccaggacctagtgggttggccatcccctcccgtgg

SEQ ID NO: 107978 - DNA, 80 bp, synthetic construct
  source 1..80: mol_type = other DNA
tcacagcttgcgttctgattagcatagtcacattagtatcagctgattacaaacaagttcaagttagcagaggaggaaat

SEQ ID NO: 107979 - DNA, 80 bp, synthetic construct
  source 1..80: mol_type = other DNA
acaactggtgggagaacgagaccgatgtgtttttgctctccagcgcacgccctcctggcgggccgtggttcgggtgcacg

SEQ ID NO: 107980 - DNA, 80 bp, synthetic construct
  source 1..80: mol_type = other DNA
gggaacctgggcaggggacggggtgtgccacaccacctgctcctgcggtgctaccatagccggccatgtgaagagcgtgt

SEQ ID NO: 107981 - DNA, 80 bp, synthetic construct
  source 1..80: mol_type = other DNA
gaaaggcaccgggagaaggctgcggcctcgttccaggagaacccagtgtccccaacagacccggggacgtgggatccccg

SEQ ID NO: 107982 - DNA, 80 bp, synthetic construct
  source 1..80: mol_type = other DNA
tgatagaactggaacctccattcggtgactcatacattgtggtaggtagaggagaacaccagataaaccaccattggcac

SEQ ID NO: 107983 - DNA, 80 bp, synthetic construct
  source 1..80: mol_type = other DNA
cgaccgttgacgccgtgcgtcgtgacgtcactaacggtcgttgcatcgtccaatcagcgacggccccgccctaaattcaa

SEQ ID NO: 107984 - DNA, 80 bp, synthetic construct
  source 1..80: mol_type = other DNA
cccgcactaccgggtggagtgctgcccataccacgtctacactcgccaacatgttcagggtgggtcccagccagaatatc

SEQ ID NO: 107985 - DNA, 80 bp, synthetic construct
  source 1..80: mol_type = other DNA
tttcaatggcgaacatttttagagggagctatttagcaggagctgggcttgccttttctattatgaaatcagttggaaca

SEQ ID NO: 107986 - DNA, 80 bp, synthetic construct
  source 1..80: mol_type = other DNA
gcaaagtctctggactttgtacctgtggaaaacatggaaacaactatgcggtctcctgtgttcaccgacaactcttctcc

SEQ ID NO: 107987 - DNA, 80 bp, synthetic construct
  source 1..80: mol_type = other DNA
aaaaagatagcccagtcaacatagaagcggaacctccattcggagacagctacatcatcataggagtagagccgggacaa

SEQ ID NO: 107988 - DNA, 80 bp, synthetic construct
  source 1..80: mol_type = other DNA
gtggcccagttcgaacaccagctgcatgtagcggtcgtagtgggaggtcagcaggtccagcacgtcatcggggccgaagg

SEQ ID NO: 107989 - DNA, 80 bp, synthetic construct
  source 1..80: mol_type = other DNA
tctggattgccatgtacttcacaggtgaatagcatcaaccactggatcttaactctatgtgcactgtctgaagtcactgg

SEQ ID NO: 107990 - DNA, 80 bp, synthetic construct
  source 1..80: mol_type = other DNA
aaggtgaccttcgaccgcctgcaggtggtggacagtacctacaatgaagtgcttaaggagataaaggcacgagcatccag

SEQ ID NO: 107991 - DNA, 80 bp, synthetic construct
  source 1..80: mol_type = other DNA
gtcatgctggcctcgggggccgagtaaccgcccccccccccgcgccaccctcactgcccgtcgcgcgtgtttgatgttaa

SEQ ID NO: 107992 - DNA, 80 bp, synthetic construct
  source 1..80: mol_type = other DNA
gggtgggcccgggacccccctgacgtcctcggcggcctccgcctcttcctcctctgcctcttcctcctcggcctcgaccc

SEQ ID NO: 107993 - DNA, 80 bp, synthetic construct
  source 1..80: mol_type = other DNA
gtcccccgccgctgtggagccactgttacctcttgcagctggccaactacatcgcctaccactcggacgttatcgaggac

SEQ ID NO: 107994 - DNA, 80 bp, synthetic construct
  source 1..80: mol_type = other DNA
actaggggtggtctggtgctttattgtccgcacgtcggttagcaggatggttctgggcactgtggtgctggtggtggccc

SEQ ID NO: 107995 - DNA, 80 bp, synthetic construct
  source 1..80: mol_type = other DNA
caccaattcctccgccgaggcggaagaggctagtgcacttggatgagtccacggtctcgcacgccttggcgcagctcgcc

SEQ ID NO: 107996 - DNA, 80 bp, synthetic construct
  source 1..80: mol_type = other DNA
gtgaaggagaacaacaagtctcggtgttggataccggtcacacctaacatcgctgtaaggcagcgcggtgctctcaccag

SEQ ID NO: 107997 - DNA, 80 bp, synthetic construct
  source 1..80: mol_type = other DNA
caacagttgtgaagcgttccaattccgggaataacggcctgatgacgtcgggttacatctatagcaaaattcagaaacgg

SEQ ID NO: 107998 - DNA, 80 bp, synthetic construct
  source 1..80: mol_type = other DNA
cccggagcgggaatccttgatcgtccgcacggtaagagcccagcatgtagaaatggttaacggccttgtagggacagcag

SEQ ID NO: 107999 - DNA, 80 bp, synthetic construct
  source 1..80: mol_type = other DNA
aacgacgcggccgtacgggcaggggtaaaccggaggtgtataggtacgtagcccaaggggagcgaccttcggtgatgttt

SEQ ID NO: 108000 - DNA, 80 bp, synthetic construct
  source 1..80: mol_type = other DNA
tcttactcgtactcgtggacaggggccctcatcacagcatgcgccgctgaggaggagaagctgcccatcagccctctgag

SEQ ID NO: 108001 - DNA, 80 bp, synthetic construct
  source 1..80: mol_type = other DNA
tcggattttggatcactttacagtacacgaagagaggaggagtgttgtgggacacaccttctccaaaagagtacaagaag

SEQ ID NO: 108002 - DNA, 80 bp, synthetic construct
  source 1..80: mol_type = other DNA
agtaaggccatacgccacatcaactccgtgtggcaagaccttctggaggacagtacaacacctatagatactactatcat

SEQ ID NO: 108003 - DNA, 80 bp, synthetic construct
  source 1..80: mol_type = other DNA
tcggccccctttacctactgcagagttcactcttgcgcgtcccttactatgtgagggctcatgcgctaatcaagatctgt

SEQ ID NO: 108004 - DNA, 80 bp, synthetic construct
  source 1..80: mol_type = other DNA
gctgtggtcaccttcaagatcatgagcggcgagacaccatcaacagaagacttggtgaacttgctcccagcaatactatc

SEQ ID NO: 108005 - DNA, 80 bp, synthetic construct
  source 1..80: mol_type = other DNA
taaccacctcgccccgctatcggactgggccgccgacggccttggcgatttagcggtggcgcttgagccagtcatattca

SEQ ID NO: 108006 - DNA, 80 bp, synthetic construct
  source 1..80: mol_type = other DNA
gccggcgctgctgtgggcagcattgggttgggcagagtcattgttgacatcctggcaggttacggagcaggtgtgtcagg

SEQ ID NO: 108007 - DNA, 80 bp, synthetic construct
  source 1..80: mol_type = other DNA
gaaactccacgcacgaaatgtactggatatctaatggtacaggtaacattgtctcttcagtcaacatgatatccagattg

SEQ ID NO: 108008 - DNA, 80 bp, synthetic construct
  source 1..80: mol_type = other DNA
acaccaggtctccccgtttgtcaagaccacctcgaattctgggagagtatctttactggccttgtccacatagatggcca

SEQ ID NO: 108009 - DNA, 80 bp, synthetic construct
  source 1..80: mol_type = other DNA
gtgggagagtgacgcggagatcacaggatctagtgatagggtggacgtcaagcttgatgatgatggaaacttccagctga

SEQ ID NO: 108010 - DNA, 80 bp, synthetic construct
  source 1..80: mol_type = other DNA
gagacccggacttgactttggaggcttctgggcaggaccccctcatcgtggatgatatgtctgacaacgcatcctattcg

SEQ ID NO: 108011 - DNA, 80 bp, synthetic construct
  source 1..80: mol_type = other DNA
gagcaaaaatgttttctggatcagaaacatcatagttgtggtctagagttaggtcatcgtaggacaacttaacaaattta

SEQ ID NO: 108012 - DNA, 80 bp, synthetic construct
  source 1..80: mol_type = other DNA
agaagatcataacctggggagcagacaccgccgcgtgcggtgacatcttggctggccttccggtgtcagcacggcgtggc

SEQ ID NO: 108013 - DNA, 80 bp, synthetic construct
  source 1..80: mol_type = other DNA
catgtccgtgccgctttatcccacggcctcgccagtttcggtcgaagcctactactcggaaagcgaagacgaggcggcca

SEQ ID NO: 108014 - DNA, 80 bp, synthetic construct
  source 1..80: mol_type = other DNA
ctctcccccaggcctgtctcctacttgaagggctcttcgggtggcccactgctctgcccttcgtggcacgctgtgggcgt

SEQ ID NO: 108015 - DNA, 80 bp, synthetic construct
  source 1..80: mol_type = other DNA
ctacgtgtagcgcgtatgcctgcgcggccttccggagcgaggtgtgggtgagcgcaaaggtgtccctgaccataactttg

SEQ ID NO: 108016 - DNA, 80 bp, synthetic construct
  source 1..80: mol_type = other DNA
cagagcagcgcctgctagaaagacgcagggcagcggccgagcaacagcgcatgaatcaagagctccaagacatgattaac

SEQ ID NO: 108017 - DNA, 80 bp, synthetic construct
  source 1..80: mol_type = other DNA
tttgtctagaatatacggcgatagccatttttttaccgttccagacgagggttttatgtgcacacaaattcccgctagag

SEQ ID NO: 108018 - DNA, 80 bp, synthetic construct
  source 1..80: mol_type = other DNA
gagtgtgagaggtcggtggtgtgtccggcggtggcgcgagccccccctcgctcctctctctctggggaagtggaaaaagt

SEQ ID NO: 108019 - DNA, 80 bp, synthetic construct
  source 1..80: mol_type = other DNA
gtttaacttaaaaacctgccaatatcaccatgagctgtcgttaacaacatacggaggttacgtatcgagtgaaattcagt

SEQ ID NO: 108020 - DNA, 80 bp, synthetic construct
  source 1..80: mol_type = other DNA
gccagagacgaggccgtacagggaggggcaagccgggcacttacagatatgtctcgcaaggagagcgtccatctggtatg

SEQ ID NO: 108021 - DNA, 80 bp, synthetic construct
  source 1..80: mol_type = other DNA
tcatcgccacgcgcctgagtgcaagcccttgctaacggaagaagtcaccttttccgtgggcctcaactcgtttgtggtag

SEQ ID NO: 108022 - DNA, 80 bp, synthetic construct
  source 1..80: mol_type = other DNA
aagtggtttccacagccactcaaaccttcctggccaccaccatcaatggcgtgctgtggacggtctactatggtgccggt

SEQ ID NO: 108023 - DNA, 80 bp, synthetic construct
  source 1..80: mol_type = other DNA
atctggtggaaccagtatgctatctccaggtgtgaggcatcattacaggtatgggttcctcccctgctagctagaggagc

SEQ ID NO: 108024 - DNA, 80 bp, synthetic construct
  source 1..80: mol_type = other DNA
aagactctggccggcccgaaaggaccggtctgtcaaatgtacaccaacgtggatcaggacttggtaggctggccagcacc

SEQ ID NO: 108025 - DNA, 80 bp, synthetic construct
  source 1..80: mol_type = other DNA
cgactcagacgttgtcgtcctgaacagcaccagaccgcccggcggggcatggtttggttgcacgtggatgaacggcactg

SEQ ID NO: 108026 - DNA, 80 bp, synthetic construct
  source 1..80: mol_type = other DNA
ataagtagtaatacacgtgatatcactaaaacgttgctggcgcaacagttcggggagagtacgagaccccaaatcgttgt

SEQ ID NO: 108027 - DNA, 80 bp, synthetic construct
  source 1..80: mol_type = other DNA
gtgagctcccagcctcccccccgatatgaggagccagaacggcgtcggtcacggcataaggcatgcccattgttatctgg

SEQ ID NO: 108028 - DNA, 80 bp, synthetic construct
  source 1..80: mol_type = other DNA
gctaccgtgtgtgcacgggccaaggccccccccccatcatgggacatcatgtggaagtgtcttatacggctgaagcctat

SEQ ID NO: 108029 - DNA, 80 bp, synthetic construct
  source 1..80: mol_type = other DNA
gctttcaacattgcccggcaatcctgctattgcttctctcatgtcattcaccgcggcagtcacaagtcctctgaccaccc

SEQ ID NO: 108030 - DNA, 80 bp, synthetic construct
  source 1..80: mol_type = other DNA
aacgttttgacatcccctgttgctcattttcttatgtaacagaacaataaaatattgttatttttgtattttcaacttta

SEQ ID NO: 108031 - DNA, 80 bp, synthetic construct
  source 1..80: mol_type = other DNA
gtcacatattcagttagtccactccaactcccagccatcattcaaagactccatggtatggccgcgttttcactccatgg

SEQ ID NO: 108032 - DNA, 80 bp, synthetic construct
  source 1..80: mol_type = other DNA
ctgctactattcgccggcgtcgacgcgcacaccttcgtcactgggggatcctccgcccgcagcacggctaatcttgttag

SEQ ID NO: 108033 - DNA, 80 bp, synthetic construct
  source 1..80: mol_type = other DNA
tggagacatcgggccagggcggtcagagcaaagctcattgcccagggagggaaagccgctatttgcggtaagtacctctt

SEQ ID NO: 108034 - DNA, 80 bp, synthetic construct
  source 1..80: mol_type = other DNA
ctgtgctagggccttagctcctccaccaagttgggatactatgtggaagtgtttaattcgccttaagcctacattgcatg

SEQ ID NO: 108035 - DNA, 80 bp, synthetic construct
  source 1..80: mol_type = other DNA
cactggttctccagagggaactccctgagtggagtggaaggagaggggctgcacaggctaggctacattttaagagacgt

SEQ ID NO: 108036 - DNA, 80 bp, synthetic construct
  source 1..80: mol_type = other DNA
gcttcagaccagaagcttttatggcctcttcaaccctggcccaagccagaaaatccagctcattaacaccaacggcagct

SEQ ID NO: 108037 - DNA, 80 bp, synthetic construct
  source 1..80: mol_type = other DNA
cgcgtcacagcgccccttgaaccggcgacacagcaggtttgtgacctgggagaactgcgcgggccactggccgcaggaac

SEQ ID NO: 108038 - DNA, 80 bp, synthetic construct
  source 1..80: mol_type = other DNA
gcccccgtcccccccgaccccccaacgatcccacgggccgccggccgatgaggtcgcaccggccagggtcgcgcggcccg

SEQ ID NO: 108039 - DNA, 80 bp, synthetic construct
  source 1..80: mol_type = other DNA
tcattctactgtggctgggaggaatggactatgggaccatggcaggagtggcccttattttctatttgctccttacggtt

SEQ ID NO: 108040 - DNA, 80 bp, synthetic construct
  source 1..80: mol_type = other DNA
cgacgtaaagaacttaaagcaggggctgagcaccggcgaggccccgttgaggtggtaggccccgttatagagcaggtccc

SEQ ID NO: 108041 - DNA, 80 bp, synthetic construct
  source 1..80: mol_type = other DNA
cggcgctccactggcaaggcctggggaaaaccaggtcgcccctggcccctatatgggaatgagggactcggctgtgcagg

SEQ ID NO: 108042 - DNA, 80 bp, synthetic construct
  source 1..80: mol_type = other DNA
gccgcatgacgtagcgaaaggcgaagaaggccgccgccaggccggccaggaccaacagacccacggccagcgccccaaag

SEQ ID NO: 108043 - DNA, 80 bp, synthetic construct
  source 1..80: mol_type = other DNA
gagactgcctttttttggtgcttgcaagaatctgaatgtttgaaatatttcacaagttcttattttctccttgaaactag

SEQ ID NO: 108044 - DNA, 80 bp, synthetic construct
  source 1..80: mol_type = other DNA
gcgtgtggcgtgtggacggtgtgatgtcgacacgctgtccttgcggggcatcaataaccggccatgtgaagaatgggtcc

SEQ ID NO: 108045 - DNA, 80 bp, synthetic construct
  source 1..80: mol_type = other DNA
gcgcgccgacagtagcgacagcagctccaggccttcggccggacaggcgcggccatacacgtaccccatcggccccggag

SEQ ID NO: 108046 - DNA, 80 bp, synthetic construct
  source 1..80: mol_type = other DNA
cgatgaagtagtggccgcctttcgggaggcccgtttgagacatgaactggttgaagatgctgtatatgaaaacccgctaa

SEQ ID NO: 108047 - DNA, 80 bp, synthetic construct
  source 1..80: mol_type = other DNA
cgaagtacgtcgtcaagtgggagtgggtcgttcttctgttcctgcttttggcggacgccagggtttgtgcctgcttatgg

SEQ ID NO: 108048 - DNA, 80 bp, synthetic construct
  source 1..80: mol_type = other DNA
ggtggtgggggtcagagatgagcagcaagcctgccacgccagcagcggcaccggacgagggaaagcagtgcagtggatga

SEQ ID NO: 108049 - DNA, 80 bp, synthetic construct
  source 1..80: mol_type = other DNA
tgcttgggaaacagcccgacatactccagtcaattcatggcttggcaacattatcatgtacgcccctacgatatgggtgc

SEQ ID NO: 108050 - DNA, 80 bp, synthetic construct
  source 1..80: mol_type = other DNA
atcttaaccaaatccatctcagtcaatgtgtaaaggaggaagcccgggctattattaaccggatctatacaaccagatac

SEQ ID NO: 108051 - DNA, 80 bp, synthetic construct
  source 1..80: mol_type = other DNA
ctgcagccccaacggctggttcgccggtacaggaacgcccgggaggcggatatcgccggtgtggccgagcgggtgtttga

SEQ ID NO: 108052 - DNA, 80 bp, synthetic construct
  source 1..80: mol_type = other DNA
gtcagcaaggatttgaatgcgtaaatctcgcaggtggcagcgatcgcctccgctgtgctggtgaaagatcacagccagat

SEQ ID NO: 108053 - DNA, 80 bp, synthetic construct
  source 1..80: mol_type = other DNA
gaagacttcatggaagggatggagccaatcctttgtgtggagtgtcccagaatcgccacggcgttttatggttgggattg

SEQ ID NO: 108054 - DNA, 80 bp, synthetic construct
  source 1..80: mol_type = other DNA
gctgtgtctcgtacgcagcggaggggcaggactggcagaggcaggccgggcatctacaggttcgtggctccgggagagcg

SEQ ID NO: 108055 - DNA, 80 bp, synthetic construct
  source 1..80: mol_type = other DNA
ggggtacttccctcgcgagcctggagacatcgagccagagctgtcagagccaaactcattgcccaaggtgggaaagcggc

SEQ ID NO: 108056 - DNA, 80 bp, synthetic construct
  source 1..80: mol_type = other DNA
tctgctccatctctcaaggcaacctgcaccactcaccatgactcccctgatgctgacctaatcgaagccaatctcttgtg

SEQ ID NO: 108057 - DNA, 80 bp, synthetic construct
  source 1..80: mol_type = other DNA
ccctacaggctgtggcattatccgtgtactgtcaattttaccatcttcaaaatacggatgttcatagggggagtcgagca

SEQ ID NO: 108058 - DNA, 80 bp, synthetic construct
  source 1..80: mol_type = other DNA
tccagcaagacgcaggagtgacacccgcgccggtctacttagtcccaggcctctggccacgcttaaggggtcgtcgggag

SEQ ID NO: 108059 - DNA, 80 bp, synthetic construct
  source 1..80: mol_type = other DNA
ggttgtatgccattatttctgtcatggtcttttgcagcaccatatttgctctagccatttacccctaccttgacattggc

SEQ ID NO: 108060 - DNA, 80 bp, synthetic construct
  source 1..80: mol_type = other DNA
gccggcgccgccccccggggcgcgcggagcggcggagcggcgccgggccctcgcggatatatacgcggtgctcccatcgt

SEQ ID NO: 108061 - DNA, 80 bp, synthetic construct
  source 1..80: mol_type = other DNA
ttggatttttactgagagagaatgaaagtactactgatcagacagaggctacctcaagtgccttcagcagcactgcaaat

SEQ ID NO: 108062 - DNA, 80 bp, synthetic construct
  source 1..80: mol_type = other DNA
cctgtttagcgacacggccgtgcggcacttccgccagcgcgccaccgtgtttctagtccccaggcgccacggaaagacct

SEQ ID NO: 108063 - DNA, 80 bp, synthetic construct
  source 1..80: mol_type = other DNA
tgccctaccgactgcttccggaagcatccagatgccacctacgccaaatgcggtgcaggcccttggcttacgccgaggtg

SEQ ID NO: 108064 - DNA, 80 bp, synthetic construct
  source 1..80: mol_type = other DNA
aactcagtaggaagacttttgactctgagtatgttaagactagagccaatgattgggactttgtggtcacaactgacatt

SEQ ID NO: 108065 - DNA, 80 bp, synthetic construct
  source 1..80: mol_type = other DNA
ccagattatgaagtggatgaggacattttccgaaagaaaagattgactataatggatttacatcccggagccggaaagac

SEQ ID NO: 108066 - DNA, 80 bp, synthetic construct
  source 1..80: mol_type = other DNA
acaatctccgatgctggataccgatcacgcccaacgtggccgtcagccagcctggagcgcttacaaggggactgcgaaca

SEQ ID NO: 108067 - DNA, 80 bp, synthetic construct
  source 1..80: mol_type = other DNA
tacaccttgggttccagatataccaacccttacgaccaatagcaacactcaggtatttttaaaatgcacgtttaatgatc

SEQ ID NO: 108068 - DNA, 80 bp, synthetic construct
  source 1..80: mol_type = other DNA
acccgcttcggcctaccaagtgcgcaactccacggggctttaccatgtcaccaatgactgccccaattcgagcattgtgt

SEQ ID NO: 108069 - DNA, 80 bp, synthetic construct
  source 1..80: mol_type = other DNA
tcggaacgaagcttgctaggtctccaaaaccaccgatgaacgatggggaaacgggcagaggtacgacccctccgttcccg

SEQ ID NO: 108070 - DNA, 80 bp, synthetic construct
  source 1..80: mol_type = other DNA
aacgttgaatcatttctccgcgacggcgacgcatggtttcggtgacggcgcgcccgttttctcgggggcgaagttcaaag

SEQ ID NO: 108071 - DNA, 80 bp, synthetic construct
  source 1..80: mol_type = other DNA
taaagttttaatggaaactgatgctttttctcgggtatggtggaacggggtatttgatttaaccatggagctatttaaag

SEQ ID NO: 108072 - DNA, 80 bp, synthetic construct
  source 1..80: mol_type = other DNA
cacgcctaatatcgctgtgagggagcgcggggcgcttaccaagggtttgcggacgcatatcgatttgatcgtggtgtccg

SEQ ID NO: 108073 - DNA, 80 bp, synthetic construct
  source 1..80: mol_type = other DNA
gacactactgagtacaaagactacaaacaagtaacagtgaagtttcaacataacaattcagggttcgtgggctacttggg

SEQ ID NO: 108074 - DNA, 80 bp, synthetic construct
  source 1..80: mol_type = other DNA
gtgaggatggatgctggtatggaatggaaatcagaccattgaaagagaaagaagagaacttggtcaattctttggtcaca

SEQ ID NO: 108075 - DNA, 80 bp, synthetic construct
  source 1..80: mol_type = other DNA
tagtatcgcaggttgaggcggctttaactaacctgatcaacatcaacgccatgtcagctgctgggacccatggtatcgtc

SEQ ID NO: 108076 - DNA, 80 bp, synthetic construct
  source 1..80: mol_type = other DNA
ccagcgcgtgcgccgccaggctctgctctcgctcgaggatcgcggccaccagatgcccgaggcgcgcctccagccgcagg

SEQ ID NO: 108077 - DNA, 80 bp, synthetic construct
  source 1..80: mol_type = other DNA
atcaatcatcaggttacattcctgcaccatccccaggtaattctcatttttccagccttgaattatctctacaaattgtt

SEQ ID NO: 108078 - DNA, 80 bp, synthetic construct
  source 1..80: mol_type = other DNA
tggtctgcggtgacgatttagtcgtgatttctgagagcgacggcgtccaggaggacataagtgccctgcgagccttcacg

SEQ ID NO: 108079 - DNA, 80 bp, synthetic construct
  source 1..80: mol_type = other DNA
cttcaagcaggggtggggccccctgacagatgccaacatcactggtccctccgatgaaagaccgtactgctggcattacg

SEQ ID NO: 108080 - DNA, 80 bp, synthetic construct
  source 1..80: mol_type = other DNA
tctctagtgaacggagttgtgcgactcctatccaagccttgggacaccatcatgaatgtcaccaccatggctatgacgga

SEQ ID NO: 108081 - DNA, 80 bp, synthetic construct
  source 1..80: mol_type = other DNA
cgagaccaggcccgcgagctgctccgcagaggggagaccaacatgggtttggccgtatcacggggttgcgccaaacttgc

SEQ ID NO: 108082 - DNA, 80 bp, synthetic construct
  source 1..80: mol_type = other DNA
ctggctgcaggcaaaactcctcccacaactccccggagtgcccttcctctcgtgtcagagagggtacaagggcgtatggc

SEQ ID NO: 108083 - DNA, 80 bp, synthetic construct
  source 1..80: mol_type = other DNA
ctccctatgacaatgcagtgcctttcatgccaaataccacggcttatccaaaaatcattaatagtacaactgatcctgaa

SEQ ID NO: 108084 - DNA, 80 bp, synthetic construct
  source 1..80: mol_type = other DNA
tgcgcgcgacgaggaagacttcggaacgatcccagcccagaggcaggcgccaaccaatacctaaggcgcgtcgccaaacg

SEQ ID NO: 108085 - DNA, 80 bp, synthetic construct
  source 1..80: mol_type = other DNA
actccccccacctcgcgggcaaacgtgcgcgccaggtcgcgtatctcggcgatggacccggcggttgtgacgcgggttgg

SEQ ID NO: 108086 - DNA, 80 bp, synthetic construct
  source 1..80: mol_type = other DNA
attatcgcttcccccatgtacggcgaaggagaagtccacgcctacatgggggtagagtcataatcgtgcatcaggatagg

SEQ ID NO: 108087 - DNA, 80 bp, synthetic construct
  source 1..80: mol_type = other DNA
acattagaagcctgtcttacaacaggaaaaacaacccttataagcataagacggactacggccatgccggcgtgaccgta

SEQ ID NO: 108088 - DNA, 80 bp, synthetic construct
  source 1..80: mol_type = other DNA
tgacacaggaaaacacggcaaggaaattaaagtaacaccacagagttccatcacagaagcagaactaacaggctatggca

SEQ ID NO: 108089 - DNA, 80 bp, synthetic construct
  source 1..80: mol_type = other DNA
ctgcccgggattctatcccctggtgcgctggttgtggtggtcatttgcgcagccatcttacgccgccatgtaggacaggg

SEQ ID NO: 108090 - DNA, 80 bp, synthetic construct
  source 1..80: mol_type = other DNA
tcctgaaagatctggcagacgccaggttttccggacttgccccttcgaatgacgccgcggattctgcagtcggtactagt

SEQ ID NO: 108091 - DNA, 80 bp, synthetic construct
  source 1..80: mol_type = other DNA
ccatcatggccaaaaacgaggtgttttgcgtggaccccgcgaagggcgggaaaaaggcagctcgcctcatcgtattccct

SEQ ID NO: 108092 - DNA, 80 bp, synthetic construct
  source 1..80: mol_type = other DNA
tgatgtgttacgctatgtcatcttggtgggggcagctttcgcagaatctaattcgggaggagacgtggtacacttggcgc

SEQ ID NO: 108093 - DNA, 80 bp, synthetic construct
  source 1..80: mol_type = other DNA
cacgtggatgaataccaccggcttcacgaagacctgtggagcccccccgtgcagaacacgtccactaggaaatggcagtg

SEQ ID NO: 108094 - DNA, 80 bp, synthetic construct
  source 1..80: mol_type = other DNA
cttgcagggccgaggacttgtgccaacatgtggcacggcactttccctatcaatgctcataccaccggtcctgccacacc

SEQ ID NO: 108095 - DNA, 80 bp, synthetic construct
  source 1..80: mol_type = other DNA
gatcatccaaagactccacggaatggccgctttttcactccatggttactcgccgggcgaactcaatcgggtggcagcag

SEQ ID NO: 108096 - DNA, 80 bp, synthetic construct
  source 1..80: mol_type = other DNA
aggttgatggagtaagactgcataggtacgcacctgcatgcagacctctcctgagggacgaagtgtcgttttctgtcggc

SEQ ID NO: 108097 - DNA, 80 bp, synthetic construct
  source 1..80: mol_type = other DNA
aagaggtggacagccaagatcagcatgccagctatactgattgctctgctagtcctggtgtttgggggcattacttacac

SEQ ID NO: 108098 - DNA, 80 bp, synthetic construct
  source 1..80: mol_type = other DNA
gtccacttatccaacaaattgtgacgttatatatcccaaggcaaaggccgctcccgtcatagcaaatacaaagacaatta

SEQ ID NO: 108099 - DNA, 80 bp, synthetic construct
  source 1..80: mol_type = other DNA
aagaagctgacagtgactattctattgtgttttactttaaatggtacaaaacttatgaaaatgttcagtttgactcttca

SEQ ID NO: 108100 - DNA, 80 bp, synthetic construct
  source 1..80: mol_type = other DNA
caaacagcagcatggtgtacgaggccgaggcaatcatcctgcaccttccagggtgcgttccgtgcatcaggaccggaaat

SEQ ID NO: 108101 - DNA, 80 bp, synthetic construct
  source 1..80: mol_type = other DNA
agggaatgtcatacacgatgtgttcaggaaaattttcaattgacaaagagatggcagaaacacagcatgggacaacagta

SEQ ID NO: 108102 - DNA, 80 bp, synthetic construct
  source 1..80: mol_type = other DNA
actggggccaggtagccgtgaatgtcccgaggacagacgagaatatccagggacgccccgaccatccccgtgtgaccgtc

SEQ ID NO: 108103 - DNA, 80 bp, synthetic construct
  source 1..80: mol_type = other DNA
ggcggtgcagtggatgaacaggctcatcgcattcgcatcccggggcaatcatgtctcaccaacgcactacgttcccgaga

SEQ ID NO: 108104 - DNA, 80 bp, synthetic construct
  source 1..80: mol_type = other DNA
cgacaggattgagatgagcccgctgctgttctccaccaccgaacttgccatcctgccgtgctcattttcgaccatgccag

SEQ ID NO: 108105 - DNA, 80 bp, synthetic construct
  source 1..80: mol_type = other DNA
ctgttcatggcccttgtggcgttccttcgtttcctaacaatcccaccaacagcagggatactgaaaagatggggaacgat

SEQ ID NO: 108106 - DNA, 80 bp, synthetic construct
  source 1..80: mol_type = other DNA
tgtcgcggaccgcctgggggtggggggaggctggggctctgatcacagccgcaacttccactttgtggtaaggctctccg

SEQ ID NO: 108107 - DNA, 80 bp, synthetic construct
  source 1..80: mol_type = other DNA
gcctcatcggcaccagagcccgcgccacttgggctgaaaatattcaagtggcaatcaaccaggtccgagcaatcatagga

SEQ ID NO: 108108 - DNA, 80 bp, synthetic construct
  source 1..80: mol_type = other DNA
tcttctcgaccacccaattgtccatcctcccctgctcattttccaccatgccagcattgtcaacaggccttattcattta

SEQ ID NO: 108109 - DNA, 80 bp, synthetic construct
  source 1..80: mol_type = other DNA
gcgacaccaccaccgcctacctgcgacggagacgcagagtccgaagctgagtcatattcttccatgccccccctcgaggg

SEQ ID NO: 108110 - DNA, 80 bp, synthetic construct
  source 1..80: mol_type = other DNA
ctccataaggccccgggccgtgagtgcgtcctcctccggcacgcctgccgttgtcaggcccaggacccgtcgcagcgtgt

SEQ ID NO: 108111 - DNA, 80 bp, synthetic construct
  source 1..80: mol_type = other DNA
tacccttggcccctctatggcaacgagggctgcgggtgggcaggatggctcctgtctccccgcggctcccggcctagttg

SEQ ID NO: 108112 - DNA, 80 bp, synthetic construct
  source 1..80: mol_type = other DNA
tatgctactcattggccaagccgaggccgcgttagagaacctgatcgtcctcaatgccgcctcggccgctagcatccatg

SEQ ID NO: 108113 - DNA, 80 bp, synthetic construct
  source 1..80: mol_type = other DNA
cttgagggccgaatatgacgacagggaaatatccatccctgctgagtgccatcgccctcctcgtccaaagtttccaccag

SEQ ID NO: 108114 - DNA, 80 bp, synthetic construct
  source 1..80: mol_type = other DNA
tggcccgtaccctcagacccgtaatcgaggccgcatttagaggtcgtttactcgttcgctcattggatggagacccgaaa

SEQ ID NO: 108115 - DNA, 80 bp, synthetic construct
  source 1..80: mol_type = other DNA
tctctactatgtcttttgcaaggccagatcaaagtctcatagaacaatctacaggccagtaatcggggatcctcagccac

SEQ ID NO: 108116 - DNA, 80 bp, synthetic construct
  source 1..80: mol_type = other DNA
ccgcccgtaggtactcgttgttcaggctgtcggaggcccagacgacatacccggtaagcgtcgcgttaattatatactgg

SEQ ID NO: 108117 - DNA, 80 bp, synthetic construct
  source 1..80: mol_type = other DNA
ggggtcgcgggtcgccgcacgtccccattcgaacgcgttcgctgccttttcctccgcagttgccactgggtcctaaacac

SEQ ID NO: 108118 - DNA, 80 bp, synthetic construct
  source 1..80: mol_type = other DNA
tgggggcgtagagctgtggcactaccccatgggacacaaatgcccacgggtcgtgcatgtcgtcacggtgaccgcgtgcc

SEQ ID NO: 108119 - DNA, 80 bp, synthetic construct
  source 1..80: mol_type = other DNA
gggctgtgctctccctccgcagggtgtaccacccgtgccaccacctaggaggaagaaagttgtgcagctcgatgagtcct

SEQ ID NO: 108120 - DNA, 80 bp, synthetic construct
  source 1..80: mol_type = other DNA
gggtcaaggtatactagtagcaaacaaccaaggtgctctagagtctaaagttgaaatgcagttttttgccccctctggca

SEQ ID NO: 108121 - DNA, 80 bp, synthetic construct
  source 1..80: mol_type = other DNA
gtgtcccactgactgcttccggaagcacccagacgccacatttgagagatgcgggtcgggtccctggcttacccctcgct

SEQ ID NO: 108122 - DNA, 80 bp, synthetic construct
  source 1..80: mol_type = other DNA
attttatgcagacaagacatggaagacatcaattttgcgtcgctggctccgcggcacggctcgcggccgtttatgggcac

SEQ ID NO: 108123 - DNA, 80 bp, synthetic construct
  source 1..80: mol_type = other DNA
gcagtaacgcaagttgtcgacttcagcttggacccaaccttttcaatcgagaccacaactgttccccaggacgctgtcgc

SEQ ID NO: 108124 - DNA, 80 bp, synthetic construct
  source 1..80: mol_type = other DNA
ctggatgaacgcgacggggttcgttaagacctgcggtgctccgccgtgtaacatcagacccgtgccgaatgcctctgacc

SEQ ID NO: 108125 - DNA, 80 bp, synthetic construct
  source 1..80: mol_type = other DNA
gccagccctgggaccgaaccccgcgtttatgaacaaacgacccaacacccgtgcgttttattctgtctttttattgccgt

SEQ ID NO: 108126 - DNA, 80 bp, synthetic construct
  source 1..80: mol_type = other DNA
cagctggagaaatacatgctgtcccttttggtttggtgagcatgatgatagcaatggaagtggtcctaaggaaaagacag

SEQ ID NO: 108127 - DNA, 80 bp, synthetic construct
  source 1..80: mol_type = other DNA
gcccatcacggcgtatgctcagcagacaaggggcctcttgggatgcataatcaccagcctgaccggccgggacaaaaacc

SEQ ID NO: 108128 - DNA, 80 bp, synthetic construct
  source 1..80: mol_type = other DNA
atcaggccactcgcagcacgggttcaggggagcggtccgaggacgacggcgccgcatctgaggcagattcctacagttcc

SEQ ID NO: 108129 - DNA, 80 bp, synthetic construct
  source 1..80: mol_type = other DNA
actactccttttggtcagcagagagttttcaaagaaaaggttgacactaaagcgcctgaaccacctgcaggagtccggga

SEQ ID NO: 108130 - DNA, 80 bp, synthetic construct
  source 1..80: mol_type = other DNA
tgacatgcatggcagctgaccttgaggtcgtgaccagctcgtgggttttgctaggaggagtcctagccgcgcttgccgcc

SEQ ID NO: 108131 - DNA, 80 bp, synthetic construct
  source 1..80: mol_type = other DNA
ctatgccccctctcgagggcgagcctggagaccctgacctcagttcaggttcgtggtccacggtcagtggggaggacgac

SEQ ID NO: 108132 - DNA, 80 bp, synthetic construct
  source 1..80: mol_type = other DNA
cgcaacagctattgccaacctagccgctcccagacgaggaaatgtgtactgggtgcgcgacgcggtaactgggactcgag

SEQ ID NO: 108133 - DNA, 80 bp, synthetic construct
  source 1..80: mol_type = other DNA
ctttgttggtagttaagggaaagtttagtaatatcaataataccacaaacccaaatgacaccgataaacaaataacaatt

SEQ ID NO: 108134 - DNA, 80 bp, synthetic construct
  source 1..80: mol_type = other DNA
cgggtcggtggcggcgactgtgcggctgtgtgcgggtgtggccccgggccccctaccccctcccggaggcccacgccgac

SEQ ID NO: 108135 - DNA, 80 bp, synthetic construct
  source 1..80: mol_type = other DNA
gtctgtcgcttgcatctgtactaaatttccggagctggcttacgtgcgagatggcgttattcaatttgaggtacaacaac

SEQ ID NO: 108136 - DNA, 80 bp, synthetic construct
  source 1..80: mol_type = other DNA
ccaacgctaccagggttgagtcagaggacaaggtgctgatcttggactccttcgagccccttgtggccgagacggatgac

SEQ ID NO: 108137 - DNA, 80 bp, synthetic construct
  source 1..80: mol_type = other DNA
agagatccaaaccctccgggtgcgcccgcgcaccaccaccgcccctcgccccctcccgcccctcgccccctcccgcacct

SEQ ID NO: 108138 - DNA, 80 bp, synthetic construct
  source 1..80: mol_type = other DNA
tcatctgcttcgcctggcacttcaagggcaggttggtccctggggccacctacctttgcttgggcatttggccattactc

SEQ ID NO: 108139 - DNA, 80 bp, synthetic construct
  source 1..80: mol_type = other DNA
cagacttaccaggttgcccacttgcatgcaccgacgggtagcggcaagagcaccaaggtcccagccgcgtatgcggccca

SEQ ID NO: 108140 - DNA, 80 bp, synthetic construct
  source 1..80: mol_type = other DNA
ttgaaacgatgacatggtagttttgtaactatgaagaaattctctgttactaccgcgcccggttcttgggttatatttaa

SEQ ID NO: 108141 - DNA, 80 bp, synthetic construct
  source 1..80: mol_type = other DNA
agtcacatattcaatcactccacttgatctcccagaaatcattcaaagactccatggtatggccgttttttcactccatg

SEQ ID NO: 108142 - DNA, 80 bp, synthetic construct
  source 1..80: mol_type = other DNA
cgcaacccgaactcgttccggaagaccccgaggactcggccctcttagaggatcccgccgggacggtgtcttcgcagatc

SEQ ID NO: 108143 - DNA, 80 bp, synthetic construct
  source 1..80: mol_type = other DNA
atcacagggaatatgtctttccgggacctagggagagtgatggttatggtgggggctgctatgacggatgacataggtat

SEQ ID NO: 108144 - DNA, 80 bp, synthetic construct
  source 1..80: mol_type = other DNA
ctgctcagtaccacccagtggcaggtgctcccctgctccttcaccaccttgcccgccatatcgaccggcctgatccacct

SEQ ID NO: 108145 - DNA, 80 bp, synthetic construct
  source 1..80: mol_type = other DNA
catcgccgccgaccgccaggcgggtgggcttccggcggccgccggagaccacgggatccggtggtcggcgaagcgccgcc

SEQ ID NO: 108146 - DNA, 80 bp, synthetic construct
  source 1..80: mol_type = other DNA
gttcactggattgacacacatagatgcccacttcctgtcacagacaaaacaacaaggtctcaacttcgcatacttggtag

SEQ ID NO: 108147 - DNA, 80 bp, synthetic construct
  source 1..80: mol_type = other DNA
gaaacctccgcgcccctcacagttacatcaggcattcttaccgtagccactgccgcacctttggtggtcgcgggcaacag

SEQ ID NO: 108148 - DNA, 80 bp, synthetic construct
  source 1..80: mol_type = other DNA
acagggcgtagagggagagcaagtggaaaaacattgggtgaggtctggaagcgtgaacttaacttgctagacaaacaaca

SEQ ID NO: 108149 - DNA, 80 bp, synthetic construct
  source 1..80: mol_type = other DNA
ccacaaatccagatgataaaataagtgcaggaaaaaaaaacattgtgtcaaatgtgtatcttgaaggaagagtgtatcag

SEQ ID NO: 108150 - DNA, 80 bp, synthetic construct
  source 1..80: mol_type = other DNA
aagcgcaaaatcaaggaggagatgctccaggtcgtcgccccggagatttacggaccaccccaggcggaccagaaaccccg

SEQ ID NO: 108151 - DNA, 80 bp, synthetic construct
  source 1..80: mol_type = other DNA
ccgcctacctatacgtcacttcgcaccacccctagcccctcctcactcattatcatattggctcgtttccagctttaagg

SEQ ID NO: 108152 - DNA, 80 bp, synthetic construct
  source 1..80: mol_type = other DNA
gcgcctcctgtgttacgccagacagccgagtgacgggtcaccgccaagagcgccgcttgcaagatggccaccccctcgat

SEQ ID NO: 108153 - DNA, 80 bp, synthetic construct
  source 1..80: mol_type = other DNA
cgtggcgcgacgggcctccgcggcagcgcgcagctggggccccgactcccagacggcggtggtgccggcgaggagcaaca

SEQ ID NO: 108154 - DNA, 80 bp, synthetic construct
  source 1..80: mol_type = other DNA
cgccgcgtctgtgtcatcaccgcaggcgagtctctttcccgccgccccccggaggacccagagcgacccggggttcccgg

SEQ ID NO: 108155 - DNA, 80 bp, synthetic construct
  source 1..80: mol_type = other DNA
tggaggctgctaacctggcagaggtccgcagttattgctatttggctaccgtcagcgatctctccaccaaagctgcatgc

SEQ ID NO: 108156 - DNA, 80 bp, synthetic construct
  source 1..80: mol_type = other DNA
agtttcaactgcacttgcagagcttgctcgcaagtcatttccaccaccttcggcacagtcacaggagagctcaggattag

SEQ ID NO: 108157 - DNA, 80 bp, synthetic construct
  source 1..80: mol_type = other DNA
ccagttgctccttgagattgcccttgaggggcattggggtgtcatcggtgccttgctgtactacagcatggttgcgaact

SEQ ID NO: 108158 - DNA, 80 bp, synthetic construct
  source 1..80: mol_type = other DNA
cttatgggcttaggaaaaggctggcccttgcacaaactggacctaagtgtcccactacttgcgattggatgttattcgca

SEQ ID NO: 108159 - DNA, 80 bp, synthetic construct
  source 1..80: mol_type = other DNA
cacatcacggcggagactgcggcgcggcgcttggcacggggatcacctccatctgaggcgagctcctcagtgagccagct

SEQ ID NO: 108160 - DNA, 80 bp, synthetic construct
  source 1..80: mol_type = other DNA
aagagtcaaatgtctgtaaagaagtgtgtgtttgaacgttgcattatggccatggtggtagaaggtcaggcgcggattcg

SEQ ID NO: 108161 - DNA, 80 bp, synthetic construct
  source 1..80: mol_type = other DNA
ctcggccccccccggcgacgccccacaaccaacgtacgacttggagctgataacatcatgttcttccaatgtctctgtcg

SEQ ID NO: 108162 - DNA, 80 bp, synthetic construct
  source 1..80: mol_type = other DNA
gatccttgataggcttgacagcgagggccacctgggccactaacatacaagtagccataaaccaagtgagaaggctcatc

SEQ ID NO: 108163 - DNA, 80 bp, synthetic construct
  source 1..80: mol_type = other DNA
aacatctcttggccttaatgcggtcgccttttataggggcttggacgtctcggtgataccaacatccggtgacgtcgtgg

SEQ ID NO: 108164 - DNA, 80 bp, synthetic construct
  source 1..80: mol_type = other DNA
tctaaatgatctcacgcctgttggtagactggtcactgttaaccccttcgtgtcggtagcgacagccaacgctaaagtgt

SEQ ID NO: 108165 - DNA, 80 bp, synthetic construct
  source 1..80: mol_type = other DNA
gccaatggtgagatcatgtaccggagggaagggattttatctcctccctcacggaacgtctttacattgtgagccgaatg

SEQ ID NO: 108166 - DNA, 80 bp, synthetic construct
  source 1..80: mol_type = other DNA
gatgaccactaccgggacgtgctaaaggagataaaagctaaagcgtccacagtgaaggcgagcctgctatccgtagagga

SEQ ID NO: 108167 - DNA, 80 bp, synthetic construct
  source 1..80: mol_type = other DNA
ataccttattatgtccccataaacgttcaaacagcaggttaaagccaactccaaccaagcaatacaaaggccttgatccc

SEQ ID NO: 108168 - DNA, 80 bp, synthetic construct
  source 1..80: mol_type = other DNA
gcttggcccaaacttgaacagttctggcagaagcatttgtggaactttgtgagtggcatacaatatttggctggcctatc

SEQ ID NO: 108169 - DNA, 80 bp, synthetic construct
  source 1..80: mol_type = other DNA
acactcagttggaacacgagacctgtccaggttaagcaccattttatcgcccttatacaatactgtcgctccaggagcaa

SEQ ID NO: 108170 - DNA, 80 bp, synthetic construct
  source 1..80: mol_type = other DNA
gttggaatcaatacactgatgatctccctgagtacccacaccaccaggatgatttacccctaaacattgtacttccacag

SEQ ID NO: 108171 - DNA, 80 bp, synthetic construct
  source 1..80: mol_type = other DNA
aagcaccactatccttctcaacattttggggggctggctagcatcccaaattgcaccacccgcggaggccactggcttcg

SEQ ID NO: 108172 - DNA, 80 bp, synthetic construct
  source 1..80: mol_type = other DNA
ctacaatattttatcgcacgggcggaagcagttgtccacgtgtgggtaccatccttacaggtccggggtggacgcgatgc

SEQ ID NO: 108173 - DNA, 80 bp, synthetic construct
  source 1..80: mol_type = other DNA
tctcctgcatggacaggcatgagctccactgggacctgaagttggaaagcaatatcatctaaatgcaccaaccatctggg

SEQ ID NO: 108174 - DNA, 80 bp, synthetic construct
  source 1..80: mol_type = other DNA
accatcttcatcttttctagatgaagcgcagcagaacccagtatgctgaagaaacagaagaaaatgatgacttcaacccc

SEQ ID NO: 108175 - DNA, 80 bp, synthetic construct
  source 1..80: mol_type = other DNA
tcatcgccttcacgtccaaggggaaccacgtcgccccgacccactatgtgacggagtccgacgcttcacaacgcgtgact

SEQ ID NO: 108176 - DNA, 80 bp, synthetic construct
  source 1..80: mol_type = other DNA
atgaactcgacggggttcgtcaagacgtgcggagcacccccctgtgtaacacgacctggcccagatagtgacaacagaac

SEQ ID NO: 108177 - DNA, 80 bp, synthetic construct
  source 1..80: mol_type = other DNA
acaggttcaggctaggctcctcactaccgaggaagcttgcgacctgacccccccacattctgcccgatccaagttcgggt

SEQ ID NO: 108178 - DNA, 80 bp, synthetic construct
  source 1..80: mol_type = other DNA
gatcagtgggtggtgttctgaactcattaggtaaaatggtgcaccaaatattcggaagtgcttacacagccctattcagt

SEQ ID NO: 108179 - DNA, 80 bp, synthetic construct
  source 1..80: mol_type = other DNA
agacgacagcgtcgtatgctgttccatgtcctactcctggacgggagctctcatcaccccatgcgctgccgaagaggata

SEQ ID NO: 108180 - DNA, 80 bp, synthetic construct
  source 1..80: mol_type = other DNA
catggtatgatggagaaggaaataaattgtgcaatggagaaaaagttgagcatgcagaatttaatcatacatgtaacatc

SEQ ID NO: 108181 - DNA, 80 bp, synthetic construct
  source 1..80: mol_type = other DNA
caggaggctgggatcgaaggccacatacgcgcgctcgaacgcccccgctttccagctgctgccggtggactcttcgcaca

SEQ ID NO: 108182 - DNA, 80 bp, synthetic construct
  source 1..80: mol_type = other DNA
agcgcggttgatcgtgtacccggaccttagcgtccgggtgtgcgagaaaaaagccctatttgacatcacccaaaaattac

SEQ ID NO: 108183 - DNA, 80 bp, synthetic construct
  source 1..80: mol_type = other DNA
ctcctaggcggcatcagacagtacagagttgcaactgttccatctatccgggccacgtctcaggtcaacgcatggcgtgg

SEQ ID NO: 108184 - DNA, 80 bp, synthetic construct
  source 1..80: mol_type = other DNA
cacataaaccgtacagccctaaactgcaatgattctttacagactggctttattgcggggttaatatattacaacaagtt

SEQ ID NO: 108185 - DNA, 80 bp, synthetic construct
  source 1..80: mol_type = other DNA
aaaagacatccaggagtggaaaccctcacaaggctggtatgactggcaacaagtccccttctgttcgaatcatttccagg

SEQ ID NO: 108186 - DNA, 80 bp, synthetic construct
  source 1..80: mol_type = other DNA
actgccttgctttcatttgctgtgcctggtacattaaggggcggattgtcccgggcgccacttatgctattttgcagctc

SEQ ID NO: 108187 - DNA, 80 bp, synthetic construct
  source 1..80: mol_type = other DNA
gtccgtcggttacgttacagtggcccagttcgaacaccagctgcatgtagcggtcgtagtggggggtcagcaggtccagc

SEQ ID NO: 108188 - DNA, 80 bp, synthetic construct
  source 1..80: mol_type = other DNA
aaagccttagctccgcccccgtcttgggaccagatgtggaagtgtctattgcggttgaaacccactcttaacggcccaac

SEQ ID NO: 108189 - DNA, 80 bp, synthetic construct
  source 1..80: mol_type = other DNA
caggaaactgatgccaattgtgcatactctattacatttgattttggatggggtaaggtgtataaggatcctataccata

SEQ ID NO: 108190 - DNA, 80 bp, synthetic construct
  source 1..80: mol_type = other DNA
cggtgcacacggttcttggtggtgccttcaacagcatctttggaggagtggggtttctgccaaagctcctaatgggagtg

SEQ ID NO: 108191 - DNA, 80 bp, synthetic construct
  source 1..80: mol_type = other DNA
ggagacacgcggggcgcccttttgagccccaggccaatatctactcttaaaggctcctctggtggtccactgctatgccc

SEQ ID NO: 108192 - DNA, 80 bp, synthetic construct
  source 1..80: mol_type = other DNA
agctctcttgctggcggccgggtgctggggccaagtgaccctgactgtgactgtgactgcagctgccctgctcttttgcc

SEQ ID NO: 108193 - DNA, 80 bp, synthetic construct
  source 1..80: mol_type = other DNA
aaaaccccggctggtactggtcaaaacactgtatgggaagttaacaatgatgctgcaacgcataaccaaattgcaagagg

SEQ ID NO: 108194 - DNA, 80 bp, synthetic construct
  source 1..80: mol_type = other DNA
tatgtctaaggcgcatggcatcgacccgaacatacggtcaggtgtcaggaccatctcgacgggcgcgcctatcacatact

SEQ ID NO: 108195 - DNA, 80 bp, synthetic construct
  source 1..80: mol_type = other DNA
agaaccggcggctggctgaatcccactcccacgatcacggcttcttcctggggcatctcttcgtctgggtctaccttggt

SEQ ID NO: 108196 - DNA, 80 bp, synthetic construct
  source 1..80: mol_type = other DNA
gctctctcacgatttcccagctcctcagacgcctccacagatggatcaatgaggactgctccaccccatgttccaacacc

SEQ ID NO: 108197 - DNA, 80 bp, synthetic construct
  source 1..80: mol_type = other DNA
tgaccgtggaacctgggctggagcccgaggtccgcgtacggccaatcaagcaggtggcgccgggactgggcgtgcagacc

SEQ ID NO: 108198 - DNA, 80 bp, synthetic construct
  source 1..80: mol_type = other DNA
tcctactcatgtgtgttgtgtacccggccttggtatttgacatcactaagctgctgctggccgtcttcggacccctttgg

SEQ ID NO: 108199 - DNA, 80 bp, synthetic construct
  source 1..80: mol_type = other DNA
gcccagctatacgagaggcgggcgtactcgcgcagcgtgcggttgcagatgaggtacgtgagcacgttctcgctctggcg

SEQ ID NO: 108200 - DNA, 80 bp, synthetic construct
  source 1..80: mol_type = other DNA
gggcaaaacaaggaaaattttgccccaaatcatcagggatgctattcaacaacgcctcagaacagctgttttggcaccca

SEQ ID NO: 108201 - DNA, 80 bp, synthetic construct
  source 1..80: mol_type = other DNA
aggttacagggcacgtcggtctggttggagtccgcgacgtatcgaaacacgtccatctcctggcgcccgacgatcacgcc

SEQ ID NO: 108202 - DNA, 80 bp, synthetic construct
  source 1..80: mol_type = other DNA
caggagtgactaccaccagtacagtggcctccgaacctgacgccagtgatggcgcaacctcggatgttgagtcctacagc

SEQ ID NO: 108203 - DNA, 80 bp, synthetic construct
  source 1..80: mol_type = other DNA
attatgctggaacctgaagtgttttctagagtgtgtttaaatggggtatttgatttatctgtggaattatgtaaggttat

SEQ ID NO: 108204 - DNA, 80 bp, synthetic construct
  source 1..80: mol_type = other DNA
attaaagtttcagctacacaaagaaaacatcactttatttgcacctattcacctgggatactaccgctgcgcagctccac

SEQ ID NO: 108205 - DNA, 80 bp, synthetic construct
  source 1..80: mol_type = other DNA
gagtccattgattcggagacggattccttgtcttcaatgccccccctggagggggagcctggagatcctgacctggagcg

SEQ ID NO: 108206 - DNA, 80 bp, synthetic construct
  source 1..80: mol_type = other DNA
ctgaaaaataacactttatggacaggtccaaaaccagaagccaactgcataattgaatacgggaaacaaaacccagatag

SEQ ID NO: 108207 - DNA, 80 bp, synthetic construct
  source 1..80: mol_type = other DNA
gtggatgaacaggctcatagcatttgcctcacgtggcaatcacgtgtcgcccacgcactacgtgcctgaaacagacgcct

SEQ ID NO: 108208 - DNA, 80 bp, synthetic construct
  source 1..80: mol_type = other DNA
atctacacagggcacattacaggccacagaatggcctgggacatgatgatgaactggagtccaacaaccaccttagttct

SEQ ID NO: 108209 - DNA, 80 bp, synthetic construct
  source 1..80: mol_type = other DNA
ggagatgcagagaaaggagtaaagtcttggaccttgttaacaaccacggatgtgacctgtgggtcgcagcaggtgtactg

SEQ ID NO: 108210 - DNA, 80 bp, synthetic construct
  source 1..80: mol_type = other DNA
tttcgcgctgctcctcttcccgactggccatttccttctcctataggcagaaaaagatcatggagtcagtcgagaagaag

SEQ ID NO: 108211 - DNA, 80 bp, synthetic construct
  source 1..80: mol_type = other DNA
agacgcggggcgttccagcgcggcacgcgggcgccgcgcagcaacaaaagccttcagatgtttgtgttgtgcaaacgcgc

SEQ ID NO: 108212 - DNA, 80 bp, synthetic construct
  source 1..80: mol_type = other DNA
aacaacggctatggtactgtctatcgtatctctctttcctttatgcctgtctacaacctcccaaaaaacaacatggcttc

SEQ ID NO: 108213 - DNA, 80 bp, synthetic construct
  source 1..80: mol_type = other DNA
agacgtgcccgagcgcccggcggcagagaggtgggggtggatccgggacccgcgacagaaaaaggccggagccctctcga

SEQ ID NO: 108214 - DNA, 80 bp, synthetic construct
  source 1..80: mol_type = other DNA
ggcaggcgcggcggtgtatgccaacaaaacttatcagccagagccgcaagtaggaccaagtgaatggaacaccagcattg

SEQ ID NO: 108215 - DNA, 80 bp, synthetic construct
  source 1..80: mol_type = other DNA
gctgttggggccaggtcaccttgactgtgactgttacagccgcaacgctgctcttttgtcactatgcgtacatggtgcca

SEQ ID NO: 108216 - DNA, 80 bp, synthetic construct
  source 1..80: mol_type = other DNA
ggcctgaaccgcgagcggttgctgcgcgcctcaaccaccgccgccggcacgcgcaccgggcctggtcccgcgcgcgcaca

SEQ ID NO: 108217 - DNA, 80 bp, synthetic construct
  source 1..80: mol_type = other DNA
ggagccgtccttctacgcttccaatcgagctttcattaatcgcttgatggattaccttcaccgcgctgcggccatgaacg

SEQ ID NO: 108218 - DNA, 80 bp, synthetic construct
  source 1..80: mol_type = other DNA
aaagggacgacccttggttccgacgcctcaacataccccgctgttctcgttcctcactgcctcccccgccctggacaccc

SEQ ID NO: 108219 - DNA, 80 bp, synthetic construct
  source 1..80: mol_type = other DNA
ttagaaggatccagtcttgataaagagtactggaactttagaaacaatgattctactgtgtctggaaaatatgaaaatgc

SEQ ID NO: 108220 - DNA, 80 bp, synthetic construct
  source 1..80: mol_type = other DNA
cggtctattgttttacccctagccctgttgttgtgggtaccactgacagacagggcgtgcccacctatacttggagggaa

SEQ ID NO: 108221 - DNA, 80 bp, synthetic construct
  source 1..80: mol_type = other DNA
cactcagtggatgaataggctgatagccttcgcctccaggggcaaccatgtatctcccactcactatgtgccggagacag

SEQ ID NO: 108222 - DNA, 80 bp, synthetic construct
  source 1..80: mol_type = other DNA
cagcttgtcgcctttaggccgcgtcaccatacctttgtccaggattgcaactgttccatctatactggtaggatcacggg

SEQ ID NO: 108223 - DNA, 80 bp, synthetic construct
  source 1..80: mol_type = other DNA
tccaccactctactccttaatatcatggggggttgggtggcgtcccagctggcatcacccaccggatccacagcgttcgt

SEQ ID NO: 108224 - DNA, 80 bp, synthetic construct
  source 1..80: mol_type = other DNA
cgtctggaattgctggtcttttcgtcccaggccctaaacagaacatccagctaatgaacaccaacggcagttggcacata

SEQ ID NO: 108225 - DNA, 80 bp, synthetic construct
  source 1..80: mol_type = other DNA
ctacgccttctacggcgtctggccacttctcctgctcctactggcgctgccccagcgggcatacgctatggaccaggagg

SEQ ID NO: 108226 - DNA, 80 bp, synthetic construct
  source 1..80: mol_type = other DNA
cagtctggttcgtcgctagtgtgaagatgggaaatgagattgcacagtgtcttcagagagcgggaaagaaggtcatccaa

SEQ ID NO: 108227 - DNA, 80 bp, synthetic construct
  source 1..80: mol_type = other DNA
actgggaaaaggaaaaggccccaaggtcagaacctggctgtttgagaatggcgaggagcgtctcagtcgcatggccgtca

SEQ ID NO: 108228 - DNA, 80 bp, synthetic construct
  source 1..80: mol_type = other DNA
gtggagtctgccggtgaagataataatgaacaggcggtgaatgagttttttcccgaatcgcttattttagctgccagtga

SEQ ID NO: 108229 - DNA, 80 bp, synthetic construct
  source 1..80: mol_type = other DNA
gaatgttcgacacggtcgtcctatgcgaggcatatgacactggagccgcgtggtatgagctaacacccgctgaaaccaca

SEQ ID NO: 108230 - DNA, 80 bp, synthetic construct
  source 1..80: mol_type = other DNA
tgcaaagctcccaaaaggtcaggtgcagaaattttgaaatcacagttgggaccttggccaccacgggagttgcggtatac

SEQ ID NO: 108231 - DNA, 80 bp, synthetic construct
  source 1..80: mol_type = other DNA
gccactaccatccttggcattgggacggtcctcgaccaagcagagacagccggggtcagattgacagtcctggccacggc

SEQ ID NO: 108232 - DNA, 80 bp, synthetic construct
  source 1..80: mol_type = other DNA
ctccggcagaaggactagtggttagaggagaccccccggaaaacgcaaaacagcatattgacgctgggaaagaccagaga

SEQ ID NO: 108233 - DNA, 80 bp, synthetic construct
  source 1..80: mol_type = other DNA
ttttgtgggatgatgttacagacagtctgttcagcccggcagccattggtcaccatggtaaaaaggagggagcagatgaa

SEQ ID NO: 108234 - DNA, 80 bp, synthetic construct
  source 1..80: mol_type = other DNA
ttgcaagatgcttacaaaaaaggactcaaagcttacactcacacttacaaagtgcggaagtcaaattttaggaaacgtat

SEQ ID NO: 108235 - DNA, 80 bp, synthetic construct
  source 1..80: mol_type = other DNA
tcgggtctggtgcgtgggatcttcccggcagggccaaaaacgctctaggtttgccccccgacgaacgtccagggacgcga

SEQ ID NO: 108236 - DNA, 80 bp, synthetic construct
  source 1..80: mol_type = other DNA
ttacatcttgctcctccaacgtatccgtggcccacgaccacactggacagagatattactacctcacacgtgacccaacc

SEQ ID NO: 108237 - DNA, 80 bp, synthetic construct
  source 1..80: mol_type = other DNA
agcagggttgctcctgaggaaactcacttcaaaagagctgatgatgacgaccataggagtcgttctcctctcccagagca

SEQ ID NO: 108238 - DNA, 80 bp, synthetic construct
  source 1..80: mol_type = other DNA
ggcgctcggccggaggccgggccgggggcgtggccgcgtccatcaggcccgcctcgaacatctccgtgtccgtgctgccg

SEQ ID NO: 108239 - DNA, 80 bp, synthetic construct
  source 1..80: mol_type = other DNA
tgcctaccctcttattggaaatatagatattacgtttatcatgccaatgggagtgtttcaggcaaactccatggacagat

SEQ ID NO: 108240 - DNA, 80 bp, synthetic construct
  source 1..80: mol_type = other DNA
aaaaagggtctactatctgacccgcgacccgacccccctggcacgagctgcctgggaaacagtccgacacactccagtca

SEQ ID NO: 108241 - DNA, 80 bp, synthetic construct
  source 1..80: mol_type = other DNA
catcaagaggcaaccatgtgtccccgacgcactacgtacctgagactgacgcgtcaaagaatgtgactcaaatactcact

SEQ ID NO: 108242 - DNA, 80 bp, synthetic construct
  source 1..80: mol_type = other DNA
gctagcagacgcgcgcatctgcgcctgcttgtggctgatgatgttggtggcccaggcggaggcggcgcttgagaacttaa

SEQ ID NO: 108243 - DNA, 80 bp, synthetic construct
  source 1..80: mol_type = other DNA
gagattgcaatgtgcctccaaagagcggggaaaaaggtcatccaactcaaccgcaagtcctatgacacagaatacccaaa

SEQ ID NO: 108244 - DNA, 80 bp, synthetic construct
  source 1..80: mol_type = other DNA
aagacacactccagtgaactcctggctaggcaacatcatcatgtttgcccccactctgtgggtacggatggtccttatga

SEQ ID NO: 108245 - DNA, 80 bp, synthetic construct
  source 1..80: mol_type = other DNA
acacctgggggaccaatgagaccgatgtcttcctgttagagagccagaggccccctgtgggtgcttggttcgggtgcgtg

SEQ ID NO: 108246 - DNA, 80 bp, synthetic construct
  source 1..80: mol_type = other DNA
tcatgtcgctgactgcgcgcaaccctgacgcgttccggccgcagccactcccccaccagcccttcgaaattcttctcgcg

SEQ ID NO: 108247 - DNA, 80 bp, synthetic construct
  source 1..80: mol_type = other DNA
gggaagagtcattctcagtgtgccgtcagccatcactagtgccagtgctgcccaacggagaggtagagtgggcaggaatc

SEQ ID NO: 108248 - DNA, 80 bp, synthetic construct
  source 1..80: mol_type = other DNA
gtttgatgagatggaggaatgctctacgacactgccctatatggccgaggccagagccattgctgagcagtttaaaacca

SEQ ID NO: 108249 - DNA, 80 bp, synthetic construct
  source 1..80: mol_type = other DNA
gctcgttaagcgtctggcaggagggaagtactttcaagctgcactcctcaaggttggaacttggactggcacttacattt

SEQ ID NO: 108250 - DNA, 80 bp, synthetic construct
  source 1..80: mol_type = other DNA
cggatgtgcgtgaggacgtggtctgttatggaggtgcctggagcttggaaggaaaatggggaggtgaagttgttcaggtc

SEQ ID NO: 108251 - DNA, 80 bp, synthetic construct
  source 1..80: mol_type = other DNA
cagctcgccatacttccctgttcattttccaccatgccggctttatcaactggcctcatccacctgcatcagaacatagt

SEQ ID NO: 108252 - DNA, 80 bp, synthetic construct
  source 1..80: mol_type = other DNA
tggtcagatgttctctttccaaccgcggcgccattggactacccaggattgcaactgttctatctacacagggcacatca

SEQ ID NO: 108253 - DNA, 80 bp, synthetic construct
  source 1..80: mol_type = other DNA
cgaccatagccaatccatgaccctgtatgtcacggagaaggcggacgggaccctcccagcctccaccctggtccgccttc

SEQ ID NO: 108254 - DNA, 80 bp, synthetic construct
  source 1..80: mol_type = other DNA
tcccgcccgacactgcaacttctcaaggagaatcaggaaaggggtcctccatcttgagctcagatatgacgcctccctct

SEQ ID NO: 108255 - DNA, 80 bp, synthetic construct
  source 1..80: mol_type = other DNA
ggcaccatcacgtagtagtaaatcttgtggtgcacggtccagtccgccccccggtgcggccggtcatccgcggcgtccgc

SEQ ID NO: 108256 - DNA, 80 bp, synthetic construct
  source 1..80: mol_type = other DNA
cagaaattaatcatgcagctgggagagtcctaaaaaagactaccccaatgaaaccatgttacggttcatatgcaaaaccc

SEQ ID NO: 108257 - DNA, 80 bp, synthetic construct
  source 1..80: mol_type = other DNA
caaccagactgccctgaactgcaatgactccttgcagaccggctttattgcggccctgttctacactcacaaattcaact

SEQ ID NO: 108258 - DNA, 80 bp, synthetic construct
  source 1..80: mol_type = other DNA
tctctcgtgcctcactacacctgcctcggcagtccattataggaacatctctggtatttaccatctcaccaatgactgcc

SEQ ID NO: 108259 - DNA, 80 bp, synthetic construct
  source 1..80: mol_type = other DNA
ctgagggggaagtgcaggttgtatcaacagccactcagagtttcctggcgaccactatcaacggtgtcctatggactgtt

SEQ ID NO: 108260 - DNA, 80 bp, synthetic construct
  source 1..80: mol_type = other DNA
tgataatgcagttccttttatgccaaacataaaagcttatcctaaacctagcacagacacttcggctaaaccagaagata

SEQ ID NO: 108261 - DNA, 80 bp, synthetic construct
  source 1..80: mol_type = other DNA
cgtagagccttgctggcgcaagctagaaggcttttggcataagcatatgtggaactttgtcagcgggatccaatatctgg

SEQ ID NO: 108262 - DNA, 80 bp, synthetic construct
  source 1..80: mol_type = other DNA
tatgtaggagagagggagcacagactctcggccgcgtgcaatttcactcgcggggatcgttgcaacttagaggacagaga

SEQ ID NO: 108263 - DNA, 80 bp, synthetic construct
  source 1..80: mol_type = other DNA
cttacttgcacgtgggagtagggacggtgtcattctacttacaagcttgctttatccatctttaatctttgacatcacta

SEQ ID NO: 108264 - DNA, 80 bp, synthetic construct
  source 1..80: mol_type = other DNA
tgggccaacccggaaaccccaggacggcaaagtacgggacgggtcccccccggacctcaaactcgggccccagaaaggca

SEQ ID NO: 108265 - DNA, 80 bp, synthetic construct
  source 1..80: mol_type = other DNA
ccctcttgcttaatattttaggcgggtgggttgcgtcgcagctcgcgacgccgactgcttctactagctttgtggtaagc

SEQ ID NO: 108266 - DNA, 80 bp, synthetic construct
  source 1..80: mol_type = other DNA
catgctggatagttggatggctagggtgactgtgatccttctggcgctgagccttgggcctgtatacgccacgagatgca

SEQ ID NO: 108267 - DNA, 80 bp, synthetic construct
  source 1..80: mol_type = other DNA
caaatctgggagcagcatcggaaaggcctttaccactacactcagaggagctcaacgactcgcagctcttggagacactg

SEQ ID NO: 108268 - DNA, 80 bp, synthetic construct
  source 1..80: mol_type = other DNA
cgcgggttaaacgtacgttttaagccaaccgttggtcttaaccatgtcatagggtcagtctcggcaaacatggccgttcg

SEQ ID NO: 108269 - DNA, 80 bp, synthetic construct
  source 1..80: mol_type = other DNA
tcaaactcactccactgccctctgccgccaggctcgatctgtcgggctggttcgtagtgggcggcaacggtgtggacatt

SEQ ID NO: 108270 - DNA, 80 bp, synthetic construct
  source 1..80: mol_type = other DNA
cggtacgcaccaagaccaatctcactccattgccagccgccggccagttggatttatccagctggtttacggttggcgtc

SEQ ID NO: 108271 - DNA, 80 bp, synthetic construct
  source 1..80: mol_type = other DNA
tcgccacgttacatgccgccgcgtacacggggtcgtggccccccgcgctaacccggcagtcgcgatggcggtccagggcc

SEQ ID NO: 108272 - DNA, 80 bp, synthetic construct
  source 1..80: mol_type = other DNA
acgttatgggagaatggagccagttctgtatggaacgcgaccacctcgataggtctttgccacatcatgcgaggagggtg

SEQ ID NO: 108273 - DNA, 80 bp, synthetic construct
  source 1..80: mol_type = other DNA
ctccaccgccctcgggctcgtcctccacgggcgagtcggcgcgatgcgcggacggagcatgggaccgcgtggaggcgcgc

SEQ ID NO: 108274 - DNA, 80 bp, synthetic construct
  source 1..80: mol_type = other DNA
aacattatcatgtatgcgcccaccttatgggcaaggatgattctgatgacccatttcttctccatccttctagctcagga

SEQ ID NO: 108275 - DNA, 80 bp, synthetic construct
  source 1..80: mol_type = other DNA
cctggtccactacccataccggttgtggcacttcccgtgcactgtcaactataccatcttcaagatcaggatgtatattg

SEQ ID NO: 108276 - DNA, 80 bp, synthetic construct
  source 1..80: mol_type = other DNA
gcccggagacccggacttgactgcagactcgtggtccaccgtaagcgagtcggaggatgtcgtgtgttgctcaatgtcat

SEQ ID NO: 108277 - DNA, 80 bp, synthetic construct
  source 1..80: mol_type = other DNA
agcttggccgtttaccaacgtatatgacacagaaaacgagagatgccctggataacttggcagttttgcacacagcagaa

SEQ ID NO: 108278 - DNA, 80 bp, synthetic construct
  source 1..80: mol_type = other DNA
gggctgctgagatgctggtcgtgctgagtgaactcccagacttcttggccaagaaaggtggagaggcggtggatactatt

SEQ ID NO: 108279 - DNA, 80 bp, synthetic construct
  source 1..80: mol_type = other DNA
gagtggaaaatgtcagagtcgcttatggcaagtgtgattcagcgggtaggtcaagaaggtccagaagggccattgactta

SEQ ID NO: 108280 - DNA, 80 bp, synthetic construct
  source 1..80: mol_type = other DNA
tctctcccaaaccaagcagtcgggggaaaacttcgcgtatctgacggcctatcaggctacagtatgcgctcgggctaaag

SEQ ID NO: 108281 - DNA, 80 bp, synthetic construct
  source 1..80: mol_type = other DNA
aaccacagtgcaaaaacaaaatcaacaaataaccttcagccaacacaattgtatgttagaccttttactaatgttagttt

SEQ ID NO: 108282 - DNA, 80 bp, synthetic construct
  source 1..80: mol_type = other DNA
gtcccagccagacgatcatgctagtgaataccaatggcagttggcacgtaaaccggactgcccttaattgcaatgacagc

SEQ ID NO: 108283 - DNA, 80 bp, synthetic construct
  source 1..80: mol_type = other DNA
atgcggtgtccagagggtcaagtaagatcagatggattgttgaaagagggatgataaaaccaaaaggaaaggtcgtagat

SEQ ID NO: 108284 - DNA, 80 bp, synthetic construct
  source 1..80: mol_type = other DNA
gcgcgtgtcggcgtgcgtcaggcggggcacggccacggacggctgcgtcgccgtggtcaggtccacgagccaggcctcga

SEQ ID NO: 108285 - DNA, 80 bp, synthetic construct
  source 1..80: mol_type = other DNA
gcactacaagcggtggctggcgcggggggtgtggtggatacagtacttcatcgctcgcaccgaggcacttctgcacatgt

SEQ ID NO: 108286 - DNA, 80 bp, synthetic construct
  source 1..80: mol_type = other DNA
cgtggtgagtggcctcgccggcgctgcgataggtggtataggcctgggcagaattttacttgatatcttggcagggtacg

SEQ ID NO: 108287 - DNA, 80 bp, synthetic construct
  source 1..80: mol_type = other DNA
cccaatagtagcattgtgtatgaggcggacgatgtcatcatgcaccttccggggtgcgttccttgtgtcaagtctggcaa

SEQ ID NO: 108288 - DNA, 80 bp, synthetic construct
  source 1..80: mol_type = other DNA
atgtactcaaggaggtgaaggctcgggcgtcaacggtgaaagcgaggcttctcagtgttgaggaagcctgtgacctcacg

SEQ ID NO: 108289 - DNA, 80 bp, synthetic construct
  source 1..80: mol_type = other DNA
gttactattatggttatgacagatacagtagtcaatatagaaattacttggttcgtgttacccagttcaaaaccacaaaa

SEQ ID NO: 108290 - DNA, 80 bp, synthetic construct
  source 1..80: mol_type = other DNA
ccatccttatagaacctggaactatcacggaagttatgaagttcaaccaacaggctcggccagctcattggtgaatggag

SEQ ID NO: 108291 - DNA, 80 bp, synthetic construct
  source 1..80: mol_type = other DNA
cttcggcaacaccctcacatgctacattaaggctaagtccgccgcgacagctgcggggcttgaaaacctcgacatgctag

SEQ ID NO: 108292 - DNA, 80 bp, synthetic construct
  source 1..80: mol_type = other DNA
gcatcactattcatgccttcaatattacttctggtcagtataaagctgaaagttatactgacagttatctaggactttgg

SEQ ID NO: 108293 - DNA, 80 bp, synthetic construct
  source 1..80: mol_type = other DNA
atgccacaatttacaatttctcgataccaagggaatcttaagttatacagtgaaccataaatcatcattttaaaccaatt

SEQ ID NO: 108294 - DNA, 80 bp, synthetic construct
  source 1..80: mol_type = other DNA
tacatcactggggtaacgcaggataacatcaagtgcccctgccaggttccggcccccgagttcttcacggaggtggatgg

SEQ ID NO: 108295 - DNA, 80 bp, synthetic construct
  source 1..80: mol_type = other DNA
ggccaaccatcaccatggaatttggggtccgtcatgtggtctgcacggccggctgcgtccccgagggcgtgacgtttgcc

SEQ ID NO: 108296 - DNA, 80 bp, synthetic construct
  source 1..80: mol_type = other DNA
agcgagacagcgagagagagagagagaaggaagagggaaggagcgcggcgggacgggggaagacgaggagaagggaagcg

SEQ ID NO: 108297 - DNA, 80 bp, synthetic construct
  source 1..80: mol_type = other DNA
acttgcttccgggctaggccacgcctctgcggcaaccgccggccgtgcgtcttgacgtcaactgcattaccgcttgttaa

SEQ ID NO: 108298 - DNA, 80 bp, synthetic construct
  source 1..80: mol_type = other DNA
ccaaagtgctgtctagccgcacgttttaacatgtccattcttatttcgcccgacaacaataccggctggggactttcctc

SEQ ID NO: 108299 - DNA, 80 bp, synthetic construct
  source 1..80: mol_type = other DNA
gaaaagaatagaaaaaataaagcaagagcatgaaacatcatggcactacgaccaagaccacccatacaaaacgtgggcat

SEQ ID NO: 108300 - DNA, 80 bp, synthetic construct
  source 1..80: mol_type = other DNA
cccggtcgctcgctaccggtgcgccaccaccagaggccatatccgacaccccagccccgacggcagccgacagcccggtc

SEQ ID NO: 108301 - DNA, 80 bp, synthetic construct
  source 1..80: mol_type = other DNA
acgggattaattatgcaacagggaatcttcctggttgctccttttctatcttccttctggcacttctctcgtgcctgacc

SEQ ID NO: 108302 - DNA, 80 bp, synthetic construct
  source 1..80: mol_type = other DNA
cgtcgatgacgatcacgttgctgcgggtaaaggccggcagcgccccgtgggtggccggtgccaaccgcgtcagggcgccc

SEQ ID NO: 108303 - DNA, 80 bp, synthetic construct
  source 1..80: mol_type = other DNA
ctgtagtgggggtggaattactgccagtacatgccaagagtttttacaacgagcaggccgtgtattctcagcttattcgc

SEQ ID NO: 108304 - DNA, 80 bp, synthetic construct
  source 1..80: mol_type = other DNA
tttcccgatgacgccgagccccgcaaccgactcagactcaggccaccctactaccagcaagagctcggaccaagatgacg

SEQ ID NO: 108305 - DNA, 80 bp, synthetic construct
  source 1..80: mol_type = other DNA
acactcccggtacaggtcggcgttggtcggtagcgccgaaaacagatcctcgttccaggtatcgagcatggtacatagcg

SEQ ID NO: 108306 - DNA, 80 bp, synthetic construct
  source 1..80: mol_type = other DNA
gtaagcccctcagaacccgtcctcggaaggaggaccccccacatgtaagcccctcagaacccgtcctcggaaggaggacc

SEQ ID NO: 108307 - DNA, 80 bp, synthetic construct
  source 1..80: mol_type = other DNA
tccgaattccagcatagtgtacgagacggaccatcagatcctacatttgccagggtgtataccttgtgtgaaaagcggga

SEQ ID NO: 108308 - DNA, 80 bp, synthetic construct
  source 1..80: mol_type = other DNA
ctctggtgtagttgttcagcagcacctcggtaccctcctcccagctctggtactccagtcctcggcgggcggcgaacttc

SEQ ID NO: 108309 - DNA, 80 bp, synthetic construct
  source 1..80: mol_type = other DNA
cactcgaccaccgctggggtcatggttcggctgcacgtggatgaactcttctggctacaccaagacttgcggcgcaccac

SEQ ID NO: 108310 - DNA, 80 bp, synthetic construct
  source 1..80: mol_type = other DNA
caggtgatctctaataaggctagtaaaggaaaaatcctctaaatagttgactagaacaccaggcaccacaacgtggtagc

SEQ ID NO: 108311 - DNA, 80 bp, synthetic construct
  source 1..80: mol_type = other DNA
tccagtgcggcgtcggggcgataacaggcgaagtttactatctccccggccaatttcatatctaaagggatcctcgggag

SEQ ID NO: 108312 - DNA, 80 bp, synthetic construct
  source 1..80: mol_type = other DNA
tttggcaatctgctcagctgtgcccattgactgggtcccgcagggacgaaccacatggagcatccacgcgagtggagcgt

SEQ ID NO: 108313 - DNA, 80 bp, synthetic construct
  source 1..80: mol_type = other DNA
gacggggatacccatctggtcggcgaaagcgcggccaagaccgccggcggaatcgccaagattttcgatctggaggccaa

SEQ ID NO: 108314 - DNA, 80 bp, synthetic construct
  source 1..80: mol_type = other DNA
cggcatcctcttcagggcgataaaaaaccacttccttccccgcgaaactcttcaatgcctgccgtatatccttactggct

SEQ ID NO: 108315 - DNA, 80 bp, synthetic construct
  source 1..80: mol_type = other DNA
cccatcccaatatagaggaggtagccctcgggcaggagggtgagatccccttctatcaagaggcgaattccccttctaac

SEQ ID NO: 108316 - DNA, 80 bp, synthetic construct
  source 1..80: mol_type = other DNA
aaaaatggagatctaaaaaagttgtgtgatgggaaaactgggcctaaaaacctatgtaatcatcagaaccttacactgca

SEQ ID NO: 108317 - DNA, 80 bp, synthetic construct
  source 1..80: mol_type = other DNA
gggtggggccctattacttacgccaacattagtggcccctctcaggagaagccctattgctggcactatgcccctagacc

SEQ ID NO: 108318 - DNA, 80 bp, synthetic construct
  source 1..80: mol_type = other DNA
gacgggcatgactactgacaatctgaaatgcccgtgtcaggtcccggcaccagaattcttcactgagctagacggggtgc

SEQ ID NO: 108319 - DNA, 80 bp, synthetic construct
  source 1..80: mol_type = other DNA
aacgacagccttaacaccggctttctcgcaggcctgttctatacccacagattcaacagctccgggtgccctgagagact

SEQ ID NO: 108320 - DNA, 80 bp, synthetic construct
  source 1..80: mol_type = other DNA
cgctcgtccctgacagacaagtactgtaccaacaatatgatgagatggaagaatgttcccagtctgctccttacatcgag

SEQ ID NO: 108321 - DNA, 80 bp, synthetic construct
  source 1..80: mol_type = other DNA
aacaaaccaggggcttggtcagtgccatcattacgagcctcaccggcagagacaagaatgagaactgcggcgaggtccag

SEQ ID NO: 108322 - DNA, 80 bp, synthetic construct
  source 1..80: mol_type = other DNA
agcacaaaggttccggccgcttatgtggcacaaggatataatgtcctcgtgttgaatccatcggtggcggccacactagg

SEQ ID NO: 108323 - DNA, 80 bp, synthetic construct
  source 1..80: mol_type = other DNA
tggatgtggacgcctaccaggcaagcttgaaagatgacaccgaacagggcgcgggtggtgcaggcggcggcaacaacagt

SEQ ID NO: 108324 - DNA, 80 bp, synthetic construct
  source 1..80: mol_type = other DNA
ggttgcggtggagagtttataggaagtggatataaccgcaggcgacgggactaaccaatccccggggtggcaacggacag

SEQ ID NO: 108325 - DNA, 80 bp, synthetic construct
  source 1..80: mol_type = other DNA
tcctctggggtcgacacacagtccagcactacttccaaggtgcccccttctccgggagtggagtccgactcagagtcatg

SEQ ID NO: 108326 - DNA, 80 bp, synthetic construct
  source 1..80: mol_type = other DNA
atggctgtggcctatttgggaaagggagcattgtggcatgcgccaaattcacttgtgccaaatccatgagtttgtttgag

SEQ ID NO: 108327 - DNA, 80 bp, synthetic construct
  source 1..80: mol_type = other DNA
acctggctcaaagcaaaacttgttccagcgctgccaggcatcccctttttctcgtgccagcgaggattcaggggatattg

SEQ ID NO: 108328 - DNA, 80 bp, synthetic construct
  source 1..80: mol_type = other DNA
cgcgacttcgtggaggccgtagggagccacgtaaagaactttttgctgatcgatacgggcgtgtacgcccacggccacag

SEQ ID NO: 108329 - DNA, 80 bp, synthetic construct
  source 1..80: mol_type = other DNA
cgcataagatgtactgtgtctctcaaaaaaatttgtgtttttatctgcaatcataaatgcaagtggaaagtccgaatcgg

SEQ ID NO: 108330 - DNA, 80 bp, synthetic construct
  source 1..80: mol_type = other DNA
ccagccaactatcagctccttcacttaaagcaacctgcactgtacacgctgatgatccagacgctgaattaatcagcgct

SEQ ID NO: 108331 - DNA, 80 bp, synthetic construct
  source 1..80: mol_type = other DNA
ggcatacttggtgctatagtcgtcagcttgaccggtcgggacaagaatgaggcccagggtgaggtccaggtcctgtcgac

SEQ ID NO: 108332 - DNA, 80 bp, synthetic construct
  source 1..80: mol_type = other DNA
ggatatactcaagttaatgttactagagatggtagtataaatcttaaaggaccatacactaataccacatggtccagatt

SEQ ID NO: 108333 - DNA, 80 bp, synthetic construct
  source 1..80: mol_type = other DNA
gcagctgaaatggaggaagctctcagaggacttccaataagataccaaaccccagccatcagagctgagcacactgggcg

SEQ ID NO: 108334 - DNA, 80 bp, synthetic construct
  source 1..80: mol_type = other DNA
cactttcacgaaattccacacacgagatgtactgggtatccaatgcttccgggaacatagtgtcatcagtgaacatgatt

SEQ ID NO: 108335 - DNA, 80 bp, synthetic construct
  source 1..80: mol_type = other DNA
ttcagatggtaaaataattctagatgtcgactacccatttaatgcaaccaccaacttgtctttaagaagaggtttggggc

SEQ ID NO: 108336 - DNA, 80 bp, synthetic construct
  source 1..80: mol_type = other DNA
tagtacggcccatgggagggaacatttccacgtgttccaatacaggtggtgttccttaatagggactgtgcaataaaata

SEQ ID NO: 108337 - DNA, 80 bp, synthetic construct
  source 1..80: mol_type = other DNA
ggtgatagactgcaatgtgtgcgtaacccagactgttgacttcagccttgaccccaccttcaccatcgagaccaccacac

SEQ ID NO: 108338 - DNA, 80 bp, synthetic construct
  source 1..80: mol_type = other DNA
tattgacgctgggaaagaccagagatcctgctgtctcctcagcatcattccaggcacagaacgccagaaaatggaatggt

SEQ ID NO: 108339 - DNA, 80 bp, synthetic construct
  source 1..80: mol_type = other DNA
catggggcaggctccaaaaccctggcgggtcccaaggggcctgtctgtcaaatgtacaccaatgtagaccaggacctggt

SEQ ID NO: 108340 - DNA, 80 bp, synthetic construct
  source 1..80: mol_type = other DNA
tggccgctcttgttactaatactagccttaccccggagggcatatgcctttgattcagagcaggcggcatcagcagggct

SEQ ID NO: 108341 - DNA, 80 bp, synthetic construct
  source 1..80: mol_type = other DNA
tcggtcaccgtgccacatcccaatatcgaggaggtggccctgtccaacactggagagatccccttctatggcaaagccat

SEQ ID NO: 108342 - DNA, 80 bp, synthetic construct
  source 1..80: mol_type = other DNA
accgtgaacgggctcaccggcctctttacacgagggccgcagcagaatttgcagcttattaactccaatggcagctggca

SEQ ID NO: 108343 - DNA, 80 bp, synthetic construct
  source 1..80: mol_type = other DNA
ccctggggcttgtggcgtgtcggagctcgacgcacagcgggccgcgcgttgggcccggtacagctctcgcgaattgacaa

SEQ ID NO: 108344 - DNA, 80 bp, synthetic construct
  source 1..80: mol_type = other DNA
gtgcatctctcaaagtagtgtttgtaacggaatttgttgtagatgcgcgacccccgccccagcgacgtgtcgcatgccga

SEQ ID NO: 108345 - DNA, 80 bp, synthetic construct
  source 1..80: mol_type = other DNA
acctaagacttacccctgggctttggacttctgcctacctgcgcaaatttgaaccccaagattaccacgcccacagtatc

SEQ ID NO: 108346 - DNA, 80 bp, synthetic construct
  source 1..80: mol_type = other DNA
acttccacgtcctactttaggaggactgattggcccgggtgatatcaaatatgtcgatgtaaatgatgatggcgtctaag

SEQ ID NO: 108347 - DNA, 80 bp, synthetic construct
  source 1..80: mol_type = other DNA
acagatggggtgccaatgagacggatgtactgctcctcaacaactctaggccgccaatggggaattggtttgggtgtacg

SEQ ID NO: 108348 - DNA, 80 bp, synthetic construct
  source 1..80: mol_type = other DNA
gcaacagggaacctccccggttgctctttttctatctttcttctagctcttttatcctgcatctcaattccagtctctgc

SEQ ID NO: 108349 - DNA, 80 bp, synthetic construct
  source 1..80: mol_type = other DNA
gcagtcaacgtcgtggccggactggtaggtggaagccaggggtgtatagatacgtctcacagggagaacggccgtcggga

SEQ ID NO: 108350 - DNA, 80 bp, synthetic construct
  source 1..80: mol_type = other DNA
tggcttccagtactcccctgcccaacgggtggagtatctcttgaaagcatgggcggaaaagaaggaccccatgggttttt

SEQ ID NO: 108351 - DNA, 80 bp, synthetic construct
  source 1..80: mol_type = other DNA
actggccagggctccagggtcgctgacttcgttaacgtcgatgttttcaacattgctgaggttaaatggagtaattttac

SEQ ID NO: 108352 - DNA, 80 bp, synthetic construct
  source 1..80: mol_type = other DNA
tgccgacgtcatcccggtgcgccggcggggcgacagcaggtggagcttgctctcccccaggcctctctccaccttgaaag

SEQ ID NO: 108353 - DNA, 80 bp, synthetic construct
  source 1..80: mol_type = other DNA
ctggcactatgcccctcggccgtgtgatgttgtcccggcacgggaggtgtgcgggccagtctactgcttcacacctagtc

SEQ ID NO: 108354 - DNA, 80 bp, synthetic construct
  source 1..80: mol_type = other DNA
ggccatgcgcaggcgcctgagtggcgggttcctgcccgcgctcatccccataatcgccgcggccatcggcacgatcccgg

SEQ ID NO: 108355 - DNA, 80 bp, synthetic construct
  source 1..80: mol_type = other DNA
ccccgtgccgtgtcccccgtgtccctccctcaccccggccccccgcccgctgctttttgttcggaaggtgtggagaaagg

SEQ ID NO: 108356 - DNA, 80 bp, synthetic construct
  source 1..80: mol_type = other DNA
gaggtgtggactagacacggagagaaaagagtgctcaaaccgaggtggatggacgccagagtttgttcagatcatgcggc

SEQ ID NO: 108357 - DNA, 80 bp, synthetic construct
  source 1..80: mol_type = other DNA
aaaatgtgttctaaagactgtcgagggattgaatataatagacaagaaatttggattacaagatcctccaaatgtgttgc

SEQ ID NO: 108358 - DNA, 80 bp, synthetic construct
  source 1..80: mol_type = other DNA
tcgtgatgaaagatggcagaagcctcgtcgtgccctgccggggacaggatgaattaataggcagagcccggatttcacca

SEQ ID NO: 108359 - DNA, 80 bp, synthetic construct
  source 1..80: mol_type = other DNA
gcttcaggaagcaccctgatgctagttacatcagatgtggggccgggccatggttgacccccaaatgcctggttgattac

SEQ ID NO: 108360 - DNA, 80 bp, synthetic construct
  source 1..80: mol_type = other DNA
cgacatgagtccacttctgttctcgacgaccgagctcgcaattctcccatgctcgtttaccactatgccggccttgtcaa

SEQ ID NO: 108361 - DNA, 80 bp, synthetic construct
  source 1..80: mol_type = other DNA
ccagttgctcttagaggtcatcacggaggcacattggggcgtcttgggggcgctgctctacttcagcatggtggcgaact

SEQ ID NO: 108362 - DNA, 80 bp, synthetic construct
  source 1..80: mol_type = other DNA
aatacatcgccacgtgcatgcaagctgaccttgagatcatgacgagcacatgggtgcttgctgggggagtgttagcagcc

SEQ ID NO: 108363 - DNA, 80 bp, synthetic construct
  source 1..80: mol_type = other DNA
tgttgcccaccagcttcggtaatacaatcacctgttacatcaaggctaaggcggcttcccgagccgcgggccttcaagac

SEQ ID NO: 108364 - DNA, 80 bp, synthetic construct
  source 1..80: mol_type = other DNA
atccccctggcgcttcatcgtggggtgaggtagcgcggccggaatcatgtgtgccgcgcccgccacgagcggtgcctgtt

SEQ ID NO: 108365 - DNA, 80 bp, synthetic construct
  source 1..80: mol_type = other DNA
agccgcctggacgcttgatctgcattacatacgccagtgcgtcaaccagctctttcggatcctgcgtgccgccccgaacc

SEQ ID NO: 108366 - DNA, 80 bp, synthetic construct
  source 1..80: mol_type = other DNA
tggacgccaatttgttgtggcggcaagagatgggcagcaacatcacacgggtagagtctgaaacaaaggttgtgattctt

SEQ ID NO: 108367 - DNA, 80 bp, synthetic construct
  source 1..80: mol_type = other DNA
ggtcaaaaacactggctggtccaaagggccccgtatgccagatgtataccaatgttgaccaagacctggtaggttggccc

SEQ ID NO: 108368 - DNA, 80 bp, synthetic construct
  source 1..80: mol_type = other DNA
cacacaggttgttgactttagccttgatccaacctttaccatagaaaccaccactgtgccccaagacgctgtttcccgga

SEQ ID NO: 108369 - DNA, 80 bp, synthetic construct
  source 1..80: mol_type = other DNA
cccacccaccgaccaacgacggcgtttggccaataccctccttttttctttttctcttcccccccaaaaaaacaataaac

SEQ ID NO: 108370 - DNA, 80 bp, synthetic construct
  source 1..80: mol_type = other DNA
gttcggtggaatgtcctggatcacacagggactacttggagctcttctcctgtggatggggttgcaggcccgcgacagga

SEQ ID NO: 108371 - DNA, 80 bp, synthetic construct
  source 1..80: mol_type = other DNA
ggcacgaaaaacaccatggctcccgcccaccgtacgtccgggcgatcgcgggtgtaatacgtcaggtatggatacatgtc

SEQ ID NO: 108372 - DNA, 80 bp, synthetic construct
  source 1..80: mol_type = other DNA
cgtgttcctgcagtacccctacacgaaaattacccgcctgctctgcgagctgtcggtccagcggcaaaacctggttcagt

SEQ ID NO: 108373 - DNA, 80 bp, synthetic construct
  source 1..80: mol_type = other DNA
ccgcgaccgctggttccgccgcactggcgtcgccagagagaagacccggacgactccgcagacgatagtagcgtgttgga

SEQ ID NO: 108374 - DNA, 80 bp, synthetic construct
  source 1..80: mol_type = other DNA
ccggtgttcacagacaactccacccctccagcagtgccccagagcttccaagtggcccacctgcatgctcccaccggtag

SEQ ID NO: 108375 - DNA, 80 bp, synthetic construct
  source 1..80: mol_type = other DNA
gatcgacgacgcctggcggcccctgttggagccggagctcgcgaaccccctaaccgcgcgcctcctcgcggagtatgacc

SEQ ID NO: 108376 - DNA, 80 bp, synthetic construct
  source 1..80: mol_type = other DNA
tgtacttgaggtcggtggtgtgccagccccggctcgtgcgggtcgcggcgttggccggtttcagctccatgtcggtctcg

SEQ ID NO: 108377 - DNA, 80 bp, synthetic construct
  source 1..80: mol_type = other DNA
gtgacagccatactctcatctctgactgtgacatccctcctaagacgactacacaagtggatcaatgaagactgccccac

SEQ ID NO: 108378 - DNA, 80 bp, synthetic construct
  source 1..80: mol_type = other DNA
agggctggggcccccttagctataccaacggcaccggaggcaatcaccgcccgtactgctggcactacgccccaaagccg

SEQ ID NO: 108379 - DNA, 80 bp, synthetic construct
  source 1..80: mol_type = other DNA
tgaccggcgaagtgcaggtgctttctacggctacccagaccttcctaggtacaacaatagggggggttatgtggactgtt

SEQ ID NO: 108380 - DNA, 80 bp, synthetic construct
  source 1..80: mol_type = other DNA
atgtggcctctcctcttgctggtattggctctgccacgcagagcatacgccagtaacggcgaggaggctgcgtctttagg

SEQ ID NO: 108381 - DNA, 80 bp, synthetic construct
  source 1..80: mol_type = other DNA
ccgagcagcgcaccctgcaactgcgcgtccgtcagcagcaggagcgggccgccaaggagctcctcgatgccatcaacatc

SEQ ID NO: 108382 - DNA, 80 bp, synthetic construct
  source 1..80: mol_type = other DNA
cgggtgaaatacaggtcatgtccacggctacacagtccttcctgggcactagcatcaacggcgtgctgtggacggtctac

SEQ ID NO: 108383 - DNA, 80 bp, synthetic construct
  source 1..80: mol_type = other DNA
gagtgccatgtaataaaattatgtcagctgctgagtgttttattgtttcttgggtgggacttgggatatataagtaggag

SEQ ID NO: 108384 - DNA, 80 bp, synthetic construct
  source 1..80: mol_type = other DNA
acaccaggtgttttgattcaaccgtcaccgagcgggatatccggactgagaacgacatctatcagtcttgccagctggat

SEQ ID NO: 108385 - DNA, 80 bp, synthetic construct
  source 1..80: mol_type = other DNA
gtctcccacggctggtttgttggtgtcgtacgccctacgcatccccgagttgatccttgacatcttcgtcagtggtcatt

SEQ ID NO: 108386 - DNA, 80 bp, synthetic construct
  source 1..80: mol_type = other DNA
ctggagtgaaggctaggctcctctccacagaggaagcatgtgacctcacccctccgcattcggctcgctctaagttcgga

SEQ ID NO: 108387 - DNA, 80 bp, synthetic construct
  source 1..80: mol_type = other DNA
agggttggggccctttgacatatacatccaggaattccactaagggcaagccctactgttggcactatgtgcctaagcct

SEQ ID NO: 108388 - DNA, 80 bp, synthetic construct
  source 1..80: mol_type = other DNA
taaagtcaggatgttcgtgggaggcattgagcatcggtttgacgccgcatgtaactggaccagaggcgagcggtgtgatc

SEQ ID NO: 108389 - DNA, 80 bp, synthetic construct
  source 1..80: mol_type = other DNA
tgttttccattgtggggaggtgcggttatgtcgcgttgaccgtctaggtaaggatccacgcgggtgcacgtctcaaccta

SEQ ID NO: 108390 - DNA, 80 bp, synthetic construct
  source 1..80: mol_type = other DNA
atggaacattccaagttgctacactgaaaaaagcgacctgtccgaaacctggttgtatgccatcatctcggtctttgtat

SEQ ID NO: 108391 - DNA, 80 bp, synthetic construct
  source 1..80: mol_type = other DNA
cccgaccgccgcgtcaacgttcatcagcgaagggtggcacacggtcccgatcgcgtgttccagagacaggcgcagcacct

SEQ ID NO: 108392 - DNA, 80 bp, synthetic construct
  source 1..80: mol_type = other DNA
tccggacgggtcgcgcagtaccatcgtgtttgcctccagccacaacacaaacgtaagtcctcttttctttcgcatggctc

SEQ ID NO: 108393 - DNA, 80 bp, synthetic construct
  source 1..80: mol_type = other DNA
ggcgtacaaagtggcatcagccggaatcacctacgcagatcgagagtggtgcttcacaggtgagagaaataaccagatac

SEQ ID NO: 108394 - DNA, 80 bp, synthetic construct
  source 1..80: mol_type = other DNA
catcacaaaataccttctggccctcataggacctctttgcctgctccaagcatcactgctgcgcgtcccttacttcgtga

SEQ ID NO: 108395 - DNA, 80 bp, synthetic construct
  source 1..80: mol_type = other DNA
aaggcttacctgtttctgcccgcaggggtagggaggtccttttagggccagccgacagccttacgggcaagggttggaga

SEQ ID NO: 108396 - DNA, 80 bp, synthetic construct
  source 1..80: mol_type = other DNA
gccacacctccgggtacggtgacgactccccacagtaacatagaggaggtggctcttggtcatgagggcgagatcccctt

SEQ ID NO: 108397 - DNA, 80 bp, synthetic construct
  source 1..80: mol_type = other DNA
tgctgttccgtgagattctccacgggcagctggggtataccgagggccaggtggtgtacaacgtcgtccggtccagcgag

SEQ ID NO: 108398 - DNA, 80 bp, synthetic construct
  source 1..80: mol_type = other DNA
gaaggggatcccgcttgattacatcaaaggtggaaggcacttgatcttctgtcattcaaaaaagaaatgcgacgagctgg

SEQ ID NO: 108399 - DNA, 80 bp, synthetic construct
  source 1..80: mol_type = other DNA
ttgatttttacacacggtcttatgatcagtttataaccgaaagtgtaacgttaagtgaacttagagcagacatcagacag

SEQ ID NO: 108400 - DNA, 80 bp, synthetic construct
  source 1..80: mol_type = other DNA
ttgatttattgctgtttggatgttctttgcccaggtggccccgtccaaggacgttaaaagaagtcaggccactacaagtg

SEQ ID NO: 108401 - DNA, 80 bp, synthetic construct
  source 1..80: mol_type = other DNA
ccttgacgctcgacacatgttcaatttaaacattccagatgttttaaattctttgtctgtggcgtggatgatactcagag

SEQ ID NO: 108402 - DNA, 80 bp, synthetic construct
  source 1..80: mol_type = other DNA
gtcgtcgcggaggcccacgggcgccggccgcgtgctttcggccgggacacccggtcgtgcttcgcgagccgtgactgccg

SEQ ID NO: 108403 - DNA, 80 bp, synthetic construct
  source 1..80: mol_type = other DNA
gaactcctcagttccctcaccataaccagtctgctcaggaggctccatcagtggatcagcgaagactaccccgtcccttg

SEQ ID NO: 108404 - DNA, 80 bp, synthetic construct
  source 1..80: mol_type = other DNA
acccgcaccactacagagagtggaaagctgataacggactggtgctgtaggagctgcaccttacctccattgcgctacca

SEQ ID NO: 108405 - DNA, 80 bp, synthetic construct
  source 1..80: mol_type = other DNA
ggtgttgtcggtgtgggcgtgtatgacctgttggcgcaggcgtgcctggcgtgcggttaaaagcagggcctcgggtaagg

SEQ ID NO: 108406 - DNA, 80 bp, synthetic construct
  source 1..80: mol_type = other DNA
cgcaggctcgcgagggacgcgaccagcgcgcgcttggcgtcgtgatacatgctgcagtactgactcaccgcgtcccccat

SEQ ID NO: 108407 - DNA, 80 bp, synthetic construct
  source 1..80: mol_type = other DNA
gaggcaaaggacatcatccttcacacgcctgggtgtgtgccctgcatacgggaaggcaatatctcccgttgctgggtacc

SEQ ID NO: 108408 - DNA, 80 bp, synthetic construct
  source 1..80: mol_type = other DNA
gggatgttcgacagcgtagtgctctgtgagtgctatgatgccggggcagcttggtacgagcttacgcctgctgagactac

SEQ ID NO: 108409 - DNA, 80 bp, synthetic construct
  source 1..80: mol_type = other DNA
cctataactactacaaatggtagtttgggtgttaacatggaaaacccactttacaacagcaatggcaaactggggctcag

SEQ ID NO: 108410 - DNA, 80 bp, synthetic construct
  source 1..80: mol_type = other DNA
accaaacgcaagtttaaagaagagctgctgcaggccattgcgcctgaaatatatggcccatcggaagctaacaataccaa

SEQ ID NO: 108411 - DNA, 80 bp, synthetic construct
  source 1..80: mol_type = other DNA
gctgtgctctacccccacagggaccgcctcctattccacccccgaggaggaaaaagctcgtgcagcttgatgagtcggtc

SEQ ID NO: 108412 - DNA, 80 bp, synthetic construct
  source 1..80: mol_type = other DNA
ggctttggcactacccctgcactgtcaacttctccatctttaaggtccggatgtttgtgggaggcgtggagcataggctc

SEQ ID NO: 108413 - DNA, 80 bp, synthetic construct
  source 1..80: mol_type = other DNA
atttcaacaggtgcgcctatcacatactccaccaatgggaaattcctagcggatggaggatgttcaggggtggcgtatga

SEQ ID NO: 108414 - DNA, 80 bp, synthetic construct
  source 1..80: mol_type = other DNA
gccgaactggaagatggagcctatagaatcaaacagaaagggattcttggatactcccagatcggagctggagtttacaa

SEQ ID NO: 108415 - DNA, 80 bp, synthetic construct
  source 1..80: mol_type = other DNA
ccccgtagagagcctagagacaaccatgaggtccccggtgtactcagacaactcctccccaccagcagtaccccagagct

SEQ ID NO: 108416 - DNA, 80 bp, synthetic construct
  source 1..80: mol_type = other DNA
gctgtctgtaaatactagttttaatggagactattttggctttaaaaatgataatagcggtatgaaacactataaagtta

SEQ ID NO: 108417 - DNA, 80 bp, synthetic construct
  source 1..80: mol_type = other DNA
ggccttggcggcctgcaaggccgcagggattgtggctcccaccatgttggtgtgcggcgacgacctagtagtcatctcag

SEQ ID NO: 108418 - DNA, 80 bp, synthetic construct
  source 1..80: mol_type = other DNA
gatgagctggccaaaaacctgtctgctctcggactcaatgcagtggcctattacagggggctggacgtgtcagtaatacc

SEQ ID NO: 108419 - DNA, 80 bp, synthetic construct
  source 1..80: mol_type = other DNA
catgccacaactgcccgggatcccattcgtatcctgccaacgcgggtaccgtggggtctggcaaaacgagggcatcatga

SEQ ID NO: 108420 - DNA, 80 bp, synthetic construct
  source 1..80: mol_type = other DNA
gcagggtgcctcccgcccgacactgcaaggagcctggggatgaacagtggcaatgcaggatccagcgctcgtacccgctc

SEQ ID NO: 108421 - DNA, 80 bp, synthetic construct
  source 1..80: mol_type = other DNA
tggacgagggggcccaaccacgaagatcctaatgaaacaatgataccccactctcaaagacccatacagcttatggcact

SEQ ID NO: 108422 - DNA, 80 bp, synthetic construct
  source 1..80: mol_type = other DNA
gtgggtctaacttaacattacttgggccagatggaaaggtcacttggtatgatgatgatttaaaaagaccatgcgagcct

SEQ ID NO: 108423 - DNA, 80 bp, synthetic construct
  source 1..80: mol_type = other DNA
ctcctccttcttacgaaagcgtgatgggatcagcggattcgccggcaacgctggaggcgctctacgttcctccccgctac

SEQ ID NO: 108424 - DNA, 80 bp, synthetic construct
  source 1..80: mol_type = other DNA
gctcatgacggcgctgggcagagatattactacctcacacgagatccattgaccccattgtctcgggctgcctgggaaac

SEQ ID NO: 108425 - DNA, 80 bp, synthetic construct
  source 1..80: mol_type = other DNA
ggtgatggtgtctaggaaaaaggcggaaggggctgatgagaatgataggagcaaggatattctagagtatcagtggtttg

SEQ ID NO: 108426 - DNA, 80 bp, synthetic construct
  source 1..80: mol_type = other DNA
cattttatggaaagggcatccccctcgagtacatcaaggggggaagacatctcatattttgtcactcaaagaagaagtgt

SEQ ID NO: 108427 - DNA, 80 bp, synthetic construct
  source 1..80: mol_type = other DNA
gcaacgagtgatgaggttcgcaagaacctgatggacatgttcagggatcgccaggcgttttctgagcatacctggaaaat

SEQ ID NO: 108428 - DNA, 80 bp, synthetic construct
  source 1..80: mol_type = other DNA
atgctcctcctactgggtcaggctgaagcggctctagagaagttggtcattttacatgcagccagtgctgctagctctaa

SEQ ID NO: 108429 - DNA, 80 bp, synthetic construct
  source 1..80: mol_type = other DNA
gcaaatcccaccaaactggcacataccgtcgatccaggacgccgcgacgccttaccatcccccggccaccccgaacaaca

SEQ ID NO: 108430 - DNA, 80 bp, synthetic construct
  source 1..80: mol_type = other DNA
gtttccgtggcccacgatggagatggcagaagatactactacctcactcgtgacccaaccacacctctcgccagggcagc

SEQ ID NO: 108431 - DNA, 80 bp, synthetic construct
  source 1..80: mol_type = other DNA
caggagagggagcggtgcagtggatgaacaggctcatagcatttgcatctcggggcaaccatgtatcaccaacacattat

SEQ ID NO: 108432 - DNA, 80 bp, synthetic construct
  source 1..80: mol_type = other DNA
gctggcctgctccgcccggggccaaatcatacacgccatgcacttgtggtgccagtgaccttttcctcgtcacacggaat

SEQ ID NO: 108433 - DNA, 80 bp, synthetic construct
  source 1..80: mol_type = other DNA
cagcggctggcctccctcctgacgtacaccgggcctataaaagcgcccgacggccccgccgccccacatacgcaggacac

SEQ ID NO: 108434 - DNA, 80 bp, synthetic construct
  source 1..80: mol_type = other DNA
ctcgatggtgcggggcaggtaggcagcgttgcacgtggccctcagcgcgtccccgaccaccagggccagcacgtaaggga

SEQ ID NO: 108435 - DNA, 80 bp, synthetic construct
  source 1..80: mol_type = other DNA
tctgtgttttttgcggcaatatagtaggccccgagattcccaaactcatggatggatttgggggttgtggtcgtataata

SEQ ID NO: 108436 - DNA, 80 bp, synthetic construct
  source 1..80: mol_type = other DNA
attgcctgccgctgccaagctcgacttgtcgacttggttcacggtgggcgccggcggggtggacatttatcgcagcatgt

SEQ ID NO: 108437 - DNA, 80 bp, synthetic construct
  source 1..80: mol_type = other DNA
attctccaaaccagtctgctcaaagtgccctactttgtgcgcgtccaaggccttctcaggatctgcgcgctagcgcgcaa

SEQ ID NO: 108438 - DNA, 80 bp, synthetic construct
  source 1..80: mol_type = other DNA
aaagaaaaaccaaaagaaacaccaaccgtcgcccaatggacgtcaagttcccgggtggcggtcagatcgttggcggagtt

SEQ ID NO: 108439 - DNA, 80 bp, synthetic construct
  source 1..80: mol_type = other DNA
ctcggaggacgcgcggcgatgagacgagcggctcattcgccatcgggatagtcccgcacgaagccgctcgcggaggccgg

SEQ ID NO: 108440 - DNA, 80 bp, synthetic construct
  source 1..80: mol_type = other DNA
ttgtgaccagcctaaccgggcgcgacaaaaatgaggtcgagggggaggtacaggtggtctccacggctacccaatccttc

SEQ ID NO: 108441 - DNA, 80 bp, synthetic construct
  source 1..80: mol_type = other DNA
actccacgtacggcaagttccttgctgacggaggctgttctggaggggcttatgacgtaatcatctgtgatgagtgccac

SEQ ID NO: 108442 - DNA, 80 bp, synthetic construct
  source 1..80: mol_type = other DNA
gagcctcggtcaggcgtcgacacagacgccttctatgtgatgacggtcgcgacgaagactttcttagtacacagagaatg

SEQ ID NO: 108443 - DNA, 80 bp, synthetic construct
  source 1..80: mol_type = other DNA
tctaactccctaatttcatggtttgctaacagctctctgtgcaaaacttttgtattccgctaaactcccattgtgtaacc

SEQ ID NO: 108444 - DNA, 80 bp, synthetic construct
  source 1..80: mol_type = other DNA
gcgcgcccgctgaaacagcagggtctaccgtcgatgcagtaattgatgaggtagtggcaaacgcccgggcttatgcaagg

SEQ ID NO: 108445 - DNA, 80 bp, synthetic construct
  source 1..80: mol_type = other DNA
gactttgttccagttgagtcccttgagaccactatgagatcaccagtgttcactgacaattcaacacccccagcggtgcc

SEQ ID NO: 108446 - DNA, 80 bp, synthetic construct
  source 1..80: mol_type = other DNA
ccaggggggggagacggctcccggctcggactcggtgtcctggtctacttgctccgaggaggacgactcagtcgtgtgct

SEQ ID NO: 108447 - DNA, 80 bp, synthetic construct
  source 1..80: mol_type = other DNA
tgtataaaagcctcgtaggcctcggtagatatggcgcatagcgcggcggcgaagtaccgttcggcgtcgttcatgagagc

SEQ ID NO: 108448 - DNA, 80 bp, synthetic construct
  source 1..80: mol_type = other DNA
aacttcgcttgctattgaatttacgtttgacgacactggaaaactacttcactcaccacttgttaacaacacttttagca

SEQ ID NO: 108449 - DNA, 80 bp, synthetic construct
  source 1..80: mol_type = other DNA
actgcaatgacagcttacagacgggtttcatagcttccctgttttacacccacagattcaacagctctggctgccccgag

SEQ ID NO: 108450 - DNA, 80 bp, synthetic construct
  source 1..80: mol_type = other DNA
ctctggctcctaaaggcgctccaaatgcatctcagtggttggataaaggggttgaaactactgaagaacggcaaaatgaa

SEQ ID NO: 108451 - DNA, 80 bp, synthetic construct
  source 1..80: mol_type = other DNA
agtatcaactggagatggtgctacgcaaagcggatgggcaaaagacgacacaatggccaggcaaaaccaaatatgcaggg

SEQ ID NO: 108452 - DNA, 80 bp, synthetic construct
  source 1..80: mol_type = other DNA
ggagtggaggcaaccaccacggtcgccagcgccgtgggccagcagacacgtggtattaccagtttgttcaacgtaggctc

SEQ ID NO: 108453 - DNA, 80 bp, synthetic construct
  source 1..80: mol_type = other DNA
agctccccctggagacgacccgcacccagagtatgacttggagctgataacatcatgctcctcgaacgtctccgttgcca

SEQ ID NO: 108454 - DNA, 80 bp, synthetic construct
  source 1..80: mol_type = other DNA
gctggcccagcccccctgggaccaagtctttggagccgtgcaagtgtggagccgtcgacctatatctggtcacgcggaac

SEQ ID NO: 108455 - DNA, 80 bp, synthetic construct
  source 1..80: mol_type = other DNA
acctggatgaacagcacggggtttacaaaaacatgcggagcacccccgtgcaagatcacgcccggtgagtacaaccagtc

SEQ ID NO: 108456 - DNA, 80 bp, synthetic construct
  source 1..80: mol_type = other DNA
gcggggaccacagaacccacgtggccatcataccacaagcgcaggtagattaagtggcgacccctcataaacacgctgga

SEQ ID NO: 108457 - DNA, 80 bp, synthetic construct
  source 1..80: mol_type = other DNA
cccaaacgatcatcgatgtgttcgttggtggtcactggggcgtgctcgctgggctgctgtattacagcatggcgaccaac

SEQ ID NO: 108458 - DNA, 80 bp, synthetic construct
  source 1..80: mol_type = other DNA
cggccgagtccgtgaccggtggatgcggcagccgccctgcgggagcggacctgctccgggccgactatgacattatcgac

SEQ ID NO: 108459 - DNA, 80 bp, synthetic construct
  source 1..80: mol_type = other DNA
acagaacggagattagcccgctgctcttctctactactgagcttgctatactgccctgttctttctcgccgatgcccgcg

SEQ ID NO: 108460 - DNA, 80 bp, synthetic construct
  source 1..80: mol_type = other DNA
tgcagaactaatcccaaacggaacgcgttattttgctgatggacaacgggtacttttattatgcaaacagctgattgcgt

SEQ ID NO: 108461 - DNA, 80 bp, synthetic construct
  source 1..80: mol_type = other DNA
gggcgaaggtcatcgcggtcctcttcctctttgcaggagctgatgccacgacctacacgggcagcgccgtgagtagcacc

SEQ ID NO: 108462 - DNA, 80 bp, synthetic construct
  source 1..80: mol_type = other DNA
aatgccatcgacccaacaggccaaagttcccaccggcactgcccatctgggcgaggccagactataacccgccgctgctt

SEQ ID NO: 108463 - DNA, 80 bp, synthetic construct
  source 1..80: mol_type = other DNA
gcctcccggtgttgggtgcccgcctcccctactctagctatcccgaacgcgtcggtagcagtgcgtgggttccgtaggca

SEQ ID NO: 108464 - DNA, 80 bp, synthetic construct
  source 1..80: mol_type = other DNA
atcaggaaaataactgtgcttattctatcacatttgaattcggatggggaaaaacctatacggcagccataccctttgat

SEQ ID NO: 108465 - DNA, 80 bp, synthetic construct
  source 1..80: mol_type = other DNA
cccattctacggcaaggcgattcctctcgaagtcatcaagggaggtcggcacttgatattctgccattcgaagaagaagt

SEQ ID NO: 108466 - DNA, 80 bp, synthetic construct
  source 1..80: mol_type = other DNA
caacaagactctagccggcttacggggtccggtcacgcagatgtactcgagtgctgaggtggacttggtaggctggccca

SEQ ID NO: 108467 - DNA, 80 bp, synthetic construct
  source 1..80: mol_type = other DNA
gagatcaatcggaggcccagttagctctcacaatcatatccctggatacaaggttcagacgaacggaccttggatgcagg

SEQ ID NO: 108468 - DNA, 80 bp, synthetic construct
  source 1..80: mol_type = other DNA
gatgcgcatcgtgggccccaagacctgccgaaacacctggtggggaaccttccctattaattcccataccacgggaccaa

SEQ ID NO: 108469 - DNA, 80 bp, synthetic construct
  source 1..80: mol_type = other DNA
ctggacgccggcgacgcccacccttgcagtcccgaactcgtcgacacctgtcagcgggttccgacgacacctagatctca

SEQ ID NO: 108470 - DNA, 80 bp, synthetic construct
  source 1..80: mol_type = other DNA
aatagcaagggggagcggtgtggctaccgcagatgccgcgcaagcggcgtctttcccaccagcttaggcaacactatgac

SEQ ID NO: 108471 - DNA, 80 bp, synthetic construct
  source 1..80: mol_type = other DNA
ttgactttgttcccgtggagagcatgcagaccaccgcacgctctccttctttctcagacaatacaaccccacctgcagtc

SEQ ID NO: 108472 - DNA, 80 bp, synthetic construct
  source 1..80: mol_type = other DNA
cctgacccacaatcttcatcttgcagatgaaaagaaccagaattgaagacgacttcaaccccgtctacccctatgacacc

SEQ ID NO: 108473 - DNA, 80 bp, synthetic construct
  source 1..80: mol_type = other DNA
acagggtcattcaagttagagaaggaagtggctgagacccagcatggaactgttctagtgcaggttaaatacgaaggaac

SEQ ID NO: 108474 - DNA, 80 bp, synthetic construct
  source 1..80: mol_type = other DNA
tgacagcaacagaagttataatattatacctggaaccacggacaccctgtaccgcagttggtacctgtcctatacctacg

SEQ ID NO: 108475 - DNA, 80 bp, synthetic construct
  source 1..80: mol_type = other DNA
catcagctcggtgaaggtcttctggttggtgaaggtcagcggcaggccgcggtgctcctcgttcaaccaagtttgacaga

SEQ ID NO: 108476 - DNA, 80 bp, synthetic construct
  source 1..80: mol_type = other DNA
cctcggtacccctcagcgctccctgtctgggctaggcccgactacaaccccccactcattgagaactggaaagcgccgga

SEQ ID NO: 108477 - DNA, 80 bp, synthetic construct
  source 1..80: mol_type = other DNA
gctggaccgagaagcaagcacaaccggagagaagggtataaaacacaaaaccagggaccctgggatgagaacggcatcgt

SEQ ID NO: 108478 - DNA, 80 bp, synthetic construct
  source 1..80: mol_type = other DNA
cgcttggccgaagctcgagcagttttggcaaaaacacctgtggaactttgtgagcggtattcaatacttggcaggtcttt

SEQ ID NO: 108479 - DNA, 80 bp, synthetic construct
  source 1..80: mol_type = other DNA
gtcgatacatttgttgtacctgcatcctatattaacaatcctgctaatctccccggatggacgcgtctgtattcgtcgca

SEQ ID NO: 108480 - DNA, 80 bp, synthetic construct
  source 1..80: mol_type = other DNA
cggctggccctctccacccggcgctaaatctcttgagccgtgcacatgcggctcagctgacctgtacctggtcacgcgtg

SEQ ID NO: 108481 - DNA, 80 bp, synthetic construct
  source 1..80: mol_type = other DNA
ctggcgaggtgcaggtgctctcgacagctacccaatccttcttaggtacaactgtaggaggtgtcttgtggactgtctac

SEQ ID NO: 108482 - DNA, 80 bp, synthetic construct
  source 1..80: mol_type = other DNA
tagctcccggttcgggctcggggtcttggtctacttgctccgaggaggacgataccaccttgtgctgctccatgtcatac

SEQ ID NO: 108483 - DNA, 80 bp, synthetic construct
  source 1..80: mol_type = other DNA
tgacattacacgcaagttgcccacggctgtgatgggggcggcatatggttttcaatactcacccgcccaaagggtggagt

SEQ ID NO: 108484 - DNA, 80 bp, synthetic construct
  source 1..80: mol_type = other DNA
cccagaccgctagcgggtttgtgtccatgttctcagttgggccgtctcagaaaatccagcttataaacaccaacggcagc

SEQ ID NO: 108485 - DNA, 80 bp, synthetic construct
  source 1..80: mol_type = other DNA
acagagcaatacaaattccaagcaaagtagcctccgaattccaaacctcccgaggcaccagcatttttgcggggcacctg

SEQ ID NO: 108486 - DNA, 80 bp, synthetic construct
  source 1..80: mol_type = other DNA
gcccccataggaggtataacaaaattaataggagagaaaaacacataaacacctgaaaaaccctcctgcctaggcaaaat

SEQ ID NO: 108487 - DNA, 80 bp, synthetic construct
  source 1..80: mol_type = other DNA
ttgcccgggagagctgcggactcatctactttgagtttcccgaggagcaccccaacggacctgcacacggagtgcggatc

SEQ ID NO: 108488 - DNA, 80 bp, synthetic construct
  source 1..80: mol_type = other DNA
atgcttataatgctgatatgattgacccttttcagttgggccttctggtcgtgttcttggccacccaggaggtccttcgc

SEQ ID NO: 108489 - DNA, 80 bp, synthetic construct
  source 1..80: mol_type = other DNA
tccaacaccagcaaccggcgccgggcagaggccaaccgcgagcctagatactcgacggccccggcaaaggccaggtctcg

SEQ ID NO: 108490 - DNA, 80 bp, synthetic construct
  source 1..80: mol_type = other DNA
tctcgcggatggcggctgctccggcggcgcttatgacatcattatctgcgatgagtgccattcaacagatcctaccacag

SEQ ID NO: 108491 - DNA, 80 bp, synthetic construct
  source 1..80: mol_type = other DNA
ggtggagtggtaggcaggcagacctccgggctcacgtccctcttctcagttggggcgtcccagaaaatccagcttataaa

SEQ ID NO: 108492 - DNA, 80 bp, synthetic construct
  source 1..80: mol_type = other DNA
ctggtcttggctgaggcccagatccaacaatgggttccccccttggaagtccgagggtggcgtgacgggatcatctgggt

SEQ ID NO: 108493 - DNA, 80 bp, synthetic construct
  source 1..80: mol_type = other DNA
gggggggtggacgccagaaacacctacaagttcacgtccctgttttcatctggtgcaagtcagaagatccagcttgtgaa

SEQ ID NO: 108494 - DNA, 80 bp, synthetic construct
  source 1..80: mol_type = other DNA
ggcgcaaacctgcccgactgatcgtataccctgacctcggggtacgagtctgtgaaaaaagggcactctatgacataaca

SEQ ID NO: 108495 - DNA, 80 bp, synthetic construct
  source 1..80: mol_type = other DNA
gcggaaaagcgcgaccgccgccgggtcttgtcgcggccgggcccgggccgggagccggagcgacggttggcgatgtcata

SEQ ID NO: 108496 - DNA, 80 bp, synthetic construct
  source 1..80: mol_type = other DNA
ggctgtcttatgtgttccaaatgcagtgatattacaaaatgcatggaaagtgagctgcacaatactggcagtggtatccg

SEQ ID NO: 108497 - DNA, 80 bp, synthetic construct
  source 1..80: mol_type = other DNA
tgaaggagcgagcatcgggggtgaagggccgcctactatcctttgaggaagcgtgctcccttgtccccccacactctgcc

SEQ ID NO: 108498 - DNA, 80 bp, synthetic construct
  source 1..80: mol_type = other DNA
cccgagggcaggtcctgggctcagcccgggtatccttggcccctctacggtaatgagggctgcgggtgtgcaggatggct

SEQ ID NO: 108499 - DNA, 80 bp, synthetic construct
  source 1..80: mol_type = other DNA
ccctccttggccagctcttccgccaaccagttgtctgcaccgtccctcagggctacttgcacaacttcccaaaaacaccc

SEQ ID NO: 108500 - DNA, 80 bp, synthetic construct
  source 1..80: mol_type = other DNA
aaacggcgggtcgacgccttgggagaggctcccctccgtcgttggccagctcctcggctagccagctttccgcaccttct

SEQ ID NO: 108501 - DNA, 80 bp, synthetic construct
  source 1..80: mol_type = other DNA
gctacggtgtgcgcacgggctaaggcccctcctccttcatgggacaccatgtggaagtgcctcatacggctcaagcctgt

SEQ ID NO: 108502 - DNA, 80 bp, synthetic construct
  source 1..80: mol_type = other DNA
ttgcccaagaacaactccataaggccctggattgtgagatccacggggcctgctactccattcagccactagatctacct

SEQ ID NO: 108503 - DNA, 80 bp, synthetic construct
  source 1..80: mol_type = other DNA
ttcaactcctcgggttgcccccaacgaatgtcctcatgccgctctattgaggagtttaggataggctggggcagcctgaa

SEQ ID NO: 108504 - DNA, 80 bp, synthetic construct
  source 1..80: mol_type = other DNA
cccagttgatcatcgacgtgttcgttggtggtcactggggtgtgcttgccgggttgctgtattacgcgatggttaccaac

SEQ ID NO: 108505 - DNA, 80 bp, synthetic construct
  source 1..80: mol_type = other DNA
ggtggtgtgatagctcgcactttgagacagaagggaaaaagcgtgatctgtctgaacagtaaaacttttgaaaaagatta

SEQ ID NO: 108506 - DNA, 80 bp, synthetic construct
  source 1..80: mol_type = other DNA
tgcggtggaggtgtggagaccgaaaccgcaaagggtcgcttacgtcagcaggatcccgagatcaaagacacccgggttct

SEQ ID NO: 108507 - DNA, 80 bp, synthetic construct
  source 1..80: mol_type = other DNA
ttctgatgacccaggacatcctggaccaggaactcgactttgagatgtatggagcggtgtactcagtgaacccattggat

SEQ ID NO: 108508 - DNA, 80 bp, synthetic construct
  source 1..80: mol_type = other DNA
tttggggggtggttttcatctgctgcgcgtggcacgtgcgcgggcggcttgtcccacttgctacttacgcagttttacag

SEQ ID NO: 108509 - DNA, 80 bp, synthetic construct
  source 1..80: mol_type = other DNA
gccgttgactacttagcggggggggctgccctttgctccgcgttatacgtcggagacgcgtgcgtggcagtgtttttggt

SEQ ID NO: 108510 - DNA, 80 bp, synthetic construct
  source 1..80: mol_type = other DNA
actcaggttgcccggaccgcatgagctcgtgtaagccccttacctcgtttaacaagggatggggtcctatcacgtatgcc

SEQ ID NO: 108511 - DNA, 80 bp, synthetic construct
  source 1..80: mol_type = other DNA
ggaccgtggtcccagactaataatcagaccgacgatacgagtgggaccgtggtcccagtctgattatcagaccgacgata

SEQ ID NO: 108512 - DNA, 80 bp, synthetic construct
  source 1..80: mol_type = other DNA
acagtggatgaaccgcttgatcgcttttgcatcgcgaggcaaccacgtggctcctacacactatgtccctgagaacgatg

SEQ ID NO: 108513 - DNA, 80 bp, synthetic construct
  source 1..80: mol_type = other DNA
ttaaagacaaagtcctcggcctgttgcagagggctagccagcaagaggccgacattcggcccatagtgcaatcaacctgg

SEQ ID NO: 108514 - DNA, 80 bp, synthetic construct
  source 1..80: mol_type = other DNA
cggtgacgcgccaaacgccagcctgtttgtcctggggatggccatagccgccgaagggactctggcgtacaacggctcgg

SEQ ID NO: 108515 - DNA, 80 bp, synthetic construct
  source 1..80: mol_type = other DNA
cctactactcggaaagcgaagacgaggccgccaacgacttcctcgtgcgcatgggccgccagcagtcggtcctaaggcgc

SEQ ID NO: 108516 - DNA, 80 bp, synthetic construct
  source 1..80: mol_type = other DNA
agcttggggaaagagcattatctttgctccagaactggcaaacaacacgttcgtcgttgacggaccagagaccaaggaat

SEQ ID NO: 108517 - DNA, 80 bp, synthetic construct
  source 1..80: mol_type = other DNA
gcatgggacatgatgatgaattggtcacctacaacagctttggtgatggcccagttgttacggattccccaggtggtcat

SEQ ID NO: 108518 - DNA, 80 bp, synthetic construct
  source 1..80: mol_type = other DNA
gggccctggcttacgccaaggtgtctggtagactacccgtaccgactgtggcattatccttgcactgtgaacttctctat

SEQ ID NO: 108519 - DNA, 80 bp, synthetic construct
  source 1..80: mol_type = other DNA
ggatacggcgctaacgatgcatctcaacaattgttgtgtaggtactccgccaccgagggacctgagcgagtccgcatcga

SEQ ID NO: 108520 - DNA, 80 bp, synthetic construct
  source 1..80: mol_type = other DNA
aaaggcctcggccctccctggaacggctggtcggtccccgggttgctgaaggtgcggcgggccgggtctctgtccgtcta

SEQ ID NO: 108521 - DNA, 80 bp, synthetic construct
  source 1..80: mol_type = other DNA
tggtccatcgtgagtggttcatggacctcaacctcccttggagcagtgctggaagtactgtgtggaggaacagagagacg

SEQ ID NO: 108522 - DNA, 80 bp, synthetic construct
  source 1..80: mol_type = other DNA
tcggcgagctcctgcagcaccccccgggccgccagggcgtacatgctgatcagcagcaggctgctgcccacctcggtagg

SEQ ID NO: 108523 - DNA, 80 bp, synthetic construct
  source 1..80: mol_type = other DNA
ttccaatagcagcattgtgtatgaggccgatgacgttatcctgcacacacccggctgtataccttgtgttcaggacggca

SEQ ID NO: 108524 - DNA, 80 bp, synthetic construct
  source 1..80: mol_type = other DNA
cagttggattgatgtttgccatcgtgggtggtctagctgagttggatgttgattccatgtccattccttttgtgttagcc

SEQ ID NO: 108525 - DNA, 80 bp, synthetic construct
  source 1..80: mol_type = other DNA
tcctgcatctccagcaggtggcggcccacgtcgtccagacttcgcacggccttgcccatcacgagcgccgtgaccaggtt

SEQ ID NO: 108526 - DNA, 80 bp, synthetic construct
  source 1..80: mol_type = other DNA
cctcgttatcaaaacccccacattgcagctcttctccatctacaaccatgaaagcagcgttagccatcttcatgttaact

SEQ ID NO: 108527 - DNA, 80 bp, synthetic construct
  source 1..80: mol_type = other DNA
atggaaaaaatggggaaaaaccctgttcatggaacccaaacttggaaacaacacatttgttgttgatggacccgaaacca

SEQ ID NO: 108528 - DNA, 80 bp, synthetic construct
  source 1..80: mol_type = other DNA
tggctggccccagaggaccagccactcagatgtacaccagtgcagagggtgacctcgtgggatggcctagcccccccggg

SEQ ID NO: 108529 - DNA, 80 bp, synthetic construct
  source 1..80: mol_type = other DNA
cggagacgatctggtagtcatttccgagagcgctggcgtccaggaagacatagctgccctgcgagctttcacggaagcta

SEQ ID NO: 108530 - DNA, 80 bp, synthetic construct
  source 1..80: mol_type = other DNA
tcaagaattaaaagacaaagacgatgaaactaaaaatataggagttggaataaatgtgagaatagggaaaaacgaaagtc

SEQ ID NO: 108531 - DNA, 80 bp, synthetic construct
  source 1..80: mol_type = other DNA
tcagcgccccccggagacgtcccacatcctgagtacgatctcgagctgataacatcctgctcgtccaacgtttccgtggc

SEQ ID NO: 108532 - DNA, 80 bp, synthetic construct
  source 1..80: mol_type = other DNA
caaggcctatgctgtggacatggtggatgctaacctgttcatggggggcgacgtgactcgaatagagtctgaggccaaag

SEQ ID NO: 108533 - DNA, 80 bp, synthetic construct
  source 1..80: mol_type = other DNA
gacattgatatgctaatcgacctaggattggacctgtccgacagcgagctcgaggaggacgctctggagcgggacgagga

SEQ ID NO: 108534 - DNA, 80 bp, synthetic construct
  source 1..80: mol_type = other DNA
tgaagcagccctggagaacgtcattgtcctaaacgcggctgcggctgcggggactcatgggtttttctggtgcctgctcg

SEQ ID NO: 108535 - DNA, 80 bp, synthetic construct
  source 1..80: mol_type = other DNA
aacattgaggaggttgctctgtccaccaccggagagatccctttctacggcaaggctattcccctcgaagtaatcaaagg

SEQ ID NO: 108536 - DNA, 80 bp, synthetic construct
  source 1..80: mol_type = other DNA
ctcgaaatgttgggtgccggtagcccccacagtggccaccagggacggcaacctccccgcaacgcagcttcgacgtcaca

SEQ ID NO: 108537 - DNA, 80 bp, synthetic construct
  source 1..80: mol_type = other DNA
ggggatgtaagttttacggctgctggatgggcgtggttggaagacccaagagcgagatgtctgtaaagcagtgtgtgttt

SEQ ID NO: 108538 - DNA, 80 bp, synthetic construct
  source 1..80: mol_type = other DNA
cttctgctattgggcctcttttttcaacgatggcttcccggtatgcacggtttacacaggatcaaatggacattttaatg

SEQ ID NO: 108539 - DNA, 80 bp, synthetic construct
  source 1..80: mol_type = other DNA
ggtgcccatcctggtcgagctggacggcgacgtaaacggccacaagttcagcgtgtccggcgagggcgagggcgatgcca

SEQ ID NO: 108540 - DNA, 80 bp, synthetic construct
  source 1..80: mol_type = other DNA
cgcccccgggtctggccgtcgcggagatggaggtccagatcgtgcgcaacgacccgccgctacgatacgacaccaacctc

SEQ ID NO: 108541 - DNA, 80 bp, synthetic construct
  source 1..80: mol_type = other DNA
aaagtgttgtgggatctacaactaaccatgcaacaccggagctttgccggacacgttgatttttcgtttctcggtgtata

SEQ ID NO: 108542 - DNA, 80 bp, synthetic construct
  source 1..80: mol_type = other DNA
atctttagccccatggagattaaagtcattacctggggtgccgacacggcagcctgcggggacatcctgtgcgggttgcc

SEQ ID NO: 108543 - DNA, 80 bp, synthetic construct
  source 1..80: mol_type = other DNA
gggtgtggcctaactagcggaaggcgtatttaaccagactagggcggcgggtccgccgtagtccttggctcgggtagcca

SEQ ID NO: 108544 - DNA, 80 bp, synthetic construct
  source 1..80: mol_type = other DNA
atgggagcaaacatcactcgggtggagtctgagaacaaggtcgtcatcctcgactcctttgagccattgagggctgagta

SEQ ID NO: 108545 - DNA, 80 bp, synthetic construct
  source 1..80: mol_type = other DNA
gacccatcacacataacggcggaatcggcgcgtcggagattggctcgagggtcacgaccctcgctagctagttcctcggc

SEQ ID NO: 108546 - DNA, 80 bp, synthetic construct
  source 1..80: mol_type = other DNA
cctttactacccgccaagcctacctaacgctgcagagctcctcatccgctcctaggtccggcggcatcggaactctccaa

SEQ ID NO: 108547 - DNA, 80 bp, synthetic construct
  source 1..80: mol_type = other DNA
tatgcactgggctcccagctcccctgtgaacccgagccggatgtcatggtactaacgtccatgctcactgatccggacca

SEQ ID NO: 108548 - DNA, 80 bp, synthetic construct
  source 1..80: mol_type = other DNA
ttgaatttgaagccttaggattcctcaatgaggatcattggctagggagaaagaactcaggaggaggagttgaaggcttg

SEQ ID NO: 108549 - DNA, 80 bp, synthetic construct
  source 1..80: mol_type = other DNA
gctgaccctgtggaacaagggggctggaggctcttggccccaatcaccgcctatgcgcagcagacgcgaggcttactgag

SEQ ID NO: 108550 - DNA, 80 bp, synthetic construct
  source 1..80: mol_type = other DNA
ggacggggttaactatgcaacagggaatttgcctggttgctccttttctatcttcttgctggccttactgtcctgcatca

SEQ ID NO: 108551 - DNA, 80 bp, synthetic construct
  source 1..80: mol_type = other DNA
ggcgcatcacagactttgcccaagggtcaggtcccatcacatatgccagtgtcaatgaaagtgaccagcgaccatactgc

SEQ ID NO: 108552 - DNA, 80 bp, synthetic construct
  source 1..80: mol_type = other DNA
acctccactacattgccgaggctagggagatcgcagagcaattcaaacagaaagctctcggcctactccaaaccacggca

SEQ ID NO: 108553 - DNA, 80 bp, synthetic construct
  source 1..80: mol_type = other DNA
cccgtgggatttgaaccagagatgttaaggaaaaaacagatcactgttcttgacttgcaccctggagcaggaaagaccag

SEQ ID NO: 108554 - DNA, 80 bp, synthetic construct
  source 1..80: mol_type = other DNA
tctttccacgggcgcagggtcctcgtcagcgtagtctgggtcacggtgaaggggtgcgctccgggctgcgcgctggccag

SEQ ID NO: 108555 - DNA, 80 bp, synthetic construct
  source 1..80: mol_type = other DNA
attccctacctaccaaagacacaggatctggtatgttcctcacttgttggaaggaaggaaagggctgaatgggccaagaa

SEQ ID NO: 108556 - DNA, 80 bp, synthetic construct
  source 1..80: mol_type = other DNA
gagacgacgaccgtgccccaagacgcagtgtcgcgctcgcagcggcgtggtaggactggcaggggcaggtgtggcatata

SEQ ID NO: 108557 - DNA, 80 bp, synthetic construct
  source 1..80: mol_type = other DNA
tcttttagcactcggcatcattaccatctttactctcaccccagcctataaacaacttcttgtaggtgtgctgtggtgga

SEQ ID NO: 108558 - DNA, 80 bp, synthetic construct
  source 1..80: mol_type = other DNA
ggtgaaagaacacgacgttcaggagagaatcaaggctctgcaggagcagtacagtgacacctggcatgtggacagggaac

SEQ ID NO: 108559 - DNA, 80 bp, synthetic construct
  source 1..80: mol_type = other DNA
gtacatgtccaaagcttatggaattgaccccaacatccgtactgggacgcgaacagttacaactggagcaaaactcacgt

SEQ ID NO: 108560 - DNA, 80 bp, synthetic construct
  source 1..80: mol_type = other DNA
ggttggggtctgcgcgcgcccagcaagatgtacggaggcgctcgccaacgctccacgcaacaccccgtgcgcgtgcgcgg

SEQ ID NO: 108561 - DNA, 80 bp, synthetic construct
  source 1..80: mol_type = other DNA
ttaggagctgccggtactagcccctgtcaacagcactggagattaacttatcgcccaacgccagtaacgccttctgtaat

SEQ ID NO: 108562 - DNA, 80 bp, synthetic construct
  source 1..80: mol_type = other DNA
ggaccatagctacaggaggcgccatcacgtactccacatatgggaaattcttggccgatgggggatgctccggaggagcg

SEQ ID NO: 108563 - DNA, 80 bp, synthetic construct
  source 1..80: mol_type = other DNA
taccgtagacccgacaagagacaggaggcgtccgtcccgccggagacaaacacggccccggccttcccggcgagcacctt

SEQ ID NO: 108564 - DNA, 80 bp, synthetic construct
  source 1..80: mol_type = other DNA
ggaagttgtggactgggaaggcgcctgggacgaagacgacggcggcgcgttcgaggtggacgtggtgctgtaacgggccg

SEQ ID NO: 108565 - DNA, 80 bp, synthetic construct
  source 1..80: mol_type = other DNA
ctctcacagagcggctgtatgtggggggccctatgtacaacagcaagggtctcaagtgcggttaccggcgttgtcgcgcc

SEQ ID NO: 108566 - DNA, 80 bp, synthetic construct
  source 1..80: mol_type = other DNA
tatggctggcctacaaagtggcgtcaaatggaatacaatacaccgatcggagatggtgttttgatggtccccggacgaat

SEQ ID NO: 108567 - DNA, 80 bp, synthetic construct
  source 1..80: mol_type = other DNA
tggggatgacgcccgtggcgtagtggtcatagatccgccgaaatatggcgctgctgcgggtggccatgggaacgcggaga

SEQ ID NO: 108568 - DNA, 80 bp, synthetic construct
  source 1..80: mol_type = other DNA
ggcaataccctaacatgctacttgaaagcacaagcagcgtgtaaggcagcaaagctcaaagactatgacatgctagtctg

SEQ ID NO: 108569 - DNA, 80 bp, synthetic construct
  source 1..80: mol_type = other DNA
ggcctctgacaaaacttccaggctttggaggttttggtttggctcaacgcttagcagcgtagtttatagggtaaaaagag

SEQ ID NO: 108570 - DNA, 80 bp, synthetic construct
  source 1..80: mol_type = other DNA
gatccgccccacatcacggcggagactgcggcgcggcgcttggcacggggatcacctccatctgaggcgagctcctcagt

SEQ ID NO: 108571 - DNA, 80 bp, synthetic construct
  source 1..80: mol_type = other DNA
cctcatggccccttttataccccaaccgaggacgcgtgcctggactccccgcccccggagacccccaaaccttcccacac

SEQ ID NO: 108572 - DNA, 80 bp, synthetic construct
  source 1..80: mol_type = other DNA
ccttctacggcaaagccataccactagaagtcatcaagggcgggagacacctgatcttctgccactcaaagaaaaaatgt

SEQ ID NO: 108573 - DNA, 80 bp, synthetic construct
  source 1..80: mol_type = other DNA
aagttgttgtttgatgcaaacggagttcttaaacagggctctactatggattcttcatattggaattatagaagtgataa

SEQ ID NO: 108574 - DNA, 80 bp, synthetic construct
  source 1..80: mol_type = other DNA
tttttgatattgttcaaaaatacctccaggaaactttgcgccaaagtatattcctagtggtgaggaagaattcagaattc

SEQ ID NO: 108575 - DNA, 80 bp, synthetic construct
  source 1..80: mol_type = other DNA
agcgagtccgcatcgaccggatcggaaaacctctcgagaaaggcgtctaaccagtcacagtcgcaaggtaggctgagcac

SEQ ID NO: 108576 - DNA, 80 bp, synthetic construct
  source 1..80: mol_type = other DNA
acgcagtgccctggtcatgcaagacccctttggcgggatgccgtttcccgccgcgaacagcccctgggctcccgtgctgg

SEQ ID NO: 108577 - DNA, 80 bp, synthetic construct
  source 1..80: mol_type = other DNA
tggtgaaatctcctgggaagaagaagctgaaataagtggaagctccagccgctatgatgtggcactcagtgagcagggtg

SEQ ID NO: 108578 - DNA, 80 bp, synthetic construct
  source 1..80: mol_type = other DNA
ttacacctccaccaaaatatcgtggacgtacagtacctctatgggctctctccagctatcacaagatacatcgtgaagtg

SEQ ID NO: 108579 - DNA, 80 bp, synthetic construct
  source 1..80: mol_type = other DNA
ccatagtctttatagtaataattggctttagtgttcttattattctgggtgccctaatttatctttgttggcatcgcagg

SEQ ID NO: 108580 - DNA, 80 bp, synthetic construct
  source 1..80: mol_type = other DNA
cttctctcgtgcctcaccacgcccgcctcggcagtcaactataaaaacagctctggtatataccatcttaccaatgactg

SEQ ID NO: 108581 - DNA, 80 bp, synthetic construct
  source 1..80: mol_type = other DNA
cgttccggactcgtctcctgcaagtagggagtgatggtggggagttcttgctgacggccggccatgctttactcctaggc

SEQ ID NO: 108582 - DNA, 80 bp, synthetic construct
  source 1..80: mol_type = other DNA
atccggtccgtgtgggaggacctcctggaagaccaacatactccaattgacacaactatcatggctaaaaatgaggtgtt

SEQ ID NO: 108583 - DNA, 80 bp, synthetic construct
  source 1..80: mol_type = other DNA
ctggtcttggctgttggtccggcctactcagctcactgcattggaattactgacagggatttcattgagggggtgcatgg

SEQ ID NO: 108584 - DNA, 80 bp, synthetic construct
  source 1..80: mol_type = other DNA
acgtatcaaaacaaggtggtgcgtgtgcaaagaccaacaccaagaggcacagtaatggacatcatatcgagaagagacca

SEQ ID NO: 108585 - DNA, 80 bp, synthetic construct
  source 1..80: mol_type = other DNA
ttccttctttcttttgttctcttttctcttttccattcttacggtggctccgtcttagccctagtcacggctagctgtga

SEQ ID NO: 108586 - DNA, 80 bp, synthetic construct
  source 1..80: mol_type = other DNA
aaggagccactcttggagagatctggaagtcaagactgaatcagttgacacgagccgaattcatggcatacaggaaagat

SEQ ID NO: 108587 - DNA, 80 bp, synthetic construct
  source 1..80: mol_type = other DNA
cccttacccgcctttaaaccaggcgccgaaatgtttttaaaccaggtatttaaacaagcgtgtgtgacatcgctaaccca

SEQ ID NO: 108588 - DNA, 80 bp, synthetic construct
  source 1..80: mol_type = other DNA
tgaagcccacaacgagaaaagagctgaccccgccttcgtttgcaagcaaggcgttgtggacagaggatggggaaatggct

SEQ ID NO: 108589 - DNA, 80 bp, synthetic construct
  source 1..80: mol_type = other DNA
cacaccgcgcggctgacaggggtgacctccctggtgctagcggtgggtgacgtggaccgtctttccgcgtttgaccgcgg

SEQ ID NO: 108590 - DNA, 80 bp, synthetic construct
  source 1..80: mol_type = other DNA
ggtcacctttgacaggctacaagtcctcgatgaccattacagagaggttgtggacgagatgaagcgactagcctccaaag

SEQ ID NO: 108591 - DNA, 80 bp, synthetic construct
  source 1..80: mol_type = other DNA
tgtctccggggttccaccaagctcctcatgagtgacctaacggtgaagcttcccaacactttcaccgccttggccagcag

SEQ ID NO: 108592 - DNA, 80 bp, synthetic construct
  source 1..80: mol_type = other DNA
ttgccagggccatcattgagctcacctatcggcacaaagttgtgaaagtgatgcgcccggctgctgatggaaggaccgtc

SEQ ID NO: 108593 - DNA, 80 bp, synthetic construct
  source 1..80: mol_type = other DNA
gacgaggagcgccgtggggcgcccctcgtacccgggcaccacgtggccctcgcggtccagctgcgggttggccgccacgt

SEQ ID NO: 108594 - DNA, 80 bp, synthetic construct
  source 1..80: mol_type = other DNA
aagtagtctccacagccactcagacttttctggccacgaccataaatggagtcctttggacagtctatcacggagccggc

SEQ ID NO: 108595 - DNA, 80 bp, synthetic construct
  source 1..80: mol_type = other DNA
aagagttaaaaaacgctgataatactaataggggagttggaattaatgtaagactgggtaaagatggaggtttgtccttt

SEQ ID NO: 108596 - DNA, 80 bp, synthetic construct
  source 1..80: mol_type = other DNA
agactccaatcacaagctggacagacgttccgtatgtgggaaagcgcgaggacatctggtgtggcagcctcatcggaacg

SEQ ID NO: 108597 - DNA, 80 bp, synthetic construct
  source 1..80: mol_type = other DNA
cacagtcccaggtaacctcggatcccgtcgttttacaacgtcgtgactgggaaaaccctggcgttacccaacttaatcgc

SEQ ID NO: 108598 - DNA, 80 bp, synthetic construct
  source 1..80: mol_type = other DNA
gggtcctctggagggccgctgctgtgcagctctggtcacgtggttggtctgttccgtgcggccgtctgtacccggtgcgt

SEQ ID NO: 108599 - DNA, 80 bp, synthetic construct
  source 1..80: mol_type = other DNA
gaaaaacacaacgggcgcgggggcgttgtggatcaaatattggaagatccccatcgcaacattgaagagcgcttggtacc

SEQ ID NO: 108600 - DNA, 80 bp, synthetic construct
  source 1..80: mol_type = other DNA
tccctggcccctgtatgggaatgagggactcggctgggcagggtggctcctgtccccccgaggctctcgcccttcgtggg

SEQ ID NO: 108601 - DNA, 80 bp, synthetic construct
  source 1..80: mol_type = other DNA
actaacgggccctacccctctgttgtacagactgggggccgtgcaaaatgagatcactactacacatccaattacaaaat

SEQ ID NO: 108602 - DNA, 80 bp, synthetic construct
  source 1..80: mol_type = other DNA
gcgggccctaaggggcctatctgccagatgtacaccaatgtagaccaggacatggtaggatggcctgcgcccccaggtgc

SEQ ID NO: 108603 - DNA, 80 bp, synthetic construct
  source 1..80: mol_type = other DNA
cccatggcccctctatgctaacgagggctgcggatggtcgggatggctcctgtcccctcgcggctcccgtcctagctggg

SEQ ID NO: 108604 - DNA, 80 bp, synthetic construct
  source 1..80: mol_type = other DNA
atcggtggcggcaacgcttagctttggctcttatatgaggcaagcttacggtgtggagccgaatatccggactggagtca

SEQ ID NO: 108605 - DNA, 80 bp, synthetic construct
  source 1..80: mol_type = other DNA
ttctttgaatttggggcatcactcattttttcaagaaattgtgatcagaaatttagatttttcttctcctggccgtacgg

SEQ ID NO: 108606 - DNA, 80 bp, synthetic construct
  source 1..80: mol_type = other DNA
ggagactgctcgccacactccagtcaactcctggctggggaacatcatcatgttcgctcccaccatttgggtgcgtatgg

SEQ ID NO: 108607 - DNA, 80 bp, synthetic construct
  source 1..80: mol_type = other DNA
accatcaattttgacgatcgctccaggtggggcggcgacctgaaaaccattttgcgcaccaatatgcccaacatcaatga

SEQ ID NO: 108608 - DNA, 80 bp, synthetic construct
  source 1..80: mol_type = other DNA
ggtccatccatggaaaaggagaatggatgacaacagaagacatgctaagcgtgtggaaccgtgtgtggattttggaaaat

SEQ ID NO: 108609 - DNA, 80 bp, synthetic construct
  source 1..80: mol_type = other DNA
gaaagataatccatgaatggtgttgcagatcctgcacgctaccccccttacgtttcagaggagaagacgggtgttggtat

SEQ ID NO: 108610 - DNA, 80 bp, synthetic construct
  source 1..80: mol_type = other DNA
gttcgaacaccagctgcatgtagcggtcgtagtggaggttcagcagctccagcacgtcctcggggctaaaggttcgcccc

SEQ ID NO: 108611 - DNA, 80 bp, synthetic construct
  source 1..80: mol_type = other DNA
cagcagtggacagcggcatgcaaaccgagccttggtacccgccaacttttacaagaaaaaaacgccactacaaacaaaca

SEQ ID NO: 108612 - DNA, 80 bp, synthetic construct
  source 1..80: mol_type = other DNA
aatacttcatagcgcggatggaagctgcgctacaagtatgggtcccgagcctctccgtacggggtggtcgtgatgcggtc

SEQ ID NO: 108613 - DNA, 80 bp, synthetic construct
  source 1..80: mol_type = other DNA
aataacagtgattgacctagaaccaataccctatgatccaaaatttgaaaagcagttaggacaagtaatgctcctagtcc

SEQ ID NO: 108614 - DNA, 80 bp, synthetic construct
  source 1..80: mol_type = other DNA
cagagcagtacaaattccaagcggattccccaaaaagactggcgacagctattgcaggcgcttgggaaaatggatgtgga

SEQ ID NO: 108615 - DNA, 80 bp, synthetic construct
  source 1..80: mol_type = other DNA
acacctatgcgccgcctgtcaacagggctcatacacctccaccagaacatcgtggacgtgcaatacctctatggtgttgg

SEQ ID NO: 108616 - DNA, 80 bp, synthetic construct
  source 1..80: mol_type = other DNA
accgagacctcataggctggcccgccccccagggcgcgagctcattgacaccttgcacctgcggctcctcggacctctac

SEQ ID NO: 108617 - DNA, 80 bp, synthetic construct
  source 1..80: mol_type = other DNA
gtcaagaagagcttaaagcagacattgtcatgtacactgagaatgcttatctggaaacaccagatacccatgtagtttac

SEQ ID NO: 108618 - DNA, 80 bp, synthetic construct
  source 1..80: mol_type = other DNA
cgcagcccgggccccccgcgggcgagactagcgagttagacaggcaagcactactcgcctctgcacgcacatgcttgcct

SEQ ID NO: 108619 - DNA, 80 bp, synthetic construct
  source 1..80: mol_type = other DNA
ctgacgccgtggcgctcaagcatggttagtagagatgagagtctgaaaaacagaaagcatgcgctaaaccaaggtggcta

SEQ ID NO: 108620 - DNA, 80 bp, synthetic construct
  source 1..80: mol_type = other DNA
caccctgttctgtgacataggagaatcttccccaagtccggaggtggaggaacaacgcacgctgcgcgtcttagaaatga

SEQ ID NO: 108621 - DNA, 80 bp, synthetic construct
  source 1..80: mol_type = other DNA
aagaagtctccgagacgcagcatgggacaatactcattaaggttgagtacaaaggggaagatgcaccttgcaagattcct

SEQ ID NO: 108622 - DNA, 80 bp, synthetic construct
  source 1..80: mol_type = other DNA
ggccattcctgcaatactataaagggagcacaagatggaatagacctcacctcgctcacataatgcatattcaaatgttc

SEQ ID NO: 108623 - DNA, 80 bp, synthetic construct
  source 1..80: mol_type = other DNA
aaatggaagagtgtgctgacatggccggactgctcacccacggtcaagaaatagccgccatgttcaaggacaaagcgctc

SEQ ID NO: 108624 - DNA, 80 bp, synthetic construct
  source 1..80: mol_type = other DNA
cagtttctagaggcacggcaaagctaagatggctggtcgagaggaggtttcttgaaccggtcggaaaagtgatcgacctt

SEQ ID NO: 108625 - DNA, 80 bp, synthetic construct
  source 1..80: mol_type = other DNA
tgtggtggttttccatagcgcttatgtttgtttgccttattattatgtggcttatttgttgcctaaagcgcagacgcgcc

SEQ ID NO: 108626 - DNA, 80 bp, synthetic construct
  source 1..80: mol_type = other DNA
cccacgaagttcgcaacgccagcgacatttaccatcttaccaacgactgctctaatgccagcatagtctacgagacgcag

SEQ ID NO: 108627 - DNA, 80 bp, synthetic construct
  source 1..80: mol_type = other DNA
caaggaggcggcggactgtggtcctagaccagagcactgtggaggctgcacttcaggacctggccattaaaacctttggc

SEQ ID NO: 108628 - DNA, 80 bp, synthetic construct
  source 1..80: mol_type = other DNA
gtttcttgctgtgggtgctttgacattgatgatgacaatgggagttggggcagattatggatgtgcaattgacccagaaa

SEQ ID NO: 108629 - DNA, 80 bp, synthetic construct
  source 1..80: mol_type = other DNA
tcctcacagtactgcaaccagaaccgggaaagcagcgtagtggagaggataaccgactggctttcctgttgattggactg

SEQ ID NO: 108630 - DNA, 80 bp, synthetic construct
  source 1..80: mol_type = other DNA
gtgaagctcctcagctggccgtggaatgcacgggaagatgtggtgcggatggcaatgacagacaccacagcgtttgggca

SEQ ID NO: 108631 - DNA, 80 bp, synthetic construct
  source 1..80: mol_type = other DNA
tcgttttctcgcctatggagaagaaggtcattacctggggggcagacaatgctgcctgcgggaccattctgtcaggactc

SEQ ID NO: 108632 - DNA, 80 bp, synthetic construct
  source 1..80: mol_type = other DNA
gtatcagctgagtgccacaggccacctaggcacaaattccctccagctctcccaatatgggccaggcccgactacaatcc

SEQ ID NO: 108633 - DNA, 80 bp, synthetic construct
  source 1..80: mol_type = other DNA
tgggaaagaccagagatcctgctgtctcctcagcatcattccaggcacagaacgccagaaaatggaatggtgctgttgaa

SEQ ID NO: 108634 - DNA, 80 bp, synthetic construct
  source 1..80: mol_type = other DNA
actctgactggacccaccccattgctgtacaggctgggagccgtacagaatgaggtgataacatctcaccctataaccaa

SEQ ID NO: 108635 - DNA, 80 bp, synthetic construct
  source 1..80: mol_type = other DNA
gggtggtctgtggcaaatattgccaaatggccgtgcttaaagtgggggccttgactggtacttacatctatgaccacctt

SEQ ID NO: 108636 - DNA, 80 bp, synthetic construct
  source 1..80: mol_type = other DNA
gaccctccgtgcgcaccacgactgacagtgggaaactggtcactgactggtgctgcaggagttgcacattgcccccactg

SEQ ID NO: 108637 - DNA, 80 bp, synthetic construct
  source 1..80: mol_type = other DNA
tctgggtgccccctttgcaggttcgcggtgggcgcgatgctgtcatactgcttacctgcctgttccacccagcgctggtg

SEQ ID NO: 108638 - DNA, 80 bp, synthetic construct
  source 1..80: mol_type = other DNA
tggtggttcgcactgctcttcatctgctgtgcatggcacttcaagggccgggtcgtccctctcttcacctacggcatcct

SEQ ID NO: 108639 - DNA, 80 bp, synthetic construct
  source 1..80: mol_type = other DNA
tgagagttcttgacactgttgagaaatggttgagctgtggtgttgaaagcttctgtgtgaaggtgttggctccatacatg

SEQ ID NO: 108640 - DNA, 80 bp, synthetic construct
  source 1..80: mol_type = other DNA
gggattctcagccgggggaaattgccaagtttggcctggtggtccggtggacaggccccaaagaccgcatggtcgccaac

SEQ ID NO: 108641 - DNA, 80 bp, synthetic construct
  source 1..80: mol_type = other DNA
gaggaagagagcgaccttgagccctcaataccatcggagcgcatgctccccaggagcgggtttccacgggccttaccggc

SEQ ID NO: 108642 - DNA, 80 bp, synthetic construct
  source 1..80: mol_type = other DNA
tcccacgatatgggtgcgtatggttttgatgacccatttcttttcaatactccaagcccaggaagcccttgaaaaagcac

SEQ ID NO: 108643 - DNA, 80 bp, synthetic construct
  source 1..80: mol_type = other DNA
tccattcggagactcctacattgtggtcggaagaggggatcagcagataaaccatcactggcataagtcaggaagtagca

SEQ ID NO: 108644 - DNA, 80 bp, synthetic construct
  source 1..80: mol_type = other DNA
tggaggcgaaaacctacatcagcggcggtatcgcggcccagcaaacatgcggctttgcgtggctgtttactgcgggctct

SEQ ID NO: 108645 - DNA, 80 bp, synthetic construct
  source 1..80: mol_type = other DNA
tgcctgtctacaggcagcgtggtcatagtgggcaggataatcctaagcgggaagccggcagtcattcctgacagggaggt

SEQ ID NO: 108646 - DNA, 80 bp, synthetic construct
  source 1..80: mol_type = other DNA
acagcagggaccccagcgagctgcgaaacaccgcggcgtcggggccggattggtgggacactaacccccccgcgctcagt

SEQ ID NO: 108647 - DNA, 80 bp, synthetic construct
  source 1..80: mol_type = other DNA
gtttgatgttaccaaaatactccttgccattttgggacccttgtacatcttacaagcaagcttgacgcgcgtgccatact

SEQ ID NO: 108648 - DNA, 80 bp, synthetic construct
  source 1..80: mol_type = other DNA
gtaatgaatatgaattccatgatctttataaacataaagttcaatggagagaagtttaatggggtactgtttatggccaa

SEQ ID NO: 108649 - DNA, 80 bp, synthetic construct
  source 1..80: mol_type = other DNA
ccgcggaccttcacctgccagatgacgtggcatcgcgactccgtgacgttctcgcgacgcaatgccaccgggctggccct

SEQ ID NO: 108650 - DNA, 80 bp, synthetic construct
  source 1..80: mol_type = other DNA
cggactttgcttgtgtgattgtggaggagcaagatgtgattgaaaaatctactgagccagtacaaggctgtaggaactgc

SEQ ID NO: 108651 - DNA, 80 bp, synthetic construct
  source 1..80: mol_type = other DNA
cacggaaaggccgcctacttttcctaggcccggcagatgacatgaaggacaaaggttggaaattgctggcccctataaca

SEQ ID NO: 108652 - DNA, 80 bp, synthetic construct
  source 1..80: mol_type = other DNA
caccacctacaccgtctactgcatctgtccaaccccgaagttgcatgagaatttttgctgtactctgtgtgctgagttta

SEQ ID NO: 108653 - DNA, 80 bp, synthetic construct
  source 1..80: mol_type = other DNA
ggtaataccataacatgctatctgaaagcaacggcagcatgcaaagctgccggcctcaaggacgtcgatatgttggtatg

SEQ ID NO: 108654 - DNA, 80 bp, synthetic construct
  source 1..80: mol_type = other DNA
gccacagatcatcaaagaggccataaatagaagattgagaacggccgtgctagcaccaactagggttgtagccgctgaga

SEQ ID NO: 108655 - DNA, 80 bp, synthetic construct
  source 1..80: mol_type = other DNA
cctgggtgctcgtcggcggtgttctggccgctttggccgcgtattgcttgtctacaggctgcgtggtcatagtgggcagg

SEQ ID NO: 108656 - DNA, 80 bp, synthetic construct
  source 1..80: mol_type = other DNA
tagtgttttggggagggagaggacctgcataaggggcagaatgattaaaatctgtgcttttctgtgtgttgcagcagcat

SEQ ID NO: 108657 - DNA, 80 bp, synthetic construct
  source 1..80: mol_type = other DNA
ttagcagcttattgcctgtcagtaggctgcgttgtcatctgtggcagaataacaacaactgggaagcccgctgtcgtgcc

SEQ ID NO: 108658 - DNA, 80 bp, synthetic construct
  source 1..80: mol_type = other DNA
gaacttgttaaaggaaatccatttgccatggaaattaaccttcaagccaatctatggcgaagtttcctttattccaatgt

SEQ ID NO: 108659 - DNA, 80 bp, synthetic construct
  source 1..80: mol_type = other DNA
tctgggggcttggtctgatgagcagaacaggtggtcaagtgcaaaagaggctgtggaggatcccgcattctggcagctcg

SEQ ID NO: 108660 - DNA, 80 bp, synthetic construct
  source 1..80: mol_type = other DNA
attgagcatcctacaacaaaagcacccaccactgctaatacagctacatcaattaaatcaacaaccacacagcctactac

SEQ ID NO: 108661 - DNA, 80 bp, synthetic construct
  source 1..80: mol_type = other DNA
acctagccgatgtcacaggatcgagccccgtcatagatgtgaagcaagatgaagatggctctttttcaattagggacgtc

SEQ ID NO: 108662 - DNA, 80 bp, synthetic construct
  source 1..80: mol_type = other DNA
ggcggtggcgacggcgcaccactcttccggagcgcccgggccggtggtcgccgcctcgggcccgccagcgccgcccggac

SEQ ID NO: 108663 - DNA, 80 bp, synthetic construct
  source 1..80: mol_type = other DNA
ggagtggaaaccttcaacaggctggcacaactggcaagaggtgcccttctgctcacaccacttcaatgaactaatgctga

SEQ ID NO: 108664 - DNA, 80 bp, synthetic construct
  source 1..80: mol_type = other DNA
gcccacttcctatctcagacaaagcagagtggggaaaaccttccctatttggtagcgtaccaagccaccgtgtgcgctag

SEQ ID NO: 108665 - DNA, 80 bp, synthetic construct
  source 1..80: mol_type = other DNA
ttttgtgggacgacgtggacagcgcggtgttctccccaattttgcaaaagcgccaggaggcggtgcgcacgcccgcgagc

SEQ ID NO: 108666 - DNA, 80 bp, synthetic construct
  source 1..80: mol_type = other DNA
gtttccgcgggcgcctccgggctgccgccgagcgggaggaaccgacgattggagggactcagccggtgacatacgtgctt

SEQ ID NO: 108667 - DNA, 80 bp, synthetic construct
  source 1..80: mol_type = other DNA
gtgccgtcagagtgtttgctcccacgcaagaggttccctccggccatccccgtctgggcgcgcccggactacaacccccc

SEQ ID NO: 108668 - DNA, 80 bp, synthetic construct
  source 1..80: mol_type = other DNA
gggtccttccaaccagcatgggtaacaccattacatgctacttgaaggcacaggcagcgtgccgcgcagcaggcctcacc

SEQ ID NO: 108669 - DNA, 80 bp, synthetic construct
  source 1..80: mol_type = other DNA
aacagggaggtgtgtccagtttgtttcagaatctcggggtgtccgtaactccgatccaaaggattgtcctgagcggtgaa

SEQ ID NO: 108670 - DNA, 80 bp, synthetic construct
  source 1..80: mol_type = other DNA
atttggggcacttgcagatttgtaaggccacgcacggcgtggagacaggccgacgcggaggctgctctaaaaatttaagg

SEQ ID NO: 108671 - DNA, 80 bp, synthetic construct
  source 1..80: mol_type = other DNA
tgcctatgtgtgggcagcgcagtcatttgcggccggattgtgacctccgggaagccggcagtgatgccggaccgagaggt

SEQ ID NO: 108672 - DNA, 80 bp, synthetic construct
  source 1..80: mol_type = other DNA
tgagagcctggagacaccgggccagggcggtcagagcgaagctcattgcccaaggtgggaaagccgctatttgcggtaaa

SEQ ID NO: 108673 - DNA, 80 bp, synthetic construct
  source 1..80: mol_type = other DNA
ctagaaaccaccatgaggtccccagtgtttactgacaattcaactccacccgccgtgccgcaaacctatcaagtggccca

SEQ ID NO: 108674 - DNA, 80 bp, synthetic construct
  source 1..80: mol_type = other DNA
tcgggttgcctcgtagctttcaagatcatgagcggcgaggccccgtcagtggaggatatggtcaatttactacccgctct

SEQ ID NO: 108675 - DNA, 80 bp, synthetic construct
  source 1..80: mol_type = other DNA
agttcacctccaggtacaagttccggagttcccacagaacatacaacttgcacaaatggacccatattagtaagcgtggc

SEQ ID NO: 108676 - DNA, 80 bp, synthetic construct
  source 1..80: mol_type = other DNA
ctttcatccatgacaggcaccgttgcaagtgttagtatattccttagatttgaccaaaacggtgttctaatggagaactc

SEQ ID NO: 108677 - DNA, 80 bp, synthetic construct
  source 1..80: mol_type = other DNA
gagctctcgtagcctttaagatcatgagcggcgagtctccttccatggaggacgttgtcaacctgctgcctgcattgtta

SEQ ID NO: 108678 - DNA, 80 bp, synthetic construct
  source 1..80: mol_type = other DNA
tgggacacatggtatcggctggtacctggtagccttttgcgcagcgtggtacgtgcggggtaaacttgtcccgctagtga

SEQ ID NO: 108679 - DNA, 80 bp, synthetic construct
  source 1..80: mol_type = other DNA
cgccttgccggtggcaagtatgtgcaagcgtgtctcttgaaaatcggagcctggaccggtacgtacatctacaaccacct

SEQ ID NO: 108680 - DNA, 80 bp, synthetic construct
  source 1..80: mol_type = other DNA
tgacctatgtacctcgctttgagttaccaagaatcctaatcgggtggcccgtaatatgaatgaaaaatacggcgcaacta

SEQ ID NO: 108681 - DNA, 80 bp, synthetic construct
  source 1..80: mol_type = other DNA
ggtggatgggataataacaatagacctagatcctgtaatatatgattcaaaatttgaaaagcaactgggacaggtcatgc

SEQ ID NO: 108682 - DNA, 80 bp, synthetic construct
  source 1..80: mol_type = other DNA
actgggcttatacacttgcatcaaaatatagtggatgtccaatacctgtacgggatctctacctccgtggtggcatgggc

SEQ ID NO: 108683 - DNA, 80 bp, synthetic construct
  source 1..80: mol_type = other DNA
agacttaccaagtgggctaccttcacgcgcccacgggtagcgggaagagcaccaaggttccggtggcctacgccagtcag

SEQ ID NO: 108684 - DNA, 80 bp, synthetic construct
  source 1..80: mol_type = other DNA
cacctgattttctgccactctaagaagaaatgcgacgagctcgcggcggcccttcggggcatgggcttgaacgcagtggc

SEQ ID NO: 108685 - DNA, 80 bp, synthetic construct
  source 1..80: mol_type = other DNA
gggtgtagcaaagtccttagattttatcccagtggaaaacatggagacgactatgcgctctccttcattcacagacaact

SEQ ID NO: 108686 - DNA, 80 bp, synthetic construct
  source 1..80: mol_type = other DNA
gttcacctcctgccgtccctagcacttaccaagtgggttacctacacgctcccaccggaagcggcaagagtaccaaggta

SEQ ID NO: 108687 - DNA, 80 bp, synthetic construct
  source 1..80: mol_type = other DNA
ccatctcctacctgaagggctcttcgggtggcccgctactatgcccctcagggcacgtggcgggcctattcagggctgcg

SEQ ID NO: 108688 - DNA, 80 bp, synthetic construct
  source 1..80: mol_type = other DNA
aaatacaatattggaggacgaactgcatttatctccgtttgagctgggacccacacttcaggacctatatgatttggagg

SEQ ID NO: 108689 - DNA, 80 bp, synthetic construct
  source 1..80: mol_type = other DNA
caatgagagaagcgaatgctctatagtgatcaaatgtgagcacaaatgttctctcaacatcacattcaagaataagacca

SEQ ID NO: 108690 - DNA, 80 bp, synthetic construct
  source 1..80: mol_type = other DNA
gtggatgaactctacggggttcgtcaaaacgtgcggtgcgccaccatgtaacattgggccgccctctaacagcactctga

SEQ ID NO: 108691 - DNA, 80 bp, synthetic construct
  source 1..80: mol_type = other DNA
tttcgcatggctctcccaaggggccccgggtcgacccgacccacacccacccacccacatacacacacaaccagacgcgg

SEQ ID NO: 108692 - DNA, 80 bp, synthetic construct
  source 1..80: mol_type = other DNA
accgacatcaagaggcacagtaatggacattatatcgagaagagaccaaagaggtagtggacaagttgtcacctacggcc

SEQ ID NO: 108693 - DNA, 80 bp, synthetic construct
  source 1..80: mol_type = other DNA
gggcgggcatggggggggagggcatgagctgggcctgactcgggcgccccgttgcgtacagcgggggggccgccggggtg

SEQ ID NO: 108694 - DNA, 80 bp, synthetic construct
  source 1..80: mol_type = other DNA
agtcttgcacctggccagaaacgcacaccctatggggtgatggcgttgttgaaagcgaaatgatcatcccggtaacacta

SEQ ID NO: 108695 - DNA, 80 bp, synthetic construct
  source 1..80: mol_type = other DNA
tctggagttagatttgggaacatcattgtataacaagcgagttcacgttttacaacttgtttgtaacattgtacttgatc

SEQ ID NO: 108696 - DNA, 80 bp, synthetic construct
  source 1..80: mol_type = other DNA
ctgcaacgttgcagtcactcaggttgttgactttagcctagatccaacctttaccatcaccactcaaaccgtccctcagg

SEQ ID NO: 108697 - DNA, 80 bp, synthetic construct
  source 1..80: mol_type = other DNA
gctggtccaagcgtccctgcccccgcgctcacctataccagggcgctgtggagggtttccgctgaggaatatgtggaggt

SEQ ID NO: 108698 - DNA, 80 bp, synthetic construct
  source 1..80: mol_type = other DNA
aatatttacagactctattcttattttaaactcaactcggcccctatgtaatgtaaacgaatggaaacattttcgcgtgt

SEQ ID NO: 108699 - DNA, 80 bp, synthetic construct
  source 1..80: mol_type = other DNA
catatgcaggccctttttcgcagcacaattaccgccagggctacgccacgcaaaccgcgggcccatggcacttgggcaaa

SEQ ID NO: 108700 - DNA, 80 bp, synthetic construct
  source 1..80: mol_type = other DNA
aggttgggtgtgcgcgcgactaggaagacttcggagcggtcgcaacctcgtggcaggcgtcagcctatccccaaggcacg

SEQ ID NO: 108701 - DNA, 80 bp, synthetic construct
  source 1..80: mol_type = other DNA
ggcgcacggacttgcgtttagcgtgcgcgcgaacgtgccgcctcccccgagtcttcggaatgtcttggcggccgtcaaga

SEQ ID NO: 108702 - DNA, 80 bp, synthetic construct
  source 1..80: mol_type = other DNA
gagagacctgcgcctcatggccaacgcaatctgttcagctgttccagtagactgggtgcccacaggccggacttcatggt

SEQ ID NO: 108703 - DNA, 80 bp, synthetic construct
  source 1..80: mol_type = other DNA
caggactgagatgagtccactattattttccaccactcaactggccattctaccttgcacattcacaaccatgcccgcac

SEQ ID NO: 108704 - DNA, 80 bp, synthetic construct
  source 1..80: mol_type = other DNA
gaagaccactggttctcgcgtgaaaactcttacagtggagtagaaggagaaggactgcacaagctaggctacatattaag

SEQ ID NO: 108705 - DNA, 80 bp, synthetic construct
  source 1..80: mol_type = other DNA
gctatgccgtgtgcaagcacatggcttaaagatatctgggattgggtgtgtactgtcctatcagatttcaagacctggct

SEQ ID NO: 108706 - DNA, 80 bp, synthetic construct
  source 1..80: mol_type = other DNA
gtggtcggctgggtcccggtgagaggtgagggagttcaacgaggccgagagcgaggcgaccgcggggcgcgtgaggcgcc

SEQ ID NO: 108707 - DNA, 80 bp, synthetic construct
  source 1..80: mol_type = other DNA
ctgcctgtgcgtaggcagcgcagtcatctgcggccgaatcataacttccgggaaaccggcggtgatgccggaccgggaga

SEQ ID NO: 108708 - DNA, 80 bp, synthetic construct
  source 1..80: mol_type = other DNA
gaatgagtcagacgtgttcttgctggagtccctgcgaccccccagcggccggtggtttgggtgcacgtggatgaactctt

SEQ ID NO: 108709 - DNA, 80 bp, synthetic construct
  source 1..80: mol_type = other DNA
gacaaggaggtcttgtacgaggccttcgatgagatggaggaatgcgcctccaaagccgctcttctcgaagaggggcaacg

SEQ ID NO: 108710 - DNA, 80 bp, synthetic construct
  source 1..80: mol_type = other DNA
tagacgcggcaattcgtattagcgcaaactgtatttttttgggacgtaacgataattttggcgtgggggatccatgttgg

SEQ ID NO: 108711 - DNA, 80 bp, synthetic construct
  source 1..80: mol_type = other DNA
gcggctagcgccgccggtactgccggctggtggtgggcggtgcttttcctgtgctgtgtttggtatgtgaaaggccgcct

SEQ ID NO: 108712 - DNA, 80 bp, synthetic construct
  source 1..80: mol_type = other DNA
tttggctggagccattcctgtggaattttcaagcaacactgtcaagttgacgtcgggtcatttgaagtgtagagtgaaga

SEQ ID NO: 108713 - DNA, 80 bp, synthetic construct
  source 1..80: mol_type = other DNA
atggtgcccaagcgccggcgcgtggaggacgtgctggacaccgtgaaaatggatgtggagcccgaggtcaaggtgcgccc

SEQ ID NO: 108714 - DNA, 80 bp, synthetic construct
  source 1..80: mol_type = other DNA
aacctatggtttgacaggcctgtggcccctagccctgctcgacctcctgctccctcagcgtgcttacgcttggacgggag

SEQ ID NO: 108715 - DNA, 80 bp, synthetic construct
  source 1..80: mol_type = other DNA
atctattgaactctcccggctcctccgtgttagggaagtctcttggggaaatctattgacctctcgccgcccccccccgg

SEQ ID NO: 108716 - DNA, 80 bp, synthetic construct
  source 1..80: mol_type = other DNA
gggggcgtggagcacaggctcaatgccgcatgcaattggactcgaggagagcgctgtaacttggaggacagggataggtc

SEQ ID NO: 108717 - DNA, 80 bp, synthetic construct
  source 1..80: mol_type = other DNA
aaccggtgagtacaccggaattgccaggacgaccgggtcctttcttggattaacccgctcaatgcctggagatttgggcg

SEQ ID NO: 108718 - DNA, 80 bp, synthetic construct
  source 1..80: mol_type = other DNA
ggtcatctccaccgctacccagactttcctggcaagtgccgtcaacggggtcttatggacagtgtaccacggcgctggtt

SEQ ID NO: 108719 - DNA, 80 bp, synthetic construct
  source 1..80: mol_type = other DNA
ttgtctgcgtattccagggcgtggctcagttgaatctcccgcagcacctctaccagcaggtccgcggtgggctggagaaa

SEQ ID NO: 108720 - DNA, 80 bp, synthetic construct
  source 1..80: mol_type = other DNA
gcaattctctgatgcggcaccacaacatggtgtactccacgacttcccgctctgccgtcactcggcagaagaaggtcacc

SEQ ID NO: 108721 - DNA, 80 bp, synthetic construct
  source 1..80: mol_type = other DNA
gctctaagtttgggtacggggcaaaagaagtccgaagccatgctagcaaagccattaaccacatcaactccgtgtgggag

SEQ ID NO: 108722 - DNA, 80 bp, synthetic construct
  source 1..80: mol_type = other DNA
tatgccctacatccttccatcgcgcctacccccggctatcgtggctacacctaccgccccagaagacgagcaactacccg

SEQ ID NO: 108723 - DNA, 80 bp, synthetic construct
  source 1..80: mol_type = other DNA
ggcatgtggacctaatggtaggcgcggccactttgtgttctgccctatatgttggggacctctgtggaggtgccttccta

SEQ ID NO: 108724 - DNA, 80 bp, synthetic construct
  source 1..80: mol_type = other DNA
gtgctctatgggatgtgcctgctcccaaggaagtaaaaaagggggagaccacagatggagtgtacagagtaatgactcgt

SEQ ID NO: 108725 - DNA, 80 bp, synthetic construct
  source 1..80: mol_type = other DNA
accgacgcacttcctcgtacttgtggtagcagaaccacgtccgccgccaacaggtctccacgtaacgccggtccctgcgt

SEQ ID NO: 108726 - DNA, 80 bp, synthetic construct
  source 1..80: mol_type = other DNA
ctgtttgggcaaagaattgaaaccaaggagaattttagcattggggagttccttttggacctgaggccggcaacggcttg

SEQ ID NO: 108727 - DNA, 80 bp, synthetic construct
  source 1..80: mol_type = other DNA
gtcgcgccggggcccggacgtacacgtgatactgagacaaagcgggtccatccctgggccacctctcgagggccaccgcg

SEQ ID NO: 108728 - DNA, 80 bp, synthetic construct
  source 1..80: mol_type = other DNA
gcgggtctgcgggccaggaccagggggggcgggcgccgcagcttcgccaggccttccgcacggtcgtggttaacaacatc

SEQ ID NO: 108729 - DNA, 80 bp, synthetic construct
  source 1..80: mol_type = other DNA
tgcacttgaatatttcgacttaggttttttggcgttagcgtccacacagtttctttacgggcaaagcgagggtcggtgat

SEQ ID NO: 108730 - DNA, 80 bp, synthetic construct
  source 1..80: mol_type = other DNA
taccctggcaccatcactggacaccgcatggcatgggacatgatgatgaactggtcgcccacggccaccatgatcctggc

SEQ ID NO: 108731 - DNA, 80 bp, synthetic construct
  source 1..80: mol_type = other DNA
gatgtacgttggcggcctggagcatcggttggaggcggcgtgcaactggaccagaggagagccctgcgatttggagcaca

SEQ ID NO: 108732 - DNA, 80 bp, synthetic construct
  source 1..80: mol_type = other DNA
tgagccagaccccatcatcgtggatgacaaatcagacgacggatcttactcgtcgatgcctccacttgaaggggagcctg

SEQ ID NO: 108733 - DNA, 80 bp, synthetic construct
  source 1..80: mol_type = other DNA
cccgcttgaaccagatgtcggccctggagttctactcctacaaaaagtcaggcatcaccgaggtgtgcagagaagaggcc

SEQ ID NO: 108734 - DNA, 80 bp, synthetic construct
  source 1..80: mol_type = other DNA
ggtccttatattggttacaacaaagaaggtacagacagagaacaatatgaagtgtcagtattagatttaatgccaattgc

SEQ ID NO: 108735 - DNA, 80 bp, synthetic construct
  source 1..80: mol_type = other DNA
tttgaccaaatgaaaaacaacatgtaacggttcaataaaagcttttattgattcaaaaaattcatgcatgcagacttttt

SEQ ID NO: 108736 - DNA, 80 bp, synthetic construct
  source 1..80: mol_type = other DNA
atggggaataccataacctgctatctgaaagcacaagcggcatgcagagcagccaacctcaaggattttgacatgttggt

SEQ ID NO: 108737 - DNA, 80 bp, synthetic construct
  source 1..80: mol_type = other DNA
acactaagatattgcttgagcccgagagcatgtccaaggtgaacctgaacggggtgtttgacatgaccatgaagatctgg

SEQ ID NO: 108738 - DNA, 80 bp, synthetic construct
  source 1..80: mol_type = other DNA
accttctgctttactgctctcctaattacaataattgctttggtgtgtaccctgctttatcttaaatacaaaagtagacg

SEQ ID NO: 108739 - DNA, 80 bp, synthetic construct
  source 1..80: mol_type = other DNA
cacttactctatcactccactggacttgccacggatcatccagagactccatggcatggccgctttctcactccacggtt

SEQ ID NO: 108740 - DNA, 80 bp, synthetic construct
  source 1..80: mol_type = other DNA
ccccaggtggaaccgcattatgcgcggccccgccccgacgcccgcgcgtccgcgtccgtggcggcggcccgttggtcgcg

SEQ ID NO: 108741 - DNA, 80 bp, synthetic construct
  source 1..80: mol_type = other DNA
taacattacatttaaaaaccgtaccatgggaaatgcatgggtgggcgattggaaaccaggagatgagcagaactacacgg

SEQ ID NO: 108742 - DNA, 80 bp, synthetic construct
  source 1..80: mol_type = other DNA
gaactgcaatgagagccttaacaccggctttatagcagggcttttctactacaacaagttcaactcctcgggctgtcccg

SEQ ID NO: 108743 - DNA, 80 bp, synthetic construct
  source 1..80: mol_type = other DNA
ttacacacagaccacaggaccttggcacttggggaaattagaaatggactttgattattgtgaagggacaacagtgatag

SEQ ID NO: 108744 - DNA, 80 bp, synthetic construct
  source 1..80: mol_type = other DNA
catcggtgggcctcgcggttattgttgccttgaccatcttcactcttaccccaacctacaagcagctgctgacaatgtta

SEQ ID NO: 108745 - DNA, 80 bp, synthetic construct
  source 1..80: mol_type = other DNA
ccggaaccgagcccggtcggcccgctcgcgggcccacgagccgcggcgcgccaggcgggcggccgaggcccagaccacca

SEQ ID NO: 108746 - DNA, 80 bp, synthetic construct
  source 1..80: mol_type = other DNA
ccctcgagtgggagcccggggacccagacctagagcctgagcaggtggagcttcagcctcccccccagggtgaggaggta

SEQ ID NO: 108747 - DNA, 80 bp, synthetic construct
  source 1..80: mol_type = other DNA
atggaaaatgcgatcctacacttaccagggtgtgtgccctgcgtgcgggagggcaaccactcgcggtgttggacgccgtt

SEQ ID NO: 108748 - DNA, 80 bp, synthetic construct
  source 1..80: mol_type = other DNA
ccgacgaggtgcgcgtggttatcatcggccaggacccatatcaccaccccggccaggcgcacggacttgcgtttagcgtg

SEQ ID NO: 108749 - DNA, 80 bp, synthetic construct
  source 1..80: mol_type = other DNA
tccagacacgggtttggatgtaactgtccgaaaaaaccactgtttggacataggccatacggacggtagtccagttgacc

SEQ ID NO: 108750 - DNA, 80 bp, synthetic construct
  source 1..80: mol_type = other DNA
gggacctggagaggcgacggcttgtgccatacgacttgcccttgtggtgcgcaaatcgcaggtcatgtgaagaacgggac

SEQ ID NO: 108751 - DNA, 80 bp, synthetic construct
  source 1..80: mol_type = other DNA
ttggaggtcaggggccctcgagatgctgtcatcattcttacagccctattccatccccacttggcctttgacatcaccaa

SEQ ID NO: 108752 - DNA, 80 bp, synthetic construct
  source 1..80: mol_type = other DNA
ttgggatatgatgatgaattggtcccccgctgtgggtatggtggtatcgcacatcttgcgcctgccccagaccttgtttg

SEQ ID NO: 108753 - DNA, 80 bp, synthetic construct
  source 1..80: mol_type = other DNA
ggcagataggcctggtccttttggtggtcatatcaattttcacacttagcccggcttacaagatccttctctgccgcagt

SEQ ID NO: 108754 - DNA, 80 bp, synthetic construct
  source 1..80: mol_type = other DNA
gtggattcgttgatatcccccaaggcctcaaggcgctccatggcctcgtagaagtccacggcgaagttgaaaaactggga

SEQ ID NO: 108755 - DNA, 80 bp, synthetic construct
  source 1..80: mol_type = other DNA
tgctggcctctttggcgctcctgtgggctggcggtgtaagctacgggaacatggcaggagtggctctcattttctacacg

SEQ ID NO: 108756 - DNA, 80 bp, synthetic construct
  source 1..80: mol_type = other DNA
cggcagctgggcctcaatgccgtcgccttctaccggggcatggacgtagccgtaataccaacttcaggcgatgttgtcgt

SEQ ID NO: 108757 - DNA, 80 bp, synthetic construct
  source 1..80: mol_type = other DNA
cataggtgccggccgagtccgcggtccaccatacccgcctcctcgaggaccacggccagggaacacagataatccaggcg

SEQ ID NO: 108758 - DNA, 80 bp, synthetic construct
  source 1..80: mol_type = other DNA
ggcttacctaaatacaccagggttgcccgtttgccaggaccatctggagttctgggagagcgtcttcacaggcctcaccc

SEQ ID NO: 108759 - DNA, 80 bp, synthetic construct
  source 1..80: mol_type = other DNA
cccgttcggcgatggccacatcctccatgaccacgtcactctcggccatgctccgaatagcctgggagacgagcacatcc

SEQ ID NO: 108760 - DNA, 80 bp, synthetic construct
  source 1..80: mol_type = other DNA
tatccctcttatcccctgccattgccgctcctgattactctaaatgcaaatttgtggaactatggaatttcttagactgc

SEQ ID NO: 108761 - DNA, 80 bp, synthetic construct
  source 1..80: mol_type = other DNA
tcgccgcatattgcctggcgactggatgcgtttccatcatcggccgcttgcacgtcaaccagcgagtcgtcgttgcgccg

SEQ ID NO: 108762 - DNA, 80 bp, synthetic construct
  source 1..80: mol_type = other DNA
gtggggtacatgtgtgatgatactatcacctatgaatgtccagtgctgtcggctggtaatgatccagaagacatcgactg

SEQ ID NO: 108763 - DNA, 80 bp, synthetic construct
  source 1..80: mol_type = other DNA
gccagtctcgttgggctgctctcgccggggcctaagcaaaacatccaactcgttaacaccaatggcagctggcacatcaa

SEQ ID NO: 108764 - DNA, 80 bp, synthetic construct
  source 1..80: mol_type = other DNA
gactgcactatgttggtctgtggtgatgacctggtcgtcatcgctgagagcgatggcgtggaggaggataagcgagccct

SEQ ID NO: 108765 - DNA, 80 bp, synthetic construct
  source 1..80: mol_type = other DNA
tgggtgggctagccctcctggcactaagtccttggatccctgcacatgtggtgccgttgacctgtacctcgtcacccgga

SEQ ID NO: 108766 - DNA, 80 bp, synthetic construct
  source 1..80: mol_type = other DNA
gaagagagattgtagacctcatgtgccatgcaaccttcacaacaagacttttgtcatcaaccagagttccaaactataac

SEQ ID NO: 108767 - DNA, 80 bp, synthetic construct
  source 1..80: mol_type = other DNA
atgaggatggcgtggtatgctgctccatgtcctattcctggactggcgctctgataacaccttgcactgcggaggaggag

SEQ ID NO: 108768 - DNA, 80 bp, synthetic construct
  source 1..80: mol_type = other DNA
attggattaagctttccagcggaaacgatgctgttgtaacgttgtgtaaaggtgacacttggataaaacacacatgcaat

SEQ ID NO: 108769 - DNA, 80 bp, synthetic construct
  source 1..80: mol_type = other DNA
tctctcgtgcctgactacccctgcctccgcggtgcattatgccaataagtccgggatttatcatctcaccaatgattgtc

SEQ ID NO: 108770 - DNA, 80 bp, synthetic construct
  source 1..80: mol_type = other DNA
ctaacctaccaaaacaaggtagtaagggtgcagagaccagcgaaaaatggaaccgtgatggatgtcatatccagacgtga

SEQ ID NO: 108771 - DNA, 80 bp, synthetic construct
  source 1..80: mol_type = other DNA
gcgggcccatcactgttagggtgttaggttgggaggtggcacaaaaagcgacacacccgtgttgtagttgtccgctggag

SEQ ID NO: 108772 - DNA, 80 bp, synthetic construct
  source 1..80: mol_type = other DNA
tagaaactacggtagtagcatcgaagctatgattttagcacctccgtccccatccgagatcctgccgggggacccaccac

SEQ ID NO: 108773 - DNA, 80 bp, synthetic construct
  source 1..80: mol_type = other DNA
ccgccctcggagataatgccccggagctgctcgcacagcgagctttcgtgcgctccgccgccgaggcttgaggccgcgca

SEQ ID NO: 108774 - DNA, 80 bp, synthetic construct
  source 1..80: mol_type = other DNA
cacttctttcgtgcctgaccgttcccgcctcggccatacactatcgcaatgcttcggacgtctaccacatcaccaacgac

SEQ ID NO: 108775 - DNA, 80 bp, synthetic construct
  source 1..80: mol_type = other DNA
ccgtggagcaatgacaccgcgcccctggatgtttgccccgggacccccggcccgggcgccgacgccggtggtccctcagc

SEQ ID NO: 108776 - DNA, 80 bp, synthetic construct
  source 1..80: mol_type = other DNA
aggcgggggaaccttctcctccttggccccgccgatgacttgaaaagcaaaggctgggcactgctagcgccaataacagc

SEQ ID NO: 108777 - DNA, 80 bp, synthetic construct
  source 1..80: mol_type = other DNA
acaaaaaactggaattggctttagcacctccatttgatgtcagagataacaagctagctattctagtaggagatggatta

SEQ ID NO: 108778 - DNA, 80 bp, synthetic construct
  source 1..80: mol_type = other DNA
gggggggctaggagccgaaccgatggccgccacacgcgacggagggcccgaaagactaccacggggggggggtgtgggaa

SEQ ID NO: 108779 - DNA, 80 bp, synthetic construct
  source 1..80: mol_type = other DNA
gcaggttctggacagccactaccgggacgtgctcaaggaggttaaggcggcggcgtcgaaagtgaaggctaacttgctat

SEQ ID NO: 108780 - DNA, 80 bp, synthetic construct
  source 1..80: mol_type = other DNA
tgctttggccgcgtattgcctatccacaggctgcgtggtcataataggcagacttgtcttgtccggaaagccggcaatca

SEQ ID NO: 108781 - DNA, 80 bp, synthetic construct
  source 1..80: mol_type = other DNA
gtagggtgctgaaagataccacgccaatgttaccatgctacgggtcttacgccaaaccaacaaatgaaaagggcggtcag

SEQ ID NO: 108782 - DNA, 80 bp, synthetic construct
  source 1..80: mol_type = other DNA
tcgacacgtgggacctggggagggggcggtgcagtggatgaacaggctcatcgcattcgcatcccggtgtaaccacgtct

SEQ ID NO: 108783 - DNA, 80 bp, synthetic construct
  source 1..80: mol_type = other DNA
tgcctgagcatttcatgggaaagacacgggaagccttagacacaatgtatctggtggcaacagctgagaaaggtggaaag

SEQ ID NO: 108784 - DNA, 80 bp, synthetic construct
  source 1..80: mol_type = other DNA
ttcctggtgaacgcctggaaatcgaagaagtgccctatgggcttctcgtatgacacccgctgttttgactcaacagttac

SEQ ID NO: 108785 - DNA, 80 bp, synthetic construct
  source 1..80: mol_type = other DNA
tgacaagcacatccaaagcgcagtagtcaagggtttcgcgtatcagatcgtaacgagactgttgcttcttttcccaaagt

SEQ ID NO: 108786 - DNA, 80 bp, synthetic construct
  source 1..80: mol_type = other DNA
gtttgtgcaagggcgaaagcccctcccccctcttgggacgtcatgtggaagtgcctcacccgcttaaagcctatgctgac

SEQ ID NO: 108787 - DNA, 80 bp, synthetic construct
  source 1..80: mol_type = other DNA
atgttccacctcatggctacgggatatatgggactgggtgtgcaccgtactctcggacttcaagacctggctcaaggcca

SEQ ID NO: 108788 - DNA, 80 bp, synthetic construct
  source 1..80: mol_type = other DNA
ttgctacgccaccacaatctggtgtactccaccacctcacgcagtgctagccaaaggcagaagaaagtcacgtttgacag

SEQ ID NO: 108789 - DNA, 80 bp, synthetic construct
  source 1..80: mol_type = other DNA
taatgactacatcttctattgataaaggatattggaattatagaaataaaaacagcgttgttggaactgcttatgaaaac

SEQ ID NO: 108790 - DNA, 80 bp, synthetic construct
  source 1..80: mol_type = other DNA
gacttgtatgctgctccatgtcctactcatggacagggatcccgatcacgccgtgcgccgctgaagaagagaaattgccc

SEQ ID NO: 108791 - DNA, 80 bp, synthetic construct
  source 1..80: mol_type = other DNA
gaggtctaccagtgttgtgacctggagcctgaaacccgcaaggtaataaccgccctcacggaaagactctacgtgggcgg

SEQ ID NO: 108792 - DNA, 80 bp, synthetic construct
  source 1..80: mol_type = other DNA
acgctgccaagggcctcctgttgacggtgctgttgagacgaccggcgctgagatatgcacccgccttggattagagccag

SEQ ID NO: 108793 - DNA, 80 bp, synthetic construct
  source 1..80: mol_type = other DNA
ataccaatctgggcccggccagactacaacccgcctctggttgagtcgtggaaacaaccggattacgaacccccggttgt

SEQ ID NO: 108794 - DNA, 80 bp, synthetic construct
  source 1..80: mol_type = other DNA
gtcattctgattaccgttgagctcgagtgcttgcaacgcttctttgccaatccccagacgctgcgcaagattgaggaatc

SEQ ID NO: 108795 - DNA, 80 bp, synthetic construct
  source 1..80: mol_type = other DNA
atcgccagtgcgttccggacgccttcgccccacacagccctcccgtccgacacccccatatcgcttcccgacctccggtc

SEQ ID NO: 108796 - DNA, 80 bp, synthetic construct
  source 1..80: mol_type = other DNA
gaactcaatagagtgggagcatgcctcaggaagcttggggctcccccattgagagcgtggagacatcgggctagagcggt

SEQ ID NO: 108797 - DNA, 80 bp, synthetic construct
  source 1..80: mol_type = other DNA
gccgcgttgtacgaaaagggcgcacactgacgcttccatctgtgcgttaccaccctagcatactctaataagctgcgctg

SEQ ID NO: 108798 - DNA, 80 bp, synthetic construct
  source 1..80: mol_type = other DNA
ctgtgggccggtgttttgcttcaccccctcccctgtggtggtggaggtaactgacatcagaggcaatcccaccttcaact

SEQ ID NO: 108799 - DNA, 80 bp, synthetic construct
  source 1..80: mol_type = other DNA
ccagacacgcgtagtttgggtatcgggtaacgcaggtttaatgtcactttgcatttgaacagacgtgtttggacttccgt

SEQ ID NO: 108800 - DNA, 80 bp, synthetic construct
  source 1..80: mol_type = other DNA
tgtgaaattcacaagacttacagccatgtccaggaagctccgggcaatccaactgaaaaccaacactggcagccttcact

SEQ ID NO: 108801 - DNA, 80 bp, synthetic construct
  source 1..80: mol_type = other DNA
gttatgtgttcggtctgggtcttctgtttcttcttcatctcgggaaggtgagacgatgctgctggtgatgaaattaaagt

SEQ ID NO: 108802 - DNA, 80 bp, synthetic construct
  source 1..80: mol_type = other DNA
tggattgaagacgaatgaccgaaagtggtgctttgagggcccagaagaacatgagatcttgaatgacagtggtgagacag

SEQ ID NO: 108803 - DNA, 80 bp, synthetic construct
  source 1..80: mol_type = other DNA
catcgtattctccgcgatggagacgaaggtcatcacgtggggggctgacacggccgcgtgtgggaacatacttgctgttc

SEQ ID NO: 108804 - DNA, 80 bp, synthetic construct
  source 1..80: mol_type = other DNA
ttggaatagttagcattcttctaagttcacttctcaagaatgatgtgccactagctggcccactaatagctggaggcatg

SEQ ID NO: 108805 - DNA, 80 bp, synthetic construct
  source 1..80: mol_type = other DNA
ttactgaaggctctcgctggggttcctgtggcacacattgagggaaccaagtaccacctgaagagtggccatgtgacctg

SEQ ID NO: 108806 - DNA, 80 bp, synthetic construct
  source 1..80: mol_type = other DNA
accacacagactgtccctcaagacgccgtctcacgcagtcagcgccggggacgcacaggcaggggaagactgggcatcta

SEQ ID NO: 108807 - DNA, 80 bp, synthetic construct
  source 1..80: mol_type = other DNA
tacgacatcatcatctgtgacgagtgtcattctacagaccctacgacggtgctgggcataggcacggttctcgaccaggc

SEQ ID NO: 108808 - DNA, 80 bp, synthetic construct
  source 1..80: mol_type = other DNA
atggggttttcctatgacacccgctgttttgactctacagtcacggagagagacatcagaaccgaggagtccatctatct

SEQ ID NO: 108809 - DNA, 80 bp, synthetic construct
  source 1..80: mol_type = other DNA
ttacatctatgaccatctcgcacctcttgacacttgggcggccgatggccttaaagacctggcagtggcattggagcctg

SEQ ID NO: 108810 - DNA, 80 bp, synthetic construct
  source 1..80: mol_type = other DNA
gacgcggtgtcccgaagtcaacgcaggggccgtacgggccggggtagaccgggaatataccggtttgtcactccagtgga

SEQ ID NO: 108811 - DNA, 80 bp, synthetic construct
  source 1..80: mol_type = other DNA
tggccgagctcgcgtctcaccgggggcgggatggagcatccgggagactgcttgcctagcaaaatcatatgcgcaaatgt

SEQ ID NO: 108812 - DNA, 80 bp, synthetic construct
  source 1..80: mol_type = other DNA
ttgggtcataaagtgggagtatgttgtcctcctgttcctgctcctggctgacgcccgcctctgtgcctgcttgtggctca

SEQ ID NO: 108813 - DNA, 80 bp, synthetic construct
  source 1..80: mol_type = other DNA
ggatcccactggggcgttctagcggggttggcttactattccatggctggcaactgggctaaggtggtggttgtgttgct

SEQ ID NO: 108814 - DNA, 80 bp, synthetic construct
  source 1..80: mol_type = other DNA
ggagctcagagcctgagggagaagtttccacccccgctgagtgtctactccctgggacaaaatacccaaaacccttgcct

SEQ ID NO: 108815 - DNA, 80 bp, synthetic construct
  source 1..80: mol_type = other DNA
tccccaccgaggcccttgggggcccccctcctcctccccgcttcaccctgggtggcggctgttgttcctgtcgtgacaca

SEQ ID NO: 108816 - DNA, 80 bp, synthetic construct
  source 1..80: mol_type = other DNA
gctgtggaagacccaaagttctgggaaatggtggatgaggaaagggaatgccacctccgaggggaatgccgaacctgcat

SEQ ID NO: 108817 - DNA, 80 bp, synthetic construct
  source 1..80: mol_type = other DNA
aaggacgtcaagcttgctgcctctaaggttagtgccaggcttctctcactagaagaggcatgcgcattgaccccgcccca

SEQ ID NO: 108818 - DNA, 80 bp, synthetic construct
  source 1..80: mol_type = other DNA
ttatcaagccactgtctgtgctcgtgcaaaggcgaacccaccatcttgggatgagatgtggaaatgtctcatacgcctga

SEQ ID NO: 108819 - DNA, 80 bp, synthetic construct
  source 1..80: mol_type = other DNA
cggggcacacaacgataccgccctcgtgtggatgaagataaaccagacgctgttgtttctgggcccgccgaccgcccccc

SEQ ID NO: 108820 - DNA, 80 bp, synthetic construct
  source 1..80: mol_type = other DNA
attcctatggctacttatggctggaatttggtcaaactccattcaggggttgacgtgttctacaaacccacagagcaagt

SEQ ID NO: 108821 - DNA, 80 bp, synthetic construct
  source 1..80: mol_type = other DNA
aaccaaggctgacatcagcaagctactcggaggccaacccaatccagttggatttgcatcaagaaccattccctgggaca

SEQ ID NO: 108822 - DNA, 80 bp, synthetic construct
  source 1..80: mol_type = other DNA
ccgatggaaaccaaactggtgatggaaaccgcgtttattgcgtttctgcgctttctggcgattccgccgaccgcgggcgt

SEQ ID NO: 108823 - DNA, 80 bp, synthetic construct
  source 1..80: mol_type = other DNA
tgtggtgggggccacgaatgatggtctaaagatcccatgccaggtgccagcacccgagttcttcaccgagttggacggtg

SEQ ID NO: 108824 - DNA, 80 bp, synthetic construct
  source 1..80: mol_type = other DNA
ccttgaagacagagatagggccgagttgagcccgctcctgcacaccaccacacagtgggccatattgccgtgctccttca

SEQ ID NO: 108825 - DNA, 80 bp, synthetic construct
  source 1..80: mol_type = other DNA
atcccacttgcaggtgtgggttcccccattgctcgtccgtggtggccgagacggcgcgatcctattattaagtctcctgt

SEQ ID NO: 108826 - DNA, 80 bp, synthetic construct
  source 1..80: mol_type = other DNA
tacatgtggcttggagcacgcttcttagagtttgaagccctgggattcctgaatgaagatcactggttttccagagagaa

SEQ ID NO: 108827 - DNA, 80 bp, synthetic construct
  source 1..80: mol_type = other DNA
ttggaccccactttcactataaacacccagaccgttccccaggatgctgtctcgcgtagccagcgtcggggtaggaccgg

SEQ ID NO: 108828 - DNA, 80 bp, synthetic construct
  source 1..80: mol_type = other DNA
gcgcgggcagcgacagtgagtgcgaggctcctcagtacagaggaagcttgtgatcttactccgccacactcggcacgttc

SEQ ID NO: 108829 - DNA, 80 bp, synthetic construct
  source 1..80: mol_type = other DNA
gcttaccaagcgacggtgtcggccaaggtctggctcgctccaccaagctgggacaccatgtggaagtgcctaattcgcct

SEQ ID NO: 108830 - DNA, 80 bp, synthetic construct
  source 1..80: mol_type = other DNA
cggcttttcaagctgggaggaggtccccttttgttcacaccacttccacgagctagtgatgaaggacggacgcaccctgg

SEQ ID NO: 108831 - DNA, 80 bp, synthetic construct
  source 1..80: mol_type = other DNA
cgaccacctcacacccttgcaggactgggcagcaactggacttgcagatctggcagtggcaacagaaccagtgatcttct

SEQ ID NO: 108832 - DNA, 80 bp, synthetic construct
  source 1..80: mol_type = other DNA
ggtctgcgagaaaatggccctctatgacattacacaaaagcttcctcaggcggtaatgggagcttcctatggcttccagt

SEQ ID NO: 108833 - DNA, 80 bp, synthetic construct
  source 1..80: mol_type = other DNA
atgactggatttaccggtgattttgactccgtgatagactgcaacacctgtgtcacccaaacagtggacttcagccttga

SEQ ID NO: 108834 - DNA, 80 bp, synthetic construct
  source 1..80: mol_type = other DNA
acggttcccccacccacgcgtcgttggtcttcatggcgatgaagcgaaaccccagccgggttttttgtgcgtactcgaaa

SEQ ID NO: 108835 - DNA, 80 bp, synthetic construct
  source 1..80: mol_type = other DNA
tgtacacgatggatggagagtataggctcaggggagaagagcggaagaactttctggaattgttgagaacggctgacctt

SEQ ID NO: 108836 - DNA, 80 bp, synthetic construct
  source 1..80: mol_type = other DNA
ggctttatccaccggccttctgcacctccaccaaaacatcgtggacgtgcagtatttgtatggtctgtcaccagctctca

SEQ ID NO: 108837 - DNA, 80 bp, synthetic construct
  source 1..80: mol_type = other DNA
gccgccgacaccatcgacgccaccacgcggttggtcctgcgctccatctccgagcgcgcggcggtcgaccgcatcagcga

SEQ ID NO: 108838 - DNA, 80 bp, synthetic construct
  source 1..80: mol_type = other DNA
cgcgaccggcttgcgagatctagccgtcgcagtggagcccgtgatcttctcccccatggagaaaaaggttatcgtatggg

SEQ ID NO: 108839 - DNA, 80 bp, synthetic construct
  source 1..80: mol_type = other DNA
tatctacagcccatgctttaagttttttacaccagcggaggttaacactaattgtaatacactggatcggcttctaatgg

SEQ ID NO: 108840 - DNA, 80 bp, synthetic construct
  source 1..80: mol_type = other DNA
ggctgctgcagacggcctccagccaggctgacgcggccactcctatagtccagacacactggcaaaagcttgaggccttc

SEQ ID NO: 108841 - DNA, 80 bp, synthetic construct
  source 1..80: mol_type = other DNA
ccggctgtgccccagacctatcaggtcgggtacttgcatgctccaactggcagtggaaagagcaccaaggtccctgtcgc

SEQ ID NO: 108842 - DNA, 80 bp, synthetic construct
  source 1..80: mol_type = other DNA
cattccgacgccgggctaccgcggcacccggtattacgccagccgcaggcgccccgcaggcaagcgccgtcgccgcacca

SEQ ID NO: 108843 - DNA, 80 bp, synthetic construct
  source 1..80: mol_type = other DNA
gtgagcgggatggcaggagcggcgatcggcagtataggcctgggcaaggtcatagtggacatcttggcagggtatggtgc

SEQ ID NO: 108844 - DNA, 80 bp, synthetic construct
  source 1..80: mol_type = other DNA
gcggaggccctcccgtcccgccgggcgtcgtcgaggtcgtgggtgtggtcggggtcgtggtcgtggtcgtcgccgccctc

SEQ ID NO: 108845 - DNA, 80 bp, synthetic construct
  source 1..80: mol_type = other DNA
tggcgatggatctcatggtctgatttttgtcacggtcggcgcgctccttggccgcgatgttgagctggacatactcgcgc

SEQ ID NO: 108846 - DNA, 80 bp, synthetic construct
  source 1..80: mol_type = other DNA
caatcaaggtgggaaggcatctcatcttctgtcactcaaagaagaagtgcgacgagctcgccgcaaaactggtcgggatg

SEQ ID NO: 108847 - DNA, 80 bp, synthetic construct
  source 1..80: mol_type = other DNA
gagagaagtcattgatgctatgtgccatgccaccctaacttacaggatgttggaaccaactagggttgttaactgggaag

SEQ ID NO: 108848 - DNA, 80 bp, synthetic construct
  source 1..80: mol_type = other DNA
ggcctcctcctcttcctcttcttccatgacgacctcttcttctatttcttcctctgggtgcggtggtggtggcgtggccc

SEQ ID NO: 108849 - DNA, 80 bp, synthetic construct
  source 1..80: mol_type = other DNA
cccatcgaccccctcggggggaagacgggttcattgaggcgccgaatgttcctttgcataggagcgcactggaatgtgac

SEQ ID NO: 108850 - DNA, 80 bp, synthetic construct
  source 1..80: mol_type = other DNA
ggaaaagggggggcctgagaccccggggtcgcactctcaccgtgccgtgggtctgccccggcggccgctcgaggccgggg

SEQ ID NO: 108851 - DNA, 80 bp, synthetic construct
  source 1..80: mol_type = other DNA
cccacttcttttctatactccaaagccaggaagctcttgaaaaagcactggacttcgacatgtacggagtcacatattca

SEQ ID NO: 108852 - DNA, 80 bp, synthetic construct
  source 1..80: mol_type = other DNA
gcaggggagactccacagcgagcttgcttagtcctaggcctctcgcctgtctcaaaggttcctctggtggtcctgttatg

SEQ ID NO: 108853 - DNA, 80 bp, synthetic construct
  source 1..80: mol_type = other DNA
gaagacctggaggaagaacgctgggtgagcaatggaaagaaaggttgaacgccatgaacaaggaagagttttttaagtac

SEQ ID NO: 108854 - DNA, 80 bp, synthetic construct
  source 1..80: mol_type = other DNA
tcaccgaggttgacggcgtgagattacataggttcgcacctatgtgccggccgcttctcagggacgaagtatcatttagc

SEQ ID NO: 108855 - DNA, 80 bp, synthetic construct
  source 1..80: mol_type = other DNA
gaggacttactgtgccctacagattgcttcaggaaacacccagaagccacttacaccaagtgtggtgctggaccctggct

SEQ ID NO: 108856 - DNA, 80 bp, synthetic construct
  source 1..80: mol_type = other DNA
tcgcgtgcccaaggcccgtgatcggggtacttcgccgccgcgacccgccacccggtgtgcgcgatgtttggtcagcagct

SEQ ID NO: 108857 - DNA, 80 bp, synthetic construct
  source 1..80: mol_type = other DNA
aggcgtcgcaagagctcttgcgcatggcgtaagggcccttgaggacggggtaaatttcgcaacagggaacttgcccggtt

SEQ ID NO: 108858 - DNA, 80 bp, synthetic construct
  source 1..80: mol_type = other DNA
gcaggcccttccacgtgtcgtggagttcctgaacgaactcggccacccgctcggggcccgtggccgcgcgcgcggcctga

SEQ ID NO: 108859 - DNA, 80 bp, synthetic construct
  source 1..80: mol_type = other DNA
tttgctcatgcttgcagctgctttctttcaaatggcttactatgacgccaagaatgttttgtcatgggaagtgcctgacg

SEQ ID NO: 108860 - DNA, 80 bp, synthetic construct
  source 1..80: mol_type = other DNA
gtgggccaaggtcattgtcatcctcttactgatggctggagttgaaggcaccaccatgacgactggaggcgtcgcggggc

SEQ ID NO: 108861 - DNA, 80 bp, synthetic construct
  source 1..80: mol_type = other DNA
gacagtatggtttgtggcgagcgtaaaaatgggcaatgaaatcgcagtgtgcttacagagagctgggaagagggtcatcc

SEQ ID NO: 108862 - DNA, 80 bp, synthetic construct
  source 1..80: mol_type = other DNA
gcgggcgggggacgggaacggggacgaggataaggacgtcgacgaggacgatgaagaggacggggacgaggacggggacg

SEQ ID NO: 108863 - DNA, 80 bp, synthetic construct
  source 1..80: mol_type = other DNA
gggtgcagttaaatacatgcccgggacccatgaagcatgcgcgacttccgggcctcggaacccacccgaaacggccaacg

SEQ ID NO: 108864 - DNA, 80 bp, synthetic construct
  source 1..80: mol_type = other DNA
gctgagctcgccgctaaatctttcggcagccccccacctgctgaagtcgcgagcgacgatgcagcctcatcctcagagcc

SEQ ID NO: 108865 - DNA, 80 bp, synthetic construct
  source 1..80: mol_type = other DNA
gggactctccaccttaccgggaaatcccgcagtggcatcaatgatggctttcagcgccgcattaactagtccactgccca

SEQ ID NO: 108866 - DNA, 80 bp, synthetic construct
  source 1..80: mol_type = other DNA
gccagcgaagctgtacctacttcagtttatacaccgactctgccgcctatacctaaattggaagaggaggataagctaga

SEQ ID NO: 108867 - DNA, 80 bp, synthetic construct
  source 1..80: mol_type = other DNA
ggtgtgccccaccgactgcttccgcaaacacccggaagcgacctttgagagatgcggctctgggccctggctcaccccac

SEQ ID NO: 108868 - DNA, 80 bp, synthetic construct
  source 1..80: mol_type = other DNA
tgacaaacagaaggcgacacacaggaggccatcaaaactaaagccgcacacacctgaagcaaaactgattacagtttcta

SEQ ID NO: 108869 - DNA, 80 bp, synthetic construct
  source 1..80: mol_type = other DNA
ttactaacatggaagcccagttagtcagacaaatggaaggagaaggtgtgctgtcaaaggcagacctcgagaaccctcat

SEQ ID NO: 108870 - DNA, 80 bp, synthetic construct
  source 1..80: mol_type = other DNA
ctgcagtcctgaggaggaaaagttgccgatcaacgccttgagcaactcactgttgcggtttcacaacaaggtgtattgca

SEQ ID NO: 108871 - DNA, 80 bp, synthetic construct
  source 1..80: mol_type = other DNA
gtcattgctacctcctccgcctggcaaactacctagcccaccactccgacctcatggaaaattccagcggcgaaggattg

SEQ ID NO: 108872 - DNA, 80 bp, synthetic construct
  source 1..80: mol_type = other DNA
cagactgatcgcgttcgcctcccgaggcaaccacgtgtcacccacgcactacgtgcctgagacggacgcgtcagcaaaag

SEQ ID NO: 108873 - DNA, 80 bp, synthetic construct
  source 1..80: mol_type = other DNA
caaaaaacacttccatgtcattttcatgcattgtgataggaattattacactctatctgggagccgtggtacaagctgac

SEQ ID NO: 108874 - DNA, 80 bp, synthetic construct
  source 1..80: mol_type = other DNA
tctcttctgccctggcggagcttgctacaaagacctttggcagctccggatcgtcggctgttggcagcggcgcggcgacc

SEQ ID NO: 108875 - DNA, 80 bp, synthetic construct
  source 1..80: mol_type = other DNA
ccgcatacgcccagcaaacccgagggttgctgagcgccatagtggtgagcatgacggggcgcgacaagacggaccaggct

SEQ ID NO: 108876 - DNA, 80 bp, synthetic construct
  source 1..80: mol_type = other DNA
atggatgtaaaattcccgggcggaggtcagatcgttggcggagtttacttgttgccgcgcaggggccctagattgggtgt

SEQ ID NO: 108877 - DNA, 80 bp, synthetic construct
  source 1..80: mol_type = other DNA
acccggcacaccttgcccagcacccaactacactcgcgcattattgcgcgtggctgccaacagctacgttgaggtgcgcc

SEQ ID NO: 108878 - DNA, 80 bp, synthetic construct
  source 1..80: mol_type = other DNA
ccgtgtggaaagaccttctggaagacagtgtaacaccaatagataccaccatcatggctaagaacgaagtattctgcgtt

SEQ ID NO: 108879 - DNA, 80 bp, synthetic construct
  source 1..80: mol_type = other DNA
tacccgaccctgatattcgacatcaccaaactgctgctcgccgtcttcggacccctttggattcttcaagccagtttgct

SEQ ID NO: 108880 - DNA, 80 bp, synthetic construct
  source 1..80: mol_type = other DNA
tgatgtcagcgttggggttggcgctggatgagtgcgtgcgcaaacagcgcccccacgcgggcacgcgtagcttgaagcgc

SEQ ID NO: 108881 - DNA, 80 bp, synthetic construct
  source 1..80: mol_type = other DNA
gtatttaaaccagtcgagcccgtcaagaggccactcttgagtgccagcgagtagagatttctctgagctccgctcccaga

SEQ ID NO: 108882 - DNA, 80 bp, synthetic construct
  source 1..80: mol_type = other DNA
cccccgatgattcagacgactcgttgggttacattaccacagttggggccgattctccttctccagtgtacgcggatctt

SEQ ID NO: 108883 - DNA, 80 bp, synthetic construct
  source 1..80: mol_type = other DNA
tatcgatctcatggttggcgctgccgcactctgttcggctatgtatgtgggcgatttgtgcggaggggtcttcctggtag

SEQ ID NO: 108884 - DNA, 80 bp, synthetic construct
  source 1..80: mol_type = other DNA
agagatggagaaagagagctggattgtggataaacagtgggcccaagacctgaccctaccttggcagagtggaagtggcg

SEQ ID NO: 108885 - DNA, 80 bp, synthetic construct
  source 1..80: mol_type = other DNA
tctcattggccgagtggaagctgccttggagaaccttattgttcttaacgctacatccgctgccagcagtcaggggtggg

SEQ ID NO: 108886 - DNA, 80 bp, synthetic construct
  source 1..80: mol_type = other DNA
agatcaacgccctacgcggccctagccctggtaatggtgttaaccagggcgaaaggactagaggttagaggagaccccgc

SEQ ID NO: 108887 - DNA, 80 bp, synthetic construct
  source 1..80: mol_type = other DNA
gatgtcggccctggagttctactcctacaaaaagtcaggcatcaccgaggtgtgcagagaagaggcccgccgcgccctca

SEQ ID NO: 108888 - DNA, 80 bp, synthetic construct
  source 1..80: mol_type = other DNA
cgcggaaacttaccagagccatggccacagcgtgtgtcctttcttcctctctttcctcctcggcgcggcagaatgagaag

SEQ ID NO: 108889 - DNA, 80 bp, synthetic construct
  source 1..80: mol_type = other DNA
gtgtgcgcaagggcgaaagcccccccaccttcatgggacgtcatgtggaaatgcctcatccggctcaaacctatgctcac

SEQ ID NO: 108890 - DNA, 80 bp, synthetic construct
  source 1..80: mol_type = other DNA
cggtcagatcgttggcggagtttacttgctgccgcgcaggggccccaggttgggtgtgcgcgcgacaaggaagacgtccg

SEQ ID NO: 108891 - DNA, 80 bp, synthetic construct
  source 1..80: mol_type = other DNA
aggctatcgtggtgtgtggcgtggcgacgggatcaacactaccacctgcacttgtggggcccagctaactggccacgtaa

SEQ ID NO: 108892 - DNA, 80 bp, synthetic construct
  source 1..80: mol_type = other DNA
caacagcagggattctgaaaagatggggacagttgaaaaagaataaggccatcaagatattgattggattcaggaaggag

SEQ ID NO: 108893 - DNA, 80 bp, synthetic construct
  source 1..80: mol_type = other DNA
tgagccgcggacaacctctccgggcttatcagaaaaaatcaccctccttacctgccgggaacgtaccagtgcgtcaccgg

SEQ ID NO: 108894 - DNA, 80 bp, synthetic construct
  source 1..80: mol_type = other DNA
cgctagagctaaagccccccctccctcgtgggacgcgatgtggaagtgtctactgaggctcaaacctactctcgttggac

SEQ ID NO: 108895 - DNA, 80 bp, synthetic construct
  source 1..80: mol_type = other DNA
cggcaaattcctgggttccgccgacgaggggcgcggtgggccgaccctcgaacccgggcaccacgtgtccctcgcggtcc

SEQ ID NO: 108896 - DNA, 80 bp, synthetic construct
  source 1..80: mol_type = other DNA
cattcacagacaactccacgccgcctgcggtgccccagacctatcaggtagggtacctgcacgcaccaacaggcagtgga

SEQ ID NO: 108897 - DNA, 80 bp, synthetic construct
  source 1..80: mol_type = other DNA
ttaacggagttgtagacatagccaatcaggctgtgcagaaaaaaattgccaaccgtttagagccgcggcccgacgaggtg

SEQ ID NO: 108898 - DNA, 80 bp, synthetic construct
  source 1..80: mol_type = other DNA
attggtacgctggggctgctcggcgcgaaagacgatctggcgaaagatggcatgcgagttggaggaaatagtgggccgtt

SEQ ID NO: 108899 - DNA, 80 bp, synthetic construct
  source 1..80: mol_type = other DNA
agccggcagcgacggcgggaccgccgtcgtggcattcggaggaaccccacgtcgctcggcgtggacgtctaccggtaccc

SEQ ID NO: 108900 - DNA, 80 bp, synthetic construct
  source 1..80: mol_type = other DNA
aaaccgttccctgcgttcacttacccgcagctgtctctacctcaaaagcgaagatcagttgcaacgcaccttgcaggacg

SEQ ID NO: 108901 - DNA, 80 bp, synthetic construct
  source 1..80: mol_type = other DNA
cttcctcttggcactcttgtcgtgcctgacggtccccgcctcagccgtgcactaccgcaacgcttcgggtgtctaccaca

SEQ ID NO: 108902 - DNA, 80 bp, synthetic construct
  source 1..80: mol_type = other DNA
caaacaggacccaggggtcgacttccatctccgtgatggcgcacatcggatcgcagaacatgtgcttgaagatggcctcg

SEQ ID NO: 108903 - DNA, 80 bp, synthetic construct
  source 1..80: mol_type = other DNA
agctcacggatacgatccgtaaggacctgcggctgtcgctggccaagttcagcatcgcgtgtaccaagacctcgtcgttt

SEQ ID NO: 108904 - DNA, 80 bp, synthetic construct
  source 1..80: mol_type = other DNA
ccatgtccggtccgtagttcatgggtttcacgtaggcgaacatgccatcaaagtgcaggggatcgaagctgaggcccacg

SEQ ID NO: 108905 - DNA, 80 bp, synthetic construct
  source 1..80: mol_type = other DNA
atgggactggacacacgtacccaaacctggatgtcggctgaaggagcttggagacaagtcgagaaggtagagacatgggc

SEQ ID NO: 108906 - DNA, 80 bp, synthetic construct
  source 1..80: mol_type = other DNA
cgccaaggtccgcgggggagccggtgtacagcaccgttcggcgatggtagccgtttcgttcgttttaataaaccgacgtt

SEQ ID NO: 108907 - DNA, 80 bp, synthetic construct
  source 1..80: mol_type = other DNA
gcgtgagggctcttgaagacgggataaacttcgcaacagggaatttgcccggttgctccttttctatcttcctccttgct

SEQ ID NO: 108908 - DNA, 80 bp, synthetic construct
  source 1..80: mol_type = other DNA
attacggtgttttttttcgccaatttccgcgtccgtgttaaatccggtgtttatgttacacatcagctgatccacagggt

SEQ ID NO: 108909 - DNA, 80 bp, synthetic construct
  source 1..80: mol_type = other DNA
ggccctgttctgtgccaccccaacgagctcctcattccggctgccggggccgcccccccgctccgactgcgtggcctata

SEQ ID NO: 108910 - DNA, 80 bp, synthetic construct
  source 1..80: mol_type = other DNA
tacacctgcctggatgtgtaccgtgtgtcaggacaggaaatgagtccaagtgttggatggccgcgacaaccacgcttgct

SEQ ID NO: 108911 - DNA, 80 bp, synthetic construct
  source 1..80: mol_type = other DNA
cagcagcgggcatcatgaaaaacccaactgtggatggaataacagtgattgacctagatccaataccatacgatccaaag

SEQ ID NO: 108912 - DNA, 80 bp, synthetic construct
  source 1..80: mol_type = other DNA
ggccccacccccctcctttacaggttgggggctgtgcaaaatgaaatcaccctgacgcaccctgtcaccaaatacattat

SEQ ID NO: 108913 - DNA, 80 bp, synthetic construct
  source 1..80: mol_type = other DNA
ccaccaaaacattgtggacgtgcagtatttgtacggcttgacaccagccatcacaagcttcctcgtgaagtgggagtggg

SEQ ID NO: 108914 - DNA, 80 bp, synthetic construct
  source 1..80: mol_type = other DNA
gctaaggttctgattgtgatgctactctttgccggcgttgacgggtcttcctccacgatagggcgggcgcagggccgtca

SEQ ID NO: 108915 - DNA, 80 bp, synthetic construct
  source 1..80: mol_type = other DNA
aagaaagtaacaaaatttatgatgataaaacatatcagccagaacctcagctgggagatgaaacttggactgaccttgat

SEQ ID NO: 108916 - DNA, 80 bp, synthetic construct
  source 1..80: mol_type = other DNA
tgtgtttggctctgccttccaaggactgtttggtggcttgagctggataacaaaggtcatcatgggggtagtcctcatat

SEQ ID NO: 108917 - DNA, 80 bp, synthetic construct
  source 1..80: mol_type = other DNA
atggcgtagtggactagcggttagaggagacccctcccttacaagtcgcagcaacaatgggggcccaaggcgagatgaag

SEQ ID NO: 108918 - DNA, 80 bp, synthetic construct
  source 1..80: mol_type = other DNA
gcacacttcaacgcaatcagaatgaattgtataaattcttaaacaatctgtccccttactttcgtcacaaccgcgagcgc

SEQ ID NO: 108919 - DNA, 80 bp, synthetic construct
  source 1..80: mol_type = other DNA
ggagaggccgcactggtaggggaaggttaggcacataccggtatgtcaccccaggggagagaccatcaggcatatttgac

SEQ ID NO: 108920 - DNA, 80 bp, synthetic construct
  source 1..80: mol_type = other DNA
gtctcaactccagctgcctatagtactccgccagaacaccttagaaaatgcaaattccaacaaccgtggtcatttcttgc

SEQ ID NO: 108921 - DNA, 80 bp, synthetic construct
  source 1..80: mol_type = other DNA
actacttgactctcattatgaccaagtcttaaaggacattaagctggctgcttccaaagtcagtgctaacctactctcta

SEQ ID NO: 108922 - DNA, 80 bp, synthetic construct
  source 1..80: mol_type = other DNA
ggggcctactcttcatctgctgcgcttggcacgtacggggtcgggttgtccccgccgctgcctacgcgctgttgcagatt

SEQ ID NO: 108923 - DNA, 80 bp, synthetic construct
  source 1..80: mol_type = other DNA
agacagggataggggtcagcagagtccactgctgcactccaccactgagtgggcggttatgccgtgctctttctccgacc

SEQ ID NO: 108924 - DNA, 80 bp, synthetic construct
  source 1..80: mol_type = other DNA
gtcggctgccccgagccccagaccccgagactgtcgcgcgaggtccttgcaaccgtcaaaacccggcagcacgtactgcc

SEQ ID NO: 108925 - DNA, 80 bp, synthetic construct
  source 1..80: mol_type = other DNA
cagaatggagaatctcttgtggaagcaagtagctaatgaactgaactacatattatgggaaaacaacatcaaattaacgg

SEQ ID NO: 108926 - DNA, 80 bp, synthetic construct
  source 1..80: mol_type = other DNA
atccgcgcctgcgcgttagtgcgcaaggttgcaggaggccagtacgtacagatggctctcatcaagttgggcgctctgac

SEQ ID NO: 108927 - DNA, 80 bp, synthetic construct
  source 1..80: mol_type = other DNA
tgttggcctcttcagcccaggcgctagccaaaatatccagctcataaattccaacggcagctggcacatcaaccgcaccg

SEQ ID NO: 108928 - DNA, 80 bp, synthetic construct
  source 1..80: mol_type = other DNA
gactctagcagctggaccacgggcacgacggcggccgaagccacgtgaaaccggcggtcgttgttgtcgctggcctgcag

SEQ ID NO: 108929 - DNA, 80 bp, synthetic construct
  source 1..80: mol_type = other DNA
ttgtggaggaacaagtagtgattgaaaattctaccgagccagtggagggctgtagaaaatgccagtaccaccgggataag

SEQ ID NO: 108930 - DNA, 80 bp, synthetic construct
  source 1..80: mol_type = other DNA
caacacaatctttccttgcgacctgtatcaatggtgtgtgttggactgtataccacggtgccggctcaaagaccttagct

SEQ ID NO: 108931 - DNA, 80 bp, synthetic construct
  source 1..80: mol_type = other DNA
ttccgccaacaggccccccagggtgtcaaagttcatctcccaggccacccttggcatcacctcgtcccgcagccgggcgc

SEQ ID NO: 108932 - DNA, 80 bp, synthetic construct
  source 1..80: mol_type = other DNA
tgcaccaatatccgacttacagaccgaaatcccggaccgagcctggaactcagggtatgagtggattacagaatatatcg

SEQ ID NO: 108933 - DNA, 80 bp, synthetic construct
  source 1..80: mol_type = other DNA
gccaacataaccggctcgtcgccagacaagccgtattgctggcattatgccccacgaccgtgtgagaccatacccgcaag

SEQ ID NO: 108934 - DNA, 80 bp, synthetic construct
  source 1..80: mol_type = other DNA
gaagtgcccaagattttcgagggtctgggtcgagatgaaaagcgggcggcgaacgctctgcagaaagaacagaaagagag

SEQ ID NO: 108935 - DNA, 80 bp, synthetic construct
  source 1..80: mol_type = other DNA
ggagaggagagacaaacatgggactggcggtctcgcgtggcacggcaaagctcgcttggcttgaagaacgcggatacgcc

SEQ ID NO: 108936 - DNA, 80 bp, synthetic construct
  source 1..80: mol_type = other DNA
gcctgaacacctggcaggggacatttcctatcaattgttacacggagggctcgtgcgtgccaaaacctgctcccaatttc

SEQ ID NO: 108937 - DNA, 80 bp, synthetic construct
  source 1..80: mol_type = other DNA
gcagcgcgcggcggaccgggcggccgggtgaggcgcgggccgcccggcagaggcggatcttctccgtgccgactacgaca

SEQ ID NO: 108938 - DNA, 80 bp, synthetic construct
  source 1..80: mol_type = other DNA
aaccaaactatgttttttaacatactcggggggtgggttgccacccatttggcaggaccccagggctcttccgcattcgt

SEQ ID NO: 108939 - DNA, 80 bp, synthetic construct
  source 1..80: mol_type = other DNA
gtgcagtgactactatactcagctccctcaccataaccagtctgttgcgcaagctccaccactggattagtgaggattat

SEQ ID NO: 108940 - DNA, 80 bp, synthetic construct
  source 1..80: mol_type = other DNA
agtaacaacagtcagtgtccatcagccgcccagggattctctcgttgattataatctccaaataaaattgctcgatgatg

SEQ ID NO: 108941 - DNA, 80 bp, synthetic construct
  source 1..80: mol_type = other DNA
cagatccttccctgcagcttcacaaccttgccagccttgtctacggggttaatccacctccaccaaaacatcgtggacgt

SEQ ID NO: 108942 - DNA, 80 bp, synthetic construct
  source 1..80: mol_type = other DNA
ttgctgagcagttcaagcagaagatcctgggcctgttgcagagcgctaccaagcaaacagaggatcttaagcctgcggcc

SEQ ID NO: 108943 - DNA, 80 bp, synthetic construct
  source 1..80: mol_type = other DNA
attataaaccatctgagccgtgcgacacgcttttctgtgacattggagaatcatcttctagtgctgaggtggaagaacaa

SEQ ID NO: 108944 - DNA, 80 bp, synthetic construct
  source 1..80: mol_type = other DNA
tcactttccaaccacgccgccacttgactactcaggattgcaattgctccatctattcaggccacatcacaggtcacagg

SEQ ID NO: 108945 - DNA, 80 bp, synthetic construct
  source 1..80: mol_type = other DNA
tcatcggagtctgaggtcgaaaccgatacagccttggagtctgaggtcgaatccgagacagcatcggattcgaccgagtc

SEQ ID NO: 108946 - DNA, 80 bp, synthetic construct
  source 1..80: mol_type = other DNA
cacacctatacagctctgtagagagacctatccgcacctacaatcgtgccggaatgggtctgtttggcatgatgaagttt

SEQ ID NO: 108947 - DNA, 80 bp, synthetic construct
  source 1..80: mol_type = other DNA
cgactgtaacacatgtgtcacccaaacagtcgatttcagcttggatcctaccttcaccattgagacgaccaccgtacccc

SEQ ID NO: 108948 - DNA, 80 bp, synthetic construct
  source 1..80: mol_type = other DNA
atgacgacctcttcttctatttcttcctctgggtgcggtggtggtggcgtggcccgacgacgacggcgacgcaccgggag

SEQ ID NO: 108949 - DNA, 80 bp, synthetic construct
  source 1..80: mol_type = other DNA
aaataatacccccggtgatattttgtttgatttacaattaggaccccacctcaacccatttctagcccatctctcacaga

SEQ ID NO: 108950 - DNA, 80 bp, synthetic construct
  source 1..80: mol_type = other DNA
ccgcgagggcaatgcacccaaagagctgctggacttcgccgagtccgtggccggtgggcgtccgcgcggggacgcccgcc

SEQ ID NO: 108951 - DNA, 80 bp, synthetic construct
  source 1..80: mol_type = other DNA
atggcatgactggcagcaggttcctttctgctcccaccactttcatgaattaatcatgaaagatggaagaaagttggtgg

SEQ ID NO: 108952 - DNA, 80 bp, synthetic construct
  source 1..80: mol_type = other DNA
aaggagaagggagagtgatcctgggagaaccatctgcagtgacagcagctagtgccgcccagagacgtggacgtatcggt

SEQ ID NO: 108953 - DNA, 80 bp, synthetic construct
  source 1..80: mol_type = other DNA
ggtgctgttgctgtttgctggcgtcgatgcgagcacttacacctccgggggagccgctgcccgggaagcgtttggattcg

SEQ ID NO: 108954 - DNA, 80 bp, synthetic construct
  source 1..80: mol_type = other DNA
ctaggcctagccactttcttcttgtggatggctgacgtctcaggcaccaagatcgcaggaaccttattgctggctctgct

SEQ ID NO: 108955 - DNA, 80 bp, synthetic construct
  source 1..80: mol_type = other DNA
tcggtcctaggacctgcaggaacatgtggagtgggacgttccccattaacgcctacaccacgggcccctgtactcccctt

SEQ ID NO: 108956 - DNA, 80 bp, synthetic construct
  source 1..80: mol_type = other DNA
accgtcggtaatattgccagcctgttcagcccaggctcccggcagaacctgcagcttataaactccaatggaagctggca

SEQ ID NO: 108957 - DNA, 80 bp, synthetic construct
  source 1..80: mol_type = other DNA
catatcactgcagagactgccgcccgtcgacttggacgtgggtccccaccctcccttgccagctcatcagcaagtcagct

SEQ ID NO: 108958 - DNA, 80 bp, synthetic construct
  source 1..80: mol_type = other DNA
tgcccgcatatgtgttgccttgtggataatgctgctggtgggccaggctgaggcagcgctggagaacctggttctcctca

SEQ ID NO: 108959 - DNA, 80 bp, synthetic construct
  source 1..80: mol_type = other DNA
caacgtctccgtcgcactcgacggcgccggcaagcggaagtacttcctgaccagagaccccaccactccactctcgcgag

SEQ ID NO: 108960 - DNA, 80 bp, synthetic construct
  source 1..80: mol_type = other DNA
tccaggcatcatggcccaaactggaacagttctgggccaagcacatgtggaacttcatcagtggtatccagtacctcgca

SEQ ID NO: 108961 - DNA, 80 bp, synthetic construct
  source 1..80: mol_type = other DNA
acgcgatggtgggtccgatgcgcgccggtactggggccccggcgcccgggtgaccacgcgcatgtcgggtggcacgtaga

SEQ ID NO: 108962 - DNA, 80 bp, synthetic construct
  source 1..80: mol_type = other DNA
gatggactgggaagctgaccctgacctcactagcagtatgtttggcactgttgatttttggaaacctaacatacatggac

SEQ ID NO: 108963 - DNA, 80 bp, synthetic construct
  source 1..80: mol_type = other DNA
cgttatcacctcctcgctcgccctcctcacaaactgcctgctgggggccgagccgttgtatatattcagctacgacgcgt

SEQ ID NO: 108964 - DNA, 80 bp, synthetic construct
  source 1..80: mol_type = other DNA
gcccgaacgacgcgccacacaaagacggagttgacaatgcgcgcgatagagtcgacgtccgtccccaggtcgtcgactct

SEQ ID NO: 108965 - DNA, 80 bp, synthetic construct
  source 1..80: mol_type = other DNA
ggaaggttttcctcccagcgattcagaggatgaacggggtgagcagaccatggctctgatctcagactatgcttgtgtga

SEQ ID NO: 108966 - DNA, 80 bp, synthetic construct
  source 1..80: mol_type = other DNA
tgtggaccttatcgtaggcactgcggcgttttgttcagccatgtacatcggtgatatctgcgggggtgctttcttggtgg

SEQ ID NO: 108967 - DNA, 80 bp, synthetic construct
  source 1..80: mol_type = other DNA
caaccactcgggatgcccggagcgaatgtccgcttgccgtggcattgactccttccgtatagggtggggctcccttgagt

SEQ ID NO: 108968 - DNA, 80 bp, synthetic construct
  source 1..80: mol_type = other DNA
ggagggtggcggcgacggagtatgcggaggtgacacagcatggtcagtacgcgtacgtgacaggattgacagctgacaac

SEQ ID NO: 108969 - DNA, 80 bp, synthetic construct
  source 1..80: mol_type = other DNA
gtgtacccatcccggcgccgaactacaagttcgcgctttggagggtgtccgccgaggactacgtggaggttcgcagagtg

SEQ ID NO: 108970 - DNA, 80 bp, synthetic construct
  source 1..80: mol_type = other DNA
ttgcttaacgggcggcgaaggagaagtccacgcctacatggaggtagagtcataatcgcgcatcaggatagggcggtggt

SEQ ID NO: 108971 - DNA, 80 bp, synthetic construct
  source 1..80: mol_type = other DNA
gcgcgtcaggaatttcttttaaaaaaaggacacggggtctatttggacccccaaaccggtgaagaacttaataccccgtc

SEQ ID NO: 108972 - DNA, 80 bp, synthetic construct
  source 1..80: mol_type = other DNA
ccgtgtcctggccctcgaacagcggccacgcggagatgtcggtgggcggctcgtcaaagacggccatcgacacgatagac

SEQ ID NO: 108973 - DNA, 80 bp, synthetic construct
  source 1..80: mol_type = other DNA
cacggtaagaaccaagcatataaaactgatttaccgccttgtacggacaacatcctttttctacaggcagggcatacgct

SEQ ID NO: 108974 - DNA, 80 bp, synthetic construct
  source 1..80: mol_type = other DNA
gccggacccgccgacgtcccctctcgagcccaccgaaacccgccgcgtctgttgaaatggccagccgcccagccgcatcc

SEQ ID NO: 108975 - DNA, 80 bp, synthetic construct
  source 1..80: mol_type = other DNA
ctacggatggaagaaatggggaaaaaccctgtttgtggaacccagacttggaaacaacacatttgttgttgatggacccg

SEQ ID NO: 108976 - DNA, 80 bp, synthetic construct
  source 1..80: mol_type = other DNA
cagttggatttatgcctaaccttctagcctatccaaaaacccaaagtcaaactgctaaaaataacattgtcagtcaagtt

SEQ ID NO: 108977 - DNA, 80 bp, synthetic construct
  source 1..80: mol_type = other DNA
tgccctgggaacattgccaggacacatgacagagaggtttcaggaagccattgacaatctcgctgtgctcatgcgagcag

SEQ ID NO: 108978 - DNA, 80 bp, synthetic construct
  source 1..80: mol_type = other DNA
gctccaaaagcttccactcgcaaacctctacacacacaagacaaacatgcagaacaaaaaggatattgataaagattttc

SEQ ID NO: 108979 - DNA, 80 bp, synthetic construct
  source 1..80: mol_type = other DNA
gctcaaggccaagttgatcccagctttgcccggtatccccttcctttcgtgtcaacggggatataggggatcttggagtg

SEQ ID NO: 108980 - DNA, 80 bp, synthetic construct
  source 1..80: mol_type = other DNA
agtctttcacaccatgtggcacgttacaagaggggcagtgttgacgtataatgggaaaagactggaaccaaattgggcta

SEQ ID NO: 108981 - DNA, 80 bp, synthetic construct
  source 1..80: mol_type = other DNA
caaagtgccctacttcgtgcgcgtccaaggccttctccggctctgcgcgctagtgcgcaagatggccggaggccactacg

SEQ ID NO: 108982 - DNA, 80 bp, synthetic construct
  source 1..80: mol_type = other DNA
ctgttgatgacgggtggagtgaccttggtgcggaaaaacagatggttgctcctaaatgtgacatctgaggacctcgggaa

SEQ ID NO: 108983 - DNA, 80 bp, synthetic construct
  source 1..80: mol_type = other DNA
ctggtgcgatacctggtccttgttggaactgcttttgcggaaatgaacactggaggcgatgtgatccacctagcacttgt

SEQ ID NO: 108984 - DNA, 80 bp, synthetic construct
  source 1..80: mol_type = other DNA
atctttgtctacaacgatgttgaaaagtggaagagtggttataagtattttccactcactccaactggacttgctcgtgt

SEQ ID NO: 108985 - DNA, 80 bp, synthetic construct
  source 1..80: mol_type = other DNA
gcgtatctgacggcgtaccaagccactgtatgcgcgagggcccaagccccacccccgtcctgggaccagatgtggaagtg

SEQ ID NO: 108986 - DNA, 80 bp, synthetic construct
  source 1..80: mol_type = other DNA
agctcggccgccgcatccatcgaggccccccatctcgcctggcggtggcgcacaaagcgtccgaagagctgaaagttggc

SEQ ID NO: 108987 - DNA, 80 bp, synthetic construct
  source 1..80: mol_type = other DNA
attggcatcaataaatgcccaagcagggagcttgtttacattgcctaaaggaattcctttcactgattttgacttgtctg

SEQ ID NO: 108988 - DNA, 80 bp, synthetic construct
  source 1..80: mol_type = other DNA
acgtgctcctgaagcacatagcgcgacagagcaccattgtacaagaagccctcaaggaatgcacacagactccgctgacg

SEQ ID NO: 108989 - DNA, 80 bp, synthetic construct
  source 1..80: mol_type = other DNA
caggagcaggtctggccttttcattaatgaaatctctaggaggaggtaggagaggcacgggagcccaaggggaaacactg

SEQ ID NO: 108990 - DNA, 80 bp, synthetic construct
  source 1..80: mol_type = other DNA
ccgtggtggtgtcttgggccctcaagtgggagtatgttgtgctagccttcctgctactagcagacgccagagtctgtgca

SEQ ID NO: 108991 - DNA, 80 bp, synthetic construct
  source 1..80: mol_type = other DNA
gcaggagtagaggcagggaatacctatgttggcagttccttggcccgaggggcaagcggtctcgctggccttttcacgcc

SEQ ID NO: 108992 - DNA, 80 bp, synthetic construct
  source 1..80: mol_type = other DNA
gcttgtggatggtgctgcttgtctcgcaggcggaggcggccttggagaacttggttgtactcaatgccgcatccctcgct

SEQ ID NO: 108993 - DNA, 80 bp, synthetic construct
  source 1..80: mol_type = other DNA
acagggcataggatggcttgggacatgatgatgaactggtcgcccacgaccaccttggtcctctcgagcgttcttaggat

SEQ ID NO: 108994 - DNA, 80 bp, synthetic construct
  source 1..80: mol_type = other DNA
tggcaaacgacaaaccaacattggacgtccgcatgattagcatcgaagctagccaacttgctgaggtcagaagttactgc

SEQ ID NO: 108995 - DNA, 80 bp, synthetic construct
  source 1..80: mol_type = other DNA
ttcgtcagggcgacagccccgcctcaaatcctacctacaatgctctagcatttatgccaaacagtaccctctacgctaga

SEQ ID NO: 108996 - DNA, 80 bp, synthetic construct
  source 1..80: mol_type = other DNA
caatctcgcgcaggatttcgcgcaggtgatgagcgcagtccacgggggggagcacaagaggccgcgggtatagatcgacg

SEQ ID NO: 108997 - DNA, 80 bp, synthetic construct
  source 1..80: mol_type = other DNA
tgttctgtcagatagctcttacgctcagcgcaagaagaaatatccaccgtgggaaaaactccaggtagaggtacacacgc

SEQ ID NO: 108998 - DNA, 80 bp, synthetic construct
  source 1..80: mol_type = other DNA
atccttggcttgtggtccttcctcctcctagtcctggccttgccacaacaggcttatgctctggacgccactgaacaagg

SEQ ID NO: 108999 - DNA, 80 bp, synthetic construct
  source 1..80: mol_type = other DNA
ctggtttcttagcaaattcgggccggacgaaaaaagcctggtgctcaccactcggtactacctgcttcaggcccagcgtc

SEQ ID NO: 109000 - DNA, 80 bp, synthetic construct
  source 1..80: mol_type = other DNA
ggacaggggccctacttttaagccctactctggcactgcctacaacgccctggcccccaagggtgccccaaatccttgcg

SEQ ID NO: 109001 - DNA, 80 bp, synthetic construct
  source 1..80: mol_type = other DNA
cgcagtcaacgtcgtggccgtacaggccggggtagactcggtacatatcgatatgtcgcccccggtgaaagaccgtctgg

SEQ ID NO: 109002 - DNA, 80 bp, synthetic construct
  source 1..80: mol_type = other DNA
ccctgcctgaggaggccagaactgtcatacactcgctcactgagagactctacgtaggagggcccatgacaaacagcaag

SEQ ID NO: 109003 - DNA, 80 bp, synthetic construct
  source 1..80: mol_type = other DNA
gggataaattacgcaacagggaatttgcctggttgctccttttctatctttctcttggccctcttatcttgcatttcaat

SEQ ID NO: 109004 - DNA, 80 bp, synthetic construct
  source 1..80: mol_type = other DNA
ggttgacgccagcacgcatgtcaccggagggagcgtggctcattccgtttacgggatttcctcgcttttcagccccgggc

SEQ ID NO: 109005 - DNA, 80 bp, synthetic construct
  source 1..80: mol_type = other DNA
gttttaactaaagataacacccacataccagacttaattggaacccttgtagtagtaactggaaatggaattggtacagg

SEQ ID NO: 109006 - DNA, 80 bp, synthetic construct
  source 1..80: mol_type = other DNA
gtgcccgtcgaggccatggagacaacccagaggtcgcccatctttacagacaattccactccgcccgccgtgccccagac

SEQ ID NO: 109007 - DNA, 80 bp, synthetic construct
  source 1..80: mol_type = other DNA
ctttgtctatgaccatctcgcccctctctctgactgggctagcgacggactgcgcgatttggcagtcgcaatcgagccgg

SEQ ID NO: 109008 - DNA, 80 bp, synthetic construct
  source 1..80: mol_type = other DNA
tggcatacgcgttggaacaaacggtcggctccccagacacatccattttccgggatatttgtggaagatggagtagagtc

SEQ ID NO: 109009 - DNA, 80 bp, synthetic construct
  source 1..80: mol_type = other DNA
agagatccccctggcccgtgcggcttgggaaacagcacgtcacactccagttaactcctggttgggaaacattatcatgt

SEQ ID NO: 109010 - DNA, 80 bp, synthetic construct
  source 1..80: mol_type = other DNA
ggcgatcggaacggcctggttcgggagaatggacgccttgctgggtcctgcggccccgagagccccggcgccgtcctcca

SEQ ID NO: 109011 - DNA, 80 bp, synthetic construct
  source 1..80: mol_type = other DNA
aaattctcgtggagtttgaagagccacatgccaccaaacaatcagtggttgccttgggttcacaggaaggagctttgcac

SEQ ID NO: 109012 - DNA, 80 bp, synthetic construct
  source 1..80: mol_type = other DNA
tgtcagggggggcgcaggccttcaccaccaggagtttcgtgtcctttttcaatcaagggcccaagcagcaaatccagctt

SEQ ID NO: 109013 - DNA, 80 bp, synthetic construct
  source 1..80: mol_type = other DNA
ttaaaaactcccacaatattacatttttattagtcttttattaatatagaatcacataaacaattgataaaatcaagggg

SEQ ID NO: 109014 - DNA, 80 bp, synthetic construct
  source 1..80: mol_type = other DNA
tgctgtgccctgagagcgctggcgtgcgcgacgacgcggcggttgacatcctggatctgccgcctctgcgtgaagaccac

SEQ ID NO: 109015 - DNA, 80 bp, synthetic construct
  source 1..80: mol_type = other DNA
catcaaccgtacagcgctgaactgcaacgacagtctgcagtccggtttcttggcatccttgttttatacccacaagttca

SEQ ID NO: 109016 - DNA, 80 bp, synthetic construct
  source 1..80: mol_type = other DNA
aaccacccggccatccgcgccaaggtggactggctggaagcgcgggtgcgggaatgcgcctccgttccggaaaagttcat

SEQ ID NO: 109017 - DNA, 80 bp, synthetic construct
  source 1..80: mol_type = other DNA
gcttggaagcaacaccatgcagcgagttgtgtttgtcgtgctattgctcttggtggccccagcctacagctttaactgcc

SEQ ID NO: 109018 - DNA, 80 bp, synthetic construct
  source 1..80: mol_type = other DNA
ataaaacgaggcttgagaacactaatcctggcccccactagagttgtggcggctgaaatggaagaggctctcagaggact

SEQ ID NO: 109019 - DNA, 80 bp, synthetic construct
  source 1..80: mol_type = other DNA
acagttggaaattgcactggcttatccatttgaagtcagcaatggcaagcttggcataaaagcaggtcatggattgaaag

SEQ ID NO: 109020 - DNA, 80 bp, synthetic construct
  source 1..80: mol_type = other DNA
ctcacattgtgtaaccagagcaccccttcccaccttactctattgccaccttttgttgccggtcgttacttttgcatagg

SEQ ID NO: 109021 - DNA, 80 bp, synthetic construct
  source 1..80: mol_type = other DNA
cagaaccccacacgagttttgccactgctaagctgtgaggcagtgcaggctgggacagccgacctccaggttgcgaaaaa

SEQ ID NO: 109022 - DNA, 80 bp, synthetic construct
  source 1..80: mol_type = other DNA
cggagctggcaacaagactctagccggcttacggggtccggtcacgcagatgtactcgagtgctgaggtggacttggtag

SEQ ID NO: 109023 - DNA, 80 bp, synthetic construct
  source 1..80: mol_type = other DNA
ctgttccaagtgccctacctcgtgagggcgcacgccattctaagagcgtgcacgctggtaaagggcatcatgggaggcaa

SEQ ID NO: 109024 - DNA, 80 bp, synthetic construct
  source 1..80: mol_type = other DNA
aggcgacgttgtcgtctgtgccacggacgcgctcatgacaggatataccggcgacttcgatagtgtgatcgactgcaacg

SEQ ID NO: 109025 - DNA, 80 bp, synthetic construct
  source 1..80: mol_type = other DNA
ccggagcacgcagggcctcgccagcctgtttactgccggttcccgacagaatttgcagcttgtgaactccaacgggagct

SEQ ID NO: 109026 - DNA, 80 bp, synthetic construct
  source 1..80: mol_type = other DNA
aataaggccatcaagatcttaacgaacttcaagagagagataggaaggatgttggctattttaaacagaaggaaaaggac

SEQ ID NO: 109027 - DNA, 80 bp, synthetic construct
  source 1..80: mol_type = other DNA
aacgtgtccggggtgtaccatgtcacgaacgactgctccaactcaagtattgtgtatgaggcagcggacgtgatcatgca

SEQ ID NO: 109028 - DNA, 80 bp, synthetic construct
  source 1..80: mol_type = other DNA
cccccggagcgctggtcgtcggcgtgatatgcgccgcagtgttgcgccggcacgtggggcctggggaaggagcggtgcag

SEQ ID NO: 109029 - DNA, 80 bp, synthetic construct
  source 1..80: mol_type = other DNA
gggataggctcaaacgaatggcagtcagtggagatgattgcgttgtgaagccaattgatgataggtttgcacatgccctc

SEQ ID NO: 109030 - DNA, 80 bp, synthetic construct
  source 1..80: mol_type = other DNA
ttaccaatgactgctccaacagcagcatcacttggcaacttgaaggggcagtgcttcacgttcctgggtgcgtcccctgt

SEQ ID NO: 109031 - DNA, 80 bp, synthetic construct
  source 1..80: mol_type = other DNA
atcttcccggttgctctttctctatcttccttttggcactactctcgtgcctcacaacgccagcctcagctcttacctac

SEQ ID NO: 109032 - DNA, 80 bp, synthetic construct
  source 1..80: mol_type = other DNA
tatggatgttttccaagacccggtacaggtgggcttggatgttcaaatacataggcattaggccgtccctgggatgcagg

SEQ ID NO: 109033 - DNA, 80 bp, synthetic construct
  source 1..80: mol_type = other DNA
tttatctggacgggcaatcagcggttcgccccgcggtacctgaccctggggtggcacacggtgagggccctgtcgcccac

SEQ ID NO: 109034 - DNA, 80 bp, synthetic construct
  source 1..80: mol_type = other DNA
tggggtggaagacgaacttcccaattactgctttccactaggcgctgtggggattgtgaattcctacaaaggtgttaaat

SEQ ID NO: 109035 - DNA, 80 bp, synthetic construct
  source 1..80: mol_type = other DNA
cctataactctcacagcagctctccttttattggtagcacattatgccattatagggccaggactccaagcaaaagcaac

SEQ ID NO: 109036 - DNA, 80 bp, synthetic construct
  source 1..80: mol_type = other DNA
ggcgtatggcgtggggatggagtaaattccaccaagtgtccgtgcggagcgacgatatctggccacgtgaaaaacggaac

SEQ ID NO: 109037 - DNA, 80 bp, synthetic construct
  source 1..80: mol_type = other DNA
acttggagctcataacatcgtgctcctctaacgtgtcggtcgcccacgacggcactggaaaaagggtctactaccttacc

SEQ ID NO: 109038 - DNA, 80 bp, synthetic construct
  source 1..80: mol_type = other DNA
gcaactgaagaatcgctattggctgctgtggccgaaaccgaaactacagagacaaaactcactattaaacctgtagaaaa

SEQ ID NO: 109039 - DNA, 80 bp, synthetic construct
  source 1..80: mol_type = other DNA
catggatgaacacaacggggttcacgaagacctgcggaggtcctccgtgcaagatacgtccccagggtgcccagagtaac

SEQ ID NO: 109040 - DNA, 80 bp, synthetic construct
  source 1..80: mol_type = other DNA
cggacctaagacctgcagtaatgtgtggcatggaacctttcccatcaacgcctacaccaccgggcccggcgtgccgatcc

SEQ ID NO: 109041 - DNA, 80 bp, synthetic construct
  source 1..80: mol_type = other DNA
aataggagtccctgccaatagggaggagtgaagcccgtgtcaggtcacattgtgccaccttgccagaaggtgcaacctgc

SEQ ID NO: 109042 - DNA, 80 bp, synthetic construct
  source 1..80: mol_type = other DNA
gtccttactccgtcttggtgtgtgtgtggctgtgtatggcgtcccatctgtgcggggaggggggcaagtcggcacgtatt

SEQ ID NO: 109043 - DNA, 80 bp, synthetic construct
  source 1..80: mol_type = other DNA
gggccaaggtcatcgccgttctcatcttgtttgcgggtgtggaggggactaccgacgtcgcccactccgcagcccggacc

SEQ ID NO: 109044 - DNA, 80 bp, synthetic construct
  source 1..80: mol_type = other DNA
tctcccgtggggatcgttgcaacttggaggacagagacaggggtcagctgtctcctttgttgcattccaccacggaatgg

SEQ ID NO: 109045 - DNA, 80 bp, synthetic construct
  source 1..80: mol_type = other DNA
caccatgtgggcccgaggaggagaagttgccgatcaaccctctgagtaattcgctcatgcggttccacaataaagtgtac

SEQ ID NO: 109046 - DNA, 80 bp, synthetic construct
  source 1..80: mol_type = other DNA
ccctttaaccaccaccgcaatgcgggcctccgttatcgctccatgttgttgggaaacggccgctacgtgccctttcacat

SEQ ID NO: 109047 - DNA, 80 bp, synthetic construct
  source 1..80: mol_type = other DNA
tggccggctcctccgggtgccaggtctttaacgccatgcacgtgtggtgccagtgacctctacttggtaacccgaaatgc

SEQ ID NO: 109048 - DNA, 80 bp, synthetic construct
  source 1..80: mol_type = other DNA
tcaactccataggaagagccgttcaccaagtgtttggtggtgccttcagaacactctttgggggaatgtcttggatcaca

SEQ ID NO: 109049 - DNA, 80 bp, synthetic construct
  source 1..80: mol_type = other DNA
cgtgggagggcccatgttcaacagcaagggccagacctgcgggtacaggcgctgccgcgccagcggtgtgcttaccacta

SEQ ID NO: 109050 - DNA, 80 bp, synthetic construct
  source 1..80: mol_type = other DNA
cccccccaagagtgcaccgcccataccaccacctaggaagaagaggctcgtgcatcttgatgaatcatcagcagcagcag

SEQ ID NO: 109051 - DNA, 80 bp, synthetic construct
  source 1..80: mol_type = other DNA
tgttaaaattgttgactgaatttcagccacaccagttatggaccaccttattgtctctgacatttgtcaaaacaactctc

SEQ ID NO: 109052 - DNA, 80 bp, synthetic construct
  source 1..80: mol_type = other DNA
ttgggtaaagtcatcgatacccttacttgcgggtttgccgacctcatggggtacatcccgctcgtcggcgctcctgtagg

SEQ ID NO: 109053 - DNA, 80 bp, synthetic construct
  source 1..80: mol_type = other DNA
accaaaaactggcaacggatgggatccagatacagatgttgctgcccagaatcaaatcgccaagggcaacatctatgcca

SEQ ID NO: 109054 - DNA, 80 bp, synthetic construct
  source 1..80: mol_type = other DNA
acgggcaaatatgctattataagtgacacagtcaacccaaagcagttctctattaagttactgtttaatgacaagggtgt

SEQ ID NO: 109055 - DNA, 80 bp, synthetic construct
  source 1..80: mol_type = other DNA
agctgtgccccaggtttaccaagttggttaccttcatgctcctacaggtagtgggaaaagcacgagagtccccgtggcct

SEQ ID NO: 109056 - DNA, 80 bp, synthetic construct
  source 1..80: mol_type = other DNA
ctgatgctaccactcccaccctaccacaacctgttagtcaataaaaaaagctttaaattgtatgctgtttgactgtttat

SEQ ID NO: 109057 - DNA, 80 bp, synthetic construct
  source 1..80: mol_type = other DNA
accgcctccagcctcacgtgcatcttctcatctggcccgtctcagaaccttcaacttgtaaacaccaatggcaggtggca

SEQ ID NO: 109058 - DNA, 80 bp, synthetic construct
  source 1..80: mol_type = other DNA
ggtgggctggccagcccccctgggggctaggtcacttgccccctgcacctgtgggtctagcgacctctacctggtcacga

SEQ ID NO: 109059 - DNA, 80 bp, synthetic construct
  source 1..80: mol_type = other DNA
gtgcaagctgacacggggtgtgttataaactggaaaggcaaagaactcaagtgtggaagtggaatcttcgtcaccaacga

SEQ ID NO: 109060 - DNA, 80 bp, synthetic construct
  source 1..80: mol_type = other DNA
tgaagccaatcttttatggggtaccagtgccaccagggttgagctgggtgacaaggtaatggtgctggattctttcgagc

SEQ ID NO: 109061 - DNA, 80 bp, synthetic construct
  source 1..80: mol_type = other DNA
cgtgggcgaaagtggttgtcatccttttgctcaccgccggggtggacgcctccaccattgcgaagtcagcctcgcatgcc

SEQ ID NO: 109062 - DNA, 80 bp, synthetic construct
  source 1..80: mol_type = other DNA
accctgggcaacaagtttagaaatcccactgtagctcccactcatgacgttaccaccgatcgttctcagcggctgacact

SEQ ID NO: 109063 - DNA, 80 bp, synthetic construct
  source 1..80: mol_type = other DNA
tggctccgccgtagtccgccatcttgccctcgtccaaaatggcttccatgtccggccacgcctccgcgccgaccgttgac

SEQ ID NO: 109064 - DNA, 80 bp, synthetic construct
  source 1..80: mol_type = other DNA
gtacgttggaggccccctatacaattctcggggcgaatcctgcggttaccgccggtgcagggccagcggggtactcccta

SEQ ID NO: 109065 - DNA, 80 bp, synthetic construct
  source 1..80: mol_type = other DNA
tcggcaaggcaaaaggcagcagagccatatggtacatgtggcttggagctcgcttcctggagtttgaagccctaggattc

SEQ ID NO: 109066 - DNA, 80 bp, synthetic construct
  source 1..80: mol_type = other DNA
actgcctacactcagcagactcgtggcctcctgggtgccattgtggtcagcctaactggccgcgacaaaaatgagcaggc

SEQ ID NO: 109067 - DNA, 80 bp, synthetic construct
  source 1..80: mol_type = other DNA
ttacagttggggcgaaaatgagactgacatctttctcttgaacaacacgaggccccctactggcaactggtttggctgca

SEQ ID NO: 109068 - DNA, 80 bp, synthetic construct
  source 1..80: mol_type = other DNA
tctgcgttgggcttaattcctatgctgtcgggtcccagcttccctgtgaacctgagcccgacgcagacgtattgaggtcc

SEQ ID NO: 109069 - DNA, 80 bp, synthetic construct
  source 1..80: mol_type = other DNA
tttttcagccgtggcccccaacaaaacctccaattgatcacgtcaaacgggagttggcacatcaacaggaccgctctgaa

SEQ ID NO: 109070 - DNA, 80 bp, synthetic construct
  source 1..80: mol_type = other DNA
tggcccccttgtccacctgggcaagcgacggcctgcgtgatctcgccgttgcagtggagcccatcgtcttctcgccgatg

SEQ ID NO: 109071 - DNA, 80 bp, synthetic construct
  source 1..80: mol_type = other DNA
cgaagcgggcgcgcgctggcctacctgtgcgacaacttttgccccgcgatcaggaagtacgagggtggcgtcgacgccac

SEQ ID NO: 109072 - DNA, 80 bp, synthetic construct
  source 1..80: mol_type = other DNA
tatgtctaaagcacatggcatcgaccccaacgtccgcacgggcgtcagaactgtcaccacgggcggtgctattacctatt

SEQ ID NO: 109073 - DNA, 80 bp, synthetic construct
  source 1..80: mol_type = other DNA
cttactacagaggaagcttgcgacctgacgcccccacactcagccaaatcaaagtttggctacggggcaaaggatgttcg

SEQ ID NO: 109074 - DNA, 80 bp, synthetic construct
  source 1..80: mol_type = other DNA
ctggcccgcctgccgcgctacctggcgcgtctggccgcggtaatcggcgacgagagcggacgcccgcagtaccgctaccg

SEQ ID NO: 109075 - DNA, 80 bp, synthetic construct
  source 1..80: mol_type = other DNA
tgcctatcagtccgttaagcaactccctaattcgtcaccacaatctggtgtactcaacaacgtcacgcagcgcgtccctt

SEQ ID NO: 109076 - DNA, 80 bp, synthetic construct
  source 1..80: mol_type = other DNA
ctgggctcagcctgggtacccctggcccctctacgggaacgagggctgcggttgggcaggatggctcttgtccccccgcg

SEQ ID NO: 109077 - DNA, 80 bp, synthetic construct
  source 1..80: mol_type = other DNA
tgtgccccaaacataccaggtcgggtacctccatgctccaactggaagcgggaagagcacaaaggtcccggctgcgtacg

SEQ ID NO: 109078 - DNA, 80 bp, synthetic construct
  source 1..80: mol_type = other DNA
tggacttgtgtacccggaaaataccaaggcaatgagtgccccgcacctgtgtttatttaatgacgtcactatttatgtga

SEQ ID NO: 109079 - DNA, 80 bp, synthetic construct
  source 1..80: mol_type = other DNA
tccgcctcctatactaaatttcccccaggcataactcgggaggagtggggaagacaattggcaatcttccccgggatttt

SEQ ID NO: 109080 - DNA, 80 bp, synthetic construct
  source 1..80: mol_type = other DNA
ccacgagcaggggcgcgggcgcggccgccgcgcccgcgcccgtctggcctgtggccgtggcgtacgcgctatataagccc

SEQ ID NO: 109081 - DNA, 80 bp, synthetic construct
  source 1..80: mol_type = other DNA
tattggagcatggaagctgcgtcaccaccatggcaaaaaataaaccaacattggacattgaactcttgaagacggaggtc

SEQ ID NO: 109082 - DNA, 80 bp, synthetic construct
  source 1..80: mol_type = other DNA
tcggactgggttagtatgcccctggcatggtagtcatttaaagccataaatgtgccctgataaccagtaggaacaagtac

SEQ ID NO: 109083 - DNA, 80 bp, synthetic construct
  source 1..80: mol_type = other DNA
ctgatggaaaccatggaaaccattctgccggcggcgctggcgtttcatctgaccagccgcgatggcgaaccgcgcatgga

SEQ ID NO: 109084 - DNA, 80 bp, synthetic construct
  source 1..80: mol_type = other DNA
cacccgtggtccggggagcaggtggcgtcgacccgggacgagggaaaacaataagggacgccccccgtgtttgtgtggag

SEQ ID NO: 109085 - DNA, 80 bp, synthetic construct
  source 1..80: mol_type = other DNA
ctgataacagtatcaggtctctaccccttggcaattccagttacaatggcactatggtacatttggcaagtgaaaacaca

SEQ ID NO: 109086 - DNA, 80 bp, synthetic construct
  source 1..80: mol_type = other DNA
gagaaggagtcttcaaaaacatccagcacctgacagtcacagaagaagttgccgtgcaaaactggttggcaagagtgggg

SEQ ID NO: 109087 - DNA, 80 bp, synthetic construct
  source 1..80: mol_type = other DNA
ggtggtttgtggagaggaaccttgtgaaaccagaagggaaagtcatagacctcggttgtggaagaggtggctggtcatat

SEQ ID NO: 109088 - DNA, 80 bp, synthetic construct
  source 1..80: mol_type = other DNA
ataattctatgaaacgcggcgtgcctctgacgtgaggtagcttactgagctcatcaaaggttaggtctgtggggtcagat

SEQ ID NO: 109089 - DNA, 80 bp, synthetic construct
  source 1..80: mol_type = other DNA
cgggtccccacacccgtggccgatcgaggctccccagagacgcgcgccggacgaggaggtggcacgtcgccgccggcggt

SEQ ID NO: 109090 - DNA, 80 bp, synthetic construct
  source 1..80: mol_type = other DNA
gtgagtgggctagcaggggctgctattggcagtataggcctaagcaaggtcattattgacatcttggctggctatggagc

SEQ ID NO: 109091 - DNA, 80 bp, synthetic construct
  source 1..80: mol_type = other DNA
gttgttggggccaagtcacactcaccgtcacagtgacaacggctacgctgcttttctgccactacgcatacatggtgcca

SEQ ID NO: 109092 - DNA, 80 bp, synthetic construct
  source 1..80: mol_type = other DNA
ttctgccgtagtgggctgggctctcaagtgggagttcgtcgtcctcgtcttcctccttctggcggacgcacgcgtgtgtg

SEQ ID NO: 109093 - DNA, 80 bp, synthetic construct
  source 1..80: mol_type = other DNA
agtgggggccgccattggcagtgtaggcttgggcagagtcttgctcgacatccttgcgggctatggtgccggcgtagccg

SEQ ID NO: 109094 - DNA, 80 bp, synthetic construct
  source 1..80: mol_type = other DNA
cgcccgctgtaccacagagttatcaggtgggctacctccacgctccgactggaagcgggaagagcactaaggtccctgcg

SEQ ID NO: 109095 - DNA, 80 bp, synthetic construct
  source 1..80: mol_type = other DNA
aattgggccaaagtcatcttggtcctgttcctgttcgctggagtagacgccgacacccgcgttaccgggggagcagtagg

SEQ ID NO: 109096 - DNA, 80 bp, synthetic construct
  source 1..80: mol_type = other DNA
gtcgtatgttgttccatgtcatacaattggacaggggcactaatcacaccttgtgcagccgaggaggagaaattgcccat

SEQ ID NO: 109097 - DNA, 80 bp, synthetic construct
  source 1..80: mol_type = other DNA
attgatgtaatcactaaataaaatacaccttttttcgattgtacgtatttttatttaaatgtgtagttcatagtccgccg

SEQ ID NO: 109098 - DNA, 80 bp, synthetic construct
  source 1..80: mol_type = other DNA
gccacgtggtggcccgcggcctccagccgcagcggctggttcgcaggtaccggaacgcccgagagggcgatatcgccggg

SEQ ID NO: 109099 - DNA, 80 bp, synthetic construct
  source 1..80: mol_type = other DNA
agtcaaacataagtttggacacctccgcaccacttacaattacctcaggcgccctaacagtggcaaccaccgctcctctg

SEQ ID NO: 109100 - DNA, 80 bp, synthetic construct
  source 1..80: mol_type = other DNA
ctcctcggttctgtgcgagtgctatgacgcaggatgcgcatggtacgagctcacccccgccgagaccacagtcagacttc

SEQ ID NO: 109101 - DNA, 80 bp, synthetic construct
  source 1..80: mol_type = other DNA
tcactgaagtggatggggtgagaatccatcgttacgcccctcaatgcaaacctctgttgagagatgagatcactttcatg

SEQ ID NO: 109102 - DNA, 80 bp, synthetic construct
  source 1..80: mol_type = other DNA
gacggctgaaaagggggggagagctcacaggatggcgctggaagagctcccggacgcgctacagacggttgccctgatag

SEQ ID NO: 109103 - DNA, 80 bp, synthetic construct
  source 1..80: mol_type = other DNA
agatttgcctggactggctgggtcatagccaggggtctccttcagccgggagctcggcctcccgggcctctgggagcgag

SEQ ID NO: 109104 - DNA, 80 bp, synthetic construct
  source 1..80: mol_type = other DNA
ggggaaaggtggtgttggcgggaagcgtgggaacacggtggattctctcacgaccggcaccagtaccacccccctgtgaa

SEQ ID NO: 109105 - DNA, 80 bp, synthetic construct
  source 1..80: mol_type = other DNA
caactggcgactctaaggaagctatgtattgaggggaaaattaccaacataacaactgactcaagatgtcctacccaagg

SEQ ID NO: 109106 - DNA, 80 bp, synthetic construct
  source 1..80: mol_type = other DNA
agcgatcccagccgcgtgggagacgccagcccatcccgaaagatcggcgctccaccggcaagtcctggggaaagccagga

SEQ ID NO: 109107 - DNA, 80 bp, synthetic construct
  source 1..80: mol_type = other DNA
tgacagcaacaccccctggaactgctgaagcctttccccagagcaacgctccaattcaagatgaagaaagggatattccg

SEQ ID NO: 109108 - DNA, 80 bp, synthetic construct
  source 1..80: mol_type = other DNA
acagggacagaagccagctgagccctctgttgcacagcaccactgagtgggccatactaccctgcactttctctgattta

SEQ ID NO: 109109 - DNA, 80 bp, synthetic construct
  source 1..80: mol_type = other DNA
acctggggtgcggatacagccgcatgcggggacattttgcatggcctacccgtgtcagcccggaaaggctccctcgttct

SEQ ID NO: 109110 - DNA, 80 bp, synthetic construct
  source 1..80: mol_type = other DNA
cttgaaggggtcctcgggggggccggtgctctgccctaggagccacgtcgttgggctcttccgagcagctgtgtgctctc

SEQ ID NO: 109111 - DNA, 80 bp, synthetic construct
  source 1..80: mol_type = other DNA
agggccagtgcgcgccgaaaccccccacgaactacaagaccgccatctggagtgtggcggcctcggagtacgcggaggtg

SEQ ID NO: 109112 - DNA, 80 bp, synthetic construct
  source 1..80: mol_type = other DNA
cctgggaagaacccaaaaaactttcaaaccatgccgggcatttttcagacaacaacgggggaaataggagcaattgcact

SEQ ID NO: 109113 - DNA, 80 bp, synthetic construct
  source 1..80: mol_type = other DNA
tccgaattccagtgtggtctatgaggctgatcatcacatcctgcacttgccggggtgcgtgccctgtgtgagaactggga

SEQ ID NO: 109114 - DNA, 80 bp, synthetic construct
  source 1..80: mol_type = other DNA
cagggaatgtattacttggcctggggccggatggacagcccgcacgagtacgggacgtgggtgcgcgtccgcacgttccg

SEQ ID NO: 109115 - DNA, 80 bp, synthetic construct
  source 1..80: mol_type = other DNA
ggatgtttgacaccgtggtgctctgtgagtgctacgacgccggagcggcctggtacgaactcactccggcagagaccacc

SEQ ID NO: 109116 - DNA, 80 bp, synthetic construct
  source 1..80: mol_type = other DNA
acgccgcgtgggctccaaacgcctccggaagagagcgccccgccccgatattcaagcccgcggtggtgctatggctttcc

SEQ ID NO: 109117 - DNA, 80 bp, synthetic construct
  source 1..80: mol_type = other DNA
catggatgtgcccttcccccccccgggagtactcctgttccaccacctaggaagaggaaggttgtacaacttgaccaatc

SEQ ID NO: 109118 - DNA, 80 bp, synthetic construct
  source 1..80: mol_type = other DNA
ttttgattcacaaggcaatatgcaacttaatgtagcaggaggactaaggattgattctcaaaacagacgccttatacttg

SEQ ID NO: 109119 - DNA, 80 bp, synthetic construct
  source 1..80: mol_type = other DNA
taaaaaaaaagggtacgccacgctacatccgggaggtatggaatgataaaacagtaacactggagcggaagatagcacgt

SEQ ID NO: 109120 - DNA, 80 bp, synthetic construct
  source 1..80: mol_type = other DNA
cactcaagacgcagcagaaggtcactaacagtgcagacgcatggagagagcaccctatcgaacaaaaagggggcctggat

SEQ ID NO: 109121 - DNA, 80 bp, synthetic construct
  source 1..80: mol_type = other DNA
ggtggctgatcccgcaggtggtgtttaaaaacacaacggcgcgggccagctccgtgaagcactggtggagggccgtcgag

SEQ ID NO: 109122 - DNA, 80 bp, synthetic construct
  source 1..80: mol_type = other DNA
ccaaggcacatgggatcaacccgaatatcaggaccggggtgcgaaccgtaacaaccggtgaatccatcacgtactccaca

SEQ ID NO: 109123 - DNA, 80 bp, synthetic construct
  source 1..80: mol_type = other DNA
ttgggtgtgtgttttgttgtgcagggttcgtccgattcataacgcgacagcgtcgagtcggttttaagggaaaaggttac

SEQ ID NO: 109124 - DNA, 80 bp, synthetic construct
  source 1..80: mol_type = other DNA
ctgcgaccctaacaggaagagaggatggccagccacagaggtcatgactgcggtgggtttaatgtttgccattgtgggag

SEQ ID NO: 109125 - DNA, 80 bp, synthetic construct
  source 1..80: mol_type = other DNA
tggtccatagggaatggttcatggatttgaacatgccctggagcagcgcggctggcacggcttggaggaacagagaaacg

SEQ ID NO: 109126 - DNA, 80 bp, synthetic construct
  source 1..80: mol_type = other DNA
gcttggactgtctatgttggcatcgtcacaatgctctccccaatgctgcaccactggatcaaagttgagtatggtaatct

SEQ ID NO: 109127 - DNA, 80 bp, synthetic construct
  source 1..80: mol_type = other DNA
gttgaggcaggacgaacactcagagttctaaacttagtggaaaactggctgaacaataatacccaattttgcataaaggt

SEQ ID NO: 109128 - DNA, 80 bp, synthetic construct
  source 1..80: mol_type = other DNA
tgggagaactgcgcgggccactggccgcaggaactgaccacgtggttcaggagcatgggcgtaaagacgggctccgagcg

SEQ ID NO: 109129 - DNA, 80 bp, synthetic construct
  source 1..80: mol_type = other DNA
agatctaaatttggctatggggcgaaagacgtccgctgccatgccagaaaggccgtaaaccacatcaactccgtgtggaa

SEQ ID NO: 109130 - DNA, 80 bp, synthetic construct
  source 1..80: mol_type = other DNA
cgtagggtgggccgtgaaatgggagattgtcatccttgtattcttactcttggcagacgctcgagtgtgtgtggctctct

SEQ ID NO: 109131 - DNA, 80 bp, synthetic construct
  source 1..80: mol_type = other DNA
ccaacttacactttcggtggaaatgactcagacgtgttcctgctgtcgtctaggcgacccccccaaggtcagtggtttgg

SEQ ID NO: 109132 - DNA, 80 bp, synthetic construct
  source 1..80: mol_type = other DNA
gacacttccagaggagcatcaggccaatatggtgtgtaagagagaccaaagtgaccgcggatgggggaaccactgcgggt

SEQ ID NO: 109133 - DNA, 80 bp, synthetic construct
  source 1..80: mol_type = other DNA
agtgggagtacgttgtgcttgctttcctgctgttggcggacgccaggctctgtgcgtgcttatggatgatgctgatggtc

SEQ ID NO: 109134 - DNA, 80 bp, synthetic construct
  source 1..80: mol_type = other DNA
aagcagcagccatatttatgacagccacaccgcccggaagctcagaacccttcccagaatccaatgctcctatttctgac

SEQ ID NO: 109135 - DNA, 80 bp, synthetic construct
  source 1..80: mol_type = other DNA
tgtgtgggattgggtttgtaccatcctgacagacttcaaaaactggttgacttctaagttgttcccaaaaatgcctggcc

SEQ ID NO: 109136 - DNA, 80 bp, synthetic construct
  source 1..80: mol_type = other DNA
gccctgacgcccgcccccgcgtattgcggggccgtggactccgccaccaaaatgatggtgcgtttggcggacgccgaaaa

SEQ ID NO: 109137 - DNA, 80 bp, synthetic construct
  source 1..80: mol_type = other DNA
tgatccgtatcgtgctgctctctcttcttgtagcttttagtcaggcaggatttcatactatcaatgctacatggtgggct

SEQ ID NO: 109138 - DNA, 80 bp, synthetic construct
  source 1..80: mol_type = other DNA
gagtttcttgtagacgacgcccagctgttgagtgcatagaagatttacttgaggaagatccaacagatgaacctttgaac

SEQ ID NO: 109139 - DNA, 80 bp, synthetic construct
  source 1..80: mol_type = other DNA
gtgaatatcatcaaatgactgctactacaaagaaggatgtaaaaatatctttactatttgatgagaatggaattctatta

SEQ ID NO: 109140 - DNA, 80 bp, synthetic construct
  source 1..80: mol_type = other DNA
cccatgcgggcgtaggcgagggtcctctgggtcgcatccaggcccgggcgctgcagaaagttgtaaaaggagataagccc

SEQ ID NO: 109141 - DNA, 80 bp, synthetic construct
  source 1..80: mol_type = other DNA
tgccactgccacagcttggatgctcctgagggctgccacccagccatccacttcagccatcgtcatgcctttgctttgcc

SEQ ID NO: 109142 - DNA, 80 bp, synthetic construct
  source 1..80: mol_type = other DNA
gcggcctagccgatctcatggggtacatcccggtcgtcggcggccccctaggtggcgttgccgcagctctggcgcatggc

SEQ ID NO: 109143 - DNA, 80 bp, synthetic construct
  source 1..80: mol_type = other DNA
acacatgtgcaaaattctcctgcaccagtaaagcgattgggagaacaatccagccagaaaacatcaaatacaaagttggc

SEQ ID NO: 109144 - DNA, 80 bp, synthetic construct
  source 1..80: mol_type = other DNA
ggtcgactcccggcgcgcggcccgccattctcccgggaccaacgagaccatcacggcgctgatgggtgcggtgacgtctc

SEQ ID NO: 109145 - DNA, 80 bp, synthetic construct
  source 1..80: mol_type = other DNA
cttgtgaaacagtacggccccgagttcgtgaccgggtacaacatcatcaacttcgactggcccttcttgctggccaagct

SEQ ID NO: 109146 - DNA, 80 bp, synthetic construct
  source 1..80: mol_type = other DNA
tcggcgtgaacgccgttgcatactatcgaggcttggacgtgtctgtcatccccacagcaggcgacgtcgttgtttgtgcg

SEQ ID NO: 109147 - DNA, 80 bp, synthetic construct
  source 1..80: mol_type = other DNA
ggttgccaataacaacggctcctctgaagacaggccatactgctggcactacccgccccgtcagtgcggggtggtgtctg

SEQ ID NO: 109148 - DNA, 80 bp, synthetic construct
  source 1..80: mol_type = other DNA
ttgtcaatgactgggcgagcttggacatgtggtggttttccatagcgcttatgtttgtttgccttattattatgtggctt

SEQ ID NO: 109149 - DNA, 80 bp, synthetic construct
  source 1..80: mol_type = other DNA
gaggtcacgttccaagtagggctcaatcaatacccggtgggctctcacctcccgtgtgaaccccaaccggacgtagccgt

SEQ ID NO: 109150 - DNA, 80 bp, synthetic construct
  source 1..80: mol_type = other DNA
aatgttcctgaatcgttggtggtctcgtgtatgtctaacgatgttcatgacgggtttatgcagcgttatatggaaacaat

SEQ ID NO: 109151 - DNA, 80 bp, synthetic construct
  source 1..80: mol_type = other DNA
tttggtaagggaagtattgacacatgtgcaaaattcacctgctctagttcagctacagggagactcatcctacccgaaaa

SEQ ID NO: 109152 - DNA, 80 bp, synthetic construct
  source 1..80: mol_type = other DNA
acatcaaagagtgcctcacaacgggcgaaaaaggtgactttcgacagggtgcaactactagactctcactatgactcagt

SEQ ID NO: 109153 - DNA, 80 bp, synthetic construct
  source 1..80: mol_type = other DNA
gggtggtgtcactggttggggccactcccacctcattgatggtgggcgttggcttggcggcactccatttggctattgtg

SEQ ID NO: 109154 - DNA, 80 bp, synthetic construct
  source 1..80: mol_type = other DNA
ctcctcaagacctggcgctcgaagaagacacctatgggattttcctatgatactagctgctttgactccacagtgactga

SEQ ID NO: 109155 - DNA, 80 bp, synthetic construct
  source 1..80: mol_type = other DNA
ggacaacactcttaccatgcaatcacaggcaccgctaaccgtgcaagactcaaaacttagcattgctaccaaagagccac

SEQ ID NO: 109156 - DNA, 80 bp, synthetic construct
  source 1..80: mol_type = other DNA
ccaattgcaggagcgcgaccgcgagctccggcgcgcaacagcggaggccctggagcgccagcagcgcgcggccgacctgg

SEQ ID NO: 109157 - DNA, 80 bp, synthetic construct
  source 1..80: mol_type = other DNA
caccagcacaataactctggctttgttggttacctcgctcccaccatgcgagagggacaggcctaccccgccaacttccc

SEQ ID NO: 109158 - DNA, 80 bp, synthetic construct
  source 1..80: mol_type = other DNA
gctgccggggctaaacttacagaagcaaataaggctttggaggaagtaactcatgttcgggcacacgaaacggctaaact

SEQ ID NO: 109159 - DNA, 80 bp, synthetic construct
  source 1..80: mol_type = other DNA
gggttaggcgttttgcgctgcttcgcgatgtacgggccagatatacgcgttgacattgattattgactagttattaatag

SEQ ID NO: 109160 - DNA, 80 bp, synthetic construct
  source 1..80: mol_type = other DNA
caaaggatggccaatatcgaaaatggacttaggcgtaccgctactggcactgggctgctattcacaagtgaacccactga

SEQ ID NO: 109161 - DNA, 80 bp, synthetic construct
  source 1..80: mol_type = other DNA
gaagggtcttattatggctccagccatgatggttcgtcgcactacaaagttactgtgtatgacaaatcaagctttggtaa

SEQ ID NO: 109162 - DNA, 80 bp, synthetic construct
  source 1..80: mol_type = other DNA
gcgataccataacaaggtgtactgtacaacatcaaagagcgcctcacagagggctaaaaaggtaacttttgacaggacgc

SEQ ID NO: 109163 - DNA, 80 bp, synthetic construct
  source 1..80: mol_type = other DNA
cgctgaacaggagttgttgcgcggtgagttgtcgctgtgagttgtgttgttgggcaggtgtggtggatgacgtgacgtgt

SEQ ID NO: 109164 - DNA, 80 bp, synthetic construct
  source 1..80: mol_type = other DNA
tagcgcgggtttctgtctcaaaaggaggtagacgatccctactgtacggagtgcgccgagacaaccgagatcgtgttggt

SEQ ID NO: 109165 - DNA, 80 bp, synthetic construct
  source 1..80: mol_type = other DNA
ctacccggagtacgacgacagagaaccatcggtgccagccgagtgccaccggccgaataggccgaagtatccaccagcat

SEQ ID NO: 109166 - DNA, 80 bp, synthetic construct
  source 1..80: mol_type = other DNA
accatcccgatagtgaacgacccccggacccgcgtggaggccgaggcggccgtgcggtccggcacggccgtggactttat

SEQ ID NO: 109167 - DNA, 80 bp, synthetic construct
  source 1..80: mol_type = other DNA
gtagatcgtagacacggcgaatggcggacagcatggccaggtcaagccgctcgcccgggcgttggcgtctggccaggcgg

SEQ ID NO: 109168 - DNA, 80 bp, synthetic construct
  source 1..80: mol_type = other DNA
aatgtatgcagaaaatgtggatctagaaactcctgacactcatgtggtgtacaaacctggagcttcagatgctagctctc

SEQ ID NO: 109169 - DNA, 80 bp, synthetic construct
  source 1..80: mol_type = other DNA
ccagctccgccgaacgctctggcctacccgccccgggcgcgtgtcgcgcaacggaagccccagaacgcgaggacgggtgc

SEQ ID NO: 109170 - DNA, 80 bp, synthetic construct
  source 1..80: mol_type = other DNA
gatgaagatagtcggacctcgctcctgcagtaatgtatggcaaggcacttttcccatcaatgcgacgacgaccggaccca

SEQ ID NO: 109171 - DNA, 80 bp, synthetic construct
  source 1..80: mol_type = other DNA
ccataaagtgggagtatatcgtcctcatgttcttggtgctggcagatgcccgtgtctgtgtggctctttggttgatgctg

SEQ ID NO: 109172 - DNA, 80 bp, synthetic construct
  source 1..80: mol_type = other DNA
tgcctgatatgggtgcttgcgagactgcctttttttggtgcttgcaagaatctgaatgtttgaaatatttcacaagttct

SEQ ID NO: 109173 - DNA, 80 bp, synthetic construct
  source 1..80: mol_type = other DNA
ggcacatcaaccgcactgccttgaattgcaatgattcgttgcacacagggttcatttcggcgttgttctacgtcaacaag

SEQ ID NO: 109174 - DNA, 80 bp, synthetic construct
  source 1..80: mol_type = other DNA
tcgatgggtcaagcgtgtccacggcacttgctgccctggcggaaagatccttcccgtcgacgaaaccagaggggacaggc

SEQ ID NO: 109175 - DNA, 80 bp, synthetic construct
  source 1..80: mol_type = other DNA
ggcggggtccatgcagtcgcatcgagtgcgccacccaactgatgggtccgcagccaacctcgtcccagaggtaaaaatga

SEQ ID NO: 109176 - DNA, 80 bp, synthetic construct
  source 1..80: mol_type = other DNA
ggtcgcaacctcgcggacggcgtcagcctatccccaaggcacgcccacgcgagggccggtcctgggctcagcctgggtac

SEQ ID NO: 109177 - DNA, 80 bp, synthetic construct
  source 1..80: mol_type = other DNA
tgtgctcagtgatttcaaaacctggctttcatccaagatcatgcccaggttgccgggagttcccctcctctcatgccaga

SEQ ID NO: 109178 - DNA, 80 bp, synthetic construct
  source 1..80: mol_type = other DNA
gtttctcacatcgaagtagactgcattccagccttcacagtctatttgctttacggatttgtcaccctcacgctcatctg

SEQ ID NO: 109179 - DNA, 80 bp, synthetic construct
  source 1..80: mol_type = other DNA
aagtcacactggactgtgagccaaggagtggactgaacactgaagcgttttacgtcatgaccgtggggtcaaagtcattt

SEQ ID NO: 109180 - DNA, 80 bp, synthetic construct
  source 1..80: mol_type = other DNA
gatactacagaatacaaggactacaaaaaagtaaccgtagagtttcagcataacaactcaggatttgtgggttacctcgg

SEQ ID NO: 109181 - DNA, 80 bp, synthetic construct
  source 1..80: mol_type = other DNA
gccggtgtttgaggagatcgacgcctgcctgcggggctggttcggttcggcccgagtggaccacgttaaaggggaaacca

SEQ ID NO: 109182 - DNA, 80 bp, synthetic construct
  source 1..80: mol_type = other DNA
gtgttcgacgcccactatgattcagtcttaaaggacattaagcttgccgcctccaaggtcaaagccaaactcctcacgat

SEQ ID NO: 109183 - DNA, 80 bp, synthetic construct
  source 1..80: mol_type = other DNA
gccgtctggaatgttcgattcggtcgtcctctgcgaggcatatgacactggagcttcgtggtatgagctaacaccatctg

SEQ ID NO: 109184 - DNA, 80 bp, synthetic construct
  source 1..80: mol_type = other DNA
cagatcagatgaagggtcttactatggttccagtaatgacgcttcaacgcactataagcttactgtgtatgacaaatcaa

SEQ ID NO: 109185 - DNA, 80 bp, synthetic construct
  source 1..80: mol_type = other DNA
atagatacaaatgcaaaaacagaacacgcgccagacgagcggtctctcggtagtacctgtccgcgatcgtggcgcgcagc

SEQ ID NO: 109186 - DNA, 80 bp, synthetic construct
  source 1..80: mol_type = other DNA
ggcggtccatgacgtacacaaactcgaacgcggccacgaagatgctagcggcgcagtggggcgcccccaggcatttggca

SEQ ID NO: 109187 - DNA, 80 bp, synthetic construct
  source 1..80: mol_type = other DNA
actcactgactgagagactatacgtgggagggcccatgacaaacagcaagggccagtcctgcgggtacaggcgttgccgc

SEQ ID NO: 109188 - DNA, 80 bp, synthetic construct
  source 1..80: mol_type = other DNA
agtacttagaagagccccctccccggcccccttccactgttagctactttcacataaccggcggcgatgactgacaacca

SEQ ID NO: 109189 - DNA, 80 bp, synthetic construct
  source 1..80: mol_type = other DNA
tgactaagatgggagagaggaagatccttaggccccgctgggctgatgcaagagtctattccgatcaccaagccttaaag

SEQ ID NO: 109190 - DNA, 80 bp, synthetic construct
  source 1..80: mol_type = other DNA
atgtaacagaacaataaaatctaaaactagccacactttggcgtctagtgattgtaaaagagtttattgatacttttaca

SEQ ID NO: 109191 - DNA, 80 bp, synthetic construct
  source 1..80: mol_type = other DNA
acagtacctatatggtgtggggtccgcggttgtctcttgggccatcaagtgggagtatgtagtgctgttgttcctcatgc

SEQ ID NO: 109192 - DNA, 80 bp, synthetic construct
  source 1..80: mol_type = other DNA
cgtggggatgtagctccatcgtggggatgtagctccatcctggaggatgtagctccatcgtggtgatgtagctccatcgt

SEQ ID NO: 109193 - DNA, 80 bp, synthetic construct
  source 1..80: mol_type = other DNA
ctcgccccgcacgtgggcatgggactggaaaccagaacagaaacatggatgtcctcagaaggagcatggaaacatgccca

SEQ ID NO: 109194 - DNA, 80 bp, synthetic construct
  source 1..80: mol_type = other DNA
ttccggtatcagctagacggggccgcgaaattttcctggggccggccgacgacatcaagacgtcgggttggcgactcctc

SEQ ID NO: 109195 - DNA, 80 bp, synthetic construct
  source 1..80: mol_type = other DNA
agtgcgggtgcaggcgcgcccccacgaccaccgagagccactggaccgtctgctccgccaggaccgccagcacatccagc

SEQ ID NO: 109196 - DNA, 80 bp, synthetic construct
  source 1..80: mol_type = other DNA
taagatgctgttgggagtcgccttggtgtggttggggctcaacgctaggaatccaacaatgtccatgacttttcttgccg

SEQ ID NO: 109197 - DNA, 80 bp, synthetic construct
  source 1..80: mol_type = other DNA
tcctaagactgcatttggcggctcggtttcttcttctttttcgctctccggagatagagggatggtagccatggacctcc

SEQ ID NO: 109198 - DNA, 80 bp, synthetic construct
  source 1..80: mol_type = other DNA
cgggtgcggaggaggggggacgcgggggcggaggaggggggacgcgggtgcggaggagaggtctcaccagcgttcgtgcc

SEQ ID NO: 109199 - DNA, 80 bp, synthetic construct
  source 1..80: mol_type = other DNA
ttcttgcatccattttggcgctatcagaccgagccaacatgcaagcagcgtccgctgaacccctattgtcgagcgtattg

SEQ ID NO: 109200 - DNA, 80 bp, synthetic construct
  source 1..80: mol_type = other DNA
tatcaagaaagtaactttcgaccggctgcaagtcgtcgatcagtactacaataaggtatgcgaagaggtgaaagcccaag

SEQ ID NO: 109201 - DNA, 80 bp, synthetic construct
  source 1..80: mol_type = other DNA
ggcgggccgggccccggccagccccgggacggccgccaggtcgccgtcgaagccctcggccagcgcctccaggatcccgc

SEQ ID NO: 109202 - DNA, 80 bp, synthetic construct
  source 1..80: mol_type = other DNA
aaggaacttaccattgtcagagcggaccttgtcaccacattttccatttggtgaacgtcaccagcagcagcaacagctcc

SEQ ID NO: 109203 - DNA, 80 bp, synthetic construct
  source 1..80: mol_type = other DNA
cagcatatgacctagagcacattacatcatgctcatccaatgtctcagttgcacacgatgcaacgggcaagagggtctac

SEQ ID NO: 109204 - DNA, 80 bp, synthetic construct
  source 1..80: mol_type = other DNA
cctcacttacattatgcaaagtcagactattacactcaggccatgcagaattctctgacagagtagcttttgactgctgt

SEQ ID NO: 109205 - DNA, 80 bp, synthetic construct
  source 1..80: mol_type = other DNA
actgtttaccatggtgctgggtcgcggactcttgctggtaacaaacggcccgcgcttcaaatgtacaccaatgtggacca

SEQ ID NO: 109206 - DNA, 80 bp, synthetic construct
  source 1..80: mol_type = other DNA
ggaaggcgcagtccagtggatgaataggctcatagcctttgcttccagaggcaatcacgtcgccccgactcactatgtgg

SEQ ID NO: 109207 - DNA, 80 bp, synthetic construct
  source 1..80: mol_type = other DNA
actgtttgcgggccggtttattgctttacgccgagccccgtggtgctgggcaccactgaccggagaggcaaaccgaccta

SEQ ID NO: 109208 - DNA, 80 bp, synthetic construct
  source 1..80: mol_type = other DNA
agttccgtcccagaagataacctaagacgcgtttgtctacaataaacatgtcaacggataaaaccgatgtaaaaatgggc

SEQ ID NO: 109209 - DNA, 80 bp, synthetic construct
  source 1..80: mol_type = other DNA
gctctcgtgcctcaccacacctgcctcggccctacattataccaataagtctggtctttactacctaaccaatgactgtc

SEQ ID NO: 109210 - DNA, 80 bp, synthetic construct
  source 1..80: mol_type = other DNA
gggacaagccttcacgttcagacctcgtcgccatcagacggtccagacctgcaactgctcgctgtacccaggccatcttt

SEQ ID NO: 109211 - DNA, 80 bp, synthetic construct
  source 1..80: mol_type = other DNA
tgtgcagcaacacctggcacggaaccttccccatcaacgccacaacaacggggcccagtgtgcctgctccggcccccaac

SEQ ID NO: 109212 - DNA, 80 bp, synthetic construct
  source 1..80: mol_type = other DNA
attctgccctcgctggagccacagaagtggattctggtgatggaaatcacatgtttgcaggacatctcaaatgcaaagtt

SEQ ID NO: 109213 - DNA, 80 bp, synthetic construct
  source 1..80: mol_type = other DNA
tctttcgtgacattgattaccgggaacatgtcctttagagacctgggaagagtgatggttatggtgggcgctaccatgac

SEQ ID NO: 109214 - DNA, 80 bp, synthetic construct
  source 1..80: mol_type = other DNA
gggttctacacgggcgagtacgacatgcctgaccccaacgacgggtttttgtgggacgacgtggacagcgcggtgttctc

SEQ ID NO: 109215 - DNA, 80 bp, synthetic construct
  source 1..80: mol_type = other DNA
gctggtcatattactgtgcaggactgaaaaaagtcacagaagtgcgaggatacacaaaaggcggtccaggacacgaagaa

SEQ ID NO: 109216 - DNA, 80 bp, synthetic construct
  source 1..80: mol_type = other DNA
tggttacatccatttccaccaaatgctctttgcgcaccatctccattccatgcaggcatctaagctccccttcgcgctcg

SEQ ID NO: 109217 - DNA, 80 bp, synthetic construct
  source 1..80: mol_type = other DNA
gcgtaagcgcgagtacgcacgggagtcaaacacatagtcattgcagacacggactagatactggtagcctaccagaagat

SEQ ID NO: 109218 - DNA, 80 bp, synthetic construct
  source 1..80: mol_type = other DNA
ctccatgagtttccaccacgctggccgccaggcacagatcgccgaacagcggcggccggtgtggggaaatccatgggtct

SEQ ID NO: 109219 - DNA, 80 bp, synthetic construct
  source 1..80: mol_type = other DNA
atatcccaagcggaagcagctttggagaaccttgtgttactcaatgcggcgtccctggccggcacgcacggtcttgtgtc

SEQ ID NO: 109220 - DNA, 80 bp, synthetic construct
  source 1..80: mol_type = other DNA
gtgtcccctaccgccccctaagacccctccaataccaccaccacggaggaagagggcgatagtgttgactgagtccacag

SEQ ID NO: 109221 - DNA, 80 bp, synthetic construct
  source 1..80: mol_type = other DNA
cacggtttcttctatgccatccttttcatctgtgtggcatggtatgtcaagggcaggcttccggcagctgcggtctacgc

SEQ ID NO: 109222 - DNA, 80 bp, synthetic construct
  source 1..80: mol_type = other DNA
aagtcagatcccttataggcaatgaggaatacacagactacatgccatccatgaagagattcagaagggaagaggaggag

SEQ ID NO: 109223 - DNA, 80 bp, synthetic construct
  source 1..80: mol_type = other DNA
gttacagcgggggaggcgtttatcacagcacgcctcgtgcccggccccgctggatctggttttgcctactcctgcttgct

SEQ ID NO: 109224 - DNA, 80 bp, synthetic construct
  source 1..80: mol_type = other DNA
gggatcctttagctcaatgccccccctcgagggggaacctggagacccagacttgagcactggttcctggtccactgtta

SEQ ID NO: 109225 - DNA, 80 bp, synthetic construct
  source 1..80: mol_type = other DNA
acgtgctaccttaaggccacagccgccacaagagcggctggcctaaaggattgcaccatgctggtctgcggcgacgacct

SEQ ID NO: 109226 - DNA, 80 bp, synthetic construct
  source 1..80: mol_type = other DNA
gccaacacccctgctgtacaggctgggagccgtacaaaacgaggtcaccctcacacaccccataaccaagtacatcatgg

SEQ ID NO: 109227 - DNA, 80 bp, synthetic construct
  source 1..80: mol_type = other DNA
gaagaggcgacactcgtggcgccctcataagccccaggccgatttcaactcttaagggatcatccggtgggccactgttg

SEQ ID NO: 109228 - DNA, 80 bp, synthetic construct
  source 1..80: mol_type = other DNA
gccacctacaactggggagcaaatgacaccgacgtcttcctgatggcgagtgcacgacctccggcaggtgggtggttcgg

SEQ ID NO: 109229 - DNA, 80 bp, synthetic construct
  source 1..80: mol_type = other DNA
cgtacgtgggttccgggagcaggcgtggaaactgtttggctccgcggaggccccgcgggcgtttatcggtgccgcgttgg

SEQ ID NO: 109230 - DNA, 80 bp, synthetic construct
  source 1..80: mol_type = other DNA
tggctcacaatccgggaggaaaacacaacagaatgtgattcggcaatcattggcacagccataaaaggagacagagctgt

SEQ ID NO: 109231 - DNA, 80 bp, synthetic construct
  source 1..80: mol_type = other DNA
agacagagttccagaaaacaaaacatcaagagtgggactttgtcgtgacaactgacatttcagagatgggcgccaacttt

SEQ ID NO: 109232 - DNA, 80 bp, synthetic construct
  source 1..80: mol_type = other DNA
gctcctggttaagggacatttgggactgggtttgcgaggtgctgggcgactttaaaaggtggctcggcgccaagctcatg

SEQ ID NO: 109233 - DNA, 80 bp, synthetic construct
  source 1..80: mol_type = other DNA
ctggcgagccaaacgggggtcggtgattgagatgaagccgtcctctgaaaagtcatccaagcgggcctcacagtccaagg

SEQ ID NO: 109234 - DNA, 80 bp, synthetic construct
  source 1..80: mol_type = other DNA
ggcaggagccccacgttctcgacgctgtagtacagcgcggtgttgggtggctgggcgaagctgtgggtggagtggtcgaa

SEQ ID NO: 109235 - DNA, 80 bp, synthetic construct
  source 1..80: mol_type = other DNA
ccgcaggggtgactcgcgggctgccctattgagtcccagaccacttagcacccttaagggctcctctggaggtcccatca

SEQ ID NO: 109236 - DNA, 80 bp, synthetic construct
  source 1..80: mol_type = other DNA
tcgttaatggatttgctttggcctggttggcaatacgagcaatggccgtgccacgcactgacaatatcgctctggcaatt

SEQ ID NO: 109237 - DNA, 80 bp, synthetic construct
  source 1..80: mol_type = other DNA
ccatgtgctgcggaggaggagaagctcccaataaatcccctgagcaactccctcgtaagacaccataacatggtgtattc

SEQ ID NO: 109238 - DNA, 80 bp, synthetic construct
  source 1..80: mol_type = other DNA
gtggtcccatgtacaactcacggggccaattgtgcgggatgcgcaggtgccgagctagtggggttctcaccactagcttg

SEQ ID NO: 109239 - DNA, 80 bp, synthetic construct
  source 1..80: mol_type = other DNA
agaactgtcgcctctgctccttaccactacaacgtggcaggtcctcccctgctctttcaccactctacctgccctttcta

SEQ ID NO: 109240 - DNA, 80 bp, synthetic construct
  source 1..80: mol_type = other DNA
gaaactgatcacctggggggccgacaccgccgcttgtggtgacattatagctggcctgccagtctctgcccggcgaggta

SEQ ID NO: 109241 - DNA, 80 bp, synthetic construct
  source 1..80: mol_type = other DNA
atgcattcttctgcatcgctgtccggggtcatgggtgctaccgcggctgagcccgagtctgcaagtccttttcctagtct

SEQ ID NO: 109242 - DNA, 80 bp, synthetic construct
  source 1..80: mol_type = other DNA
actggcctaatccacctccaccagaacatcgtggacgtccagtatctttatggtataggatccactgtggtgtcatgggc

SEQ ID NO: 109243 - DNA, 80 bp, synthetic construct
  source 1..80: mol_type = other DNA
taacccgcgtaattggccctccaccctggtgtatcagaaaatccccgggccaactaccgtactacttccgcgtgacgcac

SEQ ID NO: 109244 - DNA, 80 bp, synthetic construct
  source 1..80: mol_type = other DNA
aaggcaacctcgtctttcttggtcctgccgacgatgtgaagggcatgggctggcgccttcttgctccaatcacagcatac

SEQ ID NO: 109245 - DNA, 80 bp, synthetic construct
  source 1..80: mol_type = other DNA
cgttgggcctaagacttgcagcaacacctggcacggcaccttccccatcaacgcacacacgacgggccccggcataccag

SEQ ID NO: 109246 - DNA, 80 bp, synthetic construct
  source 1..80: mol_type = other DNA
actgttgttgctcatcctgctgttgccccctcgggcttacgcttatgatgccactgaacaagcctcacttggctttgcag

SEQ ID NO: 109247 - DNA, 80 bp, synthetic construct
  source 1..80: mol_type = other DNA
tcggtctcgtggtcgtcccggtgaaacgcggtggtctccatgttgttccgcacgtacttggccgtggagcggcagacccc

SEQ ID NO: 109248 - DNA, 80 bp, synthetic construct
  source 1..80: mol_type = other DNA
aactgggaccactccgagacaaaggctcgggtccaggctaacacgaaggaggcgatctgcgaggggtatctgtcgttttc

SEQ ID NO: 109249 - DNA, 80 bp, synthetic construct
  source 1..80: mol_type = other DNA
tcaacttgttgcctgcccttttgtcaccgggcgcactggtggtgggcgtagtatgcgctgccattctgaggcgacacgtt

SEQ ID NO: 109250 - DNA, 80 bp, synthetic construct
  source 1..80: mol_type = other DNA
tttcgtgccgggccacctggagctggcccaggaagtacgcctccgacgcgcgctccgagaacagcacgttctcagtcaca

SEQ ID NO: 109251 - DNA, 80 bp, synthetic construct
  source 1..80: mol_type = other DNA
gggctacaaggtgttagtgctcaacccatccgtcgcggccacgctgggttttggggcttacatgtctaaggcgtacggca

SEQ ID NO: 109252 - DNA, 80 bp, synthetic construct
  source 1..80: mol_type = other DNA
aaggtcttcttggacctacgtgagactgcctcctcagactgtgataccggagtcatgggggctgcagtcaaaagcggtca

SEQ ID NO: 109253 - DNA, 80 bp, synthetic construct
  source 1..80: mol_type = other DNA
aaagtagtgcaatatgagaacctcaaatacaccgtcatcattacagtgcacacaggagaccaacaccaggtgggaaatga

SEQ ID NO: 109254 - DNA, 80 bp, synthetic construct
  source 1..80: mol_type = other DNA
tcctccttcaggtgcggcaggagccccacgttctcgacgctgtaatacagcgcggtgttgggtggctgggcgaagctgtg

SEQ ID NO: 109255 - DNA, 80 bp, synthetic construct
  source 1..80: mol_type = other DNA
cgggaccccgatcccaacatccgcgctttctcgcaggccgggcgccgccttcgtggacgggacaccggtgtggtaactgg

SEQ ID NO: 109256 - DNA, 80 bp, synthetic construct
  source 1..80: mol_type = other DNA
ggggggtgcgcgacgccgtcatcctcctcgcgtgcgtggtccggccggagctaatctttgatatcaccaagctgttgctc

SEQ ID NO: 109257 - DNA, 80 bp, synthetic construct
  source 1..80: mol_type = other DNA
tgtttggatgaacggcaccggtttcacgaagacctgcggtgcccctccgtgtgtggtccgaacgagcaacaacacatggc

SEQ ID NO: 109258 - DNA, 80 bp, synthetic construct
  source 1..80: mol_type = other DNA
cacctcggcttccgttacgctgtgggagaacggagcaagttcagtctggaacgccacaacagccattggcctctgccatg

SEQ ID NO: 109259 - DNA, 80 bp, synthetic construct
  source 1..80: mol_type = other DNA
tcagagagacgatgcctgagccatccggcttacgatactgacacagggattcgtataaacgcatggcatacggattggtg

SEQ ID NO: 109260 - DNA, 80 bp, synthetic construct
  source 1..80: mol_type = other DNA
gaccctccagccgcatacgacccccatggagccccgccccggagcgagtacccgccggcctgagggccgcccccagcgcg

SEQ ID NO: 109261 - DNA, 80 bp, synthetic construct
  source 1..80: mol_type = other DNA
gcggcccagttccacgcgcggtttatggacgccatcacaccgacggggaccgtcatcacgctcctgggcctgactccgga

SEQ ID NO: 109262 - DNA, 80 bp, synthetic construct
  source 1..80: mol_type = other DNA
actcattcgagccactccaggctgagcacgacgaccgggaggtgtcgatccccgcagaaattctgcgcaagaaaagggac

SEQ ID NO: 109263 - DNA, 80 bp, synthetic construct
  source 1..80: mol_type = other DNA
gggagacatatatcacagcgtgtctcgtgcccgaccccgctggttcatgttgtgcctactcctactttctgtaggggtag

SEQ ID NO: 109264 - DNA, 80 bp, synthetic construct
  source 1..80: mol_type = other DNA
tcacccagctactcagctccctcaccataaccagcctgcttaggagactccaccaatggatcacggaagattgccccgtc

SEQ ID NO: 109265 - DNA, 80 bp, synthetic construct
  source 1..80: mol_type = other DNA
aaaggagaagctggccactgaatgaaggggtgatggctgttggacttgtgagcattctggccagttctctccttaggaat

SEQ ID NO: 109266 - DNA, 80 bp, synthetic construct
  source 1..80: mol_type = other DNA
gcggactgtttggaaagggaagcattgacacatgcgcgaagtttgcctgtacaaccaaagcaactggatggatcatccag

SEQ ID NO: 109267 - DNA, 80 bp, synthetic construct
  source 1..80: mol_type = other DNA
tcatacatgggtattttgcacgaaaacagattgggacaaaatgtgctacattcaacgctacgcgacgaagcgcgcagaga

SEQ ID NO: 109268 - DNA, 80 bp, synthetic construct
  source 1..80: mol_type = other DNA
cccgccgggtgcggacggcccctacgtcacctttgatactctgtttatggtatcttcgatcgacgaactggggcgccgcc

SEQ ID NO: 109269 - DNA, 80 bp, synthetic construct
  source 1..80: mol_type = other DNA
cccgcgggttcgcgagccgacatggtggcgatagacgcgggttatcggatgtccgctaccccccaaaaaagaaaaagacc

SEQ ID NO: 109270 - DNA, 80 bp, synthetic construct
  source 1..80: mol_type = other DNA
ttcctttccttctttttttttttttccctctttatggtggctccgtcttagccctagtcacggctagctgtgaaaggtcc

SEQ ID NO: 109271 - DNA, 80 bp, synthetic construct
  source 1..80: mol_type = other DNA
aaagaatgatgaagatcatgctcactggacagaagcaaagatgctgcttgacaatatctacactcctgaagggataattc

SEQ ID NO: 109272 - DNA, 80 bp, synthetic construct
  source 1..80: mol_type = other DNA
acatcgggcccgcgctgttcgtgctaagctcatcgcccaaggaggcagggccgctatctgcggtatttacctctttaatt

SEQ ID NO: 109273 - DNA, 80 bp, synthetic construct
  source 1..80: mol_type = other DNA
gccagatagtgctgcagggcgccgagctgaacgggatcctgcaggcctttgcgccgcttcgcacgagccttttggactcg

SEQ ID NO: 109274 - DNA, 80 bp, synthetic construct
  source 1..80: mol_type = other DNA
tggtgcgcggacaggcggctgacggtcaaatgcccccggtggcgcgcagatgtggcgggcgtggccaccggctgccgtgt

SEQ ID NO: 109275 - DNA, 80 bp, synthetic construct
  source 1..80: mol_type = other DNA
agaaagggacataccagaacgctcatggaattcaggcaatgaatggattaccgacttcgctgggaaaacggtgtggtttg

SEQ ID NO: 109276 - DNA, 80 bp, synthetic construct
  source 1..80: mol_type = other DNA
ataatatgtttatgcgttgttccatgcatttaggcttaaggcgtggcatgtttgtgccttttcaatgtaaccttagtcat

SEQ ID NO: 109277 - DNA, 80 bp, synthetic construct
  source 1..80: mol_type = other DNA
gaataactcatacaaacactcgcggacggcaggttgacggtgtgttggtaacaacagcaaccttaaaacggcaactatta

SEQ ID NO: 109278 - DNA, 80 bp, synthetic construct
  source 1..80: mol_type = other DNA
atgacatcaggatggaggaggagatataccaatgctgtgaccttgagccagaggctcggaaggcaattagcgctctcacg

SEQ ID NO: 109279 - DNA, 80 bp, synthetic construct
  source 1..80: mol_type = other DNA
catgatgctagtaggtcaagtggaggcagccctggagaatctgatagttctcaatgctgcctccgccgctagcttgcagg

SEQ ID NO: 109280 - DNA, 80 bp, synthetic construct
  source 1..80: mol_type = other DNA
gccggccggccggcgcagggctcgggaccccggtcggccgcgtcgacgtgcggtggctcggtgaggtcctcgcggtggcg

SEQ ID NO: 109281 - DNA, 80 bp, synthetic construct
  source 1..80: mol_type = other DNA
aggtccaggacatgaagaaccaatccccatggctacttatggctggaatttggtcaaactccattcaggggttgatgtgt

SEQ ID NO: 109282 - DNA, 80 bp, synthetic construct
  source 1..80: mol_type = other DNA
acttggcgatccacagtgacctgtcctattggattgaaagcaggctcaatgatacgtggaagcttgaaagggcagttctg

SEQ ID NO: 109283 - DNA, 80 bp, synthetic construct
  source 1..80: mol_type = other DNA
gatgaggatcgtcggtcctaggacctgcaggaacatgtggagtgggaccttccccattaatgcctacaccacgggcccct

SEQ ID NO: 109284 - DNA, 80 bp, synthetic construct
  source 1..80: mol_type = other DNA
cttcaagcaaaagcaaccagagaagcccagaaaagagcagcggcgggcatcatgaaaaacccaaccgtcgatggaataac

SEQ ID NO: 109285 - DNA, 80 bp, synthetic construct
  source 1..80: mol_type = other DNA
agacgcacagcgccgttatagcaggggtctccagagtacagggtatctaagtaccgggatatctcatactcatgcctttc

SEQ ID NO: 109286 - DNA, 80 bp, synthetic construct
  source 1..80: mol_type = other DNA
tcgggcctaaaacctgcagcaacacgtggcatggaacattccccatcaacgcctacaccacgggcccctgcacaccctcc

SEQ ID NO: 109287 - DNA, 80 bp, synthetic construct
  source 1..80: mol_type = other DNA
cgctccacagttactctccagttgagctcaatagggtagcaggggctctcaggaaacttgggatccctcctctacgagcc

SEQ ID NO: 109288 - DNA, 80 bp, synthetic construct
  source 1..80: mol_type = other DNA
aattcggcgcgacagtcgataatcaccaacagcccaatgggggtgtgctggataacaacgcctccgcgcggcaggcggtc

SEQ ID NO: 109289 - DNA, 80 bp, synthetic construct
  source 1..80: mol_type = other DNA
ggtgtgtggcgacgacctggtcgtcatctcagagagtcagggaaccgagagagacgaaagcaacctgagagccttcacgg

SEQ ID NO: 109290 - DNA, 80 bp, synthetic construct
  source 1..80: mol_type = other DNA
acaaccgccgccggggacagcttttccaaggcctgtccccgccaccgccgcttttgcgtcgtctccgcggtcgagtctcc

SEQ ID NO: 109291 - DNA, 80 bp, synthetic construct
  source 1..80: mol_type = other DNA
cacgcacctcgaactcgttcccgcaggccagcttggccttgtggagcagcagctcgtcgggatgggtggcggggtgatgg

SEQ ID NO: 109292 - DNA, 80 bp, synthetic construct
  source 1..80: mol_type = other DNA
agagaacttggtcaactctttggtcacagccggacatggacagattgacaacttctcgctaggagtcttgggaatggcat

SEQ ID NO: 109293 - DNA, 80 bp, synthetic construct
  source 1..80: mol_type = other DNA
cggcgaacaggttcttcagcaccaccacgaagctgggatgcaagccagacagagccgtcgccgtgtccggagtcgggtgc

SEQ ID NO: 109294 - DNA, 80 bp, synthetic construct
  source 1..80: mol_type = other DNA
acggggcgggtgacgtagtagtgtggcggaagtgtgatgttgcaagtgtggcggaacacatgtaagcgacggatgtggca

SEQ ID NO: 109295 - DNA, 80 bp, synthetic construct
  source 1..80: mol_type = other DNA
attcccctatcctgcatcaagggagggagacacctgattttctgccactcaaagaaaaagtgtgacgagctcgcggcggc

SEQ ID NO: 109296 - DNA, 80 bp, synthetic construct
  source 1..80: mol_type = other DNA
tagcctgggggtaactaaactggtcgagcgatggatttccgtctctggtgtagctgatgatccgaataactacctgtttt

SEQ ID NO: 109297 - DNA, 80 bp, synthetic construct
  source 1..80: mol_type = other DNA
cgtaggagaggcatgttgggcagcgggcgccgacgcgctttgcgcaggcgtatgaaaggcggatttttgcccgcgctgat

SEQ ID NO: 109298 - DNA, 80 bp, synthetic construct
  source 1..80: mol_type = other DNA
cactaccactaaaccaaccacagttaggacaactagggaaacaaccacacagcctaccacagccagtacaactgttgaga

SEQ ID NO: 109299 - DNA, 80 bp, synthetic construct
  source 1..80: mol_type = other DNA
ctgggcaaaagaaggtatatctattgctagtcccttcctggacgggagcgatccctccaggactatctatgaaagcatac

SEQ ID NO: 109300 - DNA, 80 bp, synthetic construct
  source 1..80: mol_type = other DNA
ctcaaagcgttcaaggaccattttctgcagcttgtggccttttttgctgtatgtttttacatgcttttactcattggcct

SEQ ID NO: 109301 - DNA, 80 bp, synthetic construct
  source 1..80: mol_type = other DNA
actactccaaatgtggccccttctgctgctactgttggcattgcccccgcgggcttttgcctacgatggcgctgaagctg

SEQ ID NO: 109302 - DNA, 80 bp, synthetic construct
  source 1..80: mol_type = other DNA
cggtaactgggatgacatgttccaggggctgctggaggctgagcatccgtttgatttccctgaaccttctcaggcttttg

SEQ ID NO: 109303 - DNA, 80 bp, synthetic construct
  source 1..80: mol_type = other DNA
ccgcctggttgcggcccgcgtttggcctgcggcgcacctattcaccttttgtcgttcgagaaccttcgacgcccgggacc

SEQ ID NO: 109304 - DNA, 80 bp, synthetic construct
  source 1..80: mol_type = other DNA
cccacaagctatcgtggatatgatagctggtgcccactggggtgtcctagcgggcctggcatactactccatggtggtga

SEQ ID NO: 109305 - DNA, 80 bp, synthetic construct
  source 1..80: mol_type = other DNA
tctctcgtgccttacaacgccagcctccgcatcacattatgccaacaaatctggcctgtaccatctcactaacgattgcc

SEQ ID NO: 109306 - DNA, 80 bp, synthetic construct
  source 1..80: mol_type = other DNA
gaattgatcatgaaggacggaaggactttggtggttccctgccggggtcaggatgaactcattgggatggcgcgagtctc

SEQ ID NO: 109307 - DNA, 80 bp, synthetic construct
  source 1..80: mol_type = other DNA
ccagcctgggtaacaccatgacttgctatataaaggccacagcagcgtgtaaagctgctggcctcaaggactatgacatg

SEQ ID NO: 109308 - DNA, 80 bp, synthetic construct
  source 1..80: mol_type = other DNA
caaagctccccccccatcctgggatgttatgtggaagtgcctgatccggctcaaacccacacttgtaggccctacgcccc

SEQ ID NO: 109309 - DNA, 80 bp, synthetic construct
  source 1..80: mol_type = other DNA
ttggactttatgggaatggagtggtgatgaaaagtggggcctatgtgagctccatagctcaaactgaaaaaagagaagat

SEQ ID NO: 109310 - DNA, 80 bp, synthetic construct
  source 1..80: mol_type = other DNA
ctcatgtggtgtacaaaccagccaaagaggatgaaagttctcaggccaacttggttcagcagtccatgcccaacagaccc

SEQ ID NO: 109311 - DNA, 80 bp, synthetic construct
  source 1..80: mol_type = other DNA
ccatgagcacgtatcctaaacctcaaagaaaaactaaacgtaacaccaaccgtcgcccaatggacgttaagttcccgggc

SEQ ID NO: 109312 - DNA, 80 bp, synthetic construct
  source 1..80: mol_type = other DNA
tccatacttcgtgcgggcacacgcgctattgcgtgtgtgtgctctcttccgcaacgttgccggagggagatacgcacagg

SEQ ID NO: 109313 - DNA, 80 bp, synthetic construct
  source 1..80: mol_type = other DNA
agggagctatttagcaggagctgggcttgccttttctattatgaaatcagttggaacaggaaaaagaggaacaggccaag

SEQ ID NO: 109314 - DNA, 80 bp, synthetic construct
  source 1..80: mol_type = other DNA
gcctttagccccacaaagtcagggaggtggcgcaggaccccctggagtttgtgcaagaacttctcccgggcgtcgcgggc

SEQ ID NO: 109315 - DNA, 80 bp, synthetic construct
  source 1..80: mol_type = other DNA
gagtgggctgcaccatattggcagcagtttctgtattaccactcctcttgacttcctcacaacaaaaaacggactggata

SEQ ID NO: 109316 - DNA, 80 bp, synthetic construct
  source 1..80: mol_type = other DNA
gggtggcccagccctcctggtactaggtctttggatccttgcacgtgtggcgctgttgacctctaccttgtcacccggaa

SEQ ID NO: 109317 - DNA, 80 bp, synthetic construct
  source 1..80: mol_type = other DNA
atggtgctttgatggggaaaggaacaaccaggtgttggaggagaacatggacgtggagatctggacaaaggaaggagaaa

SEQ ID NO: 109318 - DNA, 80 bp, synthetic construct
  source 1..80: mol_type = other DNA
tcattttacaataaatgtctgcggccgacacggtcggaatctccgcgtccgtgggtttctctgcgttgcgccggaccacg

SEQ ID NO: 109319 - DNA, 80 bp, synthetic construct
  source 1..80: mol_type = other DNA
tttctgcgttcagcctgagaaggggggtcgtaagccagctcgtctcatcgtgtaccccgacttgagcgtgcgcgtgtgcg

SEQ ID NO: 109320 - DNA, 80 bp, synthetic construct
  source 1..80: mol_type = other DNA
tggaccgcccgcaagggggggtggcatttcagtgtcgggtgacgagcgcgatccggccgtgatcctacgacaccaaaagt

SEQ ID NO: 109321 - DNA, 80 bp, synthetic construct
  source 1..80: mol_type = other DNA
cgcccgaccccgcgttttactcctgtgcctactcctacttacagtaggggtaggcatctttttgctccccgcccgataaa

SEQ ID NO: 109322 - DNA, 80 bp, synthetic construct
  source 1..80: mol_type = other DNA
atgcggctatcggtgccgcgcgagtggtgtctacaccaccagcttcggaaactcactaacgtgctatctcaaagctccag

SEQ ID NO: 109323 - DNA, 80 bp, synthetic construct
  source 1..80: mol_type = other DNA
gtgcgggtctgcgagaaaatggccctttacgacgtaacgcggaagttaccacaggccgtgatgggttcagcatacggatt

SEQ ID NO: 109324 - DNA, 80 bp, synthetic construct
  source 1..80: mol_type = other DNA
ttggccgttactcttactcctcttgttcctgcctcacagggctttggccctggactcaaccgatggcgggaccgtgggtt

SEQ ID NO: 109325 - DNA, 80 bp, synthetic construct
  source 1..80: mol_type = other DNA
agccaggtgatcctgacttgacttcagactcgtggtccactgttagcggtagtgaggacgtagtctgctgctcgatgtcc

SEQ ID NO: 109326 - DNA, 80 bp, synthetic construct
  source 1..80: mol_type = other DNA
tgtgtgtttgaacgttgcattatggccatggtggtagaaggtcaggcgcggattcgccataatgcgggctctgataatgt

SEQ ID NO: 109327 - DNA, 80 bp, synthetic construct
  source 1..80: mol_type = other DNA
accaggaggctggcctcgtggatcatgttgccgactacctctccgggcttggggtggaggacgtgctcctcaaacatcta

SEQ ID NO: 109328 - DNA, 80 bp, synthetic construct
  source 1..80: mol_type = other DNA
ggcaatatgggtgtactggccggacaggcatcccaacttaacgcagtagtggacctgcaagacagaaatacagagctatc

SEQ ID NO: 109329 - DNA, 80 bp, synthetic construct
  source 1..80: mol_type = other DNA
aacctcagctgggagatgaaacttggactgaccttgatggaaaaactgaaaagtatggaggcagggctctcaaacccgat

SEQ ID NO: 109330 - DNA, 80 bp, synthetic construct
  source 1..80: mol_type = other DNA
tcaatggcaggtccttccctgctctttcacacccctccctgccctttccactggcctgatccatctccaccaaaatatcg

SEQ ID NO: 109331 - DNA, 80 bp, synthetic construct
  source 1..80: mol_type = other DNA
agtagttcgcctgtgtgagctgacaaacttagtagtgtttgtgaggattaacaacaattaacacagtgcgagctgtttct

SEQ ID NO: 109332 - DNA, 80 bp, synthetic construct
  source 1..80: mol_type = other DNA
attggttgaacaacaacactcaattttgcataaaagttctcaacccatatatgccctcagttatagaaaaaatggaagca

SEQ ID NO: 109333 - DNA, 80 bp, synthetic construct
  source 1..80: mol_type = other DNA
ggccgcgctgaggtcgacgggaagcgtttgcaagttcactttcagaagaccggtaagagcgtgagccaggtgcaaatggt

SEQ ID NO: 109334 - DNA, 80 bp, synthetic construct
  source 1..80: mol_type = other DNA
acttggcgggcttatccactctgcccggcaacccggcagtggcatcgttgatgtcatttacagcgtcgctgaccagtcct

SEQ ID NO: 109335 - DNA, 80 bp, synthetic construct
  source 1..80: mol_type = other DNA
ttacatggtatgataaaaagggaatgcagttttgtattggaaatacaattaagaacccacaaatcaagcatagctgtgat

SEQ ID NO: 109336 - DNA, 80 bp, synthetic construct
  source 1..80: mol_type = other DNA
atgccatgtcaaaggtccgcaaagacatccaggaatggaaaccctcgacagggtggtatgactggcagcaggtcccaatc

SEQ ID NO: 109337 - DNA, 80 bp, synthetic construct
  source 1..80: mol_type = other DNA
acggatacgcgtacatatgggcgtcccacccgcgttcgagcttctggttgctgtcccggcctataaagcggtaggcacaa

SEQ ID NO: 109338 - DNA, 80 bp, synthetic construct
  source 1..80: mol_type = other DNA
ccccgggccgggaacccggaaaagcctccggtgggcctttttcgcgtcgcgtgccggcgagcgggtccggacggtgcccg

SEQ ID NO: 109339 - DNA, 80 bp, synthetic construct
  source 1..80: mol_type = other DNA
cacggtcatacagccgtccctccgcgtattgcgcgcgttctcatccaccgagccgtgaccgtcccggccaacggcgccac

SEQ ID NO: 109340 - DNA, 80 bp, synthetic construct
  source 1..80: mol_type = other DNA
tcccattacggtcaatccgccgtttgttcccacggagaatccgacgggttgttactcgctcacatttaatgttgatgaaa

SEQ ID NO: 109341 - DNA, 80 bp, synthetic construct
  source 1..80: mol_type = other DNA
acgtgtctcggtgttgggtgccggtgacccccacccttgctgtggaaaatgtttccgtgtcgacgagaggcttccgcgct

SEQ ID NO: 109342 - DNA, 80 bp, synthetic construct
  source 1..80: mol_type = other DNA
atgttacatgcgtctgaccggtcactgcatttacagtaagtagagatttttttttgttttatactgctggatgatgtgtg

SEQ ID NO: 109343 - DNA, 80 bp, synthetic construct
  source 1..80: mol_type = other DNA
gggcacaggatggcttgggatatgatgatgaattggtctccctccgcggcttatcttgcctccgcagtgctgagactgcc

SEQ ID NO: 109344 - DNA, 80 bp, synthetic construct
  source 1..80: mol_type = other DNA
tgttgcggaacacggggttggcacactggaacaccatcacgctggggttgtgaatactagccagggccgttgggtcggtc

SEQ ID NO: 109345 - DNA, 80 bp, synthetic construct
  source 1..80: mol_type = other DNA
gcagcagcaacaatggtcatgacacccttgataaagcatctcatcacgacacagtacgtgaatttttcactaacagccat

SEQ ID NO: 109346 - DNA, 80 bp, synthetic construct
  source 1..80: mol_type = other DNA
tggtaaaacaagctacccttcgttatgaatctttaccaggcaaagaacatcaactgtgctacacgctgcccactcagcga

SEQ ID NO: 109347 - DNA, 80 bp, synthetic construct
  source 1..80: mol_type = other DNA
aaatttgggaagaaacacatgattgcaggggttttcttcacgtttgtgctccttctctcagggcaaataacatggagaga

SEQ ID NO: 109348 - DNA, 80 bp, synthetic construct
  source 1..80: mol_type = other DNA
ttaaaagtggaggtagacattggcgctacgcaggttctttttgtagatgtcaccacctgcattcgaattacgagtactaa

SEQ ID NO: 109349 - DNA, 80 bp, synthetic construct
  source 1..80: mol_type = other DNA
ttggcaggggcttcccttatttacacagtgacaagaaatgccggtctggttaagagacgtggaggtggaacgggagagac

SEQ ID NO: 109350 - DNA, 80 bp, synthetic construct
  source 1..80: mol_type = other DNA
gttaaggaccagcgatcgcagctcggcgtttacggggccgagttgttggacgtccgccagcagcgagaggcgactcccgt

SEQ ID NO: 109351 - DNA, 80 bp, synthetic construct
  source 1..80: mol_type = other DNA
gtatgaggagaatgtcaccaatgacgagaacatgaggccctattgctggcattatccgccccggccgtgtggtgtcgtct

SEQ ID NO: 109352 - DNA, 80 bp, synthetic construct
  source 1..80: mol_type = other DNA
actgattccttccctcgagtatgttttaatggggtgtttgacatgtcaatggaactttttaaagtgataagatatgatga

SEQ ID NO: 109353 - DNA, 80 bp, synthetic construct
  source 1..80: mol_type = other DNA
acattaacagcactgccctcaactgtaatgactcccttcataccggctttatatcagccctcttttactccactacccgg

SEQ ID NO: 109354 - DNA, 80 bp, synthetic construct
  source 1..80: mol_type = other DNA
tacaatcttcagacccagccgccctcgaaccacccgccgtcgtcgcactacccggcgtcgatcgcgtcgcattacaccca

SEQ ID NO: 109355 - DNA, 80 bp, synthetic construct
  source 1..80: mol_type = other DNA
attgacaagttcgagcaggggtggggttccatcacttatactgagcgtggcggtcaggaccagaggccttattgctggca

SEQ ID NO: 109356 - DNA, 80 bp, synthetic construct
  source 1..80: mol_type = other DNA
aacaccccggtgcctagtcgattacccctacaggctgtggcattatccgtgcacagtcaactataccatctacaaagtac

SEQ ID NO: 109357 - DNA, 80 bp, synthetic construct
  source 1..80: mol_type = other DNA
tcacgtactccacctacggcaagttccttgccgacggtgggtgctcagggggtgcttatgacataataatttgcgacgag

SEQ ID NO: 109358 - DNA, 80 bp, synthetic construct
  source 1..80: mol_type = other DNA
tgcatcagttatggcggctgggctcatggcatgcaatcccaacaaaaagcggggatggccggccacagaagttttgacag

SEQ ID NO: 109359 - DNA, 80 bp, synthetic construct
  source 1..80: mol_type = other DNA
ataacaccagaattgaatcacattctatcagaaaatgaggtaaagttgaccattatgacaggagacattaaaggaatcat

SEQ ID NO: 109360 - DNA, 80 bp, synthetic construct
  source 1..80: mol_type = other DNA
atgaggtgctgttgggaccagctgataattacaagacgatggggtggcgcctattgtccccaatctcagcatacgcccag

SEQ ID NO: 109361 - DNA, 80 bp, synthetic construct
  source 1..80: mol_type = other DNA
gcgtggggtttggtggcttgcggctctgctctcggaggtgttcccgcacgtacagctccgcgagcgcgttgctgagaagg

SEQ ID NO: 109362 - DNA, 80 bp, synthetic construct
  source 1..80: mol_type = other DNA
tgtacaagtcaagaacacaagcacttcttatatggtgactaacgattgctccaacagcagcatcgtttggcagatggagg

SEQ ID NO: 109363 - DNA, 80 bp, synthetic construct
  source 1..80: mol_type = other DNA
cggccccagcacaccacgaccagcgccgaactatcagcgcgctctttggcgggtatctgccgaggactacgttgaagtac

SEQ ID NO: 109364 - DNA, 80 bp, synthetic construct
  source 1..80: mol_type = other DNA
tctctcgtgcctcaccgtccctgcctcggcgctcaattatgtcaacaagtctggtctctactatctgactaatgactgcc

SEQ ID NO: 109365 - DNA, 80 bp, synthetic construct
  source 1..80: mol_type = other DNA
ctgtgggcaattgaacgtttgcttaataaacctacaggctcaatgtccggaaccgcgtttatcgcatgcggttcccttcc

SEQ ID NO: 109366 - DNA, 80 bp, synthetic construct
  source 1..80: mol_type = other DNA
tcataattgtcccatgcagagatcaagatgagctggtggggcgggcaagagtgtctcctgggtgtggctggagcgtcagg

SEQ ID NO: 109367 - DNA, 80 bp, synthetic construct
  source 1..80: mol_type = other DNA
ggtacgccgcggtgttaatggtaaacgcaaagcctcccggaaagaccactagcccgcagaggcggcgattgaacccaagg

SEQ ID NO: 109368 - DNA, 80 bp, synthetic construct
  source 1..80: mol_type = other DNA
accccttttttgcagtgacggctctgaccattgcctaccttgtgggaagcaacatgacgcaacgagtcgtgattgcccta

SEQ ID NO: 109369 - DNA, 80 bp, synthetic construct
  source 1..80: mol_type = other DNA
gtcctttccactgccacgcagtcctttttaggtactgcggttaatggcgtgatgtggaccgtctaccacggagcgggcag

SEQ ID NO: 109370 - DNA, 80 bp, synthetic construct
  source 1..80: mol_type = other DNA
tgcacgaaaaagagctcgggctggccgagcgtatcggccaggaggtcctggagaggggtgctgtggcggtcggccagcac

SEQ ID NO: 109371 - DNA, 80 bp, synthetic construct
  source 1..80: mol_type = other DNA
tcctctcatgccttactgtgcccacctctgctcttaattatgccaacaagagcggcatataccatcttaccaatgactgc

SEQ ID NO: 109372 - DNA, 80 bp, synthetic construct
  source 1..80: mol_type = other DNA
ggggccgctcctctgcccatcgggccacgtggttgggctgttccgcgcagctgtttgcacgcgtggcgttgccaaagcac

SEQ ID NO: 109373 - DNA, 80 bp, synthetic construct
  source 1..80: mol_type = other DNA
gtgactcaacttccgggttcccacgttacgtcacttctgcccttacatgtaactcagccataggccgccatcttgcccac

SEQ ID NO: 109374 - DNA, 80 bp, synthetic construct
  source 1..80: mol_type = other DNA
ataggcaatggggcagtagttgaggtggacactagtgatagagttgcttttaggtgtcgtatgcagggcatgggtccgtg

SEQ ID NO: 109375 - DNA, 80 bp, synthetic construct
  source 1..80: mol_type = other DNA
gtttcttggaccatgaaaataggaatagggattctgttgacatggttgggattaaattcaaggagcacatcactttcgat

SEQ ID NO: 109376 - DNA, 80 bp, synthetic construct
  source 1..80: mol_type = other DNA
cgagggcccacatcaaatatgaggctgagaaaggacagcgacgagcgcatgcacgataccgacccccccggctccaggtc

SEQ ID NO: 109377 - DNA, 80 bp, synthetic construct
  source 1..80: mol_type = other DNA
tcctttgccaaacctactaatgtgaaaggcggtcaggcaaaaccaaaaacaacggagcagccaaatcagaaagtcgaata

SEQ ID NO: 109378 - DNA, 80 bp, synthetic construct
  source 1..80: mol_type = other DNA
ctcgaccacggaacttgctatcttgccatgtgcttttaccactatgcctgcactgtcatctggactgatccgcctccacc

SEQ ID NO: 109379 - DNA, 80 bp, synthetic construct
  source 1..80: mol_type = other DNA
aattcctacaaccatcatggccaaaaatgaggtgttctgcgtggaccccatcagagggggcaagaaagcagctcgcctta

SEQ ID NO: 109380 - DNA, 80 bp, synthetic construct
  source 1..80: mol_type = other DNA
gtataccatggagcgggcagcaaaacccttagcggccccaagggaccagtcaatcagatgtacaccaatgttgatcaaga

SEQ ID NO: 109381 - DNA, 80 bp, synthetic construct
  source 1..80: mol_type = other DNA
tcgacccatagtgcaatcacaatggcagaaagcggaggcgttctggcaacagcacatgtggaactttgtgagcgggatcc

SEQ ID NO: 109382 - DNA, 80 bp, synthetic construct
  source 1..80: mol_type = other DNA
attccacacacaagctttctcagcccatgggagtgggaaggaggtcattgacgcaatgtgccatgcaacccttacatata

SEQ ID NO: 109383 - DNA, 80 bp, synthetic construct
  source 1..80: mol_type = other DNA
tgacgtttgcctggttcctgggggacgacccctcaccggcggctaagtcggccgttacggcccaggagtcgtgcgaccac

SEQ ID NO: 109384 - DNA, 80 bp, synthetic construct
  source 1..80: mol_type = other DNA
gacaacttttcaccttccggccccgccaccacaatattgtccaggactgcaactgttccatctatacgggtcgtataact

SEQ ID NO: 109385 - DNA, 80 bp, synthetic construct
  source 1..80: mol_type = other DNA
ccaaactggccatgttacttggctagtagagacatcagattatggttcagcttctccagacaacttcattttcagtggac

SEQ ID NO: 109386 - DNA, 80 bp, synthetic construct
  source 1..80: mol_type = other DNA
tcccagtgcggcgccgtggggacacccgagggagcctactctcccctcggcccatttcatatctgaaagggtcttcgggc

SEQ ID NO: 109387 - DNA, 80 bp, synthetic construct
  source 1..80: mol_type = other DNA
aggcacgcaacaccaacaccgaatgaacccctgttggtgctttattgtctgggtacggaagttttcactcgacgggccgt

SEQ ID NO: 109388 - DNA, 80 bp, synthetic construct
  source 1..80: mol_type = other DNA
gacgcgcgggttattgggtacgatagtaaccagcctcacgggccgcgacaaggatgaggccacgggtgagatacaggtcc

SEQ ID NO: 109389 - DNA, 80 bp, synthetic construct
  source 1..80: mol_type = other DNA
gatgtcatgtgccatgccactctcactcacaggctgatgtctcctcacagggtgccgaactacaatcttttcgtgatgga

SEQ ID NO: 109390 - DNA, 80 bp, synthetic construct
  source 1..80: mol_type = other DNA
cgcaccctctctacggaggaggcttgtgccctgacgcccccccattctgccagatctaaatttggctacggggcaaagga

SEQ ID NO: 109391 - DNA, 80 bp, synthetic construct
  source 1..80: mol_type = other DNA
accccccggtgcttggtggactatccgtataggccgtggcactacccgtgcacggtcaattacactcttcacaagatcag

SEQ ID NO: 109392 - DNA, 80 bp, synthetic construct
  source 1..80: mol_type = other DNA
ctacccctgcactgtcaacttcaccgtgcataaagtcaggatgttcgtgggaggcattgagcaccggttcgacgccgcat

SEQ ID NO: 109393 - DNA, 80 bp, synthetic construct
  source 1..80: mol_type = other DNA
aacgacacaggtacctacatagttgaactcctggtcactgacctgaggaactgctcctggcctgctagtcacaccatcga

SEQ ID NO: 109394 - DNA, 80 bp, synthetic construct
  source 1..80: mol_type = other DNA
agcaggagacgtcgtggtttgcgccactgacgccctcatgactgggtacaccggagactttgattctgtcatagattgca

SEQ ID NO: 109395 - DNA, 80 bp, synthetic construct
  source 1..80: mol_type = other DNA
gcaggagctcggtccccagacgcgggagaaacaggcaccggcgcgccgaaaacccgggcatggcgtactcgccgaccacc

SEQ ID NO: 109396 - DNA, 80 bp, synthetic construct
  source 1..80: mol_type = other DNA
aggtcggtcctcgccctactctccaggtcctataaagaggctgattatccgaggccggggtatccagctcaacgacgaag

SEQ ID NO: 109397 - DNA, 80 bp, synthetic construct
  source 1..80: mol_type = other DNA
cctatatgcttgttactataaaaagtttcaacataaacaggatccactactaaattttaacatttaattttttatacaga

SEQ ID NO: 109398 - DNA, 80 bp, synthetic construct
  source 1..80: mol_type = other DNA
acaggggtgttcgtctataacgacgttgaagcttggagggacaggtacaagtaccatcctgactcccctcgtagattggc

SEQ ID NO: 109399 - DNA, 80 bp, synthetic construct
  source 1..80: mol_type = other DNA
ttgcctttaataaaaaggaagatatgcgcaccttatggacaactccagatccatctccaaattgcaagataattgaggat

SEQ ID NO: 109400 - DNA, 80 bp, synthetic construct
  source 1..80: mol_type = other DNA
accatcttcaagataagaatgtatgtagggggggttgagcacaggctcacggccgcatgcaacttcactcgtgtggatcg

SEQ ID NO: 109401 - DNA, 80 bp, synthetic construct
  source 1..80: mol_type = other DNA
ccctctatcccgcccaccgctgggcgctataaagccgccaccctctcttccctcaggtcatccttggtcgatcccgaacg

SEQ ID NO: 109402 - DNA, 80 bp, synthetic construct
  source 1..80: mol_type = other DNA
aggctgatcgcgttcgcctcccgaggcaatcatgtgtctccgacacactacgtgcccgagaccgacgcgtcggccaaagt

SEQ ID NO: 109403 - DNA, 80 bp, synthetic construct
  source 1..80: mol_type = other DNA
cccggcacatctggatctcccattgtgaacagagagggaaaaatagtgggtttgtatggaaatggagtggtgacaacaag

SEQ ID NO: 109404 - DNA, 80 bp, synthetic construct
  source 1..80: mol_type = other DNA
cacaacggatgaaagcttagccttaataaccgcccctcccattacagtagagtcttcgcgtttgggcttggccaccatag

SEQ ID NO: 109405 - DNA, 80 bp, synthetic construct
  source 1..80: mol_type = other DNA
cggcgtacgcgggcccgcggagaggaaatccctgcaggaagtcggtgtcatcgcgggagttccagaaccacgccccggtc

SEQ ID NO: 109406 - DNA, 80 bp, synthetic construct
  source 1..80: mol_type = other DNA
tttgtgtgaaggtaccacagttgttgtggatgaacactgtggaaatcggggtccatctctcagaaccacaacagtcacag

SEQ ID NO: 109407 - DNA, 80 bp, synthetic construct
  source 1..80: mol_type = other DNA
ctttgcgagttttggaaatggcatcagagtggttgcaccgagggcccagggaattttgcataaaagtcctatgtccatac

SEQ ID NO: 109408 - DNA, 80 bp, synthetic construct
  source 1..80: mol_type = other DNA
cttactgccggttctccaccgcatctggctcagaactcaggaggctagaaggggtggagcagagggaagcaccctcggcg

SEQ ID NO: 109409 - DNA, 80 bp, synthetic construct
  source 1..80: mol_type = other DNA
cgtcctttcgctgctgccgctcagtcatccaactgaagtacatccattctcgaagattctggagaagttcctctgcatct

SEQ ID NO: 109410 - DNA, 80 bp, synthetic construct
  source 1..80: mol_type = other DNA
ctttaaaagctgttttcttacccatgggaaaacatcccggttatactttgtaaaattccaccacaagcacctaaagaagg

SEQ ID NO: 109411 - DNA, 80 bp, synthetic construct
  source 1..80: mol_type = other DNA
gtttgttgtatgtaacctgaccggagtcccggtgaccctacaagccgggtccaaggtcgcccagctgctcgtcgcgggga

SEQ ID NO: 109412 - DNA, 80 bp, synthetic construct
  source 1..80: mol_type = other DNA
acagtggaagaaaaacagcgtccttcacggtttcctcggagaagaccatcttgactatgggagactacggagacgtgtcc

SEQ ID NO: 109413 - DNA, 80 bp, synthetic construct
  source 1..80: mol_type = other DNA
ctggtcgatccacgcaaaaggagaatggatgacgacagaagacatgctcgcagtctggaacagagtgtggattgaggaga

SEQ ID NO: 109414 - DNA, 80 bp, synthetic construct
  source 1..80: mol_type = other DNA
ctcctcctcaatatcttaggaggttgggtggcgtcccagttagcaccgccatcagcatccacggctttcgtcgtgagcgg

SEQ ID NO: 109415 - DNA, 80 bp, synthetic construct
  source 1..80: mol_type = other DNA
aaaaacaatacttgaaaaggcctaccatgccaaagtagttaaggttgccaggccctcaccccaagggggatgtgtaatgg

SEQ ID NO: 109416 - DNA, 80 bp, synthetic construct
  source 1..80: mol_type = other DNA
gaagacgaggacgacgacgccgccgccgatgccgacgaggcggccccggcgtccggggaggccgtcgacgagcctgccgc

SEQ ID NO: 109417 - DNA, 80 bp, synthetic construct
  source 1..80: mol_type = other DNA
cggcgtaggtttcggcggcggcgtggaacgccgcgctccagccgaggcggtggatggcggcgagcgtgtggagcatgagg

SEQ ID NO: 109418 - DNA, 80 bp, synthetic construct
  source 1..80: mol_type = other DNA
ccctgcgccagcgccccggcggcggcctcgaactccccgttgcgggcgacggcgcgcgtgcagcagctgtctccgccccc

SEQ ID NO: 109419 - DNA, 80 bp, synthetic construct
  source 1..80: mol_type = other DNA
tcgcaacctcgcggccggcgtcagcctatccccaaggcccgccggtccgagggcaggtcctgggcacagcccgggtaccc

SEQ ID NO: 109420 - DNA, 80 bp, synthetic construct
  source 1..80: mol_type = other DNA
gtccagtgtgtgtggtcccgtgtattgcttcactcccagccctgtcgtggtcggaaccaccgatcgcttcggggtcccta

SEQ ID NO: 109421 - DNA, 80 bp, synthetic construct
  source 1..80: mol_type = other DNA
tacattaaggccttagcctcctgtagagctgcaaagctccgggattgcacgctcctggtgtgcggtgacgaccttgtggc

SEQ ID NO: 109422 - DNA, 80 bp, synthetic construct
  source 1..80: mol_type = other DNA
cctctttgggcattaaatggttaacaacctcccgataccaaaaacaccttttgttaattaaggcgccatatacggccatt

SEQ ID NO: 109423 - DNA, 80 bp, synthetic construct
  source 1..80: mol_type = other DNA
tgggtgccaggacttcatgtcagagggggtcgagactcggtcatactccttacgtgcttgttacatccatcccttgggtt

SEQ ID NO: 109424 - DNA, 80 bp, synthetic construct
  source 1..80: mol_type = other DNA
atccgtgggccacaagagttctgcattaaagtgttatgtccatacatgcccaaagtcattgagaagctggaagtgttgca

SEQ ID NO: 109425 - DNA, 80 bp, synthetic construct
  source 1..80: mol_type = other DNA
cttgcttccggcctaggccacgcctccgcgccggccgttagccgtgcgtcgtgacgttatttgcatcaccgcttctcgtc

SEQ ID NO: 109426 - DNA, 80 bp, synthetic construct
  source 1..80: mol_type = other DNA
ggagtctgatgcgtcgcagcgggtaacgcagctacttggctcgctcaccatcactagcctactcagaaggctccatacct

SEQ ID NO: 109427 - DNA, 80 bp, synthetic construct
  source 1..80: mol_type = other DNA
catagccgagatgctgaagtcaaaaatccagggcctactgcagcaagcttcaaaacaagctcaggacatacaacccgccg

SEQ ID NO: 109428 - DNA, 80 bp, synthetic construct
  source 1..80: mol_type = other DNA
cacatctcgccagatcacaaccatactcagttccctcaccataaccagcctccttcgcaagctgcatgagtgggtcaaca

SEQ ID NO: 109429 - DNA, 80 bp, synthetic construct
  source 1..80: mol_type = other DNA
catgctgtttgttctggccgggctgctgacgtctggaatggttatctttttcatgtctcccaagggtatcagcagaatgt

SEQ ID NO: 109430 - DNA, 80 bp, synthetic construct
  source 1..80: mol_type = other DNA
gaataaccaaaagaaacactacccgtcgcccacaagacgttaagtttccgggcggcggccagatcgttggcggagtatac

SEQ ID NO: 109431 - DNA, 80 bp, synthetic construct
  source 1..80: mol_type = other DNA
tgtgccggtctccgctctgcaggtcaagaacaccagcagctcttacatggtaaccaatgactgccagaacagtagcatcg

SEQ ID NO: 109432 - DNA, 80 bp, synthetic construct
  source 1..80: mol_type = other DNA
ccgcgctagccagccccgggcaccacgtaatactgggtcttatcgactcggggtaccgcggaaccgttatggccgtggtc

SEQ ID NO: 109433 - DNA, 80 bp, synthetic construct
  source 1..80: mol_type = other DNA
tgtgccaacgggcggcaaactttctccacgtcctaaagggtatctcggtattcaccttcttaccctgacccacaatcttc

SEQ ID NO: 109434 - DNA, 80 bp, synthetic construct
  source 1..80: mol_type = other DNA
ttttatccagcttttgctgtgccagaagtactcgctacttatcacattttttttaaaaatcaaaaaattccagtctcctg

SEQ ID NO: 109435 - DNA, 80 bp, synthetic construct
  source 1..80: mol_type = other DNA
ggagtcatgcaagagggagtcttccacaccatgtggcacgtcacaaaaggagccgcattgaggagcggtgaaggaagact

SEQ ID NO: 109436 - DNA, 80 bp, synthetic construct
  source 1..80: mol_type = other DNA
ggtctttatggaaatggagtggtgacaacaagtggtacctacgtcagtgccatagctcaagctaaagcatcacaagaagg

SEQ ID NO: 109437 - DNA, 80 bp, synthetic construct
  source 1..80: mol_type = other DNA
tgtgattgagcatcctacaacaaaagcgccaaccactgctaatacagccacattaaccacacagcctactactaggaaaa

SEQ ID NO: 109438 - DNA, 80 bp, synthetic construct
  source 1..80: mol_type = other DNA
cgtcctacccaccagcctcggcaacaccctgacatgcttcataaaggctacggctgcgtgtaaggcggccggcctcaaag

SEQ ID NO: 109439 - DNA, 80 bp, synthetic construct
  source 1..80: mol_type = other DNA
gggcaattggtttggatgctcctggatgagcagcgagggctacaccaaagtgtgcggtgcccccgcgtgcaatatcggtg

SEQ ID NO: 109440 - DNA, 80 bp, synthetic construct
  source 1..80: mol_type = other DNA
gtgccagggctaaagcccccccaccgtcgtgggacactatgtggaagtgcctcatccgcctcaaacccactttgcaaggg

SEQ ID NO: 109441 - DNA, 80 bp, synthetic construct
  source 1..80: mol_type = other DNA
caggcgccccctggcttcgggttctatgtaaactccttcatgcgccgctgccctgataacatccaccaccgcagaataag

SEQ ID NO: 109442 - DNA, 80 bp, synthetic construct
  source 1..80: mol_type = other DNA
tcagcagtctctgccgccggggctcggtgcgactgctgcagatgggatcgggatcacaagtctctctgactatgatcccc

SEQ ID NO: 109443 - DNA, 80 bp, synthetic construct
  source 1..80: mol_type = other DNA
tcccggttcgtacgcgtccacctcacccttagaagacaaagagttgattgataacctgttatgtatgcccagcatgacca

SEQ ID NO: 109444 - DNA, 80 bp, synthetic construct
  source 1..80: mol_type = other DNA
tcacgccattctggggaaacgtgaaagaagacagaatcacatatggtggaccatggaagttcgatcggaagtggaacgga

SEQ ID NO: 109445 - DNA, 80 bp, synthetic construct
  source 1..80: mol_type = other DNA
gaacacccctgggctccccgtgtgcccagaccatctagagttctgggaaggggtctttactggactgacacacatcgacg

SEQ ID NO: 109446 - DNA, 80 bp, synthetic construct
  source 1..80: mol_type = other DNA
cggcaacccagaccccagtgggttggttgcgcggtcccgtctcctggctagttctttcccccaccaccaaataatcagac

SEQ ID NO: 109447 - DNA, 80 bp, synthetic construct
  source 1..80: mol_type = other DNA
ccaccgacgacgaggacagtgtcgtgtgctgttcgatgtcgtactcgtggacgggcgccctagtcaccccctgcgctgcc

SEQ ID NO: 109448 - DNA, 80 bp, synthetic construct
  source 1..80: mol_type = other DNA
atggatgtcctgtcgcgggaagaccaacgaggcagcgggcaggtggtcacttatgctctgaacaccttcaccaatcttgc

SEQ ID NO: 109449 - DNA, 80 bp, synthetic construct
  source 1..80: mol_type = other DNA
aacgactccatggtcttagcgcattttcactccatagttactctccaggtgagatcaatagggtggcttcatgcctcagg

SEQ ID NO: 109450 - DNA, 80 bp, synthetic construct
  source 1..80: mol_type = other DNA
tgaaacccgccacccttgacctgccttcgccacccgtgcccgcttcaccaaaggcagctccggttgagcaggcccccccg

SEQ ID NO: 109451 - DNA, 80 bp, synthetic construct
  source 1..80: mol_type = other DNA
gaacagggactggtttcacgacttgaaccttccatggacgagccctgccacaactgattggcgcaacagagaaacactgg

SEQ ID NO: 109452 - DNA, 80 bp, synthetic construct
  source 1..80: mol_type = other DNA
tggtcgtcgccaccgacgccctcatgacggggtacactggagactttgactccgtgatcgactgcaatgtagcggtcacc

SEQ ID NO: 109453 - DNA, 80 bp, synthetic construct
  source 1..80: mol_type = other DNA
cacatcaactccgtgtggaaagaccttctggaagacagtgtaacaccaatagatactaccatcatggcgaagaacgaagt

SEQ ID NO: 109454 - DNA, 80 bp, synthetic construct
  source 1..80: mol_type = other DNA
ggacttgttacatgatatgggtggggatgaacctttggacctgagcttgaaacgccccaggaactaggcgtatatgcgct

SEQ ID NO: 109455 - DNA, 80 bp, synthetic construct
  source 1..80: mol_type = other DNA
tgggaaaaaccagtgctggattagagccatggatgtcgggtacatgtgtgatgataccatcacttatgaatgccccaaac

SEQ ID NO: 109456 - DNA, 80 bp, synthetic construct
  source 1..80: mol_type = other DNA
ccacagttagactgagagcttacttgtccacacccgggttacccgtctgccaagaccatttagacttttgggagagcgtc

SEQ ID NO: 109457 - DNA, 80 bp, synthetic construct
  source 1..80: mol_type = other DNA
agctgaggcggcgcttgagaagctcatcatcttgcactccgctagcgctgctagcgccaatgggccgctatggttcttca

SEQ ID NO: 109458 - DNA, 80 bp, synthetic construct
  source 1..80: mol_type = other DNA
tagcaccaccatcctcctgaacatcatgggaggttggttggcctcacaaatagccccccccgcaggggccactggcttcg

SEQ ID NO: 109459 - DNA, 80 bp, synthetic construct
  source 1..80: mol_type = other DNA
cgaccacgtcgaactcggcgcggttctcgacgcggtccagcgccgcctcgacgccggcggcccagcgctcgctgctgccc

SEQ ID NO: 109460 - DNA, 80 bp, synthetic construct
  source 1..80: mol_type = other DNA
cactgaaaggactcccaataagatatcaaacaaccgcaacaaaatctgaacacacaggaagggagattgttgatctaatg

SEQ ID NO: 109461 - DNA, 80 bp, synthetic construct
  source 1..80: mol_type = other DNA
aaggcaatagacttcgtgccggtagagaatatggagaccacaatgcggtctccatctttctctgacaactcatcgccacc

SEQ ID NO: 109462 - DNA, 80 bp, synthetic construct
  source 1..80: mol_type = other DNA
ggagaccgctcgtcacactcctgtgaattcatggttagggaacatcattatgtatgctcccaccatttgggtacgtatgg

SEQ ID NO: 109463 - DNA, 80 bp, synthetic construct
  source 1..80: mol_type = other DNA
tgtgctgtcttcgtcctctttgcctggtacatcaaggggcgtgttgttcctgcctttacgtatggcctgctacaactatg

SEQ ID NO: 109464 - DNA, 80 bp, synthetic construct
  source 1..80: mol_type = other DNA
ctgtggcaacaccctcacttgctacatcaaggcccaagcagcctgtcgagccgcagggctccgggactgcaccatgctcg

SEQ ID NO: 109465 - DNA, 80 bp, synthetic construct
  source 1..80: mol_type = other DNA
tggggaagaaaaagacacctaggatgtgcaccagagaagaattcacaagaaaggtgagaagcaatgcagccttgggagcc

SEQ ID NO: 109466 - DNA, 80 bp, synthetic construct
  source 1..80: mol_type = other DNA
agacagagttgagatgagcccacttcttttctcgacgacagagctcgcggtcctcccgtgctctttctcgactatgccgg

SEQ ID NO: 109467 - DNA, 80 bp, synthetic construct
  source 1..80: mol_type = other DNA
agacggcggctgctcggggggcgcatacgacatcatcatttgcgatgagtgccattccacggatgcgacaacagtcctgg

SEQ ID NO: 109468 - DNA, 80 bp, synthetic construct
  source 1..80: mol_type = other DNA
cagacatgtggaccttatcgtgggtgctgcagcgttttgttcagccatgtatgttggtgatctttgcggaggtgtcttcc

SEQ ID NO: 109469 - DNA, 80 bp, synthetic construct
  source 1..80: mol_type = other DNA
ggtgttataccccgggcatcatgtttccttgggcgggtatcatcggtctcaaacggcaggtccgcctttgcccccttagc

SEQ ID NO: 109470 - DNA, 80 bp, synthetic construct
  source 1..80: mol_type = other DNA
tccagacgcgggcgacgcacacaccctagcgtgcgttacgtgtgcctgccgtccgaacgcgggtagggtatggtgcgagg

SEQ ID NO: 109471 - DNA, 80 bp, synthetic construct
  source 1..80: mol_type = other DNA
gaactcgcaggcggtctgccattccccacacactactttgacaacgtccaagatctttgtagtagtcgtgcatgagcctt

SEQ ID NO: 109472 - DNA, 80 bp, synthetic construct
  source 1..80: mol_type = other DNA
ttcgtcgcgatctcaaacgtcgcagccggcggggatggccgaaccgccgtcgtggcgctcggcggaacctcgggcccgtc

SEQ ID NO: 109473 - DNA, 80 bp, synthetic construct
  source 1..80: mol_type = other DNA
accactacctgagcacccagtccgccctgagcaaagaccccaacgagaagcgcgatcacatggtcctgctggagttcgtg

SEQ ID NO: 109474 - DNA, 80 bp, synthetic construct
  source 1..80: mol_type = other DNA
aagaaagtgacttttgagcgtgtgcaactgctagaccaacactacaacgatgtagtcaaggagaccaagctccgggcctc

SEQ ID NO: 109475 - DNA, 80 bp, synthetic construct
  source 1..80: mol_type = other DNA
tattaccacaagcaggacaaagtgccgtacgcgaagccgtactaacctggtttgacctacgtatggattcaagatggggt

SEQ ID NO: 109476 - DNA, 80 bp, synthetic construct
  source 1..80: mol_type = other DNA
gacacatgacagagagattccaggaagccattgacaacctcgctgtgctcatgcgggcagagactggaagcaggccttac

SEQ ID NO: 109477 - DNA, 80 bp, synthetic construct
  source 1..80: mol_type = other DNA
aaggacaagggctggaggttgttggctcccatcacagcttattgccaacagacccgtggcctgctcggcacgatcgtcac

SEQ ID NO: 109478 - DNA, 80 bp, synthetic construct
  source 1..80: mol_type = other DNA
agaaagtgccggcgacgcggcccggggcttttcgtctgcggtgtcggtggcgtgctgatcacgtgggtggttatcgtgcg

SEQ ID NO: 109479 - DNA, 80 bp, synthetic construct
  source 1..80: mol_type = other DNA
ggctgggatagagcacaggctcgaagctgcgtgtaattggacccgtggggaacgctgtgagctagaagatcgggacagga

SEQ ID NO: 109480 - DNA, 80 bp, synthetic construct
  source 1..80: mol_type = other DNA
ccatggcatagtgaagagctcgaaatccggtttgaggagtgcccaggaaccaaggttcacgtggaggagacatgcggaac

SEQ ID NO: 109481 - DNA, 80 bp, synthetic construct
  source 1..80: mol_type = other DNA
ttgggtgttataagatctggatgatcgtcgatgtccccgttcgatgcgtgcatatccagtctccacgtctcttcctccat

SEQ ID NO: 109482 - DNA, 80 bp, synthetic construct
  source 1..80: mol_type = other DNA
gagcttctcttctaccactgcgagcctcccgggagcgcggtgctgtacccctttttcctgctcaacaaacagaagacgcc

SEQ ID NO: 109483 - DNA, 80 bp, synthetic construct
  source 1..80: mol_type = other DNA
gtaaagacctgcggggcccccccgtgcaacatctatggggatggagggcacattagagaaaatcagtcccgccttaaatg

SEQ ID NO: 109484 - DNA, 80 bp, synthetic construct
  source 1..80: mol_type = other DNA
cacacattgggagctgtttcgccgttgtgcctatattgcaaaaacactcaagtggaatccgtccaccgaaggctgtgtaa

SEQ ID NO: 109485 - DNA, 80 bp, synthetic construct
  source 1..80: mol_type = other DNA
gccgctgcaccacacctaccgcctgaccgtaaaccagactttttccggacagacctcaataactctgtttaccagaacag

SEQ ID NO: 109486 - DNA, 80 bp, synthetic construct
  source 1..80: mol_type = other DNA
tgataggccaggcagaggcggcccttgagaacttaattgtccttaatgctgcctcagctgccagccttcatggttggtgg

SEQ ID NO: 109487 - DNA, 80 bp, synthetic construct
  source 1..80: mol_type = other DNA
tcaaggctgttgcggccaccagggccgcaggcctaaaggactgcagcatgctggtctgcggagacgacctagtcgtcatt

SEQ ID NO: 109488 - DNA, 80 bp, synthetic construct
  source 1..80: mol_type = other DNA
atcatggtgtggaagatgagcttcccaactactgcttcccgttgaatggcactggcaccaattccacttatcaaggcgta

SEQ ID NO: 109489 - DNA, 80 bp, synthetic construct
  source 1..80: mol_type = other DNA
ctaagacctgcagcaacacatggcatggaacgttccccattaacgcctacaccacgggccctagcgtgccctctccagcg

SEQ ID NO: 109490 - DNA, 80 bp, synthetic construct
  source 1..80: mol_type = other DNA
tcttccaacgtctccgtagcccacgatggaactggacagagatattactacctcacacgtgacccaaccataccacttgc

SEQ ID NO: 109491 - DNA, 80 bp, synthetic construct
  source 1..80: mol_type = other DNA
tacatgaacgggcgtgtgacaccacccgggcttgtggacacatacgtcaatgtgggagcccgctggtcccccgatgttat

SEQ ID NO: 109492 - DNA, 80 bp, synthetic construct
  source 1..80: mol_type = other DNA
gccaatcctctgactatttcacaaaacacattgactgtttccactggtaacggtcttcaagtgtcggggtctcaattagt

SEQ ID NO: 109493 - DNA, 80 bp, synthetic construct
  source 1..80: mol_type = other DNA
tcttgctcgtcgaacgtatccgtagcccatgacaatactggacagagatattactacctcacaagagacccaaccatacc

SEQ ID NO: 109494 - DNA, 80 bp, synthetic construct
  source 1..80: mol_type = other DNA
actgccaggtaatccggctgtggcctccttgatggccttctcggcggccttgactagcccactggcgacctcaacgaccc

SEQ ID NO: 109495 - DNA, 80 bp, synthetic construct
  source 1..80: mol_type = other DNA
gcattactggcggcaagtacatccaagcatgcctgctaagacttggagcctggacgggcacctacatttatgaccacttg

SEQ ID NO: 109496 - DNA, 80 bp, synthetic construct
  source 1..80: mol_type = other DNA
aaggttctcgtggacatcctcgcaggctatggcgcgggcgtggcaggggctctcgtagcattcaaagtcatgagcggcga

SEQ ID NO: 109497 - DNA, 80 bp, synthetic construct
  source 1..80: mol_type = other DNA
ggggccttgggatgcggccttagcaaaaatgttatcggcgtgggaaacatcgtagttttgctccagggtaagctcgtcat

SEQ ID NO: 109498 - DNA, 80 bp, synthetic construct
  source 1..80: mol_type = other DNA
cccacttctttgggatactccaatcccaagagcagttggagaaagcaatggacttcgacatctacggagtcacgtactct

SEQ ID NO: 109499 - DNA, 80 bp, synthetic construct
  source 1..80: mol_type = other DNA
tccacctccacagtcccctcctgtgcctccgcctcggaagaagcggacgatggtcctcaccgaatcaaacctatctactg

SEQ ID NO: 109500 - DNA, 80 bp, synthetic construct
  source 1..80: mol_type = other DNA
cgtcagggaaacatatcttttatttttgatccacatggccatgggactataggacaggctgtagttgttcgggtgaatac

SEQ ID NO: 109501 - DNA, 80 bp, synthetic construct
  source 1..80: mol_type = other DNA
tctggcgccctggcagagctcgccattaagagctttggcggctcagacacctcaggtgtagccagcggcaccgagcctcc

SEQ ID NO: 109502 - DNA, 80 bp, synthetic construct
  source 1..80: mol_type = other DNA
atgcgggttcattgagcgacccgcgggccaatgcgcgaggggccgtgtgttccgccaaaaaagcaattagcataacccgg

SEQ ID NO: 109503 - DNA, 80 bp, synthetic construct
  source 1..80: mol_type = other DNA
ctaggctcctctccacggaggaagcgtgcagccttacccctccccattccgctcgttccaagtttggatacggagcgaaa

SEQ ID NO: 109504 - DNA, 80 bp, synthetic construct
  source 1..80: mol_type = other DNA
ggtatggccaattcgatactgggccaccggttcggtgcttctcacaagcgactcgggtcgtgtggaagtaaatattggtg

SEQ ID NO: 109505 - DNA, 80 bp, synthetic construct
  source 1..80: mol_type = other DNA
tccacgtgctctgacgaccaggaatccatggtctgctgctccatgtcatactcctggacaggggccctaatcaccccctg

SEQ ID NO: 109506 - DNA, 80 bp, synthetic construct
  source 1..80: mol_type = other DNA
cattgtgcgcagtgcggccacgaccgggagccccttcgtcatgttcaaagacgcggtgaaccgccactacatctacgaca

SEQ ID NO: 109507 - DNA, 80 bp, synthetic construct
  source 1..80: mol_type = other DNA
gggcgcgcgaaatcggtaaccggggcgaccgtgtcggcgagggcaggcggccgccaaccctgggtggtcgcggaagcctg

SEQ ID NO: 109508 - DNA, 80 bp, synthetic construct
  source 1..80: mol_type = other DNA
tttcggccaccacccccctcctcccccgtactatacaacaaaaaataccacacatacgaccaaatacggacaatcatttc

SEQ ID NO: 109509 - DNA, 80 bp, synthetic construct
  source 1..80: mol_type = other DNA
gttggtttacggtcggtgtcggcgggaacgacatttatcacagcgtgtcgcgtgcccgaacccgccatttgctgctttgc

SEQ ID NO: 109510 - DNA, 80 bp, synthetic construct
  source 1..80: mol_type = other DNA
gtcctggggataggcaccgtgctcgaccaagccgaaactgccggcgtgcgcctcaccgttttggctaccgcaacaccccc

SEQ ID NO: 109511 - DNA, 80 bp, synthetic construct
  source 1..80: mol_type = other DNA
taccacgccgcccacgatgcccatcaccaccttgccgaccgcgcgccccaggtcgcccatcccctcgaagaacgcgccca

SEQ ID NO: 109512 - DNA, 80 bp, synthetic construct
  source 1..80: mol_type = other DNA
cagggacacggcgctgacgatgcattttatcaattgctgcgtaggcactccgtgcagggatctgagaacgtcgaggtcga

SEQ ID NO: 109513 - DNA, 80 bp, synthetic construct
  source 1..80: mol_type = other DNA
acatcatgggaggatggttggcctcccagattgccccccctgcaggggccactggcttcgtcgtcagtggtctggtggtg

SEQ ID NO: 109514 - DNA, 80 bp, synthetic construct
  source 1..80: mol_type = other DNA
ggtcgtcgattcccattacaatgacacattaaaggagattaaggcaagagcatcaggtgtgaaggcacgagccctctccg

SEQ ID NO: 109515 - DNA, 80 bp, synthetic construct
  source 1..80: mol_type = other DNA
tcttgggtcattaagtgggagtacgtggtacttgcctttctgctgctggcggacgcgcggatatgtgcttgcctttggct

SEQ ID NO: 109516 - DNA, 80 bp, synthetic construct
  source 1..80: mol_type = other DNA
aggacatcgcatggcatgggatatgatgatgaactggtccccagccgccggtctagctctagcacacttgctgcgggtgc

SEQ ID NO: 109517 - DNA, 80 bp, synthetic construct
  source 1..80: mol_type = other DNA
tctggagaacctggttgtgttgaacgcagcgtcccttgcaggagcgcacggcattcttcccttccttgtgtttttctgtg

SEQ ID NO: 109518 - DNA, 80 bp, synthetic construct
  source 1..80: mol_type = other DNA
tttgatcaaatgaaaaatgctcaagtgttgtttcataataaaattttttattgatttcacgctggcagacttttttattt

SEQ ID NO: 109519 - DNA, 80 bp, synthetic construct
  source 1..80: mol_type = other DNA
tgcggagggcggcccgtgcgtccccccggtccccgcgggccgcccgtggcgctcggtgcccccggtatggtattccgccc

SEQ ID NO: 109520 - DNA, 80 bp, synthetic construct
  source 1..80: mol_type = other DNA
accatctcggaggttttgtggactgtttaccacggagctggcaacaagactctagccggcttacggggtccggtcacgca

SEQ ID NO: 109521 - DNA, 80 bp, synthetic construct
  source 1..80: mol_type = other DNA
cccgtctgggcccgacccgactacaacccaccattgttagaatcgtggaaagctccagactacagtccaccaactgtttc

SEQ ID NO: 109522 - DNA, 80 bp, synthetic construct
  source 1..80: mol_type = other DNA
gttctgggccctggctcacaccaaagtgcctggtccactacccttacagactctggcattacccctgcacagtcaatttt

SEQ ID NO: 109523 - DNA, 80 bp, synthetic construct
  source 1..80: mol_type = other DNA
aacaaaaagagggggcgtgttttgggacacgccatccccaaaaccttgctcaaaaggagacaccactacaggagtctacc

SEQ ID NO: 109524 - DNA, 80 bp, synthetic construct
  source 1..80: mol_type = other DNA
ccgtacttcgtcagggcgcaagctttgctgagggtatgcgcgctggtgaaacacctcgcggtgggaaagtatgtccaact

SEQ ID NO: 109525 - DNA, 80 bp, synthetic construct
  source 1..80: mol_type = other DNA
tgtgcctctgccagccgcccgtcccgtggccgtggccactgccaggaaccccagaggccagagaggagccaactggcaaa

SEQ ID NO: 109526 - DNA, 80 bp, synthetic construct
  source 1..80: mol_type = other DNA
caatttgttgtggaggcaagagatgggtagtaacatcacgcgggtggagtccgagtccaaggtggtgatccttgactcat

SEQ ID NO: 109527 - DNA, 80 bp, synthetic construct
  source 1..80: mol_type = other DNA
ggagcgggcacgcggactgtggccggccggggtgggcctgtcctccagatgtacacgtcagtcagtgacgatctggtgtg

SEQ ID NO: 109528 - DNA, 80 bp, synthetic construct
  source 1..80: mol_type = other DNA
cgatcgcacgctgttcgcgcacgtcgcgctgtgcgcgatcgggcggcgccttggcactatcgtcacctacgacaccggtc

SEQ ID NO: 109529 - DNA, 80 bp, synthetic construct
  source 1..80: mol_type = other DNA
atacacttgtacgccaccacaaccttgtgtactctaccacttctcgcagtgcgtctcagaggcagaagaaggtcaccttt

SEQ ID NO: 109530 - DNA, 80 bp, synthetic construct
  source 1..80: mol_type = other DNA
tcctactaccatcatggcaaagaatgaggtattttgcgtggagccgtccaaaggcggccgtaaacctgcacgcttgatcg

SEQ ID NO: 109531 - DNA, 80 bp, synthetic construct
  source 1..80: mol_type = other DNA
cgggtacggtgcaggcatttcggaggccctcgtagcttttaaaatcatgggcggcgagaacccctcggtagaagatgttg

SEQ ID NO: 109532 - DNA, 80 bp, synthetic construct
  source 1..80: mol_type = other DNA
tcccccaacatgtccagatcgaaatcgtctagcgcgtcggcatgcgccatcgccacgtcctcgccgtctaagtggagctc

SEQ ID NO: 109533 - DNA, 80 bp, synthetic construct
  source 1..80: mol_type = other DNA
gcggagatgccgcgcaagtggcgtcttcaccaccagtttcgtaaacacactgacgtgctatcttaaggccacagccgcca

SEQ ID NO: 109534 - DNA, 80 bp, synthetic construct
  source 1..80: mol_type = other DNA
agatttcaagaactggctctcttccaagctactcccgaggatgcctggcatacccttcatctcatgccagaagggctaca

SEQ ID NO: 109535 - DNA, 80 bp, synthetic construct
  source 1..80: mol_type = other DNA
gaggaaaaactacctatcagtccactcagcaactctttgctgagacaccataatcttgtctattcaacgtcatctcgtag

SEQ ID NO: 109536 - DNA, 80 bp, synthetic construct
  source 1..80: mol_type = other DNA
ctgacatgctggttttctttaaccaagtcttgcaagagacgctcaccgcccagggaaagtagctcttccaagctgcggaa

SEQ ID NO: 109537 - DNA, 80 bp, synthetic construct
  source 1..80: mol_type = other DNA
gccgataaggcgtttggcacctcacaggactgtggtgactcaggccattccaccggagcagacacgggggtggatagtgc

SEQ ID NO: 109538 - DNA, 80 bp, synthetic construct
  source 1..80: mol_type = other DNA
ccatttggcagggcccacgagctcttccgcatttgtggtgagcggcttggccggcgctgccataggtggcataggcctgg

SEQ ID NO: 109539 - DNA, 80 bp, synthetic construct
  source 1..80: mol_type = other DNA
gccgctatttaactccaccaaggcccgatccgcggcggagcaccgccttttttcgcccgaggcgtgggcctctgaccagg

SEQ ID NO: 109540 - DNA, 80 bp, synthetic construct
  source 1..80: mol_type = other DNA
cctatacggcaatggagttgagcttggcgatggctcatacgtcagcgccatcgtgcagggtgaccgtcaggaggaaccag

SEQ ID NO: 109541 - DNA, 80 bp, synthetic construct
  source 1..80: mol_type = other DNA
tattgcttcaccccaagccctgtcgtggtggggacgactgatccttccggcacccccacgtacagttttggtgcgaataa

SEQ ID NO: 109542 - DNA, 80 bp, synthetic construct
  source 1..80: mol_type = other DNA
gccgcctgtgccgcggaggccttagtcgccacccgctgggttcggtgggcccggggggcggtggtaggtgtgcgtccgtc

SEQ ID NO: 109543 - DNA, 80 bp, synthetic construct
  source 1..80: mol_type = other DNA
tcatacccaagcgtttgctggtctttttgacataggcccccaacagaaactgcagctggtcaacaccaatggctcgtggc

SEQ ID NO: 109544 - DNA, 80 bp, synthetic construct
  source 1..80: mol_type = other DNA
agagaagaattcacaagaaaggtgagaagcaatgcagccttaggtgccatattcactgatgagaacaagtggaagtcggc

SEQ ID NO: 109545 - DNA, 80 bp, synthetic construct
  source 1..80: mol_type = other DNA
gccgatgtacttgccgaggtccatgtcgtacgcggggaacacgatctggcgctgctgcagcgagaacccgagcgtggtga

SEQ ID NO: 109546 - DNA, 80 bp, synthetic construct
  source 1..80: mol_type = other DNA
acgcctggcttgcctgtgtgccaagaccatcttgagttctggcaacaaatcttcaccggactcacgcacatagacgccca

SEQ ID NO: 109547 - DNA, 80 bp, synthetic construct
  source 1..80: mol_type = other DNA
tcttccttgggccggccgatgatatgaagagcatgggctggagactacttgctcccattaccgcgtactgccaacagact

SEQ ID NO: 109548 - DNA, 80 bp, synthetic construct
  source 1..80: mol_type = other DNA
ctaggtactccgccccccccggggacccgccccagccagaatacgacttggagctgataacatcatgctcctccaatgtg

SEQ ID NO: 109549 - DNA, 80 bp, synthetic construct
  source 1..80: mol_type = other DNA
gaggagaggtaggacagggaggtggaaacacggggagtataggtatgtctcgcagggagaacggccgtcaggtatctttg

SEQ ID NO: 109550 - DNA, 80 bp, synthetic construct
  source 1..80: mol_type = other DNA
ccttgagggggagccaggagacccggacgcagacgacgcgtcgtggtccaccgtgagtgaccgctccgacagtgtcattt

SEQ ID NO: 109551 - DNA, 80 bp, synthetic construct
  source 1..80: mol_type = other DNA
tgttctcttgtcttaccacacctgcatctgcagcgcattatgccaacaagtctggcctctaccatctgactaacgattgc

SEQ ID NO: 109552 - DNA, 80 bp, synthetic construct
  source 1..80: mol_type = other DNA
gttgctcgctgtcctcggccccttctggctgctacaatacagcttgtctagggtgccgtacttcgtgcgcgcccaaggcc

SEQ ID NO: 109553 - DNA, 80 bp, synthetic construct
  source 1..80: mol_type = other DNA
cacctttgccccctatccgactgggctagtgacggcctccgcgatctcgccgtggccgtagagccagtcatcttctcccc

SEQ ID NO: 109554 - DNA, 80 bp, synthetic construct
  source 1..80: mol_type = other DNA
gggatctttttgctccctgctcggtaggcagggggcctaaagctacgctccattagcttttcattttttttgcctttttt

SEQ ID NO: 109555 - DNA, 80 bp, synthetic construct
  source 1..80: mol_type = other DNA
tcggtcaggagcaagcgtagctatgacgaggtgtacggcgacgacgacatcctggaccaggcggcggagcgggcgtgcga

SEQ ID NO: 109556 - DNA, 80 bp, synthetic construct
  source 1..80: mol_type = other DNA
cactggcggaattaatattacaaaccagggtctgttacttggaactgatgaaaaagccgaaaatggcaaaaaagacattt

SEQ ID NO: 109557 - DNA, 80 bp, synthetic construct
  source 1..80: mol_type = other DNA
gcgccgcaagctgtcacggatttctctggtttgccgtgttcttcgtggcggcgtggtacatcaagggccgagcggttcca

SEQ ID NO: 109558 - DNA, 80 bp, synthetic construct
  source 1..80: mol_type = other DNA
aggaagacttccgagcgatcccagccgcgtgggagacgccagcccatcccgaaagatcggcgctccaccggcaagtcctg

SEQ ID NO: 109559 - DNA, 80 bp, synthetic construct
  source 1..80: mol_type = other DNA
tctcgtgccaagcgggatataggggagtctgggcaggggacggggtgtgccacaccacttgtacctgtggtgccgtgata

SEQ ID NO: 109560 - DNA, 80 bp, synthetic construct
  source 1..80: mol_type = other DNA
atcacaagcgatattttctatttgggcatcactacgtatattatgaggattatcgttacgtccgtgaaatcgcagtccat

SEQ ID NO: 109561 - DNA, 80 bp, synthetic construct
  source 1..80: mol_type = other DNA
tacggagggaagaaacagtatccgttattcagaattatccccattgtatgataccactcgggtgtatctggtggataaca

SEQ ID NO: 109562 - DNA, 80 bp, synthetic construct
  source 1..80: mol_type = other DNA
gcagcagcagcaaaataaatgatttaataaacacagattttgattcaaacagcaaagcatctttattatttattttttcg

SEQ ID NO: 109563 - DNA, 80 bp, synthetic construct
  source 1..80: mol_type = other DNA
gaacggctctacgtaggcggccccatggtgaactccaagggacagtcatgtggctaccgtagatgccgagccagtggggt

SEQ ID NO: 109564 - DNA, 80 bp, synthetic construct
  source 1..80: mol_type = other DNA
tacaggcgttgccgcgctagtggggtgctgactactagcatgggaaacaccatcacatgctacgtgaaagccctggcggc

SEQ ID NO: 109565 - DNA, 80 bp, synthetic construct
  source 1..80: mol_type = other DNA
gccggtcagggtaaagtcatcaaccagctgggccagggcctcgacgtgcgccaccaggtcccggtacacggccatgcact

SEQ ID NO: 109566 - DNA, 80 bp, synthetic construct
  source 1..80: mol_type = other DNA
tcctggcgcgaggtcattgacaccatgcacctgtggcgcaagcgacctctacctggtaacccggaatgccgacatcatcc

SEQ ID NO: 109567 - DNA, 80 bp, synthetic construct
  source 1..80: mol_type = other DNA
cagcagggcggcggccgggccggccaccccggcctgggtgtgcgtccgggccccgttctcgatgagaaaggcgaggacgc

SEQ ID NO: 109568 - DNA, 80 bp, synthetic construct
  source 1..80: mol_type = other DNA
gtctgcgcaagggccaaggccccccccccctcgtgggacacaatgtggaaatgtcttatccgccttaagccagtacttac

SEQ ID NO: 109569 - DNA, 80 bp, synthetic construct
  source 1..80: mol_type = other DNA
agggtagagaacttaaatgtggaagtggcatttttgtcactaatgaagtccacacttggacagagcaatacaaattccag

SEQ ID NO: 109570 - DNA, 80 bp, synthetic construct
  source 1..80: mol_type = other DNA
ggacgtagacctacacccagcttcagcctggaccctctatgcagtagccacaacagttatcactcccatgatgagacata

SEQ ID NO: 109571 - DNA, 80 bp, synthetic construct
  source 1..80: mol_type = other DNA
gcggattcaggatgtgtaattaattggaaaggtagagaactcaaatgtggaagtggcatttttgtcaccaatgaagttca

SEQ ID NO: 109572 - DNA, 80 bp, synthetic construct
  source 1..80: mol_type = other DNA
ggcaaaaaacaaatcaaacaaaagttaatgacaggagaaaaacagcgcaaaaaagaccatcaaagctaaagccggcaact

SEQ ID NO: 109573 - DNA, 80 bp, synthetic construct
  source 1..80: mol_type = other DNA
gcccacccacgtgtgggtttttaacgcgttaaacgtcattggggtaaagggtgtaaataaattacgaaaacgtgcatgcg

SEQ ID NO: 109574 - DNA, 80 bp, synthetic construct
  source 1..80: mol_type = other DNA
gtgttagggcaatcgaagacgggatcaactatgcaaccggaaaccttcctggttgctccttttctatcttccttctggca

SEQ ID NO: 109575 - DNA, 80 bp, synthetic construct
  source 1..80: mol_type = other DNA
tgtttgactcgtctgtcctctgcgagtgctatgacgcgggctgcgcttggtatgagctcacgcccgccgagaccacagtt

SEQ ID NO: 109576 - DNA, 80 bp, synthetic construct
  source 1..80: mol_type = other DNA
gcgttgtctgttgctccatgtcctactcatggacgggggccctcgtcacaccttgcgctgcagaggaagagaaattgcca

SEQ ID NO: 109577 - DNA, 80 bp, synthetic construct
  source 1..80: mol_type = other DNA
cacctctcggcaggtcatggccatactcagttcccttactgtgaccagcctcctacggaagttgcatgagtggatcaact

SEQ ID NO: 109578 - DNA, 80 bp, synthetic construct
  source 1..80: mol_type = other DNA
ccgttaagtgggagtacatagtgctggccttcttattacttgctgatgcccgtatttgtacttgcctatggatcatgctc

SEQ ID NO: 109579 - DNA, 80 bp, synthetic construct
  source 1..80: mol_type = other DNA
tttgaccaggggtggggtcccatcacttacaatgggtctcgcggcggagatcaaaggccctattgctggcactacgcgcc

SEQ ID NO: 109580 - DNA, 80 bp, synthetic construct
  source 1..80: mol_type = other DNA
ttgtggaggcaggaaatggggggaaacataacaagggttgagtctgagaacaaggttgtcgtcctcgactcctttgagcc

SEQ ID NO: 109581 - DNA, 80 bp, synthetic construct
  source 1..80: mol_type = other DNA
gcgacgcggccgtgcgccacttccgccagcgcgccaccgtgtttctcgtcccccggcgccacggcaagacctggtttcta

SEQ ID NO: 109582 - DNA, 80 bp, synthetic construct
  source 1..80: mol_type = other DNA
ggcgcagagagcctcgttaagagccaggaggctgggatcgaaggccacatacgcgcgctcgaacgcccccgccttccagc

SEQ ID NO: 109583 - DNA, 80 bp, synthetic construct
  source 1..80: mol_type = other DNA
cttctgctctattccaacatcaaccacaaggcacagagcgccgaaaattgtggctggtggggaactagaccacaggatct

SEQ ID NO: 109584 - DNA, 80 bp, synthetic construct
  source 1..80: mol_type = other DNA
acctggcaggcctaacaacactgccgggtaatcctgctgtcgcctccatgatggcttttactgcatcagtgaccagccct

SEQ ID NO: 109585 - DNA, 80 bp, synthetic construct
  source 1..80: mol_type = other DNA
acgcaacggagaaccacacatgatcgtcagcagacaagagaaagggaaaagtctcctgttcaaaacagaggatggtgtga

SEQ ID NO: 109586 - DNA, 80 bp, synthetic construct
  source 1..80: mol_type = other DNA
tcaacatcatggttgagggatgtttgggattgggtctgtacggtactcgcggatttcaaggcttggcttaaagccaagat

SEQ ID NO: 109587 - DNA, 80 bp, synthetic construct
  source 1..80: mol_type = other DNA
ataagcgcggactaaaaacagggatgtactactgcaaggttcgcaaggcgaccaacagcggggtctttggcggcgacgac

SEQ ID NO: 109588 - DNA, 80 bp, synthetic construct
  source 1..80: mol_type = other DNA
aggtacttgactcctactatgaccaagtcttgaaggacattaagctagctgcctccaaggtcagcgcaaggcttctctcc

SEQ ID NO: 109589 - DNA, 80 bp, synthetic construct
  source 1..80: mol_type = other DNA
ccggccataggatggcatgggacatgatgatgaattggtcgcccaccgtcaccttggtaatctctagtgttctgaggatt

SEQ ID NO: 109590 - DNA, 80 bp, synthetic construct
  source 1..80: mol_type = other DNA
ctagtagtcatctcagaaagccaggggactgaggaggacgagcggaacctgagagccttcacggaggccatgaccaggta

SEQ ID NO: 109591 - DNA, 80 bp, synthetic construct
  source 1..80: mol_type = other DNA
gactcggccgtggccatcgccacacacgtgcataccgagatgcaccgcatcctggcctcggcgtgggccaacggcccggg

SEQ ID NO: 109592 - DNA, 80 bp, synthetic construct
  source 1..80: mol_type = other DNA
ccctggtgagggggctgtgcagtggatgaacaggctgattgctttcgcctcgcgcggaaaccacgtttcccccacgcact

SEQ ID NO: 109593 - DNA, 80 bp, synthetic construct
  source 1..80: mol_type = other DNA
taggtgtatcgtttgcaaagttggctgctcgtaacgcctccgcggaaacaaccgaatcctcaaaattagacaattcgtca

SEQ ID NO: 109594 - DNA, 80 bp, synthetic construct
  source 1..80: mol_type = other DNA
tgaggtgtccaagctcctactggctttagtcggccccttctgggtccttcaggccagtctcttcaaggtgccgtactttg

SEQ ID NO: 109595 - DNA, 80 bp, synthetic construct
  source 1..80: mol_type = other DNA
atcgttacgctccgccatgcaagcctctccttagggatgaggtcagcttctctgtaggtttgaactcctttgtagtgggg

SEQ ID NO: 109596 - DNA, 80 bp, synthetic construct
  source 1..80: mol_type = other DNA
tacgcatgtacgtggagggagttgagcacaggctggaagcggcatgcaacttcacccgtggggatcgctgcaacttggaa

SEQ ID NO: 109597 - DNA, 80 bp, synthetic construct
  source 1..80: mol_type = other DNA
gttatgctgattttggtgtctcttgccgcattggtggtaaacccgtctgtgaagacagtgcgggaagccggaattctgat

SEQ ID NO: 109598 - DNA, 80 bp, synthetic construct
  source 1..80: mol_type = other DNA
ctggaccaggcagagacagcaggagtgcgtcttaccgtgctcgcgactgcgactcccccaggttcggtaactgtccctca

SEQ ID NO: 109599 - DNA, 80 bp, synthetic construct
  source 1..80: mol_type = other DNA
gcgctcgtagtcccgctgggctcgcagccccgacacagtgttggtggtgtcctgcagggcgcgaagctgctcgcatgccg

SEQ ID NO: 109600 - DNA, 80 bp, synthetic construct
  source 1..80: mol_type = other DNA
aggcaaacttagatcggatgggaactgatgtcaaggaggcgttggcaaaaagagagcgctttcatcgcgacggtaatctt

SEQ ID NO: 109601 - DNA, 80 bp, synthetic construct
  source 1..80: mol_type = other DNA
ccaccgggctgatccatctccatcagaacgttgtggacgtacagtacctctacggagtctcctcggccattgtgtcgtgg

SEQ ID NO: 109602 - DNA, 80 bp, synthetic construct
  source 1..80: mol_type = other DNA
tggtgcaaccgccggctcgcgccggtgcaggccgaccatctctctcttccccccctccccctcccccgagccctcaaaga

SEQ ID NO: 109603 - DNA, 80 bp, synthetic construct
  source 1..80: mol_type = other DNA
ctgtatatctttttaaataaaccaggtaataccaaagaagacccattggtgtatgttctttttttattgggaggcgcggg

SEQ ID NO: 109604 - DNA, 80 bp, synthetic construct
  source 1..80: mol_type = other DNA
aggtactctgctcccccgggtgatcccccggttcctgcttatgacctagagctcgtaacatcctgctcctcaaatgtgtc

SEQ ID NO: 109605 - DNA, 80 bp, synthetic construct
  source 1..80: mol_type = other DNA
ctattacatttgagtatacttgcactaaggattatgctaatcagcaatttgatgtgagttcctttaccttctcctatatt

SEQ ID NO: 109606 - DNA, 80 bp, synthetic construct
  source 1..80: mol_type = other DNA
ttgatgcaagggtgtactcagaccatcaggcgctgaaatcattcaaggacttcgcctcagggaagcgctctcaaataggt

SEQ ID NO: 109607 - DNA, 80 bp, synthetic construct
  source 1..80: mol_type = other DNA
tggttatgttatcgtatgggggtgatacggacttactattaagctctgcatgtacccgcacatctaccgtaaacaggtcg

SEQ ID NO: 109608 - DNA, 80 bp, synthetic construct
  source 1..80: mol_type = other DNA
cagaacgacatggtctattcacgctcaccatcagtggatgactacagaagacatgcttactgtctggaacagggtgtgga

SEQ ID NO: 109609 - DNA, 80 bp, synthetic construct
  source 1..80: mol_type = other DNA
agcgcgcagctggggccccgactcccagacggcggtggtgccggcgaggagcagcaggaccagatccgcgtacgcccacg

SEQ ID NO: 109610 - DNA, 80 bp, synthetic construct
  source 1..80: mol_type = other DNA
ggtgtagccgtccccctccggttggacacgcagagcctgctggccacgtacgcaattacgtctacgctgttgctggcggc

SEQ ID NO: 109611 - DNA, 80 bp, synthetic construct
  source 1..80: mol_type = other DNA
caagctaaggcaacgagagaagctcaaaagaggacagcggccggaatcatgaaaaatccaacagtggatggaataacagt

SEQ ID NO: 109612 - DNA, 80 bp, synthetic construct
  source 1..80: mol_type = other DNA
ggagcctcaacaacacaagaaacttggaacagacaagatttgctggtgacatttaagacagctcatgcaaagaagcagga

SEQ ID NO: 109613 - DNA, 80 bp, synthetic construct
  source 1..80: mol_type = other DNA
gccagtgtctgcagtggaagtcaggaacaccagtactagctactacgccactaatgattgctcgaacaacagcattacct

SEQ ID NO: 109614 - DNA, 80 bp, synthetic construct
  source 1..80: mol_type = other DNA
acgcgggacgcgcgcccgccggaagcgaccgtggtcgcggacgcggcggcggcgcccgagcccggcgcgctcggccggcg

SEQ ID NO: 109615 - DNA, 80 bp, synthetic construct
  source 1..80: mol_type = other DNA
tggcgttagggttctagaagacggcgtgaactacgcaacagggaatcttcctggttgctctttctctatcttcctcctgg

SEQ ID NO: 109616 - DNA, 80 bp, synthetic construct
  source 1..80: mol_type = other DNA
catcgtttgatgtttcccacaaccatgaattatctatagctaaaggggaaaatgtgggtttaaaaacatcacctattaaa

SEQ ID NO: 109617 - DNA, 80 bp, synthetic construct
  source 1..80: mol_type = other DNA
gaagccggctgttgtgcccgacagggagacgctctaccaggagttcgacgagatggaggagtgtgcggcacacctgccct

SEQ ID NO: 109618 - DNA, 80 bp, synthetic construct
  source 1..80: mol_type = other DNA
attgatcacagggaacatgtccttcaaagacctaggaagagtggtggttatggtaggcgccaccatggcggatgacatag

SEQ ID NO: 109619 - DNA, 80 bp, synthetic construct
  source 1..80: mol_type = other DNA
ccctgccgtggcgactttaatgtcgttcacagcggcggtgacttcccctctcaccacacaacaaaccctcctatttaaca

SEQ ID NO: 109620 - DNA, 80 bp, synthetic construct
  source 1..80: mol_type = other DNA
gagggatgggctcatcctgctggcagctttcttccacccgggcttagtatttgacatcaccaagttgctgctcggacctt

SEQ ID NO: 109621 - DNA, 80 bp, synthetic construct
  source 1..80: mol_type = other DNA
ggcctcgcggctggtggcggcgaaccgcccgtctcccgcgttgcacgcgggacagcaacccccgatgcctaggtagtagc

SEQ ID NO: 109622 - DNA, 80 bp, synthetic construct
  source 1..80: mol_type = other DNA
cacggaactgttcgagacggagctgctggtgccgcagggcgtggatggtggggcggtctcgggggggagcccgcaccgcg

SEQ ID NO: 109623 - DNA, 80 bp, synthetic construct
  source 1..80: mol_type = other DNA
gagtcccgccggccgcagaggagcgcgaccgccggcgctccttgccgtgatagggcccgggccgggagccgcggcgatgg

SEQ ID NO: 109624 - DNA, 80 bp, synthetic construct
  source 1..80: mol_type = other DNA
ccggatcgatctttgacatcttcgccggtggtcattggggcgtgctgggggcactgctatacttctgcatggtagccaac

SEQ ID NO: 109625 - DNA, 80 bp, synthetic construct
  source 1..80: mol_type = other DNA
tttctgcccgcgctcatccccataatcgccgcggccatcggcacgatcccgggcatagcttccgttgcgctgcaggcgtc

SEQ ID NO: 109626 - DNA, 80 bp, synthetic construct
  source 1..80: mol_type = other DNA
cacccccatcggcgacggccccgtgctgctgcccgacaaccactacctgagcacccagtccgccctgagcaaagacccca

SEQ ID NO: 109627 - DNA, 80 bp, synthetic construct
  source 1..80: mol_type = other DNA
gcgcaggttgccgggcgtaaagcagatggcgaccttgtccaggctaaggccctgggagcgcgtgatggtcatggcaagct

SEQ ID NO: 109628 - DNA, 80 bp, synthetic construct
  source 1..80: mol_type = other DNA
ctgaatcccactcccacgatcacggcatcttcctggggcatctcttcgtcggggtttaccttggtcacatgtttggtctt

SEQ ID NO: 109629 - DNA, 80 bp, synthetic construct
  source 1..80: mol_type = other DNA
aacgagcggaggaggaagagacggctgtgtcgaattatgtgaatattgctgagggtgctagtcagctggtgttggactgt

SEQ ID NO: 109630 - DNA, 80 bp, synthetic construct
  source 1..80: mol_type = other DNA
caaggtggtctggcgtggtgatggtatctactacaccacctgcccctgtggggggcagatcacaggtcacgtgaagaatg

SEQ ID NO: 109631 - DNA, 80 bp, synthetic construct
  source 1..80: mol_type = other DNA
tcgtcattgctgaaagcagtggcgtggaagaggatgctcgagccctccgagccttcacggaggctatgacgaggtactca

SEQ ID NO: 109632 - DNA, 80 bp, synthetic construct
  source 1..80: mol_type = other DNA
atccttgcaattttttgattattactacgttcgatttgtttatcgcagacaccacccgcattatcaaaacccccaaattg

SEQ ID NO: 109633 - DNA, 80 bp, synthetic construct
  source 1..80: mol_type = other DNA
ctggccacaggatggcctgggacatgatgatgaactggagccctactaccactctgctcctcgcccagatcatgaggatc

SEQ ID NO: 109634 - DNA, 80 bp, synthetic construct
  source 1..80: mol_type = other DNA
ctctttgatggtgctcccggtctcgttcccgaggtcaacaccgagactttggcacttgagccgggggctggggcttctat

SEQ ID NO: 109635 - DNA, 80 bp, synthetic construct
  source 1..80: mol_type = other DNA
attctacagaggtgtcgacgtgtccgtcatccccacctcgggcgatgtcgtcgtctgcgcaacagacgcccttatgaccg

SEQ ID NO: 109636 - DNA, 80 bp, synthetic construct
  source 1..80: mol_type = other DNA
gccttgctatcgcaaggctctgtggagggtgagtgccgaggagtatgttgaggtcgcgcaggtgcatgacactcactaca

SEQ ID NO: 109637 - DNA, 80 bp, synthetic construct
  source 1..80: mol_type = other DNA
tagcggtactcactctatcgccgtactacaagcagtacatggcccgcggcatctggtggctgcagtacatgctgactaga

SEQ ID NO: 109638 - DNA, 80 bp, synthetic construct
  source 1..80: mol_type = other DNA
ctgacaatggaactaactggtctcagaataatacagacgtctcaagcaacaacgaaatttccattggcaatgtgtttgcc

SEQ ID NO: 109639 - DNA, 80 bp, synthetic construct
  source 1..80: mol_type = other DNA
atcttgaagatcgtgaccgcagtgagcaacaaccactgctccattcaacgactgactcgctaatattgccatgctcattt

SEQ ID NO: 109640 - DNA, 80 bp, synthetic construct
  source 1..80: mol_type = other DNA
cacaggccacaggatggcctgggatatgatgatgaattggagccccactgcaacgctggtcatcgctcagatcatgagga

SEQ ID NO: 109641 - DNA, 80 bp, synthetic construct
  source 1..80: mol_type = other DNA
tctggtggaaccagtacttcttggcccgagccgaggccatcatacatgaatgggtgcctgatctgcgggtcaggtgcggc

SEQ ID NO: 109642 - DNA, 80 bp, synthetic construct
  source 1..80: mol_type = other DNA
acggggctggtaacaagaccttggctagccccagaggaccagtcacccagatgtacaccagcgcagaggtggacctcgtg

SEQ ID NO: 109643 - DNA, 80 bp, synthetic construct
  source 1..80: mol_type = other DNA
aaaggtctcaatccaacagccatctttctaacaactctttcgagaaccagcaagaaaaggagctggccgctaaatgaagc

SEQ ID NO: 109644 - DNA, 80 bp, synthetic construct
  source 1..80: mol_type = other DNA
attcgaattttgtcatgcaaaggtgtagaaatagcggtttttaccatagtatctcctgataatagattttcccggcagct

SEQ ID NO: 109645 - DNA, 80 bp, synthetic construct
  source 1..80: mol_type = other DNA
cccctggagtacatcaaggggggcaggcacttgatattttgtcattcaaagaagaaatgcgatgagctagcttcacagct

SEQ ID NO: 109646 - DNA, 80 bp, synthetic construct
  source 1..80: mol_type = other DNA
cctcaacctcccctggagcagtgccggaagcactgtgtggaggaacagagagacgttgatggagtttgaggaaccacacg

SEQ ID NO: 109647 - DNA, 80 bp, synthetic construct
  source 1..80: mol_type = other DNA
gaagcgattagcctccaaggttaaggccagactactgcccctagaggaagcctgtgggttaacaccaccccactccgccc

SEQ ID NO: 109648 - DNA, 80 bp, synthetic construct
  source 1..80: mol_type = other DNA
gtactgcggctggcccaccttgatgtgcgtcgcgttgtacctgcgggcgaagatgcggtccatggcgtcgcgggcgtcct

SEQ ID NO: 109649 - DNA, 80 bp, synthetic construct
  source 1..80: mol_type = other DNA
atctgtcactagactggagcaccaaatgtgggaagccgtaagggacgaattgaacgtcctgctcaaagagaatgcagtgg

SEQ ID NO: 109650 - DNA, 80 bp, synthetic construct
  source 1..80: mol_type = other DNA
gcaaagtctgggatggaacatcatcaccttcaaggacaaaactgatatccaccgcctagaaccagtgaaatgtgacaccc

SEQ ID NO: 109651 - DNA, 80 bp, synthetic construct
  source 1..80: mol_type = other DNA
ccttgaaagccacgtgtacaacggctggcaaacaccccgatgcggagctgattgaagcgaacctgctgtggaggcaggaa

SEQ ID NO: 109652 - DNA, 80 bp, synthetic construct
  source 1..80: mol_type = other DNA
atacagggacgagaacgtagccagaatcttaaggctcatatgaccatgcagactatgctcatactgctatcactcctatc

SEQ ID NO: 109653 - DNA, 80 bp, synthetic construct
  source 1..80: mol_type = other DNA
ttaccacctcgcagttcaccgggttcttcacacgcgggcctagccagaacatccagctcgttcacaccaacgggagctgg

SEQ ID NO: 109654 - DNA, 80 bp, synthetic construct
  source 1..80: mol_type = other DNA
tccggcgagtaagcgttggcaccgcactgtgcacacgtggtttcgcactccactaaccaggttagttcgggattttttgg

SEQ ID NO: 109655 - DNA, 80 bp, synthetic construct
  source 1..80: mol_type = other DNA
caaagcttctcccgaagctgcccggcatcccatttatctcttgtcagaaggggtacaaggtggtgtgggcaggcacggtg

SEQ ID NO: 109656 - DNA, 80 bp, synthetic construct
  source 1..80: mol_type = other DNA
gtactactagccatcgcctactttggtatggctggcaactggctaaaagtcctggccgttctgttcttatttgcaggggt

SEQ ID NO: 109657 - DNA, 80 bp, synthetic construct
  source 1..80: mol_type = other DNA
ttaccgtgacgtcctttttattaacatgcgtttttattgatgttacatttatgtcttttcattccggacggatgtagctt

SEQ ID NO: 109658 - DNA, 80 bp, synthetic construct
  source 1..80: mol_type = other DNA
atatagatgcccatttcctatcccagaccaagcaggcaggagataacttcccctatctggtagcataccaggctacagtg

SEQ ID NO: 109659 - DNA, 80 bp, synthetic construct
  source 1..80: mol_type = other DNA
ggaatttacgaagaaactccaacagatatcaaagaatggccaatgtttataggcatggagggcactttgccaaggctaaa

SEQ ID NO: 109660 - DNA, 80 bp, synthetic construct
  source 1..80: mol_type = other DNA
cttgtaggcctctttagccctggagccaaacagaacatccagctaatcaactcaaatggtagttggcacatcaaccgcac

SEQ ID NO: 109661 - DNA, 80 bp, synthetic construct
  source 1..80: mol_type = other DNA
gggcaaaagtcgctgcggtcttgattttgttcgctggcgttgacgcaacaacagatctggttggcggttcggcgtccaac

SEQ ID NO: 109662 - DNA, 80 bp, synthetic construct
  source 1..80: mol_type = other DNA
aacccgctcggagccagcctccgacggggaaagtcggaccgtccccgccgcggccaggcttgttgaaagccagccgtaga

SEQ ID NO: 109663 - DNA, 80 bp, synthetic construct
  source 1..80: mol_type = other DNA
ttctgtgcgtccatgggcataggcgcggggagactgtttccggcgtcgcggacctccaggtccctgggagactccggtcc

SEQ ID NO: 109664 - DNA, 80 bp, synthetic construct
  source 1..80: mol_type = other DNA
ttcagcttgatgggtcgaacgtatctgcagcgcttcgagcacttgcggagaaatccttcccgtcatctggactacaggag

SEQ ID NO: 109665 - DNA, 80 bp, synthetic construct
  source 1..80: mol_type = other DNA
atcatcttagttggagctgctttctctgaagcgaactcaggaggagacgtgatacacctagcactcatggcaacgttcag

SEQ ID NO: 109666 - DNA, 80 bp, synthetic construct
  source 1..80: mol_type = other DNA
aaagctgaaagtgaccgcaaacaagtcgcgaccagcaacaggcccaatgccaaagggttttgtgctgtcgcgcatgctgg

SEQ ID NO: 109667 - DNA, 80 bp, synthetic construct
  source 1..80: mol_type = other DNA
attttggttctgtcggtggactgttcacatcactgggaaaggctgtacaccaagtttttggaagtgtgtatacaaccatg

SEQ ID NO: 109668 - DNA, 80 bp, synthetic construct
  source 1..80: mol_type = other DNA
gtgaaatttgtgatgctattgctttatttgtaaccattataagctgcaataaacaagttaacaacaacaattgcattcat

SEQ ID NO: 109669 - DNA, 80 bp, synthetic construct
  source 1..80: mol_type = other DNA
tcacgtggatctgatggtaggcgccgccaccatctgctccgccctttacatcggagacgtgtgtgggggtgcgttcttgg

SEQ ID NO: 109670 - DNA, 80 bp, synthetic construct
  source 1..80: mol_type = other DNA
tgctgcatgcggcgatatcatcaacggcctcccagtctcagccgggccgagcaagatctcattgcctaacctagctgata

SEQ ID NO: 109671 - DNA, 80 bp, synthetic construct
  source 1..80: mol_type = other DNA
cgggactacctggagatcgaggtggggggccgacggctgttcttcgtgaaggcccacgtacgcgagagcctgctgagcat

SEQ ID NO: 109672 - DNA, 80 bp, synthetic construct
  source 1..80: mol_type = other DNA
tttccaggtgttagtattgaaggactccttctgcttatgcgtattcgcgcggttgtgttattatccgccgatacgtctat

SEQ ID NO: 109673 - DNA, 80 bp, synthetic construct
  source 1..80: mol_type = other DNA
caagtgtttgcggccccgtctactgcttcactccaagccccgtggtcgtgggaaccactgaccgcaagggtgttccaact

SEQ ID NO: 109674 - DNA, 80 bp, synthetic construct
  source 1..80: mol_type = other DNA
cctggccgttcaactgataagatgcatggaggctgaaggggtggtagatgaggatgacattacgagagtgagacttggac

SEQ ID NO: 109675 - DNA, 80 bp, synthetic construct
  source 1..80: mol_type = other DNA
cctcagcagtctcaccgtcacacagctcctgaaacggctccaccagtggatcagcgcagattgctccaccccatgtgccg

SEQ ID NO: 109676 - DNA, 80 bp, synthetic construct
  source 1..80: mol_type = other DNA
ggaactatgaaaataaaagatgaagagagggatgacacactcactatactccttaaagcaactttgctggcagtctcagg

SEQ ID NO: 109677 - DNA, 80 bp, synthetic construct
  source 1..80: mol_type = other DNA
tgtggatgaactccaccgggttcgtcaaaacctgcggcgctcctccatgcactgttaccaccagcaatgggtcttggcat

SEQ ID NO: 109678 - DNA, 80 bp, synthetic construct
  source 1..80: mol_type = other DNA
gcgtttatcaaccgcacctccagggccctggtcgacctgctgttttacgacgataccgtctccggagcggccgccgcgtt

SEQ ID NO: 109679 - DNA, 80 bp, synthetic construct
  source 1..80: mol_type = other DNA
cgatagaaggcactcttccgtgtcactgtccggagcaacgggtgctgcagcggctcccgaggccgcaagtcctttcccta

SEQ ID NO: 109680 - DNA, 80 bp, synthetic construct
  source 1..80: mol_type = other DNA
ttagcaaaaatgttctttggatcagaaacatcatagttgtggtctaacgttaaatcatcgtacgagagcttaacaaattt

SEQ ID NO: 109681 - DNA, 80 bp, synthetic construct
  source 1..80: mol_type = other DNA
gggcctgcccacgcccgtggttctggaattcgacagcgaattcgagatgctgttggccttcatgacccttgtgaaacagt

SEQ ID NO: 109682 - DNA, 80 bp, synthetic construct
  source 1..80: mol_type = other DNA
tgacatcaccaaaatacttctggcactcattggccccctgtacttactgcaagctagtctcctgcgcgtgccgtactatg

SEQ ID NO: 109683 - DNA, 80 bp, synthetic construct
  source 1..80: mol_type = other DNA
acagcgtcgtgtgctgctccatgtcctattcatggactggggcgcttgtcactccatgcgctgctgaagaagagaagctg

SEQ ID NO: 109684 - DNA, 80 bp, synthetic construct
  source 1..80: mol_type = other DNA
aaaccaacattgcatggccctaccccccttctgtacaggttgggaccaatccaaaatgatgtctgcacctctcaccccgt

SEQ ID NO: 109685 - DNA, 80 bp, synthetic construct
  source 1..80: mol_type = other DNA
ggaaattcctagccgatggtggatgtagtggtggtgcttatgatgtcatcatttgtgatgagtgccacgcgcaagacgct

SEQ ID NO: 109686 - DNA, 80 bp, synthetic construct
  source 1..80: mol_type = other DNA
gcagtgcgcaagacttccgagcggtcacaacctcgcagtaggcgtcaacccatccccagggcgcgccgaaccgagggccg

SEQ ID NO: 109687 - DNA, 80 bp, synthetic construct
  source 1..80: mol_type = other DNA
cgaaggccggctcggccgcctcgcgtctcgtgcggctcatcatcaacatgaagggcatgcgccacgtgggcgacatcaac

SEQ ID NO: 109688 - DNA, 80 bp, synthetic construct
  source 1..80: mol_type = other DNA
tgcatgcgcgttagttcggaggatcgcgggcggccactatgtgcagatggtgctcataaagatcggagcgtgtgcaggga

SEQ ID NO: 109689 - DNA, 80 bp, synthetic construct
  source 1..80: mol_type = other DNA
agctgaaaataaaaaacaggtctctgcgatccctcacccgcagctgcctgtatcacaaaagcgaagatcagcttcggcgc

SEQ ID NO: 109690 - DNA, 80 bp, synthetic construct
  source 1..80: mol_type = other DNA
tttcactagaccccaccttcacgattgagactactacagtaccccaggactcagtctcacgaagtcagcggagggtgcgg

SEQ ID NO: 109691 - DNA, 80 bp, synthetic construct
  source 1..80: mol_type = other DNA
agacgctgatgaagcgcgaactgacgagctttgtggtgctggttccccagggaacccccgacgttcagttgcgcctgacg

SEQ ID NO: 109692 - DNA, 80 bp, synthetic construct
  source 1..80: mol_type = other DNA
tttctcactccatggttactctcccggcgaactcaatagagtggcatcaagcctcaggaaacttggggccccacctttga

SEQ ID NO: 109693 - DNA, 80 bp, synthetic construct
  source 1..80: mol_type = other DNA
caactggcgatgcgcgctgatacccgtcccgtccagggcctcccccgtgagcagggcgatggcctcggtggccaggctga

SEQ ID NO: 109694 - DNA, 80 bp, synthetic construct
  source 1..80: mol_type = other DNA
gcttggctctactagtaatcataaccctctttacactcaccccagcctataagaccttcctcagtcggggcttgtggtgg

SEQ ID NO: 109695 - DNA, 80 bp, synthetic construct
  source 1..80: mol_type = other DNA
ctacgtggtaggggccacagcggacaacctaaagtgcccctgccaggtgccagcgccagaattcttcaccatggtggatg

SEQ ID NO: 109696 - DNA, 80 bp, synthetic construct
  source 1..80: mol_type = other DNA
agccatctttgacatggtggcaggagcccattggggcgtcctggcgggactggcctactattctatggtaggcaactggg

SEQ ID NO: 109697 - DNA, 80 bp, synthetic construct
  source 1..80: mol_type = other DNA
accaagcggagacggctggagcgcgactcgttgtgctcgccaccgccacaccaccgggatcagttaccgtgccgcaccca

SEQ ID NO: 109698 - DNA, 80 bp, synthetic construct
  source 1..80: mol_type = other DNA
gccaggcaaccccgctgtagcttccctcatggcctttaccgcctccgtaaccagccccctcacaaccaaccaaactatgt

SEQ ID NO: 109699 - DNA, 80 bp, synthetic construct
  source 1..80: mol_type = other DNA
aggaagtcgtgcaatatggtacatgtggctgggagcacgctttctagagttcgaagctcttggtttcatgaacgaagatc

SEQ ID NO: 109700 - DNA, 80 bp, synthetic construct
  source 1..80: mol_type = other DNA
aatgcatattcaaatgttcacactctaaaagtccaggagtcctttccattgtggcaataggtacagaatcctcagaggga

SEQ ID NO: 109701 - DNA, 80 bp, synthetic construct
  source 1..80: mol_type = other DNA
cacccctcttgtacaggttgggcgcggtccagaatgaggttgtaacaactcaccccataaccaagtacatttcagcctgc

SEQ ID NO: 109702 - DNA, 80 bp, synthetic construct
  source 1..80: mol_type = other DNA
cgcaggggctgcgtggtacgatctcacaccagcggagaccaccgtcaggcttagagcgtatttcaacacgcccggcctac

SEQ ID NO: 109703 - DNA, 80 bp, synthetic construct
  source 1..80: mol_type = other DNA
aaaagtttttatttgtttggtggtgttggttaatatgaacaagagttaacgactttttgttattttaggtccaatttcag

SEQ ID NO: 109704 - DNA, 80 bp, synthetic construct
  source 1..80: mol_type = other DNA
ttttgggtaccatagtagtgagtctgaccggtcgagacaagacggatcaagctggggaggtccaggtcttgtcatcggtc

SEQ ID NO: 109705 - DNA, 80 bp, synthetic construct
  source 1..80: mol_type = other DNA
gcaaataggcctggtccttctagtggtcatatcagtctttacacttagcccggcatataagatccttctctgccgcagct

SEQ ID NO: 109706 - DNA, 80 bp, synthetic construct
  source 1..80: mol_type = other DNA
gaggatcgagaccgcagtgaacaaaatccgctgctccactccacaacagagctcgccatactcccgtgctcatttacgcc

SEQ ID NO: 109707 - DNA, 80 bp, synthetic construct
  source 1..80: mol_type = other DNA
ctgaaaagaccgacagcctaacatcgccggttttacaaagtaccgaaagacacagtgttctgcttggattacaccataat

SEQ ID NO: 109708 - DNA, 80 bp, synthetic construct
  source 1..80: mol_type = other DNA
acaacatgatggggaagagagagaaaaaattaggagagtttggaaaggcaaaaggaagtcgtgcaatatggtacatgtgg

SEQ ID NO: 109709 - DNA, 80 bp, synthetic construct
  source 1..80: mol_type = other DNA
tgccgcgacaggtcgcgcagggccgggtggaaattgggcgcgttcgccacgtggtcggccccggcgaacagcgcgttgac

SEQ ID NO: 109710 - DNA, 80 bp, synthetic construct
  source 1..80: mol_type = other DNA
gataccacaccatttggccagcagcgagtgttcaaagagaaggttgacacaaaagctcctgagcctccccaaggagtgaa

SEQ ID NO: 109711 - DNA, 80 bp, synthetic construct
  source 1..80: mol_type = other DNA
gctcacgcgccgcatttgcgcccggggccccgcgctccccccgggcggcctggccgtcggaggccagatgtacgtgaacc

SEQ ID NO: 109712 - DNA, 80 bp, synthetic construct
  source 1..80: mol_type = other DNA
ccagatgaggccggactggtatacaacgctcttttagaacgcgtggctcgctacaacagtagcaatgtgcaaaccaattt

SEQ ID NO: 109713 - DNA, 80 bp, synthetic construct
  source 1..80: mol_type = other DNA
tgccgggggtctacacatacgaggccttccatcccgacgtggtgctgctgccgggctgcggtgtggacttcaccgagagc

SEQ ID NO: 109714 - DNA, 80 bp, synthetic construct
  source 1..80: mol_type = other DNA
atgggattatttgtgtagatgggcaagttttttgccgctaacattttaatccacgttaacagttcatccgcagactccaa

SEQ ID NO: 109715 - DNA, 80 bp, synthetic construct
  source 1..80: mol_type = other DNA
tgggagtggcttatttctgtatgcaagccaattgggccaaagtcatcttagtcctattcctctttgcaggggttgacgcc

SEQ ID NO: 109716 - DNA, 80 bp, synthetic construct
  source 1..80: mol_type = other DNA
ggacccactcctctcctatatagattgggcgctgtccaaaatgaggtggtaacaacccatcccattaccaagtacatcat

SEQ ID NO: 109717 - DNA, 80 bp, synthetic construct
  source 1..80: mol_type = other DNA
ggacctcgaggtggtaaccagcacatgggtcttggtaggcggcatcttggcggctcttgctgcatactgcttgtcagtcg

SEQ ID NO: 109718 - DNA, 80 bp, synthetic construct
  source 1..80: mol_type = other DNA
cacagaatggccttggaggaactgccagatgctctccagacaattgccctgattgccttattgagtgtgatgaccatggg

SEQ ID NO: 109719 - DNA, 80 bp, synthetic construct
  source 1..80: mol_type = other DNA
ggctgtgacacaggtggtggatttcagcttagaccctaccttctctatagagactaccactgtcccccaagatgctgtct

SEQ ID NO: 109720 - DNA, 80 bp, synthetic construct
  source 1..80: mol_type = other DNA
tatggaacgaaaggagtcttgcacaccatgtggcatgtaacaagaggagccgccctcagtgtggaaggggccatatcagg

SEQ ID NO: 109721 - DNA, 80 bp, synthetic construct
  source 1..80: mol_type = other DNA
tgctggccttatggaaatgtcttgggggtcgtggtagacggagtcttagtgagcccctcactgtagtggtggttatgtta

SEQ ID NO: 109722 - DNA, 80 bp, synthetic construct
  source 1..80: mol_type = other DNA
agcaactctttgttgcgtcaccataacctggtgtattccaccacttctcgcagcgcaagccagaggcaaaagaaggtcac

SEQ ID NO: 109723 - DNA, 80 bp, synthetic construct
  source 1..80: mol_type = other DNA
gttccgtgcacctgcggctccgcagacatgtacttggttaccagacatgctgacgtcattccagtcaggcggcgtgggga

SEQ ID NO: 109724 - DNA, 80 bp, synthetic construct
  source 1..80: mol_type = other DNA
acagtactttttagccagggccgaggctatgatcaatgtctacgttccgcccctgcaggtcaggtgcggccgagactcca

SEQ ID NO: 109725 - DNA, 80 bp, synthetic construct
  source 1..80: mol_type = other DNA
ctgtactttttatggatgttggaagggtttggtgggtagaccaaaaagtaaactgtctgtaaaaaagtgtttgtttgaaa

SEQ ID NO: 109726 - DNA, 80 bp, synthetic construct
  source 1..80: mol_type = other DNA
tccatcgcaggggttctgtggactgtctatcacggagctggcaacaagactctagctggctcacgaggtccggtcacgca

SEQ ID NO: 109727 - DNA, 80 bp, synthetic construct
  source 1..80: mol_type = other DNA
cccacgctcgaccccgctacttactcctgtgcctactcctactatccgtaggggtaggcatctttttgctgcctgctcgc

SEQ ID NO: 109728 - DNA, 80 bp, synthetic construct
  source 1..80: mol_type = other DNA
gggtgcccccaggagatagcggaatgtctggggtcggaggccctgaggcgtcagaaagtgccggcgacgcggcccggtgc

SEQ ID NO: 109729 - DNA, 80 bp, synthetic construct
  source 1..80: mol_type = other DNA
tagtcagctgtcagcgccatccctatatgccacctgcaccgcccatggtgcaacccctgacgttgatatgatggatacct

SEQ ID NO: 109730 - DNA, 80 bp, synthetic construct
  source 1..80: mol_type = other DNA
accacgcgccaggtggcctggatctcccccgggccggccgggggaacgtccccccccggcagctccacgtcggccacacc

SEQ ID NO: 109731 - DNA, 80 bp, synthetic construct
  source 1..80: mol_type = other DNA
agccttctggcgttacagcttcagatgactggacagcggccatggatcgtattatggctttaacggcgcgcagtcctgat

SEQ ID NO: 109732 - DNA, 80 bp, synthetic construct
  source 1..80: mol_type = other DNA
ggatcttgaccaataattacaacgcgaatgctctggggtccgcaaaatcgcgtccatgcaaaaatatcgcctgtagatgg

SEQ ID NO: 109733 - DNA, 80 bp, synthetic construct
  source 1..80: mol_type = other DNA
catcaacaccaacggtagctggcacatcaacaggaccgaactgaattgcaatgattcgctgcaaaccggcttcatcgccg

SEQ ID NO: 109734 - DNA, 80 bp, synthetic construct
  source 1..80: mol_type = other DNA
gcctacgcccaacagacacgcgggttgctaggtacaatagtcaccagccttaccggccgtgacaagaatgaggcggctgg

SEQ ID NO: 109735 - DNA, 80 bp, synthetic construct
  source 1..80: mol_type = other DNA
gccccaactggcagtgggaaaagtaccaaagtcccagcagcgtacgccgctcagggctacaaagtcctggtactaaatcc

SEQ ID NO: 109736 - DNA, 80 bp, synthetic construct
  source 1..80: mol_type = other DNA
acgagggctgcgggtgtgcaggttggctcctgtccccccgcggctcccggccacactggggccccaacgacccccggcgt

SEQ ID NO: 109737 - DNA, 80 bp, synthetic construct
  source 1..80: mol_type = other DNA
cctgattgattacccgtaccggctgtggcatttcccgtgcaccgccaacttctccgtctttaacatcaggacatttgtcg

SEQ ID NO: 109738 - DNA, 80 bp, synthetic construct
  source 1..80: mol_type = other DNA
aatggagtgctggaaagccagatgctcatcccaaaagcatatgcaggccctgtttcacagcacaactaccgccagggcta

SEQ ID NO: 109739 - DNA, 80 bp, synthetic construct
  source 1..80: mol_type = other DNA
gatccaagtcgtctccacagccactcagtccttcctcgccactgccatcaatggcgttctttggacggtataccatggcg

SEQ ID NO: 109740 - DNA, 80 bp, synthetic construct
  source 1..80: mol_type = other DNA
atatcaggggccgtgatatgccgggtcacgatagatcgcgccaggttttcgtcgcggatgtcctggtagataggcaggcg

SEQ ID NO: 109741 - DNA, 80 bp, synthetic construct
  source 1..80: mol_type = other DNA
tgggcatcggcactgtccttgaccaagcagagactgcgggggcgagactggttgtgctcgccactgctacccctccgggc

SEQ ID NO: 109742 - DNA, 80 bp, synthetic construct
  source 1..80: mol_type = other DNA
ggtaagcacttactctatgtcttttacatggtcctgggaaagtggaaaatacaccactgaaacttttgctaccaactctt

SEQ ID NO: 109743 - DNA, 80 bp, synthetic construct
  source 1..80: mol_type = other DNA
gaacaaggaagatcatgaaggtggtgaatagatggttgtttcggcatctgtccagggagaagaaccccaggttgtgcacc

SEQ ID NO: 109744 - DNA, 80 bp, synthetic construct
  source 1..80: mol_type = other DNA
ctaacccccaggtgtttggtggactatccctacaggctatggcactatccatgcacagtcaattacaccatccacaccgt

SEQ ID NO: 109745 - DNA, 80 bp, synthetic construct
  source 1..80: mol_type = other DNA
tcgaagcgctgctcttcgccagaagaaggttaccttcgacaggctgcaggtgctcgatgaccattataaaagtgtactta

SEQ ID NO: 109746 - DNA, 80 bp, synthetic construct
  source 1..80: mol_type = other DNA
agcactaccaccctgggcgcggcctgattacaatccgccgctcctagagacctggaaaagaccagactatcaaccaccag

SEQ ID NO: 109747 - DNA, 80 bp, synthetic construct
  source 1..80: mol_type = other DNA
ttccacatactttgacattcgcggcgtgctggaccggggccccacttttaagccctactccggcactgcctacaacgctc

SEQ ID NO: 109748 - DNA, 80 bp, synthetic construct
  source 1..80: mol_type = other DNA
cagtctgcgggcccgtctactgctttacgccatcaccggtagtggtgggcaccactgatgttaaaggcttaccaacttac

SEQ ID NO: 109749 - DNA, 80 bp, synthetic construct
  source 1..80: mol_type = other DNA
aacggatccatgagaatcgtgggccctcgcacctgcagtaatgtatggcatggcacttttcccatcaacgcgacaacgac

SEQ ID NO: 109750 - DNA, 80 bp, synthetic construct
  source 1..80: mol_type = other DNA
tgacagcgcccccaaccgaacgggcccgcacgtgatctgggcgcagggcgccggcccgggcgccagcccgcggctgtact

SEQ ID NO: 109751 - DNA, 80 bp, synthetic construct
  source 1..80: mol_type = other DNA
cacatcaatagcacggccttgaactgtaatgcgagcctcgacactggttggctagcggggctcttttactactacaaatt

SEQ ID NO: 109752 - DNA, 80 bp, synthetic construct
  source 1..80: mol_type = other DNA
cacaccttgagaacagggactttgtaacaggagtacagggaaccactagggtatccctggttctggagcttggaggatgt

SEQ ID NO: 109753 - DNA, 80 bp, synthetic construct
  source 1..80: mol_type = other DNA
ggagcaggatggaacgtgagagacacggcctgcttagccaaggcatacgcccaaatgtggctcctcctctatttccaccg

SEQ ID NO: 109754 - DNA, 80 bp, synthetic construct
  source 1..80: mol_type = other DNA
atggacctgaaacagctgaatgtcctaattcaaagagggcatggaacagctttgaaattgaagactttggatttggcata

SEQ ID NO: 109755 - DNA, 80 bp, synthetic construct
  source 1..80: mol_type = other DNA
agggcctgggctcagcccgggtacccttggcccctctatggcaatgagggcctggtgtgggcaggatggctcctgtcacc

SEQ ID NO: 109756 - DNA, 80 bp, synthetic construct
  source 1..80: mol_type = other DNA
ccttattacacctactctggctctataccctacctagatgggaccttttacctcaaccacacctttaagaaggtggccat

SEQ ID NO: 109757 - DNA, 80 bp, synthetic construct
  source 1..80: mol_type = other DNA
tcttcgtagtcgtcctcgcccgcgatctgttgggccagaatttcggtccacgagatgcgcgtctcgaggccgaccggggc

SEQ ID NO: 109758 - DNA, 80 bp, synthetic construct
  source 1..80: mol_type = other DNA
actagagcacatagaagtggaccctagcatacagccagatgtcaaaatacgtcctataaaaaaagttgctcccggtttgg

SEQ ID NO: 109759 - DNA, 80 bp, synthetic construct
  source 1..80: mol_type = other DNA
tagaggaactgacccgaaaaaagctgtaccgcgaaactaccgaaatgttatatgctctacacgtacctcttatggtctta

SEQ ID NO: 109760 - DNA, 80 bp, synthetic construct
  source 1..80: mol_type = other DNA
tgatggtggtgggggaaggattcgaaccttcgaagtcgatgacggcagatttagagtctgctccctgcttgtgtgttgga

SEQ ID NO: 109761 - DNA, 80 bp, synthetic construct
  source 1..80: mol_type = other DNA
gtggaacagggctgagcagttctgggcaaaacacatgtggaactttgtcagtgggatccaatacttggccggtctttcaa

SEQ ID NO: 109762 - DNA, 80 bp, synthetic construct
  source 1..80: mol_type = other DNA
ttggtgcacaaaatcagcagtctacgtcaggtatggaagatgcaccaagacacgccactcaagacgtagccggaggtcac

SEQ ID NO: 109763 - DNA, 80 bp, synthetic construct
  source 1..80: mol_type = other DNA
acaactttgtattcggctaaacttgaactttgtaacaccagcactccttctaaccttactttgttacctccttttgttgc

SEQ ID NO: 109764 - DNA, 80 bp, synthetic construct
  source 1..80: mol_type = other DNA
ataaccatctcgcccccctggaaacatgggccgccggcggcctacgggatttggccgttgcagtcgagcccgtgatattc

SEQ ID NO: 109765 - DNA, 80 bp, synthetic construct
  source 1..80: mol_type = other DNA
acatcagaacaggggtaaggactgtgactaccggggaccccatcacctactccacgtacggcaaatttctcgcggacgga

SEQ ID NO: 109766 - DNA, 80 bp, synthetic construct
  source 1..80: mol_type = other DNA
tgctggcgcccatcacggcgtacgcccagcagacgaggggccttttggcgtgcataattaccagcctgaccggccgggac

SEQ ID NO: 109767 - DNA, 80 bp, synthetic construct
  source 1..80: mol_type = other DNA
tagctcccaagggcgctcctaactcctgtgagtgggaacaaaccgaagatagcggccgggcagttgccgaggatgaagaa

SEQ ID NO: 109768 - DNA, 80 bp, synthetic construct
  source 1..80: mol_type = other DNA
cttcgggcattgcgaaagaccaacccccaccccccttcggtgccaccctctatcacgacgacctggactctgatggtgga

SEQ ID NO: 109769 - DNA, 80 bp, synthetic construct
  source 1..80: mol_type = other DNA
ccttcggggcatgggcttgaatgccgtggcatactatagagggttggacgtctccataataccagctcagggagatgtgg

SEQ ID NO: 109770 - DNA, 80 bp, synthetic construct
  source 1..80: mol_type = other DNA
ctgacccgagttaatgtaggcgtaccccagggcccggagaacgcgaatacagaacagatgcgccagacgcagggccggct

SEQ ID NO: 109771 - DNA, 80 bp, synthetic construct
  source 1..80: mol_type = other DNA
ctcgtcctacttggggcccaactgacccccggcataggtcacgcaatttgggaaaagtcatcgataccatcacgtgtggc

SEQ ID NO: 109772 - DNA, 80 bp, synthetic construct
  source 1..80: mol_type = other DNA
aggggccgcacaggcagaggcaagccgggggtgtataggtatgtctcgcagggcgaaagaccatccggtatgttcgatac

SEQ ID NO: 109773 - DNA, 80 bp, synthetic construct
  source 1..80: mol_type = other DNA
tagatcccacattctctattgagacttctaccgtgccccaggatgccgtgtcccgctcccaacggaggggtagaaccggt

SEQ ID NO: 109774 - DNA, 80 bp, synthetic construct
  source 1..80: mol_type = other DNA
tggcctgcgggacctggcggtcgccgttgagcctatcatcttcagtccgatggagaagaaagtcattgtctggggagcgg

SEQ ID NO: 109775 - DNA, 80 bp, synthetic construct
  source 1..80: mol_type = other DNA
gcacggcttaacgagagatccaatacatcaacgcgaaagggtggacgtttttccacaatttaacaaacccccatgggttt

SEQ ID NO: 109776 - DNA, 80 bp, synthetic construct
  source 1..80: mol_type = other DNA
ctggaaaaactgaaactgaagggcacaacctactccatgtgtgacaaagcaaagttcaaatggaagagagttcctgtgga

SEQ ID NO: 109777 - DNA, 80 bp, synthetic construct
  source 1..80: mol_type = other DNA
tacccttactggacccacccctcttctgtacaggttgggagccgtgcagaacgagataattactacacacccaattacca

SEQ ID NO: 109778 - DNA, 80 bp, synthetic construct
  source 1..80: mol_type = other DNA
ttcccgctgggactcgacacaacaaagagcagtactggctgcagctctggaaataatggtcaaattctcttcagaacccc

SEQ ID NO: 109779 - DNA, 80 bp, synthetic construct
  source 1..80: mol_type = other DNA
gagactcgcgtgatggtgggaacggaggcccgtgctgcccacgggattgtgagccatttcttttcgcgtgggccggctca

SEQ ID NO: 109780 - DNA, 80 bp, synthetic construct
  source 1..80: mol_type = other DNA
cctggccgacttggcgcacgccaggttcaaggccgacacgcaatccattgaaggccaggattctgcggtgggcaccagta

SEQ ID NO: 109781 - DNA, 80 bp, synthetic construct
  source 1..80: mol_type = other DNA
tggcaaggctatccctctagcttccatcaaggggggcagacacctaatattctgccattcaaagaagaagtgcgatgagc

SEQ ID NO: 109782 - DNA, 80 bp, synthetic construct
  source 1..80: mol_type = other DNA
gctcttggtccactgtgagcgatgaggacgacgtcgtatgttgttccatgtcctattcctggacgggggctctgataaca

SEQ ID NO: 109783 - DNA, 80 bp, synthetic construct
  source 1..80: mol_type = other DNA
gttgtgggcgtttctggccagagaaaaacgtcccagaatgtgctctcgagaggaattcataaaaaaggtcaatagcaatg

SEQ ID NO: 109784 - DNA, 80 bp, synthetic construct
  source 1..80: mol_type = other DNA
ggactggcagaggtaagccgggagtgtaccgatacgtctcacaaggtgaacggccgtctggcatgtttgacactgtcgtt

SEQ ID NO: 109785 - DNA, 80 bp, synthetic construct
  source 1..80: mol_type = other DNA
ccgctgcgtacacggggtcgtggccccccgcgctaacccggcagtcgcgatggcggtccagggccgcgcgccgcatcagg

SEQ ID NO: 109786 - DNA, 80 bp, synthetic construct
  source 1..80: mol_type = other DNA
aatagcagtggatgccccgagcgcctgagctcttgcaagcccattgtctctttctctcagggatggggccccatcacata

SEQ ID NO: 109787 - DNA, 80 bp, synthetic construct
  source 1..80: mol_type = other DNA
aatagagagcaatcacggactcttctccgtagcctggaggatagaccgccagggtgcggtggcgaacaacccccggttcg

SEQ ID NO: 109788 - DNA, 80 bp, synthetic construct
  source 1..80: mol_type = other DNA
tcgttggttatgggggagtgtggttccccagggagtgggtcgagcgcctcggcctcggaatccgagaggaacaacgaggt

SEQ ID NO: 109789 - DNA, 80 bp, synthetic construct
  source 1..80: mol_type = other DNA
ggcgcaatcttcgcatttcttttttccagatgaaacgagccagatttgaagatgacttcaaccccgtctacccttacgaa

SEQ ID NO: 109790 - DNA, 80 bp, synthetic construct
  source 1..80: mol_type = other DNA
actcccaccattacgcttccaaaccagaagtggatgttggtatggcaacaagatcacgccacagaaacatgatgaacgaa

SEQ ID NO: 109791 - DNA, 80 bp, synthetic construct
  source 1..80: mol_type = other DNA
gcaactaatccgaatgatggagggggaaggggtcatagaggcagcggatgcacacaacccgagactgcttcgagtggagc

SEQ ID NO: 109792 - DNA, 80 bp, synthetic construct
  source 1..80: mol_type = other DNA
ggctggggagggggtcccccccctctctggccagttcttctgcaagtcaattatctgctccttcactgaaggccacctgc

SEQ ID NO: 109793 - DNA, 80 bp, synthetic construct
  source 1..80: mol_type = other DNA
tagcatttaataagaaagaagacaaacgcaccctatggacaactccagacacatctccaaattgcagaattgatcaggat

SEQ ID NO: 109794 - DNA, 80 bp, synthetic construct
  source 1..80: mol_type = other DNA
tggccactcttgctgcttgttctggctctgccgcaacgcgccttcgcttacgatcaagaagcagcgggttccataggggc

SEQ ID NO: 109795 - DNA, 80 bp, synthetic construct
  source 1..80: mol_type = other DNA
tttgtgccagtagagtccctcgagaccaccatgagatccccctcctttacagacaactccacacccccggctgtgcccca

SEQ ID NO: 109796 - DNA, 80 bp, synthetic construct
  source 1..80: mol_type = other DNA
cagtacgccccctgcagtccctcatgagttccaagtggggcacctccatgcacccaccggaagcgggaagagcacaaagg

SEQ ID NO: 109797 - DNA, 80 bp, synthetic construct
  source 1..80: mol_type = other DNA
agcgttcgcacttcgtcccaatatatatatattattagggcgaagtgcgagcactggcgccgtgcccgactccgcgccgg

SEQ ID NO: 109798 - DNA, 80 bp, synthetic construct
  source 1..80: mol_type = other DNA
acggcaccgccgccttgccgccggcagaacttctacaacccccacctcgctcagaccggaacgcagccaaaggcccccgg

SEQ ID NO: 109799 - DNA, 80 bp, synthetic construct
  source 1..80: mol_type = other DNA
cactaataatgattgggtccaacgcctctgacaggatgggaatgggcgtcacctatctagctttaattgcaacatttaaa

SEQ ID NO: 109800 - DNA, 80 bp, synthetic construct
  source 1..80: mol_type = other DNA
acaatttggtttgttccaagtgtgagaaacggaaatgaaatcgcagcctgtctgacaaaggctggaaagcgggtcataca

SEQ ID NO: 109801 - DNA, 80 bp, synthetic construct
  source 1..80: mol_type = other DNA
taatgcttgtgtcctcccccgcaagcgacaatgtcaaagcgcaaaatcaaggaggagatgctccaggtcgtcgccccgga

SEQ ID NO: 109802 - DNA, 80 bp, synthetic construct
  source 1..80: mol_type = other DNA
ggcgtggacgcacgggcagggggaggccggaggtgtacagatacgtctcacagggcgagaggccgtccggcacgttcgat

SEQ ID NO: 109803 - DNA, 80 bp, synthetic construct
  source 1..80: mol_type = other DNA
acatcagctttgtaaaggaaaggaaatttttaaccctcaattcaatcacacatgtaatgaacagaaccttacactgctgt

SEQ ID NO: 109804 - DNA, 80 bp, synthetic construct
  source 1..80: mol_type = other DNA
accgcgaagtgctgtatcagcagtttgatgaaatggaggagtgttccctttacaccccttacattgagcgcggccgggat

SEQ ID NO: 109805 - DNA, 80 bp, synthetic construct
  source 1..80: mol_type = other DNA
gacgggcctctggtccctagccttgctcgtcctcttgctccctcaacgggcatacgcttggtcaggtgaggacagcgcta

SEQ ID NO: 109806 - DNA, 80 bp, synthetic construct
  source 1..80: mol_type = other DNA
cgacccccgcccgacccccgcccagtgcccgacccccgcccagtgcccgacccgcgcccgccctcaccgtcggccaggtc

SEQ ID NO: 109807 - DNA, 80 bp, synthetic construct
  source 1..80: mol_type = other DNA
gggtgtgtgtgggtgtgtaggcgatgcgggtcccccgagtccgcgggaagggcgtgggtttggcgcgcgtatgcgtattc

SEQ ID NO: 109808 - DNA, 80 bp, synthetic construct
  source 1..80: mol_type = other DNA
cagtgtggtttgctgctcaatgtcctattcctggacgggggccatcatcacaccctgtgcgcccgaggaggagaaattgc

SEQ ID NO: 109809 - DNA, 80 bp, synthetic construct
  source 1..80: mol_type = other DNA
cacggggcaacgcatggcgtgggacatgatgatgaattggtctcctacaaccactatggttgtcgcatatcttatgcgtg

SEQ ID NO: 109810 - DNA, 80 bp, synthetic construct
  source 1..80: mol_type = other DNA
ggtgtgcgccagggcgcgggctcctcccccctcctgggatgaacagtggaagtgcctcaccaggctcaagcccaccttaa

SEQ ID NO: 109811 - DNA, 80 bp, synthetic construct
  source 1..80: mol_type = other DNA
agggcgtcaaactctacgtcatacaggctgttttcgtcggagcgcacgcgggcgaaaaaatcaaagagtctgcggtggga

SEQ ID NO: 109812 - DNA, 80 bp, synthetic construct
  source 1..80: mol_type = other DNA
ccgtggctggccccccctgagagacccgactctccctccaccaatggatccggctttgagatcttatcaccaacggctcc

SEQ ID NO: 109813 - DNA, 80 bp, synthetic construct
  source 1..80: mol_type = other DNA
ggtggagtagagcacaggtttgaggcagcgtgtaactggacgcgaggggagaggtgcgagctggatgaccgaggtaggac

SEQ ID NO: 109814 - DNA, 80 bp, synthetic construct
  source 1..80: mol_type = other DNA
acgccggaaccgtcggcccgtcgtcctcgcccgcctcggcgaccggcggcccggccgggtcgggtggtgccgaggcgagg

SEQ ID NO: 109815 - DNA, 80 bp, synthetic construct
  source 1..80: mol_type = other DNA
gaaaaggacatcagggtcgaggaggaggtatatcagtgttgtgacctggagcccgaggcccgcaaggcaatcactgccct

SEQ ID NO: 109816 - DNA, 80 bp, synthetic construct
  source 1..80: mol_type = other DNA
cgtggtctcggggtgtcctcttcccccctccggccaggccccggtgccccccccgaggaggcgccgggctacagtcctga

SEQ ID NO: 109817 - DNA, 80 bp, synthetic construct
  source 1..80: mol_type = other DNA
acgtgcggtgttgccgatctcatggggtacatccctgtcgttggcgccccggttggaggcgttgccagagccctggcaca

SEQ ID NO: 109818 - DNA, 80 bp, synthetic construct
  source 1..80: mol_type = other DNA
ggcggccactggcgtcgacgaggcgcgtggtggatatgtcgtcgggcgcccgccaggcggcgctcgtgcgcctcaccgcg

SEQ ID NO: 109819 - DNA, 80 bp, synthetic construct
  source 1..80: mol_type = other DNA
cgtaaacaatgacacaggggttctctccgccgcggccggcgcggggcgttgccggcccggcccggccccggagcccgcgg

SEQ ID NO: 109820 - DNA, 80 bp, synthetic construct
  source 1..80: mol_type = other DNA
attcagtcccatggaaatcaaggtcatcacttggggtgcggacacggcggcttgcggggatattctgtgcgggctgcccg

SEQ ID NO: 109821 - DNA, 80 bp, synthetic construct
  source 1..80: mol_type = other DNA
aatgattctccccgagaatatcaagtatgaggtaggggtgtttgtccatggatctactgactcaacaaaccatggagatt

SEQ ID NO: 109822 - DNA, 80 bp, synthetic construct
  source 1..80: mol_type = other DNA
agtagccggggcatgtagctgatggagggaagaataaagaggggctctaatccctactttttttaaggacaaaccttctg

SEQ ID NO: 109823 - DNA, 80 bp, synthetic construct
  source 1..80: mol_type = other DNA
gtgaggaccgggaaccaatcacggtgctgggtggcgttaacccccactgtggcggctcctagccttaatgctcctactga

SEQ ID NO: 109824 - DNA, 80 bp, synthetic construct
  source 1..80: mol_type = other DNA
ccagcaatactgtcacctggagcactggtggttggcgtggtctgtgctgccatcttacgcaggcacgtgggaccccagga

SEQ ID NO: 109825 - DNA, 80 bp, synthetic construct
  source 1..80: mol_type = other DNA
aaggagtcttccacaccatgtggcacgtcacaagaggggcagtgttgacacataatgggaaaagactggaaccaaactgg

SEQ ID NO: 109826 - DNA, 80 bp, synthetic construct
  source 1..80: mol_type = other DNA
gcagacgcctcgaagaattccagcaaggttggggcaagcttggggtcgccaacaccacaggcccctctgatcaaagacct

SEQ ID NO: 109827 - DNA, 80 bp, synthetic construct
  source 1..80: mol_type = other DNA
ccagcgatcgcagctcggcgtttacgggaccgagttgttggacgtccgccagcagcgagaggcgactcccgttgtagtac

SEQ ID NO: 109828 - DNA, 80 bp, synthetic construct
  source 1..80: mol_type = other DNA
gtttttaacatgcgtacatgttatctcatggggtttcttgtcaagaaggtgatcaccacacgcgaggtggtgactgttta

SEQ ID NO: 109829 - DNA, 80 bp, synthetic construct
  source 1..80: mol_type = other DNA
gcgctttggtggtgggagtcatctgtgcagcaatcttgcgccgccacgtcggccagggtgagggagcggtccagtggatg

SEQ ID NO: 109830 - DNA, 80 bp, synthetic construct
  source 1..80: mol_type = other DNA
gggagtcctttatgccatcatatttttctgcgccgcatggtatattaagggcagggctcctgcggccgtcgcctatgcga

SEQ ID NO: 109831 - DNA, 80 bp, synthetic construct
  source 1..80: mol_type = other DNA
attggcagaggcggcaaagctgtccgccgccgccacccacatcgaggccccggccgcgcaggctatccccagggcccgtg

SEQ ID NO: 109832 - DNA, 80 bp, synthetic construct
  source 1..80: mol_type = other DNA
catgctaatggggttcttggagtacacccggttggtccccggggacggggccgccccgagagggagtgattccctccctc

SEQ ID NO: 109833 - DNA, 80 bp, synthetic construct
  source 1..80: mol_type = other DNA
gcgtggtatttgatataaccaagtggttgctagcactcctgggacccggctacctccttaagggtgttttggcacgtgtg

SEQ ID NO: 109834 - DNA, 80 bp, synthetic construct
  source 1..80: mol_type = other DNA
gtgcacgtggatgaactctacgggctttaccaagacctgtggtgccccgccatgtcagatagtcccgggagattacaata

SEQ ID NO: 109835 - DNA, 80 bp, synthetic construct
  source 1..80: mol_type = other DNA
aacgggctgactccgcatacgtctgcaaacaaggagtggtggaccgaggatgggggaatggatgcggcctatttggaaag

SEQ ID NO: 109836 - DNA, 80 bp, synthetic construct
  source 1..80: mol_type = other DNA
cctacggcaagctgaccctgaagttcatctgcaccaccggcaagctgcccgtgccctggcccaccctcgtgaccaccctg

SEQ ID NO: 109837 - DNA, 80 bp, synthetic construct
  source 1..80: mol_type = other DNA
ccctgctgagggtgctaaccagtggatgaacaggctaatagcctttgcatcaagaggcaaccacgtgtccccgacgcatt

SEQ ID NO: 109838 - DNA, 80 bp, synthetic construct
  source 1..80: mol_type = other DNA
gtccaagagtgcaactgttccatctacactggtcatataacaggccacagaatggcatgggacatgatgatgaactggtc

SEQ ID NO: 109839 - DNA, 80 bp, synthetic construct
  source 1..80: mol_type = other DNA
acgaaggatggccatcctgggagacactgcatgggacttcggttctataggaggggtgttcacgtctgtgggaaaactga

SEQ ID NO: 109840 - DNA, 80 bp, synthetic construct
  source 1..80: mol_type = other DNA
gctatctgatttcaagacctggctgcgggcaaaagtgctacccagcctcccaggcgtgcccctcctctcgtgtcaacgag

SEQ ID NO: 109841 - DNA, 80 bp, synthetic construct
  source 1..80: mol_type = other DNA
agtcaacgtttcctcgcactttgtgtataccccgtccccatacgtgttcgccctggcccaggcgcacctcccccggctcc

SEQ ID NO: 109842 - DNA, 80 bp, synthetic construct
  source 1..80: mol_type = other DNA
cggcaagccgttgctgattcgaggcgttaaccgtcacgagcatcatcctctgcatggtcaggtcatggatgagcagacga

SEQ ID NO: 109843 - DNA, 80 bp, synthetic construct
  source 1..80: mol_type = other DNA
ggagtggaagcacacatcaccaccatcggctctgccgcggccggtaccacacaccagttggccagcttattcaccccggg

SEQ ID NO: 109844 - DNA, 80 bp, synthetic construct
  source 1..80: mol_type = other DNA
cttgctccttgcctcaagaggccagaactgtcatacactcgctcactgagaggctatacgtgggagggcccatgacaaac

SEQ ID NO: 109845 - DNA, 80 bp, synthetic construct
  source 1..80: mol_type = other DNA
tcctggccggaccaatgccagtcaccgcggcgagtgctgcgcaaaggagagggagagttggcaggaacccacaaaaagag

SEQ ID NO: 109846 - DNA, 80 bp, synthetic construct
  source 1..80: mol_type = other DNA
cctcactgacaccatgcacttgcggtgcgtcggacttgttcctggtcactcggaacgcagatgtgattcccgtgcgcaga

SEQ ID NO: 109847 - DNA, 80 bp, synthetic construct
  source 1..80: mol_type = other DNA
ccagccttactcttgatgaactttctaactccaggtttcccgcacctatagtacaactttatacaaacccccatgataat

SEQ ID NO: 109848 - DNA, 80 bp, synthetic construct
  source 1..80: mol_type = other DNA
aagtttgataaaatgatttaatttaattatatgtgagattgcccacattaatggggtaactatatataacaccgggggta

SEQ ID NO: 109849 - DNA, 80 bp, synthetic construct
  source 1..80: mol_type = other DNA
agccagggttataaggtcttggtgttaaacccctcagtggccgccacccttggcttcggtgcgtatatgcgtaccgccta

SEQ ID NO: 109850 - DNA, 80 bp, synthetic construct
  source 1..80: mol_type = other DNA
tgaggaagaggtggacggccagacttactctgccagcagcggttggggctctgctagtcctcctccttggtggcattacc

SEQ ID NO: 109851 - DNA, 80 bp, synthetic construct
  source 1..80: mol_type = other DNA
tcccccttgctctcattaagggcggtaggcatctcatcttctgccactctaagaaaaagtgtgatgaacttgccaagcaa

SEQ ID NO: 109852 - DNA, 80 bp, synthetic construct
  source 1..80: mol_type = other DNA
cggtcggtggtatcggcctcggaaaggttctcgtcgacattttggctggctatggcgctggggtcgccggcgccgtagtc

SEQ ID NO: 109853 - DNA, 80 bp, synthetic construct
  source 1..80: mol_type = other DNA
cacttctctcgtgcctgaccgttcccgcttcagccgttcactatcgcaacagctcgggcatctatcatatcaccaatgac

SEQ ID NO: 109854 - DNA, 80 bp, synthetic construct
  source 1..80: mol_type = other DNA
atgttaaattcccgggcggcggtcagatcgttggtggagtctacttattgccgcgcaggggcccacgtttgggtgtgcgc

SEQ ID NO: 109855 - DNA, 80 bp, synthetic construct
  source 1..80: mol_type = other DNA
aagccagtggaagaggggcagcaacctaaagaccttgacattacattggctttctttgacacacctggtggaacattgaa

SEQ ID NO: 109856 - DNA, 80 bp, synthetic construct
  source 1..80: mol_type = other DNA
ggggatgggggttacgtacttagccctcctcgctaccttcagaataagaccaacttttgctttggctcttatgataagga

SEQ ID NO: 109857 - DNA, 80 bp, synthetic construct
  source 1..80: mol_type = other DNA
tacagtaacttgctacatcaaggcaactgcggctgctaaagcggcaggcctccaagacccatccttccttgtctgcgggg

SEQ ID NO: 109858 - DNA, 80 bp, synthetic construct
  source 1..80: mol_type = other DNA
gatactgtggcttataaggactactatcaggacgttaagctcccctaccagcacaacaactcagggttcgtgggctacat

SEQ ID NO: 109859 - DNA, 80 bp, synthetic construct
  source 1..80: mol_type = other DNA
gcattttagccagttctctcctaaaaaatgatattcccatgacaggcccactagtggctggagggcttcttaccgtatgt

SEQ ID NO: 109860 - DNA, 80 bp, synthetic construct
  source 1..80: mol_type = other DNA
gagcaggcagcccagcaaattggcgagttcgcctacggcaaacgcggtcgttacggagaggtggggctgttgctggatca

SEQ ID NO: 109861 - DNA, 80 bp, synthetic construct
  source 1..80: mol_type = other DNA
aggctacgagcataccttgacaccccgggactccccgtgtgccaagaccatcttgaattttgggatggtgtcttcacggg

SEQ ID NO: 109862 - DNA, 80 bp, synthetic construct
  source 1..80: mol_type = other DNA
tgccaggacccctccagtaccacctccacggaggaagaagacagttgtcctgacagaatccactgtgtcttctgccttgg

SEQ ID NO: 109863 - DNA, 80 bp, synthetic construct
  source 1..80: mol_type = other DNA
agtcggccatatccagagcgccgtagggtgcggagtcgtgggaggtaaatcccggccccggggaatccccgtccgccaac

SEQ ID NO: 109864 - DNA, 80 bp, synthetic construct
  source 1..80: mol_type = other DNA
tcgctcccacaccaaagccgttttttcgggacgaggtctcgttcagcgttggactcaattcgtttgtagtcgggtctcag

SEQ ID NO: 109865 - DNA, 80 bp, synthetic construct
  source 1..80: mol_type = other DNA
cgtgttcgtccacgagttcgtctcgtccgagccaatgcgcctccaccgagataacgtcatgctggcctcgggggccgagt

SEQ ID NO: 109866 - DNA, 80 bp, synthetic construct
  source 1..80: mol_type = other DNA
cacttccgccaccttctcacccattgtgatttcacgccctggctggcatggcacgttgcagcgaacgtgtctagcgtgac

SEQ ID NO: 109867 - DNA, 80 bp, synthetic construct
  source 1..80: mol_type = other DNA
gtatggaggaggttggaagctagaaggagaatggaaggaaggagaagaagtccaggtcctggcattagagcctggaaaga

SEQ ID NO: 109868 - DNA, 80 bp, synthetic construct
  source 1..80: mol_type = other DNA
ggacagtcacagtggaggtacagtacgcagggacagatggaccttgcaaggttccagctcagatggcggtggacatgcaa

SEQ ID NO: 109869 - DNA, 80 bp, synthetic construct
  source 1..80: mol_type = other DNA
aaagcaaccagagaagcgcagaaaagagcagcagcaggcatcatgaaaaacccaactgtggatggaataacagtgattga

SEQ ID NO: 109870 - DNA, 80 bp, synthetic construct
  source 1..80: mol_type = other DNA
agctcttgcagcatgtaaagctgcagggatcgtagatcctactatgctggtgtgtggagacgacctggttgtcatctcgg

SEQ ID NO: 109871 - DNA, 80 bp, synthetic construct
  source 1..80: mol_type = other DNA
ggggacgcgcacctgttccgcctgtcgcacccacagctttttttgcgaaccgtcccgttccgggatgccgtgccgcccgt

SEQ ID NO: 109872 - DNA, 80 bp, synthetic construct
  source 1..80: mol_type = other DNA
gtggaaaagcatgaaggaatgtacaagtccgctccgaagagactaccatcaaccactgagaagctggaaatgggatggaa

SEQ ID NO: 109873 - DNA, 80 bp, synthetic construct
  source 1..80: mol_type = other DNA
accaactcgcggggccagaagtgcgggtatcggaggtgtcgggctagcggtgtgctcactactagcctgggtaacactct

SEQ ID NO: 109874 - DNA, 80 bp, synthetic construct
  source 1..80: mol_type = other DNA
tatccggcgactcctccggctcgcggtccccggcgaccgtctcgaattccccgttgcgagcggcggcgcgcgtacagcag

SEQ ID NO: 109875 - DNA, 80 bp, synthetic construct
  source 1..80: mol_type = other DNA
cgggcggcacacctatcacgtgactggccgtcaggagctcggcgcagagagcctcgttaagagccaggaggctgggatcg

SEQ ID NO: 109876 - DNA, 80 bp, synthetic construct
  source 1..80: mol_type = other DNA
ggtcgatcaattctaccggttgtgcgccgaggcttgccgcgtgtcgtgacttggcatctttcaatcaggggtgtggccct

SEQ ID NO: 109877 - DNA, 80 bp, synthetic construct
  source 1..80: mol_type = other DNA
ctccatcgctgaaggccacttgtcaaacgcataggccacaccctgatgctgagctgatagacgccaacctcctttggagg

SEQ ID NO: 109878 - DNA, 80 bp, synthetic construct
  source 1..80: mol_type = other DNA
atacgccaacccgttgcctaccatgtaacgcatagtaagtcggattttaatactcttacatattctcttcttggagggta

SEQ ID NO: 109879 - DNA, 80 bp, synthetic construct
  source 1..80: mol_type = other DNA
tggccgcgtattgcctgtcaacaggctgcgtggtcatagtgggcaggatcgtcttgtccgggaagccggcaattatacct

SEQ ID NO: 109880 - DNA, 80 bp, synthetic construct
  source 1..80: mol_type = other DNA
gtcgcgtggagatcggctgtctctagcgatattggcccggggaggctaagatccaccccaacgcccggccacccgtgtac

SEQ ID NO: 109881 - DNA, 80 bp, synthetic construct
  source 1..80: mol_type = other DNA
gttagcgtggctgggagtgtggatgggctagagctcaagaagcttggtgaagtttcatgggaagaggaggcggagatcag

SEQ ID NO: 109882 - DNA, 80 bp, synthetic construct
  source 1..80: mol_type = other DNA
ccgtggagccggggcgctgcttgttctccgacgccatcgccgatgcggtgcgatcctccggggatacggctgcgacggcg

SEQ ID NO: 109883 - DNA, 80 bp, synthetic construct
  source 1..80: mol_type = other DNA
ctgatgacacagctggttgggacacaagaataacagaagatgacctgcacaatgaggaaaagatcacacagcaaatggac

SEQ ID NO: 109884 - DNA, 80 bp, synthetic construct
  source 1..80: mol_type = other DNA
gaggagaaccttgaggtggagatttggacaaaagaaggagagaggaaaaaactgagaccaaagtggctggatgcgcgaac

SEQ ID NO: 109885 - DNA, 80 bp, synthetic construct
  source 1..80: mol_type = other DNA
atgagacttgtaggcccccgcaagtgcgccaatctctggcatggcacattccctgtcaacgagtacactactggtccttg

SEQ ID NO: 109886 - DNA, 80 bp, synthetic construct
  source 1..80: mol_type = other DNA
cccccccgcgtctacagcttttgtcgtgagcggtctagcaggagccgcggttggaagcatccggctcgggagtgtgttgg

SEQ ID NO: 109887 - DNA, 80 bp, synthetic construct
  source 1..80: mol_type = other DNA
ccgcgttctacaaggacgtcctggccaaattctgggacgagtagcccaaacgtcagacgagcgcgcttgtccccgaacaa

SEQ ID NO: 109888 - DNA, 80 bp, synthetic construct
  source 1..80: mol_type = other DNA
caccaaaagcttctactcgcaaacctctttccccacctcagcaaattaatgtcagaatgggacaaaatgtaactctagtt

SEQ ID NO: 109889 - DNA, 80 bp, synthetic construct
  source 1..80: mol_type = other DNA
gctcgacgagtcatcagcttcggcagctctcgcagcgctagctcttaaggcgtttccgcccccccaggcggactcgcagg

SEQ ID NO: 109890 - DNA, 80 bp, synthetic construct
  source 1..80: mol_type = other DNA
ggcaataccctcacatgctacataaaagcccaagcggcttgcaaagcagccaagctcgagaactttgacatgttggtttg

SEQ ID NO: 109891 - DNA, 80 bp, synthetic construct
  source 1..80: mol_type = other DNA
aacttatcaacctgaaccacaaataggagaatcacagtggaacgaagccgaatcgtccgtagcaggtggaagggttctta

SEQ ID NO: 109892 - DNA, 80 bp, synthetic construct
  source 1..80: mol_type = other DNA
ggtcttagactgctggcgtttcgaaggcttgcagagcgaaggaacagacggtctttcagtgaaccactaacagtggtggg

SEQ ID NO: 109893 - DNA, 80 bp, synthetic construct
  source 1..80: mol_type = other DNA
ggcccgcagccgcatcagcgtcgtgtgcgcgcaggcgtggcgggtctcgaaggtacacaggttgcagggcacgtcggtct

SEQ ID NO: 109894 - DNA, 80 bp, synthetic construct
  source 1..80: mol_type = other DNA
gccgtgctcatctgggtgggaataaacacccgcaacatgaccatgtccatgtccatgatcttggtaggtgtgatcatgat

SEQ ID NO: 109895 - DNA, 80 bp, synthetic construct
  source 1..80: mol_type = other DNA
actaaccagaccctgctctttaacattttgggtggatgggtggctacgcaactagcctcccccaccgcctcgaccgcttt

SEQ ID NO: 109896 - DNA, 80 bp, synthetic construct
  source 1..80: mol_type = other DNA
agggatgcatgcggggggagatgaggtgcatcttagcctggatcttcagattggcgatgttaccgcccagatcccgcctg

SEQ ID NO: 109897 - DNA, 80 bp, synthetic construct
  source 1..80: mol_type = other DNA
cacatcatgccgtgtctaggggtagtgcaaaacttcaatggtttgtggaaaggaacatggtcattcccgagggaagagtc

SEQ ID NO: 109898 - DNA, 80 bp, synthetic construct
  source 1..80: mol_type = other DNA
ccctccgagagcgcgaccgtcagcgttttggccgacagaaacccgttgttaaacatgtccatcacgcgccgccgcagcac

SEQ ID NO: 109899 - DNA, 80 bp, synthetic construct
  source 1..80: mol_type = other DNA
tgagggtaccaggagttctgatggacatcatcgccggagcccattggggcgttataggtgccctggcatattacagcatg

SEQ ID NO: 109900 - DNA, 80 bp, synthetic construct
  source 1..80: mol_type = other DNA
ctgtttcactcccagccccgtcgtggtggggaccactaacaggcttggggtgcccacctacaactggtgcgaaaacgaaa

SEQ ID NO: 109901 - DNA, 80 bp, synthetic construct
  source 1..80: mol_type = other DNA
cctgcatgctcccacaggcagcggtaagagcaccaaagtcccggctgcgtacgcagctcagggctacaaagtgctggtgc

SEQ ID NO: 109902 - DNA, 80 bp, synthetic construct
  source 1..80: mol_type = other DNA
gcggggcacttccgcttgacggaggagaaaagaaaacatttccggcaccttctgacaaactgtgacttcacaccttggct

SEQ ID NO: 109903 - DNA, 80 bp, synthetic construct
  source 1..80: mol_type = other DNA
ccccacggactgcttccggaagcatccgggagccacatacgccaagtgcggatccggtccgtggcttacgcctaggtgtc

SEQ ID NO: 109904 - DNA, 80 bp, synthetic construct
  source 1..80: mol_type = other DNA
tgccctagattttaaacccggcacatctggatctcccatcgtgaacagagaaggaaaaatagtaggtctttacggaaatg

SEQ ID NO: 109905 - DNA, 80 bp, synthetic construct
  source 1..80: mol_type = other DNA
ccggacccagcacaccttgcccaccacccaattacactcgtgcgctgtggcgcgtggccgccaacagctacgtcgaggtg

SEQ ID NO: 109906 - DNA, 80 bp, synthetic construct
  source 1..80: mol_type = other DNA
acaaacctatcaagtggggtacctgcacgctccgactggcagtgggaagagcacgaaagtgccggcggcatatgccagcc

SEQ ID NO: 109907 - DNA, 80 bp, synthetic construct
  source 1..80: mol_type = other DNA
gatgtctaaccgaaataaagtggtcgaaacggactgttgggtctccggtgtgattattacgcaggggagtggtgtggcgg

SEQ ID NO: 109908 - DNA, 80 bp, synthetic construct
  source 1..80: mol_type = other DNA
cgcagttgttgatggcatagtcgcgacagatgttccagagctggaaagaacgaccccacagatgcagaaaaggctaggcc

SEQ ID NO: 109909 - DNA, 80 bp, synthetic construct
  source 1..80: mol_type = other DNA
acgactgctcgaacagcagcattacctggcagcttcggaacgctgtgcttcacgttcctggatgcgtcccctgtgaacga

SEQ ID NO: 109910 - DNA, 80 bp, synthetic construct
  source 1..80: mol_type = other DNA
gagcggccctcgggtatgtttgactcggtggtgctttgcgagtgctacgacgcaggttgcgcttggtacgagctggcgcc

SEQ ID NO: 109911 - DNA, 80 bp, synthetic construct
  source 1..80: mol_type = other DNA
tctaccagtgctgcaagcttgaacccgcggctaaaatcgccatcaactccctcacggaaaggttatacgtgggcggaccc

SEQ ID NO: 109912 - DNA, 80 bp, synthetic construct
  source 1..80: mol_type = other DNA
cgtttactgcatatggatccccacccaattgaaaatgcatgtttaattgtccaactagaaaaactgtccgcgctcattgc

SEQ ID NO: 109913 - DNA, 80 bp, synthetic construct
  source 1..80: mol_type = other DNA
ccttggccagaggatttccattcgtggatgtgggtgtctccgcccttctgttggctgcaggatgttgggggcaagtcacg

SEQ ID NO: 109914 - DNA, 80 bp, synthetic construct
  source 1..80: mol_type = other DNA
cctcgctggagctgccgtcggtagtgtggggttggggaaagtccttgtcgacatcctcgctggctacggcgctggcgtgg

SEQ ID NO: 109915 - DNA, 80 bp, synthetic construct
  source 1..80: mol_type = other DNA
gtaatttggtcctactcggtccggccgataacatgctggacaaggggtggaaacttctcgcgcctattacggcctacgcc

SEQ ID NO: 109916 - DNA, 80 bp, synthetic construct
  source 1..80: mol_type = other DNA
ggcccggcgtccgtgggttccggcagcggactcggcaacgacgacgacggggactggtttccctgctacgacgacgccgg

SEQ ID NO: 109917 - DNA, 80 bp, synthetic construct
  source 1..80: mol_type = other DNA
cgtctgcgccaaatacgccttagcagacccctcgcttaagatggccgatcccaatcgatttcgcgggaagaaccttccgg

SEQ ID NO: 109918 - DNA, 80 bp, synthetic construct
  source 1..80: mol_type = other DNA
tatgtggcacaaggatacaatgttctcgtgctgaatccatcagtggcggccacgctaggctttggctctttcatgtcgcg

SEQ ID NO: 109919 - DNA, 80 bp, synthetic construct
  source 1..80: mol_type = other DNA
gaaagtccttagatccctgcacctgcggagcggtcgacctttacctggttacacggaacgccgacgtcgtgccagccagg

SEQ ID NO: 109920 - DNA, 80 bp, synthetic construct
  source 1..80: mol_type = other DNA
tggcccctgtacgggaatgagggccttggttgggcagggtggctcctgtccccccgcggctctcgcccttcatggtgccc

SEQ ID NO: 109921 - DNA, 80 bp, synthetic construct
  source 1..80: mol_type = other DNA
tgccgtacttcgtgcgggcgcaggtgctcatccgcttgtgcttgctcgtgcgtagactgaccggcggccagtatgcgcag

SEQ ID NO: 109922 - DNA, 80 bp, synthetic construct
  source 1..80: mol_type = other DNA
gaataggtcacaatgctgggtggccctgacccctaccgtggcggcgccgtacctccatgctccagtcgactccctacgga

SEQ ID NO: 109923 - DNA, 80 bp, synthetic construct
  source 1..80: mol_type = other DNA
actcccctgcccaacgggtggagtatctcttgaaagcatgggcggaaaagaaggaccccatgggtttttcgtatgatacc

SEQ ID NO: 109924 - DNA, 80 bp, synthetic construct
  source 1..80: mol_type = other DNA
gagcggctctgctatccccgcgaccgctttcataccttaaagggtcttcggggtggcccctgctctgcccctcgggacat

SEQ ID NO: 109925 - DNA, 80 bp, synthetic construct
  source 1..80: mol_type = other DNA
cacctacgcccgctcttagcactggtcttatacacctacatcagaatatagtagacacccaatacctctacggcctgagc

SEQ ID NO: 109926 - DNA, 80 bp, synthetic construct
  source 1..80: mol_type = other DNA
tcaaaacaaagtggtgaaagtgctgcgaccaaccccgaaaggagctgtcatggacatcatatccagacgtgatcagcgag

SEQ ID NO: 109927 - DNA, 80 bp, synthetic construct
  source 1..80: mol_type = other DNA
aatggcggcgtgcccgctcgcagagtcgcgtcaggttcggagcctgggtgctggggtccaggtgccggccgccgtgaaag

SEQ ID NO: 109928 - DNA, 80 bp, synthetic construct
  source 1..80: mol_type = other DNA
cagccgcgctccgtgtggacgatcggggcgtcctcgggctcatatagtcccaggagccggcgtgaaggaggagcagcgga

SEQ ID NO: 109929 - DNA, 80 bp, synthetic construct
  source 1..80: mol_type = other DNA
aagatccttggttggaggtggcgctcggggccccaagcgtgactacggccctaccggcgcgacgccgagggcggtccctc

SEQ ID NO: 109930 - DNA, 80 bp, synthetic construct
  source 1..80: mol_type = other DNA
ctggagctcatcaaccgcacccgcacaaacaccacccctgtggaggagattattaacgcccacgatgccttggggataca

SEQ ID NO: 109931 - DNA, 80 bp, synthetic construct
  source 1..80: mol_type = other DNA
cagcatcactgtgccacatcccaacattgaagaggtggccctaggctctgaaggtgagatccccttctatggcaaggcta

SEQ ID NO: 109932 - DNA, 80 bp, synthetic construct
  source 1..80: mol_type = other DNA
ctacgtcctggggtctcagctgccctgcgagcccgaaccagacgtgacggtcctcacctccatgctgacagaccctgatc

SEQ ID NO: 109933 - DNA, 80 bp, synthetic construct
  source 1..80: mol_type = other DNA
tacattgattcccaactcactttcaattggaacatcccagatgtgctcaattccttgtcggttgcgtggatgatactaag

SEQ ID NO: 109934 - DNA, 80 bp, synthetic construct
  source 1..80: mol_type = other DNA
ggccacccccacgaagaagtcgaacgcggggtgcagctcaagagccaggttggcgttgtcgggctgcataaactgctccg

SEQ ID NO: 109935 - DNA, 80 bp, synthetic construct
  source 1..80: mol_type = other DNA
cgacgaggaagacttcagaacgatcccagcccagaggcaggcgccaaccaatacccaaggcgcgccaccagatgggccgt

SEQ ID NO: 109936 - DNA, 80 bp, synthetic construct
  source 1..80: mol_type = other DNA
gcactttgatgtggacatggtagatgctagtctcttcatggggggggatgtcactcggattgagtctcaagcaaaagtgc

SEQ ID NO: 109937 - DNA, 80 bp, synthetic construct
  source 1..80: mol_type = other DNA
agggtgtggaagagtcgggctcgcgcagtcagggcgtccctcatctcccgtggagggaaagcggccgtttgcggccgata

SEQ ID NO: 109938 - DNA, 80 bp, synthetic construct
  source 1..80: mol_type = other DNA
agctaccttcttcctgtgggcggcagaggttcctggaaccaaaatagcagggaccctgctgatcgccctgctgctgatgg

SEQ ID NO: 109939 - DNA, 80 bp, synthetic construct
  source 1..80: mol_type = other DNA
tctatgaagatcgtgggcccccggacctgcagcaacgtgtggtttggcacctttcccatcaatgcgaccacgactggtcc

SEQ ID NO: 109940 - DNA, 80 bp, synthetic construct
  source 1..80: mol_type = other DNA
gtcatattcgtccatgcccccccttgagggagagccgggcgacccggacctggatgctgactcttggtccactgtcagtg

SEQ ID NO: 109941 - DNA, 80 bp, synthetic construct
  source 1..80: mol_type = other DNA
gataactgaggactgccccatcccatgctccggatcctggctccgcgacgtgtgggactgggtttgcaccatcttgacag

SEQ ID NO: 109942 - DNA, 80 bp, synthetic construct
  source 1..80: mol_type = other DNA
gataccggtcacctctaacatcgctgtgagccaacccggcgcgctcaccaagggcttgcggacgcatattgacatcatcg

SEQ ID NO: 109943 - DNA, 80 bp, synthetic construct
  source 1..80: mol_type = other DNA
gccgacctcatggggtacatacccgtccttggcgcccccctgggtggcgtcgctagggccatcgcacatggtgtgagggt

SEQ ID NO: 109944 - DNA, 80 bp, synthetic construct
  source 1..80: mol_type = other DNA
tactctcctgccttactgtgcccgcttcagcacaccaggtgtggaatacgtcgggcctctacattctgaccaatgactgt

SEQ ID NO: 109945 - DNA, 80 bp, synthetic construct
  source 1..80: mol_type = other DNA
tgatggcgtcgagtgacgcctctcaaggcacttccggtgcttctggcgccggacagttggttccagaggccaacgcacca

SEQ ID NO: 109946 - DNA, 80 bp, synthetic construct
  source 1..80: mol_type = other DNA
catggccaacgccatctgctccgctgtccctgtgaattgggtccctaccggaagaaccacgtggtccatccatgcaggag

SEQ ID NO: 109947 - DNA, 80 bp, synthetic construct
  source 1..80: mol_type = other DNA
tcggcagatcttttaacgcaacaggcagcgcccaacagaccaaactacattggctttagggataacttcattggcctgat

SEQ ID NO: 109948 - DNA, 80 bp, synthetic construct
  source 1..80: mol_type = other DNA
gcagcggcgtcaaaagtgaaggctaaattgctatccgtagaggaagcgtgcagcctgacgcccccacattcagccagatc

SEQ ID NO: 109949 - DNA, 80 bp, synthetic construct
  source 1..80: mol_type = other DNA
cgcacgcgccagcgaactttacgggacacaatccccgactgcgcgctgcggtcccagaccctggagagtctagacgcgcg

SEQ ID NO: 109950 - DNA, 80 bp, synthetic construct
  source 1..80: mol_type = other DNA
gcctgcgaggacgccggaaccgtgggcccgtcgtcctcgcccgcctcggcgaccggcggcccggccgggtcgggtggtgc

SEQ ID NO: 109951 - DNA, 80 bp, synthetic construct
  source 1..80: mol_type = other DNA
taaatttggaaactccagacactcatgtagtgtacaaacctggaacagaagacacaagttccgaagctaatttgggacaa

SEQ ID NO: 109952 - DNA, 80 bp, synthetic construct
  source 1..80: mol_type = other DNA
ggatgctcggcaacgcgcgccgccagggccatagggtcgatgtcaatgttggcctccgcgaccaggagagcggcgcgagg

SEQ ID NO: 109953 - DNA, 80 bp, synthetic construct
  source 1..80: mol_type = other DNA
acaaccttctgcgggtcacctgccagtcaaacgacctcatcagccgggacgaggccgtgcacacgacggcctcgtgttac

SEQ ID NO: 109954 - DNA, 80 bp, synthetic construct
  source 1..80: mol_type = other DNA
tgttgctggtgttggccttaccccagcgtgcctacgccctgggcactgatggacaggcgcaactgggtctagctctacta

SEQ ID NO: 109955 - DNA, 80 bp, synthetic construct
  source 1..80: mol_type = other DNA
gacatcctcacagcaaaaaacggattggataccattagcattgacaatcaagggcctcaatccaacagccatttttctaa

SEQ ID NO: 109956 - DNA, 80 bp, synthetic construct
  source 1..80: mol_type = other DNA
gatactctcctggcgaacttaatcgagtggcatcatgcctcaggaagcttggggctccaccattaagagcttggagacat

SEQ ID NO: 109957 - DNA, 80 bp, synthetic construct
  source 1..80: mol_type = other DNA
tgatttggaggttatcaccagtacctgggtcctggtggggggcgtcctggcggctctcgcagcatactgcttgacagtgg

SEQ ID NO: 109958 - DNA, 80 bp, synthetic construct
  source 1..80: mol_type = other DNA
ggaggaggcttgccagttaaccccaccccattctgcaagatctaaatatgggtttggggctaaggaggtccgcagcttgt

SEQ ID NO: 109959 - DNA, 80 bp, synthetic construct
  source 1..80: mol_type = other DNA
tggaacatacgtgagtgccatagcccagactgaaaaaagcattgaagacaacccagagattgaagatgacatctttcgaa

SEQ ID NO: 109960 - DNA, 80 bp, synthetic construct
  source 1..80: mol_type = other DNA
taaaggagcgagcgtctggggtgaaggctcgcatgctcaccatcgaggaagcgtgcaagcttgtccccccccactctgcc

SEQ ID NO: 109961 - DNA, 80 bp, synthetic construct
  source 1..80: mol_type = other DNA
gccgccccttgagggtgagcccggcgatcccgatcttgactctgggtcatggtccacagtcagcgaggatgaacccagtg

SEQ ID NO: 109962 - DNA, 80 bp, synthetic construct
  source 1..80: mol_type = other DNA
ttgtcccacagactgttttcggaaacatccagatgccacatatgcaaggtgtgggtcggggccctggctgacccccaggt

SEQ ID NO: 109963 - DNA, 80 bp, synthetic construct
  source 1..80: mol_type = other DNA
gcgcgagcggcgtgctcacaacaagtttggggaacaccctcacatgttatgtgaaggcgctagcagcctgtaaggcagcg

SEQ ID NO: 109964 - DNA, 80 bp, synthetic construct
  source 1..80: mol_type = other DNA
gggcaacatccccgccctcctgaatgtcaaggagtatctgaaggataaggaagaagctggcacagcagcaggaaaagaaa

SEQ ID NO: 109965 - DNA, 80 bp, synthetic construct
  source 1..80: mol_type = other DNA
gctcgatacaatttgcgaaatgaatttcctcttttaactacaaagcgtgttttttggagggccgtcgtggaagagttgtt

SEQ ID NO: 109966 - DNA, 80 bp, synthetic construct
  source 1..80: mol_type = other DNA
atattttatagccaggattgaggccatgatgcactgttacattccatctttgaacgttaggggtccccgggactccgtaa

SEQ ID NO: 109967 - DNA, 80 bp, synthetic construct
  source 1..80: mol_type = other DNA
gcagctcaaacagaaggctcttggcgctctgcaattcgctggtaaacaggcagaagttgccgcaccagttgttcaatcca

SEQ ID NO: 109968 - DNA, 80 bp, synthetic construct
  source 1..80: mol_type = other DNA
ggattgattgagcgcggattaattctctgtctaacacacccaggttttcatcatggacagctctttcaccattcacggcc

SEQ ID NO: 109969 - DNA, 80 bp, synthetic construct
  source 1..80: mol_type = other DNA
cattgggcccattatacttgatacaggctaccatcaccgccaccccctactttgtgcgtgcgcatgtactggtccgcctt

SEQ ID NO: 109970 - DNA, 80 bp, synthetic construct
  source 1..80: mol_type = other DNA
actcgtggaatttggaccaccacatgctgtgaaaatggatgttttcaatctgggggaccagactgctgtgctgctcaaat

SEQ ID NO: 109971 - DNA, 80 bp, synthetic construct
  source 1..80: mol_type = other DNA
aagggcagcggatggcggagatgctcaagtccaagatacaaggccttctacaacaggccacaagacaggcccaagacata

SEQ ID NO: 109972 - DNA, 80 bp, synthetic construct
  source 1..80: mol_type = other DNA
tgggcgtggtacgtgcggggtagagtggtacctgcctgcgcgtacggcctactccagatatggccgctcttgctgctggt

SEQ ID NO: 109973 - DNA, 80 bp, synthetic construct
  source 1..80: mol_type = other DNA
tggtacttttccattagcatagccatggcttccatgcctttttcccaagctgaaactaggggctggcttgccggattgcg

SEQ ID NO: 109974 - DNA, 80 bp, synthetic construct
  source 1..80: mol_type = other DNA
acaattgaaccaaaatgacaaatgggaagtggataatgcaatatcaaatcagaaccgcatatgcaagggcaatgtctatg

SEQ ID NO: 109975 - DNA, 80 bp, synthetic construct
  source 1..80: mol_type = other DNA
accttcaacgggctggcacaattggcaggaggtgcccttctgctcacaccacttcaatgaactaatgctaaaggatggga

SEQ ID NO: 109976 - DNA, 80 bp, synthetic construct
  source 1..80: mol_type = other DNA
ggtgctccaggctggcataacgagagtgccgtacttcgtgcgcgctcaagggctcattcgtgcatgcatgttagtgcgaa

SEQ ID NO: 109977 - DNA, 80 bp, synthetic construct
  source 1..80: mol_type = other DNA
cctccgagacaacgccgctatttaactccaccaaggcccgatccgcggcggagcaccgccttttttcgcccgaggcgtgg

SEQ ID NO: 109978 - DNA, 80 bp, synthetic construct
  source 1..80: mol_type = other DNA
cacgacggcgctggcaaaagggtctactatctgacccgtgatcctgagactcccctcgcgcgtgccgcttgggaaacagc

SEQ ID NO: 109979 - DNA, 80 bp, synthetic construct
  source 1..80: mol_type = other DNA
cccgctgtcaggctgggccgctaccggcctcagagacttggcggtggcagttgagcctgtagtattcacacccatggaga

SEQ ID NO: 109980 - DNA, 80 bp, synthetic construct
  source 1..80: mol_type = other DNA
accaattgcaaaccaaaatccaacaacttgtcaatagtgccgtggcgtctggagcgcaggccatgagagacttgggggtg

SEQ ID NO: 109981 - DNA, 80 bp, synthetic construct
  source 1..80: mol_type = other DNA
ttggaataagacatatgaaaatgtgcagtttgattcctcttttttaactttctcatatattgctcaagaatgaaagacca

SEQ ID NO: 109982 - DNA, 80 bp, synthetic construct
  source 1..80: mol_type = other DNA
tgggttttctttggcttttgtaattatggcctgctttatgtcaggtctgctggtaggggctctaatgtggtttttaaagt

SEQ ID NO: 109983 - DNA, 80 bp, synthetic construct
  source 1..80: mol_type = other DNA
ggaatagctcccccgacaggagggaggcgtcgaacggccgcccgaggatagctcgcacgaggaaggggtcctcgtcggtg

SEQ ID NO: 109984 - DNA, 80 bp, synthetic construct
  source 1..80: mol_type = other DNA
gggggtggtgataaactcacacacggcgtcctggccgtggtccatccctgcgcgccgcggcacctgggcgcacccgaaca

SEQ ID NO: 109985 - DNA, 80 bp, synthetic construct
  source 1..80: mol_type = other DNA
tttactttggactataaactgcgactgaacgttatgaacccaccccaagcccgcgtctcggaacagacaaaggacttgct

SEQ ID NO: 109986 - DNA, 80 bp, synthetic construct
  source 1..80: mol_type = other DNA
gcaatgcactatcaatgatgcctgaggcaatgacaatagtcatgctgtttatactggctggactactgacatcgggaatg

SEQ ID NO: 109987 - DNA, 80 bp, synthetic construct
  source 1..80: mol_type = other DNA
cctggaactaataacatcatgttcatccaacgtctcggtcgcgcacgacgcaacggggaaggtgtactacctgacccgag

SEQ ID NO: 109988 - DNA, 80 bp, synthetic construct
  source 1..80: mol_type = other DNA
gaccccgccaaaggcgggaagaagccagctcgcctcatcgtcttccctgacctcggcgtcagggtatgcgagaagatggc

SEQ ID NO: 109989 - DNA, 80 bp, synthetic construct
  source 1..80: mol_type = other DNA
tgggtgccgtggtgatcattggcttgacaatattcactctctcccccttttacaagacactgctagtgcagttgctgtgg

SEQ ID NO: 109990 - DNA, 80 bp, synthetic construct
  source 1..80: mol_type = other DNA
ggggacgtggtggtggtagctaccgatgcccttatgacggggttcactggtgatttcgactcagtggttgactgcaacgt

SEQ ID NO: 109991 - DNA, 80 bp, synthetic construct
  source 1..80: mol_type = other DNA
tgggaagatcaggcagaaatatcaggaagcagcccaatcctgtcaataacaatatcagaagatggcagcatgtcgataaa

SEQ ID NO: 109992 - DNA, 80 bp, synthetic construct
  source 1..80: mol_type = other DNA
caccagggaaatgagatagttgatgtcatgtgtcatgccactctaacgcatagactgatgtcaccaaaccgcgttcccaa

SEQ ID NO: 109993 - DNA, 80 bp, synthetic construct
  source 1..80: mol_type = other DNA
tggggcgccatattggggggcgccatattgaggggcgccatgttgagggaccgccgacccctacactggaaccgcccgcc

SEQ ID NO: 109994 - DNA, 80 bp, synthetic construct
  source 1..80: mol_type = other DNA
aactcctggttgggcaacattataatgttcgcccctacactgtgggtgaggatgatcctgatgactcacttcttctccat

SEQ ID NO: 109995 - DNA, 80 bp, synthetic construct
  source 1..80: mol_type = other DNA
aacactccccagtgaactcctggctcggcaacatcattatgtacgccccaaccctatgggtgaggatagtgatgatgacc

SEQ ID NO: 109996 - DNA, 80 bp, synthetic construct
  source 1..80: mol_type = other DNA
cgggactgccggcccaggaggccgcggtgcacactgagacgtggggacggactgatcggccgtgggcgaaaggtgatccg

SEQ ID NO: 109997 - DNA, 80 bp, synthetic construct
  source 1..80: mol_type = other DNA
gctcaaaatgtggcggtcaaagaaggtgcctatgggcttttcttacgacaccaggtgttttgattcaaccgtcactgagc

SEQ ID NO: 109998 - DNA, 80 bp, synthetic construct
  source 1..80: mol_type = other DNA
agaaagccacctacgagccagatgttgacctaggaagcggaacccgcaacattggaattgaaaatgagataccaaatcta

SEQ ID NO: 109999 - DNA, 80 bp, synthetic construct
  source 1..80: mol_type = other DNA
attccatcatgggacgtgcgggggccacgagactctgtaatcatcctcatgaccttactccatccccacttggtctttga

SEQ ID NO: 110000 - DNA, 80 bp, synthetic construct
  source 1..80: mol_type = other DNA
gtacagtacctctacgggctgaccccgtccattgtggcgtggtcgatcaagtgggagtacctcgtccttgcgtttctggt

SEQ ID NO: 110001 - DNA, 80 bp, synthetic construct
  source 1..80: mol_type = other DNA
cgggagggcggggacagggggtgtgtgtgggtaaaagcaacgtcggaaaatcaaaaccaatgccacaaacaggaaaaaaa

SEQ ID NO: 110002 - DNA, 80 bp, synthetic construct
  source 1..80: mol_type = other DNA
ggtcttcactggtctcacgcacatcgatgcccacttcctctcccagacgaagcaaggaggagagaactttgcgtatctaa

SEQ ID NO: 110003 - DNA, 80 bp, synthetic construct
  source 1..80: mol_type = other DNA
ccgccgccgccgcggccatctctagcatgaccagacccaggcgcggaaacgtgtactgggtgcgcgactccgtcacgggc

SEQ ID NO: 110004 - DNA, 80 bp, synthetic construct
  source 1..80: mol_type = other DNA
gtcaaagacattggccggcccgaaagggcccatttgccaaatgtacaccaacgtcgaccaagacctggtaggctggcctg

SEQ ID NO: 110005 - DNA, 80 bp, synthetic construct
  source 1..80: mol_type = other DNA
cgcctggacccgcgcccgcccgccgccacggtggtggagatggaagatgcaagtgcgcatcctccgcccaggggcgagaa

SEQ ID NO: 110006 - DNA, 80 bp, synthetic construct
  source 1..80: mol_type = other DNA
gtggacggacgaccggtcgcccctgcgaattccgccaccctcacctatgccaccgtgggatcatcgttggacactgccgc

SEQ ID NO: 110007 - DNA, 80 bp, synthetic construct
  source 1..80: mol_type = other DNA
tgatttccattatatcaccggggtaacacaggacaacatcaagtgcccctgccaggtccctgctcctgaatttttcactg

SEQ ID NO: 110008 - DNA, 80 bp, synthetic construct
  source 1..80: mol_type = other DNA
tattcacgcgtctaggccaggggctggaacaacgaaaatccagaatcggaacttcttttccattacagtaaactttaggc

SEQ ID NO: 110009 - DNA, 80 bp, synthetic construct
  source 1..80: mol_type = other DNA
tccgccagccaactgtcggctccgtcgttgaaggccacttgtcagtcgtatgggcctcatctggacgctgagctagtgga

SEQ ID NO: 110010 - DNA, 80 bp, synthetic construct
  source 1..80: mol_type = other DNA
cctgcctgtccaaggcgtacgggcaaatgtggctcctcaactacttccaccggagagatctccgcacccttggattcgcc

SEQ ID NO: 110011 - DNA, 80 bp, synthetic construct
  source 1..80: mol_type = other DNA
gcacacccacccgttgatggccagccgcacgacggcatccgccaaaaagctcatcgcctgggcggggctggtttttgttc

SEQ ID NO: 110012 - DNA, 80 bp, synthetic construct
  source 1..80: mol_type = other DNA
gacccggagtccgtagcaggcccctggcggccagccaggtcacggatgcgttgtgcagatgcgcgatgctcaggttcgtc

SEQ ID NO: 110013 - DNA, 80 bp, synthetic construct
  source 1..80: mol_type = other DNA
ggagagtggcgcggagatggcgtgatgcataccacatgcccctgcggagcagatctggcaggtcacatcaagaacggctc

SEQ ID NO: 110014 - DNA, 80 bp, synthetic construct
  source 1..80: mol_type = other DNA
caaaatacggttcaaaggcattacccgatattgtattgtagtacagggcaatgggaattgatgatcccaataaacggcat

SEQ ID NO: 110015 - DNA, 80 bp, synthetic construct
  source 1..80: mol_type = other DNA
cgctggttggcgcgaatactgtggtggttgcagtactttatagccagggctgaggccctggtacaggtctatgttccatc

SEQ ID NO: 110016 - DNA, 80 bp, synthetic construct
  source 1..80: mol_type = other DNA
ggagagaaattgtagacctgatgtgccatgccacttttactatgagactcctatcttccacaagagtccccaactacaac

SEQ ID NO: 110017 - DNA, 80 bp, synthetic construct
  source 1..80: mol_type = other DNA
tgttctactgacttttcatcatacgcatttacgcaccgggatttccacttacaggacaaaccccacgcaacatttgcgat

SEQ ID NO: 110018 - DNA, 80 bp, synthetic construct
  source 1..80: mol_type = other DNA
agcctggaccccacgttctcaatagagactacaactgtcccgcaggacgccgtttctaggagtcaaaggcggggcaggac

SEQ ID NO: 110019 - DNA, 80 bp, synthetic construct
  source 1..80: mol_type = other DNA
ctaccgcaccgggcatatgccatggacaacgagcaggcagcctccgttggggtagctgtcattggggtacttaccatctt

SEQ ID NO: 110020 - DNA, 80 bp, synthetic construct
  source 1..80: mol_type = other DNA
gcttgatgaagcctctgccagcgcagcgcttgccgagctagcccggaaaacattccagtccgaatcatcatcagggcagg

SEQ ID NO: 110021 - DNA, 80 bp, synthetic construct
  source 1..80: mol_type = other DNA
ggggggaaaagcagctatatgcggtaagtacctctttaactgggcggtgaagaccaaactaaaactcactccattggtct

SEQ ID NO: 110022 - DNA, 80 bp, synthetic construct
  source 1..80: mol_type = other DNA
atcacaccaatgctgagacatagcattgaaaattcctcagtgaatgtgtctctaacagccattgccaaccaagccacagt

SEQ ID NO: 110023 - DNA, 80 bp, synthetic construct
  source 1..80: mol_type = other DNA
cccagctaatcatagacatcttcgctggcggtcactggggtgtggccgccggccttctctactatagtatggttgccaac

SEQ ID NO: 110024 - DNA, 80 bp, synthetic construct
  source 1..80: mol_type = other DNA
aaacccccaggatgatttacccctaaatattgtatttccagagcccccgcgtcctccttctgttgttagctattttaagt

SEQ ID NO: 110025 - DNA, 80 bp, synthetic construct
  source 1..80: mol_type = other DNA
tgttttgaactggatttatgaatctttattgatttttacaccagcacgggtagtcagtctcccaccaccagcccatttca

SEQ ID NO: 110026 - DNA, 80 bp, synthetic construct
  source 1..80: mol_type = other DNA
tggagggggggctggttggatgtttttgcacaaaaagacgcggccctcgggctttggtgtttttggcaccttgccgcccg

SEQ ID NO: 110027 - DNA, 80 bp, synthetic construct
  source 1..80: mol_type = other DNA
gcggtttcaaacatgtgaccgtgtagcctttaactgcgcaatgcagagcttgggccctgggcttattggcatgagtggtg

SEQ ID NO: 110028 - DNA, 80 bp, synthetic construct
  source 1..80: mol_type = other DNA
tctgatgtcccgcccgcgtttggaaactgtatattggcaggagttgcaggatgaatttcagcggggtgatatgcatttac

SEQ ID NO: 110029 - DNA, 80 bp, synthetic construct
  source 1..80: mol_type = other DNA
ttccatgactgaggtagaggatgaccgtgagccttccataccatcagagtacctgatcaggaggagaaagtttccaccgg

SEQ ID NO: 110030 - DNA, 80 bp, synthetic construct
  source 1..80: mol_type = other DNA
agattgccgagcagtttaggcaaaaggccctgggactactccaggcaggggcaaaacaggcggaggaactgaagcctgct

SEQ ID NO: 110031 - DNA, 80 bp, synthetic construct
  source 1..80: mol_type = other DNA
tcccccatggagaagaagatcatagtttggggggcggagaccactgcttgtggcgacattctttgtggcctgcctgtctc

SEQ ID NO: 110032 - DNA, 80 bp, synthetic construct
  source 1..80: mol_type = other DNA
ggctgtggcattatccatgcaccgtcaactacaccattcacaaggtccggatgtttgtggggggggtggagcacaggttc

SEQ ID NO: 110033 - DNA, 80 bp, synthetic construct
  source 1..80: mol_type = other DNA
tgcccattgccatctaataaggcccctccaataccacctccacggagaaagaagacggttgtcctgactgagtccacagt

SEQ ID NO: 110034 - DNA, 80 bp, synthetic construct
  source 1..80: mol_type = other DNA
aaagatggatgctggtatggaatggaaatccggccggtgaaggaggaggaagcaaagcttgtgaaatctcgagtgacagc

SEQ ID NO: 110035 - DNA, 80 bp, synthetic construct
  source 1..80: mol_type = other DNA
taagaccaaacgtcttgcgggggaaccggggcgccagagacagaaatcattttccctgccgcgatccagaaccccgataa

SEQ ID NO: 110036 - DNA, 80 bp, synthetic construct
  source 1..80: mol_type = other DNA
gcgcatgcgcgccccgcggtgcgcttcccaggactcgctgaccgcggcgcggcgggcgtccgcggcggcgcgcagccgtg

SEQ ID NO: 110037 - DNA, 80 bp, synthetic construct
  source 1..80: mol_type = other DNA
ctcgagcatggctacctaggaggagatgtgctgctgaaacacttgcagcgccagtccctcatcctccgggacgccctggc

SEQ ID NO: 110038 - DNA, 80 bp, synthetic construct
  source 1..80: mol_type = other DNA
tgatgtcagtccgcttctgttttcgacgaccgagcttgcaattctcccctgctcttttaccactatgccagccttgtcca

SEQ ID NO: 110039 - DNA, 80 bp, synthetic construct
  source 1..80: mol_type = other DNA
actactacgacggcatcatcgagctgtttcactaccccctggggaaccactgcccccgcgttgtacacgtggtcacactg

SEQ ID NO: 110040 - DNA, 80 bp, synthetic construct
  source 1..80: mol_type = other DNA
gctggggtaatggctgtggactattcggaaagggaagtctattgacgtgtgccaagttcaagtgtgtgacaaaactagag

SEQ ID NO: 110041 - DNA, 80 bp, synthetic construct
  source 1..80: mol_type = other DNA
agggacgtgggagtgggagaggataaaaggcggcgcaaaaagcagtaaccaggtccgcccagattctgcgggcataggat

SEQ ID NO: 110042 - DNA, 80 bp, synthetic construct
  source 1..80: mol_type = other DNA
agggtgacaacgcgcgcctagccgtgctgaaacgcagcatcgaggtcacccactttgcctacccggcacttaacctaccc

SEQ ID NO: 110043 - DNA, 80 bp, synthetic construct
  source 1..80: mol_type = other DNA
acctccccgaatcccacctgaacgagctggcggccaggggcctgcccacgcccgtggttctggaattcgacagcgaattc

SEQ ID NO: 110044 - DNA, 80 bp, synthetic construct
  source 1..80: mol_type = other DNA
cgtatggagaaattgagaattaagggaatgtcatacacgatgtgttcaggaaagttctcaattgacaaagagatggcaga

SEQ ID NO: 110045 - DNA, 80 bp, synthetic construct
  source 1..80: mol_type = other DNA
tgatcattatggatgaagcccattttttggatccagctagcatagccgctagaggttgggcagcgcacagagctagggca

SEQ ID NO: 110046 - DNA, 80 bp, synthetic construct
  source 1..80: mol_type = other DNA
gcggagttcctggcatgctgaaaaaagggaaggacatggaggtctcttggaggagctggggccactcaatgatctggagc

SEQ ID NO: 110047 - DNA, 80 bp, synthetic construct
  source 1..80: mol_type = other DNA
gatgttcgcgatagttggaggcctagccgagctagacattgactcaatggcgattcccatgaccatagctggactcatgt

SEQ ID NO: 110048 - DNA, 80 bp, synthetic construct
  source 1..80: mol_type = other DNA
catctctaggtgcagcggtcattgtcatcctgaccctcgtcactctcactccacattataaggctctgctcactgggtgc

SEQ ID NO: 110049 - DNA, 80 bp, synthetic construct
  source 1..80: mol_type = other DNA
cccaaccagaatacgacctggagcgaataacatcttgttcctccaacgtgtcggtcgcgcacgatggcactggcaagagg

SEQ ID NO: 110050 - DNA, 80 bp, synthetic construct
  source 1..80: mol_type = other DNA
tttccggagccggcggtggcgaccctgacgaggaggccatgctggatttggaagagggcgagggtttggctcgcctggga

SEQ ID NO: 110051 - DNA, 80 bp, synthetic construct
  source 1..80: mol_type = other DNA
tctcgaattttgggagggcgtcttcacgggtctcacccatatagacgcccacttcctatcccagacaaagcaaagtggtg

SEQ ID NO: 110052 - DNA, 80 bp, synthetic construct
  source 1..80: mol_type = other DNA
tgaaggaaaagcgatccacaacgcttgggtatgaatgtggtacgggcttgcatttactggctccatctatgggtacattt

SEQ ID NO: 110053 - DNA, 80 bp, synthetic construct
  source 1..80: mol_type = other DNA
aagctgctatttgatgccaagggacgtttattggaaggatctagtttagataaagcttattggaactatagaagcgttaa

SEQ ID NO: 110054 - DNA, 80 bp, synthetic construct
  source 1..80: mol_type = other DNA
cacagtttcaggggtggtctttctttttctgatgagtgggaaaggaattggtaagatgtcaatgggacttggatgcatca

SEQ ID NO: 110055 - DNA, 80 bp, synthetic construct
  source 1..80: mol_type = other DNA
ttcggcagcgtgtcctttggcgcgaagcttgcccttggaaatttgctgacagctgggacagcggaggcattttagggcgt

SEQ ID NO: 110056 - DNA, 80 bp, synthetic construct
  source 1..80: mol_type = other DNA
agcataataactctggctttgtgggttacatggctcctaccatgcgtcagggtcaagcgtaccctgctaactacccatac

SEQ ID NO: 110057 - DNA, 80 bp, synthetic construct
  source 1..80: mol_type = other DNA
cccatcagctctctcagcaacaccatgctacggcaccataacatgatatacagcacatcgtctaagtctgcaactcagcg

SEQ ID NO: 110058 - DNA, 80 bp, synthetic construct
  source 1..80: mol_type = other DNA
atactccaggcttcgctcttgcgcatcccttactttgtgagggcacacgcgctaatcaagatctgcagcttggtgcgagg

SEQ ID NO: 110059 - DNA, 80 bp, synthetic construct
  source 1..80: mol_type = other DNA
ttctgtttaacatcttggcgtggtgggtagctgcccagctcgctccccccagtgctgcttcggctttcgtgggcgccggc

SEQ ID NO: 110060 - DNA, 80 bp, synthetic construct
  source 1..80: mol_type = other DNA
caccaccacccagaccttcctcgccacgacccttaatggggtgctttggactgtgtatcacggtgccggctctaagaccc

SEQ ID NO: 110061 - DNA, 80 bp, synthetic construct
  source 1..80: mol_type = other DNA
cggagtttacttgttgccgcgcaggggccccaggttgggtgtgcgcgcgactcggaagacttcggagcggtcgcaacgaa

SEQ ID NO: 110062 - DNA, 80 bp, synthetic construct
  source 1..80: mol_type = other DNA
ctggggaggtccaagtcctatccacagttactcaatcttttcttggaacatccatatcaggggtcctttggacagtctac

SEQ ID NO: 110063 - DNA, 80 bp, synthetic construct
  source 1..80: mol_type = other DNA
cccgagcggtcagggccaagcttattgcccaaggagggaaagccgcagtatgtggcaagtacctcttcaattgggcgata

SEQ ID NO: 110064 - DNA, 80 bp, synthetic construct
  source 1..80: mol_type = other DNA
gcccgtctctgcgcgattaggccgtgaggtattattgggacctgctgatgactatcgggagatgggttggcgcctgttgg

SEQ ID NO: 110065 - DNA, 80 bp, synthetic construct
  source 1..80: mol_type = other DNA
gtggggatgaattcctacgcgataggatctcaactcccttgtgaacctgaaccagatgtctctgttctgacctcgatgtt

SEQ ID NO: 110066 - DNA, 80 bp, synthetic construct
  source 1..80: mol_type = other DNA
gaggcacaagcccaggtatggaaatctggaaaaggaaaaattgctataatgtttttctttccacagcatcatgaatacag

SEQ ID NO: 110067 - DNA, 80 bp, synthetic construct
  source 1..80: mol_type = other DNA
cccaacctacacgtggggtacgaatgagacagatgtgttcctgctgaagtccttgcgacctcccagcggtcggtggttcg

SEQ ID NO: 110068 - DNA, 80 bp, synthetic construct
  source 1..80: mol_type = other DNA
ctttgaaaggtgtaccttgggtatcctgtctgagggtaactccagggtgcgccacaatgtggcctccgactgtggttgct

SEQ ID NO: 110069 - DNA, 80 bp, synthetic construct
  source 1..80: mol_type = other DNA
ggtatctttcaaaaaataaatctggggtccataaacaacaaaatatgttatcacatcgaaatatttcatcacgaaccaac

SEQ ID NO: 110070 - DNA, 80 bp, synthetic construct
  source 1..80: mol_type = other DNA
aaagtgcaaatcacgcaggtgacagcgttccccgccgctgtgctggtggaaacagacagccagatcaaaacccactctat

SEQ ID NO: 110071 - DNA, 80 bp, synthetic construct
  source 1..80: mol_type = other DNA
tcgtcgattttagcctagaccccaccttctctattgagattacaacagtcccccaggacgcggtggctcgcagtcagcgg

SEQ ID NO: 110072 - DNA, 80 bp, synthetic construct
  source 1..80: mol_type = other DNA
tacgctgcacgggccaacaccccttctgtataggctgggagccgtccaaaatgaggtcattctcacacaccccgtaacca

SEQ ID NO: 110073 - DNA, 80 bp, synthetic construct
  source 1..80: mol_type = other DNA
ctacaggctgtggcattacccatgcaccttcaactataccatctttaagataaggatgtttgtggggggaattgaacaca

SEQ ID NO: 110074 - DNA, 80 bp, synthetic construct
  source 1..80: mol_type = other DNA
gcgtcttgtttttatttaataggcataaacacggaatccggtatacatgaactgccaatatacacggacataattaatgc

SEQ ID NO: 110075 - DNA, 80 bp, synthetic construct
  source 1..80: mol_type = other DNA
gttcatggtcccgaagacgccgatggctccgcgggcggcgctggcgaacttgggatggcgcgcccggaggcgcatgagcg

SEQ ID NO: 110076 - DNA, 80 bp, synthetic construct
  source 1..80: mol_type = other DNA
tgacgtcatccccgcgaggcgtagggaggacacgcgggctggccttctcagtccaagaccgctgagcacgctcaagggtt

SEQ ID NO: 110077 - DNA, 80 bp, synthetic construct
  source 1..80: mol_type = other DNA
cctccggtgtggggagcagacacccggcgaagatgcgccgctcggggacgcccgcgttggcgccgcggatgaggttggcc

SEQ ID NO: 110078 - DNA, 80 bp, synthetic construct
  source 1..80: mol_type = other DNA
tgaaaaaaccaaaacaagaaatccggaggatccggattgtcaatatgctaaaacgcggagtagcccgtgtgagccccttt

SEQ ID NO: 110079 - DNA, 80 bp, synthetic construct
  source 1..80: mol_type = other DNA
ctctcttgtcttgtatgtctgtaccagtgtccggtgtagaggttaagaacaccagtaagctctacattgccaccaatgac

SEQ ID NO: 110080 - DNA, 80 bp, synthetic construct
  source 1..80: mol_type = other DNA
agcaaccaccaccgtcggccacggagtggcccgcactactgccggtattaccggccttttctcccccggtgccagccaga

SEQ ID NO: 110081 - DNA, 80 bp, synthetic construct
  source 1..80: mol_type = other DNA
cacacagaacaaaacacactccgcagacgaacacaatatttatacactccctttgccgtcaaaagtccacaaaaactcca

SEQ ID NO: 110082 - DNA, 80 bp, synthetic construct
  source 1..80: mol_type = other DNA
accgatgctgttactaatggtctaggttttatgcctaatgtgagtgcttaccctagaccaaatgccagtgaggctaaaag

SEQ ID NO: 110083 - DNA, 80 bp, synthetic construct
  source 1..80: mol_type = other DNA
cagggccgcgccgcccatgatcacgcacaacccccaaaacacgggtggcgacaacggcaggcgatcccgtttgatgttca

SEQ ID NO: 110084 - DNA, 80 bp, synthetic construct
  source 1..80: mol_type = other DNA
catccgtggtacaccatcttgcttgcttaaacactcgcaacgcactggcataagaacgcgtttctgcccctgtcgcatgt

SEQ ID NO: 110085 - DNA, 80 bp, synthetic construct
  source 1..80: mol_type = other DNA
ctcagtcctcttactgattgggcctgtgacggacttcgagatcttgccgttgcagtggagccagttgttttctctcctat

SEQ ID NO: 110086 - DNA, 80 bp, synthetic construct
  source 1..80: mol_type = other DNA
cagttcaagcaaaagattctaggcttgctccagaacactgcaaagcaggctgaagagctcaagccggcggttcagtcggc

SEQ ID NO: 110087 - DNA, 80 bp, synthetic construct
  source 1..80: mol_type = other DNA
cccggttgctctttttctatcttcatcttggcgcttctctcgtgcctgaccgtcccggcctcagctcagcattatcggaa

SEQ ID NO: 110088 - DNA, 80 bp, synthetic construct
  source 1..80: mol_type = other DNA
gaaaggaagctctattggccaaatgtttgagacaacaatgagaggagcgaagagaatggccattttaggtgacacagctt

SEQ ID NO: 110089 - DNA, 80 bp, synthetic construct
  source 1..80: mol_type = other DNA
gtccatggggtcgaaagcgtacttggcccggcatttgacctcgtaaaaggccagggaggtcttggggactggagccaggt

SEQ ID NO: 110090 - DNA, 80 bp, synthetic construct
  source 1..80: mol_type = other DNA
atcactgttaattgccataaccatgcaatctaaaagttttaaaactgcaagaagacctttcgtttgattttccgtaggta

SEQ ID NO: 110091 - DNA, 80 bp, synthetic construct
  source 1..80: mol_type = other DNA
gtatgcgccagggcgaaagccccccccccctcatgggacgtcatgtggaagtgtctcctacgcctcaagcccacgctcac

SEQ ID NO: 110092 - DNA, 80 bp, synthetic construct
  source 1..80: mol_type = other DNA
cagataatccaggcgtgcccagaggggaccgatggccagaggggcgcggacgccgcgcagcaacccgcgcaggtggcgct

SEQ ID NO: 110093 - DNA, 80 bp, synthetic construct
  source 1..80: mol_type = other DNA
cgaggggatcccccccctctctggccagctcttcggccagccagctgtccgcaccatctctcaaggcaacttgcactacc

SEQ ID NO: 110094 - DNA, 80 bp, synthetic construct
  source 1..80: mol_type = other DNA
aggccgagctcgcgctggccgggcgcacctgggcccccggcgtggaggcgctcacacacacgctgctctccaccgccgtc

SEQ ID NO: 110095 - DNA, 80 bp, synthetic construct
  source 1..80: mol_type = other DNA
gtcttcgtcaagtgctgaggttgaagagcataggacgattcgggtccttgaaatggttgaggactggctgcaccgagggc

SEQ ID NO: 110096 - DNA, 80 bp, synthetic construct
  source 1..80: mol_type = other DNA
tgttggaccgagattttgtggaggccatcgggagctacgtaaaaaacttcctgttgatcgatacgggagtgtacgcccac

SEQ ID NO: 110097 - DNA, 80 bp, synthetic construct
  source 1..80: mol_type = other DNA
ctggtgtctcaggtgccttagtggcttttaagatcatgggaggggaattccccactgctgaggacatggtcaacctgctg

SEQ ID NO: 110098 - DNA, 80 bp, synthetic construct
  source 1..80: mol_type = other DNA
aaaaccttccttatctggtggcctaccaagccaccgtgtgcgctagagctcaggcccttcctccatcatgggaccagatg

SEQ ID NO: 110099 - DNA, 80 bp, synthetic construct
  source 1..80: mol_type = other DNA
ttacacctccccggttgtgtcccatgtgtcaaatccgggaacacgtcatcgtgctggtacccagtgtcgcctacgttggc

SEQ ID NO: 110100 - DNA, 80 bp, synthetic construct
  source 1..80: mol_type = other DNA
accatcttcacgctcacccccgcctacaagaccttgctagcgcagttcctgtggtggacccagtatttcatagcacggct

SEQ ID NO: 110101 - DNA, 80 bp, synthetic construct
  source 1..80: mol_type = other DNA
gcttttggcgttgcttgggcctgcttacctcttaagggccgctttgacacatgtgccgtacttcgtcagagctcacgctc

SEQ ID NO: 110102 - DNA, 80 bp, synthetic construct
  source 1..80: mol_type = other DNA
tccagacggttgtaaagcgagccaaagtgcaagtcacgaagatcacacctctccccaccgctgcgttggtgaaaaattac

SEQ ID NO: 110103 - DNA, 80 bp, synthetic construct
  source 1..80: mol_type = other DNA
aaacttcccatcagcccgctcagcaactccctactacgacaccataatcttgtgtattccaccagctcgcgtagtgccgg

SEQ ID NO: 110104 - DNA, 80 bp, synthetic construct
  source 1..80: mol_type = other DNA
agaaaaacgtcccagaatgtgctctcgagaggaattcataagaaaggtcaacagcaatgcagctttgggtgccatgtttg

SEQ ID NO: 110105 - DNA, 80 bp, synthetic construct
  source 1..80: mol_type = other DNA
cggacatgtggatctgttggttggtgcggccacgctttgctcggctctttatgttggcgacctgtgtggagctgtgttcc

SEQ ID NO: 110106 - DNA, 80 bp, synthetic construct
  source 1..80: mol_type = other DNA
tccaaaaccttagctggccccaaaggccctgtttgccaaatgtacactaatgtagaccaggacatggtgggttggccggc

SEQ ID NO: 110107 - DNA, 80 bp, synthetic construct
  source 1..80: mol_type = other DNA
ttacagtatggtgatcagccatgattcctaggttcttcctatttaacatcctcttctgtctcttcaacatctgcgctgcc

SEQ ID NO: 110108 - DNA, 80 bp, synthetic construct
  source 1..80: mol_type = other DNA
cgaccggcctaatccaccttcaccagaatatcgtggacgtgcaatacctctacggaatttccacggcaattgtgtcgtgg

SEQ ID NO: 110109 - DNA, 80 bp, synthetic construct
  source 1..80: mol_type = other DNA
gggtgtggtggcggcgaatgaaatgggccttttggaaaaaaccaagtctgacattgccaagttgtttggcagccaacctg

SEQ ID NO: 110110 - DNA, 80 bp, synthetic construct
  source 1..80: mol_type = other DNA
tactctaagtgcaaatttgtggagctatggaatttcttagactgctatgatgctaaaatggatatgccatcctattactt

SEQ ID NO: 110111 - DNA, 80 bp, synthetic construct
  source 1..80: mol_type = other DNA
tcaagtccttggcgccatgcacctgtggcgcctcggacttattcttggttacccgccgcgcggatgtcatccctgtgcgg

SEQ ID NO: 110112 - DNA, 80 bp, synthetic construct
  source 1..80: mol_type = other DNA
tagcaggcctttccactttgcctggcaaccccgctgtggcgtctcttatggcgttcaccgcttctgtcaccagtcccctg

SEQ ID NO: 110113 - DNA, 80 bp, synthetic construct
  source 1..80: mol_type = other DNA
aacccaggttggagtagggatacacatggaaggtgtattccacacaatgtggcatgtcacaagaggatcggtgatctgcc

SEQ ID NO: 110114 - DNA, 80 bp, synthetic construct
  source 1..80: mol_type = other DNA
gtccgggagggccgttaaccacatcaagtccgtgtggaaggacctcctggaagacccacaaacaccaattcccacaacca

SEQ ID NO: 110115 - DNA, 80 bp, synthetic construct
  source 1..80: mol_type = other DNA
gcggccctatgctgtgtccctctggtcatgtcgcagggattttccgtgcggcagtatgtaccaggggtgtggctaaatca

SEQ ID NO: 110116 - DNA, 80 bp, synthetic construct
  source 1..80: mol_type = other DNA
tacattggtttggcaaaacggtcttctcgaaaacccggatccaggccattgtggacaaatctatatgagttgccaattga

SEQ ID NO: 110117 - DNA, 80 bp, synthetic construct
  source 1..80: mol_type = other DNA
cagttctgtgatggaaatacagttaagaatcctcaaataagacatgagtgtaatgagcaaaaccttacactaattcatgt

SEQ ID NO: 110118 - DNA, 80 bp, synthetic construct
  source 1..80: mol_type = other DNA
tacccacgccaaagcctgtgaccttgacatggtggacgccaacctcttctgctggtgtagcatgggcggtgacataactc

SEQ ID NO: 110119 - DNA, 80 bp, synthetic construct
  source 1..80: mol_type = other DNA
gcaatcctggactttattgaccacagcggacgtcacgtgcgggtcgcagcaggtgtactggtctttacccgacatgatgc

SEQ ID NO: 110120 - DNA, 80 bp, synthetic construct
  source 1..80: mol_type = other DNA
agggagtactttaatgctccaaagctagcacctaaaaactgcatgctggaataagctctttttgtatctccggtaatgcc

SEQ ID NO: 110121 - DNA, 80 bp, synthetic construct
  source 1..80: mol_type = other DNA
catggcacttgctgctctggcagaaagatccttcccgtcgacgaaaccagaggggacaggcacttcctcctcaggagttg

SEQ ID NO: 110122 - DNA, 80 bp, synthetic construct
  source 1..80: mol_type = other DNA
atggatgctgggtagcaacaacacacagagagtggtctttgtgatcatgctgatgttgattgccccggcatacagcttta

SEQ ID NO: 110123 - DNA, 80 bp, synthetic construct
  source 1..80: mol_type = other DNA
tcactttttcacctcggcgccattggacaacacagagctgcaattgttccatctacccaggccctgtaacgggtcaccgt

SEQ ID NO: 110124 - DNA, 80 bp, synthetic construct
  source 1..80: mol_type = other DNA
caatcttgatccagatatgattctgtatgccgaaaatgtaaatctagaaacacctgacacacatgtagtttataaaccag

SEQ ID NO: 110125 - DNA, 80 bp, synthetic construct
  source 1..80: mol_type = other DNA
acggtaggggtaggcatcttcctcctgccagctcggtgagctggtaggataacactccatttccttttgttttttcccct

SEQ ID NO: 110126 - DNA, 80 bp, synthetic construct
  source 1..80: mol_type = other DNA
ggaaattggtggaagaagaacgctccagacacctgaaaggccagtgccggcattgtgtgtacaacatgatgggaaagaga

SEQ ID NO: 110127 - DNA, 80 bp, synthetic construct
  source 1..80: mol_type = other DNA
ggtgttagagtcctggaagacggcgtgaattacgcaacagggaacctccccggttgctctttttctatcttcttgctcgc

SEQ ID NO: 110128 - DNA, 80 bp, synthetic construct
  source 1..80: mol_type = other DNA
cctatgacatcatcatatgcgatgaatgccacgctgtggatgctacctccattctcggcatcggaacggtccttgatcaa

SEQ ID NO: 110129 - DNA, 80 bp, synthetic construct
  source 1..80: mol_type = other DNA
aattcatcagggtgtgtcgagcgaatgtctgcttgcagtccccttgaccgtttcgcgcaagggtgtggtccattggggcc

SEQ ID NO: 110130 - DNA, 80 bp, synthetic construct
  source 1..80: mol_type = other DNA
gcggcagcgtcatcggcggtaacgcgaacccccccgttcccgttttaatatctatatagtttggtccccctctatcccgc

SEQ ID NO: 110131 - DNA, 80 bp, synthetic construct
  source 1..80: mol_type = other DNA
ttataactaacaatgccgtagcagttaatcctaccggagcgttaggctttaacaacacaggagctttacaattaaacgct

SEQ ID NO: 110132 - DNA, 80 bp, synthetic construct
  source 1..80: mol_type = other DNA
ctcctattcctgctgctcgcagatgctcgcatttgcgcctgtttgtggatgatactactcgtatcccaagcggaggcagc

SEQ ID NO: 110133 - DNA, 80 bp, synthetic construct
  source 1..80: mol_type = other DNA
gctcatagagggaaacaccagccttctttggaatggacccatggctgtctccatgacaggagtcatgagggggaatcact

SEQ ID NO: 110134 - DNA, 80 bp, synthetic construct
  source 1..80: mol_type = other DNA
agagttgccaattggacccaaaggccaggaaggccataacatccctcaccgacaggctgtattgcggtggccccatgttc

SEQ ID NO: 110135 - DNA, 80 bp, synthetic construct
  source 1..80: mol_type = other DNA
tactttttgatttgcagatagggactcatttgaatcctttcctttcccacctctctcagatgaataatggttcgcttggt

SEQ ID NO: 110136 - DNA, 80 bp, synthetic construct
  source 1..80: mol_type = other DNA
tcgcagaaccatgaatactttgaccggtgtcgtgctgctctctcttcttgtagcttttagtcaggcaggatttcatacta

SEQ ID NO: 110137 - DNA, 80 bp, synthetic construct
  source 1..80: mol_type = other DNA
gctgccttgtctatcattcagagggggcggtggcaggactggaagaaccatgatttttttactccaaacggtcacgcagc

SEQ ID NO: 110138 - DNA, 80 bp, synthetic construct
  source 1..80: mol_type = other DNA
cccgcgagatcactagccgagtagtgttgggtcgcgaaaggccttgtggtactgcctgatagggtgcttgcgagtgcccc

SEQ ID NO: 110139 - DNA, 80 bp, synthetic construct
  source 1..80: mol_type = other DNA
ttcggcccccaccgcgtgcggcacgcacgaggacgagtccgcgtgctttattggcgttccaagcgttgccctccagtttc

SEQ ID NO: 110140 - DNA, 80 bp, synthetic construct
  source 1..80: mol_type = other DNA
ggcggactcagccgcgtgtggggacatcatctcggggttgcccgtctccgcccgcaggtgccgggaaatactgctcggac

SEQ ID NO: 110141 - DNA, 80 bp, synthetic construct
  source 1..80: mol_type = other DNA
gcaggtgctggacgcacactatgactcagtcttgcaggacattaagctggccgcctctaaggttagtgcgaggctcctct

SEQ ID NO: 110142 - DNA, 80 bp, synthetic construct
  source 1..80: mol_type = other DNA
gaggaaacgcgcgcccccatcccctcccgatgcccgacctgttaataataagagtaataaaatcgtttgttattatgcat

SEQ ID NO: 110143 - DNA, 80 bp, synthetic construct
  source 1..80: mol_type = other DNA
ctgccaacactaacgtttccaatgctgtagaatttatgcctagctctaaaaggtatcccaatgagaaaggttctgaagtt

SEQ ID NO: 110144 - DNA, 80 bp, synthetic construct
  source 1..80: mol_type = other DNA
tcgtcaatgcccatggcatcggtaaacatctgttcaaactcaaaatcgtccacgtccaaagccccatacgagacggggtc

SEQ ID NO: 110145 - DNA, 80 bp, synthetic construct
  source 1..80: mol_type = other DNA
gcgggtgaagccaaaagtcaaatgttaagtcagacatatttacagggagatacaactaaacctattacaatgaaagttgt

SEQ ID NO: 110146 - DNA, 80 bp, synthetic construct
  source 1..80: mol_type = other DNA
atggagcttgagagaaacagcctgtctgggcaaagcttacgcccagatgtggtcgcttatgtacttccatagaagggacc

SEQ ID NO: 110147 - DNA, 80 bp, synthetic construct
  source 1..80: mol_type = other DNA
tgatattgctcacttgcctgtttcatccatctctcggctttgaggtcaccaagatcctgctggcactaataggcccgctc

SEQ ID NO: 110148 - DNA, 80 bp, synthetic construct
  source 1..80: mol_type = other DNA
gctctggagtggtgttgtaaataatccaatcgtagcagggtttttgagcatgaaactggaagatgtccttaaggaggagg

SEQ ID NO: 110149 - DNA, 80 bp, synthetic construct
  source 1..80: mol_type = other DNA
agctgactatcatgacaggagacattaaaggaatcatgcaggcaggaaaacgatccctgcggcctcaacccactgagctg

SEQ ID NO: 110150 - DNA, 80 bp, synthetic construct
  source 1..80: mol_type = other DNA
cctgctgcccgccatactgtcccccggggccttggttgtcggcgtgatatgcgcagccgtgttgcgccggcacgtaggac

SEQ ID NO: 110151 - DNA, 80 bp, synthetic construct
  source 1..80: mol_type = other DNA
cctggagccggatggaacgtgcgagacaccgcttgcttggcaaaggcctatgcacagatgtggctcctgctctacttcca

SEQ ID NO: 110152 - DNA, 80 bp, synthetic construct
  source 1..80: mol_type = other DNA
tctattcttccagagccatataaaaatgcaattggatttatgcctaatttactagcttatgctaaagctacaactgatca

SEQ ID NO: 110153 - DNA, 80 bp, synthetic construct
  source 1..80: mol_type = other DNA
tggatgaatagcactgggttcaccaagacgtgtgggggccccccgtgtaacatcggtgggaacggcaacaacactttgac

SEQ ID NO: 110154 - DNA, 80 bp, synthetic construct
  source 1..80: mol_type = other DNA
aaaacttatgtcaaaggagcggtctgtgtaccgccattattttaattacatcgcaaggtcccccccagaagaactagcta

SEQ ID NO: 110155 - DNA, 80 bp, synthetic construct
  source 1..80: mol_type = other DNA
gtccaccatagcaacaagtctgggctgtactatctcacaaatgactgccccaatgccagtatcgtgtaccaggcgcatga

SEQ ID NO: 110156 - DNA, 80 bp, synthetic construct
  source 1..80: mol_type = other DNA
ggctttattacctttgatgcgtaatttgaccgtggaaaaaacttttacatccagcctggcggtggtttctggagcacgca

SEQ ID NO: 110157 - DNA, 80 bp, synthetic construct
  source 1..80: mol_type = other DNA
agaaccggcttgagatggccatgtggagacgtgtggaggctgtgctcaacttggcccttgcagagagtgatgccaacctc

SEQ ID NO: 110158 - DNA, 80 bp, synthetic construct
  source 1..80: mol_type = other DNA
ctacgtacaataagtgtggttctggtccttggcttacacccaggtgcttggtcgactacccctacaggctatggcactac

SEQ ID NO: 110159 - DNA, 80 bp, synthetic construct
  source 1..80: mol_type = other DNA
ttttttttgtcaccgcaaacgacggtcccgtaagcgaagaagcgctatcttcggcagtaacgcttatatacggaagctgt

SEQ ID NO: 110160 - DNA, 80 bp, synthetic construct
  source 1..80: mol_type = other DNA
gggaggagtgggtgtgcgaggtggccggaggaaggcgcccgctagctagaacggccgttcccggacgacaccttgcgaca

SEQ ID NO: 110161 - DNA, 80 bp, synthetic construct
  source 1..80: mol_type = other DNA
atttgcagagtcaaactcaggaggagacgtggttcatctagcgctgatggcgacctttaagatccaaccggcgttcatgg

SEQ ID NO: 110162 - DNA, 80 bp, synthetic construct
  source 1..80: mol_type = other DNA
ccacactcaatggccccacgcctttgctgtaccgtctaggctctgtttccaatgaggtcactctcacgcaccctgtgacg

SEQ ID NO: 110163 - DNA, 80 bp, synthetic construct
  source 1..80: mol_type = other DNA
ggtgtcagggccgtggaggacgggatcaattacgcaacaggaaatcttcccggttgctccttttctatcttcctcttggc

SEQ ID NO: 110164 - DNA, 80 bp, synthetic construct
  source 1..80: mol_type = other DNA
ttgctccaccccgtgtgatgcgtcttggttgcatgacatatgggactgggtctgcaccgtgctgagcgatttcaagacat

SEQ ID NO: 110165 - DNA, 80 bp, synthetic construct
  source 1..80: mol_type = other DNA
actcgttgtttcgactcaacggtgactgagaatgacatccgtacggaagagtccctttaccaatgttgtgacctagcccc

SEQ ID NO: 110166 - DNA, 80 bp, synthetic construct
  source 1..80: mol_type = other DNA
ttgggccaaagtcatcctggtcctattccttttcgctggagtggatgcttcaacctacaccactggtggggccgctggcg

SEQ ID NO: 110167 - DNA, 80 bp, synthetic construct
  source 1..80: mol_type = other DNA
caaccccgggtccggtgggcgcctccgccgcgcccacggccgattcccccctcaccgcctcgccccccgctaccgcgccg

SEQ ID NO: 110168 - DNA, 80 bp, synthetic construct
  source 1..80: mol_type = other DNA
aagtgttggtgcttaacccgtcagtggctgccacccttgggtttggcagctacatgagcacagcccacggcatcgaccct

SEQ ID NO: 110169 - DNA, 80 bp, synthetic construct
  source 1..80: mol_type = other DNA
ccgtgacaaaatacattgccacgtgcatgcaggccgacctcgaggtcatgacaagcacatgggtcctggcaggtgtggtg

SEQ ID NO: 110170 - DNA, 80 bp, synthetic construct
  source 1..80: mol_type = other DNA
gtgcggttcagaatgagatcacactgacgcatccaattacaaaatacatcatgacttgtatgtcggctgacctggaagtt

SEQ ID NO: 110171 - DNA, 80 bp, synthetic construct
  source 1..80: mol_type = other DNA
tagggatcggcaccgtcttggaccaggcggaaacggctggtgcgcgcctcactgtcctggcgaccgcaacgcctccaggg

SEQ ID NO: 110172 - DNA, 80 bp, synthetic construct
  source 1..80: mol_type = other DNA
gcggaacaccgcacgcaggtaccccatgaaccccaccccatcgcccgctggctcgtccgccacgggcgaggcgcggtggc

SEQ ID NO: 110173 - DNA, 80 bp, synthetic construct
  source 1..80: mol_type = other DNA
atttggaagatgagtttaaaaatggaaacatgaatcttttatacaagtatggatttgaacagctgaaaacacattggatg

SEQ ID NO: 110174 - DNA, 80 bp, synthetic construct
  source 1..80: mol_type = other DNA
gtttttccgggatgaggtctcgttctgcgttggactcaattcattcgtcgtcgggtctcagctgccttgtgaccctgaac

SEQ ID NO: 110175 - DNA, 80 bp, synthetic construct
  source 1..80: mol_type = other DNA
tgcttacagacccatcccacatcaccgcggaggctgcgcggcgcaggctggccaggggatcacccccctcgctagccagc

SEQ ID NO: 110176 - DNA, 80 bp, synthetic construct
  source 1..80: mol_type = other DNA
tcccccgctgacggcctggtggaccagggcgccctggcggagccccgaggcgacgccggaggccgcgtgcttggtgcgcg

SEQ ID NO: 110177 - DNA, 80 bp, synthetic construct
  source 1..80: mol_type = other DNA
aagatcactggtttggcagggaaaactcatggagtggagtggaaggggaaggtctgcataggttgggatacatcttggag

SEQ ID NO: 110178 - DNA, 80 bp, synthetic construct
  source 1..80: mol_type = other DNA
gagatcgacgcctgcctgcggggctggttcggttcggcccgagtggaccacgttaaaggggaaaccatctccttctcgtt

SEQ ID NO: 110179 - DNA, 80 bp, synthetic construct
  source 1..80: mol_type = other DNA
ccgacgcagacgtattgaggtccatgctaacagatccgccccacatcacggcggagactgcggcgcggcgcttggcacgg

SEQ ID NO: 110180 - DNA, 80 bp, synthetic construct
  source 1..80: mol_type = other DNA
caggttaaatccgtgacgtggtgtgtttggcgtgtgtctctgaaatggcggaaaccgacatgcaaatgggattcatggac

SEQ ID NO: 110181 - DNA, 80 bp, synthetic construct
  source 1..80: mol_type = other DNA
cagccgacggaatggtctccaaggcgtggagattgctggcgcctattacggcatacgcccagcagacaaggggcctccta

SEQ ID NO: 110182 - DNA, 80 bp, synthetic construct
  source 1..80: mol_type = other DNA
aaggagcgtcagtcggcgttgtggtcatcatcgctctgaccatctttacgctcaccccaacttacaggatcttgttggcg

SEQ ID NO: 110183 - DNA, 80 bp, synthetic construct
  source 1..80: mol_type = other DNA
aaggggtgtggcgaggggacggcataatgtcaacccgctgtccctgtggagcagtcatatccggccatgtgaagaacgtg

SEQ ID NO: 110184 - DNA, 80 bp, synthetic construct
  source 1..80: mol_type = other DNA
ggtcgacacgggtgtggcgataaactcacacacggcgtcctggccgtggtccatccctgcgcgccgcggcacctgggcgc

SEQ ID NO: 110185 - DNA, 80 bp, synthetic construct
  source 1..80: mol_type = other DNA
ggggggagaatgagtcggatgtgctgatcctcaacaacacgcggccacccgccggcaactggtttggctgcacctggatg

SEQ ID NO: 110186 - DNA, 80 bp, synthetic construct
  source 1..80: mol_type = other DNA
gaaaccaaaatgaagccttgttatggctcatttgctagacccacaaatgaaaaaggagggcaggctgtatttaaaactgg

SEQ ID NO: 110187 - DNA, 80 bp, synthetic construct
  source 1..80: mol_type = other DNA
ctccgacaccgggactgaaaatgagacatattatctgccacggaggtgttattaccgaagaaatggccgccagtcttttg

SEQ ID NO: 110188 - DNA, 80 bp, synthetic construct
  source 1..80: mol_type = other DNA
agctgaacaggagatcgtatgacacagaatacccgaagtgcaagggtggagagtgggactttgtggtcaccactgacata

SEQ ID NO: 110189 - DNA, 80 bp, synthetic construct
  source 1..80: mol_type = other DNA
atgaacagcacagggttcacaaaaacctgcggggcaccaccgtgcaagatcacacctggtagctacaatcaaacaaatca

SEQ ID NO: 110190 - DNA, 80 bp, synthetic construct
  source 1..80: mol_type = other DNA
tgcgtcggtgccccgctcgccgccggcgtctctgtctcgctgtggcccccttcgcgatgccgccgctgccgtcccggtct

SEQ ID NO: 110191 - DNA, 80 bp, synthetic construct
  source 1..80: mol_type = other DNA
cttacgacgtgatcatctgtgacgagtgccattctactgatgccacctccgttctaggcatcggaactgttcttgaccaa

SEQ ID NO: 110192 - DNA, 80 bp, synthetic construct
  source 1..80: mol_type = other DNA
ggtgctgacatccatggccaggggagtgaagagggagaggagcgatggtggcaatactgggctgatgacccagctaactg

SEQ ID NO: 110193 - DNA, 80 bp, synthetic construct
  source 1..80: mol_type = other DNA
ggtgtatgtacgccatcagcgagcttaaattctggttaacgtctaattccactgaaggaccccaacgtactttagacgtg

SEQ ID NO: 110194 - DNA, 80 bp, synthetic construct
  source 1..80: mol_type = other DNA
ggcactccccggacggtgagcgctccgttgacgaacatgaagggctggaacagacccgccaactgacgccagctctccag

SEQ ID NO: 110195 - DNA, 80 bp, synthetic construct
  source 1..80: mol_type = other DNA
ggcttagggaaaacatctattggcttgctctgtgtgacggcctcaagcgcactgttatggatggccaatgtggagcccca

SEQ ID NO: 110196 - DNA, 80 bp, synthetic construct
  source 1..80: mol_type = other DNA
ctgggagggtgatgcggaaatcacaggttccagtgaaagagttgatgttcggcttgacgatgacgggaacttccagctca

SEQ ID NO: 110197 - DNA, 80 bp, synthetic construct
  source 1..80: mol_type = other DNA
tactccacacagattggggccactcaggcagggagattcagcatcactcctgcggcgccctcatacacactaaagcttgg

SEQ ID NO: 110198 - DNA, 80 bp, synthetic construct
  source 1..80: mol_type = other DNA
gtgatgaacttgccaaacaattgaccagtctgggcgtgaatgccgtggcatattatagaggtctagacgtcgccgtcata

SEQ ID NO: 110199 - DNA, 80 bp, synthetic construct
  source 1..80: mol_type = other DNA
ggtctgtcacagtccctcacccaaacatcactgagactgctttgccgagcacaggtgaggtgcctttctacggaaaggcg

SEQ ID NO: 110200 - DNA, 80 bp, synthetic construct
  source 1..80: mol_type = other DNA
gacagatttggcaaagcactttactttctgaatgacatggccaagaccaggaaggacaccggggaatgggagcactcggc

SEQ ID NO: 110201 - DNA, 80 bp, synthetic construct
  source 1..80: mol_type = other DNA
gtagagacgaccaattacagcccccataggaggtataacaaaattatttgggcatggttgttttcccacgataggtcgct

SEQ ID NO: 110202 - DNA, 80 bp, synthetic construct
  source 1..80: mol_type = other DNA
gatcggcgctgcggttatagccgccctgaccatcttcagcctcacaccagcatacaagactctgctagcacatttcctgt

SEQ ID NO: 110203 - DNA, 80 bp, synthetic construct
  source 1..80: mol_type = other DNA
cgcgcggtaggccctggtccacctctcccgatcattaagagtgcggtggattttttccaggacccggtagaggtgggatt

SEQ ID NO: 110204 - DNA, 80 bp, synthetic construct
  source 1..80: mol_type = other DNA
cggccagattgacgattcctgcggttttgggggccctacttgtgctgatgcttggaggcatcacttacactgacctggca

SEQ ID NO: 110205 - DNA, 80 bp, synthetic construct
  source 1..80: mol_type = other DNA
gtgccaccaggcccccgggcccaaggcgcagcacgcgcccggctccggtgtggtcttcgcggggaccagatacgcgccat

SEQ ID NO: 110206 - DNA, 80 bp, synthetic construct
  source 1..80: mol_type = other DNA
cttgaagatgtggacctcaaagaaagttcctttggggttctcatatgacacccgctgcttcgactctactgtcactgaac

SEQ ID NO: 110207 - DNA, 80 bp, synthetic construct
  source 1..80: mol_type = other DNA
gatcacccctgacagggaggtactataccagcaatttgatgagatggaggagtgctcagcctccttgccctatgtggacg

SEQ ID NO: 110208 - DNA, 80 bp, synthetic construct
  source 1..80: mol_type = other DNA
ggcaccttgcattgctggatacaagtaacacccaacgtggctgtgaaacaccgcggtgcgctcactcgtagcctgcgaac

SEQ ID NO: 110209 - DNA, 80 bp, synthetic construct
  source 1..80: mol_type = other DNA
gcactaaaccagggtggctattctcactgaaggaaaaatcactctctccagcagcagggtgcccactgggtggccctcgc

SEQ ID NO: 110210 - DNA, 80 bp, synthetic construct
  source 1..80: mol_type = other DNA
ggggttgtttttaccggagcctcctgtactttctcctgtctgtgagcctattgggggcgaatgtatgccacaactgcacc

SEQ ID NO: 110211 - DNA, 80 bp, synthetic construct
  source 1..80: mol_type = other DNA
gcggccatctcgcggcgccgatctgtaccgcggccggagtatgcggtggaccgaggcggtccgtacgctacccggcgtct

SEQ ID NO: 110212 - DNA, 80 bp, synthetic construct
  source 1..80: mol_type = other DNA
gcttgcctttggaaatgtgctgacagctgggacagtagaggcatttcagggcgtagagtttgggtgccaggaagacagat

SEQ ID NO: 110213 - DNA, 80 bp, synthetic construct
  source 1..80: mol_type = other DNA
gagggaagcccatgtaagataccttttgagatcatggacttagaaaagaaacatgtcctaggacggttaataactgtcaa

SEQ ID NO: 110214 - DNA, 80 bp, synthetic construct
  source 1..80: mol_type = other DNA
agcccctatgtcaacttgggcctccgacggccttagagacctggcagttgccctcgagcctgtcatattcacccctatgg

SEQ ID NO: 110215 - DNA, 80 bp, synthetic construct
  source 1..80: mol_type = other DNA
aggattgtccacgttgccagggaacccagctgtagcatccctcatggcgttctctgctgctgtcaccagcccccttacca

SEQ ID NO: 110216 - DNA, 80 bp, synthetic construct
  source 1..80: mol_type = other DNA
aatgatcactgttgatgatgatggaacaatgagaataaaagatgatgagactgagaatattttgacagtgcttttgaaga

SEQ ID NO: 110217 - DNA, 80 bp, synthetic construct
  source 1..80: mol_type = other DNA
caaaggggccccatgcaagattcccgtgattgtggcagatgacctaacggcagcagtgaacaaaggcatcttggtcactg

SEQ ID NO: 110218 - DNA, 80 bp, synthetic construct
  source 1..80: mol_type = other DNA
agagctaagggtagccgtgccatatggtacatgtggttaggagccagattcctagagtttgaagctcttggcttcctcaa

SEQ ID NO: 110219 - DNA, 80 bp, synthetic construct
  source 1..80: mol_type = other DNA
tgctctaacagcagcatcacgtggcaactcgagggtgcggtactacatgttcctggatgcatcccctgcgagttaacggg

SEQ ID NO: 110220 - DNA, 80 bp, synthetic construct
  source 1..80: mol_type = other DNA
gccgtgccccccggagagagagcgaggaacatccagactctgcccggaatatttaagacaaaggatggggacattggagc

SEQ ID NO: 110221 - DNA, 80 bp, synthetic construct
  source 1..80: mol_type = other DNA
cggactttttggtaaaggaagcatcgacacatgcgccaaatttgcctgttcaaccaaggcaacgggaaggactatcttaa

SEQ ID NO: 110222 - DNA, 80 bp, synthetic construct
  source 1..80: mol_type = other DNA
atgtgacggccgccacagccgacaatcttaagtgcccctgccaggtcccagcacccgagtttttcactgaggtagacggt

SEQ ID NO: 110223 - DNA, 80 bp, synthetic construct
  source 1..80: mol_type = other DNA
tggatatgaaagcaatccatcatgcttttatactgtcaatgtaattgagcttccaaccaccagatcgccaactaccacca

SEQ ID NO: 110224 - DNA, 80 bp, synthetic construct
  source 1..80: mol_type = other DNA
agagactcttaccaaggtaaaacctaaaacaggtcaggaaaatggatgggaaaaagatgctacagaattttcagataaaa

SEQ ID NO: 110225 - DNA, 80 bp, synthetic construct
  source 1..80: mol_type = other DNA
gcggcccaagcagtcatcatttcaccgcagcaccacacctttgtccaggagtgcaattgttccatctatccaggccacgt

SEQ ID NO: 110226 - DNA, 80 bp, synthetic construct
  source 1..80: mol_type = other DNA
ctatctcccctgctcctctccaccacacagtggcaagttctcccttgctctttcaccacgctgcccgccctctcgaccgg

SEQ ID NO: 110227 - DNA, 80 bp, synthetic construct
  source 1..80: mol_type = other DNA
gcgccacagatgctctcatgacaggcttcaccggtgactttgactcagtgatagactgcaacacgtctgtcatacaaaca

SEQ ID NO: 110228 - DNA, 80 bp, synthetic construct
  source 1..80: mol_type = other DNA
gcaatggagtgttggaaagccagatgcttattccaaaatcatatgcgggccctttttcacagcacaattaccgccagggc

SEQ ID NO: 110229 - DNA, 80 bp, synthetic construct
  source 1..80: mol_type = other DNA
ggcacttagtgggcatattcagggccgcggtgtgcactcgcggagtggcaaaagcggtcgaatttgtgcccgttgagtcc

SEQ ID NO: 110230 - DNA, 80 bp, synthetic construct
  source 1..80: mol_type = other DNA
ctggagtgccaaacaacatgcttcattctcctaaagtccagcccaccctgtgtgacaaccaaaaagcactctaccatttt

SEQ ID NO: 110231 - DNA, 80 bp, synthetic construct
  source 1..80: mol_type = other DNA
gccttgctcagcgagggaggagtccctggcttggtggcggtgttcgtgctgatggaattccttttgagaaggcgtccggg

SEQ ID NO: 110232 - DNA, 80 bp, synthetic construct
  source 1..80: mol_type = other DNA
cgcttctcagcgtcagaagaaggttaccttcgacaggctgcaggtgctcgacgaccactacaaaactgctttaaaggagg

SEQ ID NO: 110233 - DNA, 80 bp, synthetic construct
  source 1..80: mol_type = other DNA
cctaacagtgggcagtgccgttatatgcggcagggttattgtatccggcaagcctgtaccagtgccagatcgtgaagtac

SEQ ID NO: 110234 - DNA, 80 bp, synthetic construct
  source 1..80: mol_type = other DNA
cggcgtcagcggctctcgcagcactggccttcaaggcgtttccacccgacggatcgggctcccaagccgagtctgggaag

SEQ ID NO: 110235 - DNA, 80 bp, synthetic construct
  source 1..80: mol_type = other DNA
gcggccatggaccgtattctagctttgaccacccgcaatcctgaagccttcaggcagcagccccaggccaacaggttttc

SEQ ID NO: 110236 - DNA, 80 bp, synthetic construct
  source 1..80: mol_type = other DNA
aagctatgaagctccttcgacaggctcagcatcctccatggtgaacggggtagttaaactgctgacaaaaccctgggacg

SEQ ID NO: 110237 - DNA, 80 bp, synthetic construct
  source 1..80: mol_type = other DNA
ccacttgtggccgaagaggacaaggaggtttctgtcgcggcagagatcttgcgccccaccaagaagttcccgccggccat

SEQ ID NO: 110238 - DNA, 80 bp, synthetic construct
  source 1..80: mol_type = other DNA
ctaggagggccgtcaaccacatccagtccgtgtgggaggacctcttagaagaccaagagacacctatcccgacaaccatc

SEQ ID NO: 110239 - DNA, 80 bp, synthetic construct
  source 1..80: mol_type = other DNA
gtgcgggccgtcgcgggcgatgaggggctggtggacctcgaactgcacacgcccttcgttcatgtaagccagctccggga

SEQ ID NO: 110240 - DNA, 80 bp, synthetic construct
  source 1..80: mol_type = other DNA
tgagtcgtctggcggcctttctttttctcaatgtatgagaggcgcattggagttctgctgttgatctcattaacacagac

SEQ ID NO: 110241 - DNA, 80 bp, synthetic construct
  source 1..80: mol_type = other DNA
agcaaaattgagatggctagtggaaagaaggttcctagaacccatcggcaaagtcatagaccttcgatgcggaaggggag

SEQ ID NO: 110242 - DNA, 80 bp, synthetic construct
  source 1..80: mol_type = other DNA
cgagatacaaatcctctcaacggccactcaaactttcctggcaacctgtgttaacggcgtgtgctggactgtctaccatg

SEQ ID NO: 110243 - DNA, 80 bp, synthetic construct
  source 1..80: mol_type = other DNA
agtggtgcctgaccgggaggtattgtaccagcagttcgacgagatggaggagtgctccaggcatctctcttacctcgccg

SEQ ID NO: 110244 - DNA, 80 bp, synthetic construct
  source 1..80: mol_type = other DNA
atcacgtcggggtccctacttacacctggggggagaacgagactgatgtcttccttttgaactcgaccagaccgccgcat

SEQ ID NO: 110245 - DNA, 80 bp, synthetic construct
  source 1..80: mol_type = other DNA
gaaatagggaaacttccacaacatttaacgcaaagggcccagaacgccttggacaatctggttatgttgcacaactctga

SEQ ID NO: 110246 - DNA, 80 bp, synthetic construct
  source 1..80: mol_type = other DNA
agttgttaagctaggaaacggtcttcgctttgatagctggggaagcatagctgtctcacctactaccactacccctacca

SEQ ID NO: 110247 - DNA, 80 bp, synthetic construct
  source 1..80: mol_type = other DNA
ctatcactagatccccctccttcacggacaacagtacgcctccggccgtaccccagacctaccaagtggggtatttgcat

SEQ ID NO: 110248 - DNA, 80 bp, synthetic construct
  source 1..80: mol_type = other DNA
gtgaagaagggtctacacctggagtgctgtaagcaccaatcttaatgttgtcaggcctgctagtcagccacagcttgggg

SEQ ID NO: 110249 - DNA, 80 bp, synthetic construct
  source 1..80: mol_type = other DNA
catcaggactgaccggattgccaagcatggcactggacctgcgtccagctacggcttgggcgctgtatgggtggagcaca

SEQ ID NO: 110250 - DNA, 80 bp, synthetic construct
  source 1..80: mol_type = other DNA
gcagagagtgttcaaggacaaagttgacaccaaggcacaggaaccccagccaggtaccagggtcatcatgagggcggtca

SEQ ID NO: 110251 - DNA, 80 bp, synthetic construct
  source 1..80: mol_type = other DNA
ggacagggcctgcttcggcgcgtcctgcgccccccgatctctcgccgcgacggcccagggctccccaggtggtcgggacc

SEQ ID NO: 110252 - DNA, 80 bp, synthetic construct
  source 1..80: mol_type = other DNA
tatggctagctgtcgtcttcacgccgggcgtagtcttcgatgtctgcaaatgggttctcgcgatcctagggcctgcttcc

SEQ ID NO: 110253 - DNA, 80 bp, synthetic construct
  source 1..80: mol_type = other DNA
gaaaaggactcaaagcttactttaattttaacgaaatgcggaagtcaaattttggcaaatgtgtccttgcttgttgtaaa

SEQ ID NO: 110254 - DNA, 80 bp, synthetic construct
  source 1..80: mol_type = other DNA
ataagaatcacattaaaggctggacctccatcgatttcatcaatcatcaggttacactcattcaccatccctaggtaatt

SEQ ID NO: 110255 - DNA, 80 bp, synthetic construct
  source 1..80: mol_type = other DNA
tgcctacctacaactggggtgaagatgaaacggacgttttcgtcctcaataacaccaggccaccgctgggcaattggttc

SEQ ID NO: 110256 - DNA, 80 bp, synthetic construct
  source 1..80: mol_type = other DNA
gggaggacttgctggaagacaacaccacacctattgtcaccactataatggctaagaacgaagtgttttgcgtggacgct

SEQ ID NO: 110257 - DNA, 80 bp, synthetic construct
  source 1..80: mol_type = other DNA
gttcaaacaaaaggtgctaggcctaattcaggccactacaaaacaagcagaagagctcaagccagctgtccactcagcat

SEQ ID NO: 110258 - DNA, 80 bp, synthetic construct
  source 1..80: mol_type = other DNA
ggactgggccgctaacggcctacgggacctggcggtcgctgtagaacccatcatcttcagtcccatggagaggaaggtta

SEQ ID NO: 110259 - DNA, 80 bp, synthetic construct
  source 1..80: mol_type = other DNA
ggagcgcctgtcgcgcctctgggagcacgagctggtgcgctgttttaaaattctgtgtcaccgcaacaaccagggccaag

SEQ ID NO: 110260 - DNA, 80 bp, synthetic construct
  source 1..80: mol_type = other DNA
ccaccacaacatggtctattccaccacttctcgcagcgcaggccagaggcagaaaaaagtcacttttgacagactccaag

SEQ ID NO: 110261 - DNA, 80 bp, synthetic construct
  source 1..80: mol_type = other DNA
gtcccatctgtgtggggaggggggcaagtcggcacgtattcggacagactcaagcacacacggaggagcgctcttgtctc

SEQ ID NO: 110262 - DNA, 80 bp, synthetic construct
  source 1..80: mol_type = other DNA
cgagcgtggagacaccgggcacgagcagtgcgcgccaaactcattgcccagggaggaagggccaggatatgtggtctata

SEQ ID NO: 110263 - DNA, 80 bp, synthetic construct
  source 1..80: mol_type = other DNA
agtggcaactgacgttccggaattggagcgtaccacaccaataatgcagaagaaggttggccaagtgctgctgattctcg

SEQ ID NO: 110264 - DNA, 80 bp, synthetic construct
  source 1..80: mol_type = other DNA
cactgaggagtccatttaccaatgctgccagttagacccggaagcaagaaaggccatcacatcactcaatgaacggctgt

SEQ ID NO: 110265 - DNA, 80 bp, synthetic construct
  source 1..80: mol_type = other DNA
agccccttcccctacggaatcgccggaaccatcgacaccaacgcccccgaggtcctggccggggatccgtataccaccac

SEQ ID NO: 110266 - DNA, 80 bp, synthetic construct
  source 1..80: mol_type = other DNA
ccatgaagagaatgttaccaatgatgaagacatgaggccctattgctggcattatccgcctagaccatgtggcattgtcc

SEQ ID NO: 110267 - DNA, 80 bp, synthetic construct
  source 1..80: mol_type = other DNA
ccgaccccaacattcggtcaggtgtcaggaccatcaccaccggtgcgccgatcacatactccacctatgggaagttccta

SEQ ID NO: 110268 - DNA, 80 bp, synthetic construct
  source 1..80: mol_type = other DNA
cgagtccgtatgcaacctcattaataaagagtgagaaccaaccaaaacagacgcggtgtgagtttgtgggttataggaac

SEQ ID NO: 110269 - DNA, 80 bp, synthetic construct
  source 1..80: mol_type = other DNA
ggctgccatgcggcagggatacggcgctaacgatgcatctcaacaattgttgtgtaggtactccgccgccgagggacctg

SEQ ID NO: 110270 - DNA, 80 bp, synthetic construct
  source 1..80: mol_type = other DNA
ttgaaaattaccaaaccgggaataaatgatgctggtgtgtatgtacttcttgttcggttagaccatagcagatccaccga

SEQ ID NO: 110271 - DNA, 80 bp, synthetic construct
  source 1..80: mol_type = other DNA
gatccccctgtttagcgacgcggccgtgcgccacttccgccagcgcgccaccgtgtttctcgtcccccggcgccacggca

SEQ ID NO: 110272 - DNA, 80 bp, synthetic construct
  source 1..80: mol_type = other DNA
gacgggactgtccctcggagacctggacgacgtcaaggggcgcctcggcctggacgcccggccgatgatggccagcatgt

SEQ ID NO: 110273 - DNA, 80 bp, synthetic construct
  source 1..80: mol_type = other DNA
gcctgggcctccaggcccggcctcagacgacgccgcagcgcccgcacctgaagcgcgttcagcttcagttggtggagctt

SEQ ID NO: 110274 - DNA, 80 bp, synthetic construct
  source 1..80: mol_type = other DNA
cgtcgtggccgtacgggccgaggtagactcggtacgtaccgatatgtcaccccgggtgagagaccatctggaatgtttga

SEQ ID NO: 110275 - DNA, 80 bp, synthetic construct
  source 1..80: mol_type = other DNA
gggtcccccccctcaacgtacggggggggcgggacgctgtcatcttgcttgcgtgcgcggtccacgcccatctaattttt

SEQ ID NO: 110276 - DNA, 80 bp, synthetic construct
  source 1..80: mol_type = other DNA
ctgtcagttcgctatcaggaagcagctcaggtgatgctacacaacaaatcatctctagcgtaggagctaaagacgttaag

SEQ ID NO: 110277 - DNA, 80 bp, synthetic construct
  source 1..80: mol_type = other DNA
gccaggcggctgtttcgccggatgtcccggtagatccccggctcgacgcggacggaggtgatgatcagggcgatcggaac

SEQ ID NO: 110278 - DNA, 80 bp, synthetic construct
  source 1..80: mol_type = other DNA
ccctggctcccagcctccaccgcctttacatccaccgccgccacggccaccgagccttccaggaggcgaagatggggccc

SEQ ID NO: 110279 - DNA, 80 bp, synthetic construct
  source 1..80: mol_type = other DNA
gttgtgaaaccaattgatgacagatttgccactgcactccactttctcaacaacatgtcaaagatcagaaaggacattca

SEQ ID NO: 110280 - DNA, 80 bp, synthetic construct
  source 1..80: mol_type = other DNA
gcgaggggcctcactagcctctttagcccggggcccaagcagaacatccagcttgttaacaccaatggcagttggcacat

SEQ ID NO: 110281 - DNA, 80 bp, synthetic construct
  source 1..80: mol_type = other DNA
tttggtgcgagcagggttattgactgcagaaagagtgtgaaacccaccatcctagaggagggagaaggtagagtcatcct

SEQ ID NO: 110282 - DNA, 80 bp, synthetic construct
  source 1..80: mol_type = other DNA
caacgcaacgcctactacagcgtcctgaacacgtttcaggccctgcaccgctccgaagcctttcggcagttggttcactt

SEQ ID NO: 110283 - DNA, 80 bp, synthetic construct
  source 1..80: mol_type = other DNA
gagcagccgaagagctcgagggcggaagggatcctcacgacagagagtggcgcgcggccgggttggcgtgacagaggctg

SEQ ID NO: 110284 - DNA, 80 bp, synthetic construct
  source 1..80: mol_type = other DNA
catagtagctaccaactggcaaaagcttgaggcgttctggcacaagcatatgtggaattttgtgagtgggatccagtacc

SEQ ID NO: 110285 - DNA, 80 bp, synthetic construct
  source 1..80: mol_type = other DNA
gacatcgagagagaaattccagaaaggtcatggaatacagggtttgactggataacggactaccaagggaaaactgtgtg

SEQ ID NO: 110286 - DNA, 80 bp, synthetic construct
  source 1..80: mol_type = other DNA
ggtgcattgtagactatccatatagactgtggcattatccctgcacggttaatttcaccatccataaagtgcgcctgtat

SEQ ID NO: 110287 - DNA, 80 bp, synthetic construct
  source 1..80: mol_type = other DNA
tgcttgtccgtaggctgcgtagtgatatgcggcaggatctccaccagcggcaagccggtgctcattcctgacagggaagt

SEQ ID NO: 110288 - DNA, 80 bp, synthetic construct
  source 1..80: mol_type = other DNA
ttttaatgggccggcgttcccgctcgcggtaattagcagcttttaacgggccgccattcccgcttatggtaattaaaaac

SEQ ID NO: 110289 - DNA, 80 bp, synthetic construct
  source 1..80: mol_type = other DNA
ctactttccgtaggggtaggcatctttttgctgcctgctcggtaggcggctaacactccgaccttagggtcctactgttt

SEQ ID NO: 110290 - DNA, 80 bp, synthetic construct
  source 1..80: mol_type = other DNA
atgtactaaaggagattaagcttcgagcgtccacggtgcaggcgaagctcttatccatagaggaagcctgcgacctcaca

SEQ ID NO: 110291 - DNA, 80 bp, synthetic construct
  source 1..80: mol_type = other DNA
gcctgactacaacccgccgctcgtggaatcgtggaggaggccagattaccaaccgcccaccgttgctggttgtgctctcc

SEQ ID NO: 110292 - DNA, 80 bp, synthetic construct
  source 1..80: mol_type = other DNA
ccacgcactacgtgccggagagcgatgcggctgcccgcgtcactgctatactcagcagcctcaccgtgacccagctccta

SEQ ID NO: 110293 - DNA, 80 bp, synthetic construct
  source 1..80: mol_type = other DNA
gggggccctactagtcgcgcttgctttactttcacttttggatctgggctctactatgctagttcagcctgtactatttg

SEQ ID NO: 110294 - DNA, 80 bp, synthetic construct
  source 1..80: mol_type = other DNA
ctgggattcctgaatgaggaccattgggcttccagggaaaactcaggaggaggagtggaaggcattggcttacaatacct

SEQ ID NO: 110295 - DNA, 80 bp, synthetic construct
  source 1..80: mol_type = other DNA
cggggatccccccaaacctgaatatgacctggagctgataacatcttgctcctccaatgtgtctgtggctttggaccctc

SEQ ID NO: 110296 - DNA, 80 bp, synthetic construct
  source 1..80: mol_type = other DNA
caggggtatgggcctatcacctatgtctctgatgcccgtgaggccgtgaacagcagtgatcgccggccctactgctggca

SEQ ID NO: 110297 - DNA, 80 bp, synthetic construct
  source 1..80: mol_type = other DNA
ccccctagagctaattaaggggggcagacatctcatcttctgtcactcgaagaaaaaatgtgatgaactggctaaacaac

SEQ ID NO: 110298 - DNA, 80 bp, synthetic construct
  source 1..80: mol_type = other DNA
gggagaaaccggggcagatgaagttcacttagcccaatatctgattcgagacgcgtcgccccttaggggatgtcttcctc

SEQ ID NO: 110299 - DNA, 80 bp, synthetic construct
  source 1..80: mol_type = other DNA
acaacctctttgtgatggatgaggctcacttcactgacccggcgagcatagcagcacgaggctacattgctacaaaagtt

SEQ ID NO: 110300 - DNA, 80 bp, synthetic construct
  source 1..80: mol_type = other DNA
attgctcggcccggcggacaccgaggtgcaagggggctggaggctcctcgcccccatcactgcatatgcccagcagacac

SEQ ID NO: 110301 - DNA, 80 bp, synthetic construct
  source 1..80: mol_type = other DNA
ttcaagcgtcatggcctaagcttgagcaattctgggccaaacacatgtggaacttcataagcggcattcaatacatcgcc

SEQ ID NO: 110302 - DNA, 80 bp, synthetic construct
  source 1..80: mol_type = other DNA
ctatacaaaacctagaaatcaaactaaaagaattcagccatatactactaagggaactaccaaaggaactacaaaattaa

SEQ ID NO: 110303 - DNA, 80 bp, synthetic construct
  source 1..80: mol_type = other DNA
gcgatgagcttgctaagcaactcacctcacttggtctcaacgccgtagctttctatagaggggtcgatgtgtccgtgatt

SEQ ID NO: 110304 - DNA, 80 bp, synthetic construct
  source 1..80: mol_type = other DNA
ctttccggtcgcggaacgcccggaagacctcgtcatccagatctcctgtctgctgtacgacctgtccaccaccgccctcg

SEQ ID NO: 110305 - DNA, 80 bp, synthetic construct
  source 1..80: mol_type = other DNA
gacagaccttttgaggtcaaggatggcgtctacagaatcttcagcccaggactgctttgggggcagcgccaagtgggagt

SEQ ID NO: 110306 - DNA, 80 bp, synthetic construct
  source 1..80: mol_type = other DNA
cttccgatctgcagatttgaaagagatattttttcactttcatcagtcgtgaacgtgttgagaaaaagacagcttaggag

SEQ ID NO: 110307 - DNA, 80 bp, synthetic construct
  source 1..80: mol_type = other DNA
ctgtgccactgatgccctcatgactgggttcaccggtgatttcgactctgtaattgactgcaatgttgcggttacccagg

SEQ ID NO: 110308 - DNA, 80 bp, synthetic construct
  source 1..80: mol_type = other DNA
accggctggaggagcccctgccagacagggccgtgcccatttacgtggctgggtttttggccctgtatgacagcggggac

SEQ ID NO: 110309 - DNA, 80 bp, synthetic construct
  source 1..80: mol_type = other DNA
cccgcaggacctgctcgaaaactggttagctgcgcagccggcatcattcacacagcagcgggcgtcattgttggctattt

SEQ ID NO: 110310 - DNA, 80 bp, synthetic construct
  source 1..80: mol_type = other DNA
ttctacccagtttttgcagtgccagaagcactggcaacataccatattttctttaaaaatcacaaaatacccctatcctg

SEQ ID NO: 110311 - DNA, 80 bp, synthetic construct
  source 1..80: mol_type = other DNA
acgaccagacctactccatggacgtcgtctggttgaggttcgacgtgccgacctcgtgtgccgagatgcgaatatacgaa

SEQ ID NO: 110312 - DNA, 80 bp, synthetic construct
  source 1..80: mol_type = other DNA
aatgaaatcttgctcggtccggctgactcagaggcaacgggaggttggaggcttcttgcccccatcaccgcttatgcgca

SEQ ID NO: 110313 - DNA, 80 bp, synthetic construct
  source 1..80: mol_type = other DNA
tcctgtggtttatgatgcaaaatttgagaaacaactaggccaaataatgttgttgatactatgtacatcacaaatcctct

SEQ ID NO: 110314 - DNA, 80 bp, synthetic construct
  source 1..80: mol_type = other DNA
ttcgacgcgccctgcggacagaccccgagggcgtcgaccccgacgttcgggccccccgaaccgggcggcgcctcatggcc

SEQ ID NO: 110315 - DNA, 80 bp, synthetic construct
  source 1..80: mol_type = other DNA
gtataaatccgtccccgttccaaggccggtgtcatagtgcccttaggagcttcccgcccgggcgcatccccccttttgca

SEQ ID NO: 110316 - DNA, 80 bp, synthetic construct
  source 1..80: mol_type = other DNA
tacgagggtggggtcgacgccaccacccggttcatcctggacaaccccgggttcgtcaccttcggctggtaccgtctcaa

SEQ ID NO: 110317 - DNA, 80 bp, synthetic construct
  source 1..80: mol_type = other DNA
acgggatccgtaaccatcgaaaccagatattgttggagcaggcggcagtcacctccacgcccagggcaaagcttaacccg

SEQ ID NO: 110318 - DNA, 80 bp, synthetic construct
  source 1..80: mol_type = other DNA
ctatgggcttttcttatgacaccaggtgctttgactcaactgtcaccgagcgcgacatcaggactgaagctgacatttac

SEQ ID NO: 110319 - DNA, 80 bp, synthetic construct
  source 1..80: mol_type = other DNA
aggctatggcggcctgcaaggccgcggggatagtagcccccactatgctggtgtgcggcgacgacctagtagtcatctca

SEQ ID NO: 110320 - DNA, 80 bp, synthetic construct
  source 1..80: mol_type = other DNA
cttgatgacagccacaccgcctgggactagtgatgaatttccacattcaaatggtgaaatagaagatgttcaaacggaca

SEQ ID NO: 110321 - DNA, 80 bp, synthetic construct
  source 1..80: mol_type = other DNA
ttggcatctggtggacgaagagagagaaaggcatctaaaaggaagatgtgctcagtgcgtgtacaacatgatgggcaaga

SEQ ID NO: 110322 - DNA, 80 bp, synthetic construct
  source 1..80: mol_type = other DNA
ttgtcgttatctgtgagagcggcggggtccaggaagacgcggcaagcctgagagccttcacggaggctatgaccaggtat

SEQ ID NO: 110323 - DNA, 80 bp, synthetic construct
  source 1..80: mol_type = other DNA
tcctattacagcccccaccgcccccaccggctcctgtgcagcgcgctccatcagttattagctactttcatcttaactct

SEQ ID NO: 110324 - DNA, 80 bp, synthetic construct
  source 1..80: mol_type = other DNA
tggtacgggcggtggcgcgactgcggtttaaggagtgcgcgccggcggacgtggtgcctcagcgtaacgcctactatagc

SEQ ID NO: 110325 - DNA, 80 bp, synthetic construct
  source 1..80: mol_type = other DNA
ttctttacagcggcctggtacttaaagggcagggtggtcccagcggccacgtactctgttctcggcttatggtcctttct

SEQ ID NO: 110326 - DNA, 80 bp, synthetic construct
  source 1..80: mol_type = other DNA
gttgaactcactagcggtggcgtggatgattttgagagccatcacgtttaccaacacttcgaacgtagtggttccactct

SEQ ID NO: 110327 - DNA, 80 bp, synthetic construct
  source 1..80: mol_type = other DNA
gtttacgcagatcctgtggcgttgaaagaattcaaggaatttgcaggaggaaggaaaagccccaccatggacattctgac

SEQ ID NO: 110328 - DNA, 80 bp, synthetic construct
  source 1..80: mol_type = other DNA
gggcaacacacttacatgctacctcaaggctagtgctgccgcaaaagcagccggcctaaaatctcccaccatgctcgtgt

SEQ ID NO: 110329 - DNA, 80 bp, synthetic construct
  source 1..80: mol_type = other DNA
ggcggacggagggtgttcaggaggtgcctatgacatcgtcatatgtgatgaatgccattctacagaccctaccacagtat

SEQ ID NO: 110330 - DNA, 80 bp, synthetic construct
  source 1..80: mol_type = other DNA
ttatggtggaaccagtacttcatagcgcgggtggaagctctgttacaagtgtggatcccctcgcttcaagtccggagagg

SEQ ID NO: 110331 - DNA, 80 bp, synthetic construct
  source 1..80: mol_type = other DNA
ggtttttattgacacatccacgctccccttaaataaaagattaaaacacccaccgcggaatttaaatgatggaaacgttt

SEQ ID NO: 110332 - DNA, 80 bp, synthetic construct
  source 1..80: mol_type = other DNA
aatatattggggggttgggtggctgcccagctcgccgcccccggtgcagctaccgcctttgtaggcgctggcttagctgg

SEQ ID NO: 110333 - DNA, 80 bp, synthetic construct
  source 1..80: mol_type = other DNA
ggctgtgtttgagttgagggtgggcctgctcagcgcttttgcgctgcgcagcaacctcaccgtcagagagatggtaacca

SEQ ID NO: 110334 - DNA, 80 bp, synthetic construct
  source 1..80: mol_type = other DNA
caccgtagcaggagccctcgctgaactggctcagaagtctttcccgacgctccccgcctccacgactgactcggactcgg

SEQ ID NO: 110335 - DNA, 80 bp, synthetic construct
  source 1..80: mol_type = other DNA
ctcaaaacaaaagaaaagaggaggaaagaccggaattgcagtcatgattggcctggtcgccagcgtaggagcagttaccc

SEQ ID NO: 110336 - DNA, 80 bp, synthetic construct
  source 1..80: mol_type = other DNA
ttacaggcacaaagtggtcaaggtcatgagacctgcagcagaaggaaaaaccgtgatggacgtgatatcaagagaagatc

SEQ ID NO: 110337 - DNA, 80 bp, synthetic construct
  source 1..80: mol_type = other DNA
ctcatcccaccccccatcttgtccccaaataaaacaaggtctggtagttaggacaacgaccgcagttctcgtgtgttatt

SEQ ID NO: 110338 - DNA, 80 bp, synthetic construct
  source 1..80: mol_type = other DNA
cgtgatttgctgttcttactcatactcctggactggcaatgttatcacgccgtgcgttccggaggaggagaaactaccaa

SEQ ID NO: 110339 - DNA, 80 bp, synthetic construct
  source 1..80: mol_type = other DNA
ggaggacttgctagaggacaatgccacgcccatccccaccacgatcatggcgaaaaacgaagtgttttgcgtggacattt

SEQ ID NO: 110340 - DNA, 80 bp, synthetic construct
  source 1..80: mol_type = other DNA
ggcaggtgggcttgattctactagtggtcttgtgcatcttctcgctttcctcggcttataagatctggcttagtcgcggc

SEQ ID NO: 110341 - DNA, 80 bp, synthetic construct
  source 1..80: mol_type = other DNA
agggtcgccgcaaatactacctaaccagagaccctaccactccacttgccagggctgcctgggaaacagctagacactcc

SEQ ID NO: 110342 - DNA, 80 bp, synthetic construct
  source 1..80: mol_type = other DNA
gtggatgaactccacggggtttaccaagacgtgcggggctcccccttgtaacatctatggtggtaaagggagtcatcaca

SEQ ID NO: 110343 - DNA, 80 bp, synthetic construct
  source 1..80: mol_type = other DNA
tctggcattagcggggtggtagacctggccaatcaagcagtgcaaaataagattaacagtaagcttgatccccgccctcc

SEQ ID NO: 110344 - DNA, 80 bp, synthetic construct
  source 1..80: mol_type = other DNA
cagccctttgagtaacacattgatgagacatcacaacatggtgtactcaacctcctcacgtagtgccggcctccgccaaa

SEQ ID NO: 110345 - DNA, 80 bp, synthetic construct
  source 1..80: mol_type = other DNA
gcgatgctgacgtcatccccgctcggcgcaggggggactccacagcgagcttgctcagccctaggcctctcgcctgtctc

SEQ ID NO: 110346 - DNA, 80 bp, synthetic construct
  source 1..80: mol_type = other DNA
gggcacccattcggccaaatcccccccgtacaacatccgcgctagcgatacgctcgacgtgtactgttcgcactcgtcgt

SEQ ID NO: 110347 - DNA, 80 bp, synthetic construct
  source 1..80: mol_type = other DNA
gaaacactacaaaggaaatatggaggagccttggtgaggaatccactctcacgaaactccacacatgagatgtactgggt

SEQ ID NO: 110348 - DNA, 80 bp, synthetic construct
  source 1..80: mol_type = other DNA
agtgataggactttatggcaatggggttgtgatcaagaatggaagctatgttagtgccataacccagggaaaaaggtagg

SEQ ID NO: 110349 - DNA, 80 bp, synthetic construct
  source 1..80: mol_type = other DNA
gcttgacgctggaaatgatccagaagacatagattgctggtgtgataatcaagccatgtacgtgagttatggtagatgca

SEQ ID NO: 110350 - DNA, 80 bp, synthetic construct
  source 1..80: mol_type = other DNA
cagctgcggtaataccctcacctgttatatcaaagccacagcagcctgtcgagccgcaaggctccaggactgcaccatgc

SEQ ID NO: 110351 - DNA, 80 bp, synthetic construct
  source 1..80: mol_type = other DNA
ttaaggaagatgctagcaagagaagctataatgtcataggggacacccatgacaccctgtaccgcagctggtacctgtcc

SEQ ID NO: 110352 - DNA, 80 bp, synthetic construct
  source 1..80: mol_type = other DNA
tttcagcttgtcgcggtaagctcgtcatgctggggccagctgatgacatgcgcgggagtggctggaagttacttgctccc

SEQ ID NO: 110353 - DNA, 80 bp, synthetic construct
  source 1..80: mol_type = other DNA
gggacaagccttcaatttcaggtctcgtcaccactggactgttcaggagtgcaactgctcaatatacccaggccacatta

SEQ ID NO: 110354 - DNA, 80 bp, synthetic construct
  source 1..80: mol_type = other DNA
aacgtacaagccaatcttgaccgccttaccactgacgtgagggaggcggtagcacagcgggagcgctttatgcatgacac

SEQ ID NO: 110355 - DNA, 80 bp, synthetic construct
  source 1..80: mol_type = other DNA
gagaccgacgctgggctcgagcatggctacctgggaggagaggaggatgtgctgctcaaacacctgcagcgccagtccct

SEQ ID NO: 110356 - DNA, 80 bp, synthetic construct
  source 1..80: mol_type = other DNA
cctgggtcttccgcggagctcccgggagctccgcaccaagccgctctccggagagacgatggcaggagccgcgcatatat

SEQ ID NO: 110357 - DNA, 80 bp, synthetic construct
  source 1..80: mol_type = other DNA
tacctgctattttgtcccctggcgccttggtagtgggagtcatttgcgcagcaatcttgcgccgccacgtcggccaggga

SEQ ID NO: 110358 - DNA, 80 bp, synthetic construct
  source 1..80: mol_type = other DNA
attttcatctcgccaccttatcaatatgtctctaagcaaatcccgaatattaagtccggccattgtaaaaatctgctcca

SEQ ID NO: 110359 - DNA, 80 bp, synthetic construct
  source 1..80: mol_type = other DNA
ctcatgaagagggcatttgtggaatccgctcagtaacaagactggagaatctaatgtggaaacaaataacaccagaactg

SEQ ID NO: 110360 - DNA, 80 bp, synthetic construct
  source 1..80: mol_type = other DNA
agtacctcaggggtcggcactcaatctggcagcctgaccggtcctgtccaactagatgatgacgactcggacaacgagtc

SEQ ID NO: 110361 - DNA, 80 bp, synthetic construct
  source 1..80: mol_type = other DNA
atgtacggagtcacttactcaatcactccattggacctaccggttatcatccaacggttacatggtatggctgccttttc

SEQ ID NO: 110362 - DNA, 80 bp, synthetic construct
  source 1..80: mol_type = other DNA
aggtggacggcgtcaggctccatcgccacgctcccccatgcaaacccttgctgcgggacgaggtggcgtttacggtgggc

SEQ ID NO: 110363 - DNA, 80 bp, synthetic construct
  source 1..80: mol_type = other DNA
cctcaacgcggctgcagctgcagcgagccagggttgggaatggtgcttcctcttcattatctgtgcatggtacatacggg

SEQ ID NO: 110364 - DNA, 80 bp, synthetic construct
  source 1..80: mol_type = other DNA
gcaatgactgaccaccacctggacctcgagatggacggccgggcctccgagcagcgcatcctgcaactgcacgtccgtca

SEQ ID NO: 110365 - DNA, 80 bp, synthetic construct
  source 1..80: mol_type = other DNA
agtgctatgacgcggggtgtgcttggtatgagctcacacctgccgagaccacagtcagactgcgggcgtatctaaataca

SEQ ID NO: 110366 - DNA, 80 bp, synthetic construct
  source 1..80: mol_type = other DNA
ccaccgatccaactacagttttgggcatcggcactgtactggaccaggcagagacggcaggagtacgtcttaccgtgctc

SEQ ID NO: 110367 - DNA, 80 bp, synthetic construct
  source 1..80: mol_type = other DNA
aagccacgaacctggctgaagtgagaagctactgctatctagccactgtctcagatgtttcaactgtctccaactgtcca

SEQ ID NO: 110368 - DNA, 80 bp, synthetic construct
  source 1..80: mol_type = other DNA
cgatagggaagtcctctaccgagagttcgatgaaatggaggagtgcgcttcacatctcccttacatcgaacagggaatgc

SEQ ID NO: 110369 - DNA, 80 bp, synthetic construct
  source 1..80: mol_type = other DNA
cagctgcggcaacacccttacatgctacctgaaagccaccgcagcctgtagagcctccgggctccaggactgcacaatgc

SEQ ID NO: 110370 - DNA, 80 bp, synthetic construct
  source 1..80: mol_type = other DNA
acaacaacgcccatgttggtatattacaggcccgtgtccgatttggggcacttgcagatttgtaaggccacgcacggcgg

SEQ ID NO: 110371 - DNA, 80 bp, synthetic construct
  source 1..80: mol_type = other DNA
aatcgcggagatgttaaagactaaagtgcagggcttgctgcagcaagccaccaaacaagcccaagacatacagcctgctg

SEQ ID NO: 110372 - DNA, 80 bp, synthetic construct
  source 1..80: mol_type = other DNA
gatattaccatgtacatgagcaaacagtacaagttgtggcccccacaaaagtgtttagagaacactggcaccttttgttc

SEQ ID NO: 110373 - DNA, 80 bp, synthetic construct
  source 1..80: mol_type = other DNA
atccgcaggcggtcggccatgccccaggcttcgctctgacatcgacgtagatccttgtagaagtcttgcatgagtctttc

SEQ ID NO: 110374 - DNA, 80 bp, synthetic construct
  source 1..80: mol_type = other DNA
ctggttcgttgctggttacagcgggggagacatatatcacagcctgtctcgcgcccgaccccgctggttcatgttgtgcc

SEQ ID NO: 110375 - DNA, 80 bp, synthetic construct
  source 1..80: mol_type = other DNA
tcatgacctgcatgtcagcggacttggaggtcatcaccagtacttgggtgttacttggtggggttctggccgctttggcc

SEQ ID NO: 110376 - DNA, 80 bp, synthetic construct
  source 1..80: mol_type = other DNA
gatgaccaccataggaattgtactcctctcccaaagtactataccagagaccgctcttgaactgactgacgcgtttgcct

SEQ ID NO: 110377 - DNA, 80 bp, synthetic construct
  source 1..80: mol_type = other DNA
actcgatgggaaactttcatttgactgagcttgagaaagaggaaaggatgatggctttttggctgcttgccggcctagtg

SEQ ID NO: 110378 - DNA, 80 bp, synthetic construct
  source 1..80: mol_type = other DNA
ggcttccagagagtccagtggaggaggagttgagggaataagcttaaactacctgggttggcacctcaagaagttatcaa

SEQ ID NO: 110379 - DNA, 80 bp, synthetic construct
  source 1..80: mol_type = other DNA
catggtgtgatgactcgctgtcatacgagtgtgtgaccatagagcaaggggaagagcccgttgatgtggattgtttttgc

SEQ ID NO: 110380 - DNA, 80 bp, synthetic construct
  source 1..80: mol_type = other DNA
ccagcacggagcgtatgtggcccagtatactgtttcacccctagccctgtggtggtgggaacgaccgacaaagcgggcgc

SEQ ID NO: 110381 - DNA, 80 bp, synthetic construct
  source 1..80: mol_type = other DNA
accccctctttgggttcgggatttgatccctactttacctactctggctccgttccatacttggatggtaccttttacct

SEQ ID NO: 110382 - DNA, 80 bp, synthetic construct
  source 1..80: mol_type = other DNA
caccatggtgacgggggcagtgcaaggccgcaccgcctccagcttcgcgtcccttttcaacttggtgtcggctcagaaga

SEQ ID NO: 110383 - DNA, 80 bp, synthetic construct
  source 1..80: mol_type = other DNA
agagctttcgcacttaacaatgaggaagcatcatctataggcttgcttgtgcttggcattattactatgtttaccctcac

SEQ ID NO: 110384 - DNA, 80 bp, synthetic construct
  source 1..80: mol_type = other DNA
ctgctgatgttggcagctgctttcttccaaatggcttactatgatgcccggcaaattttgctttgggaaatgcctgatgt

SEQ ID NO: 110385 - DNA, 80 bp, synthetic construct
  source 1..80: mol_type = other DNA
ggccccacgtggtcacgtccccgagggtggtgagcgagtgaagcaacagcacgcggtccgtaaactgacggcagaaccgg

SEQ ID NO: 110386 - DNA, 80 bp, synthetic construct
  source 1..80: mol_type = other DNA
cgggcctgatggacgcggccacgcccccggcccggcccccggccgagcgccagggcagccccacgcccgccgacgcgcag

SEQ ID NO: 110387 - DNA, 80 bp, synthetic construct
  source 1..80: mol_type = other DNA
catacctgagattgtttccttggaggaagttcccaagatatttgaaggtcttggcaaagatgaaaaacgggcagcaaacg

SEQ ID NO: 110388 - DNA, 80 bp, synthetic construct
  source 1..80: mol_type = other DNA
atggcagctggaagatagagaaagcatcctttctagaggtgaaaagctgcacatggccacgctcccacactttatggagc

SEQ ID NO: 110389 - DNA, 80 bp, synthetic construct
  source 1..80: mol_type = other DNA
gaggtcaccaaacacctgctggccttactggggcccctctacgttcttcaggcttccctcttgcgggttccttatttcgt

SEQ ID NO: 110390 - DNA, 80 bp, synthetic construct
  source 1..80: mol_type = other DNA
gctgcctctagaggaagcttgtgggttaacaccaccccattccgcccgttccaagtatggatacggcgctaaggaggttc

SEQ ID NO: 110391 - DNA, 80 bp, synthetic construct
  source 1..80: mol_type = other DNA
tttgattgtggtcgcaggaaagtaccacatcataaataataagaataatccagaaataaaaagttttactattaaacttc

SEQ ID NO: 110392 - DNA, 80 bp, synthetic construct
  source 1..80: mol_type = other DNA
ggggaaatccaagtcctatccacagtcactcagtccttcctcggaacatccatttcgggggtcttatggactgtttatca

SEQ ID NO: 110393 - DNA, 80 bp, synthetic construct
  source 1..80: mol_type = other DNA
gcggagttatcgcccttgctcttgtccactacgcagtggcaggtgctcccctgctcattcacgaccctccccgctctatc

SEQ ID NO: 110394 - DNA, 80 bp, synthetic construct
  source 1..80: mol_type = other DNA
tcacactacacagttagacactacagtgcagaatagtactgtattggttaggtatttgttaagagaggaaagtactactg

SEQ ID NO: 110395 - DNA, 80 bp, synthetic construct
  source 1..80: mol_type = other DNA
cttgcaacaggcgacccatcacggtgctaaagctcttctgggtggtaaaggtcagttgcatcccgcgggcctcctcgttc

SEQ ID NO: 110396 - DNA, 80 bp, synthetic construct
  source 1..80: mol_type = other DNA
agaagaaaagagggggagtcgtaggagtcatggctgtcttaggactagtagcttgcgtcggatctgtgaccctctcaaac

SEQ ID NO: 110397 - DNA, 80 bp, synthetic construct
  source 1..80: mol_type = other DNA
caggtaaaacagcatcttggccagcagcgccggggaaaacccacacagcatggccaggtgctcgccggcaaattcctggg

SEQ ID NO: 110398 - DNA, 80 bp, synthetic construct
  source 1..80: mol_type = other DNA
caactgtcacctgctgaagaccattcacgtagccagccactctcgcaaggcctggccagtgtttgagcataacatactga

SEQ ID NO: 110399 - DNA, 80 bp, synthetic construct
  source 1..80: mol_type = other DNA
ggcccccgttggtgaccgcgccaccatttccagtttgctgacgcccaatacccggctgttgttgctgctgattgccccat

SEQ ID NO: 110400 - DNA, 80 bp, synthetic construct
  source 1..80: mol_type = other DNA
tggccaaagagaagcggacacaggctagcatccccctggaccgccagggtacactgggccatcttggcccacagacacgg

SEQ ID NO: 110401 - DNA, 80 bp, synthetic construct
  source 1..80: mol_type = other DNA
gtcttcgagcaggaaggcgtggtctgccgtcccgctcacgggcgcccggggcgccgaggacgcggggcgaaggtccacgt

SEQ ID NO: 110402 - DNA, 80 bp, synthetic construct
  source 1..80: mol_type = other DNA
ggatgaatagcaccgggttcaccaagacgtgcgggggccccccgtgtaacatcggtggagccggcaataacaccttgatt

SEQ ID NO: 110403 - DNA, 80 bp, synthetic construct
  source 1..80: mol_type = other DNA
agtggaaacgagatagtggatgtgatgtgccatgcgacactaacacatcgattgatgtcgccgctaagagtcccgaatta

SEQ ID NO: 110404 - DNA, 80 bp, synthetic construct
  source 1..80: mol_type = other DNA
ctttttcatagcagcctggtacttcaagggtaggatagttcccatgaccacttacttcctcaccaacctctgggcattct

SEQ ID NO: 110405 - DNA, 80 bp, synthetic construct
  source 1..80: mol_type = other DNA
aacacacataagagcgacttaatggttcattgttttattttgctcgtatatacatgttataaatcgtttatcactgtgcc

SEQ ID NO: 110406 - DNA, 80 bp, synthetic construct
  source 1..80: mol_type = other DNA
ctggccctgctggctgagctggaagccctgagccgccagctgaccgccctgacccaggaggtgtccgagctccgcgaaca

SEQ ID NO: 110407 - DNA, 80 bp, synthetic construct
  source 1..80: mol_type = other DNA
ttgcagttggcatggtcacactgtacctaggagtcatggttcaagcggattcaggatgtgtaatcaactggaagggcaga

SEQ ID NO: 110408 - DNA, 80 bp, synthetic construct
  source 1..80: mol_type = other DNA
ctagaaccaatatcttatgaccccaagttcgaaaaacaactagggcaaatcatgctactagcgctgtgtgctgggcaatt

SEQ ID NO: 110409 - DNA, 80 bp, synthetic construct
  source 1..80: mol_type = other DNA
agccgtagatgggacaccgtttccatcgcaggatctccaccagccccagttggtaagcagcccacgcaaactcggcgtgg

SEQ ID NO: 110410 - DNA, 80 bp, synthetic construct
  source 1..80: mol_type = other DNA
cccccacgcggtgctggagggccagccgtttaaggcgacgtgcacggccgccacctactacccgggcaaccgcgcggagt

SEQ ID NO: 110411 - DNA, 80 bp, synthetic construct
  source 1..80: mol_type = other DNA
ccaggtcccaccgcccgagttcttcacagaactagacggggtgcgcctgcacaggtttgcgcccccttgcaagcccttgt

SEQ ID NO: 110412 - DNA, 80 bp, synthetic construct
  source 1..80: mol_type = other DNA
ctggctgctctaacaccattagccagaggcacactgctcgtggcatggagagcgggcctcgccacttgtggagggttcat

SEQ ID NO: 110413 - DNA, 80 bp, synthetic construct
  source 1..80: mol_type = other DNA
gagatcaagacgagctggtcggcagagcacgagtgtcgccaggatgtggatggagcgtgcgggagacagcctgcctgtcc

SEQ ID NO: 110414 - DNA, 80 bp, synthetic construct
  source 1..80: mol_type = other DNA
ccactctcggagctggactcttagccctttttggttttttcacactgtcaccttggtacaaacactggatctcgcgcctc

SEQ ID NO: 110415 - DNA, 80 bp, synthetic construct
  source 1..80: mol_type = other DNA
aaaagccgtctgagcctttgttccttccgagaaaaacagaccgcaggacttggcagaaaacacattggtggcacagctca

SEQ ID NO: 110416 - DNA, 80 bp, synthetic construct
  source 1..80: mol_type = other DNA
tcctactttctgtaggggtaggcatcttccttcttcccgctcggtaagggggaagcctaaagctacactccattaatgct

SEQ ID NO: 110417 - DNA, 80 bp, synthetic construct
  source 1..80: mol_type = other DNA
tgaggaggaaatctaccagtgctgccaactcgacccggcggcgcgtaaagtcatagcttcactcacagagaggctgtact

SEQ ID NO: 110418 - DNA, 80 bp, synthetic construct
  source 1..80: mol_type = other DNA
acgtcaagttcccaggcggcggtcagatcgttggtggagtttacgtactaccacgcaggggccccaggttgggtgtgcgt

SEQ ID NO: 110419 - DNA, 80 bp, synthetic construct
  source 1..80: mol_type = other DNA
ggcaaagctattccactagcttacatcaaggggggcagacacctgattttctgtcattccaagaagaaatgtgatgagct

SEQ ID NO: 110420 - DNA, 80 bp, synthetic construct
  source 1..80: mol_type = other DNA
gccccaatgcgtccgttgtgtacgagacggagaacctgatcatgcatctgcccgggtgtgtgccctacgtacgcgagggc

SEQ ID NO: 110421 - DNA, 80 bp, synthetic construct
  source 1..80: mol_type = other DNA
agtcgtgcaaacacggcatggtttttccgagatcggaaacggtgctcatgcatatggtgcaggtattatccgaagcgtcg

SEQ ID NO: 110422 - DNA, 80 bp, synthetic construct
  source 1..80: mol_type = other DNA
ggagcgaccggcagcggaggcgtccgggggaggggagagtgatttagggggcggtagttcagggggtgggtcgtaaaact

SEQ ID NO: 110423 - DNA, 80 bp, synthetic construct
  source 1..80: mol_type = other DNA
agcagttcaagcagaaggtccttggccttattcaaacttcggccagacaggcggaggagttgaagccagcggtcaacgcg

SEQ ID NO: 110424 - DNA, 80 bp, synthetic construct
  source 1..80: mol_type = other DNA
ccatataaagcgagtctggaaggggggaaaggcggacagtcgataagtcggtagcggtggacgcgcacctgttccgcctg

SEQ ID NO: 110425 - DNA, 80 bp, synthetic construct
  source 1..80: mol_type = other DNA
gggggagtgttaaggaggatcgcctatgttatggaggaccttggaaattgcaacacaagtggaatgggcacgatgaagtt

SEQ ID NO: 110426 - DNA, 80 bp, synthetic construct
  source 1..80: mol_type = other DNA
cgacacagcgattcccgggctttcttgccggcgacaagctggcctgcgccattgtcaacacggccggccgcgagaccgga

SEQ ID NO: 110427 - DNA, 80 bp, synthetic construct
  source 1..80: mol_type = other DNA
aaaaatcttaccacttacacttttggaaatgccccagtgaaagcagaaggtggtgatatcactaaagacaaaggtcttcc

SEQ ID NO: 110428 - DNA, 80 bp, synthetic construct
  source 1..80: mol_type = other DNA
gcttgaagcggtcggcggcgtagctggtgtgttcggtgtgcgacccctcccggtagccgtaaaacggggacatgtacaca

SEQ ID NO: 110429 - DNA, 80 bp, synthetic construct
  source 1..80: mol_type = other DNA
gcgtaggcgtccgcgccgcagtgggcgcagacggtctcgcactccacgagccaggtgaggtcgggctgattgggatcaaa

SEQ ID NO: 110430 - DNA, 80 bp, synthetic construct
  source 1..80: mol_type = other DNA
aggcacgtcggcgtggcgctcgggcaggtcccggtgctgtgccctgagagcgctggcgtgcgcgacgacgcggcggttga

SEQ ID NO: 110431 - DNA, 80 bp, synthetic construct
  source 1..80: mol_type = other DNA
caatccggaacccattcctacaaccattatggccaaaaacgaagtcttctgcgtcaaccctgcgaagggaggtcgcaagt

SEQ ID NO: 110432 - DNA, 80 bp, synthetic construct
  source 1..80: mol_type = other DNA
atatgctccagcgctacaaccttgaagtcaggcttcctggatgtcagcatctgactttggccagcacctgtcccgcggat

SEQ ID NO: 110433 - DNA, 80 bp, synthetic construct
  source 1..80: mol_type = other DNA
tggtcatctccgagagtgctggcgtcccagaggatgaagccgccctgagagcgttcacggacgctatgatcaggtattca

SEQ ID NO: 110434 - DNA, 80 bp, synthetic construct
  source 1..80: mol_type = other DNA
atcttctgctctatttcaacaccagctacgaggcaccgaacgccgaaaagtgtagctggtggtggagaagaacacaggat

SEQ ID NO: 110435 - DNA, 80 bp, synthetic construct
  source 1..80: mol_type = other DNA
agccgcccacgcctgagcctgagggtgagggaggctgcgactcagacgtggagtccttttcttccatgcccccccttgag

SEQ ID NO: 110436 - DNA, 80 bp, synthetic construct
  source 1..80: mol_type = other DNA
ccgacaagcgtagtggaataagtccggcacgggctcacgtgtcggcggccgatctggtgactgcgtacgagcaaactgta

SEQ ID NO: 110437 - DNA, 80 bp, synthetic construct
  source 1..80: mol_type = other DNA
tactgaactattaagtgaaagtcaagtcattggtaccttcgaaatgcagggaccgcagtctgacagcaatttcacgacga

SEQ ID NO: 110438 - DNA, 80 bp, synthetic construct
  source 1..80: mol_type = other DNA
atctgcgtgttcgaattcgccaatgacaagacgctgggcggggtttgtgtcatcatagaactaaagacatgcaaatatat

SEQ ID NO: 110439 - DNA, 80 bp, synthetic construct
  source 1..80: mol_type = other DNA
ggcctcgagctgggcccggcgctcgcgcgcggccagcacctcccgcagccccgccgtgacccgctcggtggcttcggcgc

SEQ ID NO: 110440 - DNA, 80 bp, synthetic construct
  source 1..80: mol_type = other DNA
cccccagcccttcccatttgggccaggccagactacaatccaccattaatagagcagtggaagaaaccggactatgtgcc

SEQ ID NO: 110441 - DNA, 80 bp, synthetic construct
  source 1..80: mol_type = other DNA
tgctcatggagcaatggaaaaataggaaccccacagctgcttgtgtgttcaaggtgttggccccatatcgcccagaagtg

SEQ ID NO: 110442 - DNA, 80 bp, synthetic construct
  source 1..80: mol_type = other DNA
aaaggaaaccaaaatgaagccatgctatggctcatttgccagacccactaatgaaaagggaggtcaggcaaaatttaaaa

SEQ ID NO: 110443 - DNA, 80 bp, synthetic construct
  source 1..80: mol_type = other DNA
ttaggacctggctctttgagaatggagaggagagagtgactaggatggcgatcagtggagacgattgcgtcgtcaagccg

SEQ ID NO: 110444 - DNA, 80 bp, synthetic construct
  source 1..80: mol_type = other DNA
ggtacgccttgacgagtccaccgtgtcacaggcgctggccgaactcgctgagttatccttccccaagggtttggctatga

SEQ ID NO: 110445 - DNA, 80 bp, synthetic construct
  source 1..80: mol_type = other DNA
tgtgagtgatagcgaggaacaaagtgtggtttgctgttccatgtcctactcctggaccggcgctataataacaccttgta

SEQ ID NO: 110446 - DNA, 80 bp, synthetic construct
  source 1..80: mol_type = other DNA
ctcaggggtacaaagttttggtgctcaatccatccgtagcagccacgctcgggtttggggcgtacatgtccaaggcccac

SEQ ID NO: 110447 - DNA, 80 bp, synthetic construct
  source 1..80: mol_type = other DNA
ggaaaaagaatcccatggggttctcttatgacactaggtgctttgactcaacagtgactgaacgcgatattcgcgtagaa

SEQ ID NO: 110448 - DNA, 80 bp, synthetic construct
  source 1..80: mol_type = other DNA
taatggggaaaatcaatctgacgaatctaatgttccatcagctactgtggcaattgtggtgggagtgattgcgggattca

SEQ ID NO: 110449 - DNA, 80 bp, synthetic construct
  source 1..80: mol_type = other DNA
gtccactcagcaactctttgctgagacaccacaatcttgtctactcaacgtcatctcgtagcgctgctgcgcgtcaaaag

SEQ ID NO: 110450 - DNA, 80 bp, synthetic construct
  source 1..80: mol_type = other DNA
ccaagctggaattcctggcccccgagttggtacgggcggtggcgcgactgcggtttaaggagtgcgcgccggcggacgtg

SEQ ID NO: 110451 - DNA, 80 bp, synthetic construct
  source 1..80: mol_type = other DNA
cggcggccggcacggcgacgtgctggcccgtgggccggtagagggcgttgcgtggagcgggaggtgacgcctcgcgccac

SEQ ID NO: 110452 - DNA, 80 bp, synthetic construct
  source 1..80: mol_type = other DNA
aacagccacatgaccctgcacggctgcaatttcttcgggttcaacaatatgtgtgcagaggtctggggcgcctccaagat

SEQ ID NO: 110453 - DNA, 80 bp, synthetic construct
  source 1..80: mol_type = other DNA
acgttgtgggcgagaatgatactgatgacccacttcttcagtgtcctcttagccagggatcagcttgaacaggcccttga

SEQ ID NO: 110454 - DNA, 80 bp, synthetic construct
  source 1..80: mol_type = other DNA
attataattacttttaatgaagaagctgacagcgagtattctattgtgttttactttaaatggtacaaaacttatgaaaa

SEQ ID NO: 110455 - DNA, 80 bp, synthetic construct
  source 1..80: mol_type = other DNA
gtcttcccgtctcagcgcggcgggtgcgggaagtgctattgggtccagctgacaactataaaacaatgggctggcggttg

SEQ ID NO: 110456 - DNA, 80 bp, synthetic construct
  source 1..80: mol_type = other DNA
aaaaagacgcggaagtcactggaaacagtcctcggcttgacgtggcactagatgagagtggtgatttctccttggtagag

SEQ ID NO: 110457 - DNA, 80 bp, synthetic construct
  source 1..80: mol_type = other DNA
gaagcccacaatgacaagcgggctgactcagcgtatgtgtgcaagcagggcgttgtggacagaggctggggaaatggatg

SEQ ID NO: 110458 - DNA, 80 bp, synthetic construct
  source 1..80: mol_type = other DNA
gggcaaaggacgttcggagccatgccagcaaggccattaaccacatcaactccgtgtgggcggacttgctggaggacact

SEQ ID NO: 110459 - DNA, 80 bp, synthetic construct
  source 1..80: mol_type = other DNA
cggccacccaggtgacgccttcgagggtctcgttcagcgaattcggcttatcgtcccatctacgttgcggggcgtggacg

SEQ ID NO: 110460 - DNA, 80 bp, synthetic construct
  source 1..80: mol_type = other DNA
gggggacctgtgcgggcagcgcagatgccgcgcgagcggtgtctacaccaccagcttcgggaacactgtaacgtgctacc

SEQ ID NO: 110461 - DNA, 80 bp, synthetic construct
  source 1..80: mol_type = other DNA
tgaccgtgaggtcttataccagcaatacgacgagatggaggagtgctcaaagcatatcccctatcttgccgaaggccggc

SEQ ID NO: 110462 - DNA, 80 bp, synthetic construct
  source 1..80: mol_type = other DNA
ccggtgcccaatcgtccgtcagcgcggggtcgccttgtccccggtactgccccccatgaaccccgttccgacatcgggca

SEQ ID NO: 110463 - DNA, 80 bp, synthetic construct
  source 1..80: mol_type = other DNA
cgcgtctcatcgtatacccggatctgggagtccgggtgtgcgagaagagggcgcttcatgacgtcgtcaaaaaacttcct

SEQ ID NO: 110464 - DNA, 80 bp, synthetic construct
  source 1..80: mol_type = other DNA
gtgtctttttagcggggcagatggtcagtttccagccgcggcgccattggaccacccaggagtgcaactgctccatctat

SEQ ID NO: 110465 - DNA, 80 bp, synthetic construct
  source 1..80: mol_type = other DNA
ggccacagcagccaccagggccgcaggcttaaaggactgcacgatgttggtttgcggtgacgacctagtcgtcatcgctg

SEQ ID NO: 110466 - DNA, 80 bp, synthetic construct
  source 1..80: mol_type = other DNA
agtggtgaagctcatgagcaaaccttgggacgccattgccaacgtcaccaccatggccatgactgacaccaccccttttg

SEQ ID NO: 110467 - DNA, 80 bp, synthetic construct
  source 1..80: mol_type = other DNA
ctcatagcccaggagcaccttgaaaaggctctagattgtgaaatctatggggccatacactccgtccaaccgttggacct

SEQ ID NO: 110468 - DNA, 80 bp, synthetic construct
  source 1..80: mol_type = other DNA
tattagcgcactgcggctcatggtcaccgaggtaccgcaaagcgaagtgtaccagtccgggcccgattatttttttcaaa

SEQ ID NO: 110469 - DNA, 80 bp, synthetic construct
  source 1..80: mol_type = other DNA
aacagaagcactaaagattgcatatcctaccgaatataatcgctctagcgtgtttgtggaaccgtcgtttgtgccttata

SEQ ID NO: 110470 - DNA, 80 bp, synthetic construct
  source 1..80: mol_type = other DNA
cttttgcgctgcgcgtgccgggcgttgtgttctcgatcatctccggcggccattggggagtgcttctcgggttagctttc

SEQ ID NO: 110471 - DNA, 80 bp, synthetic construct
  source 1..80: mol_type = other DNA
tacgtgtacttcgaggagtacgcgtactctcaccagctgagtcgcgccgacgtcaccaccgtcagcaccttcatcgacct

SEQ ID NO: 110472 - DNA, 80 bp, synthetic construct
  source 1..80: mol_type = other DNA
attgggctaaagtcatcttggtcctattcctttttgcagtggttgacgccgagactcatgtgactgggggggtagtcggt

SEQ ID NO: 110473 - DNA, 80 bp, synthetic construct
  source 1..80: mol_type = other DNA
gtccgcatgactaactcaggtgtccagctggcgggcggcgcttcccggtgtccgcccagacccgacttaggtataaaaac

SEQ ID NO: 110474 - DNA, 80 bp, synthetic construct
  source 1..80: mol_type = other DNA
ggggccatcttcatcataggccagggaatcatctggacacccagagtccactggactgtgcaagattgtaactgctccat

SEQ ID NO: 110475 - DNA, 80 bp, synthetic construct
  source 1..80: mol_type = other DNA
tgttactggtaatggcggcagttatttacgctatggactgtttggtggacacggtatcctttattgggccaagggtgtgg

SEQ ID NO: 110476 - DNA, 80 bp, synthetic construct
  source 1..80: mol_type = other DNA
tgttccaacaacagcatcacatggcaacttgagggtgcagtgcttcacgtccccggttgtgtcccctgcgagtcggtgaa

SEQ ID NO: 110477 - DNA, 80 bp, synthetic construct
  source 1..80: mol_type = other DNA
atttctttcatggtcccgtaataaacagccaacgcacgccgcgtatgatgagttgcttgccaatgtttattgctgtggtt

SEQ ID NO: 110478 - DNA, 80 bp, synthetic construct
  source 1..80: mol_type = other DNA
gcgggacagctgcttaggccggaggctgacacactgtggacgatgccggttgcttgtggcatgagtggcgtggtcaggtg

SEQ ID NO: 110479 - DNA, 80 bp, synthetic construct
  source 1..80: mol_type = other DNA
gctttccccacactacaagcgctggctagccctgtgcatgtggtggttgcaatatttcatagctagagtagaggccatgc

SEQ ID NO: 110480 - DNA, 80 bp, synthetic construct
  source 1..80: mol_type = other DNA
agcgatcccagccccgagggagacgccagcccatcccaaaggcgagaccccaaacgggcagaaactgggctcagcctggt

SEQ ID NO: 110481 - DNA, 80 bp, synthetic construct
  source 1..80: mol_type = other DNA
gagttttgcctactagctttggcaacacgatcacctgttacatcaaggccacagcggccgcaagggccgcaggcctccgg

SEQ ID NO: 110482 - DNA, 80 bp, synthetic construct
  source 1..80: mol_type = other DNA
tcctggcggaggccttgattcaggattgggtaccgccactgcaagtgcggtgtggccgtgacggtgtcatatgggctgtg

SEQ ID NO: 110483 - DNA, 80 bp, synthetic construct
  source 1..80: mol_type = other DNA
ccaccagtgggaaaagccgaactggaagatggagcctatagaatcaagcaaagagggatttttggatattctcagattgg

SEQ ID NO: 110484 - DNA, 80 bp, synthetic construct
  source 1..80: mol_type = other DNA
caactcaaggagacgtggtggttgttgccactgacgccctaatgactggatacaccggtgactttgactctgtcatcgac

SEQ ID NO: 110485 - DNA, 80 bp, synthetic construct
  source 1..80: mol_type = other DNA
cccccggtgatgccctgcccgacctgagcccgggtccccatcttaatcctctcccgctccatccatcacaaatgtataat

SEQ ID NO: 110486 - DNA, 80 bp, synthetic construct
  source 1..80: mol_type = other DNA
cccgagtccggggcggccgcgcatcagggcggccagagggattcccgcggccgccaggcactcgctggatatgatgacgt

SEQ ID NO: 110487 - DNA, 80 bp, synthetic construct
  source 1..80: mol_type = other DNA
gcctactttggtatggctggcaactggctaaaagttctggctgttctgttcttatttgcaggggttgaagcacaaaccat

SEQ ID NO: 110488 - DNA, 80 bp, synthetic construct
  source 1..80: mol_type = other DNA
ctgcgagctccccgcacatccgtccgaaggcgtcctttgccctcccccacaaactcgcgcacggtctctcggagaggctg

SEQ ID NO: 110489 - DNA, 80 bp, synthetic construct
  source 1..80: mol_type = other DNA
cgcgcctatttgaatacaccaggactccccgtctgtcaagaccacctggaattttgggagtgcgtatttacggggttgac

SEQ ID NO: 110490 - DNA, 80 bp, synthetic construct
  source 1..80: mol_type = other DNA
tgtagacccgaacattaggacaggggtgcggactattacaacaggaggtcccatcacctactccacctatggcaagttct

SEQ ID NO: 110491 - DNA, 80 bp, synthetic construct
  source 1..80: mol_type = other DNA
gtgcgctccccccccccagcaacaccccagtgccgcctccaaggaggcgccgaactgtggtcttggaccagagtaccgtg

SEQ ID NO: 110492 - DNA, 80 bp, synthetic construct
  source 1..80: mol_type = other DNA
gaccccacgtgttgtagctctgtggaccgcacaaggcgcagccataaccttggtgaaggtgttagccaaggagaagggac

SEQ ID NO: 110493 - DNA, 80 bp, synthetic construct
  source 1..80: mol_type = other DNA
atttgggcgcgttcggggacgtacgcgtccccccattccaccacatcgctgggcagcgttgataggaatttacactcccg

SEQ ID NO: 110494 - DNA, 80 bp, synthetic construct
  source 1..80: mol_type = other DNA
ccaccccacccacgaaacacaggggacgcaccccgggggcctccgacgacagaaacccaccggtccgccttttttgcacg

SEQ ID NO: 110495 - DNA, 80 bp, synthetic construct
  source 1..80: mol_type = other DNA
aagtgagatgataattccaaaaaatttcgccgggccagtgtcacaacacaactacagaccaggttaccatacacaaacag

SEQ ID NO: 110496 - DNA, 80 bp, synthetic construct
  source 1..80: mol_type = other DNA
cgaacgcggccacgaagatgctagcggcgcagtggggcgcccccaggcatttggcacagagaaacgcgtaatcggccacc

SEQ ID NO: 110497 - DNA, 80 bp, synthetic construct
  source 1..80: mol_type = other DNA
gctccacccgcacttgctctttgagatcactaagatcatgctggccatcttcgggcccctatggatcttgcaggccagtc

SEQ ID NO: 110498 - DNA, 80 bp, synthetic construct
  source 1..80: mol_type = other DNA
ccccccatgcgaacattgaggagatagctctgccgacaacgggggaagtccccttctacggcagggcaatccctctagag

SEQ ID NO: 110499 - DNA, 80 bp, synthetic construct
  source 1..80: mol_type = other DNA
tagtgtagctggcggaggaaccatagatgtaagacttggagatgatggtggactctcatttgataaaaagggtgatttag

SEQ ID NO: 110500 - DNA, 80 bp, synthetic construct
  source 1..80: mol_type = other DNA
gaacccgtctccacgatcaggcgctccaggcagcgatgtttggcggcgatgtcggccgacgtaaagaacttaaagcaggg

SEQ ID NO: 110501 - DNA, 80 bp, synthetic construct
  source 1..80: mol_type = other DNA
atgccattctcttcatctgcattgcttggcatgtcaagggccggctcccggctattgccgcttacgcggcctgcgggatg

SEQ ID NO: 110502 - DNA, 80 bp, synthetic construct
  source 1..80: mol_type = other DNA
cgctgacacccccatcccaaccaccatcatggccaagacggaggttttctccgtgaaaccggagaagggtgggcgaaagc

SEQ ID NO: 110503 - DNA, 80 bp, synthetic construct
  source 1..80: mol_type = other DNA
gcatcttccgagcagccgtgtgtactcggggtgtggccaaagctgtggactttgtgccggtcgagtcccttgaaaccacc

SEQ ID NO: 110504 - DNA, 80 bp, synthetic construct
  source 1..80: mol_type = other DNA
ggatccggaccttagcgaggggtcatggtcgacggtcagtagtgaggccagcacagaggacgttgtgtgctgctcaatgt

SEQ ID NO: 110505 - DNA, 80 bp, synthetic construct
  source 1..80: mol_type = other DNA
gtccacccccttgtggcattgtaccggcgcggaatgtctgcggaccagtgttctgcttcacccccagccccgtggtggtg

SEQ ID NO: 110506 - DNA, 80 bp, synthetic construct
  source 1..80: mol_type = other DNA
ggcctcgcaaatcgctccccccgccggagccactggcttcgtcgtcagtggcctggtgggggcagccgtaggcagcatag

SEQ ID NO: 110507 - DNA, 80 bp, synthetic construct
  source 1..80: mol_type = other DNA
ggcggcgtcgagcataggttcaacgctgcttgcaactggacccgaggcgatcggtgcgagcttgatgacagagacaggtt

SEQ ID NO: 110508 - DNA, 80 bp, synthetic construct
  source 1..80: mol_type = other DNA
agacgcacacaatatttatacactccctttatcgtcaaaagtccacaaaaactccaaaggtcacaaaaacccgcgcaaaa

SEQ ID NO: 110509 - DNA, 80 bp, synthetic construct
  source 1..80: mol_type = other DNA
aaagatctccccaggacaaccaaatggcaatcatcatcatggtagcagtaggtcttctgggcttgattaccgccaatgaa

SEQ ID NO: 110510 - DNA, 80 bp, synthetic construct
  source 1..80: mol_type = other DNA
agctggggctcgctgtggagcggcattaaaaatttcggttccgccgttaagaactatggcagtaaggcctggaacagcag

SEQ ID NO: 110511 - DNA, 80 bp, synthetic construct
  source 1..80: mol_type = other DNA
ctgctgctattcgccggcgtcgacgcggaaacctacaccaccgggggatccgtcgccagcatgacggctggttttacccg

SEQ ID NO: 110512 - DNA, 80 bp, synthetic construct
  source 1..80: mol_type = other DNA
gggttcaggaaagagatcggaaggatgctgaacatcttgaataggaggcgcaggtctgcaggcatgatcattatgctgat

SEQ ID NO: 110513 - DNA, 80 bp, synthetic construct
  source 1..80: mol_type = other DNA
ccagatccaagtttggctatggggctaaggatgtccggagccatgccaggaaggccgtcaaccacatccgctccgtgtgg

SEQ ID NO: 110514 - DNA, 80 bp, synthetic construct
  source 1..80: mol_type = other DNA
aagaaacaggatgtcgttgttttaggatctcaagaaggggccatgcacacggcacttacaggggccacagaaatccagat

SEQ ID NO: 110515 - DNA, 80 bp, synthetic construct
  source 1..80: mol_type = other DNA
cggagacggcgtgtgctacaccacctgtggctgcggagccaatatcacgggtcacgtgaaaaatggaaccatgaagattg

SEQ ID NO: 110516 - DNA, 80 bp, synthetic construct
  source 1..80: mol_type = other DNA
acgagacgtggaagtgtctcttgcggcttaagccaacattacatggacctacgccccttctataccggttggggcccgtc

SEQ ID NO: 110517 - DNA, 80 bp, synthetic construct
  source 1..80: mol_type = other DNA
ccgggctgatacatttacaccagaacatagtggacgtccagtacttgtacgggatttcctcgtctgtagtaaactttgcc

SEQ ID NO: 110518 - DNA, 80 bp, synthetic construct
  source 1..80: mol_type = other DNA
gccatgttgtgcatattttcttgtacacgctgccctgatccggcaaaaaacgaaaggtggcgcgctcgtcgtgatccaca

SEQ ID NO: 110519 - DNA, 80 bp, synthetic construct
  source 1..80: mol_type = other DNA
gttttatatcccgcgaccgcttatcctgtgctattgttaacactgctggtcgcgaaactgggggcgtgcattggcttgct

SEQ ID NO: 110520 - DNA, 80 bp, synthetic construct
  source 1..80: mol_type = other DNA
actacccttataggttgtggcattatccgtgcactgtaaacttcaccatcttcaaggcgcggatgtatgtaggaggggtg

SEQ ID NO: 110521 - DNA, 80 bp, synthetic construct
  source 1..80: mol_type = other DNA
ttttacacgacattgagaattttttaaaacagcttaattactgctatattatcacgtcttctcgtgaggcgctaaacaca

SEQ ID NO: 110522 - DNA, 80 bp, synthetic construct
  source 1..80: mol_type = other DNA
gctacacaggcgatttcgataccgtcatcgactgtaacgtagccgtgacacaggtggtggatttcagcttggacccaaca

SEQ ID NO: 110523 - DNA, 80 bp, synthetic construct
  source 1..80: mol_type = other DNA
atcggctccgtcgctgaaggccaattgccaatcgcataggcttcatccagacgctgagctagtggacgccaacttgttat

SEQ ID NO: 110524 - DNA, 80 bp, synthetic construct
  source 1..80: mol_type = other DNA
ggccagatgttcacctataggcctcgccagcacgctacggtgcaggactgcaactgttccatttacagtggccacgtcac

SEQ ID NO: 110525 - DNA, 80 bp, synthetic construct
  source 1..80: mol_type = other DNA
gaggtaacggctaagctcctctcagttgaggaggcatgtgcccttacccctccacactctgctcgttcgaagttcgggta

SEQ ID NO: 110526 - DNA, 80 bp, synthetic construct
  source 1..80: mol_type = other DNA
ctacatcaaagccctcgcagcatgcaaggcagcggggatcgtggaccccgttatgctggtgtgtggagacgacctggtcg

SEQ ID NO: 110527 - DNA, 80 bp, synthetic construct
  source 1..80: mol_type = other DNA
gctgagcagcaaaaaactcacgtatttgggcaggcgccttattctggtataaatattacaaaggagggtattcaaatagg

SEQ ID NO: 110528 - DNA, 80 bp, synthetic construct
  source 1..80: mol_type = other DNA
tagtagaggtccaagatgatggaactatgaaaataaaagatgaagagagggatgacacactcactatactccttaaagca

SEQ ID NO: 110529 - DNA, 80 bp, synthetic construct
  source 1..80: mol_type = other DNA
atgaattccaccggatttgtcaagacgtgcggcgccccaccgtgcaacatcagccccccaagcagcagcaacaactccct

SEQ ID NO: 110530 - DNA, 80 bp, synthetic construct
  source 1..80: mol_type = other DNA
ctggacccttcaacggaattgtaactgagcctgatcccgaagagggtactagcagtgggcaaaggggtggcattaatgtg

SEQ ID NO: 110531 - DNA, 80 bp, synthetic construct
  source 1..80: mol_type = other DNA
agcgtatgacacggggtgcgcgtggtacgagctgagcccctcagagaccaccgtgcggctacgcgcttatctcaataccc

SEQ ID NO: 110532 - DNA, 80 bp, synthetic construct
  source 1..80: mol_type = other DNA
ccctcggggcacgctgtgggcatcttccgggctgctgtgtgcacccggtgggttgcgaaggcggtggactttgtacccat

SEQ ID NO: 110533 - DNA, 80 bp, synthetic construct
  source 1..80: mol_type = other DNA
aggacatcacggcctggtatggtctctggtcttcatctgttgggcgtggtacgtacggggtagagtggcacctgcctgcg

SEQ ID NO: 110534 - DNA, 80 bp, synthetic construct
  source 1..80: mol_type = other DNA
tgatggtcgtgttgggaggattaacatggatggacttgctgagagtcacaatcatgcttgggaacacaatggccggcaaa

SEQ ID NO: 110535 - DNA, 80 bp, synthetic construct
  source 1..80: mol_type = other DNA
atggctcttgcctgggcacgtaaaaatccataccaccttcttttagctctgcaactaaacctctcccccgtccccagcca

SEQ ID NO: 110536 - DNA, 80 bp, synthetic construct
  source 1..80: mol_type = other DNA
gcgcgagtctggtgacttggcgcccaccgtgcagcttatggtgcccaagcgtcagcgactggaagatgtcttggaaaaaa

SEQ ID NO: 110537 - DNA, 80 bp, synthetic construct
  source 1..80: mol_type = other DNA
aaaactcaccaaggccatggcgacgagcgtacgttcgttcttctttattatctgtgtctagtataatgaggcgagtcgtg

SEQ ID NO: 110538 - DNA, 80 bp, synthetic construct
  source 1..80: mol_type = other DNA
cagggtgaatttaccatatccccaaataacaccccgcaattaggcccacacctaaaccctttcctagcacatttatccca

SEQ ID NO: 110539 - DNA, 80 bp, synthetic construct
  source 1..80: mol_type = other DNA
atccactgacgctgacagcggcggtgttgatgctagtggctcattacgccataattggacctggactgcaagcaaaagct

SEQ ID NO: 110540 - DNA, 80 bp, synthetic construct
  source 1..80: mol_type = other DNA
ctggaatggcgtaacaccagcggcctgtatattctgaccaacgattgcagcaacaacagcattgtgtatgaagcggatga

SEQ ID NO: 110541 - DNA, 80 bp, synthetic construct
  source 1..80: mol_type = other DNA
cgacgggagttatttgtggatccccgcctctcattacaatcagctcgtcaccgggcaatccgcgccccgccacccgccgc

SEQ ID NO: 110542 - DNA, 80 bp, synthetic construct
  source 1..80: mol_type = other DNA
aaaagggacgcacgtcaggcctacgtgccgccgcagaacctgtttagggatcgcagcggacaggaacccgaagagatgag

SEQ ID NO: 110543 - DNA, 80 bp, synthetic construct
  source 1..80: mol_type = other DNA
atgctcattttgttaggccaagccgaggccgcactggagaagttaatcattgtgcacgcggctagcgtcgccagctcaaa

SEQ ID NO: 110544 - DNA, 80 bp, synthetic construct
  source 1..80: mol_type = other DNA
tccactctgcatggcccaagcttgaacagttttggcacaagcatatgtggaatttcataagcggcatacaatatcttgcc

SEQ ID NO: 110545 - DNA, 80 bp, synthetic construct
  source 1..80: mol_type = other DNA
agttattgtttgatgccaatggtaaattattgacaggatcaagcctagatggaaattattggaattataaaaacaaggat

SEQ ID NO: 110546 - DNA, 80 bp, synthetic construct
  source 1..80: mol_type = other DNA
acagaactgggaagtggcaatcatggatgaagctcattggacggatccacacagcatagccgctcggggtcacttgtaca

SEQ ID NO: 110547 - DNA, 80 bp, synthetic construct
  source 1..80: mol_type = other DNA
cacagtggatattgagctggtgacaactacagtctctaacatggctgaagtgaggtcttattgctatgaggcctccatct

SEQ ID NO: 110548 - DNA, 80 bp, synthetic construct
  source 1..80: mol_type = other DNA
ccattaatacacgcgcaacgcaacgggcttccgcggaagcagagttgtcttgctttaatacgctaagcgcggccgtagac

SEQ ID NO: 110549 - DNA, 80 bp, synthetic construct
  source 1..80: mol_type = other DNA
gttctttactgaagtggatggggtgagactccaccgttacgcccccccatgcaaacccctgttgagagatgagatcactt

SEQ ID NO: 110550 - DNA, 80 bp, synthetic construct
  source 1..80: mol_type = other DNA
tgaacccctccgtcgcggctacactaggctttggggcatacatgtctaaggcctacgggattgacccgaacatcagaacc

SEQ ID NO: 110551 - DNA, 80 bp, synthetic construct
  source 1..80: mol_type = other DNA
aggaggggaaggtgcagcccagtggatgaacaggctgatcgcgtttgcttctcgaggcaatcacgtatcaccaacccact

SEQ ID NO: 110552 - DNA, 80 bp, synthetic construct
  source 1..80: mol_type = other DNA
tctactgacaaaaatagtaatgggaaaaatactattgtttctaacctttatctggaaggaaaggcatatcagccagttgc

SEQ ID NO: 110553 - DNA, 80 bp, synthetic construct
  source 1..80: mol_type = other DNA
accaccaacagcctcgtctccttgttcgctccggggcctcaacagaatatccagcttatcaactcaaacggtagctggca

SEQ ID NO: 110554 - DNA, 80 bp, synthetic construct
  source 1..80: mol_type = other DNA
ccctttcccaccccgcccgcctctacgtcaccttacaccacccctagtccctcctccctcattatcatattggctcgttt

SEQ ID NO: 110555 - DNA, 80 bp, synthetic construct
  source 1..80: mol_type = other DNA
gcctgcttgcaagactgcgggaggaacatcgcttttgcccgccgctacctgcttttccaccgcggggtaaacatcccccg

SEQ ID NO: 110556 - DNA, 80 bp, synthetic construct
  source 1..80: mol_type = other DNA
ctggctgatggaggttgcagtggaggggcatacgacataatcatctgtgacgagtgccattccactgactccacaacgat

SEQ ID NO: 110557 - DNA, 80 bp, synthetic construct
  source 1..80: mol_type = other DNA
ctcaaagctacagccgctattagggcggccgggctgagagactgcactatgctggtttgcggcgacgacttagtcgtcat

SEQ ID NO: 110558 - DNA, 80 bp, synthetic construct
  source 1..80: mol_type = other DNA
gcccctatcaccgcgtatgcgcagcagacgcgaggggtactgggcgccatagttctcagcctgaccggccgggacaaaaa

SEQ ID NO: 110559 - DNA, 80 bp, synthetic construct
  source 1..80: mol_type = other DNA
atccccctagacctaatcaaggggggcagacatctcatcttctgccactcaaagaaaaaatgtgatgaattggccaagca

SEQ ID NO: 110560 - DNA, 80 bp, synthetic construct
  source 1..80: mol_type = other DNA
cggggatctcgagggtcgtgtagtgtagggcgtggttgatggcgaacacgaggctgcatagcttgcggatgcgcgtgagg

SEQ ID NO: 110561 - DNA, 80 bp, synthetic construct
  source 1..80: mol_type = other DNA
ctcaaaagagcttccccactgactcagacaaaccacctaccggctcagactctggtcatggtaccactgatacagcgtca

SEQ ID NO: 110562 - DNA, 80 bp, synthetic construct
  source 1..80: mol_type = other DNA
acctgtgggttggccgccacgtgggtcccgggcacgaggaagaagcggtaaaaggagggtttgctgtggtcctttgggtc

SEQ ID NO: 110563 - DNA, 80 bp, synthetic construct
  source 1..80: mol_type = other DNA
aacgcagggaatcacagctgagataacgccccaggcatcaactactgaagccatcttgcctgaatatggaacccttgggc

SEQ ID NO: 110564 - DNA, 80 bp, synthetic construct
  source 1..80: mol_type = other DNA
aaaggtcgctttgtccctgctgtcacttacggtctgctacaactgtggccactcctcctgctcgtgctcgcactcccaca

SEQ ID NO: 110565 - DNA, 80 bp, synthetic construct
  source 1..80: mol_type = other DNA
ggtacccatggggttctcgtatgacacccgctgcttcgactccacggttaccgagagagacatcagggtcgaggaggaga

SEQ ID NO: 110566 - DNA, 80 bp, synthetic construct
  source 1..80: mol_type = other DNA
aagtacatcatggcatccatgtcggctgatcttgaggtcaccacgagcacttgggtgctacttgggggagttctagcagc

SEQ ID NO: 110567 - DNA, 80 bp, synthetic construct
  source 1..80: mol_type = other DNA
tggtggggtcccagctcccatgcgagcccgagccagacgtcgcagtgttaacatccatgctgacagatccatctcacatc

SEQ ID NO: 110568 - DNA, 80 bp, synthetic construct
  source 1..80: mol_type = other DNA
gcgaggctaatagtctaccccgatctgggggtgcgggtttgcgaaaagagggccctttatgacgtcacacgcaagcttcc

SEQ ID NO: 110569 - DNA, 80 bp, synthetic construct
  source 1..80: mol_type = other DNA
agggataggagtcagctaagcccgctgctgcactccaccactgaatgggctattctaccctgttcgtacacagatctacc

SEQ ID NO: 110570 - DNA, 80 bp, synthetic construct
  source 1..80: mol_type = other DNA
gattggacaacaccatgtgccacgtcttggttacgggacatttgggattggatatgcacagtcctggccgattttaaggt

SEQ ID NO: 110571 - DNA, 80 bp, synthetic construct
  source 1..80: mol_type = other DNA
agctccttggtcaacggagttgtccgcctaatgagcaagccctgggatgcaattctcaacgtgaccaccatggcgatgac

SEQ ID NO: 110572 - DNA, 80 bp, synthetic construct
  source 1..80: mol_type = other DNA
agtcttagctggattaaacaggaagacaatcctaacaaaaacttacaatcatttttctttattggccaaaaactctgtga

SEQ ID NO: 110573 - DNA, 80 bp, synthetic construct
  source 1..80: mol_type = other DNA
ccgtgtcaccaagatattgagcagcctcactgtcacccaactcctgaggcgcctccaccagtggatcagcgaagactgct

SEQ ID NO: 110574 - DNA, 80 bp, synthetic construct
  source 1..80: mol_type = other DNA
caccagcagtgccgcagtcttttcaagtgggttatctccatgcgcccaccggcagcggtaagagtacaaaagtgcccgcc

SEQ ID NO: 110575 - DNA, 80 bp, synthetic construct
  source 1..80: mol_type = other DNA
tcggcgtgttcggcctccggaaggacacccaggaccaggttcgtgccgggcgcggtcggtggcatgagggccacgaacgc

SEQ ID NO: 110576 - DNA, 80 bp, synthetic construct
  source 1..80: mol_type = other DNA
tgatggccacattcagaattcaaccagtctttatggtagcttcgtttctaaaggcaagatggacaaaccaggaaaatatt

SEQ ID NO: 110577 - DNA, 80 bp, synthetic construct
  source 1..80: mol_type = other DNA
acatgagaccttattgttggcattatcccccaaaaccatgtggtgtagttgacgcccgcaccgtatgcgggccagtttat

SEQ ID NO: 110578 - DNA, 80 bp, synthetic construct
  source 1..80: mol_type = other DNA
gccagaatggcgcgcgtggccgccgcgtcgtcccggcgccggtgcgcgtccccgcacgcccgggcgtactttaaggtcac

SEQ ID NO: 110579 - DNA, 80 bp, synthetic construct
  source 1..80: mol_type = other DNA
atggcgcacattcctatgtgacggggttgacggatgacaacttaaaggtcccctgccaattaccagcaccagaattcttc

SEQ ID NO: 110580 - DNA, 80 bp, synthetic construct
  source 1..80: mol_type = other DNA
cgtggcccgcggcgacggtcgcgttgtcgccggcggggcgcggcggctttggtggtttcggttttttgttcttcttcggt

SEQ ID NO: 110581 - DNA, 80 bp, synthetic construct
  source 1..80: mol_type = other DNA
ccctctgtggcggcgaccctagggttcggcgcttacatgtcaaagagccacgggcttgatccaaatatcaggaccggtgt

SEQ ID NO: 110582 - DNA, 80 bp, synthetic construct
  source 1..80: mol_type = other DNA
ctcagacctgacggagtcttccagctcggaggagcgggccgctcttccttcaccactcgccaggcctacctgaccctgca

SEQ ID NO: 110583 - DNA, 80 bp, synthetic construct
  source 1..80: mol_type = other DNA
tgtggtggaccaggtcccccacaccacctactacgatggggtcgtagagctgtggcactaccccatgggacacaaatgcc

SEQ ID NO: 110584 - DNA, 80 bp, synthetic construct
  source 1..80: mol_type = other DNA
ctatgatttaagagtagtacaaatttttccacctaaatgcatcattacttcaaagtaccttacaaacgattattgtcaca

SEQ ID NO: 110585 - DNA, 80 bp, synthetic construct
  source 1..80: mol_type = other DNA
taacactgtcaccatactataaggaatggctgaccagactcatgtggtggttgcagtacttcttgaccagagccgaggcc

SEQ ID NO: 110586 - DNA, 80 bp, synthetic construct
  source 1..80: mol_type = other DNA
atagactcaccagtcttttcgaccagggcccccagcagaacatccagttggtcaacaccaatggcagctggcacatcaaa

SEQ ID NO: 110587 - DNA, 80 bp, synthetic construct
  source 1..80: mol_type = other DNA
ccctcgaattcatcaagggggggagacatcttatattctgtcattcgaagaagaagtgcgatgaactggccagccagctg

SEQ ID NO: 110588 - DNA, 80 bp, synthetic construct
  source 1..80: mol_type = other DNA
aagatcaaggtgaacgggatggtgaacatcgacatgtacggcatcatcaccgacaaggtcaaactctccagctacaagct

SEQ ID NO: 110589 - DNA, 80 bp, synthetic construct
  source 1..80: mol_type = other DNA
caggctccatcgccacgcccctgcgtgcaagcccatgctgagggacgaggtgttctttacagtgggcctcaacacttttg

SEQ ID NO: 110590 - DNA, 80 bp, synthetic construct
  source 1..80: mol_type = other DNA
aaaggatggccagctgcaagcctcttgccgatttcgaccagggctggggccctatcagctatgccgacggaagtggcccc

SEQ ID NO: 110591 - DNA, 80 bp, synthetic construct
  source 1..80: mol_type = other DNA
accggccgcctccccccgcgccccgcccctggggcttcccccgcccctccgcccgcgcccgcggccccgagctctcagca

SEQ ID NO: 110592 - DNA, 80 bp, synthetic construct
  source 1..80: mol_type = other DNA
aacacgtagtcgttgcatgtgcgcaccagatactggtagccgaccaggaagtgaggaggcggctctcggtacaggggcca

SEQ ID NO: 110593 - DNA, 80 bp, synthetic construct
  source 1..80: mol_type = other DNA
ctgtctccgatcacggcatacgctcagcagaccagaggactttttggtaccatcgtgaccagcttgacaggcagagataa

SEQ ID NO: 110594 - DNA, 80 bp, synthetic construct
  source 1..80: mol_type = other DNA
gcaaggcaagacacacgcctacaaccttaaagtcaggctttcctggactgagagcgcctgacttcaacagcacctgcccc

SEQ ID NO: 110595 - DNA, 80 bp, synthetic construct
  source 1..80: mol_type = other DNA
cggttactctccaggagagctcaatcgggtggcagcgagcctcaggaagctcggggcgcccccattgagagcctggagac

SEQ ID NO: 110596 - DNA, 80 bp, synthetic construct
  source 1..80: mol_type = other DNA
agaagagaacggcagctggcatcatgaagaaccctgttgtggatggaatagtggtgactgacattgacacaatgacaatt

SEQ ID NO: 110597 - DNA, 80 bp, synthetic construct
  source 1..80: mol_type = other DNA
ctggtccatagggagtggtttcatgacctcgctctcccctggacgtccccttcgagcacagcgtggagaaacagagaact

SEQ ID NO: 110598 - DNA, 80 bp, synthetic construct
  source 1..80: mol_type = other DNA
gtccccgcctcggctgtgcattatcacaacacctcgggcatctatcacatcaccaatgactgccctaactctagcatagt

SEQ ID NO: 110599 - DNA, 80 bp, synthetic construct
  source 1..80: mol_type = other DNA
gctccgtctgcaggcccttccacgtgtcgtggagttcctggacaaactcggccacgggctcgggtcccgcggccgcgcgc

SEQ ID NO: 110600 - DNA, 80 bp, synthetic construct
  source 1..80: mol_type = other DNA
ctcagtggattgctgaaggcgtaaaaaaagaaaatggggaagctgacgatgaagcagctgtcgaagaggaagaggaagag

SEQ ID NO: 110601 - DNA, 80 bp, synthetic construct
  source 1..80: mol_type = other DNA
tgacacccgttgctttgactcaacagtcactgaggctgatatccgtacggaggaagacctttaccaatcctgtgacctgg

SEQ ID NO: 110602 - DNA, 80 bp, synthetic construct
  source 1..80: mol_type = other DNA
caggcaaatggaaggagaaggtgtgctgtcaaaggcagacctcgagaaccctcatctgccagaaaagaaaatcacacaat

SEQ ID NO: 110603 - DNA, 80 bp, synthetic construct
  source 1..80: mol_type = other DNA
cctttaaaccctaaactcacagctgagttagttctacaatattgtagactcccttatatatggttacgtacagcctgccc

SEQ ID NO: 110604 - DNA, 80 bp, synthetic construct
  source 1..80: mol_type = other DNA
agcaggtggtattggaacggaagaatacaaagcagatattgttatgtacactgaaaatgtcaaccttgaaacacctgaca

SEQ ID NO: 110605 - DNA, 80 bp, synthetic construct
  source 1..80: mol_type = other DNA
cgctgcctgcaccgcaccgagcgctttggggcggtcagcgtccccgttgtcatcctggaaggcgtggtgtggcgccccgg

SEQ ID NO: 110606 - DNA, 80 bp, synthetic construct
  source 1..80: mol_type = other DNA
ccggtggtggtaggcactaccgataggctgggctcgccaacctacaactttggcgagaacgaaacagacgtgttcctgct

SEQ ID NO: 110607 - DNA, 80 bp, synthetic construct
  source 1..80: mol_type = other DNA
tctcgttgctgcataaaccgactacacaaatcagcgatttccatgttgccactcgctttaatgatgatttcagccgcgct

SEQ ID NO: 110608 - DNA, 80 bp, synthetic construct
  source 1..80: mol_type = other DNA
gcggaagtgaaaattgatgacggcaattttattataggcgcggaatatttaccgagggcagagtgaactctgagcctcta

SEQ ID NO: 110609 - DNA, 80 bp, synthetic construct
  source 1..80: mol_type = other DNA
tgtttaactaaatgcggagctcacgttttaggaagtgtaagcttaaccggggtagcaggtaccatgacaaacatggctga

SEQ ID NO: 110610 - DNA, 80 bp, synthetic construct
  source 1..80: mol_type = other DNA
gacggccagggtgcgctgggccatattggaccacatgcacggggcgacgcagggacaggcctccgccacggcggtggcgc

SEQ ID NO: 110611 - DNA, 80 bp, synthetic construct
  source 1..80: mol_type = other DNA
actcagcaccccccggtgacgacccgcagccggagtatgacctcgagctgataacatcatgctcgtcaaacgtctccgta

SEQ ID NO: 110612 - DNA, 80 bp, synthetic construct
  source 1..80: mol_type = other DNA
gattacaatcctcctttagtggagaattggaagtctcctgattatgatccccccgtcgtgcacgggtgttcattgccacc

SEQ ID NO: 110613 - DNA, 80 bp, synthetic construct
  source 1..80: mol_type = other DNA
ggctccaagctgcatgcaatttcactcgcggggatcgctgtaaccttgatgacagagataggagccagctgagcccgctc

SEQ ID NO: 110614 - DNA, 80 bp, synthetic construct
  source 1..80: mol_type = other DNA
aagcttatgttcgcgaatcagttggacttcgccgtatcccccagaccccccgaagcttcgggccccggggatctcgagga

SEQ ID NO: 110615 - DNA, 80 bp, synthetic construct
  source 1..80: mol_type = other DNA
gtacgtggatgaatgcgaccggattcacaaagacgtgcggggctcccccctgcgccgtcagtaactggtcgtgtcccacc

SEQ ID NO: 110616 - DNA, 80 bp, synthetic construct
  source 1..80: mol_type = other DNA
tagaggacagagacaggtcggagctcagtccgctcctgttgtccaccacacagtggcaagtcctcccttgcagtttcacc

SEQ ID NO: 110617 - DNA, 80 bp, synthetic construct
  source 1..80: mol_type = other DNA
atctgcgccactgatgccctcatgactggatacaccggcgacttcgactctgtgatagactgcaacgtggcagtcactca

SEQ ID NO: 110618 - DNA, 80 bp, synthetic construct
  source 1..80: mol_type = other DNA
aaaagttgcacttatttaactgtacatattacgtcagattcacgtgataattcagaataatccagggttcctgcagggtc

SEQ ID NO: 110619 - DNA, 80 bp, synthetic construct
  source 1..80: mol_type = other DNA
aggactgggttaccaaagctgattctccacggttggaaagcctcccagaaccgtctcggaagaggagtccctgccaacaa

SEQ ID NO: 110620 - DNA, 80 bp, synthetic construct
  source 1..80: mol_type = other DNA
gccagccaccccctggcgatgattccggtcattccacggggacgcgcatcaccgatagtaccagccaaacagtcccggaa

SEQ ID NO: 110621 - DNA, 80 bp, synthetic construct
  source 1..80: mol_type = other DNA
ctcccgtcccgccgggcgtcgtcgaggtcgtggtggtggtcgtggtcgtggtcggggtcgtccccgccctcctccgtctc

SEQ ID NO: 110622 - DNA, 80 bp, synthetic construct
  source 1..80: mol_type = other DNA
tcgagatgggatggaaagcctgggggaaaagcattatcttcgcacctgagatcgcgaacaacacgttcgtggtcgacggt

SEQ ID NO: 110623 - DNA, 80 bp, synthetic construct
  source 1..80: mol_type = other DNA
ttccagctcgtagacggggcgacactcgtgcctccctgctcagcccgagacccattagctgtctcaagggttcatcaggc

SEQ ID NO: 110624 - DNA, 80 bp, synthetic construct
  source 1..80: mol_type = other DNA
ttggagccggtagcatgtcatgaccggaaatttggtgtattgggtggagttttgtaactttttagttatggaatcatgaa

SEQ ID NO: 110625 - DNA, 80 bp, synthetic construct
  source 1..80: mol_type = other DNA
cactgtacatgggtgtgcattgccaccacagaaaattccacctataccgcctccgcgcaggaagaagaccatcgttctca

SEQ ID NO: 110626 - DNA, 80 bp, synthetic construct
  source 1..80: mol_type = other DNA
gccttcacggaggctatgaccagatattctgcccctcccggggacgccccacagcccacctacgacctggagctgattac

SEQ ID NO: 110627 - DNA, 80 bp, synthetic construct
  source 1..80: mol_type = other DNA
atgggtttgagcagttgaaaactcactggttggagccgtgggaggatatggaaatggctctagacacctttgctaaagtg

SEQ ID NO: 110628 - DNA, 80 bp, synthetic construct
  source 1..80: mol_type = other DNA
tgtaggttcgaaactgttgtcccactttagttttttcggggtttatgcaataaaaagtagtggggtctttttcccactgg

SEQ ID NO: 110629 - DNA, 80 bp, synthetic construct
  source 1..80: mol_type = other DNA
ggaacagccaaaccggccagatgctaagggacaagttaaaagaccagaacttccaacaaaaagtggtagacggtctggct

SEQ ID NO: 110630 - DNA, 80 bp, synthetic construct
  source 1..80: mol_type = other DNA
ccgttagaggcttaatcgtgccaattattaagacgacccctgtcacccttccgtttaacttgggtcagacagtggcggat

SEQ ID NO: 110631 - DNA, 80 bp, synthetic construct
  source 1..80: mol_type = other DNA
caagtacgaggttgcaattttcgtgcatggctcaacggactccacgtcacatggcaattactctgagcaaattggaaaaa

SEQ ID NO: 110632 - DNA, 80 bp, synthetic construct
  source 1..80: mol_type = other DNA
aaaccttaaaaagttatggacgggctttgacgagcgcaccgtcgcctcggacctggccgagattgtttttcctgaacgcc

SEQ ID NO: 110633 - DNA, 80 bp, synthetic construct
  source 1..80: mol_type = other DNA
ccttaccgtgctcccaacagcaacgccgccgggttctgtcactgttccccatcctaacataacagagacagccctcccga

SEQ ID NO: 110634 - DNA, 80 bp, synthetic construct
  source 1..80: mol_type = other DNA
acaaccactacgtggtgggcgctactgctgacaacttgaagtgcccatgtcaagtgcccgcccccgagttcttcacggag

SEQ ID NO: 110635 - DNA, 80 bp, synthetic construct
  source 1..80: mol_type = other DNA
gtcaacaagagtggttcatctgaggacaagccctattgctggcattatgcacctaggccctgcggcattgtcaaagcgca

SEQ ID NO: 110636 - DNA, 80 bp, synthetic construct
  source 1..80: mol_type = other DNA
cccacgcactcccctggatcccccccgacaacatccacgaggacggcgcattccgggcctaccccagaggggttccggac

SEQ ID NO: 110637 - DNA, 80 bp, synthetic construct
  source 1..80: mol_type = other DNA
ctagcatttatgcccagttcaaaaaggtacccaagagggcgtggaagcgaagttcagaatcagactgtgggctacacttg

SEQ ID NO: 110638 - DNA, 80 bp, synthetic construct
  source 1..80: mol_type = other DNA
gcgcgccgaaaccccccacgaactacaagaccgccatctggagggtggcggcctcggagtacgcggaggtgacgcagcat

SEQ ID NO: 110639 - DNA, 80 bp, synthetic construct
  source 1..80: mol_type = other DNA
ggaaggtttgaagaagagaatgaccacaaagatcataatgagcacatcaatggcagtgctggtagccatggtcttgggag

SEQ ID NO: 110640 - DNA, 80 bp, synthetic construct
  source 1..80: mol_type = other DNA
gagtatacttgttgccgcgcaggggccccaggttgggtgtgcgcgcgacaaggaagacttcggagcggtcccagccacgt

SEQ ID NO: 110641 - DNA, 80 bp, synthetic construct
  source 1..80: mol_type = other DNA
tgtgggtgcccccgctgcaggttcgcggcgtgcgggacgccatcattttggtcacttgcctactgcacccgcagctggga

SEQ ID NO: 110642 - DNA, 80 bp, synthetic construct
  source 1..80: mol_type = other DNA
cgcctggggcagaccgtgcttcactcgaccctgaagggcgaggcgcggcgggactacatccgcgactgtgtctttctttt

SEQ ID NO: 110643 - DNA, 80 bp, synthetic construct
  source 1..80: mol_type = other DNA
atcgaagtcgatcgctcagcagcaaaacacgccaggaaagaaggcaatgtcaccggagggcatccagtctctaggggcac

SEQ ID NO: 110644 - DNA, 80 bp, synthetic construct
  source 1..80: mol_type = other DNA
ctgacaggggtgacctccctggtgctagcggtgggtgacgtggaccgtctttccgcgtttgaccgcggagcggcgtgcgc

SEQ ID NO: 110645 - DNA, 80 bp, synthetic construct
  source 1..80: mol_type = other DNA
cgccttaacgtgggcgctgggctgcgttacaatccagtgagtaaaaaattggacgcgaaccccaatcaaaacaagggttt

SEQ ID NO: 110646 - DNA, 80 bp, synthetic construct
  source 1..80: mol_type = other DNA
ctgcccaacacaaggagaacctagcctaaatgaagaacaggacaaaagatttgtctgcaaacactccatggtagatagag

SEQ ID NO: 110647 - DNA, 80 bp, synthetic construct
  source 1..80: mol_type = other DNA
tcgctgcaaagttgtcgggcctcggactcaacgctgtggcgtattaccggggtctcgatgtgtccgtcataccgaccagc

SEQ ID NO: 110648 - DNA, 80 bp, synthetic construct
  source 1..80: mol_type = other DNA
gcgacgccaacaggatcaaaaaaataaagagttaattgatttacaaaccgtgcatcagtgtaaaaaaggacttttttgcc

SEQ ID NO: 110649 - DNA, 80 bp, synthetic construct
  source 1..80: mol_type = other DNA
gcaaacacccgtgcgtacgtgtatcccatgagcgtataattgtccgtctgcagggcgacggacatcagccccccgcgcgg

SEQ ID NO: 110650 - DNA, 80 bp, synthetic construct
  source 1..80: mol_type = other DNA
tcgtgtctttttttgatgtctgtctgtgggggagtggggtgttgtggatattagagggtagagggtgctggtttgaacgt

SEQ ID NO: 110651 - DNA, 80 bp, synthetic construct
  source 1..80: mol_type = other DNA
cgttaaaggcagatattagcgtactggttgtctcatgtcgccgtagctttacccagacgttgattcaacggtttaacgat

SEQ ID NO: 110652 - DNA, 80 bp, synthetic construct
  source 1..80: mol_type = other DNA
gcagcaagacccttgccgggcctaaagggccggtgtgtcaaatgtatactaatgtggaccaggaccttgtaggctggcct

SEQ ID NO: 110653 - DNA, 80 bp, synthetic construct
  source 1..80: mol_type = other DNA
atctcttcttgttgtcaaaggaaggtttcaaaacctaaattacaaaacaaacccaaaccttcctaaaacatttacaataa

SEQ ID NO: 110654 - DNA, 80 bp, synthetic construct
  source 1..80: mol_type = other DNA
acatgcccccagacacccctgatcgcacattaatgtcacaacagtccggcaacgtaaagatcacagtcaatggccagacg

SEQ ID NO: 110655 - DNA, 80 bp, synthetic construct
  source 1..80: mol_type = other DNA
atgaggaacaagggcatagggaagatgggctttggaatggtgactcttggggccagcgcatggctcatgtggctctcgga

SEQ ID NO: 110656 - DNA, 80 bp, synthetic construct
  source 1..80: mol_type = other DNA
ttgaggcagtagagcaagggcagttgggtctggtccttttggcggtaatatccatcttcacactcaccccggcttacaag

SEQ ID NO: 110657 - DNA, 80 bp, synthetic construct
  source 1..80: mol_type = other DNA
ggtaagctcctgtattaatggtgtaactgcagttggtcattactgaccaattaacagtgtggacacctggctgtatggtt

SEQ ID NO: 110658 - DNA, 80 bp, synthetic construct
  source 1..80: mol_type = other DNA
gaccggcagagggaggctggggatctaccggtatgtcacgccaggggagaggccgtcaggcatgtttgacacctcagtgc

SEQ ID NO: 110659 - DNA, 80 bp, synthetic construct
  source 1..80: mol_type = other DNA
cagctatgtctacgggcctcattcacttacatcagaacatagtggatatccagtacctctatggagtgtccacggccatt

SEQ ID NO: 110660 - DNA, 80 bp, synthetic construct
  source 1..80: mol_type = other DNA
caacaggaccgcgctgaactgcaacgacagcctccacactgggttccttgctaacctgttttatgtccataaaatcaacg

SEQ ID NO: 110661 - DNA, 80 bp, synthetic construct
  source 1..80: mol_type = other DNA
gtaccggtacagggccgagcagaagttggccaacacggttcgatagctctcctcccgcgcccgtagctcggcgtggaaga

SEQ ID NO: 110662 - DNA, 80 bp, synthetic construct
  source 1..80: mol_type = other DNA
tacaaattgttggtgtaagtccactccgcacatgtggaaaagctcccacagcgccccctccactttcataatcaggcaga

SEQ ID NO: 110663 - DNA, 80 bp, synthetic construct
  source 1..80: mol_type = other DNA
agcagacgcgtggactgttgggcacaatagtgaccagcctcaccggtcgtgacaagaacgagaccgccggtgagatacaa

SEQ ID NO: 110664 - DNA, 80 bp, synthetic construct
  source 1..80: mol_type = other DNA
ggtgaggctgggcggtcggctcgaccgtggtgggtgcgggcaggctcgcgttcgggagccggccgagcaggtaggtcttc

SEQ ID NO: 110665 - DNA, 80 bp, synthetic construct
  source 1..80: mol_type = other DNA
tctttttgcttcccgctcgataggcgtgaagctaaacactccacaccattaattccctggggggggaaaaaacccaggcc

SEQ ID NO: 110666 - DNA, 80 bp, synthetic construct
  source 1..80: mol_type = other DNA
gatcgcgaagtgctctaccaacagttcgacgaaatggaggagtgtgcctctagggcggctctcatcgaagagtggcagcg

SEQ ID NO: 110667 - DNA, 80 bp, synthetic construct
  source 1..80: mol_type = other DNA
ttccgcgataatttcaccacgcccacatacccactcccaataaaagccctgtagagcgcattggcatcttacttgagatt

SEQ ID NO: 110668 - DNA, 80 bp, synthetic construct
  source 1..80: mol_type = other DNA
agaatcaaaaattccatctactactgtggcaatcgtggtgggagtgattgcgggcttcataactataatcattgtcattc

SEQ ID NO: 110669 - DNA, 80 bp, synthetic construct
  source 1..80: mol_type = other DNA
gggtaagtgggtgcctggagcgacgtacgccctctacgggatgtggcctctgctcctgactttgacaccgcagtacaagc

SEQ ID NO: 110670 - DNA, 80 bp, synthetic construct
  source 1..80: mol_type = other DNA
actttgttaattgtaaataaatattgttattatgtgtagaagtttagctttataatagtgtttagtgtgtttagagttag

SEQ ID NO: 110671 - DNA, 80 bp, synthetic construct
  source 1..80: mol_type = other DNA
aagtcgccagtcgccagcacaaactcgtcgtacgggtacaccgagcgcgcgtccacctcctcgacgatgcagtttaccgt

SEQ ID NO: 110672 - DNA, 80 bp, synthetic construct
  source 1..80: mol_type = other DNA
acatatgaaagagacgtggacttaggcgctggaacaagacatgtggcagtagaaccagaggtggccaacctagatatcat

SEQ ID NO: 110673 - DNA, 80 bp, synthetic construct
  source 1..80: mol_type = other DNA
catcaccttcagtgtcgtctacaacgagataaacagtgggtatgcttttacgtttaaatggtcagccgaaccgggaaaac

SEQ ID NO: 110674 - DNA, 80 bp, synthetic construct
  source 1..80: mol_type = other DNA
ggtgttagaaccatcaccactggtgccgccatcacgtactccacctacggcaagtttttagctgacggtggatgtgccgg

SEQ ID NO: 110675 - DNA, 80 bp, synthetic construct
  source 1..80: mol_type = other DNA
gtatcaccccagtgccgccccaaacctcgtgacttccccaccgctcccgcccacccctcccgccctcccgcccctgccgc

SEQ ID NO: 110676 - DNA, 80 bp, synthetic construct
  source 1..80: mol_type = other DNA
ctggatgtgaccgaggagctgcgaccagaccacctggtgatggcctgtaccgggaccgagttcagctccagtggtgagga

SEQ ID NO: 110677 - DNA, 80 bp, synthetic construct
  source 1..80: mol_type = other DNA
cttgcgggatgtggcccctactgctcttgctcctcgcattgcccgagagggcatatgcatgggacgcagaagtcgcagga

SEQ ID NO: 110678 - DNA, 80 bp, synthetic construct
  source 1..80: mol_type = other DNA
ccttctcaatgtgatggggtggtgggtggcgtctcagctagcctctcccgtgccggccaccacctttgtgatcagcggcc

SEQ ID NO: 110679 - DNA, 80 bp, synthetic construct
  source 1..80: mol_type = other DNA
gctgtggcactacccatgcactgtcaattttaccgtcttcaaagtgaggatgtatattggcggcatagaacaccggctag

SEQ ID NO: 110680 - DNA, 80 bp, synthetic construct
  source 1..80: mol_type = other DNA
ccgacttggagagtgcggcggttgaacgccccccccccccttcggaggaggaggacgttcccgaccaaaactccgggtcg

SEQ ID NO: 110681 - DNA, 80 bp, synthetic construct
  source 1..80: mol_type = other DNA
gcttgcatgtcagcggacttggaggtcgtcaccagcacatgggtgctggtaggcggtgtcctggccgctctggccgctta

SEQ ID NO: 110682 - DNA, 80 bp, synthetic construct
  source 1..80: mol_type = other DNA
gtctgacttcaagacatggctctccgctaagattatgccagcgctccctgggctgcctttcctttcctgtcagaagggat

SEQ ID NO: 110683 - DNA, 80 bp, synthetic construct
  source 1..80: mol_type = other DNA
aattccacacctattatgactaccatcatggcaaaaaacgaggtgttttgcgtgaacctccaaaaggggggtcggaaacc

SEQ ID NO: 110684 - DNA, 80 bp, synthetic construct
  source 1..80: mol_type = other DNA
gcgtcgcagtcccacacgaggggtggcagcagcgccgggtctcgcattaggtgattcagctcggcttgcgcctgcccgcc

SEQ ID NO: 110685 - DNA, 80 bp, synthetic construct
  source 1..80: mol_type = other DNA
ttggattatataaaacctcaaaatgaagatctattaagtgaacgcgctcccctccggtggcgtggtcaaactctacagcc

SEQ ID NO: 110686 - DNA, 80 bp, synthetic construct
  source 1..80: mol_type = other DNA
ccatggatgcgccttaccaccacggagcactccaccggtgcctcccccccggaggaagagagtaattcagctggacggct

SEQ ID NO: 110687 - DNA, 80 bp, synthetic construct
  source 1..80: mol_type = other DNA
tgctatttgccggcgttgacgcggacacccacgtcaccgggggaagtgtagcccgcgccgcgtctggaattgccggtctc

SEQ ID NO: 110688 - DNA, 80 bp, synthetic construct
  source 1..80: mol_type = other DNA
agaacattgctttagtgctaggagctgctttctttcagatggcttcaacggacttggagtttggcatccatgggttgctg

SEQ ID NO: 110689 - DNA, 80 bp, synthetic construct
  source 1..80: mol_type = other DNA
actggcaccaattctacataccaaggggttaaagaaacagctgctcagaatggatgggaaaaagatccaaatgttgctgc

SEQ ID NO: 110690 - DNA, 80 bp, synthetic construct
  source 1..80: mol_type = other DNA
gcgcgctgcggtcccagaccctggagagtctagacgcgcgctacgtctcgcgagacggcgcgcatgacgcggccgtctgg

SEQ ID NO: 110691 - DNA, 80 bp, synthetic construct
  source 1..80: mol_type = other DNA
cgcctccttctcttgggccctgctgatggcatgcaggacgcgggctggagactacttgcccccataacggcgtactgcca

SEQ ID NO: 110692 - DNA, 80 bp, synthetic construct
  source 1..80: mol_type = other DNA
attgtcccaacaccagcattgtgtatgagtcagataccatcatcatgcacacgccgggctgtgtaccttgtgtgcgcact

SEQ ID NO: 110693 - DNA, 80 bp, synthetic construct
  source 1..80: mol_type = other DNA
tgagaaactgctcatggccggctagccacactatcgacaatgccgaggtggtggactcagagctcttccttccggccagt

SEQ ID NO: 110694 - DNA, 80 bp, synthetic construct
  source 1..80: mol_type = other DNA
ggttctgctggaggctttctgagttcaattgggaaggcggtgcacacggtccttggaggtgctttcaacagcatcttcgg

SEQ ID NO: 110695 - DNA, 80 bp, synthetic construct
  source 1..80: mol_type = other DNA
tccggcggaccgtgcattcgtgctgatatttgtaaaagcgggcgcaatactcgcagcgttgcacgctctgcatctcttga

SEQ ID NO: 110696 - DNA, 80 bp, synthetic construct
  source 1..80: mol_type = other DNA
ctacactggtggaagaacaagacgcgaactttgtgtgtcgccgaacgtttgtggacagaggctggggtaatggctgtgga

SEQ ID NO: 110697 - DNA, 80 bp, synthetic construct
  source 1..80: mol_type = other DNA
cttcatagagatgcagctgcccccaggggataacatcatttatgttggggaactgagtcatcaatggttccaaaaaggga

SEQ ID NO: 110698 - DNA, 80 bp, synthetic construct
  source 1..80: mol_type = other DNA
ctggagagctggaaagccccagattatgacccacctgtggtggcaggctgtgcactgcctcctccggggcgaccacctgt

SEQ ID NO: 110699 - DNA, 80 bp, synthetic construct
  source 1..80: mol_type = other DNA
tgctctattggctacgtcaatttttaagctgacttatcaaaacaaggtggtgagggtgcaaagaccagcaaaaaatggaa

SEQ ID NO: 110700 - DNA, 80 bp, synthetic construct
  source 1..80: mol_type = other DNA
acgcagaagttgcctaagaccgtgatgggatctgcatacggtttccagtactccccctcccaacgggtagagtacttgct

SEQ ID NO: 110701 - DNA, 80 bp, synthetic construct
  source 1..80: mol_type = other DNA
tatcttggtaggcaatttctgccattaattgatcaatttcttcctcctggaggtctccatgtcccgcacgttcaatagtg

SEQ ID NO: 110702 - DNA, 80 bp, synthetic construct
  source 1..80: mol_type = other DNA
gttaccaatctaaatgacttgactccagtgggaaggttggtgacggcaaacccattcgtctcagccacaacagccaattc

SEQ ID NO: 110703 - DNA, 80 bp, synthetic construct
  source 1..80: mol_type = other DNA
gtggtgggtctggtgtgtgcaggtggcgacgttcatcgtctcggccatctgcgtcgtggggctcctggtgctggcctctg

SEQ ID NO: 110704 - DNA, 80 bp, synthetic construct
  source 1..80: mol_type = other DNA
taagatcccttttgagataacagacttggaaaaaagacacgtcttaggtcgcctgatcacagttaacccaatcgtaatag

SEQ ID NO: 110705 - DNA, 80 bp, synthetic construct
  source 1..80: mol_type = other DNA
ggcagctggttacctggcagccgcgcaagcatcagaccgtgcaggattgtaactgttccatctactccgggcacattacc

SEQ ID NO: 110706 - DNA, 80 bp, synthetic construct
  source 1..80: mol_type = other DNA
caagctaattgctaatggaagacctttagtataggtattgataaaacggttaagctgggtgggatgcatccgaggtgaca

SEQ ID NO: 110707 - DNA, 80 bp, synthetic construct
  source 1..80: mol_type = other DNA
cctcagtcgtcttctagctgcaaactttctccacagtttaaatgggatgtcagattcctcttgttcctgcccctccgcac

SEQ ID NO: 110708 - DNA, 80 bp, synthetic construct
  source 1..80: mol_type = other DNA
ccttcgatcgtcttcaagtgcttgacgaccactaccagactgttctaaaggaggttaaagctcgggcatctggaatgaag

SEQ ID NO: 110709 - DNA, 80 bp, synthetic construct
  source 1..80: mol_type = other DNA
ttgctgacggtgctgcagcctgaggcgggaaaacagagaagcagcgatgacaacaagttggcctactttctgttgacgct

SEQ ID NO: 110710 - DNA, 80 bp, synthetic construct
  source 1..80: mol_type = other DNA
ggggcccacccccctgttgtacaggcttggctcggtacaaaatgaaatcaccaccacacacccgatcacgaagtacatca

SEQ ID NO: 110711 - DNA, 80 bp, synthetic construct
  source 1..80: mol_type = other DNA
aacaggtataagtattacaaatgcctccctttgccccccaatccaaaccaaataagctgccccgtcttaccgcgacaaag

SEQ ID NO: 110712 - DNA, 80 bp, synthetic construct
  source 1..80: mol_type = other DNA
ggcgaggtgcaaatcctctccacagccacccagacctttctcgggaccaccgtcaacggcgtaatgtggactgtctacca

SEQ ID NO: 110713 - DNA, 80 bp, synthetic construct
  source 1..80: mol_type = other DNA
gacgactggactcgcctgcatactagggatgcttgccactgctggagcggtcacattctcaagctttcaaggaagagtga

SEQ ID NO: 110714 - DNA, 80 bp, synthetic construct
  source 1..80: mol_type = other DNA
gcttgcttgctcgtgcggagggtggtggggggccagtacgtgcaaatggtgcttctcaaggcgtgagcggccaccggcac

SEQ ID NO: 110715 - DNA, 80 bp, synthetic construct
  source 1..80: mol_type = other DNA
ccgcagatggggggggggtgtccgtacccacggcccaaagaggctccgcacctcggaggctatcggaggccctttgttgc

SEQ ID NO: 110716 - DNA, 80 bp, synthetic construct
  source 1..80: mol_type = other DNA
tatgccccccctagagggggagcttggagatcctgacctgagctctggttcatggtctacagtcagtgaggagaccagcg

SEQ ID NO: 110717 - DNA, 80 bp, synthetic construct
  source 1..80: mol_type = other DNA
tgaggcggcttcaccagtggataactgaggactgctccaccccgtgctccgattcgtggctatccacaatctggaactgg

SEQ ID NO: 110718 - DNA, 80 bp, synthetic construct
  source 1..80: mol_type = other DNA
cgtgtggcttcgccgacctcatggggtacatcccgctcgtcggtgctcctctaggtggcgctgctagggctctggcacat

SEQ ID NO: 110719 - DNA, 80 bp, synthetic construct
  source 1..80: mol_type = other DNA
gttcatagctttcctcagatttctagccattccaccaacagcaggagtcttggctagatggggaaccttcaagaagtcgg

SEQ ID NO: 110720 - DNA, 80 bp, synthetic construct
  source 1..80: mol_type = other DNA
gggctcactgtggaacaagatagtggaaagttaattgtgaatcctaaggctcccttgcaagttgcaaatgggcaattgga

SEQ ID NO: 110721 - DNA, 80 bp, synthetic construct
  source 1..80: mol_type = other DNA
gggttcggtaagccacaatgtccgtggcctgacgtccctctttacatctgggccgcagcagaagatccagcttgtaaaca

SEQ ID NO: 110722 - DNA, 80 bp, synthetic construct
  source 1..80: mol_type = other DNA
cccttgcggagggtgcgcacccgtcccagggactggtacacggacaccatgtccggtccgtagttcatgggtttcacgta

SEQ ID NO: 110723 - DNA, 80 bp, synthetic construct
  source 1..80: mol_type = other DNA
gcacgcgttggaattaataaagcgggatttgtaatattaaaaacgtttacaccaggggcggaaggttttgcgtttgcgtg

SEQ ID NO: 110724 - DNA, 80 bp, synthetic construct
  source 1..80: mol_type = other DNA
acatcaatcgtacagctctcaattgtaatgatagtctgaagactgggttcatcgcaggcctattttatgtccgcaagttt

SEQ ID NO: 110725 - DNA, 80 bp, synthetic construct
  source 1..80: mol_type = other DNA
aacttcttcatggggagtgatgtgacacggatagaatccgagacgaaggtgcttatcctagactctctcgacccttcggt

SEQ ID NO: 110726 - DNA, 80 bp, synthetic construct
  source 1..80: mol_type = other DNA
gcagctccgccggcagcaccattcacgggattgctaacctctttaccccggggtctaagcagaacctccagcttatcaac

SEQ ID NO: 110727 - DNA, 80 bp, synthetic construct
  source 1..80: mol_type = other DNA
tctggctgcccgcaggctatggcatcgtgtagggacctatcttccttccatcaagggtggtgccctattacggatgccaa

SEQ ID NO: 110728 - DNA, 80 bp, synthetic construct
  source 1..80: mol_type = other DNA
cgtacaccaggtttttggcagtgtgtatacaactatgtttggaggagtctcatggatggtcagaatcttgatcgggctct

SEQ ID NO: 110729 - DNA, 80 bp, synthetic construct
  source 1..80: mol_type = other DNA
ctccagccgtcccgcagtcctaccaggtaggttacctccacgcccctactggcagtggtaagagcactaaggtcccggct

SEQ ID NO: 110730 - DNA, 80 bp, synthetic construct
  source 1..80: mol_type = other DNA
tgtggattgtttttgccgaggtgttgacagagtcaagttagagtacggacgctgtggaagacaggctggattcaggggga

SEQ ID NO: 110731 - DNA, 80 bp, synthetic construct
  source 1..80: mol_type = other DNA
ccctgcgagcccgagccggacgtggcggtactgacgtccatgctcactgacccgtcccacatcaccgcggagacggcggc

SEQ ID NO: 110732 - DNA, 80 bp, synthetic construct
  source 1..80: mol_type = other DNA
gatcataagacaaagcctctgtagcgtggcctttagcccgtatttttcctttggaggtgctcccgcagtgaggacactga

SEQ ID NO: 110733 - DNA, 80 bp, synthetic construct
  source 1..80: mol_type = other DNA
cctcctaggcctatggtccttcttcgtgctgctcatggcgttgcctcaacaggcttacgcttttgacgcggctgagcaag

SEQ ID NO: 110734 - DNA, 80 bp, synthetic construct
  source 1..80: mol_type = other DNA
ctcatagggcgaatggagaagagaacatggcatggaccaaaatacgaggaggatgttaaccttggaagtggaacaagagc

SEQ ID NO: 110735 - DNA, 80 bp, synthetic construct
  source 1..80: mol_type = other DNA
acagagaggtctccgtcgctgcggagattctccgcccctcaaagcgattcccgcccgccttgcccatctgggcgaggccg

SEQ ID NO: 110736 - DNA, 80 bp, synthetic construct
  source 1..80: mol_type = other DNA
cagtccaggcctcctggcccaaactggaacaattttgggccaaacatatgtggaacttcatcagtggtattcagtacctc

SEQ ID NO: 110737 - DNA, 80 bp, synthetic construct
  source 1..80: mol_type = other DNA
gggagtgtagctccatcgtggaggatgtagctccatcgtggggattgtagctccatcgtggggatgtaactccatcgtgg

SEQ ID NO: 110738 - DNA, 80 bp, synthetic construct
  source 1..80: mol_type = other DNA
caaaaccagccagatgttgtcatgtacactgaaaatgtgtatctggaaaccccagacacccatgtggtgtacaaacctgg

SEQ ID NO: 110739 - DNA, 80 bp, synthetic construct
  source 1..80: mol_type = other DNA
ggtcttgtaccaacagtttgatgagatggaggaatgtgcccacaacataccctatctcgtggaagggcaacaaatagctg

SEQ ID NO: 110740 - DNA, 80 bp, synthetic construct
  source 1..80: mol_type = other DNA
ccgagcccccgcccgcccccgccccgtcatcgcccccggaggccagggtcccgatgagggcccgggttgcggactgcgcg

SEQ ID NO: 110741 - DNA, 80 bp, synthetic construct
  source 1..80: mol_type = other DNA
tacctcttcaactgggcggtgaagaccaagctcaagctcactccaatacccggtgcgagctccctagatttatcggggtg

SEQ ID NO: 110742 - DNA, 80 bp, synthetic construct
  source 1..80: mol_type = other DNA
cctggtccacgtgctccgaggaggaagactccgtggtgtgttgctccatgtcgtactcttggaccggggcgctgataacc

SEQ ID NO: 110743 - DNA, 80 bp, synthetic construct
  source 1..80: mol_type = other DNA
gacctcatggggtatatccctgtcgtaggaggtcccttaggtggcctcgcggcagccctagctcatggagtacgggctgt

SEQ ID NO: 110744 - DNA, 80 bp, synthetic construct
  source 1..80: mol_type = other DNA
aggttgaccttgtagaggcgggtgagggcgtgcttgagatgcagatggtacttgatttctacgggtgagttggtggccgt

SEQ ID NO: 110745 - DNA, 80 bp, synthetic construct
  source 1..80: mol_type = other DNA
agggcgtatgctgacagtgggaatgaggctgtgtctctggggttgttagcagttaccatcattactgtgtttaccctcac

SEQ ID NO: 110746 - DNA, 80 bp, synthetic construct
  source 1..80: mol_type = other DNA
gtataggttgtggcactacccttgcacggtgaactttaccatcttcaaaatacggatgtatgtgggaggagttgaacaca

SEQ ID NO: 110747 - DNA, 80 bp, synthetic construct
  source 1..80: mol_type = other DNA
atgtgcttcgatatcgaatgcaaggcggggggtgaggacgagctggcctttccggtggcctggcacccggaggacctggt

SEQ ID NO: 110748 - DNA, 80 bp, synthetic construct
  source 1..80: mol_type = other DNA
cctacaaaaggagtgggattatggaggtggacagatccgaagccaaagagggactgaaaagaggagaaacaaccaaacat

SEQ ID NO: 110749 - DNA, 80 bp, synthetic construct
  source 1..80: mol_type = other DNA
cgcaaaccctcctcctcaacgtgttgggggggtgggtagcgtcccagctggccgccccggttccagctacagctttcgtg

SEQ ID NO: 110750 - DNA, 80 bp, synthetic construct
  source 1..80: mol_type = other DNA
ggacatgatgctaaactggtcaccaactctcactatgatctttgcctacgcggcccgtgttcctgagctagtccttgaag

SEQ ID NO: 110751 - DNA, 80 bp, synthetic construct
  source 1..80: mol_type = other DNA
ttaacggttggttggaactggaagccaaaacgaacggaagtttgttcgcttgtcaagtggcgtgaggttgaagacgtagt

SEQ ID NO: 110752 - DNA, 80 bp, synthetic construct
  source 1..80: mol_type = other DNA
cctcttcaacatcttaggggggtgggttgcttcgcagattgcaactcccaccgcctcgacggctttcgtcgtgagcggtc

SEQ ID NO: 110753 - DNA, 80 bp, synthetic construct
  source 1..80: mol_type = other DNA
caaaatgaaacctgcttgacgcaccccgtcacaaaatatatcatggcatgcatgtcagctgatctggaagtaaccaccag

SEQ ID NO: 110754 - DNA, 80 bp, synthetic construct
  source 1..80: mol_type = other DNA
aagtactcgtactaaatccctctgtcgcggctacgcttggttttggggcttacatgtccaaggcctacgggatcaaccct

SEQ ID NO: 110755 - DNA, 80 bp, synthetic construct
  source 1..80: mol_type = other DNA
aagaacaaacactgaccatactcattagaacaggattgctggtgatctcaggacttttccctatatcaataccaatcacg

SEQ ID NO: 110756 - DNA, 80 bp, synthetic construct
  source 1..80: mol_type = other DNA
tcctcctggtagtgttactgtgccgcattctaacatagaggaaatcgctctgtccagcgagggtgaaatccccttttacg

SEQ ID NO: 110757 - DNA, 80 bp, synthetic construct
  source 1..80: mol_type = other DNA
gggagaagcggctgccatattcatgacagcaacacctccaggagccatggaccctttccctcagagcaacagccccattg

SEQ ID NO: 110758 - DNA, 80 bp, synthetic construct
  source 1..80: mol_type = other DNA
atttgaccggctccaggtagtggaccagcactaccaggatgtactttcggaggttaaggctcgggcaagaggggtgagcg

SEQ ID NO: 110759 - DNA, 80 bp, synthetic construct
  source 1..80: mol_type = other DNA
gtggtgagtggcctggcaggtgctgctgtgggaagtgtaggtcttgggaaggtgataatagacttgttggcaggctatgg

SEQ ID NO: 110760 - DNA, 80 bp, synthetic construct
  source 1..80: mol_type = other DNA
aggcccgcaccgccattgacgccctcactgagagactgtacgtgggtggtcccatgttcaactccagaggtgagaaggtc

SEQ ID NO: 110761 - DNA, 80 bp, synthetic construct
  source 1..80: mol_type = other DNA
tacccatttgggctaggcctgactacaacccgcctcttttggaaccatggaagtctcctgactataacccaccaatggtc

SEQ ID NO: 110762 - DNA, 80 bp, synthetic construct
  source 1..80: mol_type = other DNA
ccgggataggagccagctcagccccttgctacattccaccactgagtgggccattctaccttgtaccttctccgacatgc

SEQ ID NO: 110763 - DNA, 80 bp, synthetic construct
  source 1..80: mol_type = other DNA
gcaagcggagtgctcaccaccagcatgggcaacacactcacgtgttacgtgaaagccagggcggcgtgtaacgccgccgg

SEQ ID NO: 110764 - DNA, 80 bp, synthetic construct
  source 1..80: mol_type = other DNA
gggaaatccaacacccagtttaaaggctgttactttgcaacaagtgttgcccgtccttgggccttcggaagaaaagcgtg

SEQ ID NO: 110765 - DNA, 80 bp, synthetic construct
  source 1..80: mol_type = other DNA
atcaatgacgactatccgaccccctgcgcgggtggttggttgtatgaggtctggaactggatttgcattgtgttgagcga

SEQ ID NO: 110766 - DNA, 80 bp, synthetic construct
  source 1..80: mol_type = other DNA
ttcttagcgtcactcttctacgtccgcaaattcaactcctcgggctgcccagagcggatggctgtgtgtaagtccctcgc

SEQ ID NO: 110767 - DNA, 80 bp, synthetic construct
  source 1..80: mol_type = other DNA
gcacgctggggggacggcgggaccccgcgatgatggccgtaagggtgttgatgaagtatgtcgagtgatcgcagtaccgc

SEQ ID NO: 110768 - DNA, 80 bp, synthetic construct
  source 1..80: mol_type = other DNA
gactgcgccaacggcagcattgtgtatgaggccgatgatgttatcctacatttacccggctgtgtgccctgcactaatga

SEQ ID NO: 110769 - DNA, 80 bp, synthetic construct
  source 1..80: mol_type = other DNA
tatatattgatgctaagccatataatccagtggttattaaaattagcttcaatcaagagacacaaaacaattgtgtctat

SEQ ID NO: 110770 - DNA, 80 bp, synthetic construct
  source 1..80: mol_type = other DNA
ctctagttggtgtatcagacactgtgaaccaaatgttcacacaaaagtcagcaaccatacaattaagattatatttcgac

SEQ ID NO: 110771 - DNA, 80 bp, synthetic construct
  source 1..80: mol_type = other DNA
gtgcgcgggtgtcgatcgagccccttccattacgggatcgcaggcaccatcgatacaaacgcccccgaggtcctggccgg

SEQ ID NO: 110772 - DNA, 80 bp, synthetic construct
  source 1..80: mol_type = other DNA
tctggttggcctacagagtggcagctgaaggcatcaactacgcagacagaaggtggtgttttgatggaattaagaacaac

SEQ ID NO: 110773 - DNA, 80 bp, synthetic construct
  source 1..80: mol_type = other DNA
ttgatgcccattttctgtcacagtgcaagcagagtggggagaacctttcatacctggtggcctatcaggctacagtgtgc

SEQ ID NO: 110774 - DNA, 80 bp, synthetic construct
  source 1..80: mol_type = other DNA
ctactaatcctacaactcctttagaaaagagtcaagcaaaaaataaatacgtaagtaacgtctaccttggcggacaagca

SEQ ID NO: 110775 - DNA, 80 bp, synthetic construct
  source 1..80: mol_type = other DNA
gcaattgctcctcgagatcttcctgggagcacattggggcgttcttggagccgtggtatactactgcatggtggccaact

SEQ ID NO: 110776 - DNA, 80 bp, synthetic construct
  source 1..80: mol_type = other DNA
ggatggctcctgtccccccgcggctcccgccctaattggaggcccaatgacccccggcggaggtcccgcaacctgggtaa

SEQ ID NO: 110777 - DNA, 80 bp, synthetic construct
  source 1..80: mol_type = other DNA
tagcgttgtagctaggtcacatacgcctataaacttgctaggttttgcggcatacgtaagacttaaagtatatgttttag

SEQ ID NO: 110778 - DNA, 80 bp, synthetic construct
  source 1..80: mol_type = other DNA
gaggtgctgatgttatccctgcacgtcgtaggggtgatactcgcgctgctcttttgtcccccagacccataagcaccctc

SEQ ID NO: 110779 - DNA, 80 bp, synthetic construct
  source 1..80: mol_type = other DNA
ggggtttaccaagacgtgtggagctcccccttgtgacatctatgggtgtgaggggaatcgccgcaatgactcagacctct

SEQ ID NO: 110780 - DNA, 80 bp, synthetic construct
  source 1..80: mol_type = other DNA
tggtttgaagacgaatgatcgtaagtggtgttttgaagggcctgaggaacatgagatcttgaatgacagcggtgaaacag

SEQ ID NO: 110781 - DNA, 80 bp, synthetic construct
  source 1..80: mol_type = other DNA
tgtgcaaataaagcctctttagactctgacacacctggtcctgtatatttttagaatggaagacatcaattttgcgtccc

SEQ ID NO: 110782 - DNA, 80 bp, synthetic construct
  source 1..80: mol_type = other DNA
agaccccctccatggaggacttagtcaatcttttgccagctctcctgtcaccgggggctctagtcgtgggtgtcgtgtgt

SEQ ID NO: 110783 - DNA, 80 bp, synthetic construct
  source 1..80: mol_type = other DNA
gtaatgatgctggaacacctaaatatgctgataaaacatttcaacctgaacctcaaataggagaatctcagtggaacgaa

SEQ ID NO: 110784 - DNA, 80 bp, synthetic construct
  source 1..80: mol_type = other DNA
atgaaatggggtggcttgacagaacaaagagtgacattggcaccctttggggccagagaacggagtcgagagaaagtttt

SEQ ID NO: 110785 - DNA, 80 bp, synthetic construct
  source 1..80: mol_type = other DNA
cacatcaatcgcacagctctgaactgcaacgacagtctggaaaccggcttcctcgcggccctgttctataccagctcctt

SEQ ID NO: 110786 - DNA, 80 bp, synthetic construct
  source 1..80: mol_type = other DNA
cctcctgggccgcgcagggcctgcgagacctcgccgtcgccgtagagcctgtgatttttagccccatggagaagaaggtc

SEQ ID NO: 110787 - DNA, 80 bp, synthetic construct
  source 1..80: mol_type = other DNA
tggcaagtggccaaggctggtttgaagacgaatgatcgtaagtggtgttttgaaggccctgaggaacatgagatcttgaa

SEQ ID NO: 110788 - DNA, 80 bp, synthetic construct
  source 1..80: mol_type = other DNA
gggtgagcgctaacctactaaccgtagaggaagcatgctcattaacccctcctcactcagcccgatccaagttcgggtat

SEQ ID NO: 110789 - DNA, 80 bp, synthetic construct
  source 1..80: mol_type = other DNA
tgggaaggtcgagctcaccgggaccaggcgagtgaccacggcttcggctgcccaacggcgcggaagagttggtcggcagg

SEQ ID NO: 110790 - DNA, 80 bp, synthetic construct
  source 1..80: mol_type = other DNA
gcctttccaccttgcccggcaaccccgctgtggcgtctcttatggcgttcactgcttcagtcaccagtcccctgacgacc

SEQ ID NO: 110791 - DNA, 80 bp, synthetic construct
  source 1..80: mol_type = other DNA
gtcaaactctaccaccccggcacgctctctgtctccatggcccgccgccgccgccatcgcggcccccgccgcccccggcc

SEQ ID NO: 110792 - DNA, 80 bp, synthetic construct
  source 1..80: mol_type = other DNA
tcagcttcagttgttatgaaaactccatcatatctgatcgctctgataaaatcattcactgtagaatgggcaatgcccaa

SEQ ID NO: 110793 - DNA, 80 bp, synthetic construct
  source 1..80: mol_type = other DNA
ctgggattttggatccgtgggaggaattttcacgtcctttgggaaagccgtacaccaagtgtttggaggagcgttccggt

SEQ ID NO: 110794 - DNA, 80 bp, synthetic construct
  source 1..80: mol_type = other DNA
gtgaattgcatcattgaggaagttgaagccagatcaatattcccttatgatagttttggactttccacgggagatataat

SEQ ID NO: 110795 - DNA, 80 bp, synthetic construct
  source 1..80: mol_type = other DNA
ttccggcccctgggtcacgcccaggtgcctagtccactatccttacagactttggcactatccgtgtaccgtcaactaca

SEQ ID NO: 110796 - DNA, 80 bp, synthetic construct
  source 1..80: mol_type = other DNA
ttgacttcgacatgtacggagtcacatatagtatcactccacttgatctaccagagatcatccaacgccttcatggcatg

SEQ ID NO: 110797 - DNA, 80 bp, synthetic construct
  source 1..80: mol_type = other DNA
cctggctgacgggtggtgttcgggcggagcgtatgacgtcatcatatgtgatgaatgccactccactgacccgaccacgg

SEQ ID NO: 110798 - DNA, 80 bp, synthetic construct
  source 1..80: mol_type = other DNA
ggtcaaagacgctagccggcccgaaaggaccggtgtgtcaaatgtacaccaatgttgaccaggacctggtaggctggcct

SEQ ID NO: 110799 - DNA, 80 bp, synthetic construct
  source 1..80: mol_type = other DNA
acttgctgcagtattcgctcactaatatgccttacttcgtcagggcgcgtgccctgctgaggatgtgcttgctagtgaag

SEQ ID NO: 110800 - DNA, 80 bp, synthetic construct
  source 1..80: mol_type = other DNA
tggcactatgcgcccaacccatgtagcacagtgaacgctaccagtgtttgtgggccggtgtactgcttcacccccagtcc

SEQ ID NO: 110801 - DNA, 80 bp, synthetic construct
  source 1..80: mol_type = other DNA
catcatcaataatataccccacaaagtaaacaaaagttaatatgcaaatgagcttttgaatttagggcggggccagcgct

SEQ ID NO: 110802 - DNA, 80 bp, synthetic construct
  source 1..80: mol_type = other DNA
agccagccgtagatgggacaccattgaaaccagcgccgcaaacttgggtaagaatcgcaagcaggcgcgtcggggctact

SEQ ID NO: 110803 - DNA, 80 bp, synthetic construct
  source 1..80: mol_type = other DNA
ttaacggggattggacaacaccgtgtgccacaagttggttgagggacgtgtgggattgggtgtgtacagttttatctgac

SEQ ID NO: 110804 - DNA, 80 bp, synthetic construct
  source 1..80: mol_type = other DNA
actgccacaccccccggaacctcagacccctttcctgaatccaatgcacccgtggcagatattcagacggaaattcctga

SEQ ID NO: 110805 - DNA, 80 bp, synthetic construct
  source 1..80: mol_type = other DNA
cacgatgccacgggcaaaagggtctactatctgacccgagaccctgaaacccccctggctcgcgctgcctgggaaacagt

SEQ ID NO: 110806 - DNA, 80 bp, synthetic construct
  source 1..80: mol_type = other DNA
ggcggccctaaaagccatcacaacaagagaaccggatatcacacacagacaaaaggaccctggagtgaaggagaaataac

SEQ ID NO: 110807 - DNA, 80 bp, synthetic construct
  source 1..80: mol_type = other DNA
ctggttgggcaacattatcatgtatgctcccacactgtgggcgaggatgatactgatgactcacttcttctccatcctca

SEQ ID NO: 110808 - DNA, 80 bp, synthetic construct
  source 1..80: mol_type = other DNA
atattgtcattcctgcattttcccgcggttcctgttgtacaatgggcgtgcgttatgatcgcctataccctgcgttacag

SEQ ID NO: 110809 - DNA, 80 bp, synthetic construct
  source 1..80: mol_type = other DNA
ccgcagtactctgcgagtgctatgatgctggatgtgcctggtacgaactgacaccagctgagaccacaacaagactaagg

SEQ ID NO: 110810 - DNA, 80 bp, synthetic construct
  source 1..80: mol_type = other DNA
cctgctgcttacgctgcccaaggctataaagttttagtccttaatccatcagtggcagccactttgggattcggagcgta

SEQ ID NO: 110811 - DNA, 80 bp, synthetic construct
  source 1..80: mol_type = other DNA
ccagtgtattgcttcactcccagccccgtggtgattggaacgaccgacaagtcgggcgcgcctacctacaactggggtga

SEQ ID NO: 110812 - DNA, 80 bp, synthetic construct
  source 1..80: mol_type = other DNA
cagtggatgaacaggctcatagcgttcgcctctagaggcaaccacgtgtcacccacgcactacgtgcccgagacggacgc

SEQ ID NO: 110813 - DNA, 80 bp, synthetic construct
  source 1..80: mol_type = other DNA
tgttgggctcccattttacccgaagatcggctgctatccccgggacatggatcgcggggcggtggtgtggtttcttctcg

SEQ ID NO: 110814 - DNA, 80 bp, synthetic construct
  source 1..80: mol_type = other DNA
gccgcaagcctgcacgcctgatcgtgttccctgacttgtccgtgcgcgtttgtgaaaaacgcgcactgtatgacgtgaca

SEQ ID NO: 110815 - DNA, 80 bp, synthetic construct
  source 1..80: mol_type = other DNA
cggtgccccacagactgtttcaggaagcatccggaagccacctacaccaagtgtggctcgggcccctggctcactcctag

SEQ ID NO: 110816 - DNA, 80 bp, synthetic construct
  source 1..80: mol_type = other DNA
ttccaggggaagttgatgatgacggtgaacgccacagatattaccaatgtgatcaccattccaattgcctccggaaaaaa

SEQ ID NO: 110817 - DNA, 80 bp, synthetic construct
  source 1..80: mol_type = other DNA
ggaccatcgtggtgccatgcaggagccaggatgaactaattggcagagccagaatttcaccaggagcaggatggaacgtg

SEQ ID NO: 110818 - DNA, 80 bp, synthetic construct
  source 1..80: mol_type = other DNA
caattgacatcgcttggtctaaatgccgttgcattttataggggtatcgacgtggccgtgatcccaacagcaggcgatgt

SEQ ID NO: 110819 - DNA, 80 bp, synthetic construct
  source 1..80: mol_type = other DNA
tcaccttggtataagcattggatcggccgcctcatgtggtggaaccagtacgccatatgtagatgcgaggccgctcttca

SEQ ID NO: 110820 - DNA, 80 bp, synthetic construct
  source 1..80: mol_type = other DNA
aacctgctcccggccatactatcgccgggcgctctggtggtgcgggtagtgtgcgccgcgatcttgcggcgtcacgtggg

SEQ ID NO: 110821 - DNA, 80 bp, synthetic construct
  source 1..80: mol_type = other DNA
ttgttccagtagctggtgatgcactggaccacgagccgggccagggcgcagaagacgtgctcgctgccgtgtatggcggc

SEQ ID NO: 110822 - DNA, 80 bp, synthetic construct
  source 1..80: mol_type = other DNA
ccaggttccatcgcccgaatttttcacggaactagacggggtgcgcctgcatagattcgcgcccccttgcaagcctttgc

SEQ ID NO: 110823 - DNA, 80 bp, synthetic construct
  source 1..80: mol_type = other DNA
cacggagtcatgctcgtccatgccccccctcgagggggagccgggcgacccggacttgagttgtgactcttggtccaccg

SEQ ID NO: 110824 - DNA, 80 bp, synthetic construct
  source 1..80: mol_type = other DNA
ctaactccctaatttcatggtttgctaacagctctctgtgcaaaactttctaccaaggaaaacttttgtattctgctaaa

SEQ ID NO: 110825 - DNA, 80 bp, synthetic construct
  source 1..80: mol_type = other DNA
cacagtgggaggaaaaccgcattgttcacagtctcttcggaaaaaacaattctaaccatgggcgaatacggagacgtgtc

SEQ ID NO: 110826 - DNA, 80 bp, synthetic construct
  source 1..80: mol_type = other DNA
ggcccaggattgcaggcaaaagctacaagagaggcccagaaaaggacagctgctggaatcatgaaaaatcccacagtgga

SEQ ID NO: 110827 - DNA, 80 bp, synthetic construct
  source 1..80: mol_type = other DNA
tcctacaaagttgcctcagaaggcttccagtactccgacagaaggtggtgctttgatggggaaaggaacaaccaggtgtt

SEQ ID NO: 110828 - DNA, 80 bp, synthetic construct
  source 1..80: mol_type = other DNA
atgtggcacgtcacgcgaggggcctttctcgttagaaatggtaaaaagctggttccatcctgggcctcagtcaaggaaga

SEQ ID NO: 110829 - DNA, 80 bp, synthetic construct
  source 1..80: mol_type = other DNA
aggtaagaaggaagcggaccaaccgtggattgttgtaaacacgagcacactgtttgatgaactcgaattagacccccccg

SEQ ID NO: 110830 - DNA, 80 bp, synthetic construct
  source 1..80: mol_type = other DNA
acctcttttggcatgttgtaattcaccacctcccggtaccatataaacctctgattaaacatggcgccatccaccaccat

SEQ ID NO: 110831 - DNA, 80 bp, synthetic construct
  source 1..80: mol_type = other DNA
gaaaggtggtcggaagccagcccggctcatcgtatatccagacctcggggtgagggtatgcgagaagagggcgctttatg

SEQ ID NO: 110832 - DNA, 80 bp, synthetic construct
  source 1..80: mol_type = other DNA
ctcatgtccaccgacaaacacaccaattttttcgagtgtcgcagcacctcctacgccggggcggtcgtcaacgatctgtg

SEQ ID NO: 110833 - DNA, 80 bp, synthetic construct
  source 1..80: mol_type = other DNA
ataacataaccaatagaaacttaatacagagtcacgccccattacaacaaggataaaacacgggatcattttcttaacat

SEQ ID NO: 110834 - DNA, 80 bp, synthetic construct
  source 1..80: mol_type = other DNA
acctctttggaaaaaagaatttgattccatctagtgccgcaccttggagctggccagattttgacttgaaaccaggagct

SEQ ID NO: 110835 - DNA, 80 bp, synthetic construct
  source 1..80: mol_type = other DNA
cgcgaacacgcggcgacctcgcgggccagggcggcggagcacgcggtgaacttaaccgccgtggcggccacgtttgggtg

SEQ ID NO: 110836 - DNA, 80 bp, synthetic construct
  source 1..80: mol_type = other DNA
ccttttggagacagctacattatcgttgggagaggagattcacgtctcacttaccagtggcacaaagagggaagctcaat

SEQ ID NO: 110837 - DNA, 80 bp, synthetic construct
  source 1..80: mol_type = other DNA
tgaaaattgttggccccaggacatgcagcaacgtttggcatggcacgttccccataaacgccacaacaactggccctagc

SEQ ID NO: 110838 - DNA, 80 bp, synthetic construct
  source 1..80: mol_type = other DNA
cgcgctcacgggctcggcccccgccgacatcgcccgctgcgtcgtccacagtctgacgcaggtcctggccctgcatcccg

SEQ ID NO: 110839 - DNA, 80 bp, synthetic construct
  source 1..80: mol_type = other DNA
acgtccattctggggattggtaccgtgctggatcaggctgagacagcgggtgtgagactaaccgtgctcgccacagctac

SEQ ID NO: 110840 - DNA, 80 bp, synthetic construct
  source 1..80: mol_type = other DNA
ggccatggtactgtggtactggaactgcagtacacaggcacggatggaccctgcaagatacccatttcatcagtagcttc

SEQ ID NO: 110841 - DNA, 80 bp, synthetic construct
  source 1..80: mol_type = other DNA
cgcgaagctcctatctgttgaagaagcttgcgcgctgactccaccgcactcagcccgatctaagttcgggtatggggcca

SEQ ID NO: 110842 - DNA, 80 bp, synthetic construct
  source 1..80: mol_type = other DNA
catataagcgcggcctgaagacggggatgtactactgcaaggttcgcaaggcgaccaacagcggggtgttcgccggcgac

SEQ ID NO: 110843 - DNA, 80 bp, synthetic construct
  source 1..80: mol_type = other DNA
tttggtgtgcaagactctaaacttagcattgccaccaaaggacccctcacagtgtcagaaggaaagctggccctgcaaac

SEQ ID NO: 110844 - DNA, 80 bp, synthetic construct
  source 1..80: mol_type = other DNA
ttgccaacagctgtgatggggtctgcatatggcttccagtactctcccagccagcgggtggagtacctcctcaaaatgtg

SEQ ID NO: 110845 - DNA, 80 bp, synthetic construct
  source 1..80: mol_type = other DNA
tcgcaaagtcatcaaaaaaccgcaaagttgtttaaaataagagcaacactacaaaaggagataagaagagcacatacctc

SEQ ID NO: 110846 - DNA, 80 bp, synthetic construct
  source 1..80: mol_type = other DNA
ggtatgccctactgattgcttccgcaaacacccagaagctacctatgcgaggtgtgggtcaggaccgtggcttacacctc

SEQ ID NO: 110847 - DNA, 80 bp, synthetic construct
  source 1..80: mol_type = other DNA
aaaggggtacaggggagtatggcgaggagacggggtgacaacgacacgttgcccctgcggagctatcttgacagagcatg

SEQ ID NO: 110848 - DNA, 80 bp, synthetic construct
  source 1..80: mol_type = other DNA
gggagcagcctatggcttccagtactcgcctaaggacagggtagaccacctgctgaagttgtggcgctccaagaaaacgc

SEQ ID NO: 110849 - DNA, 80 bp, synthetic construct
  source 1..80: mol_type = other DNA
tcgggatcggcgtccgggtcgcgggcgtgggtgcccccaggagatagcggaatgtccgtggtcggaggcccggaggcgtc

SEQ ID NO: 110850 - DNA, 80 bp, synthetic construct
  source 1..80: mol_type = other DNA
agtccccttttgctcacaccatttccatgagataatcatgaaagacgggagaaaactggtggtcccctgccgaaaccaag

SEQ ID NO: 110851 - DNA, 80 bp, synthetic construct
  source 1..80: mol_type = other DNA
ctctctagggcattttcgtgagaccctcatggctgctaaaggggcatcagccgtgtagtaagaaggccccgacctactgc

SEQ ID NO: 110852 - DNA, 80 bp, synthetic construct
  source 1..80: mol_type = other DNA
aaaaccttgctttagtgctaggagctgcttttttccaaatggctgctaccgatctccagttcaacatgcctgacttactg

SEQ ID NO: 110853 - DNA, 80 bp, synthetic construct
  source 1..80: mol_type = other DNA
ggagatgatgtgtagtttggcctggatcttaaggttggcgatgttaccgcccagatcccgccgggggttcatgttgtgca

SEQ ID NO: 110854 - DNA, 80 bp, synthetic construct
  source 1..80: mol_type = other DNA
ccggatcccgccgaccccgccccctcctcgcccccggaggccaaggttccgatgagggcccgggtggcagactgcaccag

SEQ ID NO: 110855 - DNA, 80 bp, synthetic construct
  source 1..80: mol_type = other DNA
ggatttttgcatcgagctgggtaataagcgttggcaatttaaccgccagtcaggctttctttcacagatgtggattggcg

SEQ ID NO: 110856 - DNA, 80 bp, synthetic construct
  source 1..80: mol_type = other DNA
actcagcaacctcactgtcacccaactcctgaggcgactacaccagtggataagcacggattgcaccactccctgttctg

SEQ ID NO: 110857 - DNA, 80 bp, synthetic construct
  source 1..80: mol_type = other DNA
ggcctctgcgatggaggcactcacgaaaatgcggaaggcagccttcccggaggcattgcaaagctctggtgccggctcag

SEQ ID NO: 110858 - DNA, 80 bp, synthetic construct
  source 1..80: mol_type = other DNA
gacaagcagcaggccgccatcaaggtcgtgtgtaactcggtgtacgggttcacgggagtgcagcacggactcctgccgtg

SEQ ID NO: 110859 - DNA, 80 bp, synthetic construct
  source 1..80: mol_type = other DNA
aaagaatggcaatcagcggagatgactgcgtagtgaaaccaattgatgataggtttgcaacagccttaacagctctgaat

SEQ ID NO: 110860 - DNA, 80 bp, synthetic construct
  source 1..80: mol_type = other DNA
cttgaaggacgtcaagcaagcagcctccaaggtcagtgctaagctcctctcccttgaggaggcgtgtgcactgaccccgc

SEQ ID NO: 110861 - DNA, 80 bp, synthetic construct
  source 1..80: mol_type = other DNA
tctactttggctgcttgtccttgaccgtctggctgctcgaggggagttacggtggatcggaccaccacgccgcgcgagcc

SEQ ID NO: 110862 - DNA, 80 bp, synthetic construct
  source 1..80: mol_type = other DNA
aggggaagccctcagtggatgtgtggcttgacgccatttaccaggagagccctgccaagacacgcgagtactgtttgcac

SEQ ID NO: 110863 - DNA, 80 bp, synthetic construct
  source 1..80: mol_type = other DNA
ttggagtctataatccacacagtttcctggcgagccaaacgggggtcggtgattgagatgaagccgtcctctgaaaagtc

SEQ ID NO: 110864 - DNA, 80 bp, synthetic construct
  source 1..80: mol_type = other DNA
ccggcctggaccctcgggaatgaatgttgtacaggtggctgaactgtatccagaactgagacgcattttgacaattacag

SEQ ID NO: 110865 - DNA, 80 bp, synthetic construct
  source 1..80: mol_type = other DNA
gtaacttggtcctacttggcccggctgacagtatgcaggacaaggggtggaagctacttgcgcccatcacggcctacgcc

SEQ ID NO: 110866 - DNA, 80 bp, synthetic construct
  source 1..80: mol_type = other DNA
aggggttgcactttttatgggtgttggaaggccttggtaggtaggcccaaaagtaaaatgtctgtaaaaaagtgcttgtt

SEQ ID NO: 110867 - DNA, 80 bp, synthetic construct
  source 1..80: mol_type = other DNA
tcagaactctcttcggtggcatgtcctggatcacccagggtctaatgggagctctgcttctatggatggtggtgaatgcg

SEQ ID NO: 110868 - DNA, 80 bp, synthetic construct
  source 1..80: mol_type = other DNA
gctgaggttagctgccacatgaccagcaggtcgctgtctgcgggactcatccatccttcggccaggtcgccgtctcccca

SEQ ID NO: 110869 - DNA, 80 bp, synthetic construct
  source 1..80: mol_type = other DNA
tccaacagatgaacctttgaacctgtccttaaagcgccccaagtgctcctgagatcatagtaataaagttattgaccctt

SEQ ID NO: 110870 - DNA, 80 bp, synthetic construct
  source 1..80: mol_type = other DNA
gccgtcaggcatgtttgacacctcagtcctgtgcgagtgttatgacacgggatgtgcctggtatgagctaacacccgggg

SEQ ID NO: 110871 - DNA, 80 bp, synthetic construct
  source 1..80: mol_type = other DNA
cttttggaaagaccgcgatgatgcaatgcaaactttggggattcgaccgacaacggacgttttacccaaagagcaagaca

SEQ ID NO: 110872 - DNA, 80 bp, synthetic construct
  source 1..80: mol_type = other DNA
gtttctatgtgccagaaggctacaaagaccgaatgtattctttcttcagaaactttcagcctatgagtagacaggttgtt

SEQ ID NO: 110873 - DNA, 80 bp, synthetic construct
  source 1..80: mol_type = other DNA
ttgcaaaaagcgtcccatgagctcctgaaaggttttttgggatgaaaaagtcagctgcaaaccgcgcttttcttcgttga

SEQ ID NO: 110874 - DNA, 80 bp, synthetic construct
  source 1..80: mol_type = other DNA
tatggtggctgtgctacctgctagtcttggccgaagcccagatccagcaatgggttccccccctggaggtccgggtggtg

SEQ ID NO: 110875 - DNA, 80 bp, synthetic construct
  source 1..80: mol_type = other DNA
caacctgtttgtcatggatgaagcccatttcacagatccagccagtatagcagctcgtggatatattgccacccgtgttg

SEQ ID NO: 110876 - DNA, 80 bp, synthetic construct
  source 1..80: mol_type = other DNA
gtaaagggattggaaagacttcaataggactcatttgcgtgattgcttccagcggcatgctgtggatggctgaaattcct

SEQ ID NO: 110877 - DNA, 80 bp, synthetic construct
  source 1..80: mol_type = other DNA
atgcggaacggctggttgagtttggagctccacacgccgtgaaaatggacgtgtacaaccttggagaccagactggagtg

SEQ ID NO: 110878 - DNA, 80 bp, synthetic construct
  source 1..80: mol_type = other DNA
tggggtgagaatccatcgttacgcccctccatgtaagcccctgttgagagatgaaatcaccttcatggtagggttgaatt

SEQ ID NO: 110879 - DNA, 80 bp, synthetic construct
  source 1..80: mol_type = other DNA
tacgtccccgagtccgacgcggctgcccgtgtaacggccatactctcatctctgactgtgacatccctcctgaggcggtt

SEQ ID NO: 110880 - DNA, 80 bp, synthetic construct
  source 1..80: mol_type = other DNA
ggtcgtcgactctgtcgcgcgtgccgcgagctccggcccgggaatccggccggggcaaggtccccggtggaccaggcggc

SEQ ID NO: 110881 - DNA, 80 bp, synthetic construct
  source 1..80: mol_type = other DNA
aagcaatatatactatcagttaacagtaatacaaattaatccgcccaactgtatcatcacttccaaataccttacagaag

SEQ ID NO: 110882 - DNA, 80 bp, synthetic construct
  source 1..80: mol_type = other DNA
tggggtgagagttctggaggacgggataaactatgcaacagggaacctgcccggttgctctttctctatcttcttattgg

SEQ ID NO: 110883 - DNA, 80 bp, synthetic construct
  source 1..80: mol_type = other DNA
ttttgggcttcacggttcaagcggacatgggttgtgtggtgtcatggagtgggagagaattgaagtgtggaagtggaatt

SEQ ID NO: 110884 - DNA, 80 bp, synthetic construct
  source 1..80: mol_type = other DNA
tacctcggcatgtggtccttcagccttctactcctggcacttccccaacaggcctatgcccttgatacaactgagcaggg

SEQ ID NO: 110885 - DNA, 80 bp, synthetic construct
  source 1..80: mol_type = other DNA
cgcacaccgcttcgatttatcggagtggtttgtgtcaggcggaagcgggggggacatatttcacagcgtgtcccaggccc

SEQ ID NO: 110886 - DNA, 80 bp, synthetic construct
  source 1..80: mol_type = other DNA
ctgccttttccttacacggttactctcccactgaactcaatcgggttggagcatgcctcaggaagcttggggctcctccc

SEQ ID NO: 110887 - DNA, 80 bp, synthetic construct
  source 1..80: mol_type = other DNA
tccatggtatggcagcattttcactccacggatactctccagttgagctcaatagggtaggggcttgcctcaggaaactt

SEQ ID NO: 110888 - DNA, 80 bp, synthetic construct
  source 1..80: mol_type = other DNA
gaactgggcgcccactctctcgatgatcacatcatacgcgctgagagtgcccgaagtcattttcacaaccgtagccggcg

SEQ ID NO: 110889 - DNA, 80 bp, synthetic construct
  source 1..80: mol_type = other DNA
atcctgttcctcaaatgtgtctgtggcgttgggcccgcggggccgccgcagatactacctgaccagagacccaaccactc

SEQ ID NO: 110890 - DNA, 80 bp, synthetic construct
  source 1..80: mol_type = other DNA
tactcgactgaaaaccaaagaaaccccctctttgggttcgggatttgatccctactttacctactctggctccgttccat

SEQ ID NO: 110891 - DNA, 80 bp, synthetic construct
  source 1..80: mol_type = other DNA
tccagcttataagtccctccttgtgaccacgatctggtggatacagtacttcatctcgcgcacggaggctatcttacatg

SEQ ID NO: 110892 - DNA, 80 bp, synthetic construct
  source 1..80: mol_type = other DNA
cagcatacccatcccagcgcccagctatcgtagagcgctgtggagggttagtgccgaggagtacgtcgaggtaacgcgtg

SEQ ID NO: 110893 - DNA, 80 bp, synthetic construct
  source 1..80: mol_type = other DNA
gcttaatgattaaaaatacaaattagtatgttttgacaagcatgaaaaaggtattttttattttagcagttaaaggtact

SEQ ID NO: 110894 - DNA, 80 bp, synthetic construct
  source 1..80: mol_type = other DNA
ggcggatgttttgaaatgcaaaataaaactcaccaaggccatagcgtgcgttctcttccttgttagagatgaggcgcgcg

SEQ ID NO: 110895 - DNA, 80 bp, synthetic construct
  source 1..80: mol_type = other DNA
cgctgagcgacgacctgggtgtgtaccgcaacgaccgcattcacaaggccgtgagcacaagccggcggcgcgagctaagc

SEQ ID NO: 110896 - DNA, 80 bp, synthetic construct
  source 1..80: mol_type = other DNA
tatccctgctagacgcaggggtgacacccgtgctgcccttctcagtccccgcccactgagctaccttaaagggtcctcag

SEQ ID NO: 110897 - DNA, 80 bp, synthetic construct
  source 1..80: mol_type = other DNA
gcgtttcggtgggaagtgaaactacaggcagcaggtccggacgcgaacacgccccttccccgtcaaattcggatgattcg

SEQ ID NO: 110898 - DNA, 80 bp, synthetic construct
  source 1..80: mol_type = other DNA
accgaggaggcgtggctaggcggcccgacggggagcagcgcggacagcggcgtggccggtgtcgtgagggtcaggtccca

SEQ ID NO: 110899 - DNA, 80 bp, synthetic construct
  source 1..80: mol_type = other DNA
gaaatgacccagaggatatagattgctggtgtacaaaactggccatgtatgttcgatatggaaggtgcacaaagactcgc

SEQ ID NO: 110900 - DNA, 80 bp, synthetic construct
  source 1..80: mol_type = other DNA
gcgcggagaatgtctggtgctgtggcctcccttgtggaccggggaccgtctggtcttcgattcgcccgtacagcggctgt

SEQ ID NO: 110901 - DNA, 80 bp, synthetic construct
  source 1..80: mol_type = other DNA
cggccgacggcatggccgacaaagggtggaggctgctcgcccctgtcacagcttatgcgcagcaaacacgcggcctactg

SEQ ID NO: 110902 - DNA, 80 bp, synthetic construct
  source 1..80: mol_type = other DNA
tgggttttgcgggatcggtcgttatgtcgcgcgggccgtacgcgaatgccgcgtctggggcgttcgccgtcgggtgcgcc

SEQ ID NO: 110903 - DNA, 80 bp, synthetic construct
  source 1..80: mol_type = other DNA
atctgccactacccgttccgcaagcactgcctgttgaatttgggtaagggtggttgcaaagtcatccacatctacaaagc

SEQ ID NO: 110904 - DNA, 80 bp, synthetic construct
  source 1..80: mol_type = other DNA
ctttttcgtcttgatgaggaacaagggcatagggaagatgggctttggaatggtgacccttggggccagtgcatggctca

SEQ ID NO: 110905 - DNA, 80 bp, synthetic construct
  source 1..80: mol_type = other DNA
cgcgaagtcaattgaacccgcccaattggcccgctgcccaggtgtatcaggaaaaccccgctccgaccacagttctcctg

SEQ ID NO: 110906 - DNA, 80 bp, synthetic construct
  source 1..80: mol_type = other DNA
gcaacttgaaaaagccctggattgccaaatctacggggcctgttactccattgagccacttgacctacctcagatcattg

SEQ ID NO: 110907 - DNA, 80 bp, synthetic construct
  source 1..80: mol_type = other DNA
gaatgcggtggcttattacaggggccttgatgtttctgttataccaacccaaggagatgtcgtggttgtcgccaccgacg

SEQ ID NO: 110908 - DNA, 80 bp, synthetic construct
  source 1..80: mol_type = other DNA
tccttgaagccctcggtaacgaccagatacaggagggcgcggtccgggtccaggccgaggcgctcacacagcgcctcccc

SEQ ID NO: 110909 - DNA, 80 bp, synthetic construct
  source 1..80: mol_type = other DNA
agaagttacctaaagccgtaatggggtcagcttacgggttccagtactcccctagtcaaagggtagagtatttactcaaa

SEQ ID NO: 110910 - DNA, 80 bp, synthetic construct
  source 1..80: mol_type = other DNA
cacggggcaccggatggcctgggacatgatgatgaattggagccccactgcaactttgatccttgcccaactgatgaggc

SEQ ID NO: 110911 - DNA, 80 bp, synthetic construct
  source 1..80: mol_type = other DNA
aatggccaccacggtggactatggccttagttctaaactagccatgacaattgcacgctcacagggcctgagtttagaga

SEQ ID NO: 110912 - DNA, 80 bp, synthetic construct
  source 1..80: mol_type = other DNA
tcttcgtcagaagaaggtgacttttgacaggaaccaggtactcgaccaacactaccatgatgttcttaaggaggtaaagc

SEQ ID NO: 110913 - DNA, 80 bp, synthetic construct
  source 1..80: mol_type = other DNA
gaggtcctatgctgtgtccctcgggtcatgttgctgggatcttccgcgcagcagtgtgcactagaggtgtggcaaaatcc

SEQ ID NO: 110914 - DNA, 80 bp, synthetic construct
  source 1..80: mol_type = other DNA
cctgatgaatcggaagcgcccagagcgccttacctggtacgagctacagcaggagtgcagggatgagttgggcctgatgc

SEQ ID NO: 110915 - DNA, 80 bp, synthetic construct
  source 1..80: mol_type = other DNA
tgggccaaggtcatcgtggtcttgctcttgttcgcaggggtcgatgccaccaccaccatcgcctcgggcgtggctcattc

SEQ ID NO: 110916 - DNA, 80 bp, synthetic construct
  source 1..80: mol_type = other DNA
gtcaagcttttcagtccgggcgcccagcagaaaattcagctgatcaacaccaacggcagctggcacatcaacaggactgc

SEQ ID NO: 110917 - DNA, 80 bp, synthetic construct
  source 1..80: mol_type = other DNA
cgcggtccagaccacggtcaaaatgccggccgtggcgctccgggcgctttcgccgcgcgaggagatgacccaggagtcga

SEQ ID NO: 110918 - DNA, 80 bp, synthetic construct
  source 1..80: mol_type = other DNA
cccgccccgatacgccccggaggacgccgagcggccaacagaccacggacccctgttaccgtcgacgcaccaccagcgat

SEQ ID NO: 110919 - DNA, 80 bp, synthetic construct
  source 1..80: mol_type = other DNA
aacgcggatgtcgtcccagccaggagacgaggagatcgacgtggggcactgctctctccaaggcctctctcaactttgaa

SEQ ID NO: 110920 - DNA, 80 bp, synthetic construct
  source 1..80: mol_type = other DNA
gccaacggaggcgtgcgtgcttatgcgcggcgcgtttcttctgtctccagggaatccgaggccaggactttaacctgctc

SEQ ID NO: 110921 - DNA, 80 bp, synthetic construct
  source 1..80: mol_type = other DNA
cgtcaggctgccccgaacggcttagctcatgtagaaggctcaacgacttccagcaaggctggggccctcttgagtaccac

SEQ ID NO: 110922 - DNA, 80 bp, synthetic construct
  source 1..80: mol_type = other DNA
ctaaccacaaggatcagcttcgccagcgccaggcgaccgatcagagagttttcgtccagcacgtgctggacgaggggcag

SEQ ID NO: 110923 - DNA, 80 bp, synthetic construct
  source 1..80: mol_type = other DNA
gattggcagcaagtgcctttttgttcacaccatttccaccagctgatcatgaaggatgggagggaaatagtggtgccatg

SEQ ID NO: 110924 - DNA, 80 bp, synthetic construct
  source 1..80: mol_type = other DNA
tagcactggtgtttcttggttgctggggacaagtgacgctcaccaccttgataatggcaacaatactggtaaccctccac

SEQ ID NO: 110925 - DNA, 80 bp, synthetic construct
  source 1..80: mol_type = other DNA
cactgcccgttcgccgacccaaccgtagatgggacaccactggaaccagggccggtaagtccaagcagccgccgccgtta

SEQ ID NO: 110926 - DNA, 80 bp, synthetic construct
  source 1..80: mol_type = other DNA
gagacgacttggtcatcatatcggagagtgcgggagtttctgaggacgctagtgcactgcgagccttcacggaggctatg

SEQ ID NO: 110927 - DNA, 80 bp, synthetic construct
  source 1..80: mol_type = other DNA
tcgaggtagtcgggacagtgtgattttactagcaagcctactgtatccctctctaatctttgacatcacaaagctgctga

SEQ ID NO: 110928 - DNA, 80 bp, synthetic construct
  source 1..80: mol_type = other DNA
aaggttcttgaactgctggacggagaacaccgacgcctagcgcggtccatcattgagctcacataccgacacaaagtcgt

SEQ ID NO: 110929 - DNA, 80 bp, synthetic construct
  source 1..80: mol_type = other DNA
gcagcagccaggttggatttatccgactggtttactgttggctacagcgggggaggcgtatatcacagcacgcctcatgc

SEQ ID NO: 110930 - DNA, 80 bp, synthetic construct
  source 1..80: mol_type = other DNA
ggccgtgtacgccgcggtgggcgcggtgacctcgcgctacgagcgcgcgctggatgcggcccgtcgcctggcggcggccc

SEQ ID NO: 110931 - DNA, 80 bp, synthetic construct
  source 1..80: mol_type = other DNA
atggtcctcattaaaatgggggcctattgcggcacctacatctatgaccacctatctccgctgagagattgggcccacag

SEQ ID NO: 110932 - DNA, 80 bp, synthetic construct
  source 1..80: mol_type = other DNA
gccccctttatgtgctccaggcttcgctcttgcgagtcccttacttcgtgagggcgcacgctctgatcaagctctgcagc

SEQ ID NO: 110933 - DNA, 80 bp, synthetic construct
  source 1..80: mol_type = other DNA
gcccggcccccgatttggaggaccaacccggtgtcccccaaagaaccccattagcatgcccctcccgccgacgcaacagg

SEQ ID NO: 110934 - DNA, 80 bp, synthetic construct
  source 1..80: mol_type = other DNA
atttcaaacatgctgagcataatcaacaaacggaaaaagacatcgctctgtctcatgatgatattgccagcagcacttgc

SEQ ID NO: 110935 - DNA, 80 bp, synthetic construct
  source 1..80: mol_type = other DNA
ggttcccgtgaactgggttccgatgggccgcaccacctggagcatccatgcgagtggtgagtggatgacgacagaagaca

SEQ ID NO: 110936 - DNA, 80 bp, synthetic construct
  source 1..80: mol_type = other DNA
gtgaaagtcaagtatgaaggtgctggagctccgtgtaaagtccccatagagataagagatgtaaacaaggaaaaagtggt

SEQ ID NO: 110937 - DNA, 80 bp, synthetic construct
  source 1..80: mol_type = other DNA
ggaagttacgaagccccctcaacaggatcagcatcctctatggtcaatggagtggtcaaactgctgacaaaaccatggga

SEQ ID NO: 110938 - DNA, 80 bp, synthetic construct
  source 1..80: mol_type = other DNA
ccgcgtcctaccgcatcagcgatagcaactttgtccaatgtggttccaactgcaccatgatcatcgacggagacgtggtg

SEQ ID NO: 110939 - DNA, 80 bp, synthetic construct
  source 1..80: mol_type = other DNA
gactcagggggttgcgcacgttcaggacaccgggggtcgcgggctcgacgatgcgttttccgtccttgccttccttcaac

SEQ ID NO: 110940 - DNA, 80 bp, synthetic construct
  source 1..80: mol_type = other DNA
ctgccccactgactgtttccgaaaacatcctgaggcaacctacagcaaatgcggctcaggcccctggctcacgccaaggt

SEQ ID NO: 110941 - DNA, 80 bp, synthetic construct
  source 1..80: mol_type = other DNA
tcttcctatgtcctgggatcccaactcccatgcgagcccgagccagacgttaccattgtcacgtctatgctgagagatcc

SEQ ID NO: 110942 - DNA, 80 bp, synthetic construct
  source 1..80: mol_type = other DNA
ctggcctttgacatcacaaaatacatcttggcccttttgggacccctctacatacttcaggcttcgctgctgcgcatacc

SEQ ID NO: 110943 - DNA, 80 bp, synthetic construct
  source 1..80: mol_type = other DNA
ttgccatactgccttgcagcttcacacccatgccagctctctcctccggccttatccatctgcatcagaatatcgtagac

SEQ ID NO: 110944 - DNA, 80 bp, synthetic construct
  source 1..80: mol_type = other DNA
gtcctggtcacccttgagttggaatgcatgcgccgcttttttagcgaccccgaaaccctgcgcaaggttgaagagaccct

SEQ ID NO: 110945 - DNA, 80 bp, synthetic construct
  source 1..80: mol_type = other DNA
ccggcctgatccacctccaccaaaacatcgtggacgttcaatacctctacggtgttggatccgcggtggtgtcttgggcc

SEQ ID NO: 110946 - DNA, 80 bp, synthetic construct
  source 1..80: mol_type = other DNA
ggttgacgccgacacccgcgtctccggggggaccatcgctcgcgccactcacgggttcaccggtctgtttgcacctggtg

SEQ ID NO: 110947 - DNA, 80 bp, synthetic construct
  source 1..80: mol_type = other DNA
gcagaccgtcacgcggatggtggtgatgccaaggagttcgttgaggtcttcgtctgtgcgcggacgcgacatgtcccaga

SEQ ID NO: 110948 - DNA, 80 bp, synthetic construct
  source 1..80: mol_type = other DNA
ggctgggagccagattcttggagtttgaagctctaggattcctcaatgaagaccattggatgagtagagagaattcagga

SEQ ID NO: 110949 - DNA, 80 bp, synthetic construct
  source 1..80: mol_type = other DNA
aacagacggtgatgcgaactgttcgtggaaggactagaggttagaggagaccccgtggaacttaggtgcggcccaagccg

SEQ ID NO: 110950 - DNA, 80 bp, synthetic construct
  source 1..80: mol_type = other DNA
aagacagaagcgaaacatcccgccactctaaggaagtattgcatagaggcaaagctgaccaacacaacaacagcatctcg

SEQ ID NO: 110951 - DNA, 80 bp, synthetic construct
  source 1..80: mol_type = other DNA
acttcacatacaacaatttccatttcaacaatcagcattattgctgccgtgacaattggaatatctattcttgtttttac

SEQ ID NO: 110952 - DNA, 80 bp, synthetic construct
  source 1..80: mol_type = other DNA
tgaactggtcgcccacagttgggtatgtggtttctagcctgctaagaatgccacagatcctcatggacattgttcttgaa

SEQ ID NO: 110953 - DNA, 80 bp, synthetic construct
  source 1..80: mol_type = other DNA
ctcgtgtcgtcgcggcagagatggcagaagctctgagaggactccccgtcagataccaaacttcagcggtccagcgggaa

SEQ ID NO: 110954 - DNA, 80 bp, synthetic construct
  source 1..80: mol_type = other DNA
atctcggccggagggctgtcccgcatcgatatcacgagccccatgaagcccttcccgtatcgcgcgcgcacgagcgcggc

SEQ ID NO: 110955 - DNA, 80 bp, synthetic construct
  source 1..80: mol_type = other DNA
gctctcccaatttgggcccgaccggactataacccaccattgattgagccatggaaggattcatcatacgtggctcccgt

SEQ ID NO: 110956 - DNA, 80 bp, synthetic construct
  source 1..80: mol_type = other DNA
cggtggtgcggtgggtcgcggcggccagcacggccacgtgctggcccgtgggtcggtagagggcgtgtggtgcctcggtg

SEQ ID NO: 110957 - DNA, 80 bp, synthetic construct
  source 1..80: mol_type = other DNA
gaactgcaacgactcccttaacacggggttcattgcagcgctgttctacacccacaaattcaactcctcggggtgtcctg

SEQ ID NO: 110958 - DNA, 80 bp, synthetic construct
  source 1..80: mol_type = other DNA
aagtcctgtagcggtaggcaccaccgacaggctgggcgtccccacgtatacctggggcgaaaacgagacagacgtcttca

SEQ ID NO: 110959 - DNA, 80 bp, synthetic construct
  source 1..80: mol_type = other DNA
aaatattaccagtcccattacactaataaacggatccttggctttagccacatcccctcctctggacaccacaggatcta

SEQ ID NO: 110960 - DNA, 80 bp, synthetic construct
  source 1..80: mol_type = other DNA
gctaaagccttggacttcgttccggtggagaacatggagacgaccatgcggtctcccgtcttcagtgataactcttcgcc

SEQ ID NO: 110961 - DNA, 80 bp, synthetic construct
  source 1..80: mol_type = other DNA
tcgcgttgcacacacttggaaaacagggactttgtgactggtactcaggggactacgagggtcaccttggtgctggaact

SEQ ID NO: 110962 - DNA, 80 bp, synthetic construct
  source 1..80: mol_type = other DNA
acatcatgtggaagcaaatatcaaatgaattgaaccacattctgcttgagaatgacatgaaattcacagtggttgtagga

SEQ ID NO: 110963 - DNA, 80 bp, synthetic construct
  source 1..80: mol_type = other DNA
ttctaaatcttgaattaggcccagagctcaatccttacttgagtcatttgtcccgtatgtaccacggacatgcaggcgga

SEQ ID NO: 110964 - DNA, 80 bp, synthetic construct
  source 1..80: mol_type = other DNA
gccgcagacgtaccaggtggggtacctgcatgcccctactggcagtggcaagagcaccaaggttcctgcagcgtacgctg

SEQ ID NO: 110965 - DNA, 80 bp, synthetic construct
  source 1..80: mol_type = other DNA
ccaagccactgccgggtttacaagttttttcacccgaggtccaagtcagaatttgcaattggtcaactcaaatgggtcat

SEQ ID NO: 110966 - DNA, 80 bp, synthetic construct
  source 1..80: mol_type = other DNA
atgtgcgtgcgcacgctctgttacgagcctgcctgcttttccgccgggcagtcggcggtaagtacgtacaagcttgtttg

SEQ ID NO: 110967 - DNA, 80 bp, synthetic construct
  source 1..80: mol_type = other DNA
gcccagcgcccgggccctggaggcggctggttatgttggcgcaatgcaggaggaagaagatgaggaggactatgaggacg

SEQ ID NO: 110968 - DNA, 80 bp, synthetic construct
  source 1..80: mol_type = other DNA
aatctgggctccaagcaggatatccagctgatcaacactaacggcagttggtcaactcttcaggctgccccgagaggatg

SEQ ID NO: 110969 - DNA, 80 bp, synthetic construct
  source 1..80: mol_type = other DNA
tatggagcaaaagaagttcgtagccattctagcaaagccgttggccacatcaactccgtgtgggaagacttgctagagga

SEQ ID NO: 110970 - DNA, 80 bp, synthetic construct
  source 1..80: mol_type = other DNA
ggccacaggatggcatgggatatgatgatgaattggtctccaactgcaaccctggtcttgtcgtatgtcatgcgaatacc

SEQ ID NO: 110971 - DNA, 80 bp, synthetic construct
  source 1..80: mol_type = other DNA
ttgctggagctgccgtcggtagcgtggggctgggaaaggtccttgtcgacatcctcgccggctacggcgccggtgtagcc

SEQ ID NO: 110972 - DNA, 80 bp, synthetic construct
  source 1..80: mol_type = other DNA
atggcgtaaggttacatcgctatgcacccaagtgcaagccactcttgagggacgagatcacattttctgtaggcatgtcc

SEQ ID NO: 110973 - DNA, 80 bp, synthetic construct
  source 1..80: mol_type = other DNA
ccacgtgtgtctacaacatgatggggaagagagagaaaaaattaggagagtttggaaaggcaaaaggaagtcgtgcaata

SEQ ID NO: 110974 - DNA, 80 bp, synthetic construct
  source 1..80: mol_type = other DNA
ttaagtgggagtacattgtgctcgcatttttgctcctggcggatgctagggtctgcgcgtgcctatggatgatgctaatg

SEQ ID NO: 110975 - DNA, 80 bp, synthetic construct
  source 1..80: mol_type = other DNA
aacaggctgcgtagccattgtaggcagagtcgttctgtccgggaagccggcaattatacctgacagggaggttctctacc

SEQ ID NO: 110976 - DNA, 80 bp, synthetic construct
  source 1..80: mol_type = other DNA
tggttctgcgcaagcgcaacaaagccaggtactctccgctccacaacgaggacgaggccggagacgaagacgagctctaa

SEQ ID NO: 110977 - DNA, 80 bp, synthetic construct
  source 1..80: mol_type = other DNA
ttccacgcagggcgcgagttgcggcatggcctgaaccgcgagcggttgctgcgcgaggaggactttgagcccgacgcgcg

SEQ ID NO: 110978 - DNA, 80 bp, synthetic construct
  source 1..80: mol_type = other DNA
cgtcccgctctccgatccccgcccctgggcacgcgcaagcgcaagcgcccttcccgccccctctcatcggagtctgaggt

SEQ ID NO: 110979 - DNA, 80 bp, synthetic construct
  source 1..80: mol_type = other DNA
ttgggccaaagtcatcttggtcctattcctctttgcaggggttgatgccgagactcacgtgtctggggcagcagtcggcc

SEQ ID NO: 110980 - DNA, 80 bp, synthetic construct
  source 1..80: mol_type = other DNA
gggacccagatcacatcaccgctgagacggcagcacgccgcctcaacagggggtcccccccgtctctcgccagctcttca

SEQ ID NO: 110981 - DNA, 80 bp, synthetic construct
  source 1..80: mol_type = other DNA
atctggggcacttgttggcttcaaaatcatgtgcggcgagactccatctgccgaggacatggtcaacctgctccccgcct

SEQ ID NO: 110982 - DNA, 80 bp, synthetic construct
  source 1..80: mol_type = other DNA
tcgtttggcgacaacgagactgatgtcttcctgctggagagcctgcggccacctgacggcggttggtatggctgcacctg

SEQ ID NO: 110983 - DNA, 80 bp, synthetic construct
  source 1..80: mol_type = other DNA
cctgtacaggctgggggccgtccagaatgagatcacattgacgcaccccatcaccaagtacattatggcttgcatgtccg

SEQ ID NO: 110984 - DNA, 80 bp, synthetic construct
  source 1..80: mol_type = other DNA
taaacctagagttgggcccagagctcaacccctacttaagtcatttgtcccgcatgtacaacgggctatgccggcggact

SEQ ID NO: 110985 - DNA, 80 bp, synthetic construct
  source 1..80: mol_type = other DNA
cagaccgacaacacgagtgggatcgtggtcccagactaataatcagaccgacgatacgagtgggaccgtggtcccagact

SEQ ID NO: 110986 - DNA, 80 bp, synthetic construct
  source 1..80: mol_type = other DNA
gcatccaaactcagaggtatggggctcaacgctgtagcgtactataggggtcttgatgtttccgtcataccaacaacagg

SEQ ID NO: 110987 - DNA, 80 bp, synthetic construct
  source 1..80: mol_type = other DNA
aagcagttccaggcggtcccacagctcggtcacgtgctctacggcatctcgatccagcatatctcctcgtttcgtgggtt

SEQ ID NO: 110988 - DNA, 80 bp, synthetic construct
  source 1..80: mol_type = other DNA
cgacgggtacgatacagtcgaagaggctcgtgttgttttccgagtagcggaccacggaggcccggagtctgcgcagggcc

SEQ ID NO: 110989 - DNA, 80 bp, synthetic construct
  source 1..80: mol_type = other DNA
gccgccctggggcccgcttggctcctgcaagccagcctcctgaaggttccatacttcgtgcgtgcccaggccctgctggg

SEQ ID NO: 110990 - DNA, 80 bp, synthetic construct
  source 1..80: mol_type = other DNA
cgacgaggccgggaggcacctgatagacgccccggccgtcgacggtaccctccctggattcggcaagggcggaaacagcc

SEQ ID NO: 110991 - DNA, 80 bp, synthetic construct
  source 1..80: mol_type = other DNA
gtgcccttcttcttggccttgtgttccgtgcgctccatggcagacaccagggccatgtaccgtatcatctcccgggcctc

SEQ ID NO: 110992 - DNA, 80 bp, synthetic construct
  source 1..80: mol_type = other DNA
ttcagtgccgctctcaccagtccactgtcaactagcaccactatccttctcaacatcttgggaggctggctggcgtccca

SEQ ID NO: 110993 - DNA, 80 bp, synthetic construct
  source 1..80: mol_type = other DNA
ccgttcgaaatacgggtatagtgcaaaagatgttcgctccttagccagcaaggccgtagaccaaatccgctccgtttggg

SEQ ID NO: 110994 - DNA, 80 bp, synthetic construct
  source 1..80: mol_type = other DNA
gaccgaggcgtgtctgcgcgtgtgggtcccctcccttcaagccaggtggggccgcgacgccatcatcctcatcatgtgtg

SEQ ID NO: 110995 - DNA, 80 bp, synthetic construct
  source 1..80: mol_type = other DNA
gggcccgcttatctcctgcgagatgctctgacacgcgtgccgtatttcgtcagagctcacgctctgttgaggttgtgcac

SEQ ID NO: 110996 - DNA, 80 bp, synthetic construct
  source 1..80: mol_type = other DNA
gggcgggtgggtccgcgccccgccccgcatggcatctcattaccgcccgatccggcggtttccgcttccgttccgcatgc

SEQ ID NO: 110997 - DNA, 80 bp, synthetic construct
  source 1..80: mol_type = other DNA
aattcacagtggttgtaggagatgccaacggaattttggcccaagggaaaaaaatgattaggccacaacctatggaacac

SEQ ID NO: 110998 - DNA, 80 bp, synthetic construct
  source 1..80: mol_type = other DNA
tcgggcatggccccggggcgggggggccttgccgtggtcctgtggagactgttgtgactcgaggcgggggtgtccgggga

SEQ ID NO: 110999 - DNA, 80 bp, synthetic construct
  source 1..80: mol_type = other DNA
gtgtctactgtcctggccgagctcgctagtaagacctttagcgactccaatacttctggtgtcgatagcggcgccacggc

SEQ ID NO: 111000 - DNA, 80 bp, synthetic construct
  source 1..80: mol_type = other DNA
tggccgcatactgcctgacgacaggcagtgtggtcattgtgggcaggatcatcttgtccgggaagccagctgtcgttccc

SEQ ID NO: 111001 - DNA, 80 bp, synthetic construct
  source 1..80: mol_type = other DNA
caccgcatcagccagctggcccaccttatctacgtcctgcactttgcgtgcctcgtgtatctcgcggcccatttttgcac

SEQ ID NO: 111002 - DNA, 80 bp, synthetic construct
  source 1..80: mol_type = other DNA
cgaggttgacctgacgaccgcgcacaaggaagcagagtgggaatttgagcccctcgcctggcgggtttggctggtggtct

SEQ ID NO: 111003 - DNA, 80 bp, synthetic construct
  source 1..80: mol_type = other DNA
tggtttagcgggcgcagcagtggggagcattggctttggaaaggtcctggtagacatcattgccgggtacggtgctggcg

SEQ ID NO: 111004 - DNA, 80 bp, synthetic construct
  source 1..80: mol_type = other DNA
cccaggttgccatcgacttgctcgttgggtcccactggggcgtccttgccggtcttgcttacttctccatgcaaggcaat

SEQ ID NO: 111005 - DNA, 80 bp, synthetic construct
  source 1..80: mol_type = other DNA
ctgcaaaaaagaaaggagcaagtctgttatgcctggctctagcctcaacaggacttttcaaccctatgatcctcgccgct

SEQ ID NO: 111006 - DNA, 80 bp, synthetic construct
  source 1..80: mol_type = other DNA
gcaaacgccgtgcaccacggggtacagtcgccggtggcatgagcccgagtctggatttcgacctggaagtttgcggccgt

SEQ ID NO: 111007 - DNA, 80 bp, synthetic construct
  source 1..80: mol_type = other DNA
tcccgagagcgacgctgcagcgagagtcactgcattactgagttctctgaccgtcacaagcctgctccggcggttacacc

SEQ ID NO: 111008 - DNA, 80 bp, synthetic construct
  source 1..80: mol_type = other DNA
cttggatcgggttggcgccgtcgacgcgggggcgtctgggagtgcggcggattctggctgggccgatttcctgccgcgtg

SEQ ID NO: 111009 - DNA, 80 bp, synthetic construct
  source 1..80: mol_type = other DNA
tagaaaaaatggaagttctgcagcgtcgcttcggaggtgggctagtgcgtctccccctgtcccgaaactccaatcacgag

SEQ ID NO: 111010 - DNA, 80 bp, synthetic construct
  source 1..80: mol_type = other DNA
atatagttctatgccacctcttgagggcgaaccaggcgacccggatctctgtgaggaggggagctccgggtcgtgggtca

SEQ ID NO: 111011 - DNA, 80 bp, synthetic construct
  source 1..80: mol_type = other DNA
gtcagctccatccctgaaggctacgtgcaccacgcaccctgaccatccggacgcagaactcatagaggcaaacctcctat

SEQ ID NO: 111012 - DNA, 80 bp, synthetic construct
  source 1..80: mol_type = other DNA
aacaccaaaccggatcttactcattggggagcccctgtcgtattggcgtaaccttgcaggggaggacgctatttgcggaa

SEQ ID NO: 111013 - DNA, 80 bp, synthetic construct
  source 1..80: mol_type = other DNA
ctcacaggcgctggccgagcttgcccagaagtcctttccagagggttccaccgcgtcacgagctgagtcggggatagact

SEQ ID NO: 111014 - DNA, 80 bp, synthetic construct
  source 1..80: mol_type = other DNA
cgccaaaggaaggccaagatgataacgacgaccaccgcgaccaccccaaaaaccgcatgacgacacgtcccgccacacca

SEQ ID NO: 111015 - DNA, 80 bp, synthetic construct
  source 1..80: mol_type = other DNA
accgccagtgggttcactaacctattcacctcagggtcagcccaaaacctgcagcttattaacaccaatggcagttggca

SEQ ID NO: 111016 - DNA, 80 bp, synthetic construct
  source 1..80: mol_type = other DNA
ttggatcaactagctgcgcagatatccccatctaactccgattctacagaatcttaaataaagacaaataaatttgttga

SEQ ID NO: 111017 - DNA, 80 bp, synthetic construct
  source 1..80: mol_type = other DNA
gttctcggcttgtggtcctttctccttctagtcttggccctgccgcagcaggcttacgccttggacgccgctgaacaagg

SEQ ID NO: 111018 - DNA, 80 bp, synthetic construct
  source 1..80: mol_type = other DNA
gggccaaggtggacgtggccacccacgggcagacgtacggcaccttggagctcttccagaaaatgatactaatgcacgcg

SEQ ID NO: 111019 - DNA, 80 bp, synthetic construct
  source 1..80: mol_type = other DNA
gagatcgttgacgtcatgtgtcatgccacactaactcacagactcatgtctccccacagagtgcctaactacaacctgtt

SEQ ID NO: 111020 - DNA, 80 bp, synthetic construct
  source 1..80: mol_type = other DNA
gctccagggtcggttacttcgttggtatcaatgttatccacattgctgaggttaaaaggagtgattttacacagttgacg

SEQ ID NO: 111021 - DNA, 80 bp, synthetic construct
  source 1..80: mol_type = other DNA
gaaactaacctttcttctcgtactaacagaccttaatttggaggtgagctaaggcttttcccttctaaggagggggatta

SEQ ID NO: 111022 - DNA, 80 bp, synthetic construct
  source 1..80: mol_type = other DNA
cctagaccaccgatctcgatcattgagaacacggtggattttttccaaaatcctataaaggtgggattgaatgtttagat

SEQ ID NO: 111023 - DNA, 80 bp, synthetic construct
  source 1..80: mol_type = other DNA
gtttttattcgctatcggacatgggaggtggaaactgggtggcgcggcaggcgcctccggaggtccgccggtgagtgtgg

SEQ ID NO: 111024 - DNA, 80 bp, synthetic construct
  source 1..80: mol_type = other DNA
ctggttgctccttttctatcttcctgctggctctactgtcctgcatcaccgttccagtttctgccgcggaggtgaagaac

SEQ ID NO: 111025 - DNA, 80 bp, synthetic construct
  source 1..80: mol_type = other DNA
gataactgaggactgccccatcccatgcagcggcgattggctgcgtgacatctgggactgggtttgctcggtgttgtccg

SEQ ID NO: 111026 - DNA, 80 bp, synthetic construct
  source 1..80: mol_type = other DNA
aatggacgtaaagttcccgggtggcggtcagatcgtcggtggagtctacttattgccgcgcaggggccctagattgggtg

SEQ ID NO: 111027 - DNA, 80 bp, synthetic construct
  source 1..80: mol_type = other DNA
tgagatcaccctcacacaccctgtgaccaaattcatcatgacatgcatgtcggccgacctggaggtcgtcactagcacct

SEQ ID NO: 111028 - DNA, 80 bp, synthetic construct
  source 1..80: mol_type = other DNA
actagtaactacttccccccgcaagcgctcattggtccacactaggcgaccgccttttcgtgaacaatatggagggagaa

SEQ ID NO: 111029 - DNA, 80 bp, synthetic construct
  source 1..80: mol_type = other DNA
tccttgttggtcaagctatcaccttttcacccccgcatgaccacacgacacaggactgtaactgttcaatctattccggc

SEQ ID NO: 111030 - DNA, 80 bp, synthetic construct
  source 1..80: mol_type = other DNA
gtaccacaggtgggtgctttggaaacttgccggtcgccgtgctcctgtgagcttgcgtccctccccggtttcctttgcgc

SEQ ID NO: 111031 - DNA, 80 bp, synthetic construct
  source 1..80: mol_type = other DNA
aaaaataaatctgtagaatattagttcatcttccgttaaacagtccaagtattgataatcatcttcaatgataaaatcgc

SEQ ID NO: 111032 - DNA, 80 bp, synthetic construct
  source 1..80: mol_type = other DNA
acacgttaaacataccgtctatacccccacaatccaactccgattcaacgacagctgggcttccggttaacgcccgtgtt

SEQ ID NO: 111033 - DNA, 80 bp, synthetic construct
  source 1..80: mol_type = other DNA
gagaagaaaatcatcgtctggggcgctgacaccgctgcttgcggcgacatcatagggggcctacccgtttcggccaggct

SEQ ID NO: 111034 - DNA, 80 bp, synthetic construct
  source 1..80: mol_type = other DNA
agcctgggggaagagcatcatcttcgcacctgagttagccaacaacacgtttgtggtagatggcactgaaacaaaggagt

SEQ ID NO: 111035 - DNA, 80 bp, synthetic construct
  source 1..80: mol_type = other DNA
acatcccagattcaatgattgcaattatcgcagcggtggcagtggtgatggcactaataataatatgcatgcttttatat

SEQ ID NO: 111036 - DNA, 80 bp, synthetic construct
  source 1..80: mol_type = other DNA
tggcaaaaaatgaggttttctgcgtccaaccagaaaagggcggtaggaagccagcacgcctcatagtattcccagacctg

SEQ ID NO: 111037 - DNA, 80 bp, synthetic construct
  source 1..80: mol_type = other DNA
gcccacccttacctatgtagcctccagcgccttaagggtcccgcagctccttctggacgttgtcctggagaggcattggg

SEQ ID NO: 111038 - DNA, 80 bp, synthetic construct
  source 1..80: mol_type = other DNA
aaaatcaatggaactcagcaaaagaagcagtggaagatgagcggttctgggaccttgtgcacagagagagggagcttcac

SEQ ID NO: 111039 - DNA, 80 bp, synthetic construct
  source 1..80: mol_type = other DNA
atccccgatcacggcgtatgctcagcagaccagaggacttctaggaaccatagtcaccagcttgacaggcagagacaata

SEQ ID NO: 111040 - DNA, 80 bp, synthetic construct
  source 1..80: mol_type = other DNA
gcctcgcaggggctgcggttggcagcgtggtgttagggaggattctggttgacattctcgctggctacggcgccggcgtg

SEQ ID NO: 111041 - DNA, 80 bp, synthetic construct
  source 1..80: mol_type = other DNA
gcgggcgacgccccggccgcctggttgcggcccgcgtttggcctgcggcgcacctattcaccgtttgtcgttcgagaacc

SEQ ID NO: 111042 - DNA, 80 bp, synthetic construct
  source 1..80: mol_type = other DNA
gtccgcatgactaactcaggtgtccagctggccggcggcgcttcccggtgcccgctccgcccacaatcgggtataaaaac

SEQ ID NO: 111043 - DNA, 80 bp, synthetic construct
  source 1..80: mol_type = other DNA
gggattaattatgcaacagggaatctacccggttgctccttttctatcttcctcctagctcttctatcttgcatctcaat

SEQ ID NO: 111044 - DNA, 80 bp, synthetic construct
  source 1..80: mol_type = other DNA
atccccctcgaatacatcagagggggtaggcacctgatcttctgtcattccaagaagaaatgcgatgagctagccaggca

SEQ ID NO: 111045 - DNA, 80 bp, synthetic construct
  source 1..80: mol_type = other DNA
actccgtcgtcctgtgcgaggcgtacgacacaggttgcgcatggtacgagctgactccatccgaaacaaccgtacgacta

SEQ ID NO: 111046 - DNA, 80 bp, synthetic construct
  source 1..80: mol_type = other DNA
ggtcatgctgcccataaggtatcgcgcggccgggtagcacaggagagcggcgatgggatggcggtcgaagatgagggtga

SEQ ID NO: 111047 - DNA, 80 bp, synthetic construct
  source 1..80: mol_type = other DNA
ccaaactattgccccggatgcccggcatccccttttactcctgtcaaaaggggtacaaccgggaatgccgtggagacggg

SEQ ID NO: 111048 - DNA, 80 bp, synthetic construct
  source 1..80: mol_type = other DNA
gtagactacccttacaggttgtggcattacccctgcacagtcaacttcaccactcacaaggtccgcatgtttgtaggcgg

SEQ ID NO: 111049 - DNA, 80 bp, synthetic construct
  source 1..80: mol_type = other DNA
tcagagacttctctcagggctggggccccataacatacgccaacatgagcggtccatcgcaggagaaaccatattgctgg

SEQ ID NO: 111050 - DNA, 80 bp, synthetic construct
  source 1..80: mol_type = other DNA
gttagtagtggggctggcacggaggatatcgtgtgctgctcaatgtcctattcctggacaggcgcactcgtcaccccgtg

SEQ ID NO: 111051 - DNA, 80 bp, synthetic construct
  source 1..80: mol_type = other DNA
cctgtctccgggagccctggtggtgtgggtcatctgcgcggccattctgcgccgccacgtgggaccgtgggagtgcgcgg

SEQ ID NO: 111052 - DNA, 80 bp, synthetic construct
  source 1..80: mol_type = other DNA
ggaaggggaacctcatcctgctcggccccggtgacgcgatgggagacgcaggatggaggttgctggcacctataacagcc

SEQ ID NO: 111053 - DNA, 80 bp, synthetic construct
  source 1..80: mol_type = other DNA
caattctagtggctgtcccgagaggatggcttcttgtaaacctctcagtgactttgaccaggggtggggcccgctgtggt

SEQ ID NO: 111054 - DNA, 80 bp, synthetic construct
  source 1..80: mol_type = other DNA
ctccgtggtgctctgtgagtgctacgatgccggatgtgcatggtatgatctgacccctgcagagactaccgtgaggttgc

SEQ ID NO: 111055 - DNA, 80 bp, synthetic construct
  source 1..80: mol_type = other DNA
taccaaggcccctccggtaccacctccacggagaaagaggacggttgtcctgacagagtccaccgtctcttctgctttgg

SEQ ID NO: 111056 - DNA, 80 bp, synthetic construct
  source 1..80: mol_type = other DNA
gtatgggcccatcacctatgtctctgccgccgataggtccgcacctgacaacgagagccggccctattgctggcactaca

SEQ ID NO: 111057 - DNA, 80 bp, synthetic construct
  source 1..80: mol_type = other DNA
tgacttcaaatgctggcttaaggctaaactggtgcctgccctacccggtatccccttcctctcgtgtcaacgggggtata

SEQ ID NO: 111058 - DNA, 80 bp, synthetic construct
  source 1..80: mol_type = other DNA
tttcctttttccctttccctatttactttcttggtggctccatcttagccctagtcacggctagctgtgaagggtccgtg

SEQ ID NO: 111059 - DNA, 80 bp, synthetic construct
  source 1..80: mol_type = other DNA
cagggtttgactggataacagactaccaagggaaaactgtgtggtttgttcccagcataaaagctggaaatgacattgca

SEQ ID NO: 111060 - DNA, 80 bp, synthetic construct
  source 1..80: mol_type = other DNA
gaacaccaccgataccaacccggcacgccgaccatactgctggcactatgcccctcctccatgcggtattgttccggcta

SEQ ID NO: 111061 - DNA, 80 bp, synthetic construct
  source 1..80: mol_type = other DNA
gggcagccaccggcccactgggcgctgtgtgctgccgtgtgccgaccccggttgcgcgtcggtgccgctcctcgattcgg

SEQ ID NO: 111062 - DNA, 80 bp, synthetic construct
  source 1..80: mol_type = other DNA
tcagcttcaggtgttatcattaggcgatgtcctttaatgcgtagcagagtatccacacaggtcgcatgggctaaaccaag

SEQ ID NO: 111063 - DNA, 80 bp, synthetic construct
  source 1..80: mol_type = other DNA
agcaccaggtgggaaatgaaagcacagaacatgggacaactgcaactataacacctcaagctccttcgacggaaatacag

SEQ ID NO: 111064 - DNA, 80 bp, synthetic construct
  source 1..80: mol_type = other DNA
tgccgtccacaccgaccaaagtctttggatgaggtcgcacaggaatgcaacgggagtgttcatatctgagttgatagtga

SEQ ID NO: 111065 - DNA, 80 bp, synthetic construct
  source 1..80: mol_type = other DNA
actgtatagaagcaaagctgaccaatacaacaacagaatctcgttgcccaacacaaggggaacccagtctaaatgaagag

SEQ ID NO: 111066 - DNA, 80 bp, synthetic construct
  source 1..80: mol_type = other DNA
gagagcagttcttgcagggaagcaaagttttttaggggcttaagcccgtcggccatgggcatcttggcgagggtgtgcga

SEQ ID NO: 111067 - DNA, 80 bp, synthetic construct
  source 1..80: mol_type = other DNA
atgatcatccccaagagcctggccggccccatcagccagcacaactacagacccggctaccacacccagaccgccggccc

SEQ ID NO: 111068 - DNA, 80 bp, synthetic construct
  source 1..80: mol_type = other DNA
cgcgcgaggcgtacgtgccgcggcagaacctgtttcgcgaccgcgagggagaggagcccgaggagatgcgggatcgaaag

SEQ ID NO: 111069 - DNA, 80 bp, synthetic construct
  source 1..80: mol_type = other DNA
tgctaacatcagcggctcttcgtctgaaaagccgtactgctggcattatgcgcccaggccttgcctcactgtccccgccc

SEQ ID NO: 111070 - DNA, 80 bp, synthetic construct
  source 1..80: mol_type = other DNA
tccagtgatcaaaatcaggtggtgcagttccaaaatggcagggtcactctggatggacaattgcagggcactactgcagt

SEQ ID NO: 111071 - DNA, 80 bp, synthetic construct
  source 1..80: mol_type = other DNA
agtcaccctggcggggcctcggagcaatcacaataggcggccaggctacaagatgcagaatcaaggaccctgggatgagg

SEQ ID NO: 111072 - DNA, 80 bp, synthetic construct
  source 1..80: mol_type = other DNA
atggcacctaaacaggactgctttaaactgtaatgattccctaaataccgggttcatcgctggcctgttctattaccaca

SEQ ID NO: 111073 - DNA, 80 bp, synthetic construct
  source 1..80: mol_type = other DNA
gtcttttgccattccaaaaagaaatgtgatgagttagcatccaaactcaggggcatggggctcaacgctgtagcgtacta

SEQ ID NO: 111074 - DNA, 80 bp, synthetic construct
  source 1..80: mol_type = other DNA
aagcgacggcgtggaggaggacaaacgtgccctcggagccttcacggaggctatgacgaggtactcagccccccccggag

SEQ ID NO: 111075 - DNA, 80 bp, synthetic construct
  source 1..80: mol_type = other DNA
aggaccagggggtgcgggcgccgcagcttcgccaggccttccgcacggccgtggttaacaacatcaacggcgtgttggag

SEQ ID NO: 111076 - DNA, 80 bp, synthetic construct
  source 1..80: mol_type = other DNA
cggtaggtcacctacggactctcgatgggtggagtgggcgagacccacgaaccccgacgacccccgccgtcgacgcggaa

SEQ ID NO: 111077 - DNA, 80 bp, synthetic construct
  source 1..80: mol_type = other DNA
ggcccgatccaaattcgggtacggggccaaagacgtccgtggccacactagcagggccatcaaccacatccgctccgtgt

SEQ ID NO: 111078 - DNA, 80 bp, synthetic construct
  source 1..80: mol_type = other DNA
aaaagtgataggtaatgaaatatcaagtttgcctggattagtgaataagcttgttgttttaactggtaagggaattggca

SEQ ID NO: 111079 - DNA, 80 bp, synthetic construct
  source 1..80: mol_type = other DNA
agtccaacgtagcctccgcattagcgcttctggcagaaaaatcttttcccccgctatctggggacggaacatccggcttc

SEQ ID NO: 111080 - DNA, 80 bp, synthetic construct
  source 1..80: mol_type = other DNA
gctctatacggaggcagcacagtggttttaactccactgctgaaacacttgatcacttctgagtatgtgacaacatctct

SEQ ID NO: 111081 - DNA, 80 bp, synthetic construct
  source 1..80: mol_type = other DNA
gaacgaggcggtgagcatccaaatggacgagggttttgtccttccagggacgtaatgtgcgcgtcagggttgtttcggtc

SEQ ID NO: 111082 - DNA, 80 bp, synthetic construct
  source 1..80: mol_type = other DNA
atgtcccatcccatgctctgactcatggttgcgtgacatctgggattgggtttgtactgtcctctctgacttcaagacct

SEQ ID NO: 111083 - DNA, 80 bp, synthetic construct
  source 1..80: mol_type = other DNA
cccagctgaaacattgcatggaacagtcacagtggaggtgcagtatgcagggacagacggaccctgcaaagtcccagccc

SEQ ID NO: 111084 - DNA, 80 bp, synthetic construct
  source 1..80: mol_type = other DNA
gtgggaggccccatgttcaactctaggggacagtcctgcgggtaccgcagatgcagagccagcggtgtgctacccaccag

SEQ ID NO: 111085 - DNA, 80 bp, synthetic construct
  source 1..80: mol_type = other DNA
gcagccagacaacaccgtaagaggtgacaactttattgccttaaacaaggccgcaaaaatcgaagcagtcgaggctgatt

SEQ ID NO: 111086 - DNA, 80 bp, synthetic construct
  source 1..80: mol_type = other DNA
acgccggcgtgcagcgccccgtcgaagatgcgcatgttggccgtcgacgcggtgttggcgcccgcgtcgggcgccgcgga

SEQ ID NO: 111087 - DNA, 80 bp, synthetic construct
  source 1..80: mol_type = other DNA
gagagaaaagaagccaggagaatttggaaaggccaaggcagtccgggctatttggttcatgtggttgggagctagattcc

SEQ ID NO: 111088 - DNA, 80 bp, synthetic construct
  source 1..80: mol_type = other DNA
attaggccgtccctgggatgcaggtaggaccactggagggcgtcatgctctggggtggtgttgtaaataatccaatcgta

SEQ ID NO: 111089 - DNA, 80 bp, synthetic construct
  source 1..80: mol_type = other DNA
tcgaaaagacccgcaagggtttggaaagactctcagtggttggagaacatgcatgggactttggttcagtgggtggaatc

SEQ ID NO: 111090 - DNA, 80 bp, synthetic construct
  source 1..80: mol_type = other DNA
gtgcttacatgtccaaggcccatggggttgatcctaacatcaggactggagtgaggacaattactactggcagccccatc

SEQ ID NO: 111091 - DNA, 80 bp, synthetic construct
  source 1..80: mol_type = other DNA
aaaattcgttcacggctttgtatggacaacagcctttttctaccggcagggcgtacgcttgagcggcctttctgagagag

SEQ ID NO: 111092 - DNA, 80 bp, synthetic construct
  source 1..80: mol_type = other DNA
taggcggccgtaggccagggtcctctgggtcgcgtccaggccggggcgctggagaaagttgtaaaagtgaatcagcccgc

SEQ ID NO: 111093 - DNA, 80 bp, synthetic construct
  source 1..80: mol_type = other DNA
gtgtgccgagagattgtcgtcgtgtaagcgtcttgaggacttctctcagggctggggtgcacttagggccgctaagatca

SEQ ID NO: 111094 - DNA, 80 bp, synthetic construct
  source 1..80: mol_type = other DNA
gtactcatcgcgcggaacctcccgcggacccaacttcacggagcggcgagaggtcatggttccacgaacacgctagggtc

SEQ ID NO: 111095 - DNA, 80 bp, synthetic construct
  source 1..80: mol_type = other DNA
acatttcttctccatactccaggcccaggaagtgctgggcaaccctttggacttcgacatgtacggagtcacatattcag

SEQ ID NO: 111096 - DNA, 80 bp, synthetic construct
  source 1..80: mol_type = other DNA
tagcccccaagggcgctcccaattcctgcgagtgggaacaagaagaaccaactcaggaaatggctgaagaacttgaagat

SEQ ID NO: 111097 - DNA, 80 bp, synthetic construct
  source 1..80: mol_type = other DNA
aggagtcctacacaccatgtggcatgtgacaagaggagcggctcttagtgtggagagggccgtttcgggaccatattggg

SEQ ID NO: 111098 - DNA, 80 bp, synthetic construct
  source 1..80: mol_type = other DNA
tcattgtgtggtgggctgagacagtggcttgtggggatatcctgtatggcctcccggtttctgcgaggctaggtagggag

SEQ ID NO: 111099 - DNA, 80 bp, synthetic construct
  source 1..80: mol_type = other DNA
tcgtcgaagagaacttagtgacaaggaacttatgcatagcctgcaaagagcgctaacgggagccggaacagaggacgagt

SEQ ID NO: 111100 - DNA, 80 bp, synthetic construct
  source 1..80: mol_type = other DNA
ctcattgcctttgcgtccagaggaaaccatgtcgccccgacgcactacgtggcggagtcagacgcatcgcagcgggtcac

SEQ ID NO: 111101 - DNA, 80 bp, synthetic construct
  source 1..80: mol_type = other DNA
ggtgcgctctgcctcccggcaagcagccccccgttcctcctcccaggaggaaacggacggtacagctcactgagtccgtt

SEQ ID NO: 111102 - DNA, 80 bp, synthetic construct
  source 1..80: mol_type = other DNA
cagcgtcgtctgttgttctatgtcatactcttggacaggagctcttatcacaccatgcgctgccgaggaagagaaattac

SEQ ID NO: 111103 - DNA, 80 bp, synthetic construct
  source 1..80: mol_type = other DNA
tccttatggaatcttcaaatcttggtaaatcatattggaactttcgaaatcaaaattcaattatgtcaacagcttatgaa

SEQ ID NO: 111104 - DNA, 80 bp, synthetic construct
  source 1..80: mol_type = other DNA
agcttttgtcgtgagcggtctggcgggagccacggttggaagcattggactcgggagggtgttggttgatgtgctcgccg

SEQ ID NO: 111105 - DNA, 80 bp, synthetic construct
  source 1..80: mol_type = other DNA
cgcgcgactcggaagacttcggagcggtcgcaacctcgtggcaggcgtcagcctatccccaaggcgcgccggccagaggg

SEQ ID NO: 111106 - DNA, 80 bp, synthetic construct
  source 1..80: mol_type = other DNA
actgggctaaggttgtggtcgtgctgctgctcttcgctggcgttgacgcagagacccgggtcacaggggtggccgctggc

SEQ ID NO: 111107 - DNA, 80 bp, synthetic construct
  source 1..80: mol_type = other DNA
cgtggatgtttcgcgtttcagccccccggcgcccgcgccgttcgaggaagtacggcgccgccagcgcgctactgcccgaa

SEQ ID NO: 111108 - DNA, 80 bp, synthetic construct
  source 1..80: mol_type = other DNA
caacaccccgccgctttccgttggggttgttattgttgtcgggatcgtgcgggccggtggtcgccggagcaggtgcgagg

SEQ ID NO: 111109 - DNA, 80 bp, synthetic construct
  source 1..80: mol_type = other DNA
accacaaacctaccaggtgggatatctccacgcacccacagggagcgggaagagcactaaagtcccggcggcctacgcgg

SEQ ID NO: 111110 - DNA, 80 bp, synthetic construct
  source 1..80: mol_type = other DNA
accactgtacatcctgcatgccagcctcctgcgggtgccatactacgtacgagcacatgcgctcattcgcatatgcgcgc

SEQ ID NO: 111111 - DNA, 80 bp, synthetic construct
  source 1..80: mol_type = other DNA
gcacatgggtcctaataggtggcgtcctggcggccgtagctgcatactgcttgacagtgggcagcgtgacgatcgtcggg

SEQ ID NO: 111112 - DNA, 80 bp, synthetic construct
  source 1..80: mol_type = other DNA
taacacctccaagtgctgggtggctctcacgcccacgcttgcagccagggacgcgggcatacccacgcaggcaatacgac

SEQ ID NO: 111113 - DNA, 80 bp, synthetic construct
  source 1..80: mol_type = other DNA
ctagccgccgtggcagcttactgcctggcgaccggctgtatttccatcattggccgcatacacctgaatgaccaggtagt

SEQ ID NO: 111114 - DNA, 80 bp, synthetic construct
  source 1..80: mol_type = other DNA
ccatcttcacgctcactcctacttacaagatcttgctagcacacctcttatggtggattcagtacttcatagcacgtatt

SEQ ID NO: 111115 - DNA, 80 bp, synthetic construct
  source 1..80: mol_type = other DNA
cagggtgggtttggggcctactggtcatttgctgtgcgtggcactatagagggcggattgtgcctatgaccgtgtattcg

SEQ ID NO: 111116 - DNA, 80 bp, synthetic construct
  source 1..80: mol_type = other DNA
ctcctcctagtcctggccctaccacagcaggcctatgccatggataccaccgaacaaggggaactagggctggtcatatt

SEQ ID NO: 111117 - DNA, 80 bp, synthetic construct
  source 1..80: mol_type = other DNA
ctagcagcagtgccgctaacaatacaatttccaatccaacctttgccgcgcttttaaaacgcactgtgaataattctaca

SEQ ID NO: 111118 - DNA, 80 bp, synthetic construct
  source 1..80: mol_type = other DNA
ggctctgaagggcacgacttatggcatgtgtacagagaaattctcattcgcgaaaaatccagcggacacaggccatggaa

SEQ ID NO: 111119 - DNA, 80 bp, synthetic construct
  source 1..80: mol_type = other DNA
tcttgctcaatatattgggcgggtgggtcgcttcccagttggcaccaccatcagcctccacagcgttcgttgtaagtgga

SEQ ID NO: 111120 - DNA, 80 bp, synthetic construct
  source 1..80: mol_type = other DNA
gcttagacgacatttaaaaacgggtcctgcggtctcagcgggcacaggagttgcgtttattttagcagcaacaactgcca

SEQ ID NO: 111121 - DNA, 80 bp, synthetic construct
  source 1..80: mol_type = other DNA
ggggtattgcaggcgggaagtacgctcaagctttattactaaggctgggcgcatggactggcacgtacatatatgaccac

SEQ ID NO: 111122 - DNA, 80 bp, synthetic construct
  source 1..80: mol_type = other DNA
aaagtgatgaaaattctaaggcaatgttgggtcaacaatctatgccaaacagacccaattacatagctttcagggacaat

SEQ ID NO: 111123 - DNA, 80 bp, synthetic construct
  source 1..80: mol_type = other DNA
gttgtctgcgccactgatgctctcatgacgggatacactggtgacttcgactccgtgattgactgtaatgtttcagtcac

SEQ ID NO: 111124 - DNA, 80 bp, synthetic construct
  source 1..80: mol_type = other DNA
tgatgatgacaaagcacaagctctaaagtcactcaccaacctgtccacagtatatatacacaagccctaaactgacgtaa

SEQ ID NO: 111125 - DNA, 80 bp, synthetic construct
  source 1..80: mol_type = other DNA
cacggcctacgtccagcagacgcgaggcctgttgggcacgatagtgaccagcctcacaggtcgggacaggaatgaggcat

SEQ ID NO: 111126 - DNA, 80 bp, synthetic construct
  source 1..80: mol_type = other DNA
gaccggggttcgaaccccggatccggccgtccgccgtgatccatgcggttaccgcccgcgtgtcgaacccaggtgtgcga

SEQ ID NO: 111127 - DNA, 80 bp, synthetic construct
  source 1..80: mol_type = other DNA
tgataaacactattcttgcaattctcaaaacttaacaataatcaacattaccagatctgatgaaggaagctattatggat

SEQ ID NO: 111128 - DNA, 80 bp, synthetic construct
  source 1..80: mol_type = other DNA
cgcgagccgacatggtggtgatagacgcgggttatcggatgtccgctacccccccaaaaaagaaaaagaccccacagcgc

SEQ ID NO: 111129 - DNA, 80 bp, synthetic construct
  source 1..80: mol_type = other DNA
atctactccaagccagcctgttacgtgtaccatactacgtgcgggcgcacgccctgctacgagtatgcttgctcgtacgc

SEQ ID NO: 111130 - DNA, 80 bp, synthetic construct
  source 1..80: mol_type = other DNA
aaagcacccactaccactaagcctaccacagttaagacaacacaacctaccactgtgcccactacacatccaaccaccgc

SEQ ID NO: 111131 - DNA, 80 bp, synthetic construct
  source 1..80: mol_type = other DNA
tgtcagtcccctattttgtgagggcccaagctctccttagggtgtgcaccatggttaagaccgtggcgggtggtcgatat

SEQ ID NO: 111132 - DNA, 80 bp, synthetic construct
  source 1..80: mol_type = other DNA
tgggtaaaagttctcctcgtcctgctcctcttcgctggcgtggatgcatatcacacctccgtgggatacgcggcaggcca

SEQ ID NO: 111133 - DNA, 80 bp, synthetic construct
  source 1..80: mol_type = other DNA
aatgccaccactcgagggcgaacctggggatccggatctcagttccggatcttggtccacggtcagtgatgaggacgaca

SEQ ID NO: 111134 - DNA, 80 bp, synthetic construct
  source 1..80: mol_type = other DNA
cttgacgggctgtactgggcggatggccgcctgcagggacctgggctatttccatcagggctggtgccctattacctacg

SEQ ID NO: 111135 - DNA, 80 bp, synthetic construct
  source 1..80: mol_type = other DNA
ccatgatagccacgctgactggtggagttgcattgttttttctgtcagggaaaggcctgggaaagacctccattggcctt

SEQ ID NO: 111136 - DNA, 80 bp, synthetic construct
  source 1..80: mol_type = other DNA
cgggaagttggtcgctcccgacgcagttaggtcagagaaaattttgtgagaccaaaaggcctcctggaaggctcaccagg

SEQ ID NO: 111137 - DNA, 80 bp, synthetic construct
  source 1..80: mol_type = other DNA
acgggaatgccgcccggagctccgggcccggcacgcgtccctccagaacctccaccttgggcgtggaacgggccccgccg

SEQ ID NO: 111138 - DNA, 80 bp, synthetic construct
  source 1..80: mol_type = other DNA
tggcttaaagcaaagctcgttccagcgctacctggagtcccctttctctcgtgccaacgagggttccgcgggacgtggcg

SEQ ID NO: 111139 - DNA, 80 bp, synthetic construct
  source 1..80: mol_type = other DNA
ccatgcccgaccccgctatttactcctgtgcctactcctactttccgtaggggtaggcatcttcctgctgcccgctcggt

SEQ ID NO: 111140 - DNA, 80 bp, synthetic construct
  source 1..80: mol_type = other DNA
cgatttcattccggttgaaaacctggaaaccacgatgcgctcgcccgtgttcactgacaacagcacaccccctgcggtcc

SEQ ID NO: 111141 - DNA, 80 bp, synthetic construct
  source 1..80: mol_type = other DNA
gggcgtgggaacggggcgggtgacgtagtagtgtggcggaagtgtgatgttgcaagtgtggcggaacacatgtaagcgac

SEQ ID NO: 111142 - DNA, 80 bp, synthetic construct
  source 1..80: mol_type = other DNA
gcatggtccattattcatataggttgtggcattacccctgtactatgaactataccatccacaaggtccgcctcttcatc

SEQ ID NO: 111143 - DNA, 80 bp, synthetic construct
  source 1..80: mol_type = other DNA
gtgttgttacacctgtggcagcccgggccccccgcgggcgaggcggcgcgcaaaaaaggcgcgcggcggtccggtcggcg

SEQ ID NO: 111144 - DNA, 80 bp, synthetic construct
  source 1..80: mol_type = other DNA
gcgcgtgtgtgaaaagagagctctttatgatgtgatcaagaagctccctcaggccgtgatgggaagctcctacggatttc

SEQ ID NO: 111145 - DNA, 80 bp, synthetic construct
  source 1..80: mol_type = other DNA
acctggagtccgcgccgattgaggcctctcccccggaagcgggggagtcggaacctctcggctcggattccggctcgtgg

SEQ ID NO: 111146 - DNA, 80 bp, synthetic construct
  source 1..80: mol_type = other DNA
tcttaccgtgcagtcacaggccccgttaaccgtgcaagactctaaacttagcattgccaccaaaggacccctcacagtgt

SEQ ID NO: 111147 - DNA, 80 bp, synthetic construct
  source 1..80: mol_type = other DNA
cccccaccctaacattgaggaggtggccctgcccactgagggcgagattcccttttacggcagggccatacccatctcat

SEQ ID NO: 111148 - DNA, 80 bp, synthetic construct
  source 1..80: mol_type = other DNA
gaggggtgatggcatatgtcgcaccacctgcccatgtggggccgacatagtcggccatgtcaagaacgggtccatgagaa

SEQ ID NO: 111149 - DNA, 80 bp, synthetic construct
  source 1..80: mol_type = other DNA
ttgcaactccctgttttaggtacaataaaaacaaaacatttcaaacaaatcgcccctcgtgttgtccttctttgctcatg

SEQ ID NO: 111150 - DNA, 80 bp, synthetic construct
  source 1..80: mol_type = other DNA
atgagaggagcgaagagaatggccattttaggtgacacagcctgggattttggatccctgggaggagtgtttacatctat

SEQ ID NO: 111151 - DNA, 80 bp, synthetic construct
  source 1..80: mol_type = other DNA
tcatcatcgacggcccaaacaccccagaatgccctgatgaccaaagagcatggaacatttgggaagttgaggactatgga

SEQ ID NO: 111152 - DNA, 80 bp, synthetic construct
  source 1..80: mol_type = other DNA
cgccaatggaaaagcgggtgatagtgtggggtgccgacactgctgcgtgtggtgacatcatcaatggtctaccagtgtcg

SEQ ID NO: 111153 - DNA, 80 bp, synthetic construct
  source 1..80: mol_type = other DNA
gtgatcagcaagctccctgttgccgtgatgggaagctcctacggattccaatactcaccaggacagcgggttgaattcct

SEQ ID NO: 111154 - DNA, 80 bp, synthetic construct
  source 1..80: mol_type = other DNA
tcgcaggagccctcacggcttttaagatcatgagcggcgaatgcccgactggagaggacatggtcaatcttcttcctgcc

SEQ ID NO: 111155 - DNA, 80 bp, synthetic construct
  source 1..80: mol_type = other DNA
aaacaaccctacaacctgaccatcgcttggtttcggatgggaggcaactgtgctatccccatcacggtcatggagtacac

SEQ ID NO: 111156 - DNA, 80 bp, synthetic construct
  source 1..80: mol_type = other DNA
actgtttcaggaaacatcccgactcgtcctacgttaagtgtggagctggcccttggctaacacctaaatgcctggtcgac

SEQ ID NO: 111157 - DNA, 80 bp, synthetic construct
  source 1..80: mol_type = other DNA
gactctggccacaggaccaatcatgaccttgtgggagggcaacccaggaaggttttggaacacaaccatagctgtctcca

SEQ ID NO: 111158 - DNA, 80 bp, synthetic construct
  source 1..80: mol_type = other DNA
ccttattgagtgtgatgaccatgggagtattcttcctcctcatgcagcggaagggcattggaaagataggtttgggaggc

SEQ ID NO: 111159 - DNA, 80 bp, synthetic construct
  source 1..80: mol_type = other DNA
agggacgccgtctgcgtcggcgagcccacacacaccaacacgggccgcaggcgggccgcgtactgggtggtgtggtacag

SEQ ID NO: 111160 - DNA, 80 bp, synthetic construct
  source 1..80: mol_type = other DNA
caacctattgcccgccatactgtctccaggcgctctcgtcgtcggtgtgatatgcgctgccatactacgtcgacacgtag

SEQ ID NO: 111161 - DNA, 80 bp, synthetic construct
  source 1..80: mol_type = other DNA
gagcgttacctcgtgggtggtgaagtgggagtacattgttctggtgttcctggttctggcagatgctcggatttgtacat

SEQ ID NO: 111162 - DNA, 80 bp, synthetic construct
  source 1..80: mol_type = other DNA
tcgacccccgccatgctgaacctggggacccgcaactactacacctccagctgctacctggtaaacccccaggccaccac

SEQ ID NO: 111163 - DNA, 80 bp, synthetic construct
  source 1..80: mol_type = other DNA
ccaagcagttgatgggcctcggtgtcaacgcagtggcctactatagggggctggacgtctcagtaatacctacatctgga

SEQ ID NO: 111164 - DNA, 80 bp, synthetic construct
  source 1..80: mol_type = other DNA
cacactacaacgtgttcaacatcatggctcaaagatgtctgggactgggtgtgcaccgtcctctctgactttaaggtctg

SEQ ID NO: 111165 - DNA, 80 bp, synthetic construct
  source 1..80: mol_type = other DNA
gatgtattactcaacagctgtcactgggaatatagtgaactctgtcaacgtacagtcgaggaaactcttagctcggtttg

SEQ ID NO: 111166 - DNA, 80 bp, synthetic construct
  source 1..80: mol_type = other DNA
aatttgcgcagccatcctacgccggcacgtggggcagggggaaggcgcggtccagtggatgaacaggctaattgcctttg

SEQ ID NO: 111167 - DNA, 80 bp, synthetic construct
  source 1..80: mol_type = other DNA
aagtcaggaagtagcattggcaaagcattcaccacgaccctcaaaggggcgcagagactggctgctctaggagatacggc

SEQ ID NO: 111168 - DNA, 80 bp, synthetic construct
  source 1..80: mol_type = other DNA
gtatgggcaccatgaaaataacgggcccgaagacctgcttgaacatgtggcagggaaccttccccatcaattgttacaca

SEQ ID NO: 111169 - DNA, 80 bp, synthetic construct
  source 1..80: mol_type = other DNA
ttttcgggtggctggtgtcgtgggtcacccaggacgagctagcgagcgtcaccgccgtgtgcgccgggccacaggaggcg

SEQ ID NO: 111170 - DNA, 80 bp, synthetic construct
  source 1..80: mol_type = other DNA
ggagtttggcggggggacggcatcatgcacaccacctgtccatgtggagcacaaatcaccggacatgttaaaaacggttc

SEQ ID NO: 111171 - DNA, 80 bp, synthetic construct
  source 1..80: mol_type = other DNA
tccccctccggctgggcgcaggcccggcgcgcctggactaccaggtcggcggccgccgaccccagggtcgtgagctcgtc

SEQ ID NO: 111172 - DNA, 80 bp, synthetic construct
  source 1..80: mol_type = other DNA
ctactgtcatgcatatctgtgccagtgtctgctgtggaagttaggaacacatcaacgtcctacatggccacaaacgattg

SEQ ID NO: 111173 - DNA, 80 bp, synthetic construct
  source 1..80: mol_type = other DNA
aatcctcagagggaggtggaagacggtgggtttggtacgaactcagtctgcagcgaaaccatctgtcgcgttgcatcata

SEQ ID NO: 111174 - DNA, 80 bp, synthetic construct
  source 1..80: mol_type = other DNA
gcaaagctacactttttgcatcagcctccacttcgtctgtgggggccacaataacataagggatgcgttctcgaacgttt

SEQ ID NO: 111175 - DNA, 80 bp, synthetic construct
  source 1..80: mol_type = other DNA
ccgatggccagaggggcgcggacgccgcgcagcaacccgcgcaggtggcgctcgaacgtctcggctagtatatgggagtg

SEQ ID NO: 111176 - DNA, 80 bp, synthetic construct
  source 1..80: mol_type = other DNA
cctaacagcagtattgtgtatgaggccgaggatgtgatattacactcgcctggatgtgtcccctgcgtaaagtctgccaa

SEQ ID NO: 111177 - DNA, 80 bp, synthetic construct
  source 1..80: mol_type = other DNA
tccaggtggtcgacaaccattaccacgatgtcttaaaggagattaaggcgcgtgcgtctggggtaaaggcacggaccctc

SEQ ID NO: 111178 - DNA, 80 bp, synthetic construct
  source 1..80: mol_type = other DNA
ctgatggcgtacaggccgggcgtggtggcctgaaacacgtcgtgcgcctccagcagggcgtcggcctccttgcggaccga

SEQ ID NO: 111179 - DNA, 80 bp, synthetic construct
  source 1..80: mol_type = other DNA
tgcaacggtgcatcatttttggcaatctgtacctcggggtgtatagactcattgcgtattatttctgtacgtgtacattc

SEQ ID NO: 111180 - DNA, 80 bp, synthetic construct
  source 1..80: mol_type = other DNA
ctcaaagatcttattccctttaactaataaaaaaaaataataaagcatcacttacttaaaatcagttagcaaatttctgt

SEQ ID NO: 111181 - DNA, 80 bp, synthetic construct
  source 1..80: mol_type = other DNA
acgaaagttggccatgtcctactgactgcttcaggaaacacccggagactacctacgccaagtgtggctcggggccttgg

SEQ ID NO: 111182 - DNA, 80 bp, synthetic construct
  source 1..80: mol_type = other DNA
tcatctgttgtgcatggtacatcaagggcaggctagttccaggggtgacctacttttgcttgggtatctggccattgctc

SEQ ID NO: 111183 - DNA, 80 bp, synthetic construct
  source 1..80: mol_type = other DNA
acaagcggcgcagcagactggggagtttgcctatggaaaaaaagggcgctatggagacaaaattgccatccctttggacg

SEQ ID NO: 111184 - DNA, 80 bp, synthetic construct
  source 1..80: mol_type = other DNA
gctgagcagttcaagcaaaaggtgctcggcataatacacaatgcaacccggcatgctgaggaaatcaaaccagctgttca

SEQ ID NO: 111185 - DNA, 80 bp, synthetic construct
  source 1..80: mol_type = other DNA
tttacaaagcagaagggtataaaaaagaagttagaacattttcatctagaaatcaaaaacatacaattgaagattctgga

SEQ ID NO: 111186 - DNA, 80 bp, synthetic construct
  source 1..80: mol_type = other DNA
tattctacacactgggtggctacatcccagagaagatttacctagatatcctcttgtaaacgcttttcaattacagcctc

SEQ ID NO: 111187 - DNA, 80 bp, synthetic construct
  source 1..80: mol_type = other DNA
caccgacggcaaacctggtgaatttcctctcgtcgtttgtcggggtatagaccgctggtcttcccgttgatcgttcccgg

SEQ ID NO: 111188 - DNA, 80 bp, synthetic construct
  source 1..80: mol_type = other DNA
agcttggaccctaccttctccattgagaccaccaccgtgcctcaggatgcagtgtcccgaagtcagcgaaggggccgcac

SEQ ID NO: 111189 - DNA, 80 bp, synthetic construct
  source 1..80: mol_type = other DNA
ggagtgtcccctgtacaagagagcaacaggagtgttcacagtggcagaatttggtgtgggcctacgcacgaaagttttct

SEQ ID NO: 111190 - DNA, 80 bp, synthetic construct
  source 1..80: mol_type = other DNA
gctcgaagccgcgtgcaattggacgcgaggagagcgctgtgatttggacgacagggaccgggccgagttgagccccctgt

SEQ ID NO: 111191 - DNA, 80 bp, synthetic construct
  source 1..80: mol_type = other DNA
aggccgacgaggtgatcttgcacctacccggatgtgtgccctgcatcgcaaccggcaaccaatcattgtgctggacgcca

SEQ ID NO: 111192 - DNA, 80 bp, synthetic construct
  source 1..80: mol_type = other DNA
tggtctctggccgcgcccactacaccagccaatccgtgtcggggaggggaaaagtgaaagacacgggcaccacacaccag

SEQ ID NO: 111193 - DNA, 80 bp, synthetic construct
  source 1..80: mol_type = other DNA
ctgggctaaagtcctcgctgtcttggtccttttcgctggggtcgacggaactaccttcgttggccgcagtgtgggtgcgc

SEQ ID NO: 111194 - DNA, 80 bp, synthetic construct
  source 1..80: mol_type = other DNA
gatgtggacctcaaagaaaacccccttggggttctcgtatgacacccgctgttttgactcgactgtcactgaacaggaca

SEQ ID NO: 111195 - DNA, 80 bp, synthetic construct
  source 1..80: mol_type = other DNA
catcgatgcgcatttcctctcccaaactaaacagagtggggagaatttcgcgtacttggtggcctatcaggctaccgtgt

SEQ ID NO: 111196 - DNA, 80 bp, synthetic construct
  source 1..80: mol_type = other DNA
tgagagtctgaaaaacagaaagcatgcactaaaccagggtggctattctcactgaaggaaaaatcactctctccagcagc

SEQ ID NO: 111197 - DNA, 80 bp, synthetic construct
  source 1..80: mol_type = other DNA
tgtcggtgctggtgcggcttgggtccgccgggcgcataaagaacatgtactgctgaatccgatggagggcgtcgcgcagg

SEQ ID NO: 111198 - DNA, 80 bp, synthetic construct
  source 1..80: mol_type = other DNA
gattgcgaaatccagggagtccaacactccgttagtccgctggacttaccccagatcattcaaagactccatggccttag

SEQ ID NO: 111199 - DNA, 80 bp, synthetic construct
  source 1..80: mol_type = other DNA
cattaaaagtagagtatacgctgaatggcaaatctgaaaccatcgatacaaagagtgccattgcacaacgtgagttgtca

SEQ ID NO: 111200 - DNA, 80 bp, synthetic construct
  source 1..80: mol_type = other DNA
cgttgatgtctccgatggcttcgagacgctccatggcctcgtagaagtcgacggcgaagttgaaaaattgggagttgcgg

SEQ ID NO: 111201 - DNA, 80 bp, synthetic construct
  source 1..80: mol_type = other DNA
attgcgtgtttgcagttgcctgtatcttccgccaatgttgtagaatttataggctcacccaaccccgcaatgggcgtgtt

SEQ ID NO: 111202 - DNA, 80 bp, synthetic construct
  source 1..80: mol_type = other DNA
aagtgcacagacccaccccagtcagagccagtggcgagaggcgagcagctgtagaaaaaattgaggacttgttacatgac

SEQ ID NO: 111203 - DNA, 80 bp, synthetic construct
  source 1..80: mol_type = other DNA
gtctcaactcctacgtggtcgggtcacagctcccttgcgagcctgagccggacacggaggtgttggcatccatgctgaca

SEQ ID NO: 111204 - DNA, 80 bp, synthetic construct
  source 1..80: mol_type = other DNA
ggtctgctactaatactaacattggtgactttaagcccagcttacaagaaaataataatgctcttcttgtggtggttgtg

SEQ ID NO: 111205 - DNA, 80 bp, synthetic construct
  source 1..80: mol_type = other DNA
aaattattgattggttcatatgaattagtagatatcatattcaattggaattttgagattattgattggcttttgatgtt

SEQ ID NO: 111206 - DNA, 80 bp, synthetic construct
  source 1..80: mol_type = other DNA
cagggaccacgtcgacttgctggtcggggctgccgcattctgctcagcaatgtacgtggtggatctctgtggatcaatct

SEQ ID NO: 111207 - DNA, 80 bp, synthetic construct
  source 1..80: mol_type = other DNA
ccccgttcgccatataccgcaacaactgcagtatatatcgtctcacgggcttcattaagttcatcttcaagtccaggcca

SEQ ID NO: 111208 - DNA, 80 bp, synthetic construct
  source 1..80: mol_type = other DNA
gtcaattgagacgatgggtcctgcttatggattccaatactcgcctcagcagcgggtcgaacgtctactggaaatgtgga

SEQ ID NO: 111209 - DNA, 80 bp, synthetic construct
  source 1..80: mol_type = other DNA
cggctgggattggggccaggaggcgaagccacgggccatgaaatgatgcggcagcgcgcgacagcgacggtgaactggtc

SEQ ID NO: 111210 - DNA, 80 bp, synthetic construct
  source 1..80: mol_type = other DNA
gcctctgaccaggcctggtcttgcgtgacgagagcctcctccgggccggggacgcgcccgggcgcgaagtatcgcacgct

SEQ ID NO: 111211 - DNA, 80 bp, synthetic construct
  source 1..80: mol_type = other DNA
gaagggaaagtcatagacctcggttgtggaagaggtggctggtcatattattgtgctgggctgaagaaagttactgaagt

SEQ ID NO: 111212 - DNA, 80 bp, synthetic construct
  source 1..80: mol_type = other DNA
tggatgaacagactgatagcctttgcctctcggggcaaccacgtctcgcccactcattatgtgcccgagactgatgcatc

SEQ ID NO: 111213 - DNA, 80 bp, synthetic construct
  source 1..80: mol_type = other DNA
tgccagatcaaagtttggctatggggcaaaagatgttcgcagccattcccgcaaggccgttaaccacatcaactccgtgt

SEQ ID NO: 111214 - DNA, 80 bp, synthetic construct
  source 1..80: mol_type = other DNA
ccaatgccagcattgtgtatgaagcagagactgtcatcttgcatctgcctggttgcgtcccatgcgttaaggttggcaat

SEQ ID NO: 111215 - DNA, 80 bp, synthetic construct
  source 1..80: mol_type = other DNA
gttcgacatgagcccgcttctgttttccaccactcagctatccatcctcccttgttcatttaccaacatgcctgctttgt

SEQ ID NO: 111216 - DNA, 80 bp, synthetic construct
  source 1..80: mol_type = other DNA
aatcacacagcaaatggaccctgaacacagacaattagcgaacgccatattcaagctcacataccaaaacaaagtggtca

SEQ ID NO: 111217 - DNA, 80 bp, synthetic construct
  source 1..80: mol_type = other DNA
ggtctattggtggctttcggagaccccaaaacgacagacgtcgtcgctgttttatcagttttgttgaattttaggaaata

SEQ ID NO: 111218 - DNA, 80 bp, synthetic construct
  source 1..80: mol_type = other DNA
tacctgatagggaagtcctctaccgggagttcgatgagatggaagagtgctctcagcacttgccgtacatcgagcaaggg

SEQ ID NO: 111219 - DNA, 80 bp, synthetic construct
  source 1..80: mol_type = other DNA
acgcgatggacgggctcgaggccaagcagtggtctgtggcccaggccctgccttgcctggaccccgcccaccccctccgg

SEQ ID NO: 111220 - DNA, 80 bp, synthetic construct
  source 1..80: mol_type = other DNA
ctcagtcttgcaggacgttaagcgggccgcctctaaggttagtgctaggctcctctcaatagaggaagcctgcgcgctga

SEQ ID NO: 111221 - DNA, 80 bp, synthetic construct
  source 1..80: mol_type = other DNA
gacagtcgacttcagcttagaccctaccttcaccattgagacgacgaccgtgcctcaagacgcggtgtcgcgcacgcagc

SEQ ID NO: 111222 - DNA, 80 bp, synthetic construct
  source 1..80: mol_type = other DNA
cgcgttatgaatcggacgaaccctgcacaacaaaacacacacccaaacgtttacatctatgaataaggctacttgggtaa

SEQ ID NO: 111223 - DNA, 80 bp, synthetic construct
  source 1..80: mol_type = other DNA
agaaaccaaaaacagaggaaaggcatagacaaagagatgttgttaaagaagttagttttaaaactggaactaatcaaact

SEQ ID NO: 111224 - DNA, 80 bp, synthetic construct
  source 1..80: mol_type = other DNA
gacacatgcgccaaatttgcctgttctaccaaggcaacaggaagaaccattctgaaagagaacatcaagtacgaagtggc

SEQ ID NO: 111225 - DNA, 80 bp, synthetic construct
  source 1..80: mol_type = other DNA
ccacacagatcaaagtctctggatgcgatcaatgaaaaatgacacaggcacttacatagttgaacttttggtcactgacc

SEQ ID NO: 111226 - DNA, 80 bp, synthetic construct
  source 1..80: mol_type = other DNA
gggcggccggccacagtaccgctaccgcgacgacaagctccccaagacgcagttcgcggccggcgtgggccgctacgaac

SEQ ID NO: 111227 - DNA, 80 bp, synthetic construct
  source 1..80: mol_type = other DNA
agcgtggcggaagctctggcagaactagctaagaagtctttcccgacacaaccgagcccttccactgactcggactcagg

SEQ ID NO: 111228 - DNA, 80 bp, synthetic construct
  source 1..80: mol_type = other DNA
gggggaggggggggtcagccgcaccaccggctcgaagccaggggacagagaaatttgatagacaggggggaaagtggggc

SEQ ID NO: 111229 - DNA, 80 bp, synthetic construct
  source 1..80: mol_type = other DNA
acggggtgcatgggttttttgacacaacacaaacatttgcaggctcttatgactggatggattgaatttatttttagata

SEQ ID NO: 111230 - DNA, 80 bp, synthetic construct
  source 1..80: mol_type = other DNA
tcaatccgttctggttccggatgaaaaaggggtgcctcttccaaaggttgacttgcaattcttctcaaatactacctctt

SEQ ID NO: 111231 - DNA, 80 bp, synthetic construct
  source 1..80: mol_type = other DNA
atccggaggtggagggggtattggactccccctgtggagaggcaactttgcgggttttacttcccttacatgccgaatca

SEQ ID NO: 111232 - DNA, 80 bp, synthetic construct
  source 1..80: mol_type = other DNA
gagtggactttaccgagagtcgtttgagcaaccttcttggtatcagaaaaaaacagccattccaagagggttttaagatc

SEQ ID NO: 111233 - DNA, 80 bp, synthetic construct
  source 1..80: mol_type = other DNA
ctgctgcaccggttctccctgttcaaccccagggacctcctggactttgagcttgcctgtctgctgatgtacctggagaa

SEQ ID NO: 111234 - DNA, 80 bp, synthetic construct
  source 1..80: mol_type = other DNA
ctaattcacctaaaaacctgactcattgcagcagcgtttcctccttgcagactatccagttggcattttaaacgggtccg

SEQ ID NO: 111235 - DNA, 80 bp, synthetic construct
  source 1..80: mol_type = other DNA
agcgccaacgcgtccgtggagcgcatcaagaccacctcctcgatcgagttcgcccggctgcagtttacgtataaccacat

SEQ ID NO: 111236 - DNA, 80 bp, synthetic construct
  source 1..80: mol_type = other DNA
tttttcacctacatagacggggttagactgcacaggtacgcacccgagcctaagatgttgctaagggatgaggtcgactt

SEQ ID NO: 111237 - DNA, 80 bp, synthetic construct
  source 1..80: mol_type = other DNA
gtccaaaaccctagctggcccgaaaggccccgtatgccaaatgtacaccaatgtggatcaggatttggtagggtggcccg

SEQ ID NO: 111238 - DNA, 80 bp, synthetic construct
  source 1..80: mol_type = other DNA
acataacgcaggactgcaactgttcaatttacaccggccatgtcaccggccacagaatggcatgggatatgatgatgaac

SEQ ID NO: 111239 - DNA, 80 bp, synthetic construct
  source 1..80: mol_type = other DNA
ctacatattatgggaaaacaatatcaaattaacggtagttgtgggcgatacacttggggtcttagagcaagggaaaagaa

SEQ ID NO: 111240 - DNA, 80 bp, synthetic construct
  source 1..80: mol_type = other DNA
aaaaacactttatcctacagagtctccgcagagcctttgccagcatggcataccccgaggcaacgggctccagtccggcg

SEQ ID NO: 111241 - DNA, 80 bp, synthetic construct
  source 1..80: mol_type = other DNA
cggagtgatgtatgagaacgtgttccacactctctggcacacgactagaggagccgccataatgagtggtgaagggaaac

SEQ ID NO: 111242 - DNA, 80 bp, synthetic construct
  source 1..80: mol_type = other DNA
tgtggttcctatggtgacacaactggctatgactgacaccacaccatttggccaacagagagtcttcaaagagaaagtag

SEQ ID NO: 111243 - DNA, 80 bp, synthetic construct
  source 1..80: mol_type = other DNA
aggcttatgcttatgacgcatctgtgcatggccagataggagcggctctgctggtaatgatcactctctttactctcacc

SEQ ID NO: 111244 - DNA, 80 bp, synthetic construct
  source 1..80: mol_type = other DNA
aggccacggcgtgcgccagagcgaaagctccccccccctcctgggacacgatgtggaagtgcttgactagacttaaacca

SEQ ID NO: 111245 - DNA, 80 bp, synthetic construct
  source 1..80: mol_type = other DNA
agtcgtttctacggctacgcaatcctttctcgccactaccgtcaatggggtcctatggactgtctatcatggcgctggct

SEQ ID NO: 111246 - DNA, 80 bp, synthetic construct
  source 1..80: mol_type = other DNA
aggaaggaatagttggagtactgcaccttggcggcgcccggtgagggcgtcggcctgggttgcttctgggcgtggcgccc

SEQ ID NO: 111247 - DNA, 80 bp, synthetic construct
  source 1..80: mol_type = other DNA
cctggaggggtgatggcgtttgctacacaaggtgcccatgtggcgcggagattgcgggccacatcaaaaacggatcaatg

SEQ ID NO: 111248 - DNA, 80 bp, synthetic construct
  source 1..80: mol_type = other DNA
cacgggctcatctggtacatgctagcgttctgcgcagcctggcacgtgcgaggcaagcttgtcccgatagttacctatgg

SEQ ID NO: 111249 - DNA, 80 bp, synthetic construct
  source 1..80: mol_type = other DNA
taatgttacagttttccagggtaaaagtcataaaacttttatgtatacttttccattttatgaaatgtgcgatattacca

SEQ ID NO: 111250 - DNA, 80 bp, synthetic construct
  source 1..80: mol_type = other DNA
ctctgcaaaaaagtgaaaccgaaaatcagaacgttctggtggaactggatggcgataacgcgcgtctcgccgtgctcaaa

SEQ ID NO: 111251 - DNA, 80 bp, synthetic construct
  source 1..80: mol_type = other DNA
gtggctaccgtcgatgccgcgcaagcggcgtcttgaccactagctgcggcaacacccttacttgcttcttaaaggccagt

SEQ ID NO: 111252 - DNA, 80 bp, synthetic construct
  source 1..80: mol_type = other DNA
ttgtcttgtgcctcaggaatggatacaacatttctaccaggaatccgctccatcccaatcagatgtggcactgatcagat

SEQ ID NO: 111253 - DNA, 80 bp, synthetic construct
  source 1..80: mol_type = other DNA
tgtggctgtcacaaagatactcagttccctcaccatcaccagccttcttcggagactccacgagtggatcaacggagatt

SEQ ID NO: 111254 - DNA, 80 bp, synthetic construct
  source 1..80: mol_type = other DNA
cgtctggggtggggggggcaggggacggaaggtggttgtcagctgaagactgttagggcgtgggcgcttagcggtgctgt

SEQ ID NO: 111255 - DNA, 80 bp, synthetic construct
  source 1..80: mol_type = other DNA
gcgatttcaattttcacgattttattattaattacaccaaccaccctgtccccgggacgtggtcaggaccgggggtccgc

SEQ ID NO: 111256 - DNA, 80 bp, synthetic construct
  source 1..80: mol_type = other DNA
ggaaatgaccctgaagacattgactgctggtgcacgaaatcatctgtttacgtgcgctatggaagatgcacaaaaactcg

SEQ ID NO: 111257 - DNA, 80 bp, synthetic construct
  source 1..80: mol_type = other DNA
gtgctgatgacccatttctttggaatactccagtcccaagagacactccataaagtacttgacttcgacatgtacggagt

SEQ ID NO: 111258 - DNA, 80 bp, synthetic construct
  source 1..80: mol_type = other DNA
gtttctacgtgcccgagaattacaaagaccgcatgtactccttctttagaaacttccaacctatgagccgtcaagtagta

SEQ ID NO: 111259 - DNA, 80 bp, synthetic construct
  source 1..80: mol_type = other DNA
gattacatcgttggatcaatgatgattaccaaagcccttgcagcggcgactggttgcgcgacatctgggactgggtctgt

SEQ ID NO: 111260 - DNA, 80 bp, synthetic construct
  source 1..80: mol_type = other DNA
tgacatgttggtctgcggggacgatttgatcatcatctcagagagcatgggcgtatccgaggacgttggagcactgcgag

SEQ ID NO: 111261 - DNA, 80 bp, synthetic construct
  source 1..80: mol_type = other DNA
cactacaatccccttgacattccatttattacacccccgtttgcttcctccaacggcttgcaagaaaaacctccgggagt

SEQ ID NO: 111262 - DNA, 80 bp, synthetic construct
  source 1..80: mol_type = other DNA
ataatgaaacttttcgagaagctatgcttaacattgctgagcccgaggggcgctggcttttagacctagtcaacatcctg

SEQ ID NO: 111263 - DNA, 80 bp, synthetic construct
  source 1..80: mol_type = other DNA
gggggaatctcgtgttcttggggcccgctgatgacgtcaaaggcaaaggatggaggctcctcgctccgattactgcatat

SEQ ID NO: 111264 - DNA, 80 bp, synthetic construct
  source 1..80: mol_type = other DNA
gggaccccaaaaagggggtacagtcgtggacgctgctcaccaccccggacgttacctgcggcgcggagcaagtttactgg

SEQ ID NO: 111265 - DNA, 80 bp, synthetic construct
  source 1..80: mol_type = other DNA
tcagatcgtggtaaacgggccctgcgatatggatgatggcggagcaagctggattgaatctcggtttgcattgtagtgga

SEQ ID NO: 111266 - DNA, 80 bp, synthetic construct
  source 1..80: mol_type = other DNA
ccttacacttaatacaatggcaccattcacaacaacaaacgaaagcttaagcttggtcactgcccctcccattacagtgg

SEQ ID NO: 111267 - DNA, 80 bp, synthetic construct
  source 1..80: mol_type = other DNA
acattatggcctgcatgtctgccgatctggaggtcatcaccagcacttgggtggtagccggtggtatcctcgctgcaata

SEQ ID NO: 111268 - DNA, 80 bp, synthetic construct
  source 1..80: mol_type = other DNA
ctcccgccactggttcaagtgccatagtctcgttttgaacctctgggacgagacctgcggccccatcagtgactatccaa

SEQ ID NO: 111269 - DNA, 80 bp, synthetic construct
  source 1..80: mol_type = other DNA
agtgctctccaccgcgacccagtccttcctaggcaccgccattaacggggtgctatggacggtctatcatggtgctgggt

SEQ ID NO: 111270 - DNA, 80 bp, synthetic construct
  source 1..80: mol_type = other DNA
gttacaagggcgtctggaggggcgacggagtttgcaacaccacttgcccctgtggcgctgccatcgccggccacgtcaag

SEQ ID NO: 111271 - DNA, 80 bp, synthetic construct
  source 1..80: mol_type = other DNA
ccaaacacaccggagtgtccaagtgcctcaagagcatggaatgtgtgggaggtggaagattacgggttcggagtcttcac

SEQ ID NO: 111272 - DNA, 80 bp, synthetic construct
  source 1..80: mol_type = other DNA
tcatcgcccctactgtccagaccaactggcaaaaactcgagaccttttgggcgaagcatatgtggaattttattagtggg

SEQ ID NO: 111273 - DNA, 80 bp, synthetic construct
  source 1..80: mol_type = other DNA
tagtcatggtctgctcctgcactttctttgccatcatgatctacccctgttttgatctcggctggaactctgttgaggca

SEQ ID NO: 111274 - DNA, 80 bp, synthetic construct
  source 1..80: mol_type = other DNA
gagggacccttcccatatcaccgccgaaacggcagcgcgccgccttgcgcgcgggtctcctccatcagaggcaagctcat

SEQ ID NO: 111275 - DNA, 80 bp, synthetic construct
  source 1..80: mol_type = other DNA
aaacatcatggcactatgatcaagaccacccatacaaaacgtgggcctaccatggcagctacgaaacaaaacagactgga

SEQ ID NO: 111276 - DNA, 80 bp, synthetic construct
  source 1..80: mol_type = other DNA
aatgctggagaggacaaagagtgaccttggaaagatattctctcactcgaagcaacaaacgactgctctcccacttcctt

SEQ ID NO: 111277 - DNA, 80 bp, synthetic construct
  source 1..80: mol_type = other DNA
caccaatcttgcactggttagaaattactgctatgcagctactgtgtcagacgtttctacggtgtcaaactgtcccacta

SEQ ID NO: 111278 - DNA, 80 bp, synthetic construct
  source 1..80: mol_type = other DNA
acagtcgcaaggtaggctgagcaccgtggcgggcggcagcgggcggcggtcgtggttgtttctggcggaggtgctgctga

SEQ ID NO: 111279 - DNA, 80 bp, synthetic construct
  source 1..80: mol_type = other DNA
ttgtggcaccgggggagcgcccctctggcatgtttgactcgtccgtcctttgtgagtgctatgacgcgggctgtgcttgg

SEQ ID NO: 111280 - DNA, 80 bp, synthetic construct
  source 1..80: mol_type = other DNA
acgccgccgccccaggggacgagcccgccccccccgcggccctgccctccccggccaagcgcccccgggagacgccgtcg

SEQ ID NO: 111281 - DNA, 80 bp, synthetic construct
  source 1..80: mol_type = other DNA
gatatgatgatgaactggtcgccaaccgccgccctgctagtgtcgcagctgatccggatcccacaagccgtcatggacat

SEQ ID NO: 111282 - DNA, 80 bp, synthetic construct
  source 1..80: mol_type = other DNA
gcaaggggcaatcttgcgggtacaggcgctgccgcgccagcggggtgctacccactagcatggagaacactatcacatgc

SEQ ID NO: 111283 - DNA, 80 bp, synthetic construct
  source 1..80: mol_type = other DNA
gcgtacgccgcccaaggctataaggtgctggtgctcaacccttccgtggcggccacgctagggtttggggcgtacatgtc

SEQ ID NO: 111284 - DNA, 80 bp, synthetic construct
  source 1..80: mol_type = other DNA
gagtttgggacaggagtgttcaccacccgagtgtacatggatgcagtctttgagtacactatggattgtgatggatccat

SEQ ID NO: 111285 - DNA, 80 bp, synthetic construct
  source 1..80: mol_type = other DNA
tttgataaaaagggtgatttagtagcctggaataaaaaagatgacaggcgcaccctgtggacaacccctgacacatctcc

SEQ ID NO: 111286 - DNA, 80 bp, synthetic construct
  source 1..80: mol_type = other DNA
atcaggcggagacagctggagcgcggctagtcgtgctcgctaccgccacccctccgggatcgatcaccgtgcctcacaat

SEQ ID NO: 111287 - DNA, 80 bp, synthetic construct
  source 1..80: mol_type = other DNA
aaacatgtgttgcggcagagcaccattgtgcaggaggccttcaaggattactctgggtttccgctgacggtggaggagtt

SEQ ID NO: 111288 - DNA, 80 bp, synthetic construct
  source 1..80: mol_type = other DNA
gtggcatagcttgcggcaaatatgctcaagccatcttgctacgtcttggagcctggactggcacgtatatctatgaccat

SEQ ID NO: 111289 - DNA, 80 bp, synthetic construct
  source 1..80: mol_type = other DNA
cgtcatcggcgccccccttgggggcgttgcggctgctctggcacatggtgttagggcaatcgaagacgggatcaactatg

SEQ ID NO: 111290 - DNA, 80 bp, synthetic construct
  source 1..80: mol_type = other DNA
ccctcaacaccataaccaatctaaaagtccagctcataagaatggctgaagctgaaatggtgatcaaccatcagcatgtg

SEQ ID NO: 111291 - DNA, 80 bp, synthetic construct
  source 1..80: mol_type = other DNA
gctcgaggagagacatccattgaatatgcttaccggtttctgtcaaacctaatctttggaggcttgattaacttttacaa

SEQ ID NO: 111292 - DNA, 80 bp, synthetic construct
  source 1..80: mol_type = other DNA
ttttatagcattcctaagatttctagccatacctccaacagcaggaattttggctagatggggctcattcaagaagaatg

SEQ ID NO: 111293 - DNA, 80 bp, synthetic construct
  source 1..80: mol_type = other DNA
cgtcccgcagacttaccaggtggggtatctccacgcccccacgggcagtggaaagagtactaaagtcccagcggcctatg

SEQ ID NO: 111294 - DNA, 80 bp, synthetic construct
  source 1..80: mol_type = other DNA
tttgatgaaatggaagagtgctctaaacaccttccactagtcgagcatgggctgcagttggcagagcagttcaaacagaa

SEQ ID NO: 111295 - DNA, 80 bp, synthetic construct
  source 1..80: mol_type = other DNA
gccaggcggaggcagcgttggagaatttgatactcctcaacgccacctccgccgcgagcgcccgaggttgggagacggcc

SEQ ID NO: 111296 - DNA, 80 bp, synthetic construct
  source 1..80: mol_type = other DNA
aacgccttgaaaatcaactggtacaagaaggggagctcgattgggaagatgttcgaggccactgaaaggggtgcaaggcg

SEQ ID NO: 111297 - DNA, 80 bp, synthetic construct
  source 1..80: mol_type = other DNA
caacacctatgacgtggacatggtcgatgccaacctgctcatggagggcggtgtggctcagacagagcctgagtccaggg

SEQ ID NO: 111298 - DNA, 80 bp, synthetic construct
  source 1..80: mol_type = other DNA
tcagatgcaagctcatccgccagccagctatcagctccgtcgttgaaggccacttgccagtcacataggccccatccgtt

SEQ ID NO: 111299 - DNA, 80 bp, synthetic construct
  source 1..80: mol_type = other DNA
aaatagtaacacactttgataacacccaagtgggaaccttagccctttccctgactttcataagatcaataacaccatta

SEQ ID NO: 111300 - DNA, 80 bp, synthetic construct
  source 1..80: mol_type = other DNA
gatatgcggcctttatctctttaattgggcggtacgcactaagaccaacctcactccattgccagccgccggccagttgg

SEQ ID NO: 111301 - DNA, 80 bp, synthetic construct
  source 1..80: mol_type = other DNA
tttgggtgccttccttgcgggttcgcggtggacgcgatgcagtcatactgcttacctgcttgttacacccagagctggtg

SEQ ID NO: 111302 - DNA, 80 bp, synthetic construct
  source 1..80: mol_type = other DNA
ggtaggcttgttccagctgccacatatggggttttgcagttgtggccactcctgctcctggtgcttttccttccgcaccg

SEQ ID NO: 111303 - DNA, 80 bp, synthetic construct
  source 1..80: mol_type = other DNA
ttcagccttgtatgtcggggatatttgtggcggcgtcttcttggtaggacagcttttcaccttccagcctagaaagcacc

SEQ ID NO: 111304 - DNA, 80 bp, synthetic construct
  source 1..80: mol_type = other DNA
gcgaaccttacctggtacttttaacatctctccctctgtgatttacaacagtttcaacccagacggagtgagtctacgag

SEQ ID NO: 111305 - DNA, 80 bp, synthetic construct
  source 1..80: mol_type = other DNA
gcccgactggaggatgatagttccatctgggcctggggcgtagttgccctcacaaatctgcatttcccaggccttaattt

SEQ ID NO: 111306 - DNA, 80 bp, synthetic construct
  source 1..80: mol_type = other DNA
ttcctcaaggggggtagacaccttatattttgccactccaggaaaaagtgtgacgagttggccaagcagctaacatctct

SEQ ID NO: 111307 - DNA, 80 bp, synthetic construct
  source 1..80: mol_type = other DNA
actttgccaggcaatcctgccattgcttccctcatgtccttcactgctgccgttacaagccctctgaccacccagcaaac

SEQ ID NO: 111308 - DNA, 80 bp, synthetic construct
  source 1..80: mol_type = other DNA
gcattacaagcggtggttggcgcggggaatatggtggctgcaatactttattgccagggttgaggctatcctacacacgc

SEQ ID NO: 111309 - DNA, 80 bp, synthetic construct
  source 1..80: mol_type = other DNA
tggtagtggtaaacatatcgagagagccaggtgatgccggcggcggtagtggcggcgcgggcgtattcgcgaacgcggtt

SEQ ID NO: 111310 - DNA, 80 bp, synthetic construct
  source 1..80: mol_type = other DNA
tttacagtaagtgcgctatttggacggtgggaggtgtatttttttatttgttcttagcagtaaagacttttttgttttta

SEQ ID NO: 111311 - DNA, 80 bp, synthetic construct
  source 1..80: mol_type = other DNA
cacctcttgggagtcatcggcggataacgcactgaatggttcgttggttatggaggagtgtggttccccagggagtgggt

SEQ ID NO: 111312 - DNA, 80 bp, synthetic construct
  source 1..80: mol_type = other DNA
ggaggacacactgcggaggaatcagcaagaactatatattttcttaaacaaattgtcaccttactttcgcaacaaccgcc

SEQ ID NO: 111313 - DNA, 80 bp, synthetic construct
  source 1..80: mol_type = other DNA
tgcggtggtgtcttgggcgcttaagtgggagtatgttgtgctggccttcttgctgttggcagacgctagggtttgtgcat

SEQ ID NO: 111314 - DNA, 80 bp, synthetic construct
  source 1..80: mol_type = other DNA
gtgtgttgctcaatgtcatattcatggacgggggcgcttgtaacacctgccgcagcggaggagtccaagctgcccatcaa

SEQ ID NO: 111315 - DNA, 80 bp, synthetic construct
  source 1..80: mol_type = other DNA
tagctgtttttataactcttggatgggtgatttatgttttgcttgtgattttttataggtcctgtgtctgatgctgatga

SEQ ID NO: 111316 - DNA, 80 bp, synthetic construct
  source 1..80: mol_type = other DNA
gatacggagccggtgtgtcgggtgctctagtcgcttttaagatcatgagcggcgagtgcccgaccacggaagacatggtc

SEQ ID NO: 111317 - DNA, 80 bp, synthetic construct
  source 1..80: mol_type = other DNA
atgaagatcactggttttctagagagaactctttgagtggagtggaaggagaagggctgcacaagctgggttacattcta

SEQ ID NO: 111318 - DNA, 80 bp, synthetic construct
  source 1..80: mol_type = other DNA
gggggagaacttcgcgtacctagtagcctaccaagctacggtgtgcgccagagccaaggcccctcccccgtcctgggacg

SEQ ID NO: 111319 - DNA, 80 bp, synthetic construct
  source 1..80: mol_type = other DNA
aggagcttggaagcatgctcagagagtagagagctggatactcagaaacccaggatttgcactcttggcaggatttatgg

SEQ ID NO: 111320 - DNA, 80 bp, synthetic construct
  source 1..80: mol_type = other DNA
gtaactgcagcacagcaccacaatattgttcaaaatcccacaatgcaaggcgctgtatccaaagctcatggcggggacca

SEQ ID NO: 111321 - DNA, 80 bp, synthetic construct
  source 1..80: mol_type = other DNA
ggctcggtggccatagtcggtagaatcatcctatctgggagacctgccatcattcccgacagggaggtgttgtaccaaca

SEQ ID NO: 111322 - DNA, 80 bp, synthetic construct
  source 1..80: mol_type = other DNA
tggaagacagtgtaccagcagaggtgtggaccaagtatggagagaagagagtgcttaaaccgaggtggatggatgctagg

SEQ ID NO: 111323 - DNA, 80 bp, synthetic construct
  source 1..80: mol_type = other DNA
gattggatggatgctaggtagcaacaacacacagagagtggtttttgtgatcatgctgatgctgattgctccggcataca

SEQ ID NO: 111324 - DNA, 80 bp, synthetic construct
  source 1..80: mol_type = other DNA
gaagcgcagcaagataaaggtgaacggcatggtgaacatcgacatgtacgggattataaccgacaagatcaagctctcga

SEQ ID NO: 111325 - DNA, 80 bp, synthetic construct
  source 1..80: mol_type = other DNA
tcaccaggagcctatgacgtcataatgtgcgacgaatgccattccgtggactccacaacgatccttggcattggcactgt

SEQ ID NO: 111326 - DNA, 80 bp, synthetic construct
  source 1..80: mol_type = other DNA
cggaggctatgaccaggtattcggccccccccggggatgtaccgcgcccagagtacgacctggagcttattacatcatgc

SEQ ID NO: 111327 - DNA, 80 bp, synthetic construct
  source 1..80: mol_type = other DNA
acttcaaaaactggctattcacaaaattgtctccaaagatgcccggcatcccctttctctcctgtcaaaagggctataga

SEQ ID NO: 111328 - DNA, 80 bp, synthetic construct
  source 1..80: mol_type = other DNA
gaagaaatgcccgatggggttctcttatgacaccagatgctttgactccacagtcacagagcgcgacattcgtaccgagg

SEQ ID NO: 111329 - DNA, 80 bp, synthetic construct
  source 1..80: mol_type = other DNA
cccccccggaagcgttacggtgccccaccccaacatcgaggaggtcgcccttggcaacgatggggaaattcccttctatg

SEQ ID NO: 111330 - DNA, 80 bp, synthetic construct
  source 1..80: mol_type = other DNA
accatttaccagtgtatgtctgtaatacgacgttgttgtgtcccgacaaaattaactcgcgtacaaatttctgatgttcc

SEQ ID NO: 111331 - DNA, 80 bp, synthetic construct
  source 1..80: mol_type = other DNA
gcacgtggatgaacggcaccgggttcaccaagacctgcggcgcgccaccttgccgcatcaggaaagatttcaacgccagt

SEQ ID NO: 111332 - DNA, 80 bp, synthetic construct
  source 1..80: mol_type = other DNA
cggtaggggggcaggtagctttctccactcacggctttacgcgtctctttgcacgtgggccgacccaaaagatccagctc

SEQ ID NO: 111333 - DNA, 80 bp, synthetic construct
  source 1..80: mol_type = other DNA
aaagaacaaacccacattggactttgagttgacaaagacagaagccaaactaccagccactttgcggaaatactgcatag

SEQ ID NO: 111334 - DNA, 80 bp, synthetic construct
  source 1..80: mol_type = other DNA
caccatttccatgagttggtgatgaaggacggacgcaccctagtggtgccatgccgtgaccaggatgagctcgttgggag

SEQ ID NO: 111335 - DNA, 80 bp, synthetic construct
  source 1..80: mol_type = other DNA
acacgcttggagatctctggaaacggaggctgaacaactgcaccagggaggaattcttcgtgtacaggcgcactggcatc

SEQ ID NO: 111336 - DNA, 80 bp, synthetic construct
  source 1..80: mol_type = other DNA
aaagcggtggtaggaaccggtgttgatggtgtacgtgcagttggccatgacggaccagttgactacttgcatcccgggct

SEQ ID NO: 111337 - DNA, 80 bp, synthetic construct
  source 1..80: mol_type = other DNA
tattgggcccattatatctgatacaggccgccctcactagtaccccctacttcgtgcgtgcgcatgtactggttcgcctt

SEQ ID NO: 111338 - DNA, 80 bp, synthetic construct
  source 1..80: mol_type = other DNA
cgcggtcagcgtaggcatgctctccagggagcgcgagttggcgcgctcccgccgggccgcccggcgtgcctgggatcggc

SEQ ID NO: 111339 - DNA, 80 bp, synthetic construct
  source 1..80: mol_type = other DNA
tccacagttactctccaggtgaaatcaatagggtggctgcatgcctcaggaaacttggggtaccgcccttgcgagcttgg

SEQ ID NO: 111340 - DNA, 80 bp, synthetic construct
  source 1..80: mol_type = other DNA
gtaaatctcgcaggtggcagcgatcacctccgctgtgctggtgaaaaatcacagccagatcaaattgtaagcggttttcc

SEQ ID NO: 111341 - DNA, 80 bp, synthetic construct
  source 1..80: mol_type = other DNA
ccacaacaataatggcaaagaatgaggtgttctgcgtggaccccgccaagggcgggaaaaaaccagcgcgcctcatagtg

SEQ ID NO: 111342 - DNA, 80 bp, synthetic construct
  source 1..80: mol_type = other DNA
tgccctgtgtcaacgagggcaacagggcgaagtgctgggtggcactctcccccactctggcttccagggacggcgtgctc

SEQ ID NO: 111343 - DNA, 80 bp, synthetic construct
  source 1..80: mol_type = other DNA
cagagtgggtgatttccattatgtcaccggggtaacacaagacaacatcaagttcccctgccaagttccggccccagagc

SEQ ID NO: 111344 - DNA, 80 bp, synthetic construct
  source 1..80: mol_type = other DNA
gggcgtcgggtcgcctgccgcaggataaccgcgtccacggggtgcccgaagaggagctgacacaggctcgcgtccccccg

SEQ ID NO: 111345 - DNA, 80 bp, synthetic construct
  source 1..80: mol_type = other DNA
aacaacgaagttgaagttttcaccaaaactggagacaggaaaattctcaggccaaagtggatggatgcgcgggtctgctg

SEQ ID NO: 111346 - DNA, 80 bp, synthetic construct
  source 1..80: mol_type = other DNA
ccccagctgccaggggtacccttcttctcatgtcaacgagggtatagaggggtctggcgtggagatggcgtcatgaatac

SEQ ID NO: 111347 - DNA, 80 bp, synthetic construct
  source 1..80: mol_type = other DNA
ggtcgtttgactggacgattcgcgggctatttttacgtttcttgtgattgataaccgctgtttccgccatgacagatcca

SEQ ID NO: 111348 - DNA, 80 bp, synthetic construct
  source 1..80: mol_type = other DNA
tcgcccaactaccacaaagccctgtggagagttgccgctgaggaatacgttgaggtcgtgcgacatggggacaaccacta

SEQ ID NO: 111349 - DNA, 80 bp, synthetic construct
  source 1..80: mol_type = other DNA
tacgactcaaatgtacactaatgtggaccaggaccttgtcgggtggcaggccccgcagggggcacgctccctcacaccgt

SEQ ID NO: 111350 - DNA, 80 bp, synthetic construct
  source 1..80: mol_type = other DNA
aaaccacccccaccgagccggccagccccccaacaacccccaagcccacctccacgcccaaaagcccgcccacgtccacc

SEQ ID NO: 111351 - DNA, 80 bp, synthetic construct
  source 1..80: mol_type = other DNA
gggacgcatggcatagggtcctttatcatcttcttctgcgccgcatggtatctgaagggaaaatgggctccgggtgcggt

SEQ ID NO: 111352 - DNA, 80 bp, synthetic construct
  source 1..80: mol_type = other DNA
aatatctgttttgtatattccaatacatttttggcggaggctgctttcacggccgaaaatttacccggactgttgttttg

SEQ ID NO: 111353 - DNA, 80 bp, synthetic construct
  source 1..80: mol_type = other DNA
tagttgtgggcgacacaatcggggttttagagcaagggaaaagaacactaacaccacaacccatggagctaaaatactca

SEQ ID NO: 111354 - DNA, 80 bp, synthetic construct
  source 1..80: mol_type = other DNA
ggcagtggaaagagcaccaaagtccctgtcgcatacgccgctcaagggtataaagtgcttgtgcttaacccctcggtggc

SEQ ID NO: 111355 - DNA, 80 bp, synthetic construct
  source 1..80: mol_type = other DNA
gcttatctactttgagcttcccaaggagcaccccaacggccctgcacacggagtgcggattaccgtagagggcaccaccg

SEQ ID NO: 111356 - DNA, 80 bp, synthetic construct
  source 1..80: mol_type = other DNA
agtactggaaataatgacttaatgtgttctctgtgttatctgcgagcatacggcatgtttatttacagtaagtgcatttt

SEQ ID NO: 111357 - DNA, 80 bp, synthetic construct
  source 1..80: mol_type = other DNA
accttctggacggcgacgttttgctaaagcatttcgccaggcagagcaccatagtcaaggaggccttgcaagaccgctcc

SEQ ID NO: 111358 - DNA, 80 bp, synthetic construct
  source 1..80: mol_type = other DNA
atcgccttctcctgattcaactacctcacctcctgaaattcaggcacccgtccctgcaaatgtatgcaagcccattcctg

SEQ ID NO: 111359 - DNA, 80 bp, synthetic construct
  source 1..80: mol_type = other DNA
gcttcaaatatcaccccagcttttttctgctcatgaaggttagatgcctgctgcttaagtaattcctctttatctgtaaa

SEQ ID NO: 111360 - DNA, 80 bp, synthetic construct
  source 1..80: mol_type = other DNA
gcaaggagcgcgggccgcagcgcccccttccgccccacctggccctacggctgcgcaccacgacggagtacctggcgcgc

SEQ ID NO: 111361 - DNA, 80 bp, synthetic construct
  source 1..80: mol_type = other DNA
ataacatcgcttaccgcacggttatacgtcggaggcccaatgttcaactctcgaggagagcgttgtggctaccgccgatg

SEQ ID NO: 111362 - DNA, 80 bp, synthetic construct
  source 1..80: mol_type = other DNA
ccccggaagcgccgggaggtggcgccggcgcgacgcgggcggccgggcgcgggcgcgcggcggccggccgtgtgcgcgcc

SEQ ID NO: 111363 - DNA, 80 bp, synthetic construct
  source 1..80: mol_type = other DNA
aacaggagatgggaccattaccctccactggtttagaaaagggagttcgatagggaaaatgtttgaatccacttacagag

SEQ ID NO: 111364 - DNA, 80 bp, synthetic construct
  source 1..80: mol_type = other DNA
aacgaggagcgcaactttcaaaaaacctttaacaatcacgtgcgcaccttagtagcgcgagaagaggtggccataggcct

SEQ ID NO: 111365 - DNA, 80 bp, synthetic construct
  source 1..80: mol_type = other DNA
tctgggagcgagccaacagacagccaggactccgcgtcggacgcggtcagccacggcgatccggaagacctcgatggcgc

SEQ ID NO: 111366 - DNA, 80 bp, synthetic construct
  source 1..80: mol_type = other DNA
attgggctgccggtgggttgcgggacctagccgtagcggtcgagccagttgttttctcccctatggagaagaaggtcatc

SEQ ID NO: 111367 - DNA, 80 bp, synthetic construct
  source 1..80: mol_type = other DNA
ccactggggcgtcctggctggcatagctttctttggcatgcaggctaactgggctaaagtcttcctgattctgttcgtct

SEQ ID NO: 111368 - DNA, 80 bp, synthetic construct
  source 1..80: mol_type = other DNA
gaactgtccaagcgtcacaagtctgcggtcctgtgtattgcttcacaccatcgccagtggttgtaggcactactgatgct

SEQ ID NO: 111369 - DNA, 80 bp, synthetic construct
  source 1..80: mol_type = other DNA
aaggtgactttcgatcgcatgcaagtgctagacaaacattatgatgatgtccttaaggaggttaaactccgggcgtcgcg

SEQ ID NO: 111370 - DNA, 80 bp, synthetic construct
  source 1..80: mol_type = other DNA
ttcgaggtgacaaaaattttgcttgccctgctcggctctatgtatttgctccaatacagcctcctcagaacaccgtactt

SEQ ID NO: 111371 - DNA, 80 bp, synthetic construct
  source 1..80: mol_type = other DNA
agcggaggaggatgaaagggaggtatccgttgcggcggagatcctgcgaaaatccaggaagtttcccgcagcgttgccca

SEQ ID NO: 111372 - DNA, 80 bp, synthetic construct
  source 1..80: mol_type = other DNA
ccccccggagtcagatctcttacgccatgcacctgcggtgcgtcggacttgtacctagtcactaggcacgccgatgtggt

SEQ ID NO: 111373 - DNA, 80 bp, synthetic construct
  source 1..80: mol_type = other DNA
gcgctcacgcgcttctgcgcgcttgcttgcttgtgcggcgcctgcttgggggaaagtatgtccaggctctattcttgaag

SEQ ID NO: 111374 - DNA, 80 bp, synthetic construct
  source 1..80: mol_type = other DNA
caacgcctcctgctgtgccccagacataccaggtcgcgcacttgcatgcgccgacggggagcggcaagagcaccagggtt

SEQ ID NO: 111375 - DNA, 80 bp, synthetic construct
  source 1..80: mol_type = other DNA
cctccaaggctgtgactaccatactcagctccctgaccataactagcctcctccgtagactccatgagtggataaacgga

SEQ ID NO: 111376 - DNA, 80 bp, synthetic construct
  source 1..80: mol_type = other DNA
tcatgttcctagtaggccaggcagaggcggcactggagaatctgatagccctcaataccatatctgctgctggcactcat

SEQ ID NO: 111377 - DNA, 80 bp, synthetic construct
  source 1..80: mol_type = other DNA
cggagacgacttggtcgttatttcggagagcaagggagtctccgaggatgccagtgcactgcgagccttcacggaggcta

SEQ ID NO: 111378 - DNA, 80 bp, synthetic construct
  source 1..80: mol_type = other DNA
ggaaatcacatgttcacagggcatctaaaatgcaaagtgagaatggagaaactgcgaataaaaggaatgtcatacacaat

SEQ ID NO: 111379 - DNA, 80 bp, synthetic construct
  source 1..80: mol_type = other DNA
aaaatgttttctatcgcgaacttaaccacacttgtacagaaaaggaccttatcctattgtttgtaaataggacgcataat

SEQ ID NO: 111380 - DNA, 80 bp, synthetic construct
  source 1..80: mol_type = other DNA
tgaactcaaccgggtggcaggatgcctcaggaaacttggggtacccccgttgagagcgtggagacatcgggcccgagcag

SEQ ID NO: 111381 - DNA, 80 bp, synthetic construct
  source 1..80: mol_type = other DNA
ttcccatacagcggggggtgtggctcagatctttaccccgggcgccaagcaagccctccagcttataaacaccaatggca

SEQ ID NO: 111382 - DNA, 80 bp, synthetic construct
  source 1..80: mol_type = other DNA
gacataccgcccggctcgatcgctgccgcgccgcagggtgaccggtgcccaatcgtccgtcagcgcggggtcgcctcgcc

SEQ ID NO: 111383 - DNA, 80 bp, synthetic construct
  source 1..80: mol_type = other DNA
ctagaagaactccacccgctgggcgggggagatactgatccataagaaagcctcatcaccgctttggaggaaagcttttt

SEQ ID NO: 111384 - DNA, 80 bp, synthetic construct
  source 1..80: mol_type = other DNA
ggtagagccgtccccctgttcacctatgcttattttcagctgtggccacttctgctgttggtactatgcttgccccagag

SEQ ID NO: 111385 - DNA, 80 bp, synthetic construct
  source 1..80: mol_type = other DNA
ggatgttcgatacagtcgtactctgtgaggcgtatgataccggagctgcgtggtatgagctaacacctgcagagaccaca

SEQ ID NO: 111386 - DNA, 80 bp, synthetic construct
  source 1..80: mol_type = other DNA
atcagccagagcctcaagtgggggaagacagctggaatgatgatgttgcaccatcatatggcggtagggctctgaaaaag

SEQ ID NO: 111387 - DNA, 80 bp, synthetic construct
  source 1..80: mol_type = other DNA
ggtactacagaggacgcatagttccggcgtttacatatgccttcttaggcttgtggccgttcctattgctcctcctgtgc

SEQ ID NO: 111388 - DNA, 80 bp, synthetic construct
  source 1..80: mol_type = other DNA
tacgcagcacagggctacaaagtgctggtcctcaatccatcggtagcggccaccttgggttttggcgcctacatgtccaa

SEQ ID NO: 111389 - DNA, 80 bp, synthetic construct
  source 1..80: mol_type = other DNA
gagtggcgtggccgaccttagcctctggagcgccccctgtcgtttgggtccccccccctctattggggagaagcaggtgt

SEQ ID NO: 111390 - DNA, 80 bp, synthetic construct
  source 1..80: mol_type = other DNA
gactcagatgtcaggtctattgttaagcatcgtttaacgtctctgccggtatgaaataaacggcgcttagcaccccttgc

SEQ ID NO: 111391 - DNA, 80 bp, synthetic construct
  source 1..80: mol_type = other DNA
cccgaagcctcgcgcgcggccccgcgcggccgcgggggtgcgggcgcgacgtcgctctccacgtcctcgtcgagcgtgct

SEQ ID NO: 111392 - DNA, 80 bp, synthetic construct
  source 1..80: mol_type = other DNA
gctggacacgtcaaaaatggcaccatgaaaatcacggggcccaagacatgcagtaacacttggcacgggacttttccaat

SEQ ID NO: 111393 - DNA, 80 bp, synthetic construct
  source 1..80: mol_type = other DNA
ggtcgcgcagccggccagatgatgcaagacgcaacggacccggcggtgcgggcggcgctgcagagccagccgtccggcct

SEQ ID NO: 111394 - DNA, 80 bp, synthetic construct
  source 1..80: mol_type = other DNA
ccgagagatactgctcggaccggcagatgggatggtctccaaggggtggaggttgctggctcccatcactgcttatgccc

SEQ ID NO: 111395 - DNA, 80 bp, synthetic construct
  source 1..80: mol_type = other DNA
tccgcaaacatcccggcgccacctacgcgaggtgcgggtctggcccatggttgacccctcgctgcatggtggactacgcc

SEQ ID NO: 111396 - DNA, 80 bp, synthetic construct
  source 1..80: mol_type = other DNA
atgagagaaggaggtctgtggagaaaaagaaaggagctgttttaattggtctagccctgacttcgactggatatttttca

SEQ ID NO: 111397 - DNA, 80 bp, synthetic construct
  source 1..80: mol_type = other DNA
cgcggacctggtcaaccacccgcccgtcttgcgcgaactagaggataagcgtggggtgcggctgcggtgcacgggcccat

SEQ ID NO: 111398 - DNA, 80 bp, synthetic construct
  source 1..80: mol_type = other DNA
cccaatatttcatcgcacgtgcagaggcgatgctccacgtttggataccgcctctccaggtcaggggcggtagggatgcc

SEQ ID NO: 111399 - DNA, 80 bp, synthetic construct
  source 1..80: mol_type = other DNA
aagaaaacatcaagtatgaggtggccatttttgttcatggaccgactacagtcgaatcgcatggcaactacgcaacacag

SEQ ID NO: 111400 - DNA, 80 bp, synthetic construct
  source 1..80: mol_type = other DNA
ctatgaccatctctccccaatgtcagattgggctgctgccgggctacgcgacctcgcagttgctgtagaacccatcattt

SEQ ID NO: 111401 - DNA, 80 bp, synthetic construct
  source 1..80: mol_type = other DNA
caggacatctcaagtgcagactgagaatggacaaactacagctcaaaggaatgtcatactctatgtgtacaggaaagttt

SEQ ID NO: 111402 - DNA, 80 bp, synthetic construct
  source 1..80: mol_type = other DNA
acaaatgaaaatggagggcaaggcattcttgtaaagcaacaaaatggaaagctagaaagtcaagtggaaatgcaattttt

SEQ ID NO: 111403 - DNA, 80 bp, synthetic construct
  source 1..80: mol_type = other DNA
tgctaaggccattgactttgtgccggtggagaacatggaaaccaccatgcgctcccctagtttctctgacaattccactc

SEQ ID NO: 111404 - DNA, 80 bp, synthetic construct
  source 1..80: mol_type = other DNA
cagttatgacgtgaagcccacaggctccgccagctcgctggtcaatggagtggttaggctcctctcaaaaccatgggaca

SEQ ID NO: 111405 - DNA, 80 bp, synthetic construct
  source 1..80: mol_type = other DNA
gcggtcgctcgcagccagcgacgtggccgtactggcagggggaagccggtggtgtataggtacgtctcgcaaggagagcg

SEQ ID NO: 111406 - DNA, 80 bp, synthetic construct
  source 1..80: mol_type = other DNA
tgcaagaggagacagtagtgtctcaagagaggtggaaaaggcagctgaaaaagagcttgtcattgagcccatcaagcaag

SEQ ID NO: 111407 - DNA, 80 bp, synthetic construct
  source 1..80: mol_type = other DNA
tacacctggggagagaacgtgactgatgtgttcctgctggcaagcttgcgtccaccgcaaggcgggtggttcggctgcac

SEQ ID NO: 111408 - DNA, 80 bp, synthetic construct
  source 1..80: mol_type = other DNA
cccgctctttcgaccggcttgatccacctccaccagaacatcgtggatgtgcaatacctatatggcattgggtccaccgt

SEQ ID NO: 111409 - DNA, 80 bp, synthetic construct
  source 1..80: mol_type = other DNA
ctcgcggagccgcagcgtaaagacgccgccgtgcatttccaggtggcctggtgggtccccgttgggcagagagagggcgc

SEQ ID NO: 111410 - DNA, 80 bp, synthetic construct
  source 1..80: mol_type = other DNA
tccctcaagtcatcctcgacctcctttctggaggccattggggcgttctcgtcggagtggcttacttcagcatgcaagca

SEQ ID NO: 111411 - DNA, 80 bp, synthetic construct
  source 1..80: mol_type = other DNA
ttgacataaccaagtggctcttggcggtgcttgggcctgcttacctcctaaaaggtgctttgacgcgcgtgccgtacttc

SEQ ID NO: 111412 - DNA, 80 bp, synthetic construct
  source 1..80: mol_type = other DNA
tggaactgaggatgaattgccaaattattgttttcctcttgggggtattggggtaactgacacctatcaagctattaagg

SEQ ID NO: 111413 - DNA, 80 bp, synthetic construct
  source 1..80: mol_type = other DNA
tgttgaaagcttctgtgtgaaggtgttggctccatacatgcctgatgtgcttgaaaagttagagttgctccaaaggaggt

SEQ ID NO: 111414 - DNA, 80 bp, synthetic construct
  source 1..80: mol_type = other DNA
gcttacggggcccacgcctttgttgtataggttaggagccgtccagaatgagatcactactacacacccagtcactaaat

SEQ ID NO: 111415 - DNA, 80 bp, synthetic construct
  source 1..80: mol_type = other DNA
aacgcgctcttgccagaatacgtgctacatccttccattgtgcccacgccggggtatcgcgggtcaactttccagcgcag

SEQ ID NO: 111416 - DNA, 80 bp, synthetic construct
  source 1..80: mol_type = other DNA
ccctaatctcttcgccacgggcaaatttggccagagcctggactctatacagaagcggttctgggtgcgtcggtgtggcg

SEQ ID NO: 111417 - DNA, 80 bp, synthetic construct
  source 1..80: mol_type = other DNA
aaataccacatggacaagatatcacacaaatggttggaaaaaaatttgtgaatggaatgttacagcttataaatgtcaca

SEQ ID NO: 111418 - DNA, 80 bp, synthetic construct
  source 1..80: mol_type = other DNA
ccccataaataacattccttgtggctggaaacgagccaatatgataatgcccaaggaagtgttatttatggggagaaata

SEQ ID NO: 111419 - DNA, 80 bp, synthetic construct
  source 1..80: mol_type = other DNA
cccgctgctgtgccctatgggacacgctgtcggcatattccgcgcggcagtgtgcactcgtggggtggctaaagcagtgg

SEQ ID NO: 111420 - DNA, 80 bp, synthetic construct
  source 1..80: mol_type = other DNA
gataactgaggactgccccatcccatgctccggctcgtggctaagggatgtttgggactggatatgcacggtgttgactg

SEQ ID NO: 111421 - DNA, 80 bp, synthetic construct
  source 1..80: mol_type = other DNA
tgggttagtatgcccctggcatggtagtcattcaaggccataaatctgccctgatatccagtaggaaccatcacactcac

SEQ ID NO: 111422 - DNA, 80 bp, synthetic construct
  source 1..80: mol_type = other DNA
tctgaaaagtctgtgatttttacttaccgctccagcgcttggattacatgaagatctgtgttcttttttgtgtgctaagt

SEQ ID NO: 111423 - DNA, 80 bp, synthetic construct
  source 1..80: mol_type = other DNA
ggcaggagcagagcccatggaacccgagagccggcctggaccctcgggaatgaatgttgtacaggtggctgaactgtatc

SEQ ID NO: 111424 - DNA, 80 bp, synthetic construct
  source 1..80: mol_type = other DNA
aagatgtgtgcgctgtggtttttcggcgcggtacaaaatttgtctgaaaattgcatgagagttagaggaaatggtaggac

SEQ ID NO: 111425 - DNA, 80 bp, synthetic construct
  source 1..80: mol_type = other DNA
cccggccgcggtacgagggcgagtgggagatgctacgccagagcatgatgaaacacggcctgcgcaacagccagtttgtc

SEQ ID NO: 111426 - DNA, 80 bp, synthetic construct
  source 1..80: mol_type = other DNA
ccgatcgagacgtgctctaccaacagtttgatgagatggaggagtgtgctgcgcatattccactggttgagcatggcatg

SEQ ID NO: 111427 - DNA, 80 bp, synthetic construct
  source 1..80: mol_type = other DNA
cgtgtgtgctgccatcttaagacgccacgttggccctgcggagggtgccaaccagtggatgaacaggctaatagcctttg

SEQ ID NO: 111428 - DNA, 80 bp, synthetic construct
  source 1..80: mol_type = other DNA
cttgccttcgaagtcactaagcacctcttagccattataggacccctctacatcctacaggcctccctcctgcgcatccc

SEQ ID NO: 111429 - DNA, 80 bp, synthetic construct
  source 1..80: mol_type = other DNA
ggctccaagacgctggctggtccgaaaggccctgtgtgtcagatgtacaccaatgtcgaccaagacctggtaggctggcc

SEQ ID NO: 111430 - DNA, 80 bp, synthetic construct
  source 1..80: mol_type = other DNA
gtgatggagccatcctgggtgcagcggtgaatggaaagaagagtgcccatggatcacccacattttggatgggaagtcat

SEQ ID NO: 111431 - DNA, 80 bp, synthetic construct
  source 1..80: mol_type = other DNA
agtggaaatctggacgaaagaaggggaaaggaaaaaactaaaacccagatggttggatgctaggatctattctgacccac

SEQ ID NO: 111432 - DNA, 80 bp, synthetic construct
  source 1..80: mol_type = other DNA
ttcctctacggcgacacggtccccgtcgtcgtcggggcccgcgccgcccttgggcgcgtccgccgcgccccccgccccca

SEQ ID NO: 111433 - DNA, 80 bp, synthetic construct
  source 1..80: mol_type = other DNA
ggtgcacgtggatgaatactaccgggtttactaaaacttgcggcgcaccaccttgccgcattaggccggactttaacgcc

SEQ ID NO: 111434 - DNA, 80 bp, synthetic construct
  source 1..80: mol_type = other DNA
ctggccagctcttcggccagccagctgtccgcaccatctctcaaggcaacttgcactaccaaccacgactcccctgacgc

SEQ ID NO: 111435 - DNA, 80 bp, synthetic construct
  source 1..80: mol_type = other DNA
ttatcgacgtcagcaagtccatggacgacgacacgtacgtggccaacagtttccagcaccagtacatccccgcgtacggc

SEQ ID NO: 111436 - DNA, 80 bp, synthetic construct
  source 1..80: mol_type = other DNA
ctactttgtgctcagcactgtacgtgggcgacctttgcggctctgtcttccttgccgcacaattgatcaccttctcacca

SEQ ID NO: 111437 - DNA, 80 bp, synthetic construct
  source 1..80: mol_type = other DNA
gtaagtcaagttgaggcggctctgtccaacctgattaacatcaatgctgcttcagccgctggtgcccaaggcttctggta

SEQ ID NO: 111438 - DNA, 80 bp, synthetic construct
  source 1..80: mol_type = other DNA
aaaggagatagttgaccttatgtgtcacgccactttcactatgcgtctcctgtctcctgtgagagttcccaattataata

SEQ ID NO: 111439 - DNA, 80 bp, synthetic construct
  source 1..80: mol_type = other DNA
gtattccaggtcgggctcaaccaatacctggtcgggtcacagctcccatgcgagcccgagccggacgtagcagtgcttac

SEQ ID NO: 111440 - DNA, 80 bp, synthetic construct
  source 1..80: mol_type = other DNA
tccgccatgtacgtgggcgatctttgtggatccatcttcctcgtcagccagctgtttgcattctctccccgccggcattg

SEQ ID NO: 111441 - DNA, 80 bp, synthetic construct
  source 1..80: mol_type = other DNA
acagcgtgtcgcatgcccgaccccgccttttactcctttgcctactcctacttagcgtaggagtaggcatctttttactc

SEQ ID NO: 111442 - DNA, 80 bp, synthetic construct
  source 1..80: mol_type = other DNA
gcagggatcgctgaccctaccatgttggtgtgtggagacgacctggtcgtcatctcagagagtcaggggaccgaggtaga

SEQ ID NO: 111443 - DNA, 80 bp, synthetic construct
  source 1..80: mol_type = other DNA
ttaacggggtgattaagatcttgacatacccctgggacaggatagaggaagtcacgagaatggcaatgacagacacaact

SEQ ID NO: 111444 - DNA, 80 bp, synthetic construct
  source 1..80: mol_type = other DNA
agacatacaggaatggaaaccatctcaaggctggcatgactggcagcaagtccctttctgctcaaatcatttccaggaga

SEQ ID NO: 111445 - DNA, 80 bp, synthetic construct
  source 1..80: mol_type = other DNA
gccggggttaactccacggccgaggtgcgcggtggtgtagccgtgcccctcaggttggacacgcagagccttgtgggcac

SEQ ID NO: 111446 - DNA, 80 bp, synthetic construct
  source 1..80: mol_type = other DNA
gacaacccaggattgcaattgttccatctacccaggccatgtgacgggacaccgtatggcgtgggatatgatgatgaatt

SEQ ID NO: 111447 - DNA, 80 bp, synthetic construct
  source 1..80: mol_type = other DNA
ttggcacggtcctggaccaggcggagacagctggagcgcgattggtcgtgctcgctaccgccacccctccagggtctgtc

SEQ ID NO: 111448 - DNA, 80 bp, synthetic construct
  source 1..80: mol_type = other DNA
tatcgcggcacttcttagactcatctaaaaccatgcaggctatactaccaatatttttgcttctattgctcccctacgct

SEQ ID NO: 111449 - DNA, 80 bp, synthetic construct
  source 1..80: mol_type = other DNA
cgcaccgcacggggcctcgcctcgatctttgacctcggcccgcaacagaggttgcagctgatcaatacaaatggaagttg

SEQ ID NO: 111450 - DNA, 80 bp, synthetic construct
  source 1..80: mol_type = other DNA
ttgagggttatagacaaagggatcttgacactagagcattactggaacctgcagcgcggaactttttagtcacgcctcat

SEQ ID NO: 111451 - DNA, 80 bp, synthetic construct
  source 1..80: mol_type = other DNA
gttatgtggactgtttaccatggtgcaggctcaaggacacttgcgggcgctaaacatcctgcgctccaaatgtacacaaa

SEQ ID NO: 111452 - DNA, 80 bp, synthetic construct
  source 1..80: mol_type = other DNA
catacccgtcgttggcggcccagtgggcggccttgccagggcgctggcgcatggcgtcagggtcctggaggacggagtaa

SEQ ID NO: 111453 - DNA, 80 bp, synthetic construct
  source 1..80: mol_type = other DNA
cgtggttttcgtcaaacgccaggtgggcggccgcgcgggccacggcgtccacgtttcggcatcgcagtgccacggcggcg

SEQ ID NO: 111454 - DNA, 80 bp, synthetic construct
  source 1..80: mol_type = other DNA
cggcatcaaagacgacggtacaacagcgccctctgagcccgccccttctgtctgcccccccgactctgacgctgagtcct

SEQ ID NO: 111455 - DNA, 80 bp, synthetic construct
  source 1..80: mol_type = other DNA
caattctgggccaagcacatgtggaacttcatcagtggcatccagtacctcgcagggttgtccacgttgccggggaatcc

SEQ ID NO: 111456 - DNA, 80 bp, synthetic construct
  source 1..80: mol_type = other DNA
tgcttttctatactccagtcccaggaaacactccacaaagtacttgacttcgacatgtacggggtcacttactctatcac

SEQ ID NO: 111457 - DNA, 80 bp, synthetic construct
  source 1..80: mol_type = other DNA
gaagatagacagcttttatatgcgcatggctttaaaggtactaacattaagcgacgatcttggagtgtaccgcaatgacc

SEQ ID NO: 111458 - DNA, 80 bp, synthetic construct
  source 1..80: mol_type = other DNA
agtagcagccaatgagatgggactgctggaaaccacaaagaaagacttagggattggccatgtggctgttgaaaatcacc

SEQ ID NO: 111459 - DNA, 80 bp, synthetic construct
  source 1..80: mol_type = other DNA
tacctccaataattgaaagactccatggcttaggcgcgttttcactccacagttactctccaagtgaaatcaatagggtg

SEQ ID NO: 111460 - DNA, 80 bp, synthetic construct
  source 1..80: mol_type = other DNA
cacatactctatcactccgctggatctgccagctataatccaaagactccatggcttgagcgctttcacgctgcacggat

SEQ ID NO: 111461 - DNA, 80 bp, synthetic construct
  source 1..80: mol_type = other DNA
ctgcgccgtccctgaaagcaacatgtaccacccaccatgactctccagacgctgacctcataacagccaacctcctgtgg

SEQ ID NO: 111462 - DNA, 80 bp, synthetic construct
  source 1..80: mol_type = other DNA
ggccctttatgacatcacacagaaacttcccaaggcggtaatgggagaatcctacgggttccaatactcccctaaccagc

SEQ ID NO: 111463 - DNA, 80 bp, synthetic construct
  source 1..80: mol_type = other DNA
taaatcgaccgtgatgctttattgtctgtcgtctgaacgcggccggagtcgctactcgagggggcggcgtggacgggaag

SEQ ID NO: 111464 - DNA, 80 bp, synthetic construct
  source 1..80: mol_type = other DNA
agaacaaaactataggcttccacatcagtgtagtactcagaacttaactttaattaatgtaactaaatctcatgagggaa

SEQ ID NO: 111465 - DNA, 80 bp, synthetic construct
  source 1..80: mol_type = other DNA
tgggtattggcaccgtcctggaccaagcagagacggctggtgttcgcctcacggtgttggcaacggcgactccccccggg

SEQ ID NO: 111466 - DNA, 80 bp, synthetic construct
  source 1..80: mol_type = other DNA
caccgctctgcttattacagcgcttgctttggtatgtaccttactttatctcaaatacaaaagcagacgcagttttattg

SEQ ID NO: 111467 - DNA, 80 bp, synthetic construct
  source 1..80: mol_type = other DNA
tactctccaggtgagctcaatcgggtggcatcatgcctcagaaaacttggggctcccccattgagggcctggagacatcg

SEQ ID NO: 111468 - DNA, 80 bp, synthetic construct
  source 1..80: mol_type = other DNA
gcctgtttgatcagggcccgaaacagaacctgcagctggtgaacaccaacggcagctggcatattaacagcaccgcgctg

SEQ ID NO: 111469 - DNA, 80 bp, synthetic construct
  source 1..80: mol_type = other DNA
ggacgatgataaggagatctctgtgcccgcggaaattctaacgcggtctaagaagttccccgtcgccatgcctatatggg

SEQ ID NO: 111470 - DNA, 80 bp, synthetic construct
  source 1..80: mol_type = other DNA
acccggggggtcgcgaaggcggtggacttcgtgcccgttgagtccatggaaactactatgcggtctccggttttcacaga

SEQ ID NO: 111471 - DNA, 80 bp, synthetic construct
  source 1..80: mol_type = other DNA
cgtagcttttaagatcatgagcggcgagaagccctcggtagaagatgttgtgaatctcctgccagctatcctgtctcctg

SEQ ID NO: 111472 - DNA, 80 bp, synthetic construct
  source 1..80: mol_type = other DNA
cgcattcccctcgccggcgccccagaaatcggcaaccggttccagcatggctacaacctccgctcctcaggcgtcgccgg

SEQ ID NO: 111473 - DNA, 80 bp, synthetic construct
  source 1..80: mol_type = other DNA
agtgctactctcggcgctggggtcttggccctctttgggttctttaccttatcaccctggtacaagcattggatcagccg

SEQ ID NO: 111474 - DNA, 80 bp, synthetic construct
  source 1..80: mol_type = other DNA
gtggtaacaaaagacaatactagtttacaaccactactgggtacccttgttgtgttaactggcaaaggcattggcactgg

SEQ ID NO: 111475 - DNA, 80 bp, synthetic construct
  source 1..80: mol_type = other DNA
ggccatcctgcacgtctatgttccatcatttgagccacgtggcccccgggactctgtgatcatccttctagtcctgcttc

SEQ ID NO: 111476 - DNA, 80 bp, synthetic construct
  source 1..80: mol_type = other DNA
agaacagaagcgggccacgctatgaggaagatgtgaatttgggaagtggaacgcgctccgttggaaagcttacagagaag

SEQ ID NO: 111477 - DNA, 80 bp, synthetic construct
  source 1..80: mol_type = other DNA
tagggaatggttccatgacctttctcttccctggacgtccccctcaggcacggcatggagaaacagagaactcctcatgg

SEQ ID NO: 111478 - DNA, 80 bp, synthetic construct
  source 1..80: mol_type = other DNA
ctggtgaagccgcacttaccacgtcagaccgacccactctcccaaccctaacagcccaaggaagaccaacagtttccaac

SEQ ID NO: 111479 - DNA, 80 bp, synthetic construct
  source 1..80: mol_type = other DNA
tgcactttggacgggcgcctcgttggcactaccccagtttcactctctcacgttgccaagatcaggggcacttctaatgg

SEQ ID NO: 111480 - DNA, 80 bp, synthetic construct
  source 1..80: mol_type = other DNA
gatatccgcccttacagagagactctacttgggcggccccatgtacaacagcaaaggggacctctgcgggtatcggaggt

SEQ ID NO: 111481 - DNA, 80 bp, synthetic construct
  source 1..80: mol_type = other DNA
gttccgaatgccaccacgcctctaaccggattccgcgatcacgtggatcttatggtgggggctgctactctctgttcggc

SEQ ID NO: 111482 - DNA, 80 bp, synthetic construct
  source 1..80: mol_type = other DNA
tgcaactacccgttcagcaagtactgcctgctgtatttgggtaagagtattttcaaagtcatccatatctacaaagcggt

SEQ ID NO: 111483 - DNA, 80 bp, synthetic construct
  source 1..80: mol_type = other DNA
ccatccccccccgcaaggtcccgcgggtcgcgtgcggcggtcgcggcagagggacctgcctcgtcggcgaggtggcgctg

SEQ ID NO: 111484 - DNA, 80 bp, synthetic construct
  source 1..80: mol_type = other DNA
cttctcaactgtcagcgccgtctctcaaggctacttgcaccacggtcagagatcatccggatgcagagctcattactgcc

SEQ ID NO: 111485 - DNA, 80 bp, synthetic construct
  source 1..80: mol_type = other DNA
ctgcctgacaacgggcagcgtggtcattgtgggtaggatcgtcttgtccgggaagccggctatcattcctgacagagagg

SEQ ID NO: 111486 - DNA, 80 bp, synthetic construct
  source 1..80: mol_type = other DNA
agtcccctggacctcccggccataattgagagactacatgggcttgaagccttttcactgcactcatactctccccacga

SEQ ID NO: 111487 - DNA, 80 bp, synthetic construct
  source 1..80: mol_type = other DNA
ccatcttcatgaccgccacgccaccaggaacccatgacgcatttccggactccaactcaccaattatggacaccgaagtg

SEQ ID NO: 111488 - DNA, 80 bp, synthetic construct
  source 1..80: mol_type = other DNA
acatcacggcagagacggccaagcgcaggctagatcgagggtctccgccctctctagctagctcctcggccagccaactc

SEQ ID NO: 111489 - DNA, 80 bp, synthetic construct
  source 1..80: mol_type = other DNA
aactggccaactacctagcctatcactcagaccttatgacagactccagcggtgagggtctaatggagtgtcattgtcgc

SEQ ID NO: 111490 - DNA, 80 bp, synthetic construct
  source 1..80: mol_type = other DNA
tatgccaacggaagcggcctcgacgaacgcccctactgctggcactaccctccaagaccttgtggcattgtgcccgcaaa

SEQ ID NO: 111491 - DNA, 80 bp, synthetic construct
  source 1..80: mol_type = other DNA
ggagacgatttggtcgtggtctctgagagtgctggtgtttccgaggacgaagctgccctgcgagccttcacggaggctat

SEQ ID NO: 111492 - DNA, 80 bp, synthetic construct
  source 1..80: mol_type = other DNA
tgggggtcgtatgcggctggagggtcgcggacggagggtccctggtggtcgcaacgtaggcgtggcttctgtggtgatgc

SEQ ID NO: 111493 - DNA, 80 bp, synthetic construct
  source 1..80: mol_type = other DNA
cgccatcctcttcatctgtgtggcttggcacgtcaggggtcggtttcccgctgctgcgacttacgcagcttgccagatgt

SEQ ID NO: 111494 - DNA, 80 bp, synthetic construct
  source 1..80: mol_type = other DNA
attgaccgcgggggttgacgctcagacgcgtaccgttggtggccaagcggcaagcgtggtttcctccttgacgagtatgt

SEQ ID NO: 111495 - DNA, 80 bp, synthetic construct
  source 1..80: mol_type = other DNA
gtggtgcaggtgtggagaggtcgagcgataggggcggcccgggagagaagagagggtccgcaaaacccactggtgatgcg

SEQ ID NO: 111496 - DNA, 80 bp, synthetic construct
  source 1..80: mol_type = other DNA
ggtcctaggtctcctccaatccaccgccaaacaggcagaggaacttaaacctgcagtccacgccacgtggccaaagcttg

SEQ ID NO: 111497 - DNA, 80 bp, synthetic construct
  source 1..80: mol_type = other DNA
ccgggcctcgttggtgcagcaacgtctcgcaccggacctttcccatcaatgctaccacgacaggccctagcgtgcctatc

SEQ ID NO: 111498 - DNA, 80 bp, synthetic construct
  source 1..80: mol_type = other DNA
tcccaaccggaggcatccaacgcggaggccggggcccttgtcaacgccagcagcgcagcacacgtggacgttgacacggc

SEQ ID NO: 111499 - DNA, 80 bp, synthetic construct
  source 1..80: mol_type = other DNA
ctgcgggggccctccatgtaagatccggcccccgggcgctgagtccaactcgtccctcacttgccccacggactgcttca

SEQ ID NO: 111500 - DNA, 80 bp, synthetic construct
  source 1..80: mol_type = other DNA
ccattgacatcacaagaaaagagatgagatgtggaagtggcatcttcgtgcacaacgacgtggaagcctgggtggatagg

SEQ ID NO: 111501 - DNA, 80 bp, synthetic construct
  source 1..80: mol_type = other DNA
ggtgtccggcctggaggctgagctgacccagagagcccacaaagttttcttctcggcaatggtacgcaatcccatggtgg

SEQ ID NO: 111502 - DNA, 80 bp, synthetic construct
  source 1..80: mol_type = other DNA
tgttctggggcttgctagtcatctgttgcgcttggcactataaggggcggattgtgcctatgaccgtatatacggtcctg

SEQ ID NO: 111503 - DNA, 80 bp, synthetic construct
  source 1..80: mol_type = other DNA
agcgagacggacgagcgggaaccatcgataccatcagagtacctgcttccaaagaaaaggtttccccccgcactgccacc

SEQ ID NO: 111504 - DNA, 80 bp, synthetic construct
  source 1..80: mol_type = other DNA
tagaaagaaagtgcgaacggtggttggacacatgccaaaacatgaaaacccatacagtgaaaaaacgggaagtgcgaatg

SEQ ID NO: 111505 - DNA, 80 bp, synthetic construct
  source 1..80: mol_type = other DNA
tatcatggccaaaatgaggtgttctgtgtcgatcccgctaaaggcgggaaaaagccagctcgcctcattgtataccccga

SEQ ID NO: 111506 - DNA, 80 bp, synthetic construct
  source 1..80: mol_type = other DNA
agggcccatgttcaacagcaagggtcaaacctgcggttacagacgttgccgcgccagcggggtgctaaccactagcatgg

SEQ ID NO: 111507 - DNA, 80 bp, synthetic construct
  source 1..80: mol_type = other DNA
atcctattggcttgcctattccacccgcagttagggtttgaggtaactaagatcttactggccttgctcggcccactcta

SEQ ID NO: 111508 - DNA, 80 bp, synthetic construct
  source 1..80: mol_type = other DNA
ccgtctttttccgttggttgttcatcagagatctgctctctaataaaaaactgttagtctacgtggaccgacaagaacag

SEQ ID NO: 111509 - DNA, 80 bp, synthetic construct
  source 1..80: mol_type = other DNA
gcccatcaccagtggatgaccactgaagatatgcttaaagtgtggaacagagtgtggatagaagataaccccaatatgac

SEQ ID NO: 111510 - DNA, 80 bp, synthetic construct
  source 1..80: mol_type = other DNA
ctgcgctacggacgctctcatgacaggatataccggcgacttcgacagcgtaatcgactgcaacgttgcagtgacgcaag

SEQ ID NO: 111511 - DNA, 80 bp, synthetic construct
  source 1..80: mol_type = other DNA
tgcgttacgtgcaacagtctgtcagtttatacttaatgcgcgaggggatgaccccatcctcggctctggatatgacggcc

SEQ ID NO: 111512 - DNA, 80 bp, synthetic construct
  source 1..80: mol_type = other DNA
ggcagtggaaagagcaccaaggtccctgtcgcgtatgccgcccaggggtacaaagtactagtgcttaacccctcggtagc

SEQ ID NO: 111513 - DNA, 80 bp, synthetic construct
  source 1..80: mol_type = other DNA
aaattccctccagctctcccaatatgggccaggcctgactacaatccacctcttatacaagcatggcaaatgcccgggta

SEQ ID NO: 111514 - DNA, 80 bp, synthetic construct
  source 1..80: mol_type = other DNA
caacctcgaggaccgtgatcgcagtgaacaacatccactgctccactcaaccaccgagctcgctatactaccatgctcct

SEQ ID NO: 111515 - DNA, 80 bp, synthetic construct
  source 1..80: mol_type = other DNA
gggaaagccatcccccttgccaacatcaaaggggggaggcacctgatcttttgtcactcaaagaagaaatgtgatgagct

SEQ ID NO: 111516 - DNA, 80 bp, synthetic construct
  source 1..80: mol_type = other DNA
cgcagtgggagccttcgaaaggatggaatgattggcagcaagtgccgttctgttcacaccatttccaccagctgatcatg

SEQ ID NO: 111517 - DNA, 80 bp, synthetic construct
  source 1..80: mol_type = other DNA
tttaatcatttgagtaatagaaaagtcctctaaataagtcactaggaccccagggaccacaatgtggtagctcacaccgc

SEQ ID NO: 111518 - DNA, 80 bp, synthetic construct
  source 1..80: mol_type = other DNA
cgtcgcggctgcgcttgcacatggtgtgagggcaatcgaagacgggatcaattatgcaacaggaaatcttcccggttgct

SEQ ID NO: 111519 - DNA, 80 bp, synthetic construct
  source 1..80: mol_type = other DNA
gagccttcacggaggctatgaccaggtactctgccccccccggagatccgcctcaaccagagtacgaccttgagcacata

SEQ ID NO: 111520 - DNA, 80 bp, synthetic construct
  source 1..80: mol_type = other DNA
ttgcggcttcgccgatctcatgggatacatcccgctcgtaggcgcccccgtaggcggcgtcgccagagctttggcacatg

SEQ ID NO: 111521 - DNA, 80 bp, synthetic construct
  source 1..80: mol_type = other DNA
ccgtggaatcaccagtttattcaatctgggcgcccaacaaaaattgcagctggttaataccaatggctcgtggcacatca

SEQ ID NO: 111522 - DNA, 80 bp, synthetic construct
  source 1..80: mol_type = other DNA
ttaggaaggatggagaagaagacctggaagggacctcagtacgaagaagacgtgaacttgggaagcggaacgagagcagt

SEQ ID NO: 111523 - DNA, 80 bp, synthetic construct
  source 1..80: mol_type = other DNA
gacgtggaggatgttgtgtgctgctcaatgtcttattcctggacaggcgcacttatcaccccgtgtgccgcggaagaaca

SEQ ID NO: 111524 - DNA, 80 bp, synthetic construct
  source 1..80: mol_type = other DNA
gtccagagaatgcaatagtagtacggatagctgtgactccggtccttctaacacacctcctgagatacacccggtggtcc

SEQ ID NO: 111525 - DNA, 80 bp, synthetic construct
  source 1..80: mol_type = other DNA
aggctacaagtcctcgatgaccattacagagaagttgtggacgagatgaagcgactagcctccaaagttaaagccagact

SEQ ID NO: 111526 - DNA, 80 bp, synthetic construct
  source 1..80: mol_type = other DNA
gtcaggcttagagcgtatttcaacacgcccggcctacccgtgtgtcaagaccatcttgaattttgggaggcagttttcac

SEQ ID NO: 111527 - DNA, 80 bp, synthetic construct
  source 1..80: mol_type = other DNA
ccttgtgagcccgagcctgatgtgacagtgttaacatctatgctcacagacccctctcacatcactgcggagacagcagc

SEQ ID NO: 111528 - DNA, 80 bp, synthetic construct
  source 1..80: mol_type = other DNA
atgaccagatactcggcccccccaggagacgaaccacgcccagaatacgacctggagctgataacatcatgctcgtcaaa

SEQ ID NO: 111529 - DNA, 80 bp, synthetic construct
  source 1..80: mol_type = other DNA
ttgtattatttgaacacactgattttgcaggtttaaaccgtgaatattaaaaagctctgtaagggcgccctccaccgcca

SEQ ID NO: 111530 - DNA, 80 bp, synthetic construct
  source 1..80: mol_type = other DNA
gcagatcgttggtggagtatatgtgctgccgcgcaggggcccacgattgggtgtgcgcgcagtgcgtaagacttccgagc

SEQ ID NO: 111531 - DNA, 80 bp, synthetic construct
  source 1..80: mol_type = other DNA
ggtggccaagcccccccggcaccaggtctcttgaaccatgcacctgcggggcttcggacctctaccttgtgacaagaaat

SEQ ID NO: 111532 - DNA, 80 bp, synthetic construct
  source 1..80: mol_type = other DNA
gccttgcgtgagtgtcctttcgacccccccccccctccctcccccgggtcttgctaggtcgcgatctggggtcgcaatga

SEQ ID NO: 111533 - DNA, 80 bp, synthetic construct
  source 1..80: mol_type = other DNA
agatttctagccatacccccaacagcaggaattttggctagatggggctcatttaagaagaatggagcgatcaaagtgct

SEQ ID NO: 111534 - DNA, 80 bp, synthetic construct
  source 1..80: mol_type = other DNA
agacctgactacaatccacctctggtggaaaactggaaggccccaggctatgagccccctagagtattagggtgcgcgct

SEQ ID NO: 111535 - DNA, 80 bp, synthetic construct
  source 1..80: mol_type = other DNA
gagggggagagccacacatgatagttagtaagcaggaaagaggaaagtcactcttgtttaagacctctgcgggcgtcaat

SEQ ID NO: 111536 - DNA, 80 bp, synthetic construct
  source 1..80: mol_type = other DNA
gtgaggacctgtcatgccccactgattgcttcagaaaacatcccgaagctacttacaccaaatgtggggctgggccgtgg

SEQ ID NO: 111537 - DNA, 80 bp, synthetic construct
  source 1..80: mol_type = other DNA
gtgggaagtatgtacaggctgtgctgcttagggtgggtgcgtggacaggcacctatgtatatgaccatctctcccccctt

SEQ ID NO: 111538 - DNA, 80 bp, synthetic construct
  source 1..80: mol_type = other DNA
gccggccaggaccgtgtgcggcccagtgtactgtttcactcctagccccgtggtggtgtggacgaccgacaagttgggcg

SEQ ID NO: 111539 - DNA, 80 bp, synthetic construct
  source 1..80: mol_type = other DNA
catctgcccttgcggtgcggagcttgccggccacattaagaacggttccatgcaagtcttgggtcccaagacttgcatgc

SEQ ID NO: 111540 - DNA, 80 bp, synthetic construct
  source 1..80: mol_type = other DNA
acaacagcctagaagaggaggaggaaggtatcgaggacggagcgaccgccacaaaaccgtcgctttcaaccgaggcctcc

SEQ ID NO: 111541 - DNA, 80 bp, synthetic construct
  source 1..80: mol_type = other DNA
agatgtccgagccctatcccgcaaggccgttaaccacatcaactccgtgtgggaggacttgctggaggactctgtgacac

SEQ ID NO: 111542 - DNA, 80 bp, synthetic construct
  source 1..80: mol_type = other DNA
attggtccgctccgtgcagcacgtcgtggctgagggacatctgggactgggtttgcaccgtgttatctgactttaaggca

SEQ ID NO: 111543 - DNA, 80 bp, synthetic construct
  source 1..80: mol_type = other DNA
gacaaggtcagggaagctgatgtggccgaaagaatagctgccctcaagacccaatatggtgattcttggcatgtggacaa

SEQ ID NO: 111544 - DNA, 80 bp, synthetic construct
  source 1..80: mol_type = other DNA
gacgtgcattgcagttggcatggtcacactgtacttaggagtcatggttcaagcggactcgggatgtgtaatcaactgga

SEQ ID NO: 111545 - DNA, 80 bp, synthetic construct
  source 1..80: mol_type = other DNA
tgatgtgctacgatacgtcatcctcgtaggggcggcatttgctgagtcaaattctggagtggatgtcgtccacctggctt

SEQ ID NO: 111546 - DNA, 80 bp, synthetic construct
  source 1..80: mol_type = other DNA
gggcagcattggcctcgggagagtcctggttgacatcttggctggctatggggcaggggtatccggtgccctcgtcgcct

SEQ ID NO: 111547 - DNA, 80 bp, synthetic construct
  source 1..80: mol_type = other DNA
gactcactggaggtgaagggagagacggaagaggcataattattccagacggttgtaaagcgagccaaagtgcaagtcac

SEQ ID NO: 111548 - DNA, 80 bp, synthetic construct
  source 1..80: mol_type = other DNA
ataagaacaggggtcagaacagtcaccacaggagctcccattacatattccacatatggaaagttcctagccgatgggtg

SEQ ID NO: 111549 - DNA, 80 bp, synthetic construct
  source 1..80: mol_type = other DNA
cgacgccgccgaggcggtccgggcccacatcacgaccaactacggcgggacgcgggccgtggcgcggctggaccggtttt

SEQ ID NO: 111550 - DNA, 80 bp, synthetic construct
  source 1..80: mol_type = other DNA
cttatttgatttgagtttaggtccccatcttaaccccttcttattacatctgtcacaaatgtataatggcttgggttgga

SEQ ID NO: 111551 - DNA, 80 bp, synthetic construct
  source 1..80: mol_type = other DNA
tgggtcctaaaacatgcagcaatgtctggcacggcacatttcccatcaacgccaccaccaccggccccagcgtgcctatc

SEQ ID NO: 111552 - DNA, 80 bp, synthetic construct
  source 1..80: mol_type = other DNA
gcacgtgtccgggaccaggcgctccaagacggccccggcccagggctctgagggagcggccaccaccagcgcgtccagtc

SEQ ID NO: 111553 - DNA, 80 bp, synthetic construct
  source 1..80: mol_type = other DNA
tggcagcggtgtccgtttctccattgctcttaacatcctcacaacagaaagcggattggataccactggcattgacgata

SEQ ID NO: 111554 - DNA, 80 bp, synthetic construct
  source 1..80: mol_type = other DNA
agcgttgccccaacaggcttacgctttggatgcagctgagcagggccagattggactcgtactgctggtgatagtatgtt

SEQ ID NO: 111555 - DNA, 80 bp, synthetic construct
  source 1..80: mol_type = other DNA
cacgcagccagcgtagagggcgaacgggtaggggtaggttgggcatatataggtatgtctcctctggagagcgagcttcc

SEQ ID NO: 111556 - DNA, 80 bp, synthetic construct
  source 1..80: mol_type = other DNA
ggccgctctcgacgatggccaccagcggacagtcggagttgtacgtgaggtacacgcccggcgggtagcggtacagacct

SEQ ID NO: 111557 - DNA, 80 bp, synthetic construct
  source 1..80: mol_type = other DNA
catgcttttccaccagacagtggacataaagttcatcaatgccaaccagggaaactgaaccttgagggagggcgagtcat

SEQ ID NO: 111558 - DNA, 80 bp, synthetic construct
  source 1..80: mol_type = other DNA
tcagaagaccccaacccttcctctgatccaggaatctaattctacctccccagcaccacactttactagccttcccgaaa

SEQ ID NO: 111559 - DNA, 80 bp, synthetic construct
  source 1..80: mol_type = other DNA
tttgccagcgtcgatgcggacacctacgtcaccggggggactgttgcctctgccacgtctaggcttgtcagatttttcga

SEQ ID NO: 111560 - DNA, 80 bp, synthetic construct
  source 1..80: mol_type = other DNA
gaagttgaagtcttcaccaaaaccggagacaggaaaattctcaggccaaagtggatggatgcgcgggtttgttgtgacta

SEQ ID NO: 111561 - DNA, 80 bp, synthetic construct
  source 1..80: mol_type = other DNA
ctcccatgtcagattgggccgctacgggcctccgcgatttggcggtggccctagagccagttgtgttctcgcccatggag

SEQ ID NO: 111562 - DNA, 80 bp, synthetic construct
  source 1..80: mol_type = other DNA
tggcctaaggtcgaacagttctggcaaaaacacctgtggaactttgtcagcggggtacagtatctcgccggcttgtcaac

SEQ ID NO: 111563 - DNA, 80 bp, synthetic construct
  source 1..80: mol_type = other DNA
gggtataagttagggtgtaagtgtgacaatcaaaacctaacgctaatcaatgtaactaaactttatgagggagtttacta

SEQ ID NO: 111564 - DNA, 80 bp, synthetic construct
  source 1..80: mol_type = other DNA
ggacgcgtcacgcgagattcacgaagattgcggcgcatatgcctcgacttttatctaatgggtcgcaccagacagcgtcc

SEQ ID NO: 111565 - DNA, 80 bp, synthetic construct
  source 1..80: mol_type = other DNA
ccagccagcatagcggccagagggtacatctcaacccgagtgggtatgggtgaagcagctgcgatctttatgacagccac

SEQ ID NO: 111566 - DNA, 80 bp, synthetic construct
  source 1..80: mol_type = other DNA
tcttggtcattacaacctccttgttcccacagtgaaaagtctattcgttttttatagtgtggattaggaagagcgaaggt

SEQ ID NO: 111567 - DNA, 80 bp, synthetic construct
  source 1..80: mol_type = other DNA
accccacaaccattttggggataggcactgtcctagaccaggccgagacggctggggtacgcctcactgttctggccacg

SEQ ID NO: 111568 - DNA, 80 bp, synthetic construct
  source 1..80: mol_type = other DNA
gggggcccttgtggctttcaagatcatgagcggggaggcccccaccgccgaggatctagtcaaccttctgcctgccatcc

SEQ ID NO: 111569 - DNA, 80 bp, synthetic construct
  source 1..80: mol_type = other DNA
aagaagctctcatctccttttcacaaggtggtaacgggtacttcccgtacggtgccaatctgtacggataccgtctgttg

SEQ ID NO: 111570 - DNA, 80 bp, synthetic construct
  source 1..80: mol_type = other DNA
atcccactagcacgagctgcttgggaaaccgctcggcacactccagtaaattcatggctgggtaacatcatcatgtacgc

SEQ ID NO: 111571 - DNA, 80 bp, synthetic construct
  source 1..80: mol_type = other DNA
actgggctaaggttttggttgtgctactgctcttcgctggcgtcgatgcaaccacccaagtcacaggtggcaccgcgggc

SEQ ID NO: 111572 - DNA, 80 bp, synthetic construct
  source 1..80: mol_type = other DNA
acgccccgtcgaatatgcgcatgttggtggtggacgcggtgttggcgcccgcgtcgggcgccgccgagcagagcagcgcc

SEQ ID NO: 111573 - DNA, 80 bp, synthetic construct
  source 1..80: mol_type = other DNA
acgagccgccgccgccgcccccgaccgccctggccgcccagatgcgccagcacggccagggcgtacgcggtgtgaaagaa

SEQ ID NO: 111574 - DNA, 80 bp, synthetic construct
  source 1..80: mol_type = other DNA
gaagattctgccacagataataaaggaagctatcaacaagagactcaggactgtggtgttggctccaactagggtcgtag

SEQ ID NO: 111575 - DNA, 80 bp, synthetic construct
  source 1..80: mol_type = other DNA
tggcgacacctttgccacacgggcggaggagaagcgcgctgaggccgaggcagcggccgaagctgccgcccccgctgcgg

SEQ ID NO: 111576 - DNA, 80 bp, synthetic construct
  source 1..80: mol_type = other DNA
ggagagcaccgacggcttgcgcgttctatcattgaactcacctataggcacaaagtcgtgaaggtcatgagaccagcagc

SEQ ID NO: 111577 - DNA, 80 bp, synthetic construct
  source 1..80: mol_type = other DNA
ttgggcctggttacctccttaggagcgtcctgacaaatgtgccatacttcgtcagagcgcaagttttgttgagaatctgc

SEQ ID NO: 111578 - DNA, 80 bp, synthetic construct
  source 1..80: mol_type = other DNA
cctggccgtccgcagctacgcggggtgttccagaacaaaccccccaccgcgctgttcggccgaggctcacatggagcccg

SEQ ID NO: 111579 - DNA, 80 bp, synthetic construct
  source 1..80: mol_type = other DNA
gcaatggcggcttgcaaagccgcgggcattgttgcccccacaatgttggtgtgcggcgacgacctagttgtcatctcaga

SEQ ID NO: 111580 - DNA, 80 bp, synthetic construct
  source 1..80: mol_type = other DNA
gcatattaccggggccttgacgtgtccgtgatacccaccaacggagacgtcgtcgtcgtggccacagatgccttaatgac

SEQ ID NO: 111581 - DNA, 80 bp, synthetic construct
  source 1..80: mol_type = other DNA
ggattaacaacaattaacacagtgcgagctgtttcttagcacgaagatctcgatgtctaagaaaccaggagggcccggca

SEQ ID NO: 111582 - DNA, 80 bp, synthetic construct
  source 1..80: mol_type = other DNA
aagccatacccgcttctacaaggcgtttgcccgagaggtgcgggagttcaacgccaccaggatttgcggaacgctgctga

SEQ ID NO: 111583 - DNA, 80 bp, synthetic construct
  source 1..80: mol_type = other DNA
aaaacccgtctttccttgtctgtggagacgatttggtggtgatatctgagagttgcggtgtcgaggaagacagaacagcc

SEQ ID NO: 111584 - DNA, 80 bp, synthetic construct
  source 1..80: mol_type = other DNA
gcacgcgccccgtgttttgttgaggcgggacactcggtcgtgtttcgcgagccgtagctgccggcccaatgggccgcggt

SEQ ID NO: 111585 - DNA, 80 bp, synthetic construct
  source 1..80: mol_type = other DNA
ttggccactactcttactccttcttttcctgcctcacagggccctggccctggactctagcgaggtcgggtctgtgggtt

SEQ ID NO: 111586 - DNA, 80 bp, synthetic construct
  source 1..80: mol_type = other DNA
gaagggcatcttctgcctggtcaaacaggcaaagatcacctacgagctcgtgtccagcggcaagcagcatcgcctcgcct

SEQ ID NO: 111587 - DNA, 80 bp, synthetic construct
  source 1..80: mol_type = other DNA
tttcttagctctgggtctcatcaccatcttcaccctcaccccggcctacaagtatcttcttgtaaacgcgctttggtgga

SEQ ID NO: 111588 - DNA, 80 bp, synthetic construct
  source 1..80: mol_type = other DNA
ttaaagtcggccgtcgccacgttgcacgccgccgcgtagacgggctcgtgtccccccgcgtcaatccggcagtctcggtg

SEQ ID NO: 111589 - DNA, 80 bp, synthetic construct
  source 1..80: mol_type = other DNA
cggtctactgtttcactcccagccccgttgtcgtgggtaccactgacaagcagggtgtgcccacctacagttggagggaa

SEQ ID NO: 111590 - DNA, 80 bp, synthetic construct
  source 1..80: mol_type = other DNA
agatatgtggtgctagtagctgcggctttcgcggaggccaatagtggaggagatgttctgcacctcgctttgatagccgt

SEQ ID NO: 111591 - DNA, 80 bp, synthetic construct
  source 1..80: mol_type = other DNA
actaggtcgttgaccccgtgtacatgcggggccagcgacctgtatctggtaaccaggaacgctgacgtcattccggcgag

SEQ ID NO: 111592 - DNA, 80 bp, synthetic construct
  source 1..80: mol_type = other DNA
ccaagtcagcacaagcctagcagtaaagataggccaaatccaaaagtaaaaaatcctcagaaacaaaacacacacaagac

SEQ ID NO: 111593 - DNA, 80 bp, synthetic construct
  source 1..80: mol_type = other DNA
caggtcctcgataagcactatcaggacgtgctcaaggagatgaaggcgaaggcatccacagtgaaggccaacatgctatc

SEQ ID NO: 111594 - DNA, 80 bp, synthetic construct
  source 1..80: mol_type = other DNA
ctgtcgttgttgcagcgagaacccgaggggcgcgatgaagccgcggatgttgtgggtgcggccggcgcgtagaacgcact

SEQ ID NO: 111595 - DNA, 80 bp, synthetic construct
  source 1..80: mol_type = other DNA
cagcggcggacagcggctggaatcatgaaaaacgctgtagtggatggcatcgtggccacggacgtcccagaattagagcg

SEQ ID NO: 111596 - DNA, 80 bp, synthetic construct
  source 1..80: mol_type = other DNA
attccatctagtgcttcaccctggagttggccggatcttgacctgaagccaggagctgcctggacagtgtacgttggcat

SEQ ID NO: 111597 - DNA, 80 bp, synthetic construct
  source 1..80: mol_type = other DNA
gctacggtgtgcgcccgagctaaagccccccctccatcatgggacaatatgtggaagtgtctcatacggctgaagcccgt

SEQ ID NO: 111598 - DNA, 80 bp, synthetic construct
  source 1..80: mol_type = other DNA
tcgctcatgcgattccacaacaaggtgtactccacaacctcgaggagtgcttctctgagggcaaagaaggtgacctttga

SEQ ID NO: 111599 - DNA, 80 bp, synthetic construct
  source 1..80: mol_type = other DNA
aaacaaagccgtaaggcccccgcagcccgggccgggaggaggtgatgcaaaccccggcgaaggactagaggttagaggag

SEQ ID NO: 111600 - DNA, 80 bp, synthetic construct
  source 1..80: mol_type = other DNA
cggcctggggcccgagcggggggggcacaccagacaccaaagagtggggcgctggctctgagagtttgtgaggggccggg

SEQ ID NO: 111601 - DNA, 80 bp, synthetic construct
  source 1..80: mol_type = other DNA
agggtctcaagaaggggccatgcacacggcactcacaggggccacagaaatccagatgtcatcaggaaacttactgttca

SEQ ID NO: 111602 - DNA, 80 bp, synthetic construct
  source 1..80: mol_type = other DNA
ttgagcatgctacaacaaaagcacccacaactgctaatacagccacaaccacacagcctacaactgtgcccactacacca

SEQ ID NO: 111603 - DNA, 80 bp, synthetic construct
  source 1..80: mol_type = other DNA
tctgcgggccggtgttctgcttcactcccagccccgtggtggtgggggtgactgacatcagtggtaatcccaccttccac

SEQ ID NO: 111604 - DNA, 80 bp, synthetic construct
  source 1..80: mol_type = other DNA
agagcgtgagccttaacctgatgcgcgacggggtaacgcccagcgtggcgctggacatgaccgcgcgcaacatggaaccg

SEQ ID NO: 111605 - DNA, 80 bp, synthetic construct
  source 1..80: mol_type = other DNA
gcactgccgccagcaccaggtccatggccgtaacgcgcgccgcggaggtgcggtgtgtggcggcggccggcacggcgacg

SEQ ID NO: 111606 - DNA, 80 bp, synthetic construct
  source 1..80: mol_type = other DNA
gtcaggagcgctcgtcgcctttaaaatcatgagcggcgagaccccatctgctgaggatatggtcaacttgcttccagcgt

SEQ ID NO: 111607 - DNA, 80 bp, synthetic construct
  source 1..80: mol_type = other DNA
gggagcggatggcatcgtgcaggaacatcagggactttgatcagggatggtgccccatcacgtatgccaacgtgacgggc

SEQ ID NO: 111608 - DNA, 80 bp, synthetic construct
  source 1..80: mol_type = other DNA
gggccccctcttacccctaatcccgggtagctgtgaaaggtccgtgagccgcttgactgcagagagtgctgatactggcc

SEQ ID NO: 111609 - DNA, 80 bp, synthetic construct
  source 1..80: mol_type = other DNA
agagccacacatgatagttagcaagcaggaaagaggaaagtcactcttgtttaagacctctgcaggtgtcaacatgtgca

SEQ ID NO: 111610 - DNA, 80 bp, synthetic construct
  source 1..80: mol_type = other DNA
ggtggtacatagggtgaaggaagattacagagaggaatttgaaaacatattggccgactgtccagggcttttagcttcat

SEQ ID NO: 111611 - DNA, 80 bp, synthetic construct
  source 1..80: mol_type = other DNA
ctctattgggaagatgttcgaggccactgctagaggtgcaaggcgcatggccatcttgggagacacagcttgggactttg

SEQ ID NO: 111612 - DNA, 80 bp, synthetic construct
  source 1..80: mol_type = other DNA
ggtagtaattctggactctttcgacccgcttcgagcggaggaggatgatagggaggtatccgttgcagcggagatcctgc

SEQ ID NO: 111613 - DNA, 80 bp, synthetic construct
  source 1..80: mol_type = other DNA
gccacggcgtccacgtttcggcatcgcagtgccacggcggcgggtcccacgaccgcctcgaacaggaggcggttgaggtg

SEQ ID NO: 111614 - DNA, 80 bp, synthetic construct
  source 1..80: mol_type = other DNA
tgagctacaaagttatcagagcctccgacgcttgctggagttggcttctgccagaacttccagctgttggaggtttattt

SEQ ID NO: 111615 - DNA, 80 bp, synthetic construct
  source 1..80: mol_type = other DNA
aggaacttgggtttcagctaccctggagcaagacaagtgtgtcactgttatggcccctgacaagccttcattggacatct

SEQ ID NO: 111616 - DNA, 80 bp, synthetic construct
  source 1..80: mol_type = other DNA
tcggtggggttgagcaccggcttgaagctgcgtgtaactggaccagggaggaaccctgcgatctacaccatcgagatcgc

SEQ ID NO: 111617 - DNA, 80 bp, synthetic construct
  source 1..80: mol_type = other DNA
tcgtgctgaagagtcggtatatcaggcatgtaaactggaccctaccgccaggaaagccatatcacacctcaccgaacggc

SEQ ID NO: 111618 - DNA, 80 bp, synthetic construct
  source 1..80: mol_type = other DNA
atccctgagcccaattacaagagggctctttggagggtagcagcagaggaatacgtggaggttgtaagggtagtggactg

SEQ ID NO: 111619 - DNA, 80 bp, synthetic construct
  source 1..80: mol_type = other DNA
ctcggccgtcccggggcaggcggttgtcgggagtggaggcgcggcgcccaccccgtgtgccgcgcctggcgtctcctctg

SEQ ID NO: 111620 - DNA, 80 bp, synthetic construct
  source 1..80: mol_type = other DNA
atgggtattctccaggcgaactcaatagagtggctgcatgcctcaggaaacttggggcgccacccttgagagcctggaga

SEQ ID NO: 111621 - DNA, 80 bp, synthetic construct
  source 1..80: mol_type = other DNA
gtgagtttgtggacccaaagccctcagagacaacgcgacaggccagtatggaccgtgatacttttatttattaactcaca

SEQ ID NO: 111622 - DNA, 80 bp, synthetic construct
  source 1..80: mol_type = other DNA
aaagacatacttgcaccctcagaaatgcttgttggtgactacatcatccccgttaaggaatgcttgccatcaagtttccc

SEQ ID NO: 111623 - DNA, 80 bp, synthetic construct
  source 1..80: mol_type = other DNA
ccgcatcggggcgcgagatgcccgagggtatcgcgatgtcagtttcaaagccgtccgccagcatggcgccgatacacgcg

SEQ ID NO: 111624 - DNA, 80 bp, synthetic construct
  source 1..80: mol_type = other DNA
ctctcaatacctactccaggaggctatgacgcgtgtgccgtactacgtacgcgctcatgctctgctacgagcatgcatgt

SEQ ID NO: 111625 - DNA, 80 bp, synthetic construct
  source 1..80: mol_type = other DNA
cacctatctgtatgaccacctgtcccccatacaggactgggctgccgagggtctcaaaggactggcggtggccacggagc

SEQ ID NO: 111626 - DNA, 80 bp, synthetic construct
  source 1..80: mol_type = other DNA
gcggggacccgggcgagctggccctggacccagacacggtgcgtgcggccctgcctccggagaaccccctgccgatcaac

SEQ ID NO: 111627 - DNA, 80 bp, synthetic construct
  source 1..80: mol_type = other DNA
tacgatcccttggcctaaatgccgtcgcattctataggggtgtcgatgtgtcggtcatcccgacgtcaggagatgtagtc

SEQ ID NO: 111628 - DNA, 80 bp, synthetic construct
  source 1..80: mol_type = other DNA
acaatatgatgagatggaagagtgctccaaagccattccataccttgcagagggggtacaaatagcggagcaattcaagc

SEQ ID NO: 111629 - DNA, 80 bp, synthetic construct
  source 1..80: mol_type = other DNA
ggcagagatatcaggaagcagtccaatcctgtcaataacaatatcagaagatggtagcatgtcgataaaaaatgaagagg

SEQ ID NO: 111630 - DNA, 80 bp, synthetic construct
  source 1..80: mol_type = other DNA
gggaaccaaatagctatcaacgcaggtccatgtggtctcacgtttaataaccgcaagcttcaggtaaaattgggcgcggg

SEQ ID NO: 111631 - DNA, 80 bp, synthetic construct
  source 1..80: mol_type = other DNA
gccagccagctctccgccccatccctcaaggctacttgcaccactcaccacgactcccctgatgccgacctaattgaagc

SEQ ID NO: 111632 - DNA, 80 bp, synthetic construct
  source 1..80: mol_type = other DNA
aaggggcactctggtgagtcaatacatttacaaaataaaggaaaataggaaatcaaacaaggcaagaagtcaggccggat

SEQ ID NO: 111633 - DNA, 80 bp, synthetic construct
  source 1..80: mol_type = other DNA
gccggcttgtcttccttggccccgcagatgatgtgaagagcaaaggatggagcctgcttgcccccatcaccgcctacgca

SEQ ID NO: 111634 - DNA, 80 bp, synthetic construct
  source 1..80: mol_type = other DNA
atcccgaagatgacaacggtcgcctccggagccctgatggaatttaacagccagatcaaacattatgcgattttccaggc

SEQ ID NO: 111635 - DNA, 80 bp, synthetic construct
  source 1..80: mol_type = other DNA
ccactggcctgatccatcttcaccagaacatcgtggacgtacagtacctctatggagtctcatcggcccttgtgtcgtgg

SEQ ID NO: 111636 - DNA, 80 bp, synthetic construct
  source 1..80: mol_type = other DNA
ctcgggtgattatttatccccacccttgccgtctgcgccgtttaaaaatcaaaggggttctgccgcacatcgctatgcgc

SEQ ID NO: 111637 - DNA, 80 bp, synthetic construct
  source 1..80: mol_type = other DNA
cagtatctcccgcgaaggctacccgccgccccagcccccggtcaaatgcggaaacggtcccgcgctctcgcctttatacg

SEQ ID NO: 111638 - DNA, 80 bp, synthetic construct
  source 1..80: mol_type = other DNA
acagagtgttttctcgcttgccgacttctttaagcccggtcctaagcagaacctccagcttatcaacaccaacggaagct

SEQ ID NO: 111639 - DNA, 80 bp, synthetic construct
  source 1..80: mol_type = other DNA
ccgagcgggcggtggcccgtgcggtcgcggcggcacgccccgcggcgcggccccgggcggccgcggtcgcgtctacgtcc

SEQ ID NO: 111640 - DNA, 80 bp, synthetic construct
  source 1..80: mol_type = other DNA
aactgagtaatgcggaagttgaacgaactctggactttttatggctagggagggaaaactgctgatcattgctgaacttt

SEQ ID NO: 111641 - DNA, 80 bp, synthetic construct
  source 1..80: mol_type = other DNA
cccgaatttttcacagaattggacggggtgcgcctacataggtttgcgcccccctgcaagcccttgctgcgggaggaggt

SEQ ID NO: 111642 - DNA, 80 bp, synthetic construct
  source 1..80: mol_type = other DNA
tgccttttgacacctcctccatgacattctcatatattgcccaggaaaatcaagacaaaggcgaataaagtgttttgaaa

SEQ ID NO: 111643 - DNA, 80 bp, synthetic construct
  source 1..80: mol_type = other DNA
tggctcacgccgaggtgtctagtagactacccgtatcgactgtggcactacccttgcactgtgaactacaccctattcaa

SEQ ID NO: 111644 - DNA, 80 bp, synthetic construct
  source 1..80: mol_type = other DNA
agcgacgattctgccgatgatagcagtgtgctggatttaggcggcacagggaacccatttgctcacttgcgtccccaggg

SEQ ID NO: 111645 - DNA, 80 bp, synthetic construct
  source 1..80: mol_type = other DNA
gaccacacggtgcccgtgcggcgccaacatcaccggcaacgtccgcctgggcaccttgaggttgtcaggacctaagacct

SEQ ID NO: 111646 - DNA, 80 bp, synthetic construct
  source 1..80: mol_type = other DNA
actaatccaggaaacatttcagtcagctctgtggtccgatttaacgtatacagtggtgctatatatcgttcacataaaaa

SEQ ID NO: 111647 - DNA, 80 bp, synthetic construct
  source 1..80: mol_type = other DNA
tgacccggatagagtctgcgtcgaaaaccgtcatcttggactcccttggcccaatggccgatcaagaggatgatcgtgag

SEQ ID NO: 111648 - DNA, 80 bp, synthetic construct
  source 1..80: mol_type = other DNA
caacaccaccatattattcataattccataactaaaaaaactccacccaaacgacatgcgctccaacactatagccgcgt

SEQ ID NO: 111649 - DNA, 80 bp, synthetic construct
  source 1..80: mol_type = other DNA
tacaactccatttggccagcagagagtttttaaagagaaggtggacaccaggacacccaggcccatgccagggacaagaa

SEQ ID NO: 111650 - DNA, 80 bp, synthetic construct
  source 1..80: mol_type = other DNA
accccagcttataagagcttgctcgtaagcgtaatctggtggatgcagtattttatagcacgtgcggaggcccttgttca

SEQ ID NO: 111651 - DNA, 80 bp, synthetic construct
  source 1..80: mol_type = other DNA
gagtccaatggagccatcatgagtgaggaaagggccattccggacggagagtggagagaaggctttgactggataacaga

SEQ ID NO: 111652 - DNA, 80 bp, synthetic construct
  source 1..80: mol_type = other DNA
agacagcaagagtagaagttacaatgtcttggaagataaagtcaatacagcctaccgcagctggtacctgtcctacaact

SEQ ID NO: 111653 - DNA, 80 bp, synthetic construct
  source 1..80: mol_type = other DNA
gaaaaccttcccggccacacaggaccagctcaagaccaactcagattctggccatggcaccactggtgcggggtcaacaa

SEQ ID NO: 111654 - DNA, 80 bp, synthetic construct
  source 1..80: mol_type = other DNA
gttcctggttgcgagatatctgggactggatatgtgaggtgttgactgacttcaagacctggcttaaggtcaagctcctg

SEQ ID NO: 111655 - DNA, 80 bp, synthetic construct
  source 1..80: mol_type = other DNA
gaacgcagcaacacggaagcggctggattgtgcaagagacccttaagggtggcgaccgaggtgggaggctggacggtcgg

SEQ ID NO: 111656 - DNA, 80 bp, synthetic construct
  source 1..80: mol_type = other DNA
gcctggcgctgggcgccgcctatgcggcgctcctggtgctcgccgatgacgtctatccgctctttctcctcgccccggtg

SEQ ID NO: 111657 - DNA, 80 bp, synthetic construct
  source 1..80: mol_type = other DNA
ccaaggcacttgaattcatacctgtggagggtatggagacgaccatgaggtccccatcctttagtgacaactctacacca

SEQ ID NO: 111658 - DNA, 80 bp, synthetic construct
  source 1..80: mol_type = other DNA
tgacaacagactcttggtccaccgtcagcgagtcggaggatgtcgtgtgttgctcgatgtcttattcttggacgggggca

SEQ ID NO: 111659 - DNA, 80 bp, synthetic construct
  source 1..80: mol_type = other DNA
agggggacttacagtagatgacactgatgggaccttacaagaaaacataggtgccaccacaccacttgttaagactgggc

SEQ ID NO: 111660 - DNA, 80 bp, synthetic construct
  source 1..80: mol_type = other DNA
ccacagctgacgtcgtctggggtggggggggcaggggacggaaggtggttgtcagcggaagactgttagagcggttgcgc

SEQ ID NO: 111661 - DNA, 80 bp, synthetic construct
  source 1..80: mol_type = other DNA
cagcccagctgttcatcgtctcgccacagcaccactggtttcgtacaggatgcaactgctctatctaccctggcaccatc

SEQ ID NO: 111662 - DNA, 80 bp, synthetic construct
  source 1..80: mol_type = other DNA
ggttagtagttagcagttataatcatgtgcatgttcatttttgcttgctgctacagaaggcttcatcggcagaaatcaga

SEQ ID NO: 111663 - DNA, 80 bp, synthetic construct
  source 1..80: mol_type = other DNA
tgtggacgccttctacgtgatgacggtgggaacaaaatccttcctggtgcacagagagtggttcatggatttaaatctgc

SEQ ID NO: 111664 - DNA, 80 bp, synthetic construct
  source 1..80: mol_type = other DNA
tggtgctaatgacccactttttccagatactccagtcccaggagcagcttgataaggtgcttgacttcgacatatacggg

SEQ ID NO: 111665 - DNA, 80 bp, synthetic construct
  source 1..80: mol_type = other DNA
aacccccgatgcctaggtagtagcccatcccggagagggtcaggcagttgtcggccacggtctggtccagacagaagggc

SEQ ID NO: 111666 - DNA, 80 bp, synthetic construct
  source 1..80: mol_type = other DNA
cctcgagcacattacatcatgctcctccaacgtttccgtggcccatgatcagactggacagagatactactacctcactc

SEQ ID NO: 111667 - DNA, 80 bp, synthetic construct
  source 1..80: mol_type = other DNA
gtgaatacagtattggaggatgaactgcatccaactccgtttgagctgggacccacacttcaggacctatatgatctgga

SEQ ID NO: 111668 - DNA, 80 bp, synthetic construct
  source 1..80: mol_type = other DNA
atgtggatctgatggttgggtcggcaacgctttgctcggcattatatgtaggggacttatgtggggctgtcttcctggta

SEQ ID NO: 111669 - DNA, 80 bp, synthetic construct
  source 1..80: mol_type = other DNA
ctatttaacatcttgggaggatgggttgcctcgcagattgcttcccccacagcttctacggcctttgtcggtagcggcct

SEQ ID NO: 111670 - DNA, 80 bp, synthetic construct
  source 1..80: mol_type = other DNA
gctgggaaacatcatccagtatgctccaaccatatgggttcgcatggtcctaatgacacacttcttctccattctcatgg

SEQ ID NO: 111671 - DNA, 80 bp, synthetic construct
  source 1..80: mol_type = other DNA
gtagttgtctgcgctaccgatgctcttatgaccggctacactggcaactttgactctgtaatagattgcaatgtttctgt

SEQ ID NO: 111672 - DNA, 80 bp, synthetic construct
  source 1..80: mol_type = other DNA
aagttagcagaggaggaaacattacattagatggaccattcgataatactacatggacaagatatcataatgatggacat

SEQ ID NO: 111673 - DNA, 80 bp, synthetic construct
  source 1..80: mol_type = other DNA
cctcgggaaggtctcccccgaggtaggtcacgacgtacgagaccagcgagtagtcgttcacgaacgccgcgcaccgcgtg

SEQ ID NO: 111674 - DNA, 80 bp, synthetic construct
  source 1..80: mol_type = other DNA
gttacggtttctgtttttttaaacccgtctggggtgtttttcgttccgtcgccgggatgtttcgttcgttcggcccctca

SEQ ID NO: 111675 - DNA, 80 bp, synthetic construct
  source 1..80: mol_type = other DNA
cccgcgcggaggcgcggggacaggcgaggagccctcttgtcacctaggcctctatccacacttaaggtgtcatctggtgg

SEQ ID NO: 111676 - DNA, 80 bp, synthetic construct
  source 1..80: mol_type = other DNA
caccacctcccacacggctagtggagtagccagcctcttcaccgttggcgctcaacaacaactccagctcattaagacca

SEQ ID NO: 111677 - DNA, 80 bp, synthetic construct
  source 1..80: mol_type = other DNA
tctttagaaacttccagcccatgagccgtcaggtggtggacgataccaaatacaaggactaccaacaggtgggcatcctc

SEQ ID NO: 111678 - DNA, 80 bp, synthetic construct
  source 1..80: mol_type = other DNA
cccccaaactggcacatcccgtcgatccaggacgtcgcgccgcaccacgcccccgccgcccccagcaacccgggcctgat

SEQ ID NO: 111679 - DNA, 80 bp, synthetic construct
  source 1..80: mol_type = other DNA
agggcgcgcccggggtctgggttaggaagggccacctgacacagaggctcagtgaggaccgttagacaccgaaagatctt

SEQ ID NO: 111680 - DNA, 80 bp, synthetic construct
  source 1..80: mol_type = other DNA
tgtacccggacctaggggtccgggtgtgcgaaaagagggcgctttatgacgtcgtccagagacttcctgaagccgtgatg

SEQ ID NO: 111681 - DNA, 80 bp, synthetic construct
  source 1..80: mol_type = other DNA
gggcaaccccgcgattgcctccttgatggcatttacagctgccgtcaccagcccattgaccactcagcagacccttctgt

SEQ ID NO: 111682 - DNA, 80 bp, synthetic construct
  source 1..80: mol_type = other DNA
aaatataatcaacaaattcacggtctggaactttaaggccttttctatcgttggtaatatactccgatactgcgtgtatt

SEQ ID NO: 111683 - DNA, 80 bp, synthetic construct
  source 1..80: mol_type = other DNA
ccagccccccagcctcccgatcacggtttactacgccgtgttggagcgcgcctgccgcagcgtgctcctaaacgcaccgt

SEQ ID NO: 111684 - DNA, 80 bp, synthetic construct
  source 1..80: mol_type = other DNA
agggcgtcgtcgagcgtgatgggtgcgggcaaaagcgcattgaccaccgccagggcctcctgcagccgcggctccgcctc

SEQ ID NO: 111685 - DNA, 80 bp, synthetic construct
  source 1..80: mol_type = other DNA
cttcttactagctcttctgtcatgtctcactgtgccagtctcatcggcagaggtcaagaacaccagcaccagctacatgg

SEQ ID NO: 111686 - DNA, 80 bp, synthetic construct
  source 1..80: mol_type = other DNA
gtacaaaattttaagaaaccccaaagcgtaaaaacaacccttagccaaaaagatattcccttgtatgtggaaactgaatc

SEQ ID NO: 111687 - DNA, 80 bp, synthetic construct
  source 1..80: mol_type = other DNA
cgaggggggaacccctggactggtggcggtatttgtcctgatggagttcttgttgagaaggcgtccgggttctgtcacat

SEQ ID NO: 111688 - DNA, 80 bp, synthetic construct
  source 1..80: mol_type = other DNA
gcgcgactcggaagacttcggagcggtcgcaacctcgtgggagacgccaacctatccccaaggcgcgtcgatccgaggga

SEQ ID NO: 111689 - DNA, 80 bp, synthetic construct
  source 1..80: mol_type = other DNA
ccatatgggtgcgtatggtgctgatgacacatttttttggaatactccagtcccaagaaacactccacaaagtacttgac

SEQ ID NO: 111690 - DNA, 80 bp, synthetic construct
  source 1..80: mol_type = other DNA
cgcagcccgtccagcccgcgcagcccgtccagcccgcgcagcccgcgcagaccgtccagcccgcgcagcccgcgcagccc

SEQ ID NO: 111691 - DNA, 80 bp, synthetic construct
  source 1..80: mol_type = other DNA
ggactggggtgcggaccatcaccacggggtcccccattacttattccacctatggcaagttccttgccgatggtggttgt

SEQ ID NO: 111692 - DNA, 80 bp, synthetic construct
  source 1..80: mol_type = other DNA
tattattgttcttaagggtaaatatgaatttgttaaaaaagaaacagagcctaagtcctttgatgttaaattgctgtttg

SEQ ID NO: 111693 - DNA, 80 bp, synthetic construct
  source 1..80: mol_type = other DNA
acctggcgggcctatcaacactgccgggcaaccccgctattgcatcgttgatggcttttacagctgccgtcaccagccca

SEQ ID NO: 111694 - DNA, 80 bp, synthetic construct
  source 1..80: mol_type = other DNA
gtggggattggaatcggggttctcgcggcgagggtcctggtcgtaacggcaatcgtgtacgtcgtccgcacatcacagtc

SEQ ID NO: 111695 - DNA, 80 bp, synthetic construct
  source 1..80: mol_type = other DNA
agtttcttgccgacgggggttgttcggggggagcatacgacgtcatcatatgcgatgagtgtcattccactgatcctaca

SEQ ID NO: 111696 - DNA, 80 bp, synthetic construct
  source 1..80: mol_type = other DNA
gacctcaccacgaaggcccgggccacgtcgccgacgacccgcaacttgctgacgacccccaagtttaccgtggcctggga

SEQ ID NO: 111697 - DNA, 80 bp, synthetic construct
  source 1..80: mol_type = other DNA
tggttcgtccccagcataaaagctggaaacgacatatccaactgtttaagaaagtcaggcaaaagagtcatacaactgag

SEQ ID NO: 111698 - DNA, 80 bp, synthetic construct
  source 1..80: mol_type = other DNA
atcctgctggtgtgaaagcgcgcgtcttcgccctgaaagtcggccaagtagcattttaacatgagatcatagttgagggc

SEQ ID NO: 111699 - DNA, 80 bp, synthetic construct
  source 1..80: mol_type = other DNA
ctactgcttaacagttggcagcgcagttatttgcggcaggattgttacatcggggaagcccgtagtagtacccgatcgtg

SEQ ID NO: 111700 - DNA, 80 bp, synthetic construct
  source 1..80: mol_type = other DNA
aattgtttgagaaagtcgggaaagagagtagtccagttgagcagaaaaacctttgacacagagtatccaaagacgaaact

SEQ ID NO: 111701 - DNA, 80 bp, synthetic construct
  source 1..80: mol_type = other DNA
agtcgggtgctccagggcatctcggtactgccccagcagcccccacatgtccgcccgcagcgccgccgtaacctcaggtg

SEQ ID NO: 111702 - DNA, 80 bp, synthetic construct
  source 1..80: mol_type = other DNA
ggctctactggtggtttcctgacctcggttggtaaggcgctgcacacagttcttggcggtgcctttaacagcctttttgg

SEQ ID NO: 111703 - DNA, 80 bp, synthetic construct
  source 1..80: mol_type = other DNA
ctctaaatgcaactttgttgagctatggaatttcttaaactgctacaatgctaaaatggatatgccttactattacttgg

SEQ ID NO: 111704 - DNA, 80 bp, synthetic construct
  source 1..80: mol_type = other DNA
ttggggttacgcagacttggctttattattactgagtggggttgctacttggaatgtagacgagcgtacaaattgtgcta

SEQ ID NO: 111705 - DNA, 80 bp, synthetic construct
  source 1..80: mol_type = other DNA
aacgataacattgttgtgcttgattcccaccgtaatggcgtttcacttgtcaacaagagatggcgaacccctcatgatag

SEQ ID NO: 111706 - DNA, 80 bp, synthetic construct
  source 1..80: mol_type = other DNA
tgtctaacggttggcagtgctgtaatctgcggcagggttgtaacatctggcaagcccgtgccattgcccgaccgggaggt

SEQ ID NO: 111707 - DNA, 80 bp, synthetic construct
  source 1..80: mol_type = other DNA
catccaagagcgcttcagctagggcgaaaaaggtgaccttcgacaggatgcaggtcttggacacacactatgaggctgtc

SEQ ID NO: 111708 - DNA, 80 bp, synthetic construct
  source 1..80: mol_type = other DNA
gtgctggagggcgacagttgcatcaccatcatggccgctgacaaacccacccttgacataagaatgatgaacattgaagc

SEQ ID NO: 111709 - DNA, 80 bp, synthetic construct
  source 1..80: mol_type = other DNA
ttattagtgtttgttttttcttacatgataggctctggtccatctttccctgtcactaataacacgatgaatgtgttcta

SEQ ID NO: 111710 - DNA, 80 bp, synthetic construct
  source 1..80: mol_type = other DNA
gcgaggcggaggttaaaccgagggtctcctccctccttggccagctcatcagccagtcaattgtctgctccctctctgaa

SEQ ID NO: 111711 - DNA, 80 bp, synthetic construct
  source 1..80: mol_type = other DNA
acaagatacatcgtgaagtgggagtgggtgatcctccttttcttgttgttggcagacgccaggatctgtgcatgcctttg

SEQ ID NO: 111712 - DNA, 80 bp, synthetic construct
  source 1..80: mol_type = other DNA
atagctcagaggccgaggcggcctcggcctctgcataaataaaaaaaattagtcagccatggagcggagaatgggcggaa

SEQ ID NO: 111713 - DNA, 80 bp, synthetic construct
  source 1..80: mol_type = other DNA
gatgctcacttcttgtcccaaacgaagcaagggggagagaactttgcgtacctcgtggcttatcaggcgacggtgtgtgc

SEQ ID NO: 111714 - DNA, 80 bp, synthetic construct
  source 1..80: mol_type = other DNA
agacatttacttatcctgccagcttgacccagaggcccggaaagtcatagaatctctcactgagagactttacgtcgggg

SEQ ID NO: 111715 - DNA, 80 bp, synthetic construct
  source 1..80: mol_type = other DNA
gcaagtgctttaacagccctaaatgacatgggaaaagttaggaaagatatacaacaatgggaaccttcaagaggatggaa

SEQ ID NO: 111716 - DNA, 80 bp, synthetic construct
  source 1..80: mol_type = other DNA
agaagagaagggcgcctcacaggtggccacccagtgtctcgaggatcggcgaagttacggtggataactgaacgtgggtt

SEQ ID NO: 111717 - DNA, 80 bp, synthetic construct
  source 1..80: mol_type = other DNA
acgcgtcccaggaaggcggcctcccgcgtcaaaacgcaccggacggcgtcgggattgaagcgggcgagcagggccccggt

SEQ ID NO: 111718 - DNA, 80 bp, synthetic construct
  source 1..80: mol_type = other DNA
ctcatctccagagccacgggaggaaccaccctccacccagagactcgggcgatggtcgtacccgggactcaacgggttac

SEQ ID NO: 111719 - DNA, 80 bp, synthetic construct
  source 1..80: mol_type = other DNA
gacaagtcaccctcaccgtgacggtgacagcggcaacactcctgttctgccactacgcctacatggttcccggatggcag

SEQ ID NO: 111720 - DNA, 80 bp, synthetic construct
  source 1..80: mol_type = other DNA
ttacaacttgttcgttatggatgaggctcacttcactgacccagctagcattgctgcaagaggatacatatctaccaaag

SEQ ID NO: 111721 - DNA, 80 bp, synthetic construct
  source 1..80: mol_type = other DNA
gcaggcgacggcggtgatgcaatccccactggaggctccctttgtgcctccgcgatacctggcacctacggagggcagaa

SEQ ID NO: 111722 - DNA, 80 bp, synthetic construct
  source 1..80: mol_type = other DNA
gactccgtttgggcctcccacaaaacagggagatcatgatggaatccttcaacattatgtgtaagctcacagccaacccc

SEQ ID NO: 111723 - DNA, 80 bp, synthetic construct
  source 1..80: mol_type = other DNA
taaggtaccctactttgtgcgcgttcaaggccttctccggatctgcgcgttggcgcggaagatggccggaggccattacg

SEQ ID NO: 111724 - DNA, 80 bp, synthetic construct
  source 1..80: mol_type = other DNA
agtgggcgcagaaaaagactggtgaagacaatcaaactgaaacacgcacatttggtgtggccgctatgggtggaatactt

SEQ ID NO: 111725 - DNA, 80 bp, synthetic construct
  source 1..80: mol_type = other DNA
gtgaggactaagctcaaactcactcctctgccccgtgcgggcgacctcgacttgtcggtgtggttcgtagtgggtggacg

SEQ ID NO: 111726 - DNA, 80 bp, synthetic construct
  source 1..80: mol_type = other DNA
tacggtcaggcgtcaggaccatcacaacgggcgcgccgatcacatactccacctacgggaagttcctggcggatggagtg

SEQ ID NO: 111727 - DNA, 80 bp, synthetic construct
  source 1..80: mol_type = other DNA
ggacctccaggaataccagttacttggtatgacggagaaggaaataaattctgcgatggagaaaaagttgaacatgcaga

SEQ ID NO: 111728 - DNA, 80 bp, synthetic construct
  source 1..80: mol_type = other DNA
ccgaggcggcattggagaagctggtcattctgcatgcagccagtgctgctagttccaacggccccctgtacttcatcctg

SEQ ID NO: 111729 - DNA, 80 bp, synthetic construct
  source 1..80: mol_type = other DNA
gtgatgtagctttccgggacgacgaagcgatccacgaactgcatgtgctcctcggtgatgggcaggccgtactccagcac

SEQ ID NO: 111730 - DNA, 80 bp, synthetic construct
  source 1..80: mol_type = other DNA
gagggctcttgactggttaaaaaaatatggcgccgaaaggctgaaacgaatggcaatcagcggagatgattgcgtggtga

SEQ ID NO: 111731 - DNA, 80 bp, synthetic construct
  source 1..80: mol_type = other DNA
tggagatgccggagggtttatgatgtatgttatatttccggggaaatctgttcacctccattacagactaatcgatcata

SEQ ID NO: 111732 - DNA, 80 bp, synthetic construct
  source 1..80: mol_type = other DNA
acgcgtccagctgctgggtggccctgacccccactgtagccgccccttatctcaacgcgccattggagtccatgcggaga

SEQ ID NO: 111733 - DNA, 80 bp, synthetic construct
  source 1..80: mol_type = other DNA
ccggcaaccctgcggtagcttctctgatgtctttttcagcctccctgaccagtccactaacgacgccacaaacccttctc

SEQ ID NO: 111734 - DNA, 80 bp, synthetic construct
  source 1..80: mol_type = other DNA
tagcctcattcgggagtttaccaagcgccccctgctagcggagagggaaaggggcccctgtgttctgaccgtggtttgca

SEQ ID NO: 111735 - DNA, 80 bp, synthetic construct
  source 1..80: mol_type = other DNA
gcacccagcatcagcctggacattgtacgctgtggccactacagtaataacaccaatgttaagacataccatagagaatt

SEQ ID NO: 111736 - DNA, 80 bp, synthetic construct
  source 1..80: mol_type = other DNA
tctgccacccgagcaggattagggggtgggggtggggggcgagaaacgatgaaggacgtgaaagagaacagcgaccaaat

SEQ ID NO: 111737 - DNA, 80 bp, synthetic construct
  source 1..80: mol_type = other DNA
ttggccgacagaaacccgttgttaaacatgtccatcacgcgccgccgcagcaccggttggaattgattgcgaaagttgcg

SEQ ID NO: 111738 - DNA, 80 bp, synthetic construct
  source 1..80: mol_type = other DNA
tttggaagagcgtcgcaagcttatgatggccgtggtgctggttaccgtagaactagagtgtctccggcgtttctttaccg

SEQ ID NO: 111739 - DNA, 80 bp, synthetic construct
  source 1..80: mol_type = other DNA
gaggccatgaccaggtactctgcgccccctggcgacgaacctcacccagagtacgacctggagcggataacatcttgctc

SEQ ID NO: 111740 - DNA, 80 bp, synthetic construct
  source 1..80: mol_type = other DNA
ctaaaacggagtggtaatattaaaagccgccaagcctgttggtgggtgaggaggggtaaaggcacgctgtgtgcataacg

SEQ ID NO: 111741 - DNA, 80 bp, synthetic construct
  source 1..80: mol_type = other DNA
cgccagcctgttccaagcgggccccagccagaagctccaactcataaacaccgatggaagctggcatatcaacaggacgg

SEQ ID NO: 111742 - DNA, 80 bp, synthetic construct
  source 1..80: mol_type = other DNA
ggatgttcgtagggggtattgaacacagacttcaagcagcctgcaacttcactcgtggggaccgctgcaatctcgaggac

SEQ ID NO: 111743 - DNA, 80 bp, synthetic construct
  source 1..80: mol_type = other DNA
ttgccctaattccagcatagtgtttgaagctgacaacctcatcatgcacttaccggggtgtgtgccctgtgtgaggaccg

SEQ ID NO: 111744 - DNA, 80 bp, synthetic construct
  source 1..80: mol_type = other DNA
tcctgcaacaaaaaaaatattaatgcccaaagcacctaggaaaaccttatgcctccctttatacccgctgccccgtctta

SEQ ID NO: 111745 - DNA, 80 bp, synthetic construct
  source 1..80: mol_type = other DNA
cccagcgcggcgccgcgctcggttcccagctcggggaccgagcgccagggcgccaggtggtcggtttcggacaacttgcc

SEQ ID NO: 111746 - DNA, 80 bp, synthetic construct
  source 1..80: mol_type = other DNA
gtcaaagaagacccccatgggcttctcctatgacacccgctgttttgattccaccgtcacggaacgtgacatacgcactg

SEQ ID NO: 111747 - DNA, 80 bp, synthetic construct
  source 1..80: mol_type = other DNA
gactggaaaaaggagtggtgctctatgggatgtgcctgctcccaaggaagtaaaaaaaggggagaccacagatggagtgt

SEQ ID NO: 111748 - DNA, 80 bp, synthetic construct
  source 1..80: mol_type = other DNA
cccaccccagagtaaaaagaacggagcctccgctaccaccctcccacgtggtggtagaaagacggggtctagaggttaga

SEQ ID NO: 111749 - DNA, 80 bp, synthetic construct
  source 1..80: mol_type = other DNA
gacctggcttaaggcaaagctcgtgccgtcattacccggagtcccttttctctcatgccaacggggcttcaggggcacat

SEQ ID NO: 111750 - DNA, 80 bp, synthetic construct
  source 1..80: mol_type = other DNA
gccgaggaggaaaaactacctatcagtccactcagcaactcgttgctgagacaccacaatcttgtctactctacgtcatc

SEQ ID NO: 111751 - DNA, 80 bp, synthetic construct
  source 1..80: mol_type = other DNA
tgaaacgcgcgcgcaaccgcgtgagcaccggcagccagctggcgaaacgctttagcaaaggcctgctgaacggccagggc

SEQ ID NO: 111752 - DNA, 80 bp, synthetic construct
  source 1..80: mol_type = other DNA
tgtggaccttctggttggttcagcggccgcttgctcagcactttacatcggagatttatgcggcggcgtgtttctggtgg

SEQ ID NO: 111753 - DNA, 80 bp, synthetic construct
  source 1..80: mol_type = other DNA
ggcgtcaggcaccgcgccagccgcagggagctcgcgccgcgcgcccggcgttgcatggcggagaccgttcggtcggtggc

SEQ ID NO: 111754 - DNA, 80 bp, synthetic construct
  source 1..80: mol_type = other DNA
ttttggaccagctgaccgacccccccggggtgaagcgtgtttaccacattcagccgagcctggaggacccgttccagccc

SEQ ID NO: 111755 - DNA, 80 bp, synthetic construct
  source 1..80: mol_type = other DNA
gaagcccctcaccacgccgtcgcccatcatcgccacgtcggaccccaccccgcgacgggacgccgccacaaaaagcagac

SEQ ID NO: 111756 - DNA, 80 bp, synthetic construct
  source 1..80: mol_type = other DNA
ctcacataccgccacaaggttgtgaaggtaatgcgccctgcggtcggaggaaagactgtgatggacataatctcacggga

SEQ ID NO: 111757 - DNA, 80 bp, synthetic construct
  source 1..80: mol_type = other DNA
aacaggttcaggctctccacgggttatctccccgatcaaactcagacagggtaaaggtgcgatgatgttccactaaacca

SEQ ID NO: 111758 - DNA, 80 bp, synthetic construct
  source 1..80: mol_type = other DNA
ttttctggagtgacacagtagaaggttctggggtcttgttgccatcgatcccacttgagtttaatggctagatcgtgggc

SEQ ID NO: 111759 - DNA, 80 bp, synthetic construct
  source 1..80: mol_type = other DNA
tgagatgtactgggttagtggggcggctggaaacatcatacacgccgtcagcatgactagccaggtactcatggtgagga

SEQ ID NO: 111760 - DNA, 80 bp, synthetic construct
  source 1..80: mol_type = other DNA
agaatagaaaaaataaaacaagagtatggaacatcatggcactatgatcaagaccacccatataagacgtgggcctacca

SEQ ID NO: 111761 - DNA, 80 bp, synthetic construct
  source 1..80: mol_type = other DNA
tgtttcgacaatatcatatacatggaatgtgttaaagcgggggtcaaacttatccccacgaaagtcgatttccccccaaa

SEQ ID NO: 111762 - DNA, 80 bp, synthetic construct
  source 1..80: mol_type = other DNA
tcaacggaaacattcccgtgcctctatgtcccatttcatttcgagactgtcgcggaacccaactcggtttgggaagacat

SEQ ID NO: 111763 - DNA, 80 bp, synthetic construct
  source 1..80: mol_type = other DNA
ggtggaatgattgggagaatgtgcccttctgttcccaccacttccatgaactacagctgaaggatggcaggaggattgtg

SEQ ID NO: 111764 - DNA, 80 bp, synthetic construct
  source 1..80: mol_type = other DNA
catcatcaataatataccttatagatggaatggtgccaatatgtaaatgaggtggtttgaaaatggagagcggaagggga

SEQ ID NO: 111765 - DNA, 80 bp, synthetic construct
  source 1..80: mol_type = other DNA
accgaaaccgggcctactttgtgtgcggggggtgtgtttattccgtggtgcggccgtgtgcctcgcagcccggagagatt

SEQ ID NO: 111766 - DNA, 80 bp, synthetic construct
  source 1..80: mol_type = other DNA
gcgctgtgctcccccgaggacggctgggtaaaggttcaccccacccccggtacgatgctgttccgcgagattctccacgg

SEQ ID NO: 111767 - DNA, 80 bp, synthetic construct
  source 1..80: mol_type = other DNA
cctgtactcaatggccccacgcccttgctataccgtctgggccctgttaccaatgaaatcaccctcacacaccccgtgac

SEQ ID NO: 111768 - DNA, 80 bp, synthetic construct
  source 1..80: mol_type = other DNA
atggcgaaggctacaacgtagcccaatgcaacatgaccaaagactggttcttggtacagatgctcgccaactacaacatc

SEQ ID NO: 111769 - DNA, 80 bp, synthetic construct
  source 1..80: mol_type = other DNA
cacacctgctgagactactgttaggctacgtgcctacctcaacaccccgggcctccccgtatgccaagatcacttagagt

SEQ ID NO: 111770 - DNA, 80 bp, synthetic construct
  source 1..80: mol_type = other DNA
cgcccgcgcccaactataagcgagcgctctggcggttgtctgcggacgattacgccgaagtcgtgcggcttggggattca

SEQ ID NO: 111771 - DNA, 80 bp, synthetic construct
  source 1..80: mol_type = other DNA
cggtgcaggcatttcaggagccctcgtagcttttaagatcatgagcggcgagaagcccacggtagaagatgttgtgaatc

SEQ ID NO: 111772 - DNA, 80 bp, synthetic construct
  source 1..80: mol_type = other DNA
ggattaatgaggactgcaccacaccatgctccggttcgtggttaagggatgtttgggactggatatgcacggtgttaacc

SEQ ID NO: 111773 - DNA, 80 bp, synthetic construct
  source 1..80: mol_type = other DNA
gttgaattcgcaggcggtctgccattccccacacgtcactttgacatcgtccaagatctttgtagtagtcttgcattaac

SEQ ID NO: 111774 - DNA, 80 bp, synthetic construct
  source 1..80: mol_type = other DNA
ggaaaaggtgaggttcacagtgaccaagggaaaataaaaaagcggatagagaaactgaaagatgagtacgcagcaacctg

SEQ ID NO: 111775 - DNA, 80 bp, synthetic construct
  source 1..80: mol_type = other DNA
ttgcgcctgcccgcccagctccgggccggtcagggtaaagtcatcaaccagctgggccagggcctcgacgtgcgccacca

SEQ ID NO: 111776 - DNA, 80 bp, synthetic construct
  source 1..80: mol_type = other DNA
ctaacgactataatgtcacagtcttccaaggtgaaaatcgtaaaacttttatgtataaatttccattttatgaaatgtgc

SEQ ID NO: 111777 - DNA, 80 bp, synthetic construct
  source 1..80: mol_type = other DNA
gctcgccggtgctgctgtcggcagcatcggcctgggcagggtcattgttgacatcttagccgggtatggcgcaggcgtgt

SEQ ID NO: 111778 - DNA, 80 bp, synthetic construct
  source 1..80: mol_type = other DNA
acttggcccctcggtgcgttccggcaacagcgccgccggtccgcggacgaccacgtaccgaacgagtgcggtcccgagac

SEQ ID NO: 111779 - DNA, 80 bp, synthetic construct
  source 1..80: mol_type = other DNA
ggttcgaggacatgacccccgccgaactagaggttatattcccgaccacggacgccaagctgaactacctctcgcggacg

SEQ ID NO: 111780 - DNA, 80 bp, synthetic construct
  source 1..80: mol_type = other DNA
ggaagcgggcggtggtgctcaccgagtctaacgtttctgaagctttggccgaacttgccacgaaatcttttggctcctcc

SEQ ID NO: 111781 - DNA, 80 bp, synthetic construct
  source 1..80: mol_type = other DNA
gggcactggtactaccagggttgagtctgaagggaaagtgatggtgctcgattctttcgagccgctggtggctgagacag

SEQ ID NO: 111782 - DNA, 80 bp, synthetic construct
  source 1..80: mol_type = other DNA
ccacggcccccgctccttggggccgataagcgatatgacgtacttaatgtagcggtgttccaccagctcggtgatggtca

SEQ ID NO: 111783 - DNA, 80 bp, synthetic construct
  source 1..80: mol_type = other DNA
gtccaaggcccatgggattgatcctaacatcaggactggggtgaggacaattactactggcagccccatcacgtactcta

SEQ ID NO: 111784 - DNA, 80 bp, synthetic construct
  source 1..80: mol_type = other DNA
aagtgtgtagggaggaggcgcgccgcgccctcaaggatggagtggccacaggaggacatgctgtatcccgtggaagcgca

SEQ ID NO: 111785 - DNA, 80 bp, synthetic construct
  source 1..80: mol_type = other DNA
tctggcgaaaagccctctgtggaggatgtggtcaacctgttgcctggtatcctttctcctggtgctttggtagtgggaat

SEQ ID NO: 111786 - DNA, 80 bp, synthetic construct
  source 1..80: mol_type = other DNA
ggatctattggaggagttttcaattcaatcggcaaagctgtccaccaagtctttggaggggcgttcaggaccctgttcgg

SEQ ID NO: 111787 - DNA, 80 bp, synthetic construct
  source 1..80: mol_type = other DNA
gaagagagtgacatgttcatgccgaggtcaattgggggtccagttagctcccacaaccacattccgggatataaggtcca

SEQ ID NO: 111788 - DNA, 80 bp, synthetic construct
  source 1..80: mol_type = other DNA
acatgctctttgaccagggcaccctggtgggcgcgctggacttccacggcctccggtcgcgccacccgtggtctcgggag

SEQ ID NO: 111789 - DNA, 80 bp, synthetic construct
  source 1..80: mol_type = other DNA
ccggggtataagacccttctcagccggtgtctatggtggttatgctacctcctgaccctggtggaagccatgatccagga

SEQ ID NO: 111790 - DNA, 80 bp, synthetic construct
  source 1..80: mol_type = other DNA
aactactgtttgatcaaaatggagttctattggaaaattcaaacattgaaaaacagtacctaaactttagaagtggagac

SEQ ID NO: 111791 - DNA, 80 bp, synthetic construct
  source 1..80: mol_type = other DNA
agacggcatctgccatacaacatgctcatgtggagcagccatcacgggtcatgtgaagaacgggaccatgaagatcgtag

SEQ ID NO: 111792 - DNA, 80 bp, synthetic construct
  source 1..80: mol_type = other DNA
gtgttggttaatatgaacaagagttaacgactttttgttattttaggtccaatttcagatgcggaaggggagtctgagtc

SEQ ID NO: 111793 - DNA, 80 bp, synthetic construct
  source 1..80: mol_type = other DNA
acgggctccgatgtcatcctgggggaggaggagttatgggatgcggtgtttaagaaaacccgcctgcaaacgtacctgac

SEQ ID NO: 111794 - DNA, 80 bp, synthetic construct
  source 1..80: mol_type = other DNA
agttcagacagaagatcataggactgctacaaaacactgccaagcaagcagaagagctgaagccagcagtgcattctgca

SEQ ID NO: 111795 - DNA, 80 bp, synthetic construct
  source 1..80: mol_type = other DNA
aacctgggaaaatgactacctcattgtaaagctaggaaatggattaggttttgatggcgatggaaacatagctgtttctc

SEQ ID NO: 111796 - DNA, 80 bp, synthetic construct
  source 1..80: mol_type = other DNA
cagcttcttctcgcctggtccccaacaaaaactcaatttgatcaacactaatggcagctggcacataaaccgaaccgccc

SEQ ID NO: 111797 - DNA, 80 bp, synthetic construct
  source 1..80: mol_type = other DNA
aaaatcataacttggggtgctgactccgctgcgtgcggtgacattctccagggcctgcctgtctcggcgaggctgggtaa

SEQ ID NO: 111798 - DNA, 80 bp, synthetic construct
  source 1..80: mol_type = other DNA
accaccgacctcaagtacaacccctcgcgggtggaggcgttccatcggtacggcacgacggtcaactgcatcgtcgagga

SEQ ID NO: 111799 - DNA, 80 bp, synthetic construct
  source 1..80: mol_type = other DNA
gccatttgctccttcttggaccggccgatgacatgaagagcatgggctggagattacttgcccccatcaccgcgtactgt

SEQ ID NO: 111800 - DNA, 80 bp, synthetic construct
  source 1..80: mol_type = other DNA
atttaaccatggagctatttaaagtggtgaggtatgatgagtcaaaggttcgttgtcgcccctgtgagtgtggagctaat

SEQ ID NO: 111801 - DNA, 80 bp, synthetic construct
  source 1..80: mol_type = other DNA
cagactccgcgcataccttaacacacccgggctccccgtgtgccaggaccacctagagttctgggagggtgttttcaccg

SEQ ID NO: 111802 - DNA, 80 bp, synthetic construct
  source 1..80: mol_type = other DNA
gccgcatgtacggaggagctaaaaccaggtccagccaacatccagttcgcgtccgcggacactatcgagcgccatgggga

SEQ ID NO: 111803 - DNA, 80 bp, synthetic construct
  source 1..80: mol_type = other DNA
cctccacggaggtgttgggccaagggaccgtctcgcggcccgccgggcgcgtcgacggcgcgcgggcctgcgtgtcctgt

SEQ ID NO: 111804 - DNA, 80 bp, synthetic construct
  source 1..80: mol_type = other DNA
ttctgaatcgttactttctttatgttttaaaacggacgccaggcgactggtaaatgatatataatttaattgagcgtcag

SEQ ID NO: 111805 - DNA, 80 bp, synthetic construct
  source 1..80: mol_type = other DNA
gtggtcccatgtttaactcgcgaggccagctctgcgggacacgcagatgccgggcgagcggggttcttccaaccagcatg

SEQ ID NO: 111806 - DNA, 80 bp, synthetic construct
  source 1..80: mol_type = other DNA
cattcctttcctttcatgccaacgagggtaccagggggtctggcggggcgatggcgtctgcaccacgacgtgcccctgcg

SEQ ID NO: 111807 - DNA, 80 bp, synthetic construct
  source 1..80: mol_type = other DNA
agccgggcaagtccaggtcttgtcctcagttacacaatccttcttggggacatctatttcggtggttctctggacagtgt

SEQ ID NO: 111808 - DNA, 80 bp, synthetic construct
  source 1..80: mol_type = other DNA
acataaaccgcacagccctgaattgcaatgattccctaaacaccgggtttattgcgggcttgttctaccacaacaagttc

SEQ ID NO: 111809 - DNA, 80 bp, synthetic construct
  source 1..80: mol_type = other DNA
ccatgtggaagtgcctggcccgactcaagcctacgcttgcgggccccacacctctcctgtaccgtttgggccctattacc

SEQ ID NO: 111810 - DNA, 80 bp, synthetic construct
  source 1..80: mol_type = other DNA
ctcacgccacggtgcatcgttgactacccctatcggctatggcactatccctgcactgtcaattacaccatattcaaagt

SEQ ID NO: 111811 - DNA, 80 bp, synthetic construct
  source 1..80: mol_type = other DNA
cttggtggactacccctacagactatggcattatccttgcactgtcaacttcaccctccacaaagtccggatgtacgtgg

SEQ ID NO: 111812 - DNA, 80 bp, synthetic construct
  source 1..80: mol_type = other DNA
aaggaaatatggaggagccttagtgagaaatccactctcacggaactccacacatgagatgtactgggtatccaatgctt

SEQ ID NO: 111813 - DNA, 80 bp, synthetic construct
  source 1..80: mol_type = other DNA
atagcccaccagttcaaggaaaaaatcctcggattgctgcagcgagccacccagcaacaagctgtcattgagcctatagt

SEQ ID NO: 111814 - DNA, 80 bp, synthetic construct
  source 1..80: mol_type = other DNA
attaccgcttggtgaggagatttcagaacaacgcgggttgagtgtttctgtggtttataaagatttaaatggcaatgtta

SEQ ID NO: 111815 - DNA, 80 bp, synthetic construct
  source 1..80: mol_type = other DNA
tctgtaatgggcaatggactaactaaaccaatccagagaaggggtgatgtacgcgtattagagttaaccctatctgatat

SEQ ID NO: 111816 - DNA, 80 bp, synthetic construct
  source 1..80: mol_type = other DNA
accgtcgtcctatgcgaggcgtacgatataggctgcgcctggtacgaactcacaccctccgagactacggtcaggttgcg

SEQ ID NO: 111817 - DNA, 80 bp, synthetic construct
  source 1..80: mol_type = other DNA
cacatgtctggtatcccttgttatgatgttgtaaggtatgcggaaatagacaccgggcgtacatcgccaaccagcggtct

SEQ ID NO: 111818 - DNA, 80 bp, synthetic construct
  source 1..80: mol_type = other DNA
ccttcagcctcaagcagcgaatcatgattgcaaaaattcaggttcctcacagacctgtataagattcaaaagcggaacat

SEQ ID NO: 111819 - DNA, 80 bp, synthetic construct
  source 1..80: mol_type = other DNA
taaaaagatggggaacgatcaaaaagtcaaaagccatcaatgtcttgagagggttcaggaaagagattggaaggatgtta

SEQ ID NO: 111820 - DNA, 80 bp, synthetic construct
  source 1..80: mol_type = other DNA
gcgggcccggcggcgctccaggcggcccgcggtcgccgcggtggtccgggccgagcccgccccggccccgggtgcgtgct

SEQ ID NO: 111821 - DNA, 80 bp, synthetic construct
  source 1..80: mol_type = other DNA
ccaactgtttgtgaatcctacgcaactattgcacacgaattaaccggatatgaggctgttcgcacagcagccacaaattt

SEQ ID NO: 111822 - DNA, 80 bp, synthetic construct
  source 1..80: mol_type = other DNA
aacagctcacgcgcaacagaccagaggcttgttcggcactattgtcaccagcctcactggtagggacaaaaacatcatca

SEQ ID NO: 111823 - DNA, 80 bp, synthetic construct
  source 1..80: mol_type = other DNA
acccgactttttccattgagactaccactgtcccacaggacgctgtctcacgctcccaaaggcggggaaggaccggcaga

SEQ ID NO: 111824 - DNA, 80 bp, synthetic construct
  source 1..80: mol_type = other DNA
ccctgcttctgccgtccaagtgcacaactcgtcaggaatttatcacgtcaccaatgattgttccaattcgagtatagtgt

SEQ ID NO: 111825 - DNA, 80 bp, synthetic construct
  source 1..80: mol_type = other DNA
cgatcgggaatcctgcccgccacctgcaatgccttcccctccgactttgtcccgctgagctaccgccagtgtcccccgcc

SEQ ID NO: 111826 - DNA, 80 bp, synthetic construct
  source 1..80: mol_type = other DNA
ggcgctgtggagggtctctgctactgagtatgtggaggtcctacgccacaatgaccagcattatatcgtggtggtgacag

SEQ ID NO: 111827 - DNA, 80 bp, synthetic construct
  source 1..80: mol_type = other DNA
ggcaggactctctaccctaccgggaaatcctgcggtagcatcaatgatggcctttagtgccgcgttgactagtccactac

SEQ ID NO: 111828 - DNA, 80 bp, synthetic construct
  source 1..80: mol_type = other DNA
gtgctggcagcaagacgctggctggtccgaaagggccagtttgccagatgtacaccaatgtggaccaggacatggtggtg

SEQ ID NO: 111829 - DNA, 80 bp, synthetic construct
  source 1..80: mol_type = other DNA
taaggaggattctggggcaggctcggattcaggagtcccctccactagcgtggcctcttcggagccgcccagtgaggagg

SEQ ID NO: 111830 - DNA, 80 bp, synthetic construct
  source 1..80: mol_type = other DNA
ttggcaaaagagggtattaaaagaggagaaacggaccatcacgctgtgtcgcgaggctcagccaagctgagatggttcgt

SEQ ID NO: 111831 - DNA, 80 bp, synthetic construct
  source 1..80: mol_type = other DNA
catccttccttgtctgcggggacgatttggtggtggtatctgaaagctgcggcgtcgaggaggacagatcagctctgcga

SEQ ID NO: 111832 - DNA, 80 bp, synthetic construct
  source 1..80: mol_type = other DNA
ttggtcatctgctgtgcgtggttttacaagggccgcgtagtcccggcattcacatatggttttttgggcatatggccgct

SEQ ID NO: 111833 - DNA, 80 bp, synthetic construct
  source 1..80: mol_type = other DNA
cacactcattcctttgtgcaggacaagctgtcttcaaaaacagtctcattgggtagaaataacagcactcatcttaggag

SEQ ID NO: 111834 - DNA, 80 bp, synthetic construct
  source 1..80: mol_type = other DNA
ctatatagtgggagccacagctgacaacttaaagtgcccgtgccaggtcccggcaccagaattcttcaccgaagtggatg

SEQ ID NO: 111835 - DNA, 80 bp, synthetic construct
  source 1..80: mol_type = other DNA
tataccgagcctcccagctcggaccagaggccttattgctggcactatccacctcggccgtgcggcatcgtacctgcatc

SEQ ID NO: 111836 - DNA, 80 bp, synthetic construct
  source 1..80: mol_type = other DNA
atgtgcagcagagcgtagggctgttcctgatgcaggagggggccacccccagcgccgcgctggacatgaccgcgcgcaac

SEQ ID NO: 111837 - DNA, 80 bp, synthetic construct
  source 1..80: mol_type = other DNA
atcaaatggtacatagtcgtctttggttttctcaatacagcccgcgtgcccaatcggaaaattttcatttgcatcaacgc

SEQ ID NO: 111838 - DNA, 80 bp, synthetic construct
  source 1..80: mol_type = other DNA
ccacattcttttgttggatggctgacgtctcagggactaaaatagcaggaatgctgctcctttccctacttttgatgatc

SEQ ID NO: 111839 - DNA, 80 bp, synthetic construct
  source 1..80: mol_type = other DNA
gccctcttccgcccagcggcagccctccggtgccgcccccacggaggaagaagaaaaccatcgcgctcactgagtccacc

SEQ ID NO: 111840 - DNA, 80 bp, synthetic construct
  source 1..80: mol_type = other DNA
acgtactccacctacggtaagttcctcgctgacggcgggtgctctgggggcgcttatgacataataatttgtgatgagtg

SEQ ID NO: 111841 - DNA, 80 bp, synthetic construct
  source 1..80: mol_type = other DNA
gcgaccggtcgcagggagacggggttggtttggggttggtttgaggttggttttcccgttagcacatgtctgcatttgtt

SEQ ID NO: 111842 - DNA, 80 bp, synthetic construct
  source 1..80: mol_type = other DNA
gcttcccggttggggccccctatctgcgcgccggggattggtgaagcaatagtctactttacttcaacgttccctgcgaa

SEQ ID NO: 111843 - DNA, 80 bp, synthetic construct
  source 1..80: mol_type = other DNA
ccaatgtgtctggcccctcctctgagaagccgtactgttggcactatgcgccgcggccgtgcgaggtcgtgccggcttcc

SEQ ID NO: 111844 - DNA, 80 bp, synthetic construct
  source 1..80: mol_type = other DNA
ctgaaggcgtggaaatctaagaagatccccatggctttctcctatgacacccgctgctttgactcgaccattaccgaaca

SEQ ID NO: 111845 - DNA, 80 bp, synthetic construct
  source 1..80: mol_type = other DNA
agtgtctggacggctgccggaaaatgcgcttctccaccgcctgcccctatccgtgtagcgacacgtttctccggccgtga

SEQ ID NO: 111846 - DNA, 80 bp, synthetic construct
  source 1..80: mol_type = other DNA
aaaggacctggaagggaccacagtatgaagaggatgttaacttggggagtggcacacgagcggtgtggagacccctactc

SEQ ID NO: 111847 - DNA, 80 bp, synthetic construct
  source 1..80: mol_type = other DNA
cgctgatcctttgcgaatacgcccacgcgatgggtaacagtcttggcggtttcgctaaatactggcaggcgtttcgtcag

SEQ ID NO: 111848 - DNA, 80 bp, synthetic construct
  source 1..80: mol_type = other DNA
gtacgtaagacttccgagcggtcgcaacctcgcggacggcgtcagcctatccccaaggcacgcccacgcgagggccggtc

SEQ ID NO: 111849 - DNA, 80 bp, synthetic construct
  source 1..80: mol_type = other DNA
gaagtccgaagccattccagcaaggccattaaccacatcaactccgtgtgggaggacttgttggaagacaattctacacc

SEQ ID NO: 111850 - DNA, 80 bp, synthetic construct
  source 1..80: mol_type = other DNA
cagggacggcgagacgctgcgccccaacacgctcttgctgaaggaactcgagcgcacgttcggcgggaagcggctcctgg

SEQ ID NO: 111851 - DNA, 80 bp, synthetic construct
  source 1..80: mol_type = other DNA
tttggaattttcacgacaaacatatggctgaaattgcgtgattcctacacccaagtgtgtgaccaccggctaatgtcagc

SEQ ID NO: 111852 - DNA, 80 bp, synthetic construct
  source 1..80: mol_type = other DNA
catggggagagaatgagaccgacgtgttcttgctgcaaagcaccaggccccccagtgggtcttggttcgggtgcacttgg

SEQ ID NO: 111853 - DNA, 80 bp, synthetic construct
  source 1..80: mol_type = other DNA
tcgacttggtgctagaacacggaggatgcgtcacaaccatggcccagggaaaaccaaccttggattttgaactgaccaag

SEQ ID NO: 111854 - DNA, 80 bp, synthetic construct
  source 1..80: mol_type = other DNA
acatcaatcggacagcactcaactgcaacgattcccttaacaccgggttcttggcagcgctgttttatacccacaaattc

SEQ ID NO: 111855 - DNA, 80 bp, synthetic construct
  source 1..80: mol_type = other DNA
gaccaccaggctccccgcgcccgccccccccaaagactcccgccgtcacggcgacagtcgcaccaccgctcgcccccgcg

SEQ ID NO: 111856 - DNA, 80 bp, synthetic construct
  source 1..80: mol_type = other DNA
ccgccgcctctgtcgccgctaacactgtgcttggaatgggttactatggaagcatcgtggctaattccacttcctctaat

SEQ ID NO: 111857 - DNA, 80 bp, synthetic construct
  source 1..80: mol_type = other DNA
aacatcctgctggctctgggggcagcattctttcagatggcggccaccgatttgaacttttctctcccaggaattctcaa

SEQ ID NO: 111858 - DNA, 80 bp, synthetic construct
  source 1..80: mol_type = other DNA
gcgccctccaccggcattcttaagcacaccctcataattccaacagattctgctcctggttcacctgtagtagattaaca

SEQ ID NO: 111859 - DNA, 80 bp, synthetic construct
  source 1..80: mol_type = other DNA
tgtggaacagagtgtggattgaggagaacgaccacatggaagacaagaccccagttacgaaatggacagacattccctat

SEQ ID NO: 111860 - DNA, 80 bp, synthetic construct
  source 1..80: mol_type = other DNA
cttgtggtggctgtgctacctcctggtcctggtggaagccatgattcaggagtgggtacctcccctccaggcacgcggcg

SEQ ID NO: 111861 - DNA, 80 bp, synthetic construct
  source 1..80: mol_type = other DNA
gacagcgactccccccggcaaaagtgaacctttcccagagtccaacggagccatcaccagtgaggaaagacagattcctg

SEQ ID NO: 111862 - DNA, 80 bp, synthetic construct
  source 1..80: mol_type = other DNA
atatcttacccaagagaacaaagacaaagactaataaaatgttttgaactgaatttatgaatctttatttatttttacac

SEQ ID NO: 111863 - DNA, 80 bp, synthetic construct
  source 1..80: mol_type = other DNA
cgttcacactccacagttactctccagtagaactcaatagggtcgcggggacactcaggaagcttgggtgccccccccta

SEQ ID NO: 111864 - DNA, 80 bp, synthetic construct
  source 1..80: mol_type = other DNA
cgcggtgggatctcagctgccttgtgagcccgagcctgatgagatggtactaagatctatgcttagggacccggactaca

SEQ ID NO: 111865 - DNA, 80 bp, synthetic construct
  source 1..80: mol_type = other DNA
gaagaagaacccaatggggttctcctatgacaccagatgcttcgactccacagtcacggagcgtgacattcacaccgagg

SEQ ID NO: 111866 - DNA, 80 bp, synthetic construct
  source 1..80: mol_type = other DNA
agggccgacccgggccgtggccgagatcgtactggacctcgttggccaagtgcgcgttcatggttcgggagtgtgtgtgg

SEQ ID NO: 111867 - DNA, 80 bp, synthetic construct
  source 1..80: mol_type = other DNA
actcaaagatccggtgttctatgggacgtacccagccccccagagacacagaaagcagaactggaagaaggagtctatag

SEQ ID NO: 111868 - DNA, 80 bp, synthetic construct
  source 1..80: mol_type = other DNA
ccttatcccacgaaaaagagtcgatcactgggattcatacaaaggtgaaagagtcgttctctgggacgactacgggatga

SEQ ID NO: 111869 - DNA, 80 bp, synthetic construct
  source 1..80: mol_type = other DNA
cagcagcgagtgttcaaagagaaggtggacacgaaagctcctgaaccgccagaaggagtgaagtatgtgctcaacgaaac

SEQ ID NO: 111870 - DNA, 80 bp, synthetic construct
  source 1..80: mol_type = other DNA
ctgcggacttctcagaccctgctcctcaacatactcggcggctggatagccacccaagtggctcccccccccgcgtccac

SEQ ID NO: 111871 - DNA, 80 bp, synthetic construct
  source 1..80: mol_type = other DNA
gcgaggcgatggcatctgcactaccacatgcccctgcggggcagacatcaccggccatgtgaggaacgggtccatgaagg

SEQ ID NO: 111872 - DNA, 80 bp, synthetic construct
  source 1..80: mol_type = other DNA
gacggggaaaatgacgaaaaagctacatacacttttggcaatgccccagtaaaagccgatgctgacattacaaaagacgg

SEQ ID NO: 111873 - DNA, 80 bp, synthetic construct
  source 1..80: mol_type = other DNA
aagggagagtgatcttgagcaacccctcaccaatcactagtgctagtgctgcccagaggagagggagagtaggtagaaat

SEQ ID NO: 111874 - DNA, 80 bp, synthetic construct
  source 1..80: mol_type = other DNA
gagcctacaacatgttcatttacagtaagtgtgctatgggaggtgggaggtgatttttttttcttaagcagtgaaaaata

SEQ ID NO: 111875 - DNA, 80 bp, synthetic construct
  source 1..80: mol_type = other DNA
agaaggtgaagaacccaaagaacttgacatagatttgaatttctttgatattcccagtactggcacaggtggtaatggaa

SEQ ID NO: 111876 - DNA, 80 bp, synthetic construct
  source 1..80: mol_type = other DNA
ccctgcagcaggtgctgccccaggcggtgctgctgccgagccgcggggtcaagcgcgagggcgaaaacatgtacccgacc

SEQ ID NO: 111877 - DNA, 80 bp, synthetic construct
  source 1..80: mol_type = other DNA
ggctggtcgcgatcgggtgcgcggcgggaatggcggcgcgctgcgcgatgtcccgcgtgtgctggtcgaagacaggcagg

SEQ ID NO: 111878 - DNA, 80 bp, synthetic construct
  source 1..80: mol_type = other DNA
cagcggcgatgttgtcgtcgtggcaactgatgccctcatgaccggttacaccggtgacttcgactcggtgatagactgta

SEQ ID NO: 111879 - DNA, 80 bp, synthetic construct
  source 1..80: mol_type = other DNA
ggactgccccatcccatgctccggatcctggctccgcgacgtgtgggactgggtttgcaccatcttgacagacttcaaaa

SEQ ID NO: 111880 - DNA, 80 bp, synthetic construct
  source 1..80: mol_type = other DNA
atcaacaggactgccctcaactgcaacgactcgctgcagactggattcttagcgagccttttctacgcccataggttcaa

SEQ ID NO: 111881 - DNA, 80 bp, synthetic construct
  source 1..80: mol_type = other DNA
caatgcagccggtggaggacataaacgatcatgccattcgtggcgacacctttgccacacgggcggaggagaagcgcgct

SEQ ID NO: 111882 - DNA, 80 bp, synthetic construct
  source 1..80: mol_type = other DNA
tccggatgtgctttgccccctcaggggttgccacccgtccctccgcctcggcggaaaaggatggtgtgccttgacgagtc

SEQ ID NO: 111883 - DNA, 80 bp, synthetic construct
  source 1..80: mol_type = other DNA
ctacgtcatggggtcccaactcccatgcgagccagaacctgatgtgatggtactcacgtccatgctcactgacccagacc

SEQ ID NO: 111884 - DNA, 80 bp, synthetic construct
  source 1..80: mol_type = other DNA
tcctgcccggaattcttaattaatacgactcactatagggcgaattggagctccaccgcggtctttcggacttttgaaag

SEQ ID NO: 111885 - DNA, 80 bp, synthetic construct
  source 1..80: mol_type = other DNA
cagggtgccctggtcaaagagcatgttgcccaccggagtcatccagaggctgttccactccgacgcgggtggcgtcgggt

SEQ ID NO: 111886 - DNA, 80 bp, synthetic construct
  source 1..80: mol_type = other DNA
caggaatgtcgggagttccggagcttttgcggcacagatgcgttagtgccctggatgtcttctacacactcatgcacgag

SEQ ID NO: 111887 - DNA, 80 bp, synthetic construct
  source 1..80: mol_type = other DNA
tacccgtgcgcaggagaggtgacactcgaggagctcttttgtgcccaaaaccgatatccaccctcaagggctcatcggga

SEQ ID NO: 111888 - DNA, 80 bp, synthetic construct
  source 1..80: mol_type = other DNA
catgtaattggaccaggggcgagcggtgcgagctacatgacagagacagggttgaaatgagcccgctgcttttctcaacc

SEQ ID NO: 111889 - DNA, 80 bp, synthetic construct
  source 1..80: mol_type = other DNA
tgactcatttctttgcaatactccaatcccaggaaatactccataaagcacttgacttcgacatgtacggagtcacatat

SEQ ID NO: 111890 - DNA, 80 bp, synthetic construct
  source 1..80: mol_type = other DNA
ttggaatgagcaacagagacttcttagagggagtatctggagcaacatgggtggatttggttctcgaaggcgacagctgc

SEQ ID NO: 111891 - DNA, 80 bp, synthetic construct
  source 1..80: mol_type = other DNA
cggaaccggtgagtacaccggaattgccgggaagactgggtcctttcttggataaacccactctatgcccggagatttgg

SEQ ID NO: 111892 - DNA, 80 bp, synthetic construct
  source 1..80: mol_type = other DNA
cgactacgaatccagcgatgaggattaagggtaaggtgcggagcctattacaggtataaaggttggggtagagtaaaaaa

SEQ ID NO: 111893 - DNA, 80 bp, synthetic construct
  source 1..80: mol_type = other DNA
tgactcgggagaagaaccagttgatgtggactgtttctgcaggggcgtcgagcgggtgtccctggaatacgggaggtgtg

SEQ ID NO: 111894 - DNA, 80 bp, synthetic construct
  source 1..80: mol_type = other DNA
tccgtggcatgtgacggaatgggcaagaggtactattacctcacccgagatccagaaactcccttagcccgcgcggcttg

SEQ ID NO: 111895 - DNA, 80 bp, synthetic construct
  source 1..80: mol_type = other DNA
gagcgcttgtattgcggaggccctatgttcaacagcaagggcgagaagtgcggttatcgccgctgccgcgccagcggggt

SEQ ID NO: 111896 - DNA, 80 bp, synthetic construct
  source 1..80: mol_type = other DNA
gaggacgatgactcggcagacgacagcagcgtcctggatttgggagggagtggcaacccgtttgcgcaccttcgccccag

SEQ ID NO: 111897 - DNA, 80 bp, synthetic construct
  source 1..80: mol_type = other DNA
tcggccgttgtgtcctgggctgtgaagtgggagtatgtcgtcctcgccttcttggtgctcgccgacgcgcgcatctgcgc

SEQ ID NO: 111898 - DNA, 80 bp, synthetic construct
  source 1..80: mol_type = other DNA
ggcggcttggcatctacagatttgtgacaccaggcgagcggccatccggcatgttcgactcctcggtcctatgtgagtgc

SEQ ID NO: 111899 - DNA, 80 bp, synthetic construct
  source 1..80: mol_type = other DNA
tcttcttcgtctacacagacaaacatccatgttggaggaagaaatgaggcaggccatggacgagaacccgaggagcggcc

SEQ ID NO: 111900 - DNA, 80 bp, synthetic construct
  source 1..80: mol_type = other DNA
acactctgggagaacggtgccagctcagtttggaatgccacgacggcaattggactctgtcacatcatgcggggaggatg

SEQ ID NO: 111901 - DNA, 80 bp, synthetic construct
  source 1..80: mol_type = other DNA
gaatatgaagatctggtacccatccgtgatacattgaggctgttccctgggggtcgttaccttccacgagcaaaacacgt

SEQ ID NO: 111902 - DNA, 80 bp, synthetic construct
  source 1..80: mol_type = other DNA
gcgatatcgtgttggacatcagcaccggctacattccgacgattcactgccgcgacctgctgcagtacttcaagatgagt

SEQ ID NO: 111903 - DNA, 80 bp, synthetic construct
  source 1..80: mol_type = other DNA
tccatacagaacgtggaattatcatggaagttatgaagtgaaaccaactggatcagccagctcgatggtgaacggagtcg

SEQ ID NO: 111904 - DNA, 80 bp, synthetic construct
  source 1..80: mol_type = other DNA
cccctcccaactacaagaccgccatatggagggtggcagcgcaggattatgctgaggtgacgcgtgtgggtgacaatcac

SEQ ID NO: 111905 - DNA, 80 bp, synthetic construct
  source 1..80: mol_type = other DNA
acttataggtttggtgtgaacgagtcagatgtcttcttgttgacctctttgagacccccccaaggccggtggtttggatg

SEQ ID NO: 111906 - DNA, 80 bp, synthetic construct
  source 1..80: mol_type = other DNA
caccccagtgccgccccctaggaggcgacgagctgtggtgctggaccagagtaacgtgggagaggctctcaaagagctcg

SEQ ID NO: 111907 - DNA, 80 bp, synthetic construct
  source 1..80: mol_type = other DNA
gaaagaccagagatcctgctgtctctgcaacatcaatccaggcacagagcgccgcccgagtgccagaaattatgctaaaa

SEQ ID NO: 111908 - DNA, 80 bp, synthetic construct
  source 1..80: mol_type = other DNA
cctgttggaagattggtaacggtaaacccgtacgtttcagtggcgacagccaacgcaaagatcctgatagagttggagcc

SEQ ID NO: 111909 - DNA, 80 bp, synthetic construct
  source 1..80: mol_type = other DNA
gtcactgccgcccctttggggaggggaaaggcgtggggtataagttagccctggcccgacagtctggtcgcatttgcacc

SEQ ID NO: 111910 - DNA, 80 bp, synthetic construct
  source 1..80: mol_type = other DNA
agcagaggtcctgatactagaaaagaccaggagatccaggacctgccacggagccttagaaccacctcgagcttatgaat

SEQ ID NO: 111911 - DNA, 80 bp, synthetic construct
  source 1..80: mol_type = other DNA
acatacaactggggcgtgaacgtgagtgatgtgttcctgctgcagagcgccagacctcctcgtggtgcctggtttggatg

SEQ ID NO: 111912 - DNA, 80 bp, synthetic construct
  source 1..80: mol_type = other DNA
caacgcagtggccttctatagggggctagacgtgtcagtcagaccgacgtctggagacgtcgtggtatgcgcgaccgatg

SEQ ID NO: 111913 - DNA, 80 bp, synthetic construct
  source 1..80: mol_type = other DNA
accgccatctggagggtggcggcctcggagtacgcggaggtaacgcggcacgggccgtactcctatataacaggactgac

SEQ ID NO: 111914 - DNA, 80 bp, synthetic construct
  source 1..80: mol_type = other DNA
atgttgatctgatggtgggcgcagctgcattctgctcggccatgtatatcggagacctatgcggaggcgcatttttggtc

SEQ ID NO: 111915 - DNA, 80 bp, synthetic construct
  source 1..80: mol_type = other DNA
aggtcggggtaaaccgggcatttaccgatttgtctcaaaaggggagagaccatctggaatgtttgacaccgtagttctcg

SEQ ID NO: 111916 - DNA, 80 bp, synthetic construct
  source 1..80: mol_type = other DNA
catcatggggggttggttagcctcccagattgcaccccctgcggggcccactggctttgtggtcagtgccttagttggtg

SEQ ID NO: 111917 - DNA, 80 bp, synthetic construct
  source 1..80: mol_type = other DNA
ggaacggggatacggggcttgtgtggcacgacgtcgtggttgtgttactgggcaaacacttgtggactgtaggtttctgt

SEQ ID NO: 111918 - DNA, 80 bp, synthetic construct
  source 1..80: mol_type = other DNA
gtgcatcaaaggtggtagacatctgatcttctgtcactcaaagaaaaagtgcgacgaattggccaagcaacttcgtacgc

SEQ ID NO: 111919 - DNA, 80 bp, synthetic construct
  source 1..80: mol_type = other DNA
ccttgaacggaggcctcttctacgcagatgacactgctggctgggacacaaaggtcaccaatgcagacctagaggatgag

SEQ ID NO: 111920 - DNA, 80 bp, synthetic construct
  source 1..80: mol_type = other DNA
aaaaaggtaacctttgaccgcttgcaagtcctagaccaacattatcatgacactcttaaggagatcaagctccgtgcgtc

SEQ ID NO: 111921 - DNA, 80 bp, synthetic construct
  source 1..80: mol_type = other DNA
gacatcaccaagctgttgcttgctgttctcggtccactctggctattacagcacagcttgattagggtgccgtactttgt

SEQ ID NO: 111922 - DNA, 80 bp, synthetic construct
  source 1..80: mol_type = other DNA
caaccactctggtcctatctagcatcttgagggtacctgagatctgtgcgagtgtgatatttggtggccattgggggata

SEQ ID NO: 111923 - DNA, 80 bp, synthetic construct
  source 1..80: mol_type = other DNA
cgtgaactacaccacctgctcatgtggtgcaaacatcacaggccacgtaaagaatgggtcaatgaagatcgtaggcccaa

SEQ ID NO: 111924 - DNA, 80 bp, synthetic construct
  source 1..80: mol_type = other DNA
tccaaatttacgagcgaggatgcctgtcccgaagtagcatttgggcctattttgttaactaccttaaaaaacgcaaagtg

SEQ ID NO: 111925 - DNA, 80 bp, synthetic construct
  source 1..80: mol_type = other DNA
gcagctcggacctttacttggttacgagacatgcagatgttattccggtgcgccggcggggcgacaatagagggagcttg

SEQ ID NO: 111926 - DNA, 80 bp, synthetic construct
  source 1..80: mol_type = other DNA
agcgcggttaatcgtgtacccggatctgggtgtccgggtgtgcgagaaaagagccctgtttgacgtcactcgcaagttac

SEQ ID NO: 111927 - DNA, 80 bp, synthetic construct
  source 1..80: mol_type = other DNA
tcgcaactatggggcccgcttatgggttccagtactcgcccaaacagcgagtggaacatcttcttaagatgtggtcgtca

SEQ ID NO: 111928 - DNA, 80 bp, synthetic construct
  source 1..80: mol_type = other DNA
atgtaccagaacgcttgcacagcgactggggtgagggccaggaagcgaggccacagagcatggaatgctgcggcagcggc

SEQ ID NO: 111929 - DNA, 80 bp, synthetic construct
  source 1..80: mol_type = other DNA
tatcacctggggtgcagacactgcagcgtgtggcgatatcctggctgggcttccggtctctgcacgcttgggtcatttgc

SEQ ID NO: 111930 - DNA, 80 bp, synthetic construct
  source 1..80: mol_type = other DNA
tcaccaaccgcaatcgcaatcctttgaaggctgcgagagcgtttggaaaactcgggtacgtctaaattcaccccagtgcg

SEQ ID NO: 111931 - DNA, 80 bp, synthetic construct
  source 1..80: mol_type = other DNA
attccaacaaggatggggtaccattcagcatgctaatgtgtctggtccctcggaggataggccctattgctggcattacg

SEQ ID NO: 111932 - DNA, 80 bp, synthetic construct
  source 1..80: mol_type = other DNA
ctcgcatgttcaaagaaggacgtgacataagagagttcgtggcatatgcttcgggacggcggagtcttggggacatgctg

SEQ ID NO: 111933 - DNA, 80 bp, synthetic construct
  source 1..80: mol_type = other DNA
ggcgttaatcatccaccagcaatacaccacggccgtgaggaggtgacgcccaaggagcccggcctcgtcgatgacgatca

SEQ ID NO: 111934 - DNA, 80 bp, synthetic construct
  source 1..80: mol_type = other DNA
tgctctggacaacctggtcatgttgcacaattccgaacaaggaggaaaagcctacagacacgctatggaggaactaccag

SEQ ID NO: 111935 - DNA, 80 bp, synthetic construct
  source 1..80: mol_type = other DNA
cggagtcagatgcgtcgcagcgggtaacacagctgctcggctctctcaccataaccagcctgctgaggaggctccacaac

SEQ ID NO: 111936 - DNA, 80 bp, synthetic construct
  source 1..80: mol_type = other DNA
tctcttacgggatgaggttgtattccaggtcgggctcaatcaatacctggttgggtcacagctcccatgcgagcccgaac

SEQ ID NO: 111937 - DNA, 80 bp, synthetic construct
  source 1..80: mol_type = other DNA
gacccgaccggcatggacccgctactacaagatccacacagacgtcgaatatctcatctgcaaagcccttacctttgacg

SEQ ID NO: 111938 - DNA, 80 bp, synthetic construct
  source 1..80: mol_type = other DNA
ctatgaccatctcactccactgcgggactgggcccacgcaggcctacgagaccttgcggtggcagtcgagcccgtcgtct

SEQ ID NO: 111939 - DNA, 80 bp, synthetic construct
  source 1..80: mol_type = other DNA
atgaagtgggagtacgtagtcctcgcatttctggtcttggccgacgcgcgcgtttgcgcgtgcctttggatgatgttcct

SEQ ID NO: 111940 - DNA, 80 bp, synthetic construct
  source 1..80: mol_type = other DNA
tgtctgtggcccggtatattgcttcacacccagccctgtagtagtcggtactacagaccggaaagggctccccacataca

SEQ ID NO: 111941 - DNA, 80 bp, synthetic construct
  source 1..80: mol_type = other DNA
gcctcgctggcggcaagtacgtccaggctggcctcttgaagctaggagcgtggaccgggacttacatctatgaccatcta

SEQ ID NO: 111942 - DNA, 80 bp, synthetic construct
  source 1..80: mol_type = other DNA
gtgacgaaggaaaacaataagggacgccccccgtgtttgtggggaggggggggtcgggcgctggttggtctctggcctcg

SEQ ID NO: 111943 - DNA, 80 bp, synthetic construct
  source 1..80: mol_type = other DNA
tcctctaccaagagttcgatgaaatggaggagtgtgcagcgcacctcccctacatcgagcagggaatgcaactcgctgag

SEQ ID NO: 111944 - DNA, 80 bp, synthetic construct
  source 1..80: mol_type = other DNA
atgtttgtaggtggactggaacatcggttccaagccgcctgtaactggactcgtggggccccgtgcaacctcgacgatcg

SEQ ID NO: 111945 - DNA, 80 bp, synthetic construct
  source 1..80: mol_type = other DNA
acgatcgccgccctcaacttcaacttttccgccccgagcatgctcatctgcctgacgacgctgttcgccctgcttgtcgt

SEQ ID NO: 111946 - DNA, 80 bp, synthetic construct
  source 1..80: mol_type = other DNA
caggatgttcgtcggcggattggaacaccgttttgccgccgcctgcaactggaccagaggagagcgttgcaacttggagg

SEQ ID NO: 111947 - DNA, 80 bp, synthetic construct
  source 1..80: mol_type = other DNA
gtgtgccaagaccatctggagttttgggaggcggttttcaccggcctcacgcacatagatgctcacttcctctcccagac

SEQ ID NO: 111948 - DNA, 80 bp, synthetic construct
  source 1..80: mol_type = other DNA
aacagcagtggatgccctgagcgcttgagcgcctgcaagcccattactcacttccctcaagggtggggccccatcacata

SEQ ID NO: 111949 - DNA, 80 bp, synthetic construct
  source 1..80: mol_type = other DNA
ggccgtctcgaccgagagtcaatactccggcagctctattggacccgtgggcctaaccatgatgaccccagcgagaataa

SEQ ID NO: 111950 - DNA, 80 bp, synthetic construct
  source 1..80: mol_type = other DNA
gagcgccaccctctgttcggccctttacgtgggggacttgtgcgggtccattttccttgtcggtcaactgttcaccctct

SEQ ID NO: 111951 - DNA, 80 bp, synthetic construct
  source 1..80: mol_type = other DNA
agaagaaggtcatcacctggggagccgacactgcggcttgcggtgacatactgcagggcttgcccgtctcggcgcggctc

SEQ ID NO: 111952 - DNA, 80 bp, synthetic construct
  source 1..80: mol_type = other DNA
agagggaagtatccgttccggcggagatcctgcgaacaaccaggaagttccccccggcgatgcccatatgggcacgcccg

SEQ ID NO: 111953 - DNA, 80 bp, synthetic construct
  source 1..80: mol_type = other DNA
ggtgcgtggtttggatgcgtgtggatgaacagtaccgggttcaccaaaacctgtggcgcccctccatgcgaggttaacac

SEQ ID NO: 111954 - DNA, 80 bp, synthetic construct
  source 1..80: mol_type = other DNA
gatgccaacaggatggagctacgttgtggtgagggccttgttgtgtggagagaggtcactgattggtatgatggctatgc

SEQ ID NO: 111955 - DNA, 80 bp, synthetic construct
  source 1..80: mol_type = other DNA
gaggtggctgtgcagtggatgaaccggctgatagcgttcgcttcgcggggcaaccatgtttcccccacgcactacgtgcc

SEQ ID NO: 111956 - DNA, 80 bp, synthetic construct
  source 1..80: mol_type = other DNA
actgtccagacaaaacaaaacaaacatgaccacaagcaaaggaaagaggctgagcaaaggtcctgaatgaccagaccgtt

SEQ ID NO: 111957 - DNA, 80 bp, synthetic construct
  source 1..80: mol_type = other DNA
ttacatgccagccgtgattgagcacctagaaagactgcaaaggaaacacggaggaatgcttgtgagaaatccactttcac

SEQ ID NO: 111958 - DNA, 80 bp, synthetic construct
  source 1..80: mol_type = other DNA
cgtacggcctactccagatatggccgctcttgctgctggttctcttgctgccccagcgggcgtacgcctatggcggcgag

SEQ ID NO: 111959 - DNA, 80 bp, synthetic construct
  source 1..80: mol_type = other DNA
tattaccggaagtccaattttatatcactctgcacaggctattattgatgctgcgtgtataaatgcccgggttgacaatc

SEQ ID NO: 111960 - DNA, 80 bp, synthetic construct
  source 1..80: mol_type = other DNA
acggcgtgggactttggatcagtaggcggagtcttcaattcaatcggaaaggcagtacaccaagtctttggaggagcatt

SEQ ID NO: 111961 - DNA, 80 bp, synthetic construct
  source 1..80: mol_type = other DNA
tgccgatgcagtcccccaggtccacgcgcgagagcgggtactcggtcaggttggtggtgaaggtggtggatatggcgtcg

SEQ ID NO: 111962 - DNA, 80 bp, synthetic construct
  source 1..80: mol_type = other DNA
ccagcccatcaatgtcatccacacaaacggaagttggcatgtcaatagaacggcgctcaactgctttgactccttccgaa

SEQ ID NO: 111963 - DNA, 80 bp, synthetic construct
  source 1..80: mol_type = other DNA
gtgccccacagattgcttccgcagacatccggacgcaacatacgctaagtgcggctctggcccttggcttaaccctcgat

SEQ ID NO: 111964 - DNA, 80 bp, synthetic construct
  source 1..80: mol_type = other DNA
tcttggaacatgggggttgcgtcaccgtgatggcacaggacaagccaacagttgatatcgagttggtcacgacaacggtt

SEQ ID NO: 111965 - DNA, 80 bp, synthetic construct
  source 1..80: mol_type = other DNA
aatgttgactgaccccactcacatcacgtcggaggcagcggctaggaggctcgcacgggggtctcccccatctctggcaa

SEQ ID NO: 111966 - DNA, 80 bp, synthetic construct
  source 1..80: mol_type = other DNA
gacattcttggccacatgcatcaacggcgtgctctggacggtgttccacggcgctggatctaaaacccttgcgtcgaagg

SEQ ID NO: 111967 - DNA, 80 bp, synthetic construct
  source 1..80: mol_type = other DNA
tgcgggggaggggcttatgacatcatcatctgtgacgaatgccattccactgactccacgacgatccttggtataggcac

SEQ ID NO: 111968 - DNA, 80 bp, synthetic construct
  source 1..80: mol_type = other DNA
gcaacccgggcgtccgcgacgggtgtctccctaatcttgtcgaggaggcttctgctctcgactggctgggacttgcgctt

SEQ ID NO: 111969 - DNA, 80 bp, synthetic construct
  source 1..80: mol_type = other DNA
cccgcaacctacatatgaccttgagctcataacatcatgctcatccaacgtctccgtcgcccacgacggcaacgggaaga

SEQ ID NO: 111970 - DNA, 80 bp, synthetic construct
  source 1..80: mol_type = other DNA
tcctcctgaacatcttagggggttgggtagcttctcagcttgctccaccaaccgcgtccacggctttcgtcgtatcaggc

SEQ ID NO: 111971 - DNA, 80 bp, synthetic construct
  source 1..80: mol_type = other DNA
gtcgttctttaacagtccagacacatggggaaagcactctagcaaacaagaaaggagcatggcttgacagcaccaaagca

SEQ ID NO: 111972 - DNA, 80 bp, synthetic construct
  source 1..80: mol_type = other DNA
gagatgtttgtggccctgtctactgcttcaccccctcacccgtcgcggtaggaacgactgacagacttggagtccccact

SEQ ID NO: 111973 - DNA, 80 bp, synthetic construct
  source 1..80: mol_type = other DNA
tgtccttctctactttgtctgctgcaaagccagagagaaatctagtaggcccatctacaggccagtaatcggggagcctc

SEQ ID NO: 111974 - DNA, 80 bp, synthetic construct
  source 1..80: mol_type = other DNA
gtcgcgcaggccggccacggtggcggcgtacttggccgccacggccccgctcttgaacggggtgcgcgccagcagctttg

SEQ ID NO: 111975 - DNA, 80 bp, synthetic construct
  source 1..80: mol_type = other DNA
tttggtgtggctgctccgctaaatgacgcctcgatgtatggcgccttcttcgcccccacccctcgccgcgacccacgtcc

SEQ ID NO: 111976 - DNA, 80 bp, synthetic construct
  source 1..80: mol_type = other DNA
tcgctgaccagtcctctgagaacttctcaaactctgctcctcaacatacttggcggttggatagccgcccaagtggctcc

SEQ ID NO: 111977 - DNA, 80 bp, synthetic construct
  source 1..80: mol_type = other DNA
aatatctcaggctcttctgaggataagccttactgttggcattacgcccccagaccatgtggcatcgttccagcgcggaa

SEQ ID NO: 111978 - DNA, 80 bp, synthetic construct
  source 1..80: mol_type = other DNA
catctcagagatgggagcaaacttccgtgccagccgagtcatagacagccgcaaaagtgtgaaaccaattatcatcactg

SEQ ID NO: 111979 - DNA, 80 bp, synthetic construct
  source 1..80: mol_type = other DNA
aggccaaatggaagggagacataagaagctggcagaagccatattcaaactgacatatcagaataaggtagttcgcgttc

SEQ ID NO: 111980 - DNA, 80 bp, synthetic construct
  source 1..80: mol_type = other DNA
cgatctcatggggtacatcccggtcgtcggcgcccccgtgggtggcgtcgcaaaagccttcgcgcacggcgtgagagctc

SEQ ID NO: 111981 - DNA, 80 bp, synthetic construct
  source 1..80: mol_type = other DNA
gcatcggttgtccgcagcatgtaatttcacgcgcggagaccgctgcagattggaggatagggataggggtcagcaaagtc

SEQ ID NO: 111982 - DNA, 80 bp, synthetic construct
  source 1..80: mol_type = other DNA
tgatcttagtaatctcgagattcatctcagcgcgacaagcgatgatgaaatctccgatgccaccgatctggaggccgccg

SEQ ID NO: 111983 - DNA, 80 bp, synthetic construct
  source 1..80: mol_type = other DNA
ctcatggggtacattcctgtcgtcggcgccccggttggtggcgttgccagggctctcgcacatggtgtgagagttctgga

SEQ ID NO: 111984 - DNA, 80 bp, synthetic construct
  source 1..80: mol_type = other DNA
cgccacaggaataccagaataatgaccaccactatcgcgaccaccccaaatacagcatggcgccccaccacgccacaaca

SEQ ID NO: 111985 - DNA, 80 bp, synthetic construct
  source 1..80: mol_type = other DNA
cattggctactggacccctgaccactctctgggagggatctccaggaaaattctggaataccacaatagcagtgtccatg

SEQ ID NO: 111986 - DNA, 80 bp, synthetic construct
  source 1..80: mol_type = other DNA
gaggaggaggaaactcgtacaccttgacgagtcaaccgcagctcgagcgctggcccagctggctgagaaagctttcccaa

SEQ ID NO: 111987 - DNA, 80 bp, synthetic construct
  source 1..80: mol_type = other DNA
taccaggggaagcgctggttgaacatgcacccgtaaatgactctcctaaaccacacggccagcagggtgcctcccgcccg

SEQ ID NO: 111988 - DNA, 80 bp, synthetic construct
  source 1..80: mol_type = other DNA
agacaccgcgtcgctcaagcatggttagtagagatgaaagtctgaaaaacagaaagcatgcactaaaccagagtggccag

SEQ ID NO: 111989 - DNA, 80 bp, synthetic construct
  source 1..80: mol_type = other DNA
gattataatcaagacaatgacaaaattccatcaactactgtggcaatcgtggtgggtgtgattgcgggcttcataactct

SEQ ID NO: 111990 - DNA, 80 bp, synthetic construct
  source 1..80: mol_type = other DNA
ccccactcccttgctatacaggcttggggccgtgcagaatgagatcaccaccacgcatccaatcacaaaatacatcatga

SEQ ID NO: 111991 - DNA, 80 bp, synthetic construct
  source 1..80: mol_type = other DNA
ggccgtcaaaactaagctcaaactcactccattgcctgaagcatctcgcctcgacttgtcggggtggtttgtagcaggct

SEQ ID NO: 111992 - DNA, 80 bp, synthetic construct
  source 1..80: mol_type = other DNA
gagaggggtcgtggtgggaaatgttcaagttctttttccaccgcctctacgaccaccagatcgtaccgtcgacccccgcc

SEQ ID NO: 111993 - DNA, 80 bp, synthetic construct
  source 1..80: mol_type = other DNA
gtcccctctgtcctcattgatattctcagtgggggccattggggtgtcctggcagggctcgcattcttcggtgtgcagag

SEQ ID NO: 111994 - DNA, 80 bp, synthetic construct
  source 1..80: mol_type = other DNA
gagaggtgatggtgtgtgtcacaccacctgtacctgcggtgccgtgattgctggccatgtacgtaacgggaccatgaaga

SEQ ID NO: 111995 - DNA, 80 bp, synthetic construct
  source 1..80: mol_type = other DNA
gcattatccgtatcgtctgtggcattatccgtgcaccgtgaactttaccctgtttaaagtgcgtatgtttgtgggcggct

SEQ ID NO: 111996 - DNA, 80 bp, synthetic construct
  source 1..80: mol_type = other DNA
accatactttgtcagggcgcgagccctgctcaggatgtgcaccctcgtgagacacctggctgggggtaagtacgtccaga

SEQ ID NO: 111997 - DNA, 80 bp, synthetic construct
  source 1..80: mol_type = other DNA
accgcgcccacagccacctcgacccgtccgatcccggtatgcccggccgctcgctgcagggcctggcgatcctgggcctg

SEQ ID NO: 111998 - DNA, 80 bp, synthetic construct
  source 1..80: mol_type = other DNA
tgagcccgttgttgttttcgactacagagctctctatcctcccgtgctcgttcaccaccatgcctgcactgtcaaccggt

SEQ ID NO: 111999 - DNA, 80 bp, synthetic construct
  source 1..80: mol_type = other DNA
ctccgcgagctagacgccgccgccccaggggacgagcccgccccccccgcggccctgccctccccggccaagcgccaccg

SEQ ID NO: 112000 - DNA, 80 bp, synthetic construct
  source 1..80: mol_type = other DNA
ttagcccgttgagcaattccctcatccgtcaccacaatttggtgtactccacaacatcacggagtgccgcaatgcgtcag

SEQ ID NO: 112001 - DNA, 80 bp, synthetic construct
  source 1..80: mol_type = other DNA
ctacaaagtcaacatctcgggcccctccgacgaccgtccctactgttggcattacgctcccaggccatgtgacgtggtgt

SEQ ID NO: 112002 - DNA, 80 bp, synthetic construct
  source 1..80: mol_type = other DNA
ccgcccggtcggtatgtggtccagtgtactgtttcactcccaccccggtggtcgtgggcacgaccgacaggctcggggtg

SEQ ID NO: 112003 - DNA, 80 bp, synthetic construct
  source 1..80: mol_type = other DNA
aaccttcctggttgctctttctctatcttcctcttggcgcttctctcgtgcctcaccacccctgcctctgcggtgcacta

SEQ ID NO: 112004 - DNA, 80 bp, synthetic construct
  source 1..80: mol_type = other DNA
ctgctccatctttgaaggcgacctgtactacagaagcgcgccatcctgatgcagagttgttggaggccaaccttttgttt

SEQ ID NO: 112005 - DNA, 80 bp, synthetic construct
  source 1..80: mol_type = other DNA
ggtgagcggagctgctggtaacgtggtgcatgcggtcaacatgaccagtcaagtgctgctagggcgaatggatcgcacag

SEQ ID NO: 112006 - DNA, 80 bp, synthetic construct
  source 1..80: mol_type = other DNA
tgggcgacgaaccggtaccccgggcacgcggtgagcatccggtctatgagccggtagtgcaggtgtgcggacgtgccggg

SEQ ID NO: 112007 - DNA, 80 bp, synthetic construct
  source 1..80: mol_type = other DNA
agaccagtggctgcatccactgctcctgcgaaagccccgagtgcatctactccctccttaaaaccctttgcggactccgc

SEQ ID NO: 112008 - DNA, 80 bp, synthetic construct
  source 1..80: mol_type = other DNA
cgggcaccggatggcgtgggacatgatgatgaattggtcaccaactgccaccttggtcttgtcttatttcattcgcgtgc

SEQ ID NO: 112009 - DNA, 80 bp, synthetic construct
  source 1..80: mol_type = other DNA
ctaaggtgaaagtcgatacgctgtccgtcgaggaagcgtgtcgtctgaccccgccccattccgcgcgatccaagttcgga

SEQ ID NO: 112010 - DNA, 80 bp, synthetic construct
  source 1..80: mol_type = other DNA
gcaatctggcctggaccctcggaagtgccaccttgtgcatataccccaatggcctccagaactgagacgcattttaacca

SEQ ID NO: 112011 - DNA, 80 bp, synthetic construct
  source 1..80: mol_type = other DNA
gtgcccaaggcttctggtacgccatcctcttcatctgcattgtctggcatgtcaagggccggttcccagctgctgctgcc

SEQ ID NO: 112012 - DNA, 80 bp, synthetic construct
  source 1..80: mol_type = other DNA
gaggtcccgtgctatgcccctctggccacgtcgcggggatcttccgcgcggcggtgtgtactaggggtgtggctaaatca

SEQ ID NO: 112013 - DNA, 80 bp, synthetic construct
  source 1..80: mol_type = other DNA
acgtggcccgggccttcgtggtgaggtcgcgcgcgtagaagccgtcgacctgcttgaagcggtcggcggcgtagctggtg

SEQ ID NO: 112014 - DNA, 80 bp, synthetic construct
  source 1..80: mol_type = other DNA
ccggaaggttcagcgtttccccggcggcaccttcctacactttgaagctaggagaatacggagaagttacagtggactgt

SEQ ID NO: 112015 - DNA, 80 bp, synthetic construct
  source 1..80: mol_type = other DNA
agtgcaaccctccgccagaagaaagtgacttttgacagagtccaggtgctggatcagcactaccaagatgtgctcaagga

SEQ ID NO: 112016 - DNA, 80 bp, synthetic construct
  source 1..80: mol_type = other DNA
cgtgttggccaccagattggccgggtgcaggtggtgcgcggggtccgtcacggggtcgctggagcaatcctcgcctggtg

SEQ ID NO: 112017 - DNA, 80 bp, synthetic construct
  source 1..80: mol_type = other DNA
accaaaacaaagtggtaaaggtccttagaccagctgaaaaagggagaacagttatggacattatttcgagacaagaccaa

SEQ ID NO: 112018 - DNA, 80 bp, synthetic construct
  source 1..80: mol_type = other DNA
taggtcctggcaacagccaggatatccatggcccctctatggtaacgagggctgcggttgggcaggatggctcctgtccc

SEQ ID NO: 112019 - DNA, 80 bp, synthetic construct
  source 1..80: mol_type = other DNA
gcatgggacatgatgatgaattggtcccccaccgccaccctggtggtctccagcgcgctaagaataccgcaggtgattat

SEQ ID NO: 112020 - DNA, 80 bp, synthetic construct
  source 1..80: mol_type = other DNA
tcagtgatttcaaaacctggctttcatctaagatcatgcccaagctgccgggagttcccttcctctcatgtcagaaggga

SEQ ID NO: 112021 - DNA, 80 bp, synthetic construct
  source 1..80: mol_type = other DNA
cgctgtcccggcgtccgcgaacggactggctcctggccgtaacggacctggggcgcggaaaggacgcccggcggtgtggc

SEQ ID NO: 112022 - DNA, 80 bp, synthetic construct
  source 1..80: mol_type = other DNA
taggaccactggagggcgtcatgctctggggtggtgttgtaaataatccaatcgtagcagggtttttgagcatgaaactg

SEQ ID NO: 112023 - DNA, 80 bp, synthetic construct
  source 1..80: mol_type = other DNA
gacgttctttaacggtgcaaacccatggtgagagcaccttggcaaacaagaaaggagcttggcttgacggcaccaaagcg

SEQ ID NO: 112024 - DNA, 80 bp, synthetic construct
  source 1..80: mol_type = other DNA
tgggccaagcacatgtggaacttcatcagcgggatacaataccttgcgggactgtcaaccctccctgggaaccccgctat

SEQ ID NO: 112025 - DNA, 80 bp, synthetic construct
  source 1..80: mol_type = other DNA
ggccctagcggcttactgcttgtcagtcggctgcgttgtgatcgtgggtcatattgagctggggggcaagccagcactcg

SEQ ID NO: 112026 - DNA, 80 bp, synthetic construct
  source 1..80: mol_type = other DNA
cggggtgtagcgcagaaacacggcccccacgaggccgaggtcgcgccggttttcggtgcgcaccagccgcttcggctcaa

SEQ ID NO: 112027 - DNA, 80 bp, synthetic construct
  source 1..80: mol_type = other DNA
tgcctgaatctaatttggataaagattattggaactacagaagtgatgatttaactatagccaagccatatgaaaatgca

SEQ ID NO: 112028 - DNA, 80 bp, synthetic construct
  source 1..80: mol_type = other DNA
tccacaaagattacatatgttgtcaaggttgagccccacacaggggattacctggctgcaaatgagaccaactcaaacag

SEQ ID NO: 112029 - DNA, 80 bp, synthetic construct
  source 1..80: mol_type = other DNA
cattgacactgctctatcaaatgaccgtgctgccaacctcgtaccagaggctaataaagaggttatggcacttgaaccgg

SEQ ID NO: 112030 - DNA, 80 bp, synthetic construct
  source 1..80: mol_type = other DNA
tattgcgctgggctgaagaaagtcacagaagtgaaaggatacacgaaaggaggacctggacatgaggaaccaatcccaat

SEQ ID NO: 112031 - DNA, 80 bp, synthetic construct
  source 1..80: mol_type = other DNA
tattttaacacaccaggccttcccgtctgccaggatcacctggaattttgggagagcgtctttacgggcctcacccatat

SEQ ID NO: 112032 - DNA, 80 bp, synthetic construct
  source 1..80: mol_type = other DNA
gtgctaaacccgtcggtggccgctacgctgaactttggagcctatatgtccaaagcgcacggcatagatcccaacatcag

SEQ ID NO: 112033 - DNA, 80 bp, synthetic construct
  source 1..80: mol_type = other DNA
agtggcagccaacgaaatgggttggctggacaagaccaagaatgatataagcagtttgtttgggcaaagaattgaggcca

SEQ ID NO: 112034 - DNA, 80 bp, synthetic construct
  source 1..80: mol_type = other DNA
ccatttcttctcaatactccagagccaggaagcccttgaaaaagcactcgacttcgacatgtacggagtcacttactctg

SEQ ID NO: 112035 - DNA, 80 bp, synthetic construct
  source 1..80: mol_type = other DNA
ctgctgctatttgccggcgtcgacgcggaaacccatgtcaccgggggaactgccagccggactacggctggttttgctgg

SEQ ID NO: 112036 - DNA, 80 bp, synthetic construct
  source 1..80: mol_type = other DNA
actgtttgacaacgggtagcgtcgtcatctgcgggaggatcaccacctccggcaggcccgcagtggtgcctgaccgggag

SEQ ID NO: 112037 - DNA, 80 bp, synthetic construct
  source 1..80: mol_type = other DNA
ctggggcgcccatgcccagaacgcgatcaggcccgaccctcgccaacactacgtcctcaagttttctcacccgtcgcccc

SEQ ID NO: 112038 - DNA, 80 bp, synthetic construct
  source 1..80: mol_type = other DNA
cttcgtggtaggtgccactacggacaatctaaagtgtccgtgccaggttcctgctcccgagtttttcactgaggtcgatg

SEQ ID NO: 112039 - DNA, 80 bp, synthetic construct
  source 1..80: mol_type = other DNA
cgctttgtcaactggtcttctccaccttcaccagaacatcgtggacgtacaatacatgtatggcctctcacctgctatca

SEQ ID NO: 112040 - DNA, 80 bp, synthetic construct
  source 1..80: mol_type = other DNA
gcacgctgacccttcccaacgcgcgttaccaccctagcattctcgtttaatccgtgcgctgccgttttttcagatggctt

SEQ ID NO: 112041 - DNA, 80 bp, synthetic construct
  source 1..80: mol_type = other DNA
tcagagccaaattgatcgctcaggtgggaaaagctgcattatgcggcaggtacctcttcaattgggcggttaaaactaag

SEQ ID NO: 112042 - DNA, 80 bp, synthetic construct
  source 1..80: mol_type = other DNA
tgaatgatccaggagcaccttggaaaatatggatgctccgtatggcttgcctggcaatcagcgcgtacaccccttgggct

SEQ ID NO: 112043 - DNA, 80 bp, synthetic construct
  source 1..80: mol_type = other DNA
acgtcggattccaggtcgtgaaccacgggctgatgtttgtggtccccgacatcgccgtatacgcgatgctgggaggcgcc

SEQ ID NO: 112044 - DNA, 80 bp, synthetic construct
  source 1..80: mol_type = other DNA
aacgcggttacaagcgacaccacatggttccagctaaatccaccgggtccggatccggggccatcttatcgagtttattt

SEQ ID NO: 112045 - DNA, 80 bp, synthetic construct
  source 1..80: mol_type = other DNA
ggtgctcgtgctcaacccctctgtcgctgcaacgttgggttttgggaactacatgtcaaaagcacacggcattgacccga

SEQ ID NO: 112046 - DNA, 80 bp, synthetic construct
  source 1..80: mol_type = other DNA
gcgaagggaagccgtgccatctggtacatgtggctgggagcccgatatcttgagtttgaagccctgggattcctgaatga

SEQ ID NO: 112047 - DNA, 80 bp, synthetic construct
  source 1..80: mol_type = other DNA
cactattattgctcttgtggcagccaatgagatggggctaattgaaaaaacaaaaacggattttgggttttaccaggtaa

SEQ ID NO: 112048 - DNA, 80 bp, synthetic construct
  source 1..80: mol_type = other DNA
agagggtcttacagtagatgacaccgggtttttgaaagaaaacataagtgctaccacaccactcgttaagactggtcact

SEQ ID NO: 112049 - DNA, 80 bp, synthetic construct
  source 1..80: mol_type = other DNA
gggtgcggaacgttggatatacaatccaaccatgggggagttagttaaggcgagataaaaattaatataacacgtctcat

SEQ ID NO: 112050 - DNA, 80 bp, synthetic construct
  source 1..80: mol_type = other DNA
cagttacgtggtatgggggtaaaggtataaataagttatgtgagggaaataacgttcattttaaacaattgaaacacaat

SEQ ID NO: 112051 - DNA, 80 bp, synthetic construct
  source 1..80: mol_type = other DNA
ccggtggatgcggcagccgccctgcgggggcggacctgctccgggccgactatgacattatcgacgtcagcaagtccatg

SEQ ID NO: 112052 - DNA, 80 bp, synthetic construct
  source 1..80: mol_type = other DNA
agcataaaaaatgtaattattcccctcttgcacaggcagcctagctcccggcccctccaaaatcacatacaaaacttcag

SEQ ID NO: 112053 - DNA, 80 bp, synthetic construct
  source 1..80: mol_type = other DNA
ttgttgggtgctatagtggtgagcatgacagggcgcgacaagacagaccaggctggggaaattcaagttctgtccaccgt

SEQ ID NO: 112054 - DNA, 80 bp, synthetic construct
  source 1..80: mol_type = other DNA
ccggggtcggactggcagggtgaggttgggcacttaccgatatgtcactccgggcgagagaccatctggcatgtttgaca

SEQ ID NO: 112055 - DNA, 80 bp, synthetic construct
  source 1..80: mol_type = other DNA
gcggggccgtccgcgggttgcccgtccagataaagtccacggccgtgccggaccgcacggccgcctcggcctccacgcgg

SEQ ID NO: 112056 - DNA, 80 bp, synthetic construct
  source 1..80: mol_type = other DNA
ttcctgcggtcgtggttgacctgctctccggaggccactggggcattctcgcgggtttggcgtactacagtatgcaggct

SEQ ID NO: 112057 - DNA, 80 bp, synthetic construct
  source 1..80: mol_type = other DNA
gggaagacctcgcacgtaactcacgttgtgcattgtcaaagtgttacattcgggcagcagcggatgatcctccagtatgg

SEQ ID NO: 112058 - DNA, 80 bp, synthetic construct
  source 1..80: mol_type = other DNA
caagggacagatccatcgcgttggcgttcttggcgacaggaggagtcctattattcctagcagtcaacgtgcatgcggac

SEQ ID NO: 112059 - DNA, 80 bp, synthetic construct
  source 1..80: mol_type = other DNA
ttgtgtcaccggtgattccttccaagaggtgagtgataaagcgaggtaggtgctctttaatcatagcagtaatggaaaag

SEQ ID NO: 112060 - DNA, 80 bp, synthetic construct
  source 1..80: mol_type = other DNA
tgaggacgttgtttcggcagcagcagggccgggccccggagaacgagaggcccatagctcggcgagcgtgtcgtcgaatg

SEQ ID NO: 112061 - DNA, 80 bp, synthetic construct
  source 1..80: mol_type = other DNA
cggcgcgccgggcgccatggcgtcggtggtccccgaggccgccgcccggccgtccagcgccggcagcacggcccggcggt

SEQ ID NO: 112062 - DNA, 80 bp, synthetic construct
  source 1..80: mol_type = other DNA
ggccaacagagggttttcaaggaaaaggtggataccaaagcgcaggagccacaggtgggaaccaagatcattatgagggc

SEQ ID NO: 112063 - DNA, 80 bp, synthetic construct
  source 1..80: mol_type = other DNA
gcgcgacgaggaagacttccgaacggtcccagccacgcggaagacgccagcccatccccaaagatcggcgttccgctggc

SEQ ID NO: 112064 - DNA, 80 bp, synthetic construct
  source 1..80: mol_type = other DNA
agtcctcgatctgcagctgctgggtgcggggccccaggcttttcacggtcgccacgaacacgctactggcgacggccgcc

SEQ ID NO: 112065 - DNA, 80 bp, synthetic construct
  source 1..80: mol_type = other DNA
gcctatggtgtggagcctaacatcagaactggggttagatctatcacaacaggatctcctatcacctactctacctatgg

SEQ ID NO: 112066 - DNA, 80 bp, synthetic construct
  source 1..80: mol_type = other DNA
cacggtcaggctacgcgcataccttaatacccctggtctacccgtatgccaggaccatcttgaattttgggagggggtct

SEQ ID NO: 112067 - DNA, 80 bp, synthetic construct
  source 1..80: mol_type = other DNA
accttgcccatcacccaactacactcgcgcgctatggcgcgtggctgccagcagctacgtagaggtgcgccgtgtggtgg

SEQ ID NO: 112068 - DNA, 80 bp, synthetic construct
  source 1..80: mol_type = other DNA
agtcaccctgtgacacccgacgtgagcttctttgacagttcgtttgcgccgtatttaactacgcaacatcttgttgcgtt

SEQ ID NO: 112069 - DNA, 80 bp, synthetic construct
  source 1..80: mol_type = other DNA
acgcggtgggccgccggcgcaggctcaggcgcgccaggtactccgtcgtggtgcgcagccgtagggccaggtggtgcgga

SEQ ID NO: 112070 - DNA, 80 bp, synthetic construct
  source 1..80: mol_type = other DNA
tacaacagccacaacgtctatatcatggccgacaagcagaagaacggcatcaaggtgaacttcaagatccgccacaacat

SEQ ID NO: 112071 - DNA, 80 bp, synthetic construct
  source 1..80: mol_type = other DNA
aacagcggggcccagcacacgggtaagatgtcccttggacgtaaggacttatagcttacagaagaccccgccacaggcaa

SEQ ID NO: 112072 - DNA, 80 bp, synthetic construct
  source 1..80: mol_type = other DNA
aatcgccgggtggcacggccccaagcccccgtacaccagcaccctgctgccgccggagctgtccgacaccaccaacgcca

SEQ ID NO: 112073 - DNA, 80 bp, synthetic construct
  source 1..80: mol_type = other DNA
attgacccaaacgtcaggactggcgtaaggaccattaccacaggctcccccatcacccactccacctacggcaaattcct

SEQ ID NO: 112074 - DNA, 80 bp, synthetic construct
  source 1..80: mol_type = other DNA
acacatcgacgcccatttcttgtcccagactaagcaggggggggaaaattttgcatacttggtggcctaccaggccaccg

SEQ ID NO: 112075 - DNA, 80 bp, synthetic construct
  source 1..80: mol_type = other DNA
accagatctacgctggtaactacttcaccgcgcaagctttcattggtccaggctaaacgaccgccttttctagaacaaaa

SEQ ID NO: 112076 - DNA, 80 bp, synthetic construct
  source 1..80: mol_type = other DNA
gtggaagcctggaccgatgtaagggttcggggctgtgccttttactgctgctggaaggtggtggtgtgtcgccccaaaag

SEQ ID NO: 112077 - DNA, 80 bp, synthetic construct
  source 1..80: mol_type = other DNA
gacttcgcgcctgtggagagcatgcaatcctcccagcggtcaccatctttctctgacaacacttctcctcctgccgtgcc

SEQ ID NO: 112078 - DNA, 80 bp, synthetic construct
  source 1..80: mol_type = other DNA
aaaattcctcagtgaatgtgtctctaacggccattgccaaccaagccacagtgttaatgggtcttgggaaaggatggcca

SEQ ID NO: 112079 - DNA, 80 bp, synthetic construct
  source 1..80: mol_type = other DNA
tcattggcctttatggaaatggagtgatactaggtaatggggcctacgtcagtgctattgttcaaggagaaagagtagag

SEQ ID NO: 112080 - DNA, 80 bp, synthetic construct
  source 1..80: mol_type = other DNA
agtgatacagacagtggacttcagcctggatccaaccttctccatagagaccacaacagtgccccaggacgcggtatccc

SEQ ID NO: 112081 - DNA, 80 bp, synthetic construct
  source 1..80: mol_type = other DNA
gggaaagaccggagtggttctctgctttcctccaggggtctgcgagcacagtttgctctagaaaagcaacttgtgtggga

SEQ ID NO: 112082 - DNA, 80 bp, synthetic construct
  source 1..80: mol_type = other DNA
ccaacaccacacaaggcattaaactttcttggagcgcccccctcgcagtacgggcaagtgcccttacattaattacaaaa

SEQ ID NO: 112083 - DNA, 80 bp, synthetic construct
  source 1..80: mol_type = other DNA
gaggacctggccatgaagagccacaactggtgcagagctatggttggaatattgttaccatgaagagcggagtcgacgtc

SEQ ID NO: 112084 - DNA, 80 bp, synthetic construct
  source 1..80: mol_type = other DNA
cagctatcatgggagatgcttatggctttcaatactccccacagcaacgagtggaccgcctgctcaagatgtggcgctcc

SEQ ID NO: 112085 - DNA, 80 bp, synthetic construct
  source 1..80: mol_type = other DNA
acccccccggcgaccaccgcgaccgcggccgtagcaggcgccggcgctagccagccacagacagagatggacttggaaga

SEQ ID NO: 112086 - DNA, 80 bp, synthetic construct
  source 1..80: mol_type = other DNA
aggcgcaactgcatgtgtggatcccccctctctacgtccgaggggggcgtgacgccgtcatcttactcacgtgtgttgtg

SEQ ID NO: 112087 - DNA, 80 bp, synthetic construct
  source 1..80: mol_type = other DNA
gtaccgaatgcctcggtgcctgcgagcgggttccgcaagcatgtggatctcctcgcaggcgctgcggttgtttgctcttc

SEQ ID NO: 112088 - DNA, 80 bp, synthetic construct
  source 1..80: mol_type = other DNA
gcgcctccggtggttccgggcccggcgacccagtgcctggcgctcggggccgcctacgcggcgctgctggtgctggccga

SEQ ID NO: 112089 - DNA, 80 bp, synthetic construct
  source 1..80: mol_type = other DNA
ggagtaacaacggttgatgtcgacttactttatcgtctaacacgcattgcagcgtatctgcacattcaggttgaacttct

SEQ ID NO: 112090 - DNA, 80 bp, synthetic construct
  source 1..80: mol_type = other DNA
tgcgtcacctttgccgcccgcgaggagggcgcgtcgtccagcaccagcgcccaggtccagattctgaccagcgcgctgaa

SEQ ID NO: 112091 - DNA, 80 bp, synthetic construct
  source 1..80: mol_type = other DNA
ctgtcctgtcctgcctgacggttccaacatccgctcacggagtacgcaactcttcagggatttaccatgtcaccaatgat

SEQ ID NO: 112092 - DNA, 80 bp, synthetic construct
  source 1..80: mol_type = other DNA
tgggtgcgtaagcatcatcggccgcatccacctcaatcagaggacggtcatcgctcctgacagggaggtcctttatgaag

SEQ ID NO: 112093 - DNA, 80 bp, synthetic construct
  source 1..80: mol_type = other DNA
caagagctttggctgccctccccctagcggtgactcaggtcactccacaggggaaggcactactggtgagaccagtaagt

SEQ ID NO: 112094 - DNA, 80 bp, synthetic construct
  source 1..80: mol_type = other DNA
cgaggcgcgagcccgtggacatggacgcggagctggaggacgacgacgacggactgtttggggagtgacggtgtggaact

SEQ ID NO: 112095 - DNA, 80 bp, synthetic construct
  source 1..80: mol_type = other DNA
gccaactcccttttctctttctatggtgatgatgaaaagacaaccaaaaggttcttatgctgataatctgcatcatagtg

SEQ ID NO: 112096 - DNA, 80 bp, synthetic construct
  source 1..80: mol_type = other DNA
tcctatctagcatcttgagggtacctgagatctgtgcgagtgtgatatttggtggccattgggggatactactagccgtt

SEQ ID NO: 112097 - DNA, 80 bp, synthetic construct
  source 1..80: mol_type = other DNA
cctgatttcttattacagcccccgccgcccccaccggctcctgtacagcgcgctccatcagttattagctactttcacat

SEQ ID NO: 112098 - DNA, 80 bp, synthetic construct
  source 1..80: mol_type = other DNA
gaccacaccccttgcgcgagccgcgtgggagacggctagacacactccagtcaattcgtggttggggaacattatcctgt

SEQ ID NO: 112099 - DNA, 80 bp, synthetic construct
  source 1..80: mol_type = other DNA
caatgtacctattgcaacatgctctcttgcaggtgccgtactacgtgcgtgcccatgctcttctgcgcatgtgtatgctc

SEQ ID NO: 112100 - DNA, 80 bp, synthetic construct
  source 1..80: mol_type = other DNA
tgagatcattgagtcagactccaagtcgtggtccacagtctctgatcaggaggattctgttatctgctgctccatgtcat

SEQ ID NO: 112101 - DNA, 80 bp, synthetic construct
  source 1..80: mol_type = other DNA
ggatgctcttgctcgtcacccaagcagaggcggctttggagaacttaatcgttctcaacgcaatctccgccgctggcgtt

SEQ ID NO: 112102 - DNA, 80 bp, synthetic construct
  source 1..80: mol_type = other DNA
ctttgagatgtatggatcagtatactccgtgaatcctttggaccttccagccataattgagaggttacacgggcttgacg

SEQ ID NO: 112103 - DNA, 80 bp, synthetic construct
  source 1..80: mol_type = other DNA
gccgcccttgggcgcgtccgccgcgccccccgcccccatgcgcgccagcacgcgacgcagcgcctcctcgtcgcactgtt

SEQ ID NO: 112104 - DNA, 80 bp, synthetic construct
  source 1..80: mol_type = other DNA
cccatgcgcctccatcgagataacgtcatgctgtctacggaaccagactaagcacccccgccgtcccctttcttttcccc

SEQ ID NO: 112105 - DNA, 80 bp, synthetic construct
  source 1..80: mol_type = other DNA
actggacgaaacggacctcgcccctctggcgcgagcgtgtctgtagggcgccacggcgggaggtgtcaggcggactatcg

SEQ ID NO: 112106 - DNA, 80 bp, synthetic construct
  source 1..80: mol_type = other DNA
gcggtccttgggagtaaacgcagtagcgtactacaggggccttgacgtgtccgtcattccacaagatggagacgtagtag

SEQ ID NO: 112107 - DNA, 80 bp, synthetic construct
  source 1..80: mol_type = other DNA
ccaggcaggcttttgtgccgaagcagaacctgtttagggaccgcagcggtcaggaggcggaggagatgcgcgattgcagg

SEQ ID NO: 112108 - DNA, 80 bp, synthetic construct
  source 1..80: mol_type = other DNA
agcaagcgcaagtttaaagaagaactgctgcagacgctggtgcctgagatctatggccctccggacgtgaagcctgacat

SEQ ID NO: 112109 - DNA, 80 bp, synthetic construct
  source 1..80: mol_type = other DNA
gtctggctcaaggttagagaagattattcattagagtgtgatccagccgttattggaacagctgttaaggggaaggaggc

SEQ ID NO: 112110 - DNA, 80 bp, synthetic construct
  source 1..80: mol_type = other DNA
cagagctaaagccccccctccctcgtgggatacgatgtggaagtgtcttatcagactcaagcccactctcacaggaccca

SEQ ID NO: 112111 - DNA, 80 bp, synthetic construct
  source 1..80: mol_type = other DNA
ccaccgctgggcgctataaagccgccaccctctcttccctcaggtcatccttggtcgatcccgaacgacacacggcgtgg

SEQ ID NO: 112112 - DNA, 80 bp, synthetic construct
  source 1..80: mol_type = other DNA
tccaagtgcatactctatgtcattttcatgggactggtctggccacaactacattaatgaaatatttgccacatcctctt

SEQ ID NO: 112113 - DNA, 80 bp, synthetic construct
  source 1..80: mol_type = other DNA
gcgaattgaaaactggatattacggcacccagggtatacagtcatggcggccgctattgcaatggccattggaaccaaca

SEQ ID NO: 112114 - DNA, 80 bp, synthetic construct
  source 1..80: mol_type = other DNA
ggtgtctcctagttggcccgcgtgggtcagccaggcgacgagcgcctcgtagagcggcagccttcgctctccatcctgca

SEQ ID NO: 112115 - DNA, 80 bp, synthetic construct
  source 1..80: mol_type = other DNA
gagccacatctcgcgcgcgctgtttctgccccccatcaaactcgagtgcgaaaagacgttcaccaagctgctgctgatcg

SEQ ID NO: 112116 - DNA, 80 bp, synthetic construct
  source 1..80: mol_type = other DNA
gcaattgcttccaccgaaaatgtggtggggttgctgggatcaaagactacacgagacgatgcgggttgtgtcatcgttta

SEQ ID NO: 112117 - DNA, 80 bp, synthetic construct
  source 1..80: mol_type = other DNA
cacggagccctgccgccggcgcccggcgcggcgggcacgggcatcacggtcaggggcccggcgcgctgcgagaccgagtc

SEQ ID NO: 112118 - DNA, 80 bp, synthetic construct
  source 1..80: mol_type = other DNA
ggcaatgacggagggcgctccgggctcgtctcctggaggtagggagtaacggtggtgtgctctcgctgacggccagccat

SEQ ID NO: 112119 - DNA, 80 bp, synthetic construct
  source 1..80: mol_type = other DNA
ttgaccacctccaccactctcctgcttaatatcttgggtgggtggttagcaagccagttagcaccccccgctgcggcgac

SEQ ID NO: 112120 - DNA, 80 bp, synthetic construct
  source 1..80: mol_type = other DNA
gctgcccgtgtcactaccatactgtcctccctcactgtgacatctcttctcagacgccttcacaagtggatcaatgaaga

SEQ ID NO: 112121 - DNA, 80 bp, synthetic construct
  source 1..80: mol_type = other DNA
cctacgggcttggagacatcgggcaagagcagtgcgcgcatcgctcatcgctcagggagtgaaggcggccatctgcggtc

SEQ ID NO: 112122 - DNA, 80 bp, synthetic construct
  source 1..80: mol_type = other DNA
gccgagctcgcagcagcccctcccccccgcgcgccgcagggctgctttcccgcgcccgcccccgcgcggcttaaggcgtg

SEQ ID NO: 112123 - DNA, 80 bp, synthetic construct
  source 1..80: mol_type = other DNA
tgtccgctccgtctctaaaagggacatgtacaacgcacagtccccatccggatgcggaattgcttgaggccaatctctta

SEQ ID NO: 112124 - DNA, 80 bp, synthetic construct
  source 1..80: mol_type = other DNA
agcattagttgtacaaagtcatccaaatcattgcatataagctctgtcagttcgctatcaggaagcagctcaggtgatgc

SEQ ID NO: 112125 - DNA, 80 bp, synthetic construct
  source 1..80: mol_type = other DNA
gccacagacataccaagtggggtacctccacgcgcctacgggcagcggtaaaagcactaaagtcccagcggcatatgctg

SEQ ID NO: 112126 - DNA, 80 bp, synthetic construct
  source 1..80: mol_type = other DNA
tgcggggacgatttggttatagtggctgagagtggcggtgtcgaggaggatagagcggccctgagagccttcacggaggc

SEQ ID NO: 112127 - DNA, 80 bp, synthetic construct
  source 1..80: mol_type = other DNA
cgctgacgtcattccggtccggaggaaagatgatagacggggtgcattgctgtcgccaaggcctctctcaaccctcaaag

SEQ ID NO: 112128 - DNA, 80 bp, synthetic construct
  source 1..80: mol_type = other DNA
ggtcggatctcataccgggatacacagctttcatgaaagcttcatattgcttgaaagcctgttgggccttgctaccctca

SEQ ID NO: 112129 - DNA, 80 bp, synthetic construct
  source 1..80: mol_type = other DNA
tccaaggatcatggaacacaggagaagaagtgcaggtgatagctgttgaaccaggaaaaaaccccaaaaatgtacagaca

SEQ ID NO: 112130 - DNA, 80 bp, synthetic construct
  source 1..80: mol_type = other DNA
gttggaggggtgttcacctcagtagggaaggctgtccatcaagtgtttggaggagcattccgctcactgttcggaggcat

SEQ ID NO: 112131 - DNA, 80 bp, synthetic construct
  source 1..80: mol_type = other DNA
gcggagccggccggggccgccacgtacgccccgtacggattggcggcttcgacggggtcgcggttaaggcccccgaccgc

SEQ ID NO: 112132 - DNA, 80 bp, synthetic construct
  source 1..80: mol_type = other DNA
aagggaagttacaaaatgagtggcttcacggaaggaaacgctgtgagttttgagggtggggtgtttagcccatatctgac

SEQ ID NO: 112133 - DNA, 80 bp, synthetic construct
  source 1..80: mol_type = other DNA
gcaatctcacgtctgcttgggttatgtatgggacatgcacccaaagtggagaacgaaggcgagagaagcgctcagtagct

SEQ ID NO: 112134 - DNA, 80 bp, synthetic construct
  source 1..80: mol_type = other DNA
cagcccactaaccactagccaaacgttcctcttcaacattctgggggggtgggtggctgcccagctcgcagcccccggtg

SEQ ID NO: 112135 - DNA, 80 bp, synthetic construct
  source 1..80: mol_type = other DNA
cgtgcactgcccgtcatgactcccctgacgccgacctaatagaggccaacctcctgtggaggcaggagatgggagggaac

SEQ ID NO: 112136 - DNA, 80 bp, synthetic construct
  source 1..80: mol_type = other DNA
ctgcagcaacacctggcacggaaccttccccatcaatgcttacaccacaggcccaggcgtgcccatcccagcgccgaatt

SEQ ID NO: 112137 - DNA, 80 bp, synthetic construct
  source 1..80: mol_type = other DNA
ggagggggaggctcatcttcctcgggcccgctgacgatgtcaagggcaagtggtggagcctcctcgcccctatcacggct

SEQ ID NO: 112138 - DNA, 80 bp, synthetic construct
  source 1..80: mol_type = other DNA
agcggcatgtgaaactacagccgttacggcattagatactgtgtttcgccacaatccacatacccccgaaaatacaaata

SEQ ID NO: 112139 - DNA, 80 bp, synthetic construct
  source 1..80: mol_type = other DNA
actccagcggggcgatcgccgcattcgtcgccccctactttgagtcagtgcttcgggccccccgggtaggcgcgcccatc

SEQ ID NO: 112140 - DNA, 80 bp, synthetic construct
  source 1..80: mol_type = other DNA
agatgagctggttggcagggggagagtgtctccagggaatggttggatgatcaaggagacagcatgccttagcaaggcct

SEQ ID NO: 112141 - DNA, 80 bp, synthetic construct
  source 1..80: mol_type = other DNA
ttttaatgcatcaaacaatactaaaaaactggaagttagcataaaaaaatccagtggactaaactttgataatactgcca

SEQ ID NO: 112142 - DNA, 80 bp, synthetic construct
  source 1..80: mol_type = other DNA
tgtggggtctgctggtcatagtcgctgcatggtacatcaagggcagggctgttccagcctttacctatggcatcttgcaa

SEQ ID NO: 112143 - DNA, 80 bp, synthetic construct
  source 1..80: mol_type = other DNA
cgtctcttccgcccccccgccgagcgcccccgacgcgagtctgccgcccctggggctccaggaggccgccccgccgggcc

SEQ ID NO: 112144 - DNA, 80 bp, synthetic construct
  source 1..80: mol_type = other DNA
taaagtgcttgtcgaaatagaacctccttttggagactcttacatcgtagtgggaagaggagacaaacaaatcaaccacc

SEQ ID NO: 112145 - DNA, 80 bp, synthetic construct
  source 1..80: mol_type = other DNA
atgaggacaatgttaccaaccctgaggatatgagaccttattgctggcattaccctcctaagccgtgcggcatagtgccc

SEQ ID NO: 112146 - DNA, 80 bp, synthetic construct
  source 1..80: mol_type = other DNA
ccacttcgtggtgggcgtaacaaatgacaatctgaaatgcccatgccaggtgccagcacctgagttcttcaccgaggtcg

SEQ ID NO: 112147 - DNA, 80 bp, synthetic construct
  source 1..80: mol_type = other DNA
cgtctcagagagtccagcttataaacaccaatggcagctggcacatcaacaggactgccctgaattgcaacgaatccctc

SEQ ID NO: 112148 - DNA, 80 bp, synthetic construct
  source 1..80: mol_type = other DNA
ctgctattagttacttcaacctaaccggtggagatgactgacccactcgccgcctccactgctgccgaggaactacttga

SEQ ID NO: 112149 - DNA, 80 bp, synthetic construct
  source 1..80: mol_type = other DNA
ctggagggagaacccggagaccccgatctcgaaacgggttcgtggtctacggtcagcgaggaagacagcgtaatctgctg

SEQ ID NO: 112150 - DNA, 80 bp, synthetic construct
  source 1..80: mol_type = other DNA
tgttctcactgtgatttgcaactgtcctaaccctggattacatcaagatctttgttgccatctctgtgctgagtataata

SEQ ID NO: 112151 - DNA, 80 bp, synthetic construct
  source 1..80: mol_type = other DNA
gagcgcgacatacgtaacgagcacgacgtctaccaaagctgtcagctggacccagaggccaggaaagccataacatctct

SEQ ID NO: 112152 - DNA, 80 bp, synthetic construct
  source 1..80: mol_type = other DNA
gttgcggtcactcaggtcgtggacttcagcttagaccctaccttcactataaccacacagaccgttccacaagacgctgt

SEQ ID NO: 112153 - DNA, 80 bp, synthetic construct
  source 1..80: mol_type = other DNA
atgtgaacaaggaaaaagtagtcgggcgcatcatttcatctaccccttttgctgagaataccaacagcgtaactaacata

SEQ ID NO: 112154 - DNA, 80 bp, synthetic construct
  source 1..80: mol_type = other DNA
cctgtctcggccaggaggtgggacttagtcctcctcggccccgctgacgggatggagggcaaaggatgggccctgcttgc

SEQ ID NO: 112155 - DNA, 80 bp, synthetic construct
  source 1..80: mol_type = other DNA
atgctcctccaacgtgtcagtcgcccacgacggcgctggaaagagggtctactaccttacccgtgaccctacaacccccc

SEQ ID NO: 112156 - DNA, 80 bp, synthetic construct
  source 1..80: mol_type = other DNA
gctgctgctatttgccggtgtcgacgcggaaacccacgtcagcggggggactgccgctcgggccgcccatggacttgcta

SEQ ID NO: 112157 - DNA, 80 bp, synthetic construct
  source 1..80: mol_type = other DNA
cgggatgttcgattccgttgtactctgtgagtgctacgatgctggagcttcctggtacgagctaacaccgacggagacta

SEQ ID NO: 112158 - DNA, 80 bp, synthetic construct
  source 1..80: mol_type = other DNA
gactccgttgtcctatgcgaggcgtacgacactggttgcgcctggtacgagctggcaccatctgagactacggttcgcct

SEQ ID NO: 112159 - DNA, 80 bp, synthetic construct
  source 1..80: mol_type = other DNA
cccatgtcaacatatgggtggaatctagtgcgtctgcaaagtggagttgacgttttcttcaccccgccagaaaagtgtga

SEQ ID NO: 112160 - DNA, 80 bp, synthetic construct
  source 1..80: mol_type = other DNA
gccgcccaggggctcgtgtccctcttctcatccggcccgtctcagaagatccatcttgtaaacaccaatggcaggtggca

SEQ ID NO: 112161 - DNA, 80 bp, synthetic construct
  source 1..80: mol_type = other DNA
tagcggccgtagctgcatactgcttgacagtgggcagcgtcacgatcgttgggagggtcgttctatcgggccaacccgcc

SEQ ID NO: 112162 - DNA, 80 bp, synthetic construct
  source 1..80: mol_type = other DNA
agaagtcaagacatgcacctggccgagatctcatactctgtggagcaatggagtcttggaaagtgaaatgataatcccaa

SEQ ID NO: 112163 - DNA, 80 bp, synthetic construct
  source 1..80: mol_type = other DNA
ggtgttgtaccaacagtttgatgaaatggaggagtgctctcggcacatcccctacctccctgaggctcaagccatagctg

SEQ ID NO: 112164 - DNA, 80 bp, synthetic construct
  source 1..80: mol_type = other DNA
ggacggaagaggagatataccaatgctgtactcttgagccggaggccaggaaagtgatctcctccctcacggagcggctt

SEQ ID NO: 112165 - DNA, 80 bp, synthetic construct
  source 1..80: mol_type = other DNA
gtcgcaacagaggcagtcaaacaggtcgggccgcatcatctgctcggcgtacgcggcccataggatctcgcgggtcaaaa

SEQ ID NO: 112166 - DNA, 80 bp, synthetic construct
  source 1..80: mol_type = other DNA
gtgattctgcttacatgcctcttccatccatctcttggctttgaggttacgaaggtgctgctggccgtcgcaggatccat

SEQ ID NO: 112167 - DNA, 80 bp, synthetic construct
  source 1..80: mol_type = other DNA
cgcccgtagctcggcgtggaagaaacgagagagcgcttcgtagtagagcccgaggccgtcgcgggtggccggaagcgtcg

SEQ ID NO: 112168 - DNA, 80 bp, synthetic construct
  source 1..80: mol_type = other DNA
ggaagggcaggtgagcgagcccgcccgcgacgagggtctcattagcatcgcgggcggaagcggaagccgcccgcgccgtg

SEQ ID NO: 112169 - DNA, 80 bp, synthetic construct
  source 1..80: mol_type = other DNA
gtggccgcgtttatgggggaggcgtctgtggtgcaaacgtttagggaagccagatcttctatagacgctttgtttggaaa

SEQ ID NO: 112170 - DNA, 80 bp, synthetic construct
  source 1..80: mol_type = other DNA
tgtaatttttacggcacttaacgacgaggttattgacttggtatactgccagtacgaattttcctatcccaaatcatcca

SEQ ID NO: 112171 - DNA, 80 bp, synthetic construct
  source 1..80: mol_type = other DNA
tagttggacccaagtggtgtagcaacacctggcacggtactttccccatcaatgcaaccacaaccggccctagcgtaccc

SEQ ID NO: 112172 - DNA, 80 bp, synthetic construct
  source 1..80: mol_type = other DNA
ccagtttgatgagaggattgtcctcaaggaaacgccgttcccatgatgttctgactgtgcaattcctaattttgggaatg

SEQ ID NO: 112173 - DNA, 80 bp, synthetic construct
  source 1..80: mol_type = other DNA
ctggtcgttcctacgcgctggctccccgggcacgtatgtgcgtttgttgtttacaaccttacgggggttcctgtgaccct

SEQ ID NO: 112174 - DNA, 80 bp, synthetic construct
  source 1..80: mol_type = other DNA
catgctatgcaggcagccgtgtcccgacttacaggaggaggaggaatacaaggtagaggcataaaaacttaatcaagacg

SEQ ID NO: 112175 - DNA, 80 bp, synthetic construct
  source 1..80: mol_type = other DNA
acgagcgtggagacatcgggcacgagcggtgcgcgccaaacttatcgcccagggagggaaggccaaaatatgcggtctat

SEQ ID NO: 112176 - DNA, 80 bp, synthetic construct
  source 1..80: mol_type = other DNA
catgtcccggtgctgggtgccggccacgcctaccttagcaattccaaacgcgagcgcacctattcatgggttccgctcgc

SEQ ID NO: 112177 - DNA, 80 bp, synthetic construct
  source 1..80: mol_type = other DNA
ccgtacttcgtcagggctcaagctctgctgagggcgtgcgccctagtgaggagtctagtaggaggtcggtacgttcagat

SEQ ID NO: 112178 - DNA, 80 bp, synthetic construct
  source 1..80: mol_type = other DNA
tgtcaggctccgggcatacttcaacacgcctggattacccgtgtgtcaggaccatttagagttctgggaggcagttttta

SEQ ID NO: 112179 - DNA, 80 bp, synthetic construct
  source 1..80: mol_type = other DNA
ccacgttgaacagcccccagaacgcagccccggtgccgccgcagaccgcaaacttcaccgagctggccgtctgctcgatc

SEQ ID NO: 112180 - DNA, 80 bp, synthetic construct
  source 1..80: mol_type = other DNA
gccgacagggtgatagacccaagacggtgtctgaaaccggtaatactaaaagatggtccagagcgtgtcattttagcagg

SEQ ID NO: 112181 - DNA, 80 bp, synthetic construct
  source 1..80: mol_type = other DNA
gcagggtctccagggggtggttgggggccgcggggaacgtggtccacgccacggtccacttggtcaaaaaccgagtctgc

SEQ ID NO: 112182 - DNA, 80 bp, synthetic construct
  source 1..80: mol_type = other DNA
cctgggtatagggaccgtcctggaccaagcggagtcggctggagttagactcaccgtgcttgcgacagccactccccccg

SEQ ID NO: 112183 - DNA, 80 bp, synthetic construct
  source 1..80: mol_type = other DNA
tctgtcacccaatccttcctaggaacatccatctctggcgttctctggactgtcttccacggtgctggaaacaagaccct

SEQ ID NO: 112184 - DNA, 80 bp, synthetic construct
  source 1..80: mol_type = other DNA
aagcatatggaatcaatcccaacatcagaactggggttcgcacggtgacaactggggatgccatcacctactccacgtac

SEQ ID NO: 112185 - DNA, 80 bp, synthetic construct
  source 1..80: mol_type = other DNA
gataggcgccctgaccggcacctatgtttacaaccatctgactccattggcagactgggcctccgacggcctacgtgatc

SEQ ID NO: 112186 - DNA, 80 bp, synthetic construct
  source 1..80: mol_type = other DNA
agatggttgaggactggctgcaccgagggccaagggaattttgtgtgaaggtgctctgcccctacatgccaaaagtcata

SEQ ID NO: 112187 - DNA, 80 bp, synthetic construct
  source 1..80: mol_type = other DNA
ggtaggcatcttcctcctgccagcacggtgagctggtaggataacactccattccttttttgtttttccctttttttttt

SEQ ID NO: 112188 - DNA, 80 bp, synthetic construct
  source 1..80: mol_type = other DNA
cggcgtcaaaagtgaaggctaacttgctatccgtagaggaagcttgcgacctgacgccccctcactcagccagatcaaag

SEQ ID NO: 112189 - DNA, 80 bp, synthetic construct
  source 1..80: mol_type = other DNA
gcctgactcagcgaaccgcgtcgctagggtctgggtaaaactccgacgacaggagacgacgagcacactcgtgtccggag

SEQ ID NO: 112190 - DNA, 80 bp, synthetic construct
  source 1..80: mol_type = other DNA
actagataagacaaacaccctcaccgtgtgataggggcaacacggtaaggattgaaggagccccaacgacgaactgtggc

SEQ ID NO: 112191 - DNA, 80 bp, synthetic construct
  source 1..80: mol_type = other DNA
gaacatggaaactaccatgaggtcccctacgttcacagacaattcatccccaccggctgtgcctagcacttatcaagtgg

SEQ ID NO: 112192 - DNA, 80 bp, synthetic construct
  source 1..80: mol_type = other DNA
tgacaggctgtagttgatagtttaaggagatgcaactgccatcttcccgcaaaagcggagtgacttcgttcatcatgctt

SEQ ID NO: 112193 - DNA, 80 bp, synthetic construct
  source 1..80: mol_type = other DNA
ggcgctgtaccgcctgaagaagaacctaactgtcatccgcatttaagcaacattaaaatcaacctttcgatccctcatat

SEQ ID NO: 112194 - DNA, 80 bp, synthetic construct
  source 1..80: mol_type = other DNA
atcaccagggtagagtcggagaacaaagtggtgatcctggactcttttgatccaattgtggcagaaacagacgagcggga

SEQ ID NO: 112195 - DNA, 80 bp, synthetic construct
  source 1..80: mol_type = other DNA
caaacatatggctgaaattgcgtgactcctacacccaaatgtgtgaccaccggttaatgtcagctgccatcaaggacagc

SEQ ID NO: 112196 - DNA, 80 bp, synthetic construct
  source 1..80: mol_type = other DNA
ccgacacggaagtcttgatggccatgctgacagatccgtcccatatcacggcggaggctgcagcgcggcgcctagcgcgt

SEQ ID NO: 112197 - DNA, 80 bp, synthetic construct
  source 1..80: mol_type = other DNA
actggctgcgccattgatgtgactaggaaagaaatgaggtgcggcagtggcatatttgtgcacaatgatgtggaggcttg

SEQ ID NO: 112198 - DNA, 80 bp, synthetic construct
  source 1..80: mol_type = other DNA
gtgtgggtcccgagtatgtccgcgcggggcgtgcgggatgcagtgattctactcacctgtctccttcacccctcgctcgg

SEQ ID NO: 112199 - DNA, 80 bp, synthetic construct
  source 1..80: mol_type = other DNA
tcctacgcaattggatctcagctgccatgtgaacccgagccggatgtgacagtggttacatcaatgttggttgacccatc

SEQ ID NO: 112200 - DNA, 80 bp, synthetic construct
  source 1..80: mol_type = other DNA
cgaggtaggactagaaaaacttaagatgaaaggtctcacatacacaatgtgcgacaagactaaattcacgtggaaaagaa

SEQ ID NO: 112201 - DNA, 80 bp, synthetic construct
  source 1..80: mol_type = other DNA
gcaccaacaggcagcggaaagagcacccgtgttccggcggcgtacgctaaccagggctacaaggtgttggtcttgaaccc

SEQ ID NO: 112202 - DNA, 80 bp, synthetic construct
  source 1..80: mol_type = other DNA
cacacttacgtgacaggaggggcgcaggcccgtactgtcagcgggcttgcgagcttcttttcgcctgggccggcccaaaa

SEQ ID NO: 112203 - DNA, 80 bp, synthetic construct
  source 1..80: mol_type = other DNA
agcaaacaaggggcttgcttggcaccattgtgaccagccttaccggcagagacagaaatgagaactgcggcgaggtgcaa

SEQ ID NO: 112204 - DNA, 80 bp, synthetic construct
  source 1..80: mol_type = other DNA
cagcttagcccactacttcactccaccacggagtgggctattctaccgtgcacttttgcagaccttccagccctatccac

SEQ ID NO: 112205 - DNA, 80 bp, synthetic construct
  source 1..80: mol_type = other DNA
ccacgcactgacaacatcaccttggcaatcctggctgctctgacaccactggcccggggcacactgcttgtggcgtggag

SEQ ID NO: 112206 - DNA, 80 bp, synthetic construct
  source 1..80: mol_type = other DNA
ccttgaacttgtacggggcgatgttctccttgaagaccaccgcgatgccctccgtgtagttctgaccctcgggccgggtc

SEQ ID NO: 112207 - DNA, 80 bp, synthetic construct
  source 1..80: mol_type = other DNA
ctgtggcgtcactcatggctttttccgcttcgctgaccagcccgctccggatgaaccagacgcttctccttaacatcatg

SEQ ID NO: 112208 - DNA, 80 bp, synthetic construct
  source 1..80: mol_type = other DNA
ccgtggcctactaccgcggccttgacgtgtctgtcatcccgaccagcggcgatgttgtcgtcgtggcaactgatgctctc

SEQ ID NO: 112209 - DNA, 80 bp, synthetic construct
  source 1..80: mol_type = other DNA
gatgggtttggacaaaggatggccaatatcaaaaatggacttaggagtacccctgctggcattgggctgctattcacaag

SEQ ID NO: 112210 - DNA, 80 bp, synthetic construct
  source 1..80: mol_type = other DNA
tgggcctaaatgcagtcgcattttacagaggtgtcgacgtgtcggtgatacccacagcaggagacgtggttgtctgcgcc

SEQ ID NO: 112211 - DNA, 80 bp, synthetic construct
  source 1..80: mol_type = other DNA
ccctggcttttttggccacgggaggtgtgctcgtgtttttagcgaccaatgtgcacgccgacactggctgtgccattgac

SEQ ID NO: 112212 - DNA, 80 bp, synthetic construct
  source 1..80: mol_type = other DNA
gcttggtggcgtcgccagagctctcgcgcatggcgtgagagtcctggaggacggggttaattatgcaacagggaacttac

SEQ ID NO: 112213 - DNA, 80 bp, synthetic construct
  source 1..80: mol_type = other DNA
attttcgtgtgttgtcatataattcacaaatgtctcagtatattccggtaggtgctctataaggttcccgaaggacgaaa

SEQ ID NO: 112214 - DNA, 80 bp, synthetic construct
  source 1..80: mol_type = other DNA
tattaagggattagagctttctagggtgtgtaagcacatatccccttcttcagcatccagaaatgtgattggcttgtagg

SEQ ID NO: 112215 - DNA, 80 bp, synthetic construct
  source 1..80: mol_type = other DNA
caggagctttacaattaaacgctgcgggaggaatgagagtggacggcgccaacttaattcttcatgtagcataccccttt

SEQ ID NO: 112216 - DNA, 80 bp, synthetic construct
  source 1..80: mol_type = other DNA
ctctttgggggaatgtcttggatcacacaagggctaatgggtgccctactgctctggatgggcgtcaacgcacgagaccg

SEQ ID NO: 112217 - DNA, 80 bp, synthetic construct
  source 1..80: mol_type = other DNA
cgcgatgttttccggtggcggcggcccgctgtcccccggaggaaagtcggcggccaggtcggcgtccgggttttttgcgc

SEQ ID NO: 112218 - DNA, 80 bp, synthetic construct
  source 1..80: mol_type = other DNA
gcgggcacgcacgctcccatcgcgggcgccatggcgggactgggcaagccctacaccggccacccaggtgacgccttcga

SEQ ID NO: 112219 - DNA, 80 bp, synthetic construct
  source 1..80: mol_type = other DNA
gatcccctgctttttcaacaccagccacaaggcacagagcgccgtaaagtgtggctggtggtgaaaaaatcacaggatct

SEQ ID NO: 112220 - DNA, 80 bp, synthetic construct
  source 1..80: mol_type = other DNA
tggtttcattcttggtgtaaatgtatatacagcgggctcgcatcacaacattcacggggttatctacacttctccatctc

SEQ ID NO: 112221 - DNA, 80 bp, synthetic construct
  source 1..80: mol_type = other DNA
ggaggggcgacatccgcggctgacgcggcggcagatggtgattacgaacccccgcggcgccgggcccggcactacctgga

SEQ ID NO: 112222 - DNA, 80 bp, synthetic construct
  source 1..80: mol_type = other DNA
atacatgccacgtgtcatggagcgcttggaagttctacaacggaggtatggaggaggattggttcgagtccctctttcca

SEQ ID NO: 112223 - DNA, 80 bp, synthetic construct
  source 1..80: mol_type = other DNA
ccaaacccaacacacaccccgaaactgcgtcaccaggagaaagtacagtttcacttccgcaatcccaacaatcgtcactt

SEQ ID NO: 112224 - DNA, 80 bp, synthetic construct
  source 1..80: mol_type = other DNA
actttaccagcaatacgacgagatggaggaatgctcacagcgcataccctacctcgtcgagggacaacacctggcagagc

SEQ ID NO: 112225 - DNA, 80 bp, synthetic construct
  source 1..80: mol_type = other DNA
cggggccttggcctaaacgcagtcgcgttttaccggggtgtagacgtatcggtaatcccagtcgcgggagacgtggtcat

SEQ ID NO: 112226 - DNA, 80 bp, synthetic construct
  source 1..80: mol_type = other DNA
tgccttctcgggcgcacgcctatgatggtagcgagtcagcatcgattggcctcgtagtcattgtcaccttaacaatcttc

SEQ ID NO: 112227 - DNA, 80 bp, synthetic construct
  source 1..80: mol_type = other DNA
cgcggagtagcccgtgtaaacggaagcggagctactaacttcagcctgctgaagcaggctggagacgtggaggagaaccc

SEQ ID NO: 112228 - DNA, 80 bp, synthetic construct
  source 1..80: mol_type = other DNA
cgtggtgaaaccaattgacgacaggttcgcaacagccttaacagctctgaatgacatgggaaaagtaagaaaagacatac

SEQ ID NO: 112229 - DNA, 80 bp, synthetic construct
  source 1..80: mol_type = other DNA
aatgcagttgcggatcgaaaccaaatttgcaagggtaacatcgtcgccatggaaattaaccttcaggccaacctgtggaa

SEQ ID NO: 112230 - DNA, 80 bp, synthetic construct
  source 1..80: mol_type = other DNA
ctggaaagcatggggaaaaagcattctcttcgcccccgaattggccaactccacgttcgtcgtggatggacccgagacaa

SEQ ID NO: 112231 - DNA, 80 bp, synthetic construct
  source 1..80: mol_type = other DNA
caaggtcattgtcgacatcctagcaggctacggagcaggcgtatcgggtgctctcgtagctttcaagatcatgagcggcg

SEQ ID NO: 112232 - DNA, 80 bp, synthetic construct
  source 1..80: mol_type = other DNA
aatacgggtacggagcacgggacgtaaggagccatgccagcaaggccgttaaccacatcaactccgtgtggaaggacttg

SEQ ID NO: 112233 - DNA, 80 bp, synthetic construct
  source 1..80: mol_type = other DNA
gctggaccctattgggcagatgtgaaggaggatgttgtgtgctacgggggagcctggagcctggaggagaaatggaaagg

SEQ ID NO: 112234 - DNA, 80 bp, synthetic construct
  source 1..80: mol_type = other DNA
tagtctgtcaggctgaagcagccctggagaacgtcattgtcctcaacgcggccgcggccgcggggactcatgggttcttc

SEQ ID NO: 112235 - DNA, 80 bp, synthetic construct
  source 1..80: mol_type = other DNA
acgttggcccgggcgagggagcggtgcagtggatgaaccggctgatagccttcgcttcccggtggaaccacgtatccccc

SEQ ID NO: 112236 - DNA, 80 bp, synthetic construct
  source 1..80: mol_type = other DNA
aatagctgagatgctgaagtccaagatccaaggcttattgcagcaagcctctaaacaggcccaggatatacaacccgctg

SEQ ID NO: 112237 - DNA, 80 bp, synthetic construct
  source 1..80: mol_type = other DNA
ggctgcacttggatgaacgggactgggttcactaagacgtgcggcgcaccaccttgccgcattaggtgggacttcaacag

SEQ ID NO: 112238 - DNA, 80 bp, synthetic construct
  source 1..80: mol_type = other DNA
tgcgccttacctcccagcggagcgacccccgttcccccgcctaggaggaagcggacggtcgccctcaccgagtccaatgt

SEQ ID NO: 112239 - DNA, 80 bp, synthetic construct
  source 1..80: mol_type = other DNA
tcctcaagttttcaacaaggccagaaagtccataacaaaatgctggtgtgtgttgctgttcggggccgtgtccgtccccc

SEQ ID NO: 112240 - DNA, 80 bp, synthetic construct
  source 1..80: mol_type = other DNA
tgcaaatttgtagagctatggaatttcttagactgctatgatgctaaaatggacatgccttcctattacttggtgattgt

SEQ ID NO: 112241 - DNA, 80 bp, synthetic construct
  source 1..80: mol_type = other DNA
gtcggaagtccggcgtgtcccaaacagcaccaatatgccatcaatatcagccgctcgctgagctccagatgcgattgtgg

SEQ ID NO: 112242 - DNA, 80 bp, synthetic construct
  source 1..80: mol_type = other DNA
tcgcgtgcctatgggatcgaccccaacatccgcaccgggaaccgcaccgttacaactggctctaagctaacttattccac

SEQ ID NO: 112243 - DNA, 80 bp, synthetic construct
  source 1..80: mol_type = other DNA
ggccttcagcaccagaagtttcacgtccctctttgccctagggtcgcaccagtccatccagctcgtaaacaccaacggca

SEQ ID NO: 112244 - DNA, 80 bp, synthetic construct
  source 1..80: mol_type = other DNA
tggcctcgcctcaggcatcaacggggtggtggacctggccaatcaggccgtgcagcggcagatcaacagccgcctggacc

SEQ ID NO: 112245 - DNA, 80 bp, synthetic construct
  source 1..80: mol_type = other DNA
gagcgggcagcaagaccatctgtggcccgaagggacctgtcaaccagatgtacaccaacgtcgaccaagacctggtggtg

SEQ ID NO: 112246 - DNA, 80 bp, synthetic construct
  source 1..80: mol_type = other DNA
ggaagacaactcaacacctattcctaccactgtaatggccaaaaacgaagtgttctgtgtggacagctcgaaagggggcc

SEQ ID NO: 112247 - DNA, 80 bp, synthetic construct
  source 1..80: mol_type = other DNA
ctcatggggtacattccgctcgtcggcgctcctctagggggcgctgccagagctctggcacacggtgttagagttctgga

SEQ ID NO: 112248 - DNA, 80 bp, synthetic construct
  source 1..80: mol_type = other DNA
aaggccgccggtctaaaggactgcactatgttggtgaacggtgacgacctagtcgttattaccgaaagcgatggcgtcga

SEQ ID NO: 112249 - DNA, 80 bp, synthetic construct
  source 1..80: mol_type = other DNA
aaccagccgcaccacctggtcgatccatgcccatcaccaatggatgacaacagaagacatgctgtcagtgtggaataggg

SEQ ID NO: 112250 - DNA, 80 bp, synthetic construct
  source 1..80: mol_type = other DNA
tccagcaggtggcggcccacgtcgtccagacttcgcacggccttgcccatcacgagcgccgtgaccaggttggccccgtt

SEQ ID NO: 112251 - DNA, 80 bp, synthetic construct
  source 1..80: mol_type = other DNA
ggataattgcgctaatgagcttgatctgctggcgcagaagtattccatagagcagctaaccacttactggctgcagccag

SEQ ID NO: 112252 - DNA, 80 bp, synthetic construct
  source 1..80: mol_type = other DNA
tcaccggccacagaatggcttgggacatgatgatgaattggagccctaccaccaccttgctcctggcccagcttatgcgg

SEQ ID NO: 112253 - DNA, 80 bp, synthetic construct
  source 1..80: mol_type = other DNA
tctgccgtggagattaggaacaccagctcgagctacatggtgaccaatgactgttcaaacggcagcatcacttggcaact

SEQ ID NO: 112254 - DNA, 80 bp, synthetic construct
  source 1..80: mol_type = other DNA
gccgtgaatcccccgtcaaacgcggccagtgtcacgcacgccaccacggtgtcggcaaagcccagcagccgctgcaggac

SEQ ID NO: 112255 - DNA, 80 bp, synthetic construct
  source 1..80: mol_type = other DNA
ctccggcggcgcctatgacatcataatttgcgacgagtgccatgcagtggattctactaccatccttggcatcgggaccg

SEQ ID NO: 112256 - DNA, 80 bp, synthetic construct
  source 1..80: mol_type = other DNA
gacagtgggcagcgtggtcatctgtggtcgggtaatcacctctggcaggccagctgtggtgccagacagggaggtaatgt

SEQ ID NO: 112257 - DNA, 80 bp, synthetic construct
  source 1..80: mol_type = other DNA
accatctggacaggggggggttccgtggtgcaggtcaaaacgctgacccaccccacatgaatatatagcctttataatat

SEQ ID NO: 112258 - DNA, 80 bp, synthetic construct
  source 1..80: mol_type = other DNA
gggggtcgtggcccgccacgcgtctcccttcgagcgcgtccgctgccttctcctccgcagctgccactggatcctgaaca

SEQ ID NO: 112259 - DNA, 80 bp, synthetic construct
  source 1..80: mol_type = other DNA
catctcatacgcccctacaatctgggtccgaatggtctttatgacccacttcttctccacattactggcccaagatattt

SEQ ID NO: 112260 - DNA, 80 bp, synthetic construct
  source 1..80: mol_type = other DNA
aagacctggatacaagacgcaaaaccaagggccatgggatgaaggtagagttgaattagattttgactactgccccggaa

SEQ ID NO: 112261 - DNA, 80 bp, synthetic construct
  source 1..80: mol_type = other DNA
gtgggcccatgatgaactctcgtggccaatcatgcggataccgtagatgccgggccagtggcgtgctcaccacgagcttg

SEQ ID NO: 112262 - DNA, 80 bp, synthetic construct
  source 1..80: mol_type = other DNA
atgagttcgcgctttggagggtgtctgccgaggagtacgtggaggttcgcagggtgcgggagttccactatgtcaccggg

SEQ ID NO: 112263 - DNA, 80 bp, synthetic construct
  source 1..80: mol_type = other DNA
ttcttagcaggacagctcttcacatttcggccgcggttgcataccaccgtgcaggactgcaattgctccatctaccctgg

SEQ ID NO: 112264 - DNA, 80 bp, synthetic construct
  source 1..80: mol_type = other DNA
ggcgcggatcagggcgttgtagtgtgcccagcgcgtcagggtcgaggcgaggccgtgggtctgctgggccaggacttcga

SEQ ID NO: 112265 - DNA, 80 bp, synthetic construct
  source 1..80: mol_type = other DNA
tccagaaataaaccacacctgcaatgttcaaaatctaacactgctatttgtaaactacactcatcgcggagcgtattttg

SEQ ID NO: 112266 - DNA, 80 bp, synthetic construct
  source 1..80: mol_type = other DNA
gcaaggggcaacaatgcggttatcgcagatgccgcgccagcggcgtcttcaccactagtatgggcaacaccatgacgtgc

SEQ ID NO: 112267 - DNA, 80 bp, synthetic construct
  source 1..80: mol_type = other DNA
gaaagaaaaatcatggctagtccacaaacaatggtttctagacctaccactgccttggacctcgggagcttcaacatcac

SEQ ID NO: 112268 - DNA, 80 bp, synthetic construct
  source 1..80: mol_type = other DNA
aggtgggaggtgggctcaccttgcaagaaggaactggagacctaaaggtgaacgctaagtccccattgcaagttgcaact

SEQ ID NO: 112269 - DNA, 80 bp, synthetic construct
  source 1..80: mol_type = other DNA
ctcatactcaacatcctgggggggtgggtagcgtctcagttggcgccaccctcggcgtccacggcgtttgtcgtgagcgg

SEQ ID NO: 112270 - DNA, 80 bp, synthetic construct
  source 1..80: mol_type = other DNA
cacgccggcttgtagaggatagttcagacgggtgctccgggttctggagacactggtttggaactcctctatctcgcctg

SEQ ID NO: 112271 - DNA, 80 bp, synthetic construct
  source 1..80: mol_type = other DNA
cctcgaatacatcaaagggggcagacatctaatcttctgccattccaaaaagaagtgcgaggaactggccgtccaactga

SEQ ID NO: 112272 - DNA, 80 bp, synthetic construct
  source 1..80: mol_type = other DNA
gtgggcccaaaaacatgcagcaatgtgtggcgtggcactttcccgataaacgcgaccacgactggtcccagcgtacccgt

SEQ ID NO: 112273 - DNA, 80 bp, synthetic construct
  source 1..80: mol_type = other DNA
aaccaatctacaaactggaacttaacaactgatattagtaccgaaaaaggtttaatgtttagtggcaatcaaatagctct

SEQ ID NO: 112274 - DNA, 80 bp, synthetic construct
  source 1..80: mol_type = other DNA
gtaaaaagcgttcaatggttgggacgctttgaccggtgaggcgtgcgcagtcttgaatgctctagatgtaaagaaaatga

SEQ ID NO: 112275 - DNA, 80 bp, synthetic construct
  source 1..80: mol_type = other DNA
atcttagggggttgggtggcatcccagctagcgccgcccacggcgtctacagcattcgtcgtgagcggtctcgctggcgc

SEQ ID NO: 112276 - DNA, 80 bp, synthetic construct
  source 1..80: mol_type = other DNA
tttgttgccggggtcgagcacaggttcgacgccgcttgcaatttcacccgtggggaccgctgtgagttggaagataggga

SEQ ID NO: 112277 - DNA, 80 bp, synthetic construct
  source 1..80: mol_type = other DNA
acccaagaacaacaccacccccgccaagtcgggccgccccactaaaccccccgggcccgtgtggtgcgaccgccgcgacc

SEQ ID NO: 112278 - DNA, 80 bp, synthetic construct
  source 1..80: mol_type = other DNA
gatggtccaaatggggccggccagctggtgatgaagatttacaatgctgaaccaatgccatctgatgatgtggctgccgc

SEQ ID NO: 112279 - DNA, 80 bp, synthetic construct
  source 1..80: mol_type = other DNA
tggggggcgcggaggccacgtacgacctgcaggccatcaaggacatctgcgccacctacgcgattccccacgcccgccgc

SEQ ID NO: 112280 - DNA, 80 bp, synthetic construct
  source 1..80: mol_type = other DNA
gagcaggacgcagccatcacgggaactagtgaaagagttgacgtctgcctggacgatgacggtgattttcatctcatcaa

SEQ ID NO: 112281 - DNA, 80 bp, synthetic construct
  source 1..80: mol_type = other DNA
gagcggacacggcggcgtgcggggatatcctcgaagggctgccagtctctgcccgtctggtgaaggagatactattgggc

SEQ ID NO: 112282 - DNA, 80 bp, synthetic construct
  source 1..80: mol_type = other DNA
ctactctgtcactccgctggatcttccagctatcattcaaagactccacgggcttagcgcgttttcactccatacatact

SEQ ID NO: 112283 - DNA, 80 bp, synthetic construct
  source 1..80: mol_type = other DNA
agcgtgggactgtggaaaatccttgtggacattctcgctggctatggcgcgggtgtggcgggcgccttagtcgccttcaa

SEQ ID NO: 112284 - DNA, 80 bp, synthetic construct
  source 1..80: mol_type = other DNA
cctgtatgtctgctgacctcgaggtgataactagcatgtgggtactcgcaggtgggatcgtggccgctctggcggcatac

SEQ ID NO: 112285 - DNA, 80 bp, synthetic construct
  source 1..80: mol_type = other DNA
caaggccataaagatactaactggattcaggaaggagataggccgcatgctgaacatcttgaatggaaggaaaaggtcaa

SEQ ID NO: 112286 - DNA, 80 bp, synthetic construct
  source 1..80: mol_type = other DNA
tggctccgcgacgtgtgggactgggtttgcaccatcttgacagacttcaaaaattggctgacctctaaattgttccccaa

SEQ ID NO: 112287 - DNA, 80 bp, synthetic construct
  source 1..80: mol_type = other DNA
cgtaggccaagcagaggccgcgcttgggaacttgatcaccctcaacgctggctccgccgccagtatgcaagggtgtggtt

SEQ ID NO: 112288 - DNA, 80 bp, synthetic construct
  source 1..80: mol_type = other DNA
atttgggagggataacggttgttttccaccagggggtcgaccttttctagggtgtgaaggcaaaggtcatcttcttctgc

SEQ ID NO: 112289 - DNA, 80 bp, synthetic construct
  source 1..80: mol_type = other DNA
ctaatggcaatggctcaggcgataatggagatactacatggacaaaagatgaaacttttgcaacacgtaatgaaatcgga

SEQ ID NO: 112290 - DNA, 80 bp, synthetic construct
  source 1..80: mol_type = other DNA
aaaaccttcggcagctccgaattgtcggccgccgacagcggcacggcgaccgcccctcctgaccagacctccgacaacgg

SEQ ID NO: 112291 - DNA, 80 bp, synthetic construct
  source 1..80: mol_type = other DNA
accttgcgatccacagcgacctgtcctactggattgaaagcgggttcaacgagacatggaaacttgagagagccgttttg

SEQ ID NO: 112292 - DNA, 80 bp, synthetic construct
  source 1..80: mol_type = other DNA
ccaattcaaggggggaaaactgcggctaccgcaggtgccgcgcgagcggcgtactgacaactagctgtggtaacaccctc

SEQ ID NO: 112293 - DNA, 80 bp, synthetic construct
  source 1..80: mol_type = other DNA
atcgaccccctaggcccaagtatccatctgcactaccagtgtgggccaggccggattacaatccaccattgctcccagct

SEQ ID NO: 112294 - DNA, 80 bp, synthetic construct
  source 1..80: mol_type = other DNA
ggaggtctcgagcacaggttcgaggcagcatgtaactggacacgcggggaacgttgcgagctcgaggaccgtgatcgggt

SEQ ID NO: 112295 - DNA, 80 bp, synthetic construct
  source 1..80: mol_type = other DNA
attgcccgcttcgaagccgttatatatcagtggtaccccccctgcaagtgcggggaggccgtgatgcagtcatactgctc

SEQ ID NO: 112296 - DNA, 80 bp, synthetic construct
  source 1..80: mol_type = other DNA
aacaaaaacaaactggacaaaaacagagtggccaaaaagaaacaagtcaaaagaaaactaatgacacacaaaagccatcg

SEQ ID NO: 112297 - DNA, 80 bp, synthetic construct
  source 1..80: mol_type = other DNA
cgaagagcatggaattcttttgaggtggaagactatggatttggaatgttcacgaccaacatatggatgaaattccgaga

SEQ ID NO: 112298 - DNA, 80 bp, synthetic construct
  source 1..80: mol_type = other DNA
cgaagaccccttatctggcagtctactcggctattggtctcgcagaggcacgccctatttctgggcattgagcggctggg

SEQ ID NO: 112299 - DNA, 80 bp, synthetic construct
  source 1..80: mol_type = other DNA
gacgagcgcaccgtcgcctcggacctggccgagatcgtcttccccgagcgcctgaggcagacgctgaaaggagggctgcc

SEQ ID NO: 112300 - DNA, 80 bp, synthetic construct
  source 1..80: mol_type = other DNA
gtgctatctacggttacgcagtccttcttgggtaccgcggttaacggcgtaatgtggactgtgtaccatggagcgggcag

SEQ ID NO: 112301 - DNA, 80 bp, synthetic construct
  source 1..80: mol_type = other DNA
tgttgtatcaacaatacgatgagatggaggagtgctcgcaggccgccccatatatcgagcaagctcaagcaatagcccac

SEQ ID NO: 112302 - DNA, 80 bp, synthetic construct
  source 1..80: mol_type = other DNA
taaaatgggggataaaaatgccaaagtcatgcttggacaacaagcaatgccaaacagaccaaattacattgcttttagag

SEQ ID NO: 112303 - DNA, 80 bp, synthetic construct
  source 1..80: mol_type = other DNA
tcgactttgtgcccgtcgagtctatggagaccacaatgcggtctccggtctttacagacaactccactcctccggccgtg

SEQ ID NO: 112304 - DNA, 80 bp, synthetic construct
  source 1..80: mol_type = other DNA
agcggttaagctgggagggatgcatgcggggggagatgatatgcatcttggcttgaattttgaggttagctatgttacca

SEQ ID NO: 112305 - DNA, 80 bp, synthetic construct
  source 1..80: mol_type = other DNA
tttctggtgtcagagacatcgtaattatgctcttgggtgagatcatcataagacattttaatgaatttggggcggagggt

SEQ ID NO: 112306 - DNA, 80 bp, synthetic construct
  source 1..80: mol_type = other DNA
caatgttgcaccactggatcaaagtcgaatatggcaacctgtctctgtctggaatagcccagtcagcctcagtcctttct

SEQ ID NO: 112307 - DNA, 80 bp, synthetic construct
  source 1..80: mol_type = other DNA
accatttgggtgcgtatggtgttgatgacccacttcttttccatactccaagcccaggagcagcttgaaaaagccctaga

SEQ ID NO: 112308 - DNA, 80 bp, synthetic construct
  source 1..80: mol_type = other DNA
gttaagttgacgtcgggtcatttgaagtgtagagtgaagatggaaaaattgcagttgaagggaacaacctacggcgtctg

SEQ ID NO: 112309 - DNA, 80 bp, synthetic construct
  source 1..80: mol_type = other DNA
ttctccacttatggcccttcgttctgctgctcctagcgctgccccgacaggcatacgcttcggatgcagtagagcaaggc

SEQ ID NO: 112310 - DNA, 80 bp, synthetic construct
  source 1..80: mol_type = other DNA
ccatcacgggccgcagcaggttgcagctcgcgaacatggacgtccaggcgccggggtgcgcgtcgagggagtccatcagc

SEQ ID NO: 112311 - DNA, 80 bp, synthetic construct
  source 1..80: mol_type = other DNA
tcgcttcactgatgtccttcactgcttcggtcaccagccccctctcaacatcaaccacgctcctaattaacatcttagga

SEQ ID NO: 112312 - DNA, 80 bp, synthetic construct
  source 1..80: mol_type = other DNA
gcgagacaccggaacgcgggggtgcgggagggccggaaagcgcaacgcacccgggacgatgatgaaacagagatgtggtg

SEQ ID NO: 112313 - DNA, 80 bp, synthetic construct
  source 1..80: mol_type = other DNA
ctgcagtctggctggactggtggccgccaatgagatgggatttctagagaagaccaaggcggacctgtccacggtgttgt

SEQ ID NO: 112314 - DNA, 80 bp, synthetic construct
  source 1..80: mol_type = other DNA
agtgggggcgtggggtgggtgggaaaaggcgaggagactggagtggagagtgtcgggtgtggctgtttttttgtggttgt

SEQ ID NO: 112315 - DNA, 80 bp, synthetic construct
  source 1..80: mol_type = other DNA
cggctcccgcccgaattggggccccaatgacccccggcggagggcgcgcaatttgggtaaagtcatcgacaccctcacgt

SEQ ID NO: 112316 - DNA, 80 bp, synthetic construct
  source 1..80: mol_type = other DNA
actcgtcccacacggcaacctgaggggccagtcgatccaacgggaatgccgcccggagctccgggcccggcacgcgtccc

SEQ ID NO: 112317 - DNA, 80 bp, synthetic construct
  source 1..80: mol_type = other DNA
ggcgtgggctaaggtcatcgtcatcctcttgctgaccgcgggtgtcgacgcccacacgcataccaccggaggtcgagcgg

SEQ ID NO: 112318 - DNA, 80 bp, synthetic construct
  source 1..80: mol_type = other DNA
ggctggcctccaccgtcaatctggaattccagcacgcctccccccagcacgccggcctctacctgtgcgtggtgtacgtg

SEQ ID NO: 112319 - DNA, 80 bp, synthetic construct
  source 1..80: mol_type = other DNA
ggtcgtcccggaggacgaacattgggagaacaatggaaggaaaaattgaatgggcttagcaaagaggattttctaaaata

SEQ ID NO: 112320 - DNA, 80 bp, synthetic construct
  source 1..80: mol_type = other DNA
ggaccaccatgttctgcagggtggcgtatacgcggtcgaagcgaacccccgcggtgcagcagcggccccgcgagaaggcg

SEQ ID NO: 112321 - DNA, 80 bp, synthetic construct
  source 1..80: mol_type = other DNA
aagaacgacccaatggggttctcttatgatacccgctgctttgactccactgtaaccgaaaaggacatcagggtcgagga

SEQ ID NO: 112322 - DNA, 80 bp, synthetic construct
  source 1..80: mol_type = other DNA
ggtaagcgtggcagcgttcctcgtcaaccctaatgtcaccactgtgagagaagcaggggtgttggtgacggcggctacgc

SEQ ID NO: 112323 - DNA, 80 bp, synthetic construct
  source 1..80: mol_type = other DNA
cctatcaacgcactgagcaactcgttactgcgtcaccacaatctcgtgtattctaccacctcacgcagtgcttgcctaag

SEQ ID NO: 112324 - DNA, 80 bp, synthetic construct
  source 1..80: mol_type = other DNA
tacagaaagtggaaagatcatcccagagtggtgctgtcgggcctgtgagctgccaccagtgacgttccgcagtggcacgg

SEQ ID NO: 112325 - DNA, 80 bp, synthetic construct
  source 1..80: mol_type = other DNA
ggtatcgagcatggtacatagcgcggggcccgcgctaaagcccaagtcgtcgaggagacggttaaagagggcggcgtgtg

SEQ ID NO: 112326 - DNA, 80 bp, synthetic construct
  source 1..80: mol_type = other DNA
tcatagcctcgctctatcgacctgaggccgacaaagtagcagccattgagggagagttcaagcttaggacggagcaaagg

SEQ ID NO: 112327 - DNA, 80 bp, synthetic construct
  source 1..80: mol_type = other DNA
cagggcataagcttcagcggcctttcttaaagatgtatgagttaaagcaaaggtgtccctgaccattacttttaaatact

SEQ ID NO: 112328 - DNA, 80 bp, synthetic construct
  source 1..80: mol_type = other DNA
cgagaagaagacgggagaatttgggaaggctaaaggaagcagagccatctggtacatgtggctaggagctcggtttttgg

SEQ ID NO: 112329 - DNA, 80 bp, synthetic construct
  source 1..80: mol_type = other DNA
ctggacaacataaacatgcccaatggtctcatagctcagctctaccaacctgagagagaaaaggtttttaccatggatgg

SEQ ID NO: 112330 - DNA, 80 bp, synthetic construct
  source 1..80: mol_type = other DNA
ccgccgcgcagccggtgtgcccctggtgcggcggcgaccgggacgccggccctttatgtgcgcgaggaacggcccgcccc

SEQ ID NO: 112331 - DNA, 80 bp, synthetic construct
  source 1..80: mol_type = other DNA
atgtacaatctatggaagatgaaaactggacgccgggggagcgcgaatggaaaaactttgggtgaagtctggaagaggga

SEQ ID NO: 112332 - DNA, 80 bp, synthetic construct
  source 1..80: mol_type = other DNA
atctccagagaagatcagagggggagtggacaagttgtcacctacgctctaaacaccttcaccaacctggccgtccagtt

SEQ ID NO: 112333 - DNA, 80 bp, synthetic construct
  source 1..80: mol_type = other DNA
ctccaccaaaacattgtggacgtgcagtacttgtatggcctatcaccggctattaccaagttcattgttaaatgggaatg

SEQ ID NO: 112334 - DNA, 80 bp, synthetic construct
  source 1..80: mol_type = other DNA
attgaacggctgcatggacttgaagccttctcactgcacacatactctccccacgaactcactagggtggcagcaactct

SEQ ID NO: 112335 - DNA, 80 bp, synthetic construct
  source 1..80: mol_type = other DNA
gaatccgtcctctgaaaagtcatccaagcgggcctcacagtccaaggtcacagtctggtggaatgagaagaacgcacaga

SEQ ID NO: 112336 - DNA, 80 bp, synthetic construct
  source 1..80: mol_type = other DNA
tgactgggactttgtggtgacaactgacatttcagaaatgggggccaattttaaagcagatagagtgatcgacccaagaa

SEQ ID NO: 112337 - DNA, 80 bp, synthetic construct
  source 1..80: mol_type = other DNA
ccccacgcactacgtgcctgaggacgacgctgcagcgcgtgttaccaagatcctaagcagcctcaccgttacccaacttc

SEQ ID NO: 112338 - DNA, 80 bp, synthetic construct
  source 1..80: mol_type = other DNA
acactgacccccacctacaggacattgctagcgcgggttttatggtggattcagtatttcatagctcggaccgaggccta

SEQ ID NO: 112339 - DNA, 80 bp, synthetic construct
  source 1..80: mol_type = other DNA
tcgaacaattctgggcaaagcacatgtggaacttcatcagtggcatccaatacctcgccggcttatccaccttgcccggc

SEQ ID NO: 112340 - DNA, 80 bp, synthetic construct
  source 1..80: mol_type = other DNA
catggtcgattacccatacaggttatggcattatccctgcacggtgaatttcaccattcataaaatcaggatgtttgtgg

SEQ ID NO: 112341 - DNA, 80 bp, synthetic construct
  source 1..80: mol_type = other DNA
gctacaaggttctagtgctcaacccgtctgtggctgcaacgcttgcattcggtcagtatatgagcaaggcctatggcatt

SEQ ID NO: 112342 - DNA, 80 bp, synthetic construct
  source 1..80: mol_type = other DNA
tccatgaaagtggtaggtccccgcacctgtagcaacatgtggcatggcacatttcccatcaacgcgaccacgaccggccc

SEQ ID NO: 112343 - DNA, 80 bp, synthetic construct
  source 1..80: mol_type = other DNA
tctcagctccctcattgcgtggcacctgcactactgcaggtgtgcaccctgatgctgagctgatcgaagctaatttgcta

SEQ ID NO: 112344 - DNA, 80 bp, synthetic construct
  source 1..80: mol_type = other DNA
acctcttttggcataaaccgattcactacttctctataccaaaagcatcttttattaattaaagacccatacactaccat

SEQ ID NO: 112345 - DNA, 80 bp, synthetic construct
  source 1..80: mol_type = other DNA
tgaggccgggcgccgggtcgcgggccccgggctcggggccgccctccgcgtggcgcgtcttcctggcacacttcctcggc

SEQ ID NO: 112346 - DNA, 80 bp, synthetic construct
  source 1..80: mol_type = other DNA
gagtcgggggtgacggagtcccctccttttctcgtgagcgccactggcgcgcggactgtttgttgtttgttaataaaagc

SEQ ID NO: 112347 - DNA, 80 bp, synthetic construct
  source 1..80: mol_type = other DNA
cagcatgcaggctaactgggcgaaagtcatcctgatcttactcatgtttgctggggtcgacgcggtcacgtacaccactg

SEQ ID NO: 112348 - DNA, 80 bp, synthetic construct
  source 1..80: mol_type = other DNA
tgcaaaacttcaatggtttgtggagagaaacatggtcattcccgaaggaagagtcatagacctgggctgtggaagaggag

SEQ ID NO: 112349 - DNA, 80 bp, synthetic construct
  source 1..80: mol_type = other DNA
aatgggctgaagatcgacatccatgtcatcatcccgtatgaaggtctgagcggcgaccaaatgggccagatcgaaaaaat

SEQ ID NO: 112350 - DNA, 80 bp, synthetic construct
  source 1..80: mol_type = other DNA
aaaaggacacggagtgtaccttgacccccaaaccggcgaggaactcaatcttccatcaccttcctgtgctaccacgtact

SEQ ID NO: 112351 - DNA, 80 bp, synthetic construct
  source 1..80: mol_type = other DNA
cctctagcccttatcaaagggggtagacacctcatcttctgccattcaaaaaagaaatgtgacgagttagccaagcaact

SEQ ID NO: 112352 - DNA, 80 bp, synthetic construct
  source 1..80: mol_type = other DNA
agggccaatcatgtgcccttcgggccacgtggtcggtctcttccgcgctgccgtgtgcacgcgaggggttgcaaaagctc

SEQ ID NO: 112353 - DNA, 80 bp, synthetic construct
  source 1..80: mol_type = other DNA
gtggtccgggaccattgccccggaacaagtgtgaggattgacagtcattgtgacaagagaggagcctcagttagaagcac

SEQ ID NO: 112354 - DNA, 80 bp, synthetic construct
  source 1..80: mol_type = other DNA
gaacggctgccggaggacagccgaggcgtaaaatagcgcccggtggacgaccggggtggtcagcacgcggccccctagaa

SEQ ID NO: 112355 - DNA, 80 bp, synthetic construct
  source 1..80: mol_type = other DNA
ctcctcggtcggccatgcgggtagagccgaacccgcggagaggctccaggagggccaggtcggcgaccactctttctgcc

SEQ ID NO: 112356 - DNA, 80 bp, synthetic construct
  source 1..80: mol_type = other DNA
ggcccctgctcctcctgctcttgatgctgcctgaaagggcttatgcttttgaccgggagctggcagggtcccttggcggc

SEQ ID NO: 112357 - DNA, 80 bp, synthetic construct
  source 1..80: mol_type = other DNA
agttactgtcccacacccaaacataacagagacagccctatccaccacgggggaagtgcctttttacgggaaggctatcc

SEQ ID NO: 112358 - DNA, 80 bp, synthetic construct
  source 1..80: mol_type = other DNA
tcaattcatgctaagggtgagtggatgaccactgctgacatgctgggagtgtggaacaaggtatggatagaagagaatga

SEQ ID NO: 112359 - DNA, 80 bp, synthetic construct
  source 1..80: mol_type = other DNA
tgctaaccaactgagaagcttgggtctgaacgctgttgccttttacaggggcatagatgtatctgtcatccccacttcgg

SEQ ID NO: 112360 - DNA, 80 bp, synthetic construct
  source 1..80: mol_type = other DNA
agaactgtggtgagatccaggtgttgtccaccgccacgcagtccttcttaggatccgcggtaaatggcgtgatgtggacc

SEQ ID NO: 112361 - DNA, 80 bp, synthetic construct
  source 1..80: mol_type = other DNA
acgctgttggatttatgcctaacctatcagcttatccaaaatctcacggcaaaactgccaaaagtaacattgtcagtcaa

SEQ ID NO: 112362 - DNA, 80 bp, synthetic construct
  source 1..80: mol_type = other DNA
tttcttcttggaagtcgaagaagactcctatggggttctcttatgatacccgctgctttgactccactgccgaaaaggac

SEQ ID NO: 112363 - DNA, 80 bp, synthetic construct
  source 1..80: mol_type = other DNA
ggaacggtttttatgaaaaaagtgtctgtctgtctgtgcgggcgtgcgacgggcgggctggtcggaccccccccgaaaat

SEQ ID NO: 112364 - DNA, 80 bp, synthetic construct
  source 1..80: mol_type = other DNA
cagagttgagtccgagagcaaggtggtcatcctggattccttcgacccgctcgtggctgaaacggacgaccgggaggtgt

SEQ ID NO: 112365 - DNA, 80 bp, synthetic construct
  source 1..80: mol_type = other DNA
ttgaacagctgaagacacattggctggaggcttgggaggattttgagttagctctgaacacttttgccaaagtggctctg

SEQ ID NO: 112366 - DNA, 80 bp, synthetic construct
  source 1..80: mol_type = other DNA
cagatgctgcgagataagttgaaggaccagaacttccaacaaaaagtggtggacggtctggcctcgggtataaatggcgt

SEQ ID NO: 112367 - DNA, 80 bp, synthetic construct
  source 1..80: mol_type = other DNA
taccaggcacgccgacgtggtgcccgtgcgcagaagaggcgacactcgtggcgccctcataagccccaggccgatttcaa

SEQ ID NO: 112368 - DNA, 80 bp, synthetic construct
  source 1..80: mol_type = other DNA
tcgtcatcctcttgctaaccgctggggtagaagcggccacgaccatcacgggaggtagagttgcgcaagccgccttccag

SEQ ID NO: 112369 - DNA, 80 bp, synthetic construct
  source 1..80: mol_type = other DNA
cgctcctgcacgatgcctcccttaagatttctaggagaggatggatgctggtatgggatggaaatcaggcccttgaatga

SEQ ID NO: 112370 - DNA, 80 bp, synthetic construct
  source 1..80: mol_type = other DNA
tgtgtggtgtacgtcaacgaccatattcacgcctggggccacattaccatcagcaccgcggcgcagtaccggaacgcggt

SEQ ID NO: 112371 - DNA, 80 bp, synthetic construct
  source 1..80: mol_type = other DNA
tcaacaccactaagtgtccgtgcggggccctgatatctggtcatgtgaaaaacgggaccatgagaattgtaggcccaaag

SEQ ID NO: 112372 - DNA, 80 bp, synthetic construct
  source 1..80: mol_type = other DNA
ggcaatgaaatattgcttggcccggctgacactgtcgccggagggggctggagactccttgctcccatcactgcatacgc

SEQ ID NO: 112373 - DNA, 80 bp, synthetic construct
  source 1..80: mol_type = other DNA
ccatcactgcggccagcgccgcgcaaaggagaggacgtatcggaagaaacccttcacaggtgggagatgagtactgctac

SEQ ID NO: 112374 - DNA, 80 bp, synthetic construct
  source 1..80: mol_type = other DNA
cagatgattgtggtagaaccggggaagaacgtcaagaacatacagacaaagccaggcattttcaaaacccttgaaggaga

SEQ ID NO: 112375 - DNA, 80 bp, synthetic construct
  source 1..80: mol_type = other DNA
tggctgaaggccaaacttatgccgcaactgcccgggatcccattcgtatcctgtcaacgcgggtaccgtggggtctggcg

SEQ ID NO: 112376 - DNA, 80 bp, synthetic construct
  source 1..80: mol_type = other DNA
atgtccgaagccattccagtaaggccatacgccacattaactccgtgtggcaagaccttctggaggacaatacaacacct

SEQ ID NO: 112377 - DNA, 80 bp, synthetic construct
  source 1..80: mol_type = other DNA
acgagggcgagtgggagatgctacgccagagtatgatgaaacacggcctgcgcaacagccagtttgtcgcgctgatgccc

SEQ ID NO: 112378 - DNA, 80 bp, synthetic construct
  source 1..80: mol_type = other DNA
gtgggttatctccatgccccaaccggtagcggaaagagcacgaaggtgcccgctgcgtatgctgctcagggatacaaggt

SEQ ID NO: 112379 - DNA, 80 bp, synthetic construct
  source 1..80: mol_type = other DNA
atccggcatgcattgctcgcgtaataacgataacaccgctctgcggatcggcggaaccgagggtggacgttgtctatccg

SEQ ID NO: 112380 - DNA, 80 bp, synthetic construct
  source 1..80: mol_type = other DNA
ccccacatcggcccacgaggtgcgcaattcctcgggtatataccatgtcaccaacgactgccacaactcgagcattgtgt

SEQ ID NO: 112381 - DNA, 80 bp, synthetic construct
  source 1..80: mol_type = other DNA
cgcgcacgcgaggcgcgggccgtcgggcgtggtccgtcgagcgcggcgccggaagcccccgggcggacgccgcccccgcc

SEQ ID NO: 112382 - DNA, 80 bp, synthetic construct
  source 1..80: mol_type = other DNA
gtggcccgccttgcccaggaaaaagctcgtctcgcagaagcttcgctttagctcggcgaccagggtcgcccgggccaccc

SEQ ID NO: 112383 - DNA, 80 bp, synthetic construct
  source 1..80: mol_type = other DNA
tcgcatataagatcatgtctggcgagaagccctccatggaggacgtcgtcaacctgctccccgcaatcctgtctccaggt

SEQ ID NO: 112384 - DNA, 80 bp, synthetic construct
  source 1..80: mol_type = other DNA
tacaaggcagaaagttataaaaatgaaattaaaatattagtattaaaaactaataaaactacatttgaagattctggaaa

SEQ ID NO: 112385 - DNA, 80 bp, synthetic construct
  source 1..80: mol_type = other DNA
cgctgtcgctggcctcctttcgggggatcaagatcggctacacggcgcacatccgcaaggcgaccgagccggtgtttgag

SEQ ID NO: 112386 - DNA, 80 bp, synthetic construct
  source 1..80: mol_type = other DNA
ttctggggcgggtcgcgccgcagaagaccgcaagtgtctggacggctgccggaaaatgcgcttctccaccgcctgcccct

SEQ ID NO: 112387 - DNA, 80 bp, synthetic construct
  source 1..80: mol_type = other DNA
taactgggctgtgcggacaaaagccaaactcactccattgccagacgcgggtcggctggacttatccagctggttcaccg

SEQ ID NO: 112388 - DNA, 80 bp, synthetic construct
  source 1..80: mol_type = other DNA
ttagacactacagtgcagaatagtactgtgctggttaggtatttgttgagggaggaaagtactactgaacagacagaggc

SEQ ID NO: 112389 - DNA, 80 bp, synthetic construct
  source 1..80: mol_type = other DNA
tcggaaagtcaggggaccgaggcggacgagcgaaacctgagagtcttcacggaggctatgaccaggtattctgccccccc

SEQ ID NO: 112390 - DNA, 80 bp, synthetic construct
  source 1..80: mol_type = other DNA
cctgggaggccaatgagaccgacgtcttcatgatgtcgagcatgcgacccccagcgggagtgtggtatgggtgcacatgg

SEQ ID NO: 112391 - DNA, 80 bp, synthetic construct
  source 1..80: mol_type = other DNA
cgctttgcctgagagggcgtatgcgagcagcggggaggtggcgaggtctcttggtgccggcgtcatagtgttcatcatga

SEQ ID NO: 112392 - DNA, 80 bp, synthetic construct
  source 1..80: mol_type = other DNA
ggaaaacctttgacacagagtatccaaaaacgaaactcacggactgggattttgtggttaccacagacatatctgaaatg

SEQ ID NO: 112393 - DNA, 80 bp, synthetic construct
  source 1..80: mol_type = other DNA
gtaagcatgtgtaaaagtatagttttatagtagcatttagtgatgttagtgtaaatagttaagaaaattctaaggaggaa

SEQ ID NO: 112394 - DNA, 80 bp, synthetic construct
  source 1..80: mol_type = other DNA
caaagatgagagggccgtgcatgccgacatgggctattggatagaaagccaaaagaatggaagttggaagctagaaaaag

SEQ ID NO: 112395 - DNA, 80 bp, synthetic construct
  source 1..80: mol_type = other DNA
aattaagcaatctagtttcttacatgggcattttgcatgagaaccggctcggtcaaaacgtcctccactctacccttagc

SEQ ID NO: 112396 - DNA, 80 bp, synthetic construct
  source 1..80: mol_type = other DNA
tgcggggacatcctacacggacttcccgtgtccgcccgactcggtcaggagatcctccttggcccagccgatggctatac

SEQ ID NO: 112397 - DNA, 80 bp, synthetic construct
  source 1..80: mol_type = other DNA
agagtacaggctgagaggggaagaacgcaagaattttctcgagttgctcaggacagccgacttaccggtatggctggctt

SEQ ID NO: 112398 - DNA, 80 bp, synthetic construct
  source 1..80: mol_type = other DNA
gatgaactgattggcagagcccgaatctcccaaggagcagggtggtctttgcgggagacggcctgtttggggaagtctta

SEQ ID NO: 112399 - DNA, 80 bp, synthetic construct
  source 1..80: mol_type = other DNA
tgggattgctcataatcaaggccagcgcgatggaagatcgtagaggcctgggatttttgctggctgggctcatgacacaa

SEQ ID NO: 112400 - DNA, 80 bp, synthetic construct
  source 1..80: mol_type = other DNA
ctcttccaacgtctccgtggcgcgggacaacaaggggaggaggtactattacctcacccgtgatgccactactcccctgg

SEQ ID NO: 112401 - DNA, 80 bp, synthetic construct
  source 1..80: mol_type = other DNA
ctaatggggttctttgggggacaccgggttggtcccccaaatcgggtgccgggccgtgcatgctaatgatattctttgtg

SEQ ID NO: 112402 - DNA, 80 bp, synthetic construct
  source 1..80: mol_type = other DNA
ggtggcatatcaagccactgtctgcgctcgtgcaaaggcgagcccaccatgttgggatgagatgtggaaatgtctcatac

SEQ ID NO: 112403 - DNA, 80 bp, synthetic construct
  source 1..80: mol_type = other DNA
taacagctcggggtgtcctgagcggcttgcaagctgccgccggctcgacgactttgcccaaggttggggcccactcagtc

SEQ ID NO: 112404 - DNA, 80 bp, synthetic construct
  source 1..80: mol_type = other DNA
gtggagtggtttcagtgttagtttattctgatggagttttggagtgagctacaaagttatcagagcctccgacgcttgct

SEQ ID NO: 112405 - DNA, 80 bp, synthetic construct
  source 1..80: mol_type = other DNA
cccatagctgagttatgttttctattccatctcgatccaacagacttcctcgttgcggggattgggctggctgttgctgt

SEQ ID NO: 112406 - DNA, 80 bp, synthetic construct
  source 1..80: mol_type = other DNA
agacatcgcggccctgttcgtcgcggacgtccagcacgcagcgctgcccccgcccccctccccggtcggcgccgatttcc

SEQ ID NO: 112407 - DNA, 80 bp, synthetic construct
  source 1..80: mol_type = other DNA
ccgcgaacggaggtaatcccggcacgacgacggacgcccgacaaggtatgtctcccgagcgtcaaaatccgggtggtgtg

SEQ ID NO: 112408 - DNA, 80 bp, synthetic construct
  source 1..80: mol_type = other DNA
ctaacaccgccccaccagctctacactgaagagaaccgggagagttacaatgacagtgaataatccatctctcataaccc

SEQ ID NO: 112409 - DNA, 80 bp, synthetic construct
  source 1..80: mol_type = other DNA
gtgccctttctgaggtgacaggactaggccccgacatcatacaagctaattctatgtactctttctatggtgatgatgag

SEQ ID NO: 112410 - DNA, 80 bp, synthetic construct
  source 1..80: mol_type = other DNA
tcgatgagactcactgggccccgcaggtgcgccaacctctggcacggcactttccccatcaacgagtatacagtcggccc

SEQ ID NO: 112411 - DNA, 80 bp, synthetic construct
  source 1..80: mol_type = other DNA
aatgccaataagatatcagacaacagcagtgaagagtgaacacacaggaagggagatagttgacctcatgtgccacgcta

SEQ ID NO: 112412 - DNA, 80 bp, synthetic construct
  source 1..80: mol_type = other DNA
gtcctgggacgccatgtggaagtgcctggcccgactcaagcctacgcttgcgggccccacacctctcctgtaccgtttgg

SEQ ID NO: 112413 - DNA, 80 bp, synthetic construct
  source 1..80: mol_type = other DNA
gtaccctgatctaggtgtcagggtttgcgagaagatggccctctatgacataacacagaagcttcccgtcgcagtgatgg

SEQ ID NO: 112414 - DNA, 80 bp, synthetic construct
  source 1..80: mol_type = other DNA
gagacatcaggaccgaggagtccatataccaggcctgctccctgcccgaggaggcccgcactgccatacactcgctgact

SEQ ID NO: 112415 - DNA, 80 bp, synthetic construct
  source 1..80: mol_type = other DNA
cgcagatagccgcgttggtggaggccatagccgcggaccgccaggcgggcggtcagccggccgcgggagaccctgtggtc

SEQ ID NO: 112416 - DNA, 80 bp, synthetic construct
  source 1..80: mol_type = other DNA
gtgctggtaaaacaaggaggattctgccacagatcatcaaagaggctataaacaggaggctgaggacggctgtgctggcg

SEQ ID NO: 112417 - DNA, 80 bp, synthetic construct
  source 1..80: mol_type = other DNA
tcctacagctccatgcccccactcgaaggagagcccggcgatcctgatctcagctcgggctcctggtctacagtcagtga

SEQ ID NO: 112418 - DNA, 80 bp, synthetic construct
  source 1..80: mol_type = other DNA
gttttcactccattcatactctccgagcgagatcaatagggtggctagttgcctcaggaagcttggggtaccccctttga

SEQ ID NO: 112419 - DNA, 80 bp, synthetic construct
  source 1..80: mol_type = other DNA
gccacgcggctctgggagccatgttcgaagaacagaatcagtggagcagcgcccgtgaagccgtggaagatccaaagttc

SEQ ID NO: 112420 - DNA, 80 bp, synthetic construct
  source 1..80: mol_type = other DNA
tatgtgcccgagagcgatgctgcggcgagggtcactgcattgctgagttctctaactgtcacatctctgctccggcggtt

SEQ ID NO: 112421 - DNA, 80 bp, synthetic construct
  source 1..80: mol_type = other DNA
tgcgagaccctgctcacatcacggccgctacggcggcccggcggcttgcacgtggttcccccccatcggaagccagctct

SEQ ID NO: 112422 - DNA, 80 bp, synthetic construct
  source 1..80: mol_type = other DNA
tgctttgatagcaccgtgaccgaaaacgatattcgtaccgaagaagcgatttatcagtgctgcgatctggatccgcaggc

SEQ ID NO: 112423 - DNA, 80 bp, synthetic construct
  source 1..80: mol_type = other DNA
ccccagaccttgttcgacataatagccggagctcattggggcatcttggcgggcctggcctattactccatgcagggcaa

SEQ ID NO: 112424 - DNA, 80 bp, synthetic construct
  source 1..80: mol_type = other DNA
gcaggtacgtgcaggcggccttgctccaccttggtaggctgaccggaacgtacatttatgaccaccttgcccccatgaag

SEQ ID NO: 112425 - DNA, 80 bp, synthetic construct
  source 1..80: mol_type = other DNA
ggctcgagcgagagagttgatgtgcggcttgatgatgacggaaatttccagctcatgaatgatccaggagcaccttggaa

SEQ ID NO: 112426 - DNA, 80 bp, synthetic construct
  source 1..80: mol_type = other DNA
cgtggtctgctgctcatactcatactcatggacgggggccctcatcacaccatgtgctgctgaggaagagaagcttccca

SEQ ID NO: 112427 - DNA, 80 bp, synthetic construct
  source 1..80: mol_type = other DNA
cagtgggctgacaaagaaagggtgaatggaggcggtaacaccaaagatgttacaaagacatttggtgtggcagccatggg

SEQ ID NO: 112428 - DNA, 80 bp, synthetic construct
  source 1..80: mol_type = other DNA
ccatggtcacacaaatagccatgactgacactacaccttttggacaacagagggtgttcaaagagaaagttgacacacgc

SEQ ID NO: 112429 - DNA, 80 bp, synthetic construct
  source 1..80: mol_type = other DNA
gttatggtgcaggctgatagtggttgtgttgtgagctggaaaaacaaagaactaaaatgtggcagtgggatttttattac

SEQ ID NO: 112430 - DNA, 80 bp, synthetic construct
  source 1..80: mol_type = other DNA
caggatccagcgctcgtacccgctcaccatctgagctctcaccaagtccagggtagcggggcacaggcacactgacatac

SEQ ID NO: 112431 - DNA, 80 bp, synthetic construct
  source 1..80: mol_type = other DNA
cttgtatgtcggctgacctggaggtcgtcactagcacgtgggtgctggtgggcggcgtcctggccgctttggccgcttac

SEQ ID NO: 112432 - DNA, 80 bp, synthetic construct
  source 1..80: mol_type = other DNA
acgtggcaggactgggcgaggtaggctcggcacttacagatacgtctcccagggcgagcgcccttctgggatgttcgatt

SEQ ID NO: 112433 - DNA, 80 bp, synthetic construct
  source 1..80: mol_type = other DNA
cacctacagctgggtggagaatgagaccgacgtgatcatactgaacagcaccaggccccccgctggcgggtggttcgggt

SEQ ID NO: 112434 - DNA, 80 bp, synthetic construct
  source 1..80: mol_type = other DNA
ccttgcctggtaatcctgctatagcctccctcatgtccttcactgccgcagtcacgagccccctgtccacccaacaaacc

SEQ ID NO: 112435 - DNA, 80 bp, synthetic construct
  source 1..80: mol_type = other DNA
acagccggttggccagggccgccagcaggcaggacagcccgccgcgctcggcggaccactccggcggcccccccgaggcc

SEQ ID NO: 112436 - DNA, 80 bp, synthetic construct
  source 1..80: mol_type = other DNA
cagaaggctttcagtactctgacagaagatggtgctttgacggggaaaggaacaaccaggtgttggaggagaacatggac

SEQ ID NO: 112437 - DNA, 80 bp, synthetic construct
  source 1..80: mol_type = other DNA
ggcaggctagttcctgctgccacctatggggttttacagctatggccacttttacttctggttctggccctcccgcggcg

SEQ ID NO: 112438 - DNA, 80 bp, synthetic construct
  source 1..80: mol_type = other DNA
ccagagccagacagacaacgcactccgcaggacaaccagctggcatatgtggtgataggtttgttattcatgatactgac

SEQ ID NO: 112439 - DNA, 80 bp, synthetic construct
  source 1..80: mol_type = other DNA
cccaacaggcctaattacattgcttttagggacaattttattggtctaatgtattacaacagcacgggtaatatgggtgt

SEQ ID NO: 112440 - DNA, 80 bp, synthetic construct
  source 1..80: mol_type = other DNA
agtggggtctgcaacctgggaagcgtgaatctggcccgatgcgtctccaggcagacgtttgactttgggcggctccgcga

SEQ ID NO: 112441 - DNA, 80 bp, synthetic construct
  source 1..80: mol_type = other DNA
atccaggtctggcacattttttggaatatctcggtctgctccggcataagcttgtaagcattgcgcaggccgctgtcgac

SEQ ID NO: 112442 - DNA, 80 bp, synthetic construct
  source 1..80: mol_type = other DNA
actgaagtgctcccccttgaacccgttgcaggggcacaattggccgcccctgtaactggccaaaacaacattattgaccc

SEQ ID NO: 112443 - DNA, 80 bp, synthetic construct
  source 1..80: mol_type = other DNA
ggcgcatgcgctgtggttttttttttctcggtgttttgtcgggctccgtcgcctttcctgttctcgcttctccccccccc

SEQ ID NO: 112444 - DNA, 80 bp, synthetic construct
  source 1..80: mol_type = other DNA
aggctttattcgttgcctgtgtgataatcctgaatgtttgtacactttaataaaaacactgtgcggtttaagaaatcttt

SEQ ID NO: 112445 - DNA, 80 bp, synthetic construct
  source 1..80: mol_type = other DNA
accctgaaagaaatatcggtatccacttccttgtcctcacccacaattttcatcttttcatagatgaaaagaacccgagt

SEQ ID NO: 112446 - DNA, 80 bp, synthetic construct
  source 1..80: mol_type = other DNA
gtgtgggcatccccggactacaatccccctctgctagagagctggaagcgcccagactacgaaccacctgtagtccatgg

SEQ ID NO: 112447 - DNA, 80 bp, synthetic construct
  source 1..80: mol_type = other DNA
ctaacatccagagaagttcttcttctaacaattggattgagtctagtggcatctgtggagttaccaaattccttggagga

SEQ ID NO: 112448 - DNA, 80 bp, synthetic construct
  source 1..80: mol_type = other DNA
ggagtccatttaccaatcttgccagatcgaacctgaggcaaaaaaagtaatagcctcccttacggaaaggctttactgtg

SEQ ID NO: 112449 - DNA, 80 bp, synthetic construct
  source 1..80: mol_type = other DNA
gacgcggaactagcgcggaccggtcgatgcttgggtgggaaaaaggacagggacggccgatccccctcccgcgcttcgtc

SEQ ID NO: 112450 - DNA, 80 bp, synthetic construct
  source 1..80: mol_type = other DNA
ggccttgggcaatcaagaaggctccttgaagaccgctctcacaggcgctatgcgcgtcaccaaggatgagaatgacaaca

SEQ ID NO: 112451 - DNA, 80 bp, synthetic construct
  source 1..80: mol_type = other DNA
cggacgaacagcgccaggaactgcgggtaactcatcttgaagtactgcagcaggtcgcggcagtgaatcgtcggaatgta

SEQ ID NO: 112452 - DNA, 80 bp, synthetic construct
  source 1..80: mol_type = other DNA
caacaccataaaaagtgtgtccaccacgagccagctcctcttggggcgcatggacgggcctaggaggccagtgaaatatg

SEQ ID NO: 112453 - DNA, 80 bp, synthetic construct
  source 1..80: mol_type = other DNA
aaggcctacggaattgatccgaacatcaggacaggagttaggactatcaccactggaggtgctatcacctactcaaccta

SEQ ID NO: 112454 - DNA, 80 bp, synthetic construct
  source 1..80: mol_type = other DNA
ctaataacgggatagaaagtctggtggacaaactgaaccgctggaagacctacgctcaggaccatagggaacctgcgccc

SEQ ID NO: 112455 - DNA, 80 bp, synthetic construct
  source 1..80: mol_type = other DNA
gtttgtggaaagatccatcttacacatgtcacacaaataatggaagcattactattcatgccttcaatattacttctgga

SEQ ID NO: 112456 - DNA, 80 bp, synthetic construct
  source 1..80: mol_type = other DNA
ccactttcatgaactgatcatgaaagatggaagaaagttggtggttccctgcagaccccaggacgaactaataggaaggg

SEQ ID NO: 112457 - DNA, 80 bp, synthetic construct
  source 1..80: mol_type = other DNA
gaaggtcaccttcgaccgcatacaggtgctggacaaccattaccatgagacacttaaggagattaaggcacgagcgtcgc

SEQ ID NO: 112458 - DNA, 80 bp, synthetic construct
  source 1..80: mol_type = other DNA
gctgacatggggtattggatagaaagtgaaaagaacgaaacctggaagctggcgagagcctccttcatagaagtcaagac

SEQ ID NO: 112459 - DNA, 80 bp, synthetic construct
  source 1..80: mol_type = other DNA
gttctaagaccttggccggcccaaagggccccgtttgccagatgtacaccaatgttgatcaggacctcgtgggttggcct

SEQ ID NO: 112460 - DNA, 80 bp, synthetic construct
  source 1..80: mol_type = other DNA
gagcctcaagaagatcttggcctcttaatgagggcataatggctgtgggtttggtgagcctcttaggaagcgccctccta

SEQ ID NO: 112461 - DNA, 80 bp, synthetic construct
  source 1..80: mol_type = other DNA
agaagttaaaaataacacctttttaattgatggcccagaaaccacagaatgcccaaatgaaagacgagcatggaacttcc

SEQ ID NO: 112462 - DNA, 80 bp, synthetic construct
  source 1..80: mol_type = other DNA
gtctactacctgacccgcgacccaaccactcccctcgcacgagctgcttgggagacagctagacacactccagttaattc

SEQ ID NO: 112463 - DNA, 80 bp, synthetic construct
  source 1..80: mol_type = other DNA
cacggcgttacttgctttttcacgacggggtggcggttcctcgcaacgtcctctactattaccgtcatctctacagcccc

SEQ ID NO: 112464 - DNA, 80 bp, synthetic construct
  source 1..80: mol_type = other DNA
ggccggaacaaggaccatcgcgtcatctaagggtcctgttatccagatgtataccaatgtagatcaggaccttgtaggct

SEQ ID NO: 112465 - DNA, 80 bp, synthetic construct
  source 1..80: mol_type = other DNA
gagtgctggcaggactggcttttcaggagatggagaacttccttggtccgattgcagttggaggactcctgatgatgctg

SEQ ID NO: 112466 - DNA, 80 bp, synthetic construct
  source 1..80: mol_type = other DNA
ttcttaaaaatgaatctaaaccctctacgggaacgatatgaaaaatccgcagaaattagcgatcacattcttgccgctct

SEQ ID NO: 112467 - DNA, 80 bp, synthetic construct
  source 1..80: mol_type = other DNA
cgcccggcgagcggtcctcggtcaggagcaagcgtagctatgacgaggtgtacggcgacgacgacatcctggaccaggcg

SEQ ID NO: 112468 - DNA, 80 bp, synthetic construct
  source 1..80: mol_type = other DNA
cagagtcgtgctcgtccatgcctcctctcgagggggaaccaggcgatccggacttgagttgcgattcgtggtccaccgtt

SEQ ID NO: 112469 - DNA, 80 bp, synthetic construct
  source 1..80: mol_type = other DNA
attgttgtcattgacatgcataccaaatgcgacaataatgtggggagcgtggaaggtcacatgcacaatcctgacactgg

SEQ ID NO: 112470 - DNA, 80 bp, synthetic construct
  source 1..80: mol_type = other DNA
ccgagggagacgccagcctataccaaagcagcgtcctccgacgggccggcactgggctcagcccggttacccctggcccc

SEQ ID NO: 112471 - DNA, 80 bp, synthetic construct
  source 1..80: mol_type = other DNA
aatggacattgacctgcggccagcctcagcttgggccatctatgctgccttgacaactttcattaccccagccgtccaac

SEQ ID NO: 112472 - DNA, 80 bp, synthetic construct
  source 1..80: mol_type = other DNA
ggtgtacctggcgccctcgcacgagaaatcggagagggaaattaagaggctcctgagcgctctgcctttctccctcgttg

SEQ ID NO: 112473 - DNA, 80 bp, synthetic construct
  source 1..80: mol_type = other DNA
ctcggaaggaggaccccacatgtgatccatgtaagccctcagaaccgtctcggaaggaggacccccccacatgtaagccc

SEQ ID NO: 112474 - DNA, 80 bp, synthetic construct
  source 1..80: mol_type = other DNA
tgcgcgcgacgagaaaaacttctgaacggtcccagcccagaggtaggcgccagccaataccaaaagtgcgccaccagacg

SEQ ID NO: 112475 - DNA, 80 bp, synthetic construct
  source 1..80: mol_type = other DNA
tttattgatattttacataattctaaccgttaaccccctcccccattccactttaccttatacacaaccctttccccctg

SEQ ID NO: 112476 - DNA, 80 bp, synthetic construct
  source 1..80: mol_type = other DNA
ttattccaaacggtctcgaaggacgataaagtgcaagtcacgcaggtgacagcgttccccgccgctgtgctggtggaaac

SEQ ID NO: 112477 - DNA, 80 bp, synthetic construct
  source 1..80: mol_type = other DNA
ttccaaacttcgcggcagggactgcagacggttaacttgacacaggccttcaaaaacttgcagggcatgtggggtgtgcg

SEQ ID NO: 112478 - DNA, 80 bp, synthetic construct
  source 1..80: mol_type = other DNA
cttcggcgcgtcctgcgccccccgatctctcgccgcgacggcccagtgctccccaggtggtcgggaccccggagtgcggc

SEQ ID NO: 112479 - DNA, 80 bp, synthetic construct
  source 1..80: mol_type = other DNA
cagtatttcatagcccggttggaggctcttatccatgtgtgggtgccccccttgcaagtcaggggtggccgtgatgctgt

SEQ ID NO: 112480 - DNA, 80 bp, synthetic construct
  source 1..80: mol_type = other DNA
gcaaagggattaatatgcgttgctgaccgcgttgcatctgcgggtattcggcttgcagaaacgcttgcatttgtttaaat

SEQ ID NO: 112481 - DNA, 80 bp, synthetic construct
  source 1..80: mol_type = other DNA
ctaccatgatcctggcatacgcgatgcgcatccctgaggtcatcgtagacatcgtagccggggcccactggggcgtcatg

SEQ ID NO: 112482 - DNA, 80 bp, synthetic construct
  source 1..80: mol_type = other DNA
cagaaccatgaatactttgaccagtgtcgtgctgctctctcttcttgtggtttttagtcagggaaaaatagatagtgaag

SEQ ID NO: 112483 - DNA, 80 bp, synthetic construct
  source 1..80: mol_type = other DNA
ctggttcgccggtacaggaacgcccgggaggcggatatcgccggtgtggccgagcgggtgttcgacacgtggcggaacac

SEQ ID NO: 112484 - DNA, 80 bp, synthetic construct
  source 1..80: mol_type = other DNA
gggcaaccatgcagtacacagtgacctttcctactggattgagagtggactcaatgggacatggaaacttgagagagcca

SEQ ID NO: 112485 - DNA, 80 bp, synthetic construct
  source 1..80: mol_type = other DNA
agacgcttaagaactctgattttggcaccgacaagggtggttgcagctgagatggaagaagcattgaaagggctcccaat

SEQ ID NO: 112486 - DNA, 80 bp, synthetic construct
  source 1..80: mol_type = other DNA
cagcttcagagacctaaccacggcagtcgaacccgttgtgttctcccccatggaaactaaagtgattctatatggggcgg

SEQ ID NO: 112487 - DNA, 80 bp, synthetic construct
  source 1..80: mol_type = other DNA
aatcccccttgagtatatcaaggggggtagacacctgattttctgccactctaaaaagaagtgcgacgagcttgccaagc

SEQ ID NO: 112488 - DNA, 80 bp, synthetic construct
  source 1..80: mol_type = other DNA
gcccaagaatgaaagaccaataaacgtgttttcatttgaaaattttcatgtatctttattgatttttacaccagcacggg

SEQ ID NO: 112489 - DNA, 80 bp, synthetic construct
  source 1..80: mol_type = other DNA
tggccgctcttgcttttattgctatgcttaccccgtagggctttcgcttacaccaatgaggaggcagcctcttttgggtt

SEQ ID NO: 112490 - DNA, 80 bp, synthetic construct
  source 1..80: mol_type = other DNA
ttttaacattaatagtctggtacgacgagcgcaacagcgcatgcgtatttcacttaagtctttgcaatagtcacagcaca

SEQ ID NO: 112491 - DNA, 80 bp, synthetic construct
  source 1..80: mol_type = other DNA
tggcgggactacggtggcccgtcgtgccccccgtcaggtagcctggtggcgaggtgctggaggaccgagtagaggatcga

SEQ ID NO: 112492 - DNA, 80 bp, synthetic construct
  source 1..80: mol_type = other DNA
cgcttacgggggcgggggggaagggctccaggtccttgagaagaaaagaggggtctgccgacccggacacgggggtcggg

SEQ ID NO: 112493 - DNA, 80 bp, synthetic construct
  source 1..80: mol_type = other DNA
atgtccaaggcatatggcatcgacccgaacatccggtcgggagtcaggaccatcaccacgggtgcgccaatcacgtactc

SEQ ID NO: 112494 - DNA, 80 bp, synthetic construct
  source 1..80: mol_type = other DNA
cttgcttaatccatccagcagctagtctagagtggcggaatacgtctggcctctacgttcttaccaacgactgctccaat

SEQ ID NO: 112495 - DNA, 80 bp, synthetic construct
  source 1..80: mol_type = other DNA
ccaacacctagcctaaagcccgtgacactgcagcaggtgctgcccgcgcttgcaccgtccgaagaaaagcgcggcctaaa

SEQ ID NO: 112496 - DNA, 80 bp, synthetic construct
  source 1..80: mol_type = other DNA
tgttgtacaggcttggagcagtgcagaatgatatcatcacaacgcaccccataaccaagtacatcatgacttgcatgtcg

SEQ ID NO: 112497 - DNA, 80 bp, synthetic construct
  source 1..80: mol_type = other DNA
gtgaaaacaaagctcaaactcactccactgcctggtgcagccaatcttgatttatcaggatggtttgtatcgggcttcag

SEQ ID NO: 112498 - DNA, 80 bp, synthetic construct
  source 1..80: mol_type = other DNA
ttgagaaatgctacctgggggtgtctacagagggcaatgctcgagtgagacactgctcttccctggagacgggctgcttc

SEQ ID NO: 112499 - DNA, 80 bp, synthetic construct
  source 1..80: mol_type = other DNA
gctttttcgcaagagagcatacgtgaattttctttttgcatagacgtcttcgctctctaacggaccttatcgggggggta

SEQ ID NO: 112500 - DNA, 80 bp, synthetic construct
  source 1..80: mol_type = other DNA
tcgcccatggaaaagaaagtcatcacgtggggtgcagacaccgctgcctgtggagacatattggcgggccttcccgtctc

SEQ ID NO: 112501 - DNA, 80 bp, synthetic construct
  source 1..80: mol_type = other DNA
aggcaatcaagggggggagacatctcattttctgccactcaaagaagaagtgtgacgagctcgccgcaaaactggtcgcg

SEQ ID NO: 112502 - DNA, 80 bp, synthetic construct
  source 1..80: mol_type = other DNA
aatgcgcgagcggttggaggcgcctctgcccgaccgggcggtgcccatctacgtggccgggtttttggccctgtacgaca

SEQ ID NO: 112503 - DNA, 80 bp, synthetic construct
  source 1..80: mol_type = other DNA
aactcaccgtttacccttccctggaagaagtggtggcacaagatttactttctccttctgaaatgggtgtcggggactat

SEQ ID NO: 112504 - DNA, 80 bp, synthetic construct
  source 1..80: mol_type = other DNA
ggcgtgtgtatggacttcagacgttgtctgtgtatcaaaaaaccatacatcctctgtataattctcttctacacacgtgt

SEQ ID NO: 112505 - DNA, 80 bp, synthetic construct
  source 1..80: mol_type = other DNA
tccttggcaatgggagcactgattctccaggcgtgtggtcaggagggtagaactcgagtgggctatctcctggcagctat

SEQ ID NO: 112506 - DNA, 80 bp, synthetic construct
  source 1..80: mol_type = other DNA
gcgggcgaagatgcggtccatggcgtcgcgggcgtccttgccgatgcagtcccccaggtccacgcgcgagagcgggtact

SEQ ID NO: 112507 - DNA, 80 bp, synthetic construct
  source 1..80: mol_type = other DNA
catgacgccccctcccccgaaccgaaacgttgactttccgctcgccgtcctggccgcgagctcgcaatccccgcggtgct

SEQ ID NO: 112508 - DNA, 80 bp, synthetic construct
  source 1..80: mol_type = other DNA
ggaggaagcctgtgcgctgactccgccccactctgcaagatccaaatacggatttggggccaaggaggtccgtagcttgt

SEQ ID NO: 112509 - DNA, 80 bp, synthetic construct
  source 1..80: mol_type = other DNA
gcgctgatgcccaccgccgcctcggcgcagatctcggacgtcagcgagggctttgcccccctgttcaccaacctgttcag

SEQ ID NO: 112510 - DNA, 80 bp, synthetic construct
  source 1..80: mol_type = other DNA
aacacaataacctgttacatcaaagccactgccgccagcagggccgcgggtctcaaaaacccatctttccttgtctgcgg

SEQ ID NO: 112511 - DNA, 80 bp, synthetic construct
  source 1..80: mol_type = other DNA
aatggagttcttatgcaggaatcatcactcgataaagaatattggaactatagaaatgacaataatgttgtcggaactcc

SEQ ID NO: 112512 - DNA, 80 bp, synthetic construct
  source 1..80: mol_type = other DNA
ctgaacatgacatttaccagtgttgccagctagaccccacagcccgcaaggtcattacgtccctcacagagcgactgtat

SEQ ID NO: 112513 - DNA, 80 bp, synthetic construct
  source 1..80: mol_type = other DNA
aggtttcgttgaactgcagctgccaccaggagacaacatcatctatgttggtgagctgagtcaccagtggtttcagaagg

SEQ ID NO: 112514 - DNA, 80 bp, synthetic construct
  source 1..80: mol_type = other DNA
tatggcgaggcacctagcgggaggtaagtatgtccagtggttgctgatcaccctcggcaggtggacgggcacttacatct

SEQ ID NO: 112515 - DNA, 80 bp, synthetic construct
  source 1..80: mol_type = other DNA
gccccaaacataccaggtagggtacctccacgctcccacgggtagcgggaagagtactaaagtcccggcagcttatgcag

SEQ ID NO: 112516 - DNA, 80 bp, synthetic construct
  source 1..80: mol_type = other DNA
ggcaggccgggatcgccggacacacctacctccaggcgagcgaaaaattcaaaatgtggggtgcggagcctgtttccgcg

SEQ ID NO: 112517 - DNA, 80 bp, synthetic construct
  source 1..80: mol_type = other DNA
caaagacgtttttggtccatcgtgagtggttcatggacctcaacctcccttggagcagtgctggaagtactgtgtggagg

SEQ ID NO: 112518 - DNA, 80 bp, synthetic construct
  source 1..80: mol_type = other DNA
ctgccgcaccagctgcagggctcccatgacgtcgggcgccgatatcttgaagtcgcagttagggccggagctcccgcggc

SEQ ID NO: 112519 - DNA, 80 bp, synthetic construct
  source 1..80: mol_type = other DNA
tgccctcgtaggcccggtgtgggcctcggtcgctccaagccccgcggtgcgggtccctccggccagagccgaggtggaga

SEQ ID NO: 112520 - DNA, 80 bp, synthetic construct
  source 1..80: mol_type = other DNA
catctgcgagagccaggggacacacgaggacgaagcgagcctgagagcctttacggaggctatgaccaggtactctgctc

SEQ ID NO: 112521 - DNA, 80 bp, synthetic construct
  source 1..80: mol_type = other DNA
ctgctcttaacatcctcacagcagaaagcggattggataccactggcattgacgataaaaggtctcaatccaacagccat

SEQ ID NO: 112522 - DNA, 80 bp, synthetic construct
  source 1..80: mol_type = other DNA
gagcctggggatccggatctcagcgacgggtcatggtcgacggtcagtagtggggccgacacggaagatgtcgtgtgctg

SEQ ID NO: 112523 - DNA, 80 bp, synthetic construct
  source 1..80: mol_type = other DNA
actccatgctcctgttcctggttaagggatatctgggactgggtatgcgaggtgctgagcgactttaagacctggctgaa

SEQ ID NO: 112524 - DNA, 80 bp, synthetic construct
  source 1..80: mol_type = other DNA
aagcagaaagtgctcggtttaattcagaccacaacaaggcaagcggaagaacttaagccagccgtccactctgcctggcc

SEQ ID NO: 112525 - DNA, 80 bp, synthetic construct
  source 1..80: mol_type = other DNA
cgtggacctaatggtgggtgccgctgccgtttgttcggccatgtacgtaggggatctatgtggtggtgccttcctcgtcg

SEQ ID NO: 112526 - DNA, 80 bp, synthetic construct
  source 1..80: mol_type = other DNA
gggtatatataggtatgtctcttctggtgaacgtgcctcggggatgttcgactccgtagtgctctgtgagtgctatgact

SEQ ID NO: 112527 - DNA, 80 bp, synthetic construct
  source 1..80: mol_type = other DNA
gcccgtggaagcatctcaacacgccttcctcccgggtacagccatgagcccaaacagcgcagccggttgtatcccagttg

SEQ ID NO: 112528 - DNA, 80 bp, synthetic construct
  source 1..80: mol_type = other DNA
gagataactgggtccagtgaaagagtggacgttcggttggatgatgatgggaactttcagctcatgaatgaccctggggc

SEQ ID NO: 112529 - DNA, 80 bp, synthetic construct
  source 1..80: mol_type = other DNA
ttcaggaaacatccagaagctacgtacaccaagtgcggggctggaccctggttgacgcccaggtgcctggtccactaccc

SEQ ID NO: 112530 - DNA, 80 bp, synthetic construct
  source 1..80: mol_type = other DNA
tcaccgagcggctttatatcgggggtcccctgactaattcaaaagggcagaactgcggctatcgccggtgccgcgcgagc

SEQ ID NO: 112531 - DNA, 80 bp, synthetic construct
  source 1..80: mol_type = other DNA
cctgcgtcgggctctaacgggcaccggcactgatgccgaaactgaatcttactttgacatgggtgcggacctgcaatggc

SEQ ID NO: 112532 - DNA, 80 bp, synthetic construct
  source 1..80: mol_type = other DNA
gggcgacccggtggtgctctgatagtctcgcgtgcccaaggcccgtgatcggggtacttcgccgccgcgacccgccaccc

SEQ ID NO: 112533 - DNA, 80 bp, synthetic construct
  source 1..80: mol_type = other DNA
tgaagggccgggcttctggggtgaaagcgcgcatgctgtccgttgaggaggcgtgtgcgcttgtcccccctcactctgcc

SEQ ID NO: 112534 - DNA, 80 bp, synthetic construct
  source 1..80: mol_type = other DNA
tctcgcagtcaacggcgcggccgtacggggcgcgggaaaccggaggtgtataggtacgtatcgcagggagagcgcccatc

SEQ ID NO: 112535 - DNA, 80 bp, synthetic construct
  source 1..80: mol_type = other DNA
tatccttggcccctgtatgggaatgagggctgcggctgggcagggtggctcctgtccccccggggttctcgccctacttg

SEQ ID NO: 112536 - DNA, 80 bp, synthetic construct
  source 1..80: mol_type = other DNA
atttgctcctaccccaaaaccgttcatcagggatgaggtgtcctttagcgtgggcctcactccttccgttggatctcagc

SEQ ID NO: 112537 - DNA, 80 bp, synthetic construct
  source 1..80: mol_type = other DNA
ccgaaaccccgacctggaaccgcaaagaactgctggtgacctttaaaaacgcgcatgcgaaaaaacaggaagtggtggtg

SEQ ID NO: 112538 - DNA, 80 bp, synthetic construct
  source 1..80: mol_type = other DNA
tacagcaggtccccgtacgagaaccgctgcgacgcccacgggttggccgtggccgcgaagggccgcgccgggtcgctctg

SEQ ID NO: 112539 - DNA, 80 bp, synthetic construct
  source 1..80: mol_type = other DNA
gtcacctttatgaacatgaggttcaggggagatgggtataatgggacggtctttatggccaataccaagctgacagtgca

SEQ ID NO: 112540 - DNA, 80 bp, synthetic construct
  source 1..80: mol_type = other DNA
gctacgggcatatctgaacactcctggtctcccagtttgccaggaccacctggaattctgggaggtggtatttacaggac

SEQ ID NO: 112541 - DNA, 80 bp, synthetic construct
  source 1..80: mol_type = other DNA
ctgcatgtcggctgacctcgaggtggtgaccagcacatgggtcctcgtgggtggtgtgctggcagctctagctgcttact

SEQ ID NO: 112542 - DNA, 80 bp, synthetic construct
  source 1..80: mol_type = other DNA
catcttgggctgacgtcaggaacgacatgatatcatacggtgggggatggaggctcggagacaaatgggataaagaagaa

SEQ ID NO: 112543 - DNA, 80 bp, synthetic construct
  source 1..80: mol_type = other DNA
cctcccagccataattgagagactacatgggcttgaagctttctcactgcacggttactctcccaccgaactcactcggg

SEQ ID NO: 112544 - DNA, 80 bp, synthetic construct
  source 1..80: mol_type = other DNA
gccgggaagcagagcgcgtactgcagtggcgttccatccgggaccaaaaagctggtggcgaacggccgatccagcgtact

SEQ ID NO: 112545 - DNA, 80 bp, synthetic construct
  source 1..80: mol_type = other DNA
ctgaggagtccatctaccaatgttgccaactggaccccacagcccgtaaagtcataacatcactcaccgagcgattatat

SEQ ID NO: 112546 - DNA, 80 bp, synthetic construct
  source 1..80: mol_type = other DNA
atctgaaaattccttgccaactaccttctccagagtttttctcctgggtggacggtgtgcagatccataggtttgcaccc

SEQ ID NO: 112547 - DNA, 80 bp, synthetic construct
  source 1..80: mol_type = other DNA
cacaggctcgaggtggcatgcaactggacccgtggtgagcggtgtgatcttgaagacagagacagggccgagctgagccc

SEQ ID NO: 112548 - DNA, 80 bp, synthetic construct
  source 1..80: mol_type = other DNA
tttctgtcccagactaagcaggcaggggacaacttcccctacctggtagcataccaggccacagtgtgcgccagggccca

SEQ ID NO: 112549 - DNA, 80 bp, synthetic construct
  source 1..80: mol_type = other DNA
agtgactgctgccgcagcaccaacaactactgcctccataacaagatcctcagatgtgtcttcctctaccacctgctcgg

SEQ ID NO: 112550 - DNA, 80 bp, synthetic construct
  source 1..80: mol_type = other DNA
tgcgctagggctcaagcccctcccccatcgtgggaccagatgtggaagtgtttgatccgccttaaacccaccctccatgg

SEQ ID NO: 112551 - DNA, 80 bp, synthetic construct
  source 1..80: mol_type = other DNA
ttgacgacctcccagacgctcctcttgaacgtcttgggaggttgggtagcctctcagctgtcaaccccggtcccggctac

SEQ ID NO: 112552 - DNA, 80 bp, synthetic construct
  source 1..80: mol_type = other DNA
tgaggtcaagccatcaggatcagcctcatccatggtcaatggcgtggtgaaactgctcaccaaaccatgggatgtcatcc

SEQ ID NO: 112553 - DNA, 80 bp, synthetic construct
  source 1..80: mol_type = other DNA
gctaggagacgtctcgccagggggagccccccctcagaggctagctcttcggccagccaattgtcagcgccgtcgttaaa

SEQ ID NO: 112554 - DNA, 80 bp, synthetic construct
  source 1..80: mol_type = other DNA
aggccggtgctccctgggagaccggggctgtcgtggatccctggggtcacgcggtaccctgtggtctctggaagctcgcg

SEQ ID NO: 112555 - DNA, 80 bp, synthetic construct
  source 1..80: mol_type = other DNA
cggcgcccgcggccgccgccctggaggcctactgctccccgcgcgccgtggccgagctcacggaccacccgctgttcccc

SEQ ID NO: 112556 - DNA, 80 bp, synthetic construct
  source 1..80: mol_type = other DNA
tttttcacagaactggacggggtgcgcctgcataggttcgcgccctcttgcaagcctttgctgcgagatgaggtgtcgtt

SEQ ID NO: 112557 - DNA, 80 bp, synthetic construct
  source 1..80: mol_type = other DNA
acagactgggtggtgtgcagaacgagatcaccttaacacacccaatcaccaaatacatcatggcttgcatgtcggcggac

SEQ ID NO: 112558 - DNA, 80 bp, synthetic construct
  source 1..80: mol_type = other DNA
gcggtcgcaatggatgacgtcgttgactctggacatttggtaccagaggttaatgcttctgaccctcttgcaatggatcc

SEQ ID NO: 112559 - DNA, 80 bp, synthetic construct
  source 1..80: mol_type = other DNA
gcctggatttaacaaaactggtcatgtaacttggttaatagaaataccagactatggctcagccccttcaaacaaatttg

SEQ ID NO: 112560 - DNA, 80 bp, synthetic construct
  source 1..80: mol_type = other DNA
ctagaagtggacaggactgaagccaagtccgccctgaaagatgggtccaaaatcaagcatgcagtatctagagggtccag

SEQ ID NO: 112561 - DNA, 80 bp, synthetic construct
  source 1..80: mol_type = other DNA
gcacagcagcgccgtcgtgcgctcggccatgttgtgcgccagcacctgcagcgtgagcatggcgggcccgtcgacgacga

SEQ ID NO: 112562 - DNA, 80 bp, synthetic construct
  source 1..80: mol_type = other DNA
aagggggacacccgaacgctccagtactccgcgtccaaccgtttattaaacgcgtccaagataaggcggtcgcaggcgtc

SEQ ID NO: 112563 - DNA, 80 bp, synthetic construct
  source 1..80: mol_type = other DNA
gtaacatgggtgttcttgctggtcaggcatcacagctaaatgctgttgtagatttgcaagacagaaacacagagctgtcc

SEQ ID NO: 112564 - DNA, 80 bp, synthetic construct
  source 1..80: mol_type = other DNA
ggccgcattggctgcttactgcctgtccacaggctgtgtggtcattgtgggccggattatcctccctggcaagccggcaa

SEQ ID NO: 112565 - DNA, 80 bp, synthetic construct
  source 1..80: mol_type = other DNA
ggtctcttacaattaaactaggaaacggcctcactctagacaaccagggacaactaacatcaaccgctggggaagtagaa

SEQ ID NO: 112566 - DNA, 80 bp, synthetic construct
  source 1..80: mol_type = other DNA
gttggtctgcggggacgatctggtcgtaatttcggagagcttggggaatgccgaggacgccgccaacctgagagtcttca

SEQ ID NO: 112567 - DNA, 80 bp, synthetic construct
  source 1..80: mol_type = other DNA
agagtacctggagcttcgtgcgctttttcaaccctggcgcaaaacagaatctgcagttagtcaactccaatgggtcatgg

SEQ ID NO: 112568 - DNA, 80 bp, synthetic construct
  source 1..80: mol_type = other DNA
aaagcgtatgggcagatgtggctcctcaactacttccatcgcagagatctccgtacccttggacttgccatatgctctgc

SEQ ID NO: 112569 - DNA, 80 bp, synthetic construct
  source 1..80: mol_type = other DNA
cgatcagtttccagactggagcatcaaatgtgggaagcagtgaaggacgagctgaacactcttttgaaggagaatggtgt

SEQ ID NO: 112570 - DNA, 80 bp, synthetic construct
  source 1..80: mol_type = other DNA
cagcttgggaaactgcccgccacactccagtaaactcgtggttgggaaatatcatcatgtacgcgcccaccatatgggtc

SEQ ID NO: 112571 - DNA, 80 bp, synthetic construct
  source 1..80: mol_type = other DNA
ttggctttttctctagtgaagaatgcacaaacaccgagaagaggcacgggagcttctggtgagacgctcggtgaaaaatg

SEQ ID NO: 112572 - DNA, 80 bp, synthetic construct
  source 1..80: mol_type = other DNA
agctcatcctcaggggtcgacacacagtccagcactacctctaaggtgcccccccccccaggaggagaatccgactcaga

SEQ ID NO: 112573 - DNA, 80 bp, synthetic construct
  source 1..80: mol_type = other DNA
cctcggtataggtactgttttggaccaagcccaaacagcaggtgttcgactgaccgtgctcgccactgctactcctcctg

SEQ ID NO: 112574 - DNA, 80 bp, synthetic construct
  source 1..80: mol_type = other DNA
gcagcccacgtatgaccttgagctcataacatcgtgctcatccaacgtctccgtcgcccacgacggtaatgggaagagat

SEQ ID NO: 112575 - DNA, 80 bp, synthetic construct
  source 1..80: mol_type = other DNA
tggacgccaccacctacaccaccgcgggtgttatcgcgcgtgacgtcagcggattctccaggttgtttagcgtaggagcc

SEQ ID NO: 112576 - DNA, 80 bp, synthetic construct
  source 1..80: mol_type = other DNA
gcgctgtctgaatttattaagtttgctgaaggtaggaggggagctgctgaagtgctagttgtgctgagtgaactccctga

SEQ ID NO: 112577 - DNA, 80 bp, synthetic construct
  source 1..80: mol_type = other DNA
tctacaaacccactgagcaggtggacaccctgctctgtgacattggggagtcatcctctaatccgacaatagaggaagga

SEQ ID NO: 112578 - DNA, 80 bp, synthetic construct
  source 1..80: mol_type = other DNA
tctcgccgggcccccaacaacgtctgagcttggtgaacagcaatgggagctggcacatcaatcgcacggccttgaactgc

SEQ ID NO: 112579 - DNA, 80 bp, synthetic construct
  source 1..80: mol_type = other DNA
ctggttgacaaagaaagggcccttcaccaagaagggaaatgtgaatcgtgtgtctacaacatgatgggaaaacgtgagaa

SEQ ID NO: 112580 - DNA, 80 bp, synthetic construct
  source 1..80: mol_type = other DNA
aaaacctttggcaggcccgagccggactttgactctgagggggcttccattactacgactgagactccagatccgggccc

SEQ ID NO: 112581 - DNA, 80 bp, synthetic construct
  source 1..80: mol_type = other DNA
ctacgactgaatgttaagtggagaggcagagcaactgcgcctgaaacacctggtccactgtcgccgccacaagtgctttg

SEQ ID NO: 112582 - DNA, 80 bp, synthetic construct
  source 1..80: mol_type = other DNA
aagtgttggttgagatggaaccaccatttggagattcatacattgtggttggaagaggggataagcagataaaccatcac

SEQ ID NO: 112583 - DNA, 80 bp, synthetic construct
  source 1..80: mol_type = other DNA
taggcgtggtctgtgcagccatcctacgccgccacgtagggccgggcgagggtgccgtgcaatggatgaaccgcctaatc

SEQ ID NO: 112584 - DNA, 80 bp, synthetic construct
  source 1..80: mol_type = other DNA
gcaccaccgtcgatgacgccatcgacgcggtggtggaggaggcgcgcaactacacgcccacgccgccaccagtgtccaca

SEQ ID NO: 112585 - DNA, 80 bp, synthetic construct
  source 1..80: mol_type = other DNA
cgaagagcgggtcatcttggcaggacctatgccagtgacccactctagtgcagcgcaaagaagagggagaataggaagaa

SEQ ID NO: 112586 - DNA, 80 bp, synthetic construct
  source 1..80: mol_type = other DNA
agaagtgaaaggatacacaaaaggaggccctggtcatgaagaacccgtgttggtgcaaagctatgggtggaacatagtcc

SEQ ID NO: 112587 - DNA, 80 bp, synthetic construct
  source 1..80: mol_type = other DNA
gatgttagaattattgaaaatcatggaactgaagatgaacttccaaattactgctttccactgggaggtgtgattaatac

SEQ ID NO: 112588 - DNA, 80 bp, synthetic construct
  source 1..80: mol_type = other DNA
tggcgcgcaaagaaaacaccgatgggattctcctatgacacgagatgtttcgattccacagtcacggagcgcgacatccg

SEQ ID NO: 112589 - DNA, 80 bp, synthetic construct
  source 1..80: mol_type = other DNA
ggccagaaccacacacgccttttcccaactgttccagcgagggtcccgccagaatctccagctcgttaacaccaatggaa

SEQ ID NO: 112590 - DNA, 80 bp, synthetic construct
  source 1..80: mol_type = other DNA
gaagaaacaagcccgaccaccagacagaaaatgtaaccatacccaaaccgactctgggggctgtttgtggggtcggaacc

SEQ ID NO: 112591 - DNA, 80 bp, synthetic construct
  source 1..80: mol_type = other DNA
tgagacactcgacatcgccacgcgctctccttcctttactgacaacagcacaccaccggccgtgccccagacctaccagg

SEQ ID NO: 112592 - DNA, 80 bp, synthetic construct
  source 1..80: mol_type = other DNA
ctggaagattcagcgtgtccccggcagctccatctcacacgttgagcctaggcgactacggagaggtctctttcgactgc

SEQ ID NO: 112593 - DNA, 80 bp, synthetic construct
  source 1..80: mol_type = other DNA
tggggttttggctacttggcaaacactcgaagcgaggaggagcattgtgggacgtgccgtcaccaaaagtgtatccaaag

SEQ ID NO: 112594 - DNA, 80 bp, synthetic construct
  source 1..80: mol_type = other DNA
tgcttcatctgaagaacttccgggtatgcgcgctctaatagccttgcgcatagccaaccagtcttttaaaagaacaccca

SEQ ID NO: 112595 - DNA, 80 bp, synthetic construct
  source 1..80: mol_type = other DNA
tccatgcctccccttgagggagagccggaggaccctgacctggagtttgaaccagcggaaaccgctcccctttccgaggg

SEQ ID NO: 112596 - DNA, 80 bp, synthetic construct
  source 1..80: mol_type = other DNA
cacacatacactccccacgagctgacgcgggtggctgcagccctcagaaaacttggggcgccacccctcagagcgtggaa

SEQ ID NO: 112597 - DNA, 80 bp, synthetic construct
  source 1..80: mol_type = other DNA
gcgccagaaaaaagtaaccttcgaccggttgcaggtcctagattcctattactatgacacagtcaaggagataaaaaccc

SEQ ID NO: 112598 - DNA, 80 bp, synthetic construct
  source 1..80: mol_type = other DNA
ctcaatgtcatactcatggacgggggctcttgtgacaccttgtgcagctgaggagacgaagctgccaattagccccctga

SEQ ID NO: 112599 - DNA, 80 bp, synthetic construct
  source 1..80: mol_type = other DNA
atagaggtgaaaacctgcacatggccaaaatcacacactctttggagcaacggtgtgctggagagtgacatgatcattcc

SEQ ID NO: 112600 - DNA, 80 bp, synthetic construct
  source 1..80: mol_type = other DNA
ccagctcctgaggcgactgcaccagtggctaagctcggagtccactactccgtgctccggttcttggctaaaagacatct

SEQ ID NO: 112601 - DNA, 80 bp, synthetic construct
  source 1..80: mol_type = other DNA
gcggcttcatattcttccatgcctccgctagagggcgaacctggggaccctgacctttcgtcagggtcatggtcaaccgt

SEQ ID NO: 112602 - DNA, 80 bp, synthetic construct
  source 1..80: mol_type = other DNA
cacactcgcagtccgttatcgcggagcactgacggatgacgtgagaacgcacatagaccttgtcgtggcttcggccacaa

SEQ ID NO: 112603 - DNA, 80 bp, synthetic construct
  source 1..80: mol_type = other DNA
atttgtttcggcttaaggtagaaaattcagccatttacaatgttaaaaataccatcaatgcatctgaaatgaatatctac

SEQ ID NO: 112604 - DNA, 80 bp, synthetic construct
  source 1..80: mol_type = other DNA
cttcacggcagggtttgcaaactgtaaacctaacacaggcgtttaaaaacttgcaaggaatgtggggcgtgcgagccccc

SEQ ID NO: 112605 - DNA, 80 bp, synthetic construct
  source 1..80: mol_type = other DNA
ctgaacgtgttaggaggatggttagcatcacaacttgccaaccctgttccggccactgctttcgtagttagtggcctggc

SEQ ID NO: 112606 - DNA, 80 bp, synthetic construct
  source 1..80: mol_type = other DNA
ccgctcggtggcttcggcgcgctgctgtttggcgcgcaccacggcgtccttggtatcggccaggtcctgtcgggtcacga

SEQ ID NO: 112607 - DNA, 80 bp, synthetic construct
  source 1..80: mol_type = other DNA
ttgcatgtcagctgaccttgaggtggtgactagtacgtgggttctggtaggtggcgttctggcagcccttgctgcttact

SEQ ID NO: 112608 - DNA, 80 bp, synthetic construct
  source 1..80: mol_type = other DNA
cttaggagacggtcttgcattaggtggctctaagttaataatcaatcttggtccaggtttacaaacgtctaatggagcta

SEQ ID NO: 112609 - DNA, 80 bp, synthetic construct
  source 1..80: mol_type = other DNA
cagaggtgccggccgagcccgcggtccaccatgccggccgcctccagcgacacgacgagggagcacagatagtccaggcg

SEQ ID NO: 112610 - DNA, 80 bp, synthetic construct
  source 1..80: mol_type = other DNA
aaatacatcatgacctgtatgtcagcagatcttgaggtcaccaccagtacctgggtgcttgtgggtggcgtcctcgcagc

SEQ ID NO: 112611 - DNA, 80 bp, synthetic construct
  source 1..80: mol_type = other DNA
cgtcgtctatcgcacatcatccgtccaaacagtgcgcttcaagtctcaatgaaacagtaaaagattctccccccgcgatt

SEQ ID NO: 112612 - DNA, 80 bp, synthetic construct
  source 1..80: mol_type = other DNA
gccgcgccagtggagttttcactaccagcatgggaaacaccatcacgtgctatatcaaagccctttccgcctgtaaggcc

SEQ ID NO: 112613 - DNA, 80 bp, synthetic construct
  source 1..80: mol_type = other DNA
agctctaaaagatatcccaatcaaaaaggttctgaagttcagaacatggctcttacctacacttttttacaaggtaaccc

SEQ ID NO: 112614 - DNA, 80 bp, synthetic construct
  source 1..80: mol_type = other DNA
gcgttctccatggacagccgcagaacctggtggtcctttccccaaaaaaacagctgccggtgagggaacgcgcggggctc

SEQ ID NO: 112615 - DNA, 80 bp, synthetic construct
  source 1..80: mol_type = other DNA
gatactcctggacaatataacaacactccgggggcctgtggcaaccttttatggacctgagcaggacaagatgccagagg

SEQ ID NO: 112616 - DNA, 80 bp, synthetic construct
  source 1..80: mol_type = other DNA
cgcgactagaaagtcctccgaacggtcccagccgcgtggtcgacgccagcccatcccaaaagatcggcgtcccaccggca

SEQ ID NO: 112617 - DNA, 80 bp, synthetic construct
  source 1..80: mol_type = other DNA
tcctaggacctgccgatgatgtcaagtccatgggctggcgactccttgcaccaatcaccgcgtatgcccagcagacgcgg

SEQ ID NO: 112618 - DNA, 80 bp, synthetic construct
  source 1..80: mol_type = other DNA
tgataggccgtatggaaaagaagtcttggaaagggccacgatatgaagaagatgtgaacttaggcagtggtacaagatcc

SEQ ID NO: 112619 - DNA, 80 bp, synthetic construct
  source 1..80: mol_type = other DNA
gcggcctcgccgacctcttggggtacgtccccgtcctaggtggccccctcggtggggtcgcggctgctctcgctcacggt

SEQ ID NO: 112620 - DNA, 80 bp, synthetic construct
  source 1..80: mol_type = other DNA
ttcctgggactctgaggaaaggctcattgatggaggaaatggagggagtggattcactccagctcagctccgggacaaga

SEQ ID NO: 112621 - DNA, 80 bp, synthetic construct
  source 1..80: mol_type = other DNA
atcgatgctcacttcctgtcacaaaccaaacaggggggagaaaacttcgcatacctcgtggcttatcaagccacagtttg

SEQ ID NO: 112622 - DNA, 80 bp, synthetic construct
  source 1..80: mol_type = other DNA
gtgacagcggaagcagctaagcgtaggttggacagagggtctccgccctcactggccagctcctcagcaagccagctatc

SEQ ID NO: 112623 - DNA, 80 bp, synthetic construct
  source 1..80: mol_type = other DNA
acgaggcccgcaagctcaaccccaacgccatcgcctccgccaccgtcggccggcgggtgagcgcgcgcatgctcggagac

SEQ ID NO: 112624 - DNA, 80 bp, synthetic construct
  source 1..80: mol_type = other DNA
cggcaggagatgggcgggaacatcacccgcgtggagtcagagaataaggtggtagttttggactctttcgagccgcttcg

SEQ ID NO: 112625 - DNA, 80 bp, synthetic construct
  source 1..80: mol_type = other DNA
tgctccacccgcacctggtgtttgacatcactaagtatctattggctgtccttgggcccgcttggattctacaagctagc

SEQ ID NO: 112626 - DNA, 80 bp, synthetic construct
  source 1..80: mol_type = other DNA
ttatgtccaccgccacacagtccttcttgggcaccgctatcaacggcgtgctgtggacagtctaccatggcgccggctca

SEQ ID NO: 112627 - DNA, 80 bp, synthetic construct
  source 1..80: mol_type = other DNA
tgcaattgggctaatgtttgccattgttgggggtctggccgagttggacattgactccatggcaataccttttatgttag

SEQ ID NO: 112628 - DNA, 80 bp, synthetic construct
  source 1..80: mol_type = other DNA
agtggacgtgcagtacctctacggagtctcctcgagcgtcgtctcgtgggtggtgaagtgggagtacattgtcctgatgt

SEQ ID NO: 112629 - DNA, 80 bp, synthetic construct
  source 1..80: mol_type = other DNA
taaacatatcgagagagccaggtgatgccggcggcggtagtggcggcgcgggcgtattcgcgaacgcggttccagatgtt

SEQ ID NO: 112630 - DNA, 80 bp, synthetic construct
  source 1..80: mol_type = other DNA
taaggaatacaggaaaggtgacacggccaccggtgtttataggatcatgactcgtggactactaggtaactatcaagccg

SEQ ID NO: 112631 - DNA, 80 bp, synthetic construct
  source 1..80: mol_type = other DNA
acctccgacgcatccagatcctcggcgttgctcagggcgaacggggtcagcttgcacatctgccgcccgatctggggcac

SEQ ID NO: 112632 - DNA, 80 bp, synthetic construct
  source 1..80: mol_type = other DNA
tggctatggaaggagctgggaaaacgcaagcgaccacgtgtctgcaccaaagaagagttcattaataaggtgcgcagcaa

SEQ ID NO: 112633 - DNA, 80 bp, synthetic construct
  source 1..80: mol_type = other DNA
tctcggcttgctacagacagcgtctaagcaggccgaagcagctgctcccatcgtgcaatccaactggcagaaggtcgaga

SEQ ID NO: 112634 - DNA, 80 bp, synthetic construct
  source 1..80: mol_type = other DNA
gtggcagcttactgcctggcgaccggctgcatctccatcattggccgcatacacctgaatgatcaggtggttgtggcccc

SEQ ID NO: 112635 - DNA, 80 bp, synthetic construct
  source 1..80: mol_type = other DNA
aattcatcgggatgtgtcgagcggatgtctgcttgcaagccccttgaccattttgcgcaagggtgtggtccgttgggacc

SEQ ID NO: 112636 - DNA, 80 bp, synthetic construct
  source 1..80: mol_type = other DNA
gctaaggttttgattgtgatgctacttttcactggcgttgacggggagacccatacgacaggggctgtgtcaggacacac

SEQ ID NO: 112637 - DNA, 80 bp, synthetic construct
  source 1..80: mol_type = other DNA
tgcttgctcagcatgtggccatttgccttgctgcttctggcattgccccaacaagcttatgcccttgatgcagtcgaaca

SEQ ID NO: 112638 - DNA, 80 bp, synthetic construct
  source 1..80: mol_type = other DNA
gtgacgtggttatctgtgccacagatgctctcatgacggggtacacaggcgatttcgacagcgtgattgactgcaatgtt

SEQ ID NO: 112639 - DNA, 80 bp, synthetic construct
  source 1..80: mol_type = other DNA
gatacttgctattccatgacggggtggcggtccctcgcaacgttctctactattaccgtcatctctacagcccctacgaa

SEQ ID NO: 112640 - DNA, 80 bp, synthetic construct
  source 1..80: mol_type = other DNA
gtcctccccacgagcatgggcaacacactgacttgctatttaaaggccgcggcggcttgtaaagccgctggcctcaaaaa

SEQ ID NO: 112641 - DNA, 80 bp, synthetic construct
  source 1..80: mol_type = other DNA
atttaatcatacatgtgacgagcaaaatcttacactgttgtttataaatcttacacatgatggggcttatcttggctata

SEQ ID NO: 112642 - DNA, 80 bp, synthetic construct
  source 1..80: mol_type = other DNA
aaccctttagtgtcccaaatataccccttaatctgatgtccaattctagggtcccagctttgattgatggtatgacagtt

SEQ ID NO: 112643 - DNA, 80 bp, synthetic construct
  source 1..80: mol_type = other DNA
cgcgttgtgcgacgggccgctacactggtgggtggcctccgggacgaaggcgcggatcagggcgttgtagtgcgcccagc

SEQ ID NO: 112644 - DNA, 80 bp, synthetic construct
  source 1..80: mol_type = other DNA
tggtgtctcacgtttgtgtgttttgcctggtacatcaaaggtcgctttgtccctgctgttacttacggtctgctacaact

SEQ ID NO: 112645 - DNA, 80 bp, synthetic construct
  source 1..80: mol_type = other DNA
aggctttctgagttcaattgggaaggcggtgcacacggtccttggtggtgctttcaacagcatcttcggtggagtagggt

SEQ ID NO: 112646 - DNA, 80 bp, synthetic construct
  source 1..80: mol_type = other DNA
tcactcaaagccagccgtaggtgggacgccaccggatctccagcggcagcggcagcgggtaaggccaaacgcgagcggcg

SEQ ID NO: 112647 - DNA, 80 bp, synthetic construct
  source 1..80: mol_type = other DNA
tcaggcgagcgaaaaatttaaaatatgggaggcggagtctgcccctgcgccggagcgcgggtataaaaccggcgccccgg

SEQ ID NO: 112648 - DNA, 80 bp, synthetic construct
  source 1..80: mol_type = other DNA
cagcagaactgacgcgggtggcagctaccctcaggaagcttggggtgccacccctcaggacctggagacaacgggctcgc

SEQ ID NO: 112649 - DNA, 80 bp, synthetic construct
  source 1..80: mol_type = other DNA
gacctggtggggtggccttccccccctggaaagggttcgctcacccggtgtacttgcgggtcggcggatctgtacctggt

SEQ ID NO: 112650 - DNA, 80 bp, synthetic construct
  source 1..80: mol_type = other DNA
cgtgggcgcactgggagcgggaaaccggtggtgtataggtacgtctcgcagggcgaacggccgtctggcatgtttgacac

SEQ ID NO: 112651 - DNA, 80 bp, synthetic construct
  source 1..80: mol_type = other DNA
tgtattttattctaattctacctcatctatcgtgctgaactgcgcctgcactaacgaacttatccagtggattgcaaacg

SEQ ID NO: 112652 - DNA, 80 bp, synthetic construct
  source 1..80: mol_type = other DNA
cttgtccacaaacaatggtttctagacttaccattgccatggacttcaggggcttcaacacctcaagagacctggaacag

SEQ ID NO: 112653 - DNA, 80 bp, synthetic construct
  source 1..80: mol_type = other DNA
cgtcacttctgcccttacatgtaactcagtcgtagggcgccatgttgcccacgtccaaaatggtttccatgtccagccac

SEQ ID NO: 112654 - DNA, 80 bp, synthetic construct
  source 1..80: mol_type = other DNA
cgtggggcaggccgaccgagtcgcggatgaagtgggcgtaggagtcttgcagcttggcgacaagctcggcggtgacgagg

SEQ ID NO: 112655 - DNA, 80 bp, synthetic construct
  source 1..80: mol_type = other DNA
ggatcacctccatctgaggcgagctcctcagtgagccagctatcagcaccgtcgctgcgggccacctgcaccacccacag

SEQ ID NO: 112656 - DNA, 80 bp, synthetic construct
  source 1..80: mol_type = other DNA
tatggaaacaacacagcctacaactgtgcccaccacagtcagtacaactattgaaaccactacacagtcagacactacag

SEQ ID NO: 112657 - DNA, 80 bp, synthetic construct
  source 1..80: mol_type = other DNA
tgtggaccctaacattaggactggagttaggactatcaccaccggggctgctatcacatactccacttatggcaagttcc

SEQ ID NO: 112658 - DNA, 80 bp, synthetic construct
  source 1..80: mol_type = other DNA
cgcccggagcggaagccgttacgcgtgttactttcgcgacctcccgaccggagaagcaagccccggcgccttctccgcct

SEQ ID NO: 112659 - DNA, 80 bp, synthetic construct
  source 1..80: mol_type = other DNA
ctaagattctactagctgtcctggcccctctatacatcttgcagtacagtttgctcaaagtgccttactttgtgcgcgcc

SEQ ID NO: 112660 - DNA, 80 bp, synthetic construct
  source 1..80: mol_type = other DNA
gacgtaaggatcattgagaaccacggagtggaggacgaactgccaaattactgctttccgctgggagggtctgcagctac

SEQ ID NO: 112661 - DNA, 80 bp, synthetic construct
  source 1..80: mol_type = other DNA
gcacaattaccgccagggctatgctacgcaaaccatgggtccatggcacttaggcaaactagagatagactttggagaat

SEQ ID NO: 112662 - DNA, 80 bp, synthetic construct
  source 1..80: mol_type = other DNA
cataggcgctgtatctctagacttttctcctggaacgtcaggatctccaatcgtcgacaaaaaaggaaaagtcgtgggtc

SEQ ID NO: 112663 - DNA, 80 bp, synthetic construct
  source 1..80: mol_type = other DNA
acaaactcgcccggtaaccgtcgtacgtgcccctatgggctctggtaaaacaacagccttgcttgagtggcttcaacacg

SEQ ID NO: 112664 - DNA, 80 bp, synthetic construct
  source 1..80: mol_type = other DNA
acctgctcggacggcaactgtcacctgctgaagaccattcacgtagccagccactctcgcaaggcctggccagtgtttga

SEQ ID NO: 112665 - DNA, 80 bp, synthetic construct
  source 1..80: mol_type = other DNA
ggcctctttatgggaatgagggcctgggatgggcagggtggctcctgtccccccgaggctcccgccctaattggtgcccc

SEQ ID NO: 112666 - DNA, 80 bp, synthetic construct
  source 1..80: mol_type = other DNA
acggatgagatcgcgccccacctgcgctgcgacaccttcccgtgcatgcaccgcttctgcatcccgtgcatgaaaacctg

SEQ ID NO: 112667 - DNA, 80 bp, synthetic construct
  source 1..80: mol_type = other DNA
ggctatcaagtgggagtacgtagtcctagctttcctggtgttggccgacgcgcgcatttgtgcgtgcatgtggttgatgt

SEQ ID NO: 112668 - DNA, 80 bp, synthetic construct
  source 1..80: mol_type = other DNA
cgggccgctcgtaagagccgcgacccggccgccggggagcgttgtcgccgtcggtctgccggcccccgtccctccctttt

SEQ ID NO: 112669 - DNA, 80 bp, synthetic construct
  source 1..80: mol_type = other DNA
gccccagattgggtgtgcgcgcgactcggaagacttcggagcggtcgcaacctcgtggaagacgccaacctatccccaag

SEQ ID NO: 112670 - DNA, 80 bp, synthetic construct
  source 1..80: mol_type = other DNA
cgctgagcagttcaagcagaaggccctcggcctcctgcagaccgcgtcccgccaggcagaggccatcactcctgctgtcc

SEQ ID NO: 112671 - DNA, 80 bp, synthetic construct
  source 1..80: mol_type = other DNA
ggacggcgagacgctgcgccccaacacgctcctgctaaaggaactggaacgcacgtttagcgggaagcgcctcctggagg

SEQ ID NO: 112672 - DNA, 80 bp, synthetic construct
  source 1..80: mol_type = other DNA
ctccgcgaatgctagcccgaacatagtcatacatttcgtgggaaggggccagcaagctgccgcctaggtccgaccgctgg

SEQ ID NO: 112673 - DNA, 80 bp, synthetic construct
  source 1..80: mol_type = other DNA
aacccccatgggcttctcgtatgacacccgctgctttgactctacagtgactgaaagggacatccgcactgagaatgaca

SEQ ID NO: 112674 - DNA, 80 bp, synthetic construct
  source 1..80: mol_type = other DNA
cactcggatgtttctgaaggtcagagagagcaacacaactgaatgtgactcgaagatcattggaacggctgtcaagaaca

SEQ ID NO: 112675 - DNA, 80 bp, synthetic construct
  source 1..80: mol_type = other DNA
ctcgcctcgaaactgcgctccatgggactcaatgctgtagcttactatcgtggtctggatgtctccgtgattccaacgac

SEQ ID NO: 112676 - DNA, 80 bp, synthetic construct
  source 1..80: mol_type = other DNA
tgcatccgctacgttttgctctgccctgtacataggagacctttgtggcgcggtgatgttggcttctcaagtcttcatca

SEQ ID NO: 112677 - DNA, 80 bp, synthetic construct
  source 1..80: mol_type = other DNA
tgctgtcatgcttgctttgccctgcagtcgggttggaggttcgcaacgcatccggtctctacatgctcaccaatgactgc

SEQ ID NO: 112678 - DNA, 80 bp, synthetic construct
  source 1..80: mol_type = other DNA
gttctcaacgcgacttccgttgccagctcccaggggttgatttggggcctaatcttcatctgctgcgcttggcacgtacg

SEQ ID NO: 112679 - DNA, 80 bp, synthetic construct
  source 1..80: mol_type = other DNA
gcacaagggtacaaggtcctagtgctcaatccatcggtagcggccacactcgggttcggggcatatatgtctcaagccca

SEQ ID NO: 112680 - DNA, 80 bp, synthetic construct
  source 1..80: mol_type = other DNA
gatgctggatgtgaccgaggagctgaggcccgatcacttggtgctggcctgcacccgcgctgagtttggctctagcgatg

SEQ ID NO: 112681 - DNA, 80 bp, synthetic construct
  source 1..80: mol_type = other DNA
aggtgtggtgtttgacataaccaagtggctcttggcggtgcttgggcctgcttacctcctaaaaggtgctttgacgcgcg

SEQ ID NO: 112682 - DNA, 80 bp, synthetic construct
  source 1..80: mol_type = other DNA
cggatacacaaacgactgggcgtataactaatcgaagtagggcccgttcggcatcaagaactgatgcgcgaaaataggga

SEQ ID NO: 112683 - DNA, 80 bp, synthetic construct
  source 1..80: mol_type = other DNA
ggctccaatgtccgactgggcaagcagcggcctgcgtgaccttgctgttgcagtggagcccatcatattctcacccatgg

SEQ ID NO: 112684 - DNA, 80 bp, synthetic construct
  source 1..80: mol_type = other DNA
ttggaggatttatccatagttcaatacgttggaaagccagtcaatcatgcagacggtgtgtgccagcttatgtggatatg

SEQ ID NO: 112685 - DNA, 80 bp, synthetic construct
  source 1..80: mol_type = other DNA
tcattgcctttgcgtccagaggtaaccatgtcgccccgacacattacgtgacggagtcagacgcgtccaaacgggtcaca

SEQ ID NO: 112686 - DNA, 80 bp, synthetic construct
  source 1..80: mol_type = other DNA
aacattcaacaactgtgcgtagggaatcaaaccaaacataaagagctaagacacacatgtaatatgcagaacataacttt

SEQ ID NO: 112687 - DNA, 80 bp, synthetic construct
  source 1..80: mol_type = other DNA
catgttcctctttgggatgctggacactcctctccgtaccgggggagtgaatggtgggactgattctattcctgcggctg

SEQ ID NO: 112688 - DNA, 80 bp, synthetic construct
  source 1..80: mol_type = other DNA
tgttaatataatgtctcgcccgcgcttagaaactgtgtattggcaggaactgcaaaatgagtttcagcaaggagatatgc

SEQ ID NO: 112689 - DNA, 80 bp, synthetic construct
  source 1..80: mol_type = other DNA
accgcagtggggaggagcccgaggagatgcgcgactgccggtttcgggcgtgcagggagctgcgcgagggcctggaccgc

SEQ ID NO: 112690 - DNA, 80 bp, synthetic construct
  source 1..80: mol_type = other DNA
gcgtcaaggcggcttgtgaagcaaagaagaaagccacgggatacgtgtacgatgccaacaaaatagtgtacacagtgaag

SEQ ID NO: 112691 - DNA, 80 bp, synthetic construct
  source 1..80: mol_type = other DNA
aaacctcaaagaaaaaccaaacgtaacaccaaccgccgcccaatggacgttaagttcccgggcggtggtcagatcgttgg

SEQ ID NO: 112692 - DNA, 80 bp, synthetic construct
  source 1..80: mol_type = other DNA
ctagtgaatgagggtggagaggtcaatctgaaagtgaggcaggacgccatggggaatctccatctcactgaggtggagaa

SEQ ID NO: 112693 - DNA, 80 bp, synthetic construct
  source 1..80: mol_type = other DNA
ccaactttcatgactcagaaagcaagaaacgcactggacaacttggctgtactgcatacggctgaggcaggtggaagggc

SEQ ID NO: 112694 - DNA, 80 bp, synthetic construct
  source 1..80: mol_type = other DNA
ggcgagcctggggaccctgacctttcatcagggtcgtggtcaactgtcagcgatgaggacagtgtggtgtgctgctccat

SEQ ID NO: 112695 - DNA, 80 bp, synthetic construct
  source 1..80: mol_type = other DNA
atttcatataatattcggatttgggataaataggactctgttctcgcctttttaaaaatagcctggcataactcttcctc

SEQ ID NO: 112696 - DNA, 80 bp, synthetic construct
  source 1..80: mol_type = other DNA
aaatattatgcaaaatacggcagacccatatatggttattaacaccttatatcataacttaaagggggaaaaaatggctc

SEQ ID NO: 112697 - DNA, 80 bp, synthetic construct
  source 1..80: mol_type = other DNA
gaagcttggatggattcgacgaaagccacgcggtatctcatgaaaacagaaaattggatcatacggaatccaggctatgc

SEQ ID NO: 112698 - DNA, 80 bp, synthetic construct
  source 1..80: mol_type = other DNA
cgtcaggaggaccggtcatgtgcccatctggacacgctgtcgggctcttccgcgctgctgtgtgtacacggggtgtagcc

SEQ ID NO: 112699 - DNA, 80 bp, synthetic construct
  source 1..80: mol_type = other DNA
gatggaggagtgcgcttcacacctgccttacatcgagcaggggatgatgctcgccgagcagttcaagcagaaagcactcg

SEQ ID NO: 112700 - DNA, 80 bp, synthetic construct
  source 1..80: mol_type = other DNA
ctggcagtgcgcggtcctcgagactccatcctcatcctcgcagccattgcttggcctcacgtggtgtttgaggtgacgaa

SEQ ID NO: 112701 - DNA, 80 bp, synthetic construct
  source 1..80: mol_type = other DNA
aaatgaagccatgctatggctcatttgccagacccactaatgaaaagggaggtcaggcaaaatttaaaactaatgccgaa

SEQ ID NO: 112702 - DNA, 80 bp, synthetic construct
  source 1..80: mol_type = other DNA
cgtctccgtggcccacgacagttctggacagagatactactacctcacccgagacccaactacaccactgacacgtgctg

SEQ ID NO: 112703 - DNA, 80 bp, synthetic construct
  source 1..80: mol_type = other DNA
ttggaccccactttcacaattacaacacaaactgtgcctcaagactcagtctcccgaagccagcggcgcgggaggacggg

SEQ ID NO: 112704 - DNA, 80 bp, synthetic construct
  source 1..80: mol_type = other DNA
cctcctcccgcccaaggacgtgccggtggggagcgacgcgcgggccgacagcgccgccctgctgcgctttgtggactcgc

SEQ ID NO: 112705 - DNA, 80 bp, synthetic construct
  source 1..80: mol_type = other DNA
tatcaacagaacagctctaaactgcaatgatagcctcaataccgggttcttagcaggcttgttctattacaacaagttca

SEQ ID NO: 112706 - DNA, 80 bp, synthetic construct
  source 1..80: mol_type = other DNA
tgcagctaattcgcatgatggaaggagagggggtcatcgaggctacagactcacacaatcccaggctgctacgagtggag

SEQ ID NO: 112707 - DNA, 80 bp, synthetic construct
  source 1..80: mol_type = other DNA
gcggcaggcttgtccccgtaaccacctatatgatattgcagttgtggcctctgctcctactagtgctcaccctgcctcgc

SEQ ID NO: 112708 - DNA, 80 bp, synthetic construct
  source 1..80: mol_type = other DNA
cgggaggcatctaatcttctgtcactctaagaagaagtgtgacgagctcgccgctaaattggtcggcctaggtgtcaacg

SEQ ID NO: 112709 - DNA, 80 bp, synthetic construct
  source 1..80: mol_type = other DNA
gccacgtggacctgatggttggcgccgctaccgtgtgctcagccctctatattggggacgtgtgcgtggctgtgttcttg

SEQ ID NO: 112710 - DNA, 80 bp, synthetic construct
  source 1..80: mol_type = other DNA
ccacttcccggtatggtaattaaaaacttgcaagaggccttgttccgcttcccggtatggtaattagaaactcattaatg

SEQ ID NO: 112711 - DNA, 80 bp, synthetic construct
  source 1..80: mol_type = other DNA
gcgtacctgaacactcccggcctccccgtctgccaagaccatctggaattctgggaggcggtctttactggcctcacgca

SEQ ID NO: 112712 - DNA, 80 bp, synthetic construct
  source 1..80: mol_type = other DNA
gcgcctgtaccccgacgcgccgccgctgcgcctctgccgcggggccaacgtgcggtaccgcgtgcgcacgcgcttcggcc

SEQ ID NO: 112713 - DNA, 80 bp, synthetic construct
  source 1..80: mol_type = other DNA
atggcgctcacccccacgcttgcggtcaaaaatgctagtgtccccactacggcaatccgacgtcacgtcgacttgcttgt

SEQ ID NO: 112714 - DNA, 80 bp, synthetic construct
  source 1..80: mol_type = other DNA
gagaggccgcactggtagggggaggttaggaatatatcggttcgttaccccggtggagaggccgtccggcatatttgaca

SEQ ID NO: 112715 - DNA, 80 bp, synthetic construct
  source 1..80: mol_type = other DNA
cgccaacagcagggatattaaaaagatggggaacaatcaaaaaatcaaaggctatcaatgtcttgagagggttcaggaaa

SEQ ID NO: 112716 - DNA, 80 bp, synthetic construct
  source 1..80: mol_type = other DNA
cagcatacaagcagctgcttgttagcgtgctttggtggattcagtacttcattgcacgcgcagaggcggttgtccacgtg

SEQ ID NO: 112717 - DNA, 80 bp, synthetic construct
  source 1..80: mol_type = other DNA
ccttactatacctactctggctccataccctacctagacggaaccttttaccttaatcacaccttcaaaaaggtggccat

SEQ ID NO: 112718 - DNA, 80 bp, synthetic construct
  source 1..80: mol_type = other DNA
tacgtgcagatgggcctgttgaagctgggggcgcttgctggcacctacatttacaaccacctttccccgctccaagactg

SEQ ID NO: 112719 - DNA, 80 bp, synthetic construct
  source 1..80: mol_type = other DNA
cggtgaagtgcctctggatgtcgctccacaaggtaaacagttgattgaactgcctgaactaccgcagccggagagcgccg

SEQ ID NO: 112720 - DNA, 80 bp, synthetic construct
  source 1..80: mol_type = other DNA
tgcttggctagactcaaccaaggcttcgagatacctgatgaagactgagaattggattatcaggaatcctgggtatgctt

SEQ ID NO: 112721 - DNA, 80 bp, synthetic construct
  source 1..80: mol_type = other DNA
taagcatccggaggcaacgtacaccaagtgtgggtccggcccatggctcacgccccgatgcctggtcgattatccataca

SEQ ID NO: 112722 - DNA, 80 bp, synthetic construct
  source 1..80: mol_type = other DNA
tcgtttcccatcgagtatgtactgcggcttatgaacgactgggccgaggtcccgtgcaacccttacctgcgcatacagaa

SEQ ID NO: 112723 - DNA, 80 bp, synthetic construct
  source 1..80: mol_type = other DNA
gttctggcaaaagcacatgtggaacttcgtcagtggcatacagtacctggcgggcttgtcaacgctgccgggtaatccag

SEQ ID NO: 112724 - DNA, 80 bp, synthetic construct
  source 1..80: mol_type = other DNA
tcgttgtccgacgacgagtcccggtagagggcatacccagcctcgtcataatggagaaagcgaacctcgcgcatcgggcg

SEQ ID NO: 112725 - DNA, 80 bp, synthetic construct
  source 1..80: mol_type = other DNA
agagtttgggagccaggaagacggactctggtgaataagcgtcggcgccgcactgtgcacacacggtttcgcactccact

SEQ ID NO: 112726 - DNA, 80 bp, synthetic construct
  source 1..80: mol_type = other DNA
gcgccgaccctccgttgtattctgtcaccgggccgctgccgacccagcggctgattatcggcgaggtgacgcccgcgatc

SEQ ID NO: 112727 - DNA, 80 bp, synthetic construct
  source 1..80: mol_type = other DNA
agggtggccgtgccccccaggggtcaagtcattaacaccttgcacctgcggtgcttcagacttgtacctcgtcactcggc

SEQ ID NO: 112728 - DNA, 80 bp, synthetic construct
  source 1..80: mol_type = other DNA
aagttccttgccgacggcgggtgctcagggggtgcttatgacataataatttgcgacgagtgccactccacggatgcgac

SEQ ID NO: 112729 - DNA, 80 bp, synthetic construct
  source 1..80: mol_type = other DNA
aagtcctctaccagcagtttgatgagatggaggagtgttccagcatgggtgccatacttgaccaaggccgaaacatcgct

SEQ ID NO: 112730 - DNA, 80 bp, synthetic construct
  source 1..80: mol_type = other DNA
ccaccttgtgggcgaggatgatcctgatgactcacttcttttctatcctcatagcacaggagcaactccaccaggtcctg

SEQ ID NO: 112731 - DNA, 80 bp, synthetic construct
  source 1..80: mol_type = other DNA
cggcctcacacacatagacgcccacttcctctcccaaacaaagcaagcgggggagaacttcgcgtacctagtagcctacc

SEQ ID NO: 112732 - DNA, 80 bp, synthetic construct
  source 1..80: mol_type = other DNA
accgactacgaatccagcgatgaggattaagggtaaggggcggagcttattacaggtataaagtctgggagtggaggaag

SEQ ID NO: 112733 - DNA, 80 bp, synthetic construct
  source 1..80: mol_type = other DNA
ccccatcatcacagagaaagacaaaccaacaaacatagaggccgaaccgccctttggtgacagctacattttgattggag

SEQ ID NO: 112734 - DNA, 80 bp, synthetic construct
  source 1..80: mol_type = other DNA
ggaaaagaaggtcatcacctggggcgctgacacagccgcttgtggagacatcatcgctggccttcccgtttcggctaggc

SEQ ID NO: 112735 - DNA, 80 bp, synthetic construct
  source 1..80: mol_type = other DNA
tcgagacggatggcctgatcctgcacacgccggggtgcgtaccctgcgtccgcgagggcaacacctcgcggtgctgggtc

SEQ ID NO: 112736 - DNA, 80 bp, synthetic construct
  source 1..80: mol_type = other DNA
gcgggggggacatatttcacagcgtgtcccaggcccggccccgcacattactcctgtgcctactcctactcgctgtagtg

SEQ ID NO: 112737 - DNA, 80 bp, synthetic construct
  source 1..80: mol_type = other DNA
cacagcgacccagtctttcctgggtaccgccatcaacggggtgatgtggacggtctaccatggtgctggatccaagacac

SEQ ID NO: 112738 - DNA, 80 bp, synthetic construct
  source 1..80: mol_type = other DNA
tgccttttccatcctgccctggggtttgaggtcacaaaaatcctcctcgggatactaggtcctttgtacctgctgcagta

SEQ ID NO: 112739 - DNA, 80 bp, synthetic construct
  source 1..80: mol_type = other DNA
ggaacttcatcagcggcgtccaatacctcgcaggattatcaactctgccagggaaccccgctgtggcttccatgatggca

SEQ ID NO: 112740 - DNA, 80 bp, synthetic construct
  source 1..80: mol_type = other DNA
tccgccacctggccagagaaaagaaccccagactgtgcacaaaggaagaatttattgcaaaagtccgaagtcatgcagcc

SEQ ID NO: 112741 - DNA, 80 bp, synthetic construct
  source 1..80: mol_type = other DNA
gacttgctagaagacagttctacaccaattcctacaaccatcatggcaaaaaatgaggtattctgtgtaaacccccaaaa

SEQ ID NO: 112742 - DNA, 80 bp, synthetic construct
  source 1..80: mol_type = other DNA
aatcttgaaatttcttatggttgtaatggtacactaatagggccacctaaaaccccagttgagtggtatgatggcagagg

SEQ ID NO: 112743 - DNA, 80 bp, synthetic construct
  source 1..80: mol_type = other DNA
ctgcggctttgccgacctcatggggtacatccccgtcgtcggcgcccctgttggtggcgttgccagagccctcgcgcatg

SEQ ID NO: 112744 - DNA, 80 bp, synthetic construct
  source 1..80: mol_type = other DNA
gtgacgacctagtcgttatcgccgaaagcgatggtgtcgacgaggaccgccgagctctcggagttttcacggaagctatg

SEQ ID NO: 112745 - DNA, 80 bp, synthetic construct
  source 1..80: mol_type = other DNA
cggctaataaatcttacgtaacaccaacccctgcgactcgctctatcggacatatgtctgctcttctacgagaatattcc

SEQ ID NO: 112746 - DNA, 80 bp, synthetic construct
  source 1..80: mol_type = other DNA
gtggtttgggtgcgtatggatgaacagcactgggtacacgaaggcgtgcggggctccaccatgcttggtgaacacggcga

SEQ ID NO: 112747 - DNA, 80 bp, synthetic construct
  source 1..80: mol_type = other DNA
cagctacactactcttgttggttccaacaattatggcttttcacctgacgacacgaaacggtgagccgcacatgatagtg

SEQ ID NO: 112748 - DNA, 80 bp, synthetic construct
  source 1..80: mol_type = other DNA
cccggaggagccatgtatgctgatgacacagctggttgggacacaagaataacagaagatgacttgcacaatgaggaaaa

SEQ ID NO: 112749 - DNA, 80 bp, synthetic construct
  source 1..80: mol_type = other DNA
gtgttgacgacggacatgaagccgtgttggtcccgcaagaccacgtaaggcaggggggcctcttccagtaactcggccac

SEQ ID NO: 112750 - DNA, 80 bp, synthetic construct
  source 1..80: mol_type = other DNA
aagggtctactatctgacccgtgatcctgagacccccctcgcgcgtgccgcttgggaaacagcaagacacactccagtga

SEQ ID NO: 112751 - DNA, 80 bp, synthetic construct
  source 1..80: mol_type = other DNA
ggggatttccactacgtgacgggcatgaccaccgacaacataaaatgcccatgccaggttccggcccccgaattcttcac

SEQ ID NO: 112752 - DNA, 80 bp, synthetic construct
  source 1..80: mol_type = other DNA
tacatggcaatggctctgtggagaaccttgctacggaggaagagggtcttaggttgcttgccggcgcagcgtccgcacgg

SEQ ID NO: 112753 - DNA, 80 bp, synthetic construct
  source 1..80: mol_type = other DNA
cgcccacgcggcggagggcgtccagcgcggagccgttgtcggcccgcgtcagggaccctaggacaaagacccgataccgg

SEQ ID NO: 112754 - DNA, 80 bp, synthetic construct
  source 1..80: mol_type = other DNA
caacctgttgtggagacaagagatgggcagtaacatcacgcgggtggagtctgaaactaaggtggtaatccttgactcgt

SEQ ID NO: 112755 - DNA, 80 bp, synthetic construct
  source 1..80: mol_type = other DNA
tgcaatgcaacagaaagtcgaacagaaagtcgaacagaagccttcaaaaaggcctaaacaaaaaacattgcagactacaa

SEQ ID NO: 112756 - DNA, 80 bp, synthetic construct
  source 1..80: mol_type = other DNA
gtggaggaaaaactaccccgtgtttgacaacgaagggatactagcaaacagtgccacgtggggttatcgacaaggacagt

SEQ ID NO: 112757 - DNA, 80 bp, synthetic construct
  source 1..80: mol_type = other DNA
gaagaagaaactcgtccgccttgacgaggcctccgcacgggaggcactcgcgcggatgcaggagagaccctttgcggcga

SEQ ID NO: 112758 - DNA, 80 bp, synthetic construct
  source 1..80: mol_type = other DNA
ctacactttcggtgggaatgacacggacgtgtttctgctgtcgtctacgcgacctccccaaggtcggtggtttggttgca

SEQ ID NO: 112759 - DNA, 80 bp, synthetic construct
  source 1..80: mol_type = other DNA
tgaccagagaaatgtctggtcgaaaagctcagggtagaaccctgggcgtcaatatggtaagacgaggggttcgctccttg

SEQ ID NO: 112760 - DNA, 80 bp, synthetic construct
  source 1..80: mol_type = other DNA
accatctgggtgcgtatggtgttaatgacccatttcttttctatactccaagctcaagagcaactcggaaaagtcgttga

SEQ ID NO: 112761 - DNA, 80 bp, synthetic construct
  source 1..80: mol_type = other DNA
gccgtcggtggcgttggactgggaagggtcctcattgatgtcctagcgggctacggtgcaggggtagcaggagctctcgt

SEQ ID NO: 112762 - DNA, 80 bp, synthetic construct
  source 1..80: mol_type = other DNA
atacggaggaggctggaggtttcaaggatcatggaacacaggagaagaagtgcaggtgatagctgttgaaccaggaaaaa

SEQ ID NO: 112763 - DNA, 80 bp, synthetic construct
  source 1..80: mol_type = other DNA
tgggcgagttgagctcacagggaccagacgtgtgaccacggcctcagcggcccaacgccgtgggcgagtcggaagacagg

SEQ ID NO: 112764 - DNA, 80 bp, synthetic construct
  source 1..80: mol_type = other DNA
cagtcgtagtaccgtttatataatgttaggtaggaggagcctataaaaatattttgattggcgttaaaaggttcttcaac

SEQ ID NO: 112765 - DNA, 80 bp, synthetic construct
  source 1..80: mol_type = other DNA
tagaggttagaggagaccccgtgcgaaacaacaccaaataaacagcatattgacacctgggatagactaggagatctttt

SEQ ID NO: 112766 - DNA, 80 bp, synthetic construct
  source 1..80: mol_type = other DNA
accgtgaaaaccaccaaatacttgacaaaagtcgaaaactgggttttgcgcaatcctggatatgccctagttgcgctggc

SEQ ID NO: 112767 - DNA, 80 bp, synthetic construct
  source 1..80: mol_type = other DNA
accaactacaccgatcatcagttatccttaaggtctcttttgtgtggtgcgttccggtatggggggggctgccgccaggt

SEQ ID NO: 112768 - DNA, 80 bp, synthetic construct
  source 1..80: mol_type = other DNA
cccgggagagccacctgcctcttacgaggcgacactccaccatgaatcactcccctgtgaggaacttctgtcttcacgcg

SEQ ID NO: 112769 - DNA, 80 bp, synthetic construct
  source 1..80: mol_type = other DNA
gggccaaggtcctttgcatcctcctcctgttcgccggcgtggacgctgaaactcacaccgtcggagcacaggcggtgcgg

SEQ ID NO: 112770 - DNA, 80 bp, synthetic construct
  source 1..80: mol_type = other DNA
aacattctctgtgggcacaggcaactgcacaacaaacattttggaagccaagtactggtgcccagactcaatggaataca

SEQ ID NO: 112771 - DNA, 80 bp, synthetic construct
  source 1..80: mol_type = other DNA
gtgtcagtcgcccacgaccacaccggacagagatactactacctcacgagggaccctgagacacccttgacccgggctgc

SEQ ID NO: 112772 - DNA, 80 bp, synthetic construct
  source 1..80: mol_type = other DNA
aagaccgtctgaagataccttcaaccccgtgtatccatatgacacggaaaccggtcctccaactgtgccttttcttactc

SEQ ID NO: 112773 - DNA, 80 bp, synthetic construct
  source 1..80: mol_type = other DNA
caggggccctcgtagctttcaagatcatgagcggcgaggtccctagtactgaagacatgctcaacctgttgcccgccatt

SEQ ID NO: 112774 - DNA, 80 bp, synthetic construct
  source 1..80: mol_type = other DNA
gatgaccattaccgggatgtgctcaaagaggcaaaggctaaggcgtccactgtgaaggccacgatgctatccgttgagga

SEQ ID NO: 112775 - DNA, 80 bp, synthetic construct
  source 1..80: mol_type = other DNA
caggtcaattgccatgacgtttcttgcggttggaggagttttgctcttcctttcggtcaacgtccatgctgacacaggct

SEQ ID NO: 112776 - DNA, 80 bp, synthetic construct
  source 1..80: mol_type = other DNA
tctccacagagtctcacaatcagacctttcttattgatggccctgaaacagcagaatgccccaacacaaacagagcttgg

SEQ ID NO: 112777 - DNA, 80 bp, synthetic construct
  source 1..80: mol_type = other DNA
gccagctgttttttaagtttttgccccatctggagctctcggccgtcgcgcgcttggcgggtattaacatcacccgcacc

SEQ ID NO: 112778 - DNA, 80 bp, synthetic construct
  source 1..80: mol_type = other DNA
aggggcgacacccgcgcttctctcctgagcccccggcccctggcaacactcaaaggatcatccggtggtccggtcttgtg

SEQ ID NO: 112779 - DNA, 80 bp, synthetic construct
  source 1..80: mol_type = other DNA
ggcaaatttctcgccgatgggggctgcgctagcggcgcctatgacatcatcatatgcgatgaatgccacgctgtggatgc

SEQ ID NO: 112780 - DNA, 80 bp, synthetic construct
  source 1..80: mol_type = other DNA
tggtacctgaagggcaggtgggctcccggagccgcctacgcactctacgggatgtggcccttcctgctgctcctgctgat

SEQ ID NO: 112781 - DNA, 80 bp, synthetic construct
  source 1..80: mol_type = other DNA
gccaggagatactgcttgggccagccgacggaatggtctccaaggggtggaggttgctggctcccatcactgcttatgcc

SEQ ID NO: 112782 - DNA, 80 bp, synthetic construct
  source 1..80: mol_type = other DNA
aacacctacgactacatgaacaagcgagtggtggctcccgggcttgtagactgctacattaaccttggggcgcgctggtc

SEQ ID NO: 112783 - DNA, 80 bp, synthetic construct
  source 1..80: mol_type = other DNA
gggcgtacgcctacgactcagaacaagcggcatctgtgggagcgctggctcttggccttattaccatctttactcttact

SEQ ID NO: 112784 - DNA, 80 bp, synthetic construct
  source 1..80: mol_type = other DNA
ttctagggcgctgtggcgtgtggccgctgaggagtacgtggaggttacacgggtggtggatttccactacgtgacgggca

SEQ ID NO: 112785 - DNA, 80 bp, synthetic construct
  source 1..80: mol_type = other DNA
ctgggactatgttgtcacaacagacatttccgaaatgggggcaaatttccgggccgacagggtaatagacccaaggcggt

SEQ ID NO: 112786 - DNA, 80 bp, synthetic construct
  source 1..80: mol_type = other DNA
tgctatacggtaagtggatgcaggccctcttactgcggctcggggcttggactggcacctacatttatgaccatctggca

SEQ ID NO: 112787 - DNA, 80 bp, synthetic construct
  source 1..80: mol_type = other DNA
ggtggaagacggtgggtttggtacgaactcagtctgcagcgaaaccatctgtcgcgttgcatcataaattaaaagctcgc

SEQ ID NO: 112788 - DNA, 80 bp, synthetic construct
  source 1..80: mol_type = other DNA
ccaaccactctggtagacttactctctggaggccactggggtgtcctcgtgggagtggcctatttcagcatgcaggccaa

SEQ ID NO: 112789 - DNA, 80 bp, synthetic construct
  source 1..80: mol_type = other DNA
gtggtgggtgtgattgcgggcttcataactctgatcattgtctttatatgctacatctgctgccgcaagcgtcccaggtc

SEQ ID NO: 112790 - DNA, 80 bp, synthetic construct
  source 1..80: mol_type = other DNA
gcaactcagactttcctcgccaccgccataaatggggtactctggacagttttccacggtgctgggtcaaaaactctggc

SEQ ID NO: 112791 - DNA, 80 bp, synthetic construct
  source 1..80: mol_type = other DNA
gtgatttccactatgtcacaggcgtaactacagacaacctgaagtgtccgtgtcaagtgccggcacctgaatttttcacc

SEQ ID NO: 112792 - DNA, 80 bp, synthetic construct
  source 1..80: mol_type = other DNA
ggagtgaacatgaggagttgcggtcgtgggaagagtggaccaatattgacatccagcctgcacgttcttggggaacttac

SEQ ID NO: 112793 - DNA, 80 bp, synthetic construct
  source 1..80: mol_type = other DNA
aataactacaccccacgccaacatagaggaggtcgccctgccaacgacgggggaaatccctttctatggtagggcgatcc

SEQ ID NO: 112794 - DNA, 80 bp, synthetic construct
  source 1..80: mol_type = other DNA
agtacggaggagggttggtcagatgcccactctccaggaactctacacatgaaatgtattgggtgtcaggaatcacagga

SEQ ID NO: 112795 - DNA, 80 bp, synthetic construct
  source 1..80: mol_type = other DNA
tacacacgcccatcgaggccatgcctacataaaagggcaccagggcccccggggcagacatttggccagtgttttgggtc

SEQ ID NO: 112796 - DNA, 80 bp, synthetic construct
  source 1..80: mol_type = other DNA
agctccgggacaagatggccatggagctcctgctacataaatgtcagggactatcctggctccatcttagccctagtcac

SEQ ID NO: 112797 - DNA, 80 bp, synthetic construct
  source 1..80: mol_type = other DNA
tgcatacctcaacacccctggccttcccgtctgccaagaccatctggagttctgggagggcgtcttcactggactgaaac

SEQ ID NO: 112798 - DNA, 80 bp, synthetic construct
  source 1..80: mol_type = other DNA
ctcgctgatgggggctgctctggcggcgcctacgacatcatcatttgcgacgaatgccattcaacagaccctactactgt

SEQ ID NO: 112799 - DNA, 80 bp, synthetic construct
  source 1..80: mol_type = other DNA
aggcctgcgggcacacatcgacatggttgtgatgtctgccacactttgctctgccctttatgtgggggacgtatgcggtg

SEQ ID NO: 112800 - DNA, 80 bp, synthetic construct
  source 1..80: mol_type = other DNA
gggtacgggagagcagcgagggcctgcgtaacccacggtggccgcgggagtggctccctgcgggttgcggtggagagttt

SEQ ID NO: 112801 - DNA, 80 bp, synthetic construct
  source 1..80: mol_type = other DNA
gactttaagacctggctccagtccaagctcctaccacggttaccgggagtccccttcctctcatgccaacgtgggtacaa

SEQ ID NO: 112802 - DNA, 80 bp, synthetic construct
  source 1..80: mol_type = other DNA
tattctacttagatattatcgtgaggtggcaagtttggcgcgtcttctgtacctacatttatatttaaccgtaacgcgtg

SEQ ID NO: 112803 - DNA, 80 bp, synthetic construct
  source 1..80: mol_type = other DNA
ctgcaaaggaaatacggaggagcccctcacgaaattccacacacgagatgtactgggtatccaatgcttctgggaacata

SEQ ID NO: 112804 - DNA, 80 bp, synthetic construct
  source 1..80: mol_type = other DNA
agcttgtttgtccaaggcttacggccaaatgtggctgctgagctacttccacaggagggacctgaggacactgggatttg

SEQ ID NO: 112805 - DNA, 80 bp, synthetic construct
  source 1..80: mol_type = other DNA
cgcctgtggccgcgcccatatagtgagagggtggttgtggattcgtttcttgataggaatcctctgcccactttgtccct

SEQ ID NO: 112806 - DNA, 80 bp, synthetic construct
  source 1..80: mol_type = other DNA
cattggagccgtgacgcttgatttcccaaaaggaacatcaggttctccaattatcaacaagaaaggggaaatcattgggc

SEQ ID NO: 112807 - DNA, 80 bp, synthetic construct
  source 1..80: mol_type = other DNA
ctgcccttctgtcaccaggggcactggtagtggaggttgtttgtgccgccatcttgcggcgccacgtgggccccagcgaa

SEQ ID NO: 112808 - DNA, 80 bp, synthetic construct
  source 1..80: mol_type = other DNA
gaggtggaggacgagcgagagccttccataccatcagagtacttgctccccaagaagaggttcccgccagcattaccacc

SEQ ID NO: 112809 - DNA, 80 bp, synthetic construct
  source 1..80: mol_type = other DNA
ctatgacagcgacccccctcaccaacctgttcttacgggccccggacataacccacgtggcccccccttactgcctcaac

SEQ ID NO: 112810 - DNA, 80 bp, synthetic construct
  source 1..80: mol_type = other DNA
ctgctccgccatcaccgccagcacatccagcacgcgccccaggaaggcggcctcccgcgtcaaaacgcaccggactgcgt

SEQ ID NO: 112811 - DNA, 80 bp, synthetic construct
  source 1..80: mol_type = other DNA
ccgaccccccttctctatagattggggcctgtgcaaaatgaggtgactctaacccaccccataactaagtacatcatggc

SEQ ID NO: 112812 - DNA, 80 bp, synthetic construct
  source 1..80: mol_type = other DNA
tggtcttgtgcacgcactttttctccatactccaggcccaggaaacgctagatagggtgcttgacttcgacatgtacgga

SEQ ID NO: 112813 - DNA, 80 bp, synthetic construct
  source 1..80: mol_type = other DNA
tggttttaatattacagatcagggtctgttacttggaactgaggaaacagctgaaaacgttaaaaaggatatctatgcag

SEQ ID NO: 112814 - DNA, 80 bp, synthetic construct
  source 1..80: mol_type = other DNA
ttaagcttcgagcgtccaaggtgcaggcgaagctcttatccgtagaggaagcctgcgacctcacaccatcgcactcagcc

SEQ ID NO: 112815 - DNA, 80 bp, synthetic construct
  source 1..80: mol_type = other DNA
tgagcgttgattttcaatgtctaagaaaccaggagggcccggaagaaaccgggccatcaatatgctgaaacgcggcatac

SEQ ID NO: 112816 - DNA, 80 bp, synthetic construct
  source 1..80: mol_type = other DNA
tggatgaattctacggggtttactaagacatgtggagccccgccgtgcaaactccagtctactgggaacaattcactgat

SEQ ID NO: 112817 - DNA, 80 bp, synthetic construct
  source 1..80: mol_type = other DNA
ggtgagtggcggaacgatggcatcatgaacaccaagtgcccgtgtggggccctgatagcagggcacgtcaagaacggatc

SEQ ID NO: 112818 - DNA, 80 bp, synthetic construct
  source 1..80: mol_type = other DNA
aagggatgtcaaattcctggtccacaattttcattgtcttccctcttagatgacaaagagactccgggtggaagatgact

SEQ ID NO: 112819 - DNA, 80 bp, synthetic construct
  source 1..80: mol_type = other DNA
cccttcgttgtcccttctagcaacgcgctaaccctatctgcttcagatccgttaactgtaaattccaatagtttaggatt

SEQ ID NO: 112820 - DNA, 80 bp, synthetic construct
  source 1..80: mol_type = other DNA
gtaattgggctaaagtcatcattgtcctgatcatgttctcgggggtggacgcatccacatacaccacaggtggcgccacc

SEQ ID NO: 112821 - DNA, 80 bp, synthetic construct
  source 1..80: mol_type = other DNA
gggttcactaaaacatgcggagcaccaccttgccgcattaagagggacttcaacctgggcaacatcatccaatacgcccc

SEQ ID NO: 112822 - DNA, 80 bp, synthetic construct
  source 1..80: mol_type = other DNA
taggaccccaaaagtttgtctgcgtattccagggcggggctcagttgaatctcccgcagcacctctaccagcaggtccgc

SEQ ID NO: 112823 - DNA, 80 bp, synthetic construct
  source 1..80: mol_type = other DNA
cgtctccgtggcccacgatggctctggacagagatactactacctcactcgtgacccaaccgtaccattgacacgtgctg

SEQ ID NO: 112824 - DNA, 80 bp, synthetic construct
  source 1..80: mol_type = other DNA
atcgaggatcgtgaccgcagcgaacaacaaccgctgctgcattcaacaactgagcttgctatactgccttgctctttcac

SEQ ID NO: 112825 - DNA, 80 bp, synthetic construct
  source 1..80: mol_type = other DNA
gtgcgccgcgtgaccacgcgccggggccgctcgctcgttctgcccaccgtgcgctaccaccccagcatcctttaatccgt

SEQ ID NO: 112826 - DNA, 80 bp, synthetic construct
  source 1..80: mol_type = other DNA
gatgggatgtgggtgtggcttccgacgcgcgccgtcgtcgggctcgcgggccttcccgtcgacggcgcacggtcggctcg

SEQ ID NO: 112827 - DNA, 80 bp, synthetic construct
  source 1..80: mol_type = other DNA
gccagttggtcacttttaggccacggatctaccaggtcgtgcaggactgcaactgctccatctacgctggccacgtcacc

SEQ ID NO: 112828 - DNA, 80 bp, synthetic construct
  source 1..80: mol_type = other DNA
gatataggggagtctgggcaggggacggggtgtgccacaccacttgtacctgtgaggccgtgatagctggacacgtcaaa

SEQ ID NO: 112829 - DNA, 80 bp, synthetic construct
  source 1..80: mol_type = other DNA
atcacccagctgctgaagaggctccaccagtggattaatgaggactgttctacgccgtgttccggctcgtggctgaggga

SEQ ID NO: 112830 - DNA, 80 bp, synthetic construct
  source 1..80: mol_type = other DNA
acgcaccaaaagcagaggtgccagcgcgtgtatgagttgggggggggggtgggtgagcggtggaacaaaagcacgcgtca

SEQ ID NO: 112831 - DNA, 80 bp, synthetic construct
  source 1..80: mol_type = other DNA
ggagcggccatcggcagtgtgggcttggggaagatgctcgttgatatcctggccggctacggcgcaggcgtcgcgggcgc

SEQ ID NO: 112832 - DNA, 80 bp, synthetic construct
  source 1..80: mol_type = other DNA
ggttaggggctcgctttcttgaatttgaagcccttgggttcttgaacgaggaccattggttgagcagagaaaactcagga

SEQ ID NO: 112833 - DNA, 80 bp, synthetic construct
  source 1..80: mol_type = other DNA
cgctggccggctcgatctttcgagctggttcagcgtttgcgccggcgaggcagacgtgattcacagcacgcctagagccc

SEQ ID NO: 112834 - DNA, 80 bp, synthetic construct
  source 1..80: mol_type = other DNA
tgcatttagcgttctcattattattgcagccctcacttacctgtgctgtcacaaacagacttaaatcttatagctttttt

SEQ ID NO: 112835 - DNA, 80 bp, synthetic construct
  source 1..80: mol_type = other DNA
attttcatgacagccactcctccgggaagtagagacccatttcctcagagcaatgcaccaatcatggatgaggaaagaga

SEQ ID NO: 112836 - DNA, 80 bp, synthetic construct
  source 1..80: mol_type = other DNA
cccggtgcacgtcggcccggatggcgtccaggcgatcgcggagctccacgtagtcggcgtagccatgttggaagaacggc

SEQ ID NO: 112837 - DNA, 80 bp, synthetic construct
  source 1..80: mol_type = other DNA
aatgccccacggactgcttccggaaacatccaggcgcgacctacgccaagtgtggttcagggccttggcttacgccgaga

SEQ ID NO: 112838 - DNA, 80 bp, synthetic construct
  source 1..80: mol_type = other DNA
agcgcaactcttggagctgggatcctactactctttggattctttaccttgtcaccatggtataagcactggctcggccg

SEQ ID NO: 112839 - DNA, 80 bp, synthetic construct
  source 1..80: mol_type = other DNA
gacaacaaattggaacttgcttataatgcgccatttaaagttgaaaatgacaagctatcgcttgatgtaggccatggatt

SEQ ID NO: 112840 - DNA, 80 bp, synthetic construct
  source 1..80: mol_type = other DNA
accaaggtccttaacgcgaccggggccgatagtgccacgcccaccacgttcgagctcggggttaacggcaaattttccgt

SEQ ID NO: 112841 - DNA, 80 bp, synthetic construct
  source 1..80: mol_type = other DNA
ggatgccggctcagaagcagagtcctatagctcaatgccccctctcgagggggagcctggtgaccctgacctaagctcag

SEQ ID NO: 112842 - DNA, 80 bp, synthetic construct
  source 1..80: mol_type = other DNA
ggaaaaccaagaaataccccccagcgatgcctgtatgggcacgcccggactacaaccctccattactacaggcctggaag

SEQ ID NO: 112843 - DNA, 80 bp, synthetic construct
  source 1..80: mol_type = other DNA
agtttctacgaacgaggtggatttgattttaatttgtcccgcggcaatgcttttgatggtggcagggtccatctggtcag

SEQ ID NO: 112844 - DNA, 80 bp, synthetic construct
  source 1..80: mol_type = other DNA
gggcacaagtgggctcgtaagcttgcttacacccggatccaaacagaatctgcagctcatcaacaccaatggtagctggc

SEQ ID NO: 112845 - DNA, 80 bp, synthetic construct
  source 1..80: mol_type = other DNA
gacgcgtggagcttgactttgattattgccctgggaccactgtcacagtgagtgagagctgtggacaccgcggggcatcc

SEQ ID NO: 112846 - DNA, 80 bp, synthetic construct
  source 1..80: mol_type = other DNA
ctaacaacggtgtggaaagtttggtagataaaatgaatcgctggaagacctacgctcaggagcagcgggagtgggaggag

SEQ ID NO: 112847 - DNA, 80 bp, synthetic construct
  source 1..80: mol_type = other DNA
ggatagccaattcagagtaataaactgtgataatcaaccctcatcaatgatgacgaactaacccccgatatcaggtcaca

SEQ ID NO: 112848 - DNA, 80 bp, synthetic construct
  source 1..80: mol_type = other DNA
tgtgtgtggacactttagtcagtgtccgcggcgttcctttgaacgtgagtgtgttgaggaaaagacagcttaggagaaca

SEQ ID NO: 112849 - DNA, 80 bp, synthetic construct
  source 1..80: mol_type = other DNA
aaaaaaggacgcaccgccgccctaatcgccagtgcgttccggacgccttcgccccacacagccctcccgaccgacacccc

SEQ ID NO: 112850 - DNA, 80 bp, synthetic construct
  source 1..80: mol_type = other DNA
ttcgtggatggagtccgcctccacaggcatctgccagacgtgaaacccctgctccgagatgaagtgagtttcagcgtggg

SEQ ID NO: 112851 - DNA, 80 bp, synthetic construct
  source 1..80: mol_type = other DNA
tatcaccttacaaaatgggataatatttgcaaatggaatatttcaacatataaatgtcataataatggaagcattacaat

SEQ ID NO: 112852 - DNA, 80 bp, synthetic construct
  source 1..80: mol_type = other DNA
cacatcaacagaactgcccttaactgtaatgacagcctccagactgggtttgtagccggcctcctgtattatcacaagtt

SEQ ID NO: 112853 - DNA, 80 bp, synthetic construct
  source 1..80: mol_type = other DNA
ctggcgctgtggtcacctttaaaatcatgagtggcgagatgccgaccacagaggacttggtgaatttgctcccggccata

SEQ ID NO: 112854 - DNA, 80 bp, synthetic construct
  source 1..80: mol_type = other DNA
cgctacaccacagcttctggatgttggtatggaatggaaatccggccaatgaagcatgacgagacaacattagttaagtc

SEQ ID NO: 112855 - DNA, 80 bp, synthetic construct
  source 1..80: mol_type = other DNA
gtggccaatacctcttcaactgggcggtgagaaccaagctcaaactcactccactgccagaggcgagccgcctggacttg

SEQ ID NO: 112856 - DNA, 80 bp, synthetic construct
  source 1..80: mol_type = other DNA
ccctggaacggctggtcggtccccgggttgctgaaggtgcggcgggccgggtttctgtccgtctagctggcgctccccgc

SEQ ID NO: 112857 - DNA, 80 bp, synthetic construct
  source 1..80: mol_type = other DNA
cgtctactacagccaatcagagtccccaactataatctgtatattatggatgaggcccacttcacagatccctcaagtat

SEQ ID NO: 112858 - DNA, 80 bp, synthetic construct
  source 1..80: mol_type = other DNA
tggatgaactcctcaggctttgttaaagcgtgtggagctccgccttgtgcgctcgaatcgtccggcaataacaccttgac

SEQ ID NO: 112859 - DNA, 80 bp, synthetic construct
  source 1..80: mol_type = other DNA
ccgagtgcaggactgacagttgtgtggggaggagtcgtggtcttggcgctgcttgtcactggcatggtgacgctgcagag

SEQ ID NO: 112860 - DNA, 80 bp, synthetic construct
  source 1..80: mol_type = other DNA
cggcgcgcgtactgttaccactggggctgcggtgacttactcaacttatggcaaattccttgctgatggtggctgctccg

SEQ ID NO: 112861 - DNA, 80 bp, synthetic construct
  source 1..80: mol_type = other DNA
agacaaaaacgataaagtaattggatctgctgtaaatgtaagacttggaaaagacggtggtcttgattttaataaaaaag

SEQ ID NO: 112862 - DNA, 80 bp, synthetic construct
  source 1..80: mol_type = other DNA
acatctacgacacccagggggcggccatcgccggctccaacctctgcaccgagatcgtccatccggcctccaagcgatcc

SEQ ID NO: 112863 - DNA, 80 bp, synthetic construct
  source 1..80: mol_type = other DNA
aggtagtcgacttcagcctagaccccactttcaccatagagacaaccacagttccacaggacgctgtggccaggagccag

SEQ ID NO: 112864 - DNA, 80 bp, synthetic construct
  source 1..80: mol_type = other DNA
cgtgtttattcaagggagtgggatagggttcgacggttcgaaacttaacacaccaaataatcgagcgcgtctagcccagt

SEQ ID NO: 112865 - DNA, 80 bp, synthetic construct
  source 1..80: mol_type = other DNA
gcagaaccatgaatactttgaccagtgtcgtgctgctctctcttcttgtagcttttagtcagggacaagctgtgcatgag

SEQ ID NO: 112866 - DNA, 80 bp, synthetic construct
  source 1..80: mol_type = other DNA
actgtcctggaccaggccgagacggctggagctaggctcgtcgtcttggcaacggccactccccccggaagtgtcacagt

SEQ ID NO: 112867 - DNA, 80 bp, synthetic construct
  source 1..80: mol_type = other DNA
gcttgaagatcgccgggtggcacgggcccaaggccccatacacgagcaccctgctgcccccggagctgtccgagaccccc

SEQ ID NO: 112868 - DNA, 80 bp, synthetic construct
  source 1..80: mol_type = other DNA
tggggggctgagactgtggcgtgcggagacatcctgcagggccttcctgtgtcagcccgccttggccgagagatcttact

SEQ ID NO: 112869 - DNA, 80 bp, synthetic construct
  source 1..80: mol_type = other DNA
gataactgaggactgccccatcccatgcgatggcacatggctaagggccatttgggactgggtctgcacggcactgacag

SEQ ID NO: 112870 - DNA, 80 bp, synthetic construct
  source 1..80: mol_type = other DNA
tctcgccccaccgcccccactgttgccgtggctacccccgcccgccgccctcgcggggctaactggcagagcactcttaa

SEQ ID NO: 112871 - DNA, 80 bp, synthetic construct
  source 1..80: mol_type = other DNA
gaaccccggcggccggcaacgcggggtccctgtgagaggcacagatgcttacggtcaggtgctccgggtcgggtgcgtct

SEQ ID NO: 112872 - DNA, 80 bp, synthetic construct
  source 1..80: mol_type = other DNA
atgcgatcccgatcccgagccggggcgtcgcgatgccgacgccgtccgctccgacggccctctgcgactcccactcccgg

SEQ ID NO: 112873 - DNA, 80 bp, synthetic construct
  source 1..80: mol_type = other DNA
gcacgacatctaccaatgttgtcaactggacccagaggccaggaaagccataacatctttgacagagaggctttaccttg

SEQ ID NO: 112874 - DNA, 80 bp, synthetic construct
  source 1..80: mol_type = other DNA
cccaggaggactgggttaacaaatctgacaacagaaagtgagaaagccctcagaaccgtctcggaagtaggtccctgctc

SEQ ID NO: 112875 - DNA, 80 bp, synthetic construct
  source 1..80: mol_type = other DNA
agcgccaggggcaagttgccgttcaccacgcgccaggtggcctggatctcccccgggccggccggaggaacgtccccccc

SEQ ID NO: 112876 - DNA, 80 bp, synthetic construct
  source 1..80: mol_type = other DNA
gacctcagcgtcagggtttgcgagaagatggccctttatgacatcactcagaagcttcctcaggcggtgatgggctcctc

SEQ ID NO: 112877 - DNA, 80 bp, synthetic construct
  source 1..80: mol_type = other DNA
cattcaccagtatattcaatgctggccccaagcaggacgtccagctggtcaacaccaacggcagttggcacatcaaccgc

SEQ ID NO: 112878 - DNA, 80 bp, synthetic construct
  source 1..80: mol_type = other DNA
ggactgactcacatagatgcccactttctgtcacagactaagcagcagggactcaacttctcgtacctgactgcctacca

SEQ ID NO: 112879 - DNA, 80 bp, synthetic construct
  source 1..80: mol_type = other DNA
ttgcatggtatgtgaagggcaggtgggttcctggagcagcctacaccatctatggggcgtggcctttactcctgcttctt

SEQ ID NO: 112880 - DNA, 80 bp, synthetic construct
  source 1..80: mol_type = other DNA
tggaagatgttaaagtgggcgtggggcaagcggaccgagtcgcggatgaagtgcgcgtaggagtcttgcagcttggcgac

SEQ ID NO: 112881 - DNA, 80 bp, synthetic construct
  source 1..80: mol_type = other DNA
ggcgggagccgctgtgggtagtattgggttgggcagggtcattgtggacatccttgccgggtacggagcaggcgtgtctg

SEQ ID NO: 112882 - DNA, 80 bp, synthetic construct
  source 1..80: mol_type = other DNA
atgtgccatgtttacatgcaagaaatacatggaggggaaaatagtccaaccagaaaacctggaatacacagtcgccgtaa

SEQ ID NO: 112883 - DNA, 80 bp, synthetic construct
  source 1..80: mol_type = other DNA
agggagatctccgtctcagcagagatcctacggacttctaggaagttcccgagggccatgccgatttgggctcagccggc

SEQ ID NO: 112884 - DNA, 80 bp, synthetic construct
  source 1..80: mol_type = other DNA
aatcctgcggatacaggcgttgccgcgccagcggagtgctcaccaccagtatggggaataccatcacatgctatttgaaa

SEQ ID NO: 112885 - DNA, 80 bp, synthetic construct
  source 1..80: mol_type = other DNA
tggtggggaagagggcgggtgccaccacgaacgccctaaccggcttcttctcccaagggtcggcccaaaagttgcagctt

SEQ ID NO: 112886 - DNA, 80 bp, synthetic construct
  source 1..80: mol_type = other DNA
ccagcaccacacttgctgtgacctcacaggcaactactgaaaacgaattggttgccctgttgcagaatggggagaataat

SEQ ID NO: 112887 - DNA, 80 bp, synthetic construct
  source 1..80: mol_type = other DNA
tacttgcctgactcatacaagattacgccagacaacattacactgcccgaaaacaagaacacctatgcctacatgaacgg

SEQ ID NO: 112888 - DNA, 80 bp, synthetic construct
  source 1..80: mol_type = other DNA
ttgggagggatctccaggaaaattctggaacaccacgatagcggtgtccatggcaaacatttttaggggaagttatctag

SEQ ID NO: 112889 - DNA, 80 bp, synthetic construct
  source 1..80: mol_type = other DNA
tcacagcctgtctcgtgcccgaccccgctggttcatgtggtgcctactcctactttctgtaggggtaggcatctacctgc

SEQ ID NO: 112890 - DNA, 80 bp, synthetic construct
  source 1..80: mol_type = other DNA
caccaacggcagttggcacatcaaccgtactgccttgaattgcaatgactccttgaacaccggctttctcgcggccttgt

SEQ ID NO: 112891 - DNA, 80 bp, synthetic construct
  source 1..80: mol_type = other DNA
cagagaagctcagaaaagagcagcagcaggcatcatgaaaaacccaacagtcgatggaataacagtaattgacctagaac

SEQ ID NO: 112892 - DNA, 80 bp, synthetic construct
  source 1..80: mol_type = other DNA
ccagccgtgccccaaacttaccaagtgggttacctgcacgcccccacgggcagcgggaagagcacgaaagtgccagcggc

SEQ ID NO: 112893 - DNA, 80 bp, synthetic construct
  source 1..80: mol_type = other DNA
ttgggcccggccggattataatccgccccttctagaaccctggaagaggcctgactaccaaccacctactgtcgccgggt

SEQ ID NO: 112894 - DNA, 80 bp, synthetic construct
  source 1..80: mol_type = other DNA
ggtcgacatgagtcccctcctcttttctaccacagagctgtcaatcttgccctgcagttttacacctatgcctgccctct

SEQ ID NO: 112895 - DNA, 80 bp, synthetic construct
  source 1..80: mol_type = other DNA
gttcaaagccaaaatccagggcttgctgcagcaggcctcgaagcaggccgaggagatcaaaccagtgatccattcgtctt

SEQ ID NO: 112896 - DNA, 80 bp, synthetic construct
  source 1..80: mol_type = other DNA
gtggaacagtgaagttggcgccgctcaaaaggtagcgggtagggtgctgaaagataccacgccaatgttaccatgctacg

SEQ ID NO: 112897 - DNA, 80 bp, synthetic construct
  source 1..80: mol_type = other DNA
tctagaggacggtgtcaactatgcaacagggaaccttcccggttgctccttttctatcttcctccttgcgctcctctcgt

SEQ ID NO: 112898 - DNA, 80 bp, synthetic construct
  source 1..80: mol_type = other DNA
agagcgcatggccagctgccgccccattgacaagtttgctcaggggtggggtcccatcacttatgttaagcctaacatct

SEQ ID NO: 112899 - DNA, 80 bp, synthetic construct
  source 1..80: mol_type = other DNA
agcccggttggtgcgggaggtgctgctaggtcctgctgatagctacacttctaaggggtggaagcttctcgcccccatca

SEQ ID NO: 112900 - DNA, 80 bp, synthetic construct
  source 1..80: mol_type = other DNA
cttcttgcttgctctgctctcttgcctgacggtccccgcctccgccattgaggtgcgcaacgcgtccgggatttaccatg

SEQ ID NO: 112901 - DNA, 80 bp, synthetic construct
  source 1..80: mol_type = other DNA
ttagctcgctcagcaactctcttatccgccaccataatatggtgtattccaccacatcacgcagtgcctctctccgccag

SEQ ID NO: 112902 - DNA, 80 bp, synthetic construct
  source 1..80: mol_type = other DNA
aacgctgccgggtaacccagcaatagcttccctcatggccttctcggcctcgctcacaagcccactttctacctctgcaa

SEQ ID NO: 112903 - DNA, 80 bp, synthetic construct
  source 1..80: mol_type = other DNA
gaaacacccagaggccacctacactaaatgcggttctgggccgtggctcactcccaggtgcatggtccattacccgtaca

SEQ ID NO: 112904 - DNA, 80 bp, synthetic construct
  source 1..80: mol_type = other DNA
gctgccctcctctctcctaggcccattagcaccttgaaaggctcttcgggaggccccattatgtgtccctcggggcacgt

SEQ ID NO: 112905 - DNA, 80 bp, synthetic construct
  source 1..80: mol_type = other DNA
ggtgctggcagcaggacactggccggaaagaagactcccgccctacagatgtacaccaatgtggaccaagatctggttgg

SEQ ID NO: 112906 - DNA, 80 bp, synthetic construct
  source 1..80: mol_type = other DNA
ccctcaaggacatgctgtcggcatcttccgcgcggcagtgtgtacccggggcgtggccaaggcggtcgacttcgtgccag

SEQ ID NO: 112907 - DNA, 80 bp, synthetic construct
  source 1..80: mol_type = other DNA
tctaggtccttgaccgcttgcacttgtggctcaagcgatctgtacttggttacgcggaacgctgacgtcatccccgcacg

SEQ ID NO: 112908 - DNA, 80 bp, synthetic construct
  source 1..80: mol_type = other DNA
tggtgctgatgacccatttctttcaaatactccaagcgcaggagacattggataggatacttgacttcgacatatatggt

SEQ ID NO: 112909 - DNA, 80 bp, synthetic construct
  source 1..80: mol_type = other DNA
atgtgcctgagacggatgcctcccgagccgtgacaaacatactcagttctcttaccatcaccagcttgctacgtaagctc

SEQ ID NO: 112910 - DNA, 80 bp, synthetic construct
  source 1..80: mol_type = other DNA
tagcgctcactcccacgcttgcggccaggaacagcagcgtccccaccacgacaatacgacgccatgtcgatttgctcgtt

SEQ ID NO: 112911 - DNA, 80 bp, synthetic construct
  source 1..80: mol_type = other DNA
acggtaggttcaggacatgcagttttataaaaataacatgggtctttgttagggtttaccacggcctttggaaaaagtaa

SEQ ID NO: 112912 - DNA, 80 bp, synthetic construct
  source 1..80: mol_type = other DNA
cagactgctttaggaaacatccagactcaacttaccttaagtgcggggcagggccctggttgacccccagatgcctggta

SEQ ID NO: 112913 - DNA, 80 bp, synthetic construct
  source 1..80: mol_type = other DNA
ttttctcccggagagcgggcggttatgcgaccgctaaagcgcgagtacgacgaagtgtatgccgaccatgacattctgga

SEQ ID NO: 112914 - DNA, 80 bp, synthetic construct
  source 1..80: mol_type = other DNA
aaaatacagggtctaatgcagcaagcctctaagcaggcacaggaaatacaacctgctgttcaagggacatggcccaagct

SEQ ID NO: 112915 - DNA, 80 bp, synthetic construct
  source 1..80: mol_type = other DNA
aatagtggccatcattttgctcgtggcgcactacatgtacttgatcccagggctgcaggcagcagctgcgcgtgctgccc

SEQ ID NO: 112916 - DNA, 80 bp, synthetic construct
  source 1..80: mol_type = other DNA
gaatgggtccatgcggcttgcaggaccacgcacatgtgccaacatgtggcacggtactttccccatcaacgagtacacca

SEQ ID NO: 112917 - DNA, 80 bp, synthetic construct
  source 1..80: mol_type = other DNA
cagttattgctatttggccaccgtcagcgatctctccaccaaagctgcgtgcccgaccatgggagaagctcacaatgaca

SEQ ID NO: 112918 - DNA, 80 bp, synthetic construct
  source 1..80: mol_type = other DNA
tggcgccgggaacaaaacactggccggcccgcgtggtccggtcacgcagatgtataccagcgcggaggtggatctcgtgg

SEQ ID NO: 112919 - DNA, 80 bp, synthetic construct
  source 1..80: mol_type = other DNA
ctggaggattcttcacatcagtcggaaaaggcatacacactgtgtttggctctgccttccaaggactgtttggtggcttg

SEQ ID NO: 112920 - DNA, 80 bp, synthetic construct
  source 1..80: mol_type = other DNA
ccgctaccgcctttgtgggtgccggtttaactggcgccgccatcggcagcgtgggactggggaaggttctcgtggacatc

SEQ ID NO: 112921 - DNA, 80 bp, synthetic construct
  source 1..80: mol_type = other DNA
cagcagacccgcggcttgttcagtaccatcgtaacgagcctcactggcagggacaccaatgagaactgtggtgaagtcca

SEQ ID NO: 112922 - DNA, 80 bp, synthetic construct
  source 1..80: mol_type = other DNA
ctcgacttcatcccagttgagagcatgcaatccaccgtacgctctccttccttctcagacaactcttcccccccagcagt

SEQ ID NO: 112923 - DNA, 80 bp, synthetic construct
  source 1..80: mol_type = other DNA
tcgagtgtgaagtgtaccaatcctgcaaacttgaccctgacgctcgcaaggcgatcacatctctaaccgagaggttatac

SEQ ID NO: 112924 - DNA, 80 bp, synthetic construct
  source 1..80: mol_type = other DNA
tacaccgattcgcccccactccaggtcccttctttcgggatgaggtaacgtttactgtaggcctcaattccttcgtggtc

SEQ ID NO: 112925 - DNA, 80 bp, synthetic construct
  source 1..80: mol_type = other DNA
cggatgttatccccgcgagacgccggggagactccacggcgagtcttcttagtcctagacctgtttcttgtctcaagggt

SEQ ID NO: 112926 - DNA, 80 bp, synthetic construct
  source 1..80: mol_type = other DNA
aatacttacctgtatgatcacctctcaccaatgtcggactgggccgctagcggtcttaaagacctagcagtggccacaga

SEQ ID NO: 112927 - DNA, 80 bp, synthetic construct
  source 1..80: mol_type = other DNA
atcatactggagtttttcctcatggtactgttgataccagaaccagaaaaacaaaggaccccacaagacaatcaattgat

SEQ ID NO: 112928 - DNA, 80 bp, synthetic construct
  source 1..80: mol_type = other DNA
aggtggatggggtgaggttacatcggtatgcccccccctgccgaccactcatccgtgacgaggtaacctttagtgtaggg

SEQ ID NO: 112929 - DNA, 80 bp, synthetic construct
  source 1..80: mol_type = other DNA
gcgtgcccccgcaagactgctagccgagtagcgttgggttgcgaaaggccttgtggtactgcctgatagggtgcttgcga

SEQ ID NO: 112930 - DNA, 80 bp, synthetic construct
  source 1..80: mol_type = other DNA
tggcggcgtcgtgcggaggccttgtactcgtttccctggtgctcttgaccctctcgcctgcatacaaagccatcgtagcc

SEQ ID NO: 112931 - DNA, 80 bp, synthetic construct
  source 1..80: mol_type = other DNA
cagagtaacataccaggaacagttttggaactaactgacgcaatagcattgggaataatggttcttaaaatagtgaggag

SEQ ID NO: 112932 - DNA, 80 bp, synthetic construct
  source 1..80: mol_type = other DNA
ttactatcaccgtttccccccccccctcaaccccggcgattgtgggttttttaaaaacgacacgcgtgcgaccgtataca

SEQ ID NO: 112933 - DNA, 80 bp, synthetic construct
  source 1..80: mol_type = other DNA
ggcgtcggagcgatcgtcggggcctttgcgctcgtcgccgcgttggttctcgtaccccctcggtcctcgtggggactctc

SEQ ID NO: 112934 - DNA, 80 bp, synthetic construct
  source 1..80: mol_type = other DNA
cacggagctggttctaggacattagctggtaataagagaccagctctgcaaatgtacaccaacgtagaccaggacttggt

SEQ ID NO: 112935 - DNA, 80 bp, synthetic construct
  source 1..80: mol_type = other DNA
atactggattcatttgaacctcttgtggctgagacagatgatagggagatctccgtggccgcggagatcctctgtcctac

SEQ ID NO: 112936 - DNA, 80 bp, synthetic construct
  source 1..80: mol_type = other DNA
gtggtggtggacaagtttgaccccactgactaccgaggtggtgtccctggtttactgaaaaaaggaaaggacataaaagt

SEQ ID NO: 112937 - DNA, 80 bp, synthetic construct
  source 1..80: mol_type = other DNA
gtaggtccgcgaatagacagttacaagggaattgagacaaatggtgatgaaaccactacttggaaagatttagagccaaa

SEQ ID NO: 112938 - DNA, 80 bp, synthetic construct
  source 1..80: mol_type = other DNA
ggtgtcaattatgcaacagggaaccttcctggttgctctttttctatcttcctcctcgccctcctttcttgcctgactgt

SEQ ID NO: 112939 - DNA, 80 bp, synthetic construct
  source 1..80: mol_type = other DNA
cactatgatgaagtgctcaaggagatggcacgagcatccagagaggcacgcttgcttaccacagaggaagcttgcgaccc

SEQ ID NO: 112940 - DNA, 80 bp, synthetic construct
  source 1..80: mol_type = other DNA
ggggtggagagcttccttcttgatttgaaaccggcgacggcgtggtcactgtacgcggtatccaccgcggtgatgacccc

SEQ ID NO: 112941 - DNA, 80 bp, synthetic construct
  source 1..80: mol_type = other DNA
aagaaagaactctggaggaggtgtcgagggcttgggcctccaaaaactgggttacatcctgcgtgaagttggcacccggc

SEQ ID NO: 112942 - DNA, 80 bp, synthetic construct
  source 1..80: mol_type = other DNA
gcaagccgggctggtcagggtgccgtacttcgtacgcgcgcaaggactggtccggctctgcatgctggtgcgcaaggtcg

SEQ ID NO: 112943 - DNA, 80 bp, synthetic construct
  source 1..80: mol_type = other DNA
tgccgtcccgggcgtatgcctatgatggctcacaggcaggatgcattggcgcccttgtcatcattgccttgactattgtc

SEQ ID NO: 112944 - DNA, 80 bp, synthetic construct
  source 1..80: mol_type = other DNA
tggtaaatgctatcatacagttaatgtcactaggggagggaatattacacttacaggggcaggaatcaacactacatgga

SEQ ID NO: 112945 - DNA, 80 bp, synthetic construct
  source 1..80: mol_type = other DNA
gagctggcgtcatggttgagggagtgttccacactctgtggcatacaaccaagggtgcggctttgatgagtggagaaggg

SEQ ID NO: 112946 - DNA, 80 bp, synthetic construct
  source 1..80: mol_type = other DNA
ggtgtcttgtgtttctgtgttgtgcttggtacatcaagggtaggctcgtgcccggggtcacttatggactgctgcagctg

SEQ ID NO: 112947 - DNA, 80 bp, synthetic construct
  source 1..80: mol_type = other DNA
tcctggtgggccaagcggaggccgcgctggagaatttgatcgtcctaaacgccacctctgccgttagcaatcagggcctg

SEQ ID NO: 112948 - DNA, 80 bp, synthetic construct
  source 1..80: mol_type = other DNA
tctggtccgtcatataagtgccatactaataatggaagcattacaatttttgctattaacatcacttctggaacttataa

SEQ ID NO: 112949 - DNA, 80 bp, synthetic construct
  source 1..80: mol_type = other DNA
aatttctaaataggaatggcttccataaaagacacacgggggaccttggccccatttacggcttccagtggagacatttt

SEQ ID NO: 112950 - DNA, 80 bp, synthetic construct
  source 1..80: mol_type = other DNA
ggtgcggaggaggaagacgaggccgacgatgacgccccggatgacgtggcctacccggaggactacgcggaggtgcgttt

SEQ ID NO: 112951 - DNA, 80 bp, synthetic construct
  source 1..80: mol_type = other DNA
gacgggataaactatgcaacagggaacttgcccggttgctctttttctatcttcttattggccctgctatcttgcatcac

SEQ ID NO: 112952 - DNA, 80 bp, synthetic construct
  source 1..80: mol_type = other DNA
gtttacaactaaatttaaggccagggtaatggtgtctagaaaaaaagatagtgaagaccagtccaaagacattttgaaat

SEQ ID NO: 112953 - DNA, 80 bp, synthetic construct
  source 1..80: mol_type = other DNA
cgagccagggctataaggtgttggtgctcaacccgtccgtagccgccaccctgtccttcggcgtctacatgagcaaagcc

SEQ ID NO: 112954 - DNA, 80 bp, synthetic construct
  source 1..80: mol_type = other DNA
cgctaagtcagatattattaacttacgctttgcttccccacaccgtttacctgcggtattctgtaaaggatctccacgta

SEQ ID NO: 112955 - DNA, 80 bp, synthetic construct
  source 1..80: mol_type = other DNA
gaatgacagcccgtggtcgccaccacgcatttaagcaacccgcacgggccgccccgtacctcgtgacttccccccacatt

SEQ ID NO: 112956 - DNA, 80 bp, synthetic construct
  source 1..80: mol_type = other DNA
cggcaaatacatccagatggctctgctcaagttgggggctagcaccggcacgtatgtgtttgaacaccttgctccgctgt

SEQ ID NO: 112957 - DNA, 80 bp, synthetic construct
  source 1..80: mol_type = other DNA
aaggaaggtgaccagtacatctacatgggacagcctttaaacaacgatgaagatcacgcccactggacggaagcaaaaat

SEQ ID NO: 112958 - DNA, 80 bp, synthetic construct
  source 1..80: mol_type = other DNA
ccctaccatatgggtgcgcatggtgctgatgacacatttctttggtatactccagtcccaagaaacactccataaagcac

SEQ ID NO: 112959 - DNA, 80 bp, synthetic construct
  source 1..80: mol_type = other DNA
tgaggacatgaagccttactgttggcattatccccctaagcagtgcggcgtagttccagccacgaccgtgtgtggcccag

SEQ ID NO: 112960 - DNA, 80 bp, synthetic construct
  source 1..80: mol_type = other DNA
cgaggacgtttcgttgcttccagctccggggcctacggggcgcggcccgacccagaaactactatgggccgtggaacccc

SEQ ID NO: 112961 - DNA, 80 bp, synthetic construct
  source 1..80: mol_type = other DNA
catatagatgctcactttctatcacagactaagcagcagggactcaatttctcgtacctgactgcctaccaagccactgt

SEQ ID NO: 112962 - DNA, 80 bp, synthetic construct
  source 1..80: mol_type = other DNA
atagacccgaacatcagaaccggtgtcaggaccatcacgaccggaggggccattacatactcaacatatggcaaattttt

SEQ ID NO: 112963 - DNA, 80 bp, synthetic construct
  source 1..80: mol_type = other DNA
taactccactggatgtcctcaaaggctcagcagctgcaagcccatcacttccttcgggcaggcgtggggccccttggcag

SEQ ID NO: 112964 - DNA, 80 bp, synthetic construct
  source 1..80: mol_type = other DNA
taaagcgtgcggcatcgacccaaacatacgcactggcaccaggacaataacaacaggctcaccacttacctactccacct

SEQ ID NO: 112965 - DNA, 80 bp, synthetic construct
  source 1..80: mol_type = other DNA
ttcctttgtcatgtatttttacagcgacggaacgtggaggaaaaactatcccgtgtttgacaacgaagggatactagcaa

SEQ ID NO: 112966 - DNA, 80 bp, synthetic construct
  source 1..80: mol_type = other DNA
gagtatggaacccttgggctagaatgctcaccacggacaggcttggatttcaatgaaatgattttattgacaatgaagaa

SEQ ID NO: 112967 - DNA, 80 bp, synthetic construct
  source 1..80: mol_type = other DNA
gctggctatggcaacaacgttacaactgccagaggacattgaacaaatggcaaatggaatcgctctggggctcatggctc

SEQ ID NO: 112968 - DNA, 80 bp, synthetic construct
  source 1..80: mol_type = other DNA
acctacaactggggcgagaacgagacagacgtgttcttgttggagagccagagaccgccagcgggcgtgtggtacggctg

SEQ ID NO: 112969 - DNA, 80 bp, synthetic construct
  source 1..80: mol_type = other DNA
gcgttcatggttcggcgtgggtgtgggtgtgtaggcgatgcgggtcccccgagtccgcgggaagtgcgtgggtttggcgc

SEQ ID NO: 112970 - DNA, 80 bp, synthetic construct
  source 1..80: mol_type = other DNA
ttatgggtttcaatattctccagcacagcgggttgagtaccttctgcaagcgtggaagggaaagaaagaccctatggggt

SEQ ID NO: 112971 - DNA, 80 bp, synthetic construct
  source 1..80: mol_type = other DNA
tacctggctggaggctccattgcttggactctcatcaagaacgctgataagccctccttgaaaaggggaaggcctggtgg

SEQ ID NO: 112972 - DNA, 80 bp, synthetic construct
  source 1..80: mol_type = other DNA
gtggggaagacttgggaggccttggacaccatgtatgtcgtggccaccgcggaaaaaggtggacgagcccaccggacggc

SEQ ID NO: 112973 - DNA, 80 bp, synthetic construct
  source 1..80: mol_type = other DNA
aactgggaggaggttcctttctgctcacaccatttccacgagctggtgatgaaagatgggcgcgccctcatagtgccatg

SEQ ID NO: 112974 - DNA, 80 bp, synthetic construct
  source 1..80: mol_type = other DNA
ccccagcatgtcgttcacgtggcgctgtatgtggttatacgtaaactgcagccgggcgaactcgatcgaggaggtggtct

SEQ ID NO: 112975 - DNA, 80 bp, synthetic construct
  source 1..80: mol_type = other DNA
acatgaatgggcgggtggttcccccatccctggtggatacctacgtaaacattggcgccagatggtctttggatgccatg

SEQ ID NO: 112976 - DNA, 80 bp, synthetic construct
  source 1..80: mol_type = other DNA
aagaaagtcatcgtctggggcgctgacaccgctgcgtgcggagacatcataaggggattacctgtttcggccaggttgtg

SEQ ID NO: 112977 - DNA, 80 bp, synthetic construct
  source 1..80: mol_type = other DNA
ccatttgggcgcggcctgattacaacccacctctgctgaaaccatggcaagcccctgactatgatcccccaacggtgcat

SEQ ID NO: 112978 - DNA, 80 bp, synthetic construct
  source 1..80: mol_type = other DNA
ctgcagccttgctggactggttgcagccaatgagatggggtttctggagaagaccaaggcagacttgtctacggtgttgt

SEQ ID NO: 112979 - DNA, 80 bp, synthetic construct
  source 1..80: mol_type = other DNA
atgttggaggacccccactcatacacgggagccgggcgccatgttggggcgccatgttaggtggcgtggaaccccgtgac

SEQ ID NO: 112980 - DNA, 80 bp, synthetic construct
  source 1..80: mol_type = other DNA
ccaatacctactaccatcatggccaagaacgaggttttctgcgtagacgctcaaaagggcggccggaaaccggcccgact

SEQ ID NO: 112981 - DNA, 80 bp, synthetic construct
  source 1..80: mol_type = other DNA
tctatcgcctggagcattagtagtggaggtagtgtgcgcggcgatcctgcgtcgccacgtgggtccgggcgaaggggccg

SEQ ID NO: 112982 - DNA, 80 bp, synthetic construct
  source 1..80: mol_type = other DNA
ctgccctcagctcgcgcctcagcgtcagctgtaaaaagtcactcaagtcctcagacaccacagctgccaactctgagcct

SEQ ID NO: 112983 - DNA, 80 bp, synthetic construct
  source 1..80: mol_type = other DNA
gctacatcagtcctcggtataggcacggtcctggaccaagcagaaactgctggagcacgtcttaccctgctcgcaactgc

SEQ ID NO: 112984 - DNA, 80 bp, synthetic construct
  source 1..80: mol_type = other DNA
agaccaccgtgagactgcgggcatatctgaacaccccagggttgcccgtctgtcaggaccacctagagttctgggagggc

SEQ ID NO: 112985 - DNA, 80 bp, synthetic construct
  source 1..80: mol_type = other DNA
agaaaagactgaccatcatggacctccacccaggagcaggaaaaacaaagagataccttccagcaatagtcagagaagcc

SEQ ID NO: 112986 - DNA, 80 bp, synthetic construct
  source 1..80: mol_type = other DNA
cagcactgcccgtgtgggcgaggcctgattacaatccacccctcctagagatctggaggaccccagactacgagcctccc

SEQ ID NO: 112987 - DNA, 80 bp, synthetic construct
  source 1..80: mol_type = other DNA
taaccaagctggagagcatagacgcgacaagagatcagtggcgttagctccccatgtcggcatgggactggacacacgca

SEQ ID NO: 112988 - DNA, 80 bp, synthetic construct
  source 1..80: mol_type = other DNA
gatgtcattcccgtgcgccggcggggtgatagcaggggcagcctgctctcgccccggcctatttcctatttgaaaggctc

SEQ ID NO: 112989 - DNA, 80 bp, synthetic construct
  source 1..80: mol_type = other DNA
accatcgtgtcaggagggacagtggcccgcaccacccacagtctcgcgtctctctttacacaaggggcgtcccagaaaat

SEQ ID NO: 112990 - DNA, 80 bp, synthetic construct
  source 1..80: mol_type = other DNA
ccgctgttggatcgcagtcacgcccaatgtggccgtgagccaccctggggcccttactaagggtttgcggacgcacttag

SEQ ID NO: 112991 - DNA, 80 bp, synthetic construct
  source 1..80: mol_type = other DNA
tgcccgttctggactttctcgagccaatggccgaggaagagagcgaccttgagccctcaataccatcggagtgcatgctc

SEQ ID NO: 112992 - DNA, 80 bp, synthetic construct
  source 1..80: mol_type = other DNA
ccagcagcttcgggtcttcttcatctacacagacaaacatccatgttggaggaagaaatgagggaggccatggacaagaa

SEQ ID NO: 112993 - DNA, 80 bp, synthetic construct
  source 1..80: mol_type = other DNA
tgcctacatggttcccggttggcaagctgaggcaatgcgctcagcccagcggcggacagcggccggaatcatgaagaacg

SEQ ID NO: 112994 - DNA, 80 bp, synthetic construct
  source 1..80: mol_type = other DNA
caggctgcccaacaggctggtgaattcgcctatggaaaaagaagccgttacgacgacaaaattgctattcctttggacga

SEQ ID NO: 112995 - DNA, 80 bp, synthetic construct
  source 1..80: mol_type = other DNA
tttgccctggagcacttttttctccgcgcgctcacgggctcggcccccgccgacatcgcccgctgcgtcgtccacagtct

SEQ ID NO: 112996 - DNA, 80 bp, synthetic construct
  source 1..80: mol_type = other DNA
acttggtaggctggcccagcccccctgggaccaagtctttggagccgtgcaagtgtggagccgtcgacctatatctggtc

SEQ ID NO: 112997 - DNA, 80 bp, synthetic construct
  source 1..80: mol_type = other DNA
caatgctgcaccactggatcaaggttgagtatggtaatctgtctttgtctggaattgcacagtcagcctcagttttgtca

SEQ ID NO: 112998 - DNA, 80 bp, synthetic construct
  source 1..80: mol_type = other DNA
gggccagggcggtcagagctaagcttatcgctcagggaaggaaagccgccatatgtggcaggtacctctttaattgggcg

SEQ ID NO: 112999 - DNA, 80 bp, synthetic construct
  source 1..80: mol_type = other DNA
gggatcgcacggagctgtcccctttgctcctttccaccacccagtggcaggtgctcccctgctccttcacgaccatgccc

SEQ ID NO: 113000 - DNA, 80 bp, synthetic construct
  source 1..80: mol_type = other DNA
atgcgtgccgagtgaactctcccgccccgacgcgctccggctccgggcctacgccgagcccagccgcccgccatgtcccg

SEQ ID NO: 113001 - DNA, 80 bp, synthetic construct
  source 1..80: mol_type = other DNA
ggccttttcgctcataaagaatgcacaaacccccaggaggggaactgggaccacaggagagacactgggagaaaaatgga

SEQ ID NO: 113002 - DNA, 80 bp, synthetic construct
  source 1..80: mol_type = other DNA
caacgcgtccggatgcccagaacgcatggccagctgccgccccatcgataagttcgctcaggggtgcggtcccatcacgt

SEQ ID NO: 113003 - DNA, 80 bp, synthetic construct
  source 1..80: mol_type = other DNA
actattaactttgatgaaaggtctcgatggggtggagatttaaaaaccatcttacataccaacatgccaaacgtgaacga

SEQ ID NO: 113004 - DNA, 80 bp, synthetic construct
  source 1..80: mol_type = other DNA
tacttagcagtaggacgtcagaacggcgtgctggaaagcgacattggggtgaagtttgacacgcgcaacttccggttggg

SEQ ID NO: 113005 - DNA, 80 bp, synthetic construct
  source 1..80: mol_type = other DNA
agcggaggaggatgagagggaggtatccgttgcggcggagatcctgcggaaatccaagaaattccctccggcaatgccca

SEQ ID NO: 113006 - DNA, 80 bp, synthetic construct
  source 1..80: mol_type = other DNA
ggaattaatgcagtcgccttctataggggcctggacgtttccgtgataccatccgcgggcgacgtcgtggtgtgcagcac

SEQ ID NO: 113007 - DNA, 80 bp, synthetic construct
  source 1..80: mol_type = other DNA
cttcaaaactctatgagggtatctggtagtactacgcgttgttatagccgtcctttaatttcaatagttagtttaaatgg

SEQ ID NO: 113008 - DNA, 80 bp, synthetic construct
  source 1..80: mol_type = other DNA
tcgggtatggggcgaaggaggttagggcccatgctagcaaggccattaaccacatcaactccgtgtgggaggacttgcta

SEQ ID NO: 113009 - DNA, 80 bp, synthetic construct
  source 1..80: mol_type = other DNA
ctgtgtccgcgcgaaagcgcccccccccagctgggacacaatgtggaagtgcatgctccgtcttaagccgaccctgaccg

SEQ ID NO: 113010 - DNA, 80 bp, synthetic construct
  source 1..80: mol_type = other DNA
gtctcgtgggctgtgaagtgggagtatgttgtcctcatgttcctaattttggcggatgcccgggtatgcacatgcctctg

SEQ ID NO: 113011 - DNA, 80 bp, synthetic construct
  source 1..80: mol_type = other DNA
atgacgcagctccatcgaatgatggcgcggctggcctcgtaccagagatcaaccatgaggtcatggccatagaacctgtt

SEQ ID NO: 113012 - DNA, 80 bp, synthetic construct
  source 1..80: mol_type = other DNA
cagtgggaagaaaaaaagagtggagccggaaatcaaaccgaaactcatacgtttggcgttgctcccatgggcggaactaa

SEQ ID NO: 113013 - DNA, 80 bp, synthetic construct
  source 1..80: mol_type = other DNA
aacattgcgactagaaaaagggttagaagtaaccagcggaggaaagcttaacgtcaagctgggatcaggcctccaatttg

SEQ ID NO: 113014 - DNA, 80 bp, synthetic construct
  source 1..80: mol_type = other DNA
tgcacaccctccccggcgccaaactattctagggcgctgtggcgggtggctgcagaggagtacgtggaagttacgcgggt

SEQ ID NO: 113015 - DNA, 80 bp, synthetic construct
  source 1..80: mol_type = other DNA
cccaaacctaccaggtagcccatctacacgctcctactgggagcggtaagagcaccaaggtgccggctgcctatgcggac

SEQ ID NO: 113016 - DNA, 80 bp, synthetic construct
  source 1..80: mol_type = other DNA
cccatgatgaggcacacaatcgaaaacacaacggcaaacatttccctgacagccattgcaaaccaggcggccatattgat

SEQ ID NO: 113017 - DNA, 80 bp, synthetic construct
  source 1..80: mol_type = other DNA
agatggagaagaaggtcattgtctggggggctgactccgctgcttgcggcgacattctctccggactacccgtctcagct

SEQ ID NO: 113018 - DNA, 80 bp, synthetic construct
  source 1..80: mol_type = other DNA
ctccccatcgagagtccgtaggtgacctaccgtgctacgtccgccgtcgcagccgtatccccggaggatcgccccgcatc

SEQ ID NO: 113019 - DNA, 80 bp, synthetic construct
  source 1..80: mol_type = other DNA
cagcagtacagttgctcctgaaacaactaacctttcttctgatactaacaaacctcgtgtcggaggtgagctttgggttc

SEQ ID NO: 113020 - DNA, 80 bp, synthetic construct
  source 1..80: mol_type = other DNA
gggttggcgccgtcgacgcgggggcgtctgggagtgcggcggattctggctgggccgatttcctgccgcaggtggtctcc

SEQ ID NO: 113021 - DNA, 80 bp, synthetic construct
  source 1..80: mol_type = other DNA
tggacctaccagcaatcatccaacgactccacggcttgagcgcgttttcactccatggatactctccacacgaactcaat

SEQ ID NO: 113022 - DNA, 80 bp, synthetic construct
  source 1..80: mol_type = other DNA
ggccaccctagggttcggggcgtacttgtccaaagcacatggtatcaatcccaacatcaggactggagtcaggactgtga

SEQ ID NO: 113023 - DNA, 80 bp, synthetic construct
  source 1..80: mol_type = other DNA
atctacggggtgacttactccatcactccacttgatctcccagcgatcattcaacgactccatggcatggcagcattttc

SEQ ID NO: 113024 - DNA, 80 bp, synthetic construct
  source 1..80: mol_type = other DNA
gatctgctggtggtacggacagggtcgggccagacccatggtctcggtgaaaaaggcagagacgtcacccgtggtcgcga

SEQ ID NO: 113025 - DNA, 80 bp, synthetic construct
  source 1..80: mol_type = other DNA
agaagacggcatacgagataggagtccgtctcgtgggctcggagatgtgtataagagcatattgaaagacggtcgacccg

SEQ ID NO: 113026 - DNA, 80 bp, synthetic construct
  source 1..80: mol_type = other DNA
gttctagtgaagggaatggctgttttaaggcacaatatggtttgtggagtgtccgatcaatctgcgcgccgttatgttac

SEQ ID NO: 113027 - DNA, 80 bp, synthetic construct
  source 1..80: mol_type = other DNA
aaaaggaaaccaagatgaaaccatgctatggctcatttgccagaccaactaataaaaaaggagggcaggctaaagtttta

SEQ ID NO: 113028 - DNA, 80 bp, synthetic construct
  source 1..80: mol_type = other DNA
gattcggtcgtactgtgcgaagcctatgacaccggctgcgcctggtatgagctgactccctccgagaccaccgttaggtt

SEQ ID NO: 113029 - DNA, 80 bp, synthetic construct
  source 1..80: mol_type = other DNA
ggaaagatagttcaatatgaaaacttaaaatattcagtgatagtcactgtccacactggggaccagcaccaggtgggaaa

SEQ ID NO: 113030 - DNA, 80 bp, synthetic construct
  source 1..80: mol_type = other DNA
ctaattcaagtatcatctacgaggcagataacatcatcatgcatactcctggctgcgtaccgtgtgttaggacagataac

SEQ ID NO: 113031 - DNA, 80 bp, synthetic construct
  source 1..80: mol_type = other DNA
acgtacgggaaaaaccaagtcatcatgctactgtatcctgaccacccaacactcctgtcctaccggaatatgggagaaga

SEQ ID NO: 113032 - DNA, 80 bp, synthetic construct
  source 1..80: mol_type = other DNA
ccaccggttgtgtagaaagaatgtcctcgtgcaggcccctggacactttcgaccaaggctggggtcccatcacgtatgcc

SEQ ID NO: 113033 - DNA, 80 bp, synthetic construct
  source 1..80: mol_type = other DNA
ggaatggttcaattgaagattccggggtacagtcataattgaccactgttccaacgcgtcttccaacaacacataacgca

SEQ ID NO: 113034 - DNA, 80 bp, synthetic construct
  source 1..80: mol_type = other DNA
ccccgggacgttaccggaggccaccccggccccaggtcgtcctcctcggagatactcaccccgcccgagctcgtccaggt

SEQ ID NO: 113035 - DNA, 80 bp, synthetic construct
  source 1..80: mol_type = other DNA
tccgttccgggtcgggtggtccagcaccgtcccaacagtagatgggatgagaccgggcgactcccgaatgcgaccaccgc

SEQ ID NO: 113036 - DNA, 80 bp, synthetic construct
  source 1..80: mol_type = other DNA
catggattcccatgggccctcgtcgtgttctgctgtgcgtggtactacaggggcaaagttgtcccgttaaccacgtacac

SEQ ID NO: 113037 - DNA, 80 bp, synthetic construct
  source 1..80: mol_type = other DNA
attcaaaaaatcaagctcagcgaaaaatcattgttacaaagaaaccagacaatggtgttgtaacaccaatacaggttaca

SEQ ID NO: 113038 - DNA, 80 bp, synthetic construct
  source 1..80: mol_type = other DNA
ctacgccggctgttccaggactacgcccccgccgcgatgttttgccgaggctcgcatggaaccggtcccggggttggcgt

SEQ ID NO: 113039 - DNA, 80 bp, synthetic construct
  source 1..80: mol_type = other DNA
acggccatactgctggcactacgctccgcccttgtgtggcatcgtggatgctcgcactgtgtgtggcccagtgtactgct

SEQ ID NO: 113040 - DNA, 80 bp, synthetic construct
  source 1..80: mol_type = other DNA
atctggagacgtggtagtgtgcgccactgacgccctcatgactggttttacaggggattttgactctgttatagactgca

SEQ ID NO: 113041 - DNA, 80 bp, synthetic construct
  source 1..80: mol_type = other DNA
caggctatccccagggcccgtgtgcgcaggggatcggtgggtggcagcatttggttggtggcgataaagtggaaaagccc

SEQ ID NO: 113042 - DNA, 80 bp, synthetic construct
  source 1..80: mol_type = other DNA
ggtcgtgaaactgggggcgtacactggctggcctttggatggaaccccaaatcgcacacttgctatttattcgatccatt

SEQ ID NO: 113043 - DNA, 80 bp, synthetic construct
  source 1..80: mol_type = other DNA
ttacgggcctcacacacatcgatgcccacttcctctcccagacgaagcaaggaggggacaactttgcgtatctaacggcc

SEQ ID NO: 113044 - DNA, 80 bp, synthetic construct
  source 1..80: mol_type = other DNA
tgaccacaaagatcatcataagcacatcaatggcagtgctggtagctatgatcctgggaggattttcaatgagtgacctg

SEQ ID NO: 113045 - DNA, 80 bp, synthetic construct
  source 1..80: mol_type = other DNA
aggggaaagtgttaatgtcaatcaacaagactgacgctcaaagcgccataaacattcctagtgccaacggagcaaacact

SEQ ID NO: 113046 - DNA, 80 bp, synthetic construct
  source 1..80: mol_type = other DNA
tcttctgtcgtgcgttacagtgccagtgtcttcagtggaaatcaggaacatcagcactagctactacgccactaatgatt

SEQ ID NO: 113047 - DNA, 80 bp, synthetic construct
  source 1..80: mol_type = other DNA
tctgctccatctcttaaggccacgtgcgctactcatcctgattcccctggcaccgacctcatcgagtccattctcttttg

SEQ ID NO: 113048 - DNA, 80 bp, synthetic construct
  source 1..80: mol_type = other DNA
atgtcatccccatggtgacacagatggcaatgacagacacgaccccatttggacaacagcgtgtttttaaagagaaagtg

SEQ ID NO: 113049 - DNA, 80 bp, synthetic construct
  source 1..80: mol_type = other DNA
gcatatacggggtcggttggtccctgctaccgcgtacggaattttccagatatggcctctcttgctgctgctcctgctcc

SEQ ID NO: 113050 - DNA, 80 bp, synthetic construct
  source 1..80: mol_type = other DNA
cccccggacgcacgataacggtgggcccgcgtgggaacgcgagcaatgccgccccctccgcgtccccgcggaacgcatcc

SEQ ID NO: 113051 - DNA, 80 bp, synthetic construct
  source 1..80: mol_type = other DNA
tgccttgagggaaataaattaccgccgccgagaactgggactgcctctagttagatgtggtcttgttgaagaaaacaaat

SEQ ID NO: 113052 - DNA, 80 bp, synthetic construct
  source 1..80: mol_type = other DNA
gtccggcgagacgccacgagccgcaggatggactcgtagtggagcgacggcgccccgctgcggagcagatccgcggccag

SEQ ID NO: 113053 - DNA, 80 bp, synthetic construct
  source 1..80: mol_type = other DNA
catcttactaggccaagccgaagctgcactggagaagctggtcgtcctgcatgctgcgagcgcggctagctgcaacggct

SEQ ID NO: 113054 - DNA, 80 bp, synthetic construct
  source 1..80: mol_type = other DNA
tggatgaactcttcgggatacaccaaaacatgcggtgcaccgccctgtgtcatcgggtcgggcggtaacaactccctgaa

SEQ ID NO: 113055 - DNA, 80 bp, synthetic construct
  source 1..80: mol_type = other DNA
aactgggccaaggtaatcttggtcttattcctgtttgctggggttgacgcagaaacccaggtcacgggtggatcggcggc

SEQ ID NO: 113056 - DNA, 80 bp, synthetic construct
  source 1..80: mol_type = other DNA
ttgtggaccatgtcggaaatgttgaggtcggcacgcaggtctgacttggtcttttccggacagagcggttcagagcgggg

SEQ ID NO: 113057 - DNA, 80 bp, synthetic construct
  source 1..80: mol_type = other DNA
tctcagtcgggtttttgatcactggtggacttgtgttaacaatgacactgggggttggtgccgacatgggctgtgcaatt

SEQ ID NO: 113058 - DNA, 80 bp, synthetic construct
  source 1..80: mol_type = other DNA
cgccatccttttcatttgtgtggcgtggtatgtgaaaggcaggctcccggcagctgctgcttacgcagcgtgtggaatgt

SEQ ID NO: 113059 - DNA, 80 bp, synthetic construct
  source 1..80: mol_type = other DNA
agcaactccagggtgaccgacagcggggtgagaaaggccccggcctgggcctccaggcccggcctcagacgacgccgcag

SEQ ID NO: 113060 - DNA, 80 bp, synthetic construct
  source 1..80: mol_type = other DNA
ttggccgaaggtggagcagttctggcagaaacacctgtggaacctcatcagcggaatacagtatctggcgggtctctcga

SEQ ID NO: 113061 - DNA, 80 bp, synthetic construct
  source 1..80: mol_type = other DNA
tggaacatagttaagttgatgagtggaaaggatgtgttttaccttccacctgaaaagtgtgacaccctgttgtgtgacat

SEQ ID NO: 113062 - DNA, 80 bp, synthetic construct
  source 1..80: mol_type = other DNA
cacataacggcggagaaagcggcccgaagactggctcgagggtcaccgccctcgttagctagttcatcggcgagccaact

SEQ ID NO: 113063 - DNA, 80 bp, synthetic construct
  source 1..80: mol_type = other DNA
tggacgacaaggtcggcggcagccgaccctaaggtcgtgagctgggcgatggccccccgcgcgtccagggccacccgagt

SEQ ID NO: 113064 - DNA, 80 bp, synthetic construct
  source 1..80: mol_type = other DNA
tgagagtgacatccgtgttgaggagtcaatttaccaatgttgtgacttggcccccgaagccagacaggccataaggtcgc

SEQ ID NO: 113065 - DNA, 80 bp, synthetic construct
  source 1..80: mol_type = other DNA
ggagacgtcgttgtcgtggcaacagacgctctaatgacgggttttaccggcgactttgactcggtgatcgactgcaacac

SEQ ID NO: 113066 - DNA, 80 bp, synthetic construct
  source 1..80: mol_type = other DNA
tgctaacatcaccggtccatctgacgacaaaccgtactgctggcactatgcacctagaccttgtggcattgtcccggcgt

SEQ ID NO: 113067 - DNA, 80 bp, synthetic construct
  source 1..80: mol_type = other DNA
aattaaatttctttatacaaatcattactcgcttgcaaaaacaattaacgttagtatagtatgttacactttacttcatg

SEQ ID NO: 113068 - DNA, 80 bp, synthetic construct
  source 1..80: mol_type = other DNA
agtgggcaaagaacatctggggagcagtggagaaagtgaggagaatgctgggccctgagaggtatagtgactacctttcc

SEQ ID NO: 113069 - DNA, 80 bp, synthetic construct
  source 1..80: mol_type = other DNA
cgcccggcagcgccaaccgcctgcgccacctggtgcgagactgctacctcatgggctactgccggacccgcctggggccg

SEQ ID NO: 113070 - DNA, 80 bp, synthetic construct
  source 1..80: mol_type = other DNA
ttgggaaaaagggaagacttgtggtgtggatctctcatagggcacagaccgcgcaccacctgggctgagaacattaaaaa

SEQ ID NO: 113071 - DNA, 80 bp, synthetic construct
  source 1..80: mol_type = other DNA
attatatgaggtgtcagtcaaaaccttgtttcaaaacggggctaaacaaagtaaggttgaacaaagtaatattggacaag

SEQ ID NO: 113072 - DNA, 80 bp, synthetic construct
  source 1..80: mol_type = other DNA
cttggacctggctacctcctcaagggggttttgttgcagacgccatacttcgttagggctcacgccctgctgaggatgtg

SEQ ID NO: 113073 - DNA, 80 bp, synthetic construct
  source 1..80: mol_type = other DNA
aatccagcaagtaaaccccttactgcccaactgttcttgattgttcaacatagtagagataatgaaacttttagggacgc

SEQ ID NO: 113074 - DNA, 80 bp, synthetic construct
  source 1..80: mol_type = other DNA
ccggcttgtcaactttgccgggtaacccagctgtggcaggtttgatggcattctcggcctccctgaccagcccgctgact

SEQ ID NO: 113075 - DNA, 80 bp, synthetic construct
  source 1..80: mol_type = other DNA
atgccgcctcttgaaggcgagccaggtgacccggacctcagttcaggatcatggtctacagtcagtgaggagggagacag

SEQ ID NO: 113076 - DNA, 80 bp, synthetic construct
  source 1..80: mol_type = other DNA
ccgcttcagcagcgcaaactgggtgtgaacggcggcggtggtctccggttccccgggggtgtagtggcagtaaaacacgt

SEQ ID NO: 113077 - DNA, 80 bp, synthetic construct
  source 1..80: mol_type = other DNA
ctataatcttgactctccggacgtcgacctcattgcggccaacctcctgtggcggcaggagatgggcggaaacatcaccc

SEQ ID NO: 113078 - DNA, 80 bp, synthetic construct
  source 1..80: mol_type = other DNA
ggcggacctgcattggcagccgagccggcgcgccttggaggccgcctacggtccagaggacttggatgaggatgaggaag

SEQ ID NO: 113079 - DNA, 80 bp, synthetic construct
  source 1..80: mol_type = other DNA
gtacagattgctccacttatgggcttttctgctgctggttttgatgctgcctcctcgagcgtatgcttacgatggcgctg

SEQ ID NO: 113080 - DNA, 80 bp, synthetic construct
  source 1..80: mol_type = other DNA
tctagagtttgaagctttggggttcctgaatgaagaccattggctgagccgagagaattcaggaggtggagtggaaggct

SEQ ID NO: 113081 - DNA, 80 bp, synthetic construct
  source 1..80: mol_type = other DNA
aataaagctttattattgtttaaccaaaggcgagtcctacgggtgtaccggtggtgtctcctgcggcgtcatctcgtcgt

SEQ ID NO: 113082 - DNA, 80 bp, synthetic construct
  source 1..80: mol_type = other DNA
ggctatttggcggcttgaactggataacaaaggtcatcatgggggcggtacttatatgggttggcatcaacacaagaaac

SEQ ID NO: 113083 - DNA, 80 bp, synthetic construct
  source 1..80: mol_type = other DNA
gacacgccgttggagtcttcagagccgcggtgtgcacccgaggggttgctaaggcggttgacttcattcccgtcgagtct

SEQ ID NO: 113084 - DNA, 80 bp, synthetic construct
  source 1..80: mol_type = other DNA
tattgatagtcattttttgtcccagaccaaacaagcaggtgaaaacttcccatacttgacagcctaccaggctacagttt

SEQ ID NO: 113085 - DNA, 80 bp, synthetic construct
  source 1..80: mol_type = other DNA
gggggtgtggtacagggcgttaatcatccaccagcaatacaccacggccgtgaggaggtgacgcccaaggagcccggcct

SEQ ID NO: 113086 - DNA, 80 bp, synthetic construct
  source 1..80: mol_type = other DNA
cgccaggtttcaaaaacctgatgtgcaagccgtacggcttctgattctccacataacccataacgttccgctagagcccc

SEQ ID NO: 113087 - DNA, 80 bp, synthetic construct
  source 1..80: mol_type = other DNA
gttacctattcagtcactccgctggatcttccagagatcatccaacgtttacatggaatagccgccttttcactccataa

SEQ ID NO: 113088 - DNA, 80 bp, synthetic construct
  source 1..80: mol_type = other DNA
ctagggattggcaccgtgttggaccaggcggagacagctggcgtacggctcaccgtactggccactgcgactcctcctgg

SEQ ID NO: 113089 - DNA, 80 bp, synthetic construct
  source 1..80: mol_type = other DNA
ctggcttaaggctaagcttgtgccttccctgccaggcatcccctttctctcttgtcaacgggggttcagggtggtgtggc

SEQ ID NO: 113090 - DNA, 80 bp, synthetic construct
  source 1..80: mol_type = other DNA
ctttgacgccctggcgtggatgcccgacacgatggccaggaacccgtggatttcccgccgcacgacggccagcacgttac

SEQ ID NO: 113091 - DNA, 80 bp, synthetic construct
  source 1..80: mol_type = other DNA
cgtgtggtggctgcagaaatggctgaggccctcaagggccttccggtccgatacctgaccccagcggtcaacagagagca

SEQ ID NO: 113092 - DNA, 80 bp, synthetic construct
  source 1..80: mol_type = other DNA
tatgacacccgctgctttgactccactgtaaccgaaagagacatcagggtcgaggaggaggtctatcagtgttgtgacct

SEQ ID NO: 113093 - DNA, 80 bp, synthetic construct
  source 1..80: mol_type = other DNA
cacgtggggtaccagggggccagggtccttgaccccacttccgggtttcacgtgaaccccgtggtggtgttcgactttgc

SEQ ID NO: 113094 - DNA, 80 bp, synthetic construct
  source 1..80: mol_type = other DNA
ccttcttgattcactgaatctcggccaccaggctctattccaggaaagggtcctccacagccttgatttttccagcccag

SEQ ID NO: 113095 - DNA, 80 bp, synthetic construct
  source 1..80: mol_type = other DNA
gggctaagcgtgggactggcaagcgtgagggaatatttcagtgctccataattagcccccaaaaactgcatgctggaata

SEQ ID NO: 113096 - DNA, 80 bp, synthetic construct
  source 1..80: mol_type = other DNA
gacccccgccggcgtgcccccagaaccaatcgcaaccctggaggaccccgccccggggcgtggtggacggacggccccgg

SEQ ID NO: 113097 - DNA, 80 bp, synthetic construct
  source 1..80: mol_type = other DNA
cgtaccgtcttggggttcactaacctctttacttctggtgccaagcagaacctctatttaatcaacaccaatggcagctg

SEQ ID NO: 113098 - DNA, 80 bp, synthetic construct
  source 1..80: mol_type = other DNA
ccctggactggctccccgatcccatgaccatcaccgagctggtggaacaccgctacattaagtacgtcatatcgcttatc

SEQ ID NO: 113099 - DNA, 80 bp, synthetic construct
  source 1..80: mol_type = other DNA
cggagtcacgtactcagtcactccactggacttaccagcaatcattcagcgcctccatggcatggctgctttttcactcc

SEQ ID NO: 113100 - DNA, 80 bp, synthetic construct
  source 1..80: mol_type = other DNA
tggaggcaggaagtggggggtaacatcactcgggtggagtctgagaacaaagtcatcgttcttgactcgtttgatcccat

SEQ ID NO: 113101 - DNA, 80 bp, synthetic construct
  source 1..80: mol_type = other DNA
ctgaacgtgaccgagcagctgcgtacggaccaccagatgatgtcgtgtctgcgtaccgactacgaatccagcgatgagga

SEQ ID NO: 113102 - DNA, 80 bp, synthetic construct
  source 1..80: mol_type = other DNA
actccggggctgtggacgtcggcttaccttcgcaaatttgtacctgaggactaccacgcccacgagattaggttctacga

SEQ ID NO: 113103 - DNA, 80 bp, synthetic construct
  source 1..80: mol_type = other DNA
ttcaacaccaagggatcccagtgtggttacggccgttgccgtgcgactggagtcctgtctaccagctttggaaatacaat

SEQ ID NO: 113104 - DNA, 80 bp, synthetic construct
  source 1..80: mol_type = other DNA
cctcgggctgtcccgaacggatgagcagttgcaagccgctacgtgcatttgaccaaggctgggggcctctctcatacgcc

SEQ ID NO: 113105 - DNA, 80 bp, synthetic construct
  source 1..80: mol_type = other DNA
cgcgagctgatgcacagcctgcaaagggccctggctggcacgggcagcggcgatagagaggccgagtcctactttgacgc

SEQ ID NO: 113106 - DNA, 80 bp, synthetic construct
  source 1..80: mol_type = other DNA
caccgcggagacggcgggtcgacgcctcgcgagaggctccccaccgtcattggccagctcctctgcaagtcagctgtctg

SEQ ID NO: 113107 - DNA, 80 bp, synthetic construct
  source 1..80: mol_type = other DNA
cacttggagaaaaatggaaaagccgattaaacgcactgggaaaaagtgaatttcagatctacaagaaaagtggaatccag

SEQ ID NO: 113108 - DNA, 80 bp, synthetic construct
  source 1..80: mol_type = other DNA
gagacagacgcgtcccgcgcagtgactaacatactcagttctctcactataaccagtctgttgcgcaagctacatcattg

SEQ ID NO: 113109 - DNA, 80 bp, synthetic construct
  source 1..80: mol_type = other DNA
tccgtcgtggggacgtaaagcctgggaggctgcaaaccgtggaagctgtacgcacggtgtagcagactagcggttagagg

SEQ ID NO: 113110 - DNA, 80 bp, synthetic construct
  source 1..80: mol_type = other DNA
agcttcttctacgccatcctcttcatctgcgttgtctggcacgtcaagggcagactccccgccgctgctgcttacgcggc

SEQ ID NO: 113111 - DNA, 80 bp, synthetic construct
  source 1..80: mol_type = other DNA
gctgtagctatagcctggctcctgggaagctcgacgagccaaaaagttatatacttggtcatgatattgttgattgcccc

SEQ ID NO: 113112 - DNA, 80 bp, synthetic construct
  source 1..80: mol_type = other DNA
ctgcctacagttttaactgtctgggaatgagcagccgtgatttcattgaaggtgcttcaggagctacatgggtcgatttg

SEQ ID NO: 113113 - DNA, 80 bp, synthetic construct
  source 1..80: mol_type = other DNA
ctgtgctgactggtggagtgacgttgttcttcctatcaggaaggggtctaggaaaaacatccattggcctactctgcgtg

SEQ ID NO: 113114 - DNA, 80 bp, synthetic construct
  source 1..80: mol_type = other DNA
ctgcttcactcctagccccgtggtggtgggaacgaccgacaggtcgggcgtgcctacctacaactggggtgctaatgaca

SEQ ID NO: 113115 - DNA, 80 bp, synthetic construct
  source 1..80: mol_type = other DNA
gcgcggaggcgtggcctagcccggaagcaagtcgcggggctgatgacgtataaaaaagcggactttagacccggaaatgg

SEQ ID NO: 113116 - DNA, 80 bp, synthetic construct
  source 1..80: mol_type = other DNA
atcttagggccaatgtacttagtgcaggccgccctcactagcaccccttactttgtgcgcgcccatgctttgattcgtct

SEQ ID NO: 113117 - DNA, 80 bp, synthetic construct
  source 1..80: mol_type = other DNA
aagactgtacatccggccgcaggctggcgttgtgcttcagccactggggcgagaaacacggaccctggaggccccagcgg

SEQ ID NO: 113118 - DNA, 80 bp, synthetic construct
  source 1..80: mol_type = other DNA
tcccatccaagttccaaagcaagttgtaacccctggtttacaagacactcatccccagttaatttcatgacaagcataaa

SEQ ID NO: 113119 - DNA, 80 bp, synthetic construct
  source 1..80: mol_type = other DNA
cgttgatgataaccgcccagttagtcctcgtgtcaccacaacagcacgaattcacccaagactgcaactgctccatctac

SEQ ID NO: 113120 - DNA, 80 bp, synthetic construct
  source 1..80: mol_type = other DNA
cctttaaggtcatgagcggcgagatgccctccaccgaggacctggtcaacttgctccccgccatcctctctcctggcgcc

SEQ ID NO: 113121 - DNA, 80 bp, synthetic construct
  source 1..80: mol_type = other DNA
gacacaagtggtggacttcagcctagatcctactttcacaattgagacaaccacagtcccccaggatgcagtgtcccgaa

SEQ ID NO: 113122 - DNA, 80 bp, synthetic construct
  source 1..80: mol_type = other DNA
agcacaccatttggtgacgggaagctggtcgctcccgacgcaggccgtcgtaagaactttgtgagaccaaagcctcccag

SEQ ID NO: 113123 - DNA, 80 bp, synthetic construct
  source 1..80: mol_type = other DNA
gatggggatggtgttttgtattcttgtgctgtgcctggtacatcaaaggccgtgtggtccctgctaccacttatgggctc

SEQ ID NO: 113124 - DNA, 80 bp, synthetic construct
  source 1..80: mol_type = other DNA
gtcactctatgccgtcaccacagcattcctgacccctttgctaaaacatctgatcacttcggactacatcaacacctcac

SEQ ID NO: 113125 - DNA, 80 bp, synthetic construct
  source 1..80: mol_type = other DNA
ctgagcacttcatggggaagacatgggaagcacttgacaccatgtatgttgtggccaccgcagagaaaggtggaagagct

SEQ ID NO: 113126 - DNA, 80 bp, synthetic construct
  source 1..80: mol_type = other DNA
agcttatcaggccacagtttgcgcgagggcacttgcgcccccgcccagctgggacactatgtggaagtgcctgatccgcc

SEQ ID NO: 113127 - DNA, 80 bp, synthetic construct
  source 1..80: mol_type = other DNA
cccgaggagcggcctggaccctccgtcggaagaggagctggattaaatgaggtatccagcctatacccagagcttagcaa

SEQ ID NO: 113128 - DNA, 80 bp, synthetic construct
  source 1..80: mol_type = other DNA
tggacttcgtgccagtggagtctcttgagacgactatgaggtccccatctttctcagacaattccacccctccagccgtg

SEQ ID NO: 113129 - DNA, 80 bp, synthetic construct
  source 1..80: mol_type = other DNA
cgtcgggtgggagacttccactacattacggtggctacagaagatgagctcaagtgcccatgccaagtgccggctgctga

SEQ ID NO: 113130 - DNA, 80 bp, synthetic construct
  source 1..80: mol_type = other DNA
ttttcgcgaggtcgcagttcgaaaacgccgccgcgcagagcgcccccgtgcagggaaggtaagtggttagggccgtcggg

SEQ ID NO: 113131 - DNA, 80 bp, synthetic construct
  source 1..80: mol_type = other DNA
cggcgtgaggatacatcggtatgctccgccgtgcaaaccacttctcagggatgaggtcaccttctctgtgggtctcaaca

SEQ ID NO: 113132 - DNA, 80 bp, synthetic construct
  source 1..80: mol_type = other DNA
acacctgtggtgagaatgagaccgacgtgttcatcttaaacagcctgcggccgcccactggtgggtggttcgggtgcacc

SEQ ID NO: 113133 - DNA, 80 bp, synthetic construct
  source 1..80: mol_type = other DNA
tagaggacaatccatggatggaagacaaaactccagtcacaacttgggaagatgttccatacctagggaagagagaagat

SEQ ID NO: 113134 - DNA, 80 bp, synthetic construct
  source 1..80: mol_type = other DNA
aaaagccacccgtgaagctcagaaaaggacagctgctggaataatgaagaatccaacagtggatgggataatgacaatag

SEQ ID NO: 113135 - DNA, 80 bp, synthetic construct
  source 1..80: mol_type = other DNA
ggtggactcagtacttcatagcacatattgaggccaagctacatgtttggatccctcccctccgggtacgcgggtggcgt

SEQ ID NO: 113136 - DNA, 80 bp, synthetic construct
  source 1..80: mol_type = other DNA
acactgccagggaaccccgcggtggcttccatgatggcattcagtgccgccctcaccagtccgttgtcgaccagtaccac

SEQ ID NO: 113137 - DNA, 80 bp, synthetic construct
  source 1..80: mol_type = other DNA
ccatgtcgattggcgctagctgcctgcgacttgcgttcgcatggacatcatctacgccggaaaaaaaaagaggaatttct

SEQ ID NO: 113138 - DNA, 80 bp, synthetic construct
  source 1..80: mol_type = other DNA
tgattttccgcttgctaaacccttgccaacaaaagccaatgtataataatgtaaccaccgcggtgttactgcttgtattc

SEQ ID NO: 113139 - DNA, 80 bp, synthetic construct
  source 1..80: mol_type = other DNA
ggagtaccgccggcttggctaacctcttttcttctgggtctaagcagaatttacagctcatcaacagcaatgggagctgg

SEQ ID NO: 113140 - DNA, 80 bp, synthetic construct
  source 1..80: mol_type = other DNA
gatgattctgatgaagatgaaaacgaaaacgtggctcgtgcacaaacaatggtttttggatttacctctaccatggacag

SEQ ID NO: 113141 - DNA, 80 bp, synthetic construct
  source 1..80: mol_type = other DNA
tactgacatcgggaatggtcatctttttcatgtctcccaaaggcatcagtagaatgtctatggcgatgggcacaatggcc

SEQ ID NO: 113142 - DNA, 80 bp, synthetic construct
  source 1..80: mol_type = other DNA
ctctcaaaagcatcaaacaacagcatattgacacctgggaaaagactaggagatcttctgctctattccaacatcagtca

SEQ ID NO: 113143 - DNA, 80 bp, synthetic construct
  source 1..80: mol_type = other DNA
gttccgcaacggattactggcaggcgtacccatgttgaaagcattttggatttgattcaagaggaagaaagtgaacaaac

SEQ ID NO: 113144 - DNA, 80 bp, synthetic construct
  source 1..80: mol_type = other DNA
gcgacgcccacgggttggccgtggccgcgaaggcccgggacgggtcgctctggccgtggtcgtacatgagggcggtgaca

SEQ ID NO: 113145 - DNA, 80 bp, synthetic construct
  source 1..80: mol_type = other DNA
aacaagaataggggatggtttaacatttgataatggggtcatgaaagtaaacgttgccggtggaatgagaacttctggcg

SEQ ID NO: 113146 - DNA, 80 bp, synthetic construct
  source 1..80: mol_type = other DNA
ccctgttgacgctgagaaatactggagttcctgcagcctcatcagcatcactgcaggcacagaacgatagaggatgtgat

SEQ ID NO: 113147 - DNA, 80 bp, synthetic construct
  source 1..80: mol_type = other DNA
cagccagctgtccgctccatctctcagggcaacttgcaccaccaaccacgactcccctgacgccgagttaatagaagcta

SEQ ID NO: 113148 - DNA, 80 bp, synthetic construct
  source 1..80: mol_type = other DNA
aatgctttcagcctcaccagtctgttcaacctgggtccccaacaaaaactccagttgatcaacaccaacggcagttggca

SEQ ID NO: 113149 - DNA, 80 bp, synthetic construct
  source 1..80: mol_type = other DNA
tgagttcggcgatggtggcgcgcacctcgcgctcgaaatccccgggggcctcctcctcttcctcttcttccatgacgacc

SEQ ID NO: 113150 - DNA, 80 bp, synthetic construct
  source 1..80: mol_type = other DNA
cccaaccggtaggtggggagttaaacactccagatcggcagagcgtcgtgaagtgaacaagtgtagatagcgtggttggc

SEQ ID NO: 113151 - DNA, 80 bp, synthetic construct
  source 1..80: mol_type = other DNA
ccggaaaactccaccactccgctgaaacttacgccggggttgtggacttccgcgtacctgcgcaaatttgtaccccagga

SEQ ID NO: 113152 - DNA, 80 bp, synthetic construct
  source 1..80: mol_type = other DNA
acttggtatgaggttgtagtgacagatggttttccaaaatcaggggagatgaaaatcgaagatcagagtagacaaacaga

SEQ ID NO: 113153 - DNA, 80 bp, synthetic construct
  source 1..80: mol_type = other DNA
gtaagtacgtccaggtggcgctaattacccttggcaagtggacaggcacgtacatttatgaccatctatcccccatgtcg

SEQ ID NO: 113154 - DNA, 80 bp, synthetic construct
  source 1..80: mol_type = other DNA
catccttgccgggtacggcgcaggagttgcgggcgctttagtagcctttaaaattatgagtggtgaagtaccatccactg

SEQ ID NO: 113155 - DNA, 80 bp, synthetic construct
  source 1..80: mol_type = other DNA
ccccttcctgccctctccactggcctgattcatctccatcaaaacatagtagatgtccagtacatttacggcatcgggtc

SEQ ID NO: 113156 - DNA, 80 bp, synthetic construct
  source 1..80: mol_type = other DNA
tcaacaccaatggcagctggcacataaacaggactgctttgaactgcaatgattccctccagacggggttcttagcgtca

SEQ ID NO: 113157 - DNA, 80 bp, synthetic construct
  source 1..80: mol_type = other DNA
gatccgaagttctgggaattagtggatgaagaacgacggctgcatcagcagggcaggtgccgaacttgtgtgtacaacat

SEQ ID NO: 113158 - DNA, 80 bp, synthetic construct
  source 1..80: mol_type = other DNA
cagcagaacgtccagctggtcaagactaatgggagctggcacatcaataggacagcgctcaactgtaacgatagccttaa

SEQ ID NO: 113159 - DNA, 80 bp, synthetic construct
  source 1..80: mol_type = other DNA
gcaatcattgaaagactccacggcttaagcgcgttctcactccacagctactctccaggtgaaatcaatagggtggcggc

SEQ ID NO: 113160 - DNA, 80 bp, synthetic construct
  source 1..80: mol_type = other DNA
ggcggtccttcccccaaaaaaacagctggcggtgcgggaaggcgcgaggatccgggtggccgggagcgtggactaggtcc

SEQ ID NO: 113161 - DNA, 80 bp, synthetic construct
  source 1..80: mol_type = other DNA
ccagtgggaaggctggtgaccgtgaatccttatgtggcttcttcagcggcaaatgccatcgtcctgatcgaactcgaacc

SEQ ID NO: 113162 - DNA, 80 bp, synthetic construct
  source 1..80: mol_type = other DNA
gggtccaacggttgccattatgcgtggtttttttggggcgttggcatattggcccgaactaagaattgctataagtgaac

SEQ ID NO: 113163 - DNA, 80 bp, synthetic construct
  source 1..80: mol_type = other DNA
cccacttacacgtggtgggagaatgagacagatgtcttcctattgaacagcactcgaccaccgctggggtcatggttcgg

SEQ ID NO: 113164 - DNA, 80 bp, synthetic construct
  source 1..80: mol_type = other DNA
tagcaaacagtgccacgtggggttatcgacaaggacagtctgccaacactaacgtttctaatgccatagaatttatgcct

SEQ ID NO: 113165 - DNA, 80 bp, synthetic construct
  source 1..80: mol_type = other DNA
gaagcagtgacgacaacaaactggcatatttcctgttgaccctttgcagccttgctggactggttgccgcaaatgagatg

SEQ ID NO: 113166 - DNA, 80 bp, synthetic construct
  source 1..80: mol_type = other DNA
gtggccgtgttgacgtccatgctcactgatccctctcatataacagcggagacggctaggagaaggttagcgaggggatc

SEQ ID NO: 113167 - DNA, 80 bp, synthetic construct
  source 1..80: mol_type = other DNA
gtcaccttctcttgctcgggcctgctgatgacgcaaagggcaaaggttggaggctgcttgcccccataaccgcgtattgc

SEQ ID NO: 113168 - DNA, 80 bp, synthetic construct
  source 1..80: mol_type = other DNA
tctcggggccaaagctgcggatatcgccggtgtcgagctagcggcgtgctcactaccagtttgggaaacaccctgacctg

SEQ ID NO: 113169 - DNA, 80 bp, synthetic construct
  source 1..80: mol_type = other DNA
ctctcccgacgaactcaatcgggtggcatcatgcctcagaaaacttggggctcctcccttgagagcctggagacaccgag

SEQ ID NO: 113170 - DNA, 80 bp, synthetic construct
  source 1..80: mol_type = other DNA
tgcacaccggctttatcgcgtctctgttctacacccacagcttcaactcgtcaggatgtcccgaacgcatgtccgcctgc

SEQ ID NO: 113171 - DNA, 80 bp, synthetic construct
  source 1..80: mol_type = other DNA
attaagcgatgatcttggagtgtatcgcaatgacaaaatccacaaagcagtgagtgccagtcgccgcaaggagctgagcg

SEQ ID NO: 113172 - DNA, 80 bp, synthetic construct
  source 1..80: mol_type = other DNA
ccggtaaaaaccgggctatcaatatgctgaaacgcggcctaccccgcgtattcccactagtgggagtgaagagggtagta

SEQ ID NO: 113173 - DNA, 80 bp, synthetic construct
  source 1..80: mol_type = other DNA
cctgatcagaaacacagatttgaattgcaaattgattctaatcaagacaatgacaaaattccatcaaccactgtggcaat

SEQ ID NO: 113174 - DNA, 80 bp, synthetic construct
  source 1..80: mol_type = other DNA
caccccgcctgggagtgtcacggtaccgcaccccaatatagaggagattggtctctccaatgatggcgagatcccattct

SEQ ID NO: 113175 - DNA, 80 bp, synthetic construct
  source 1..80: mol_type = other DNA
tcgtactgagacagacatctatcagtcatgcaacctggaccccacggcgagaagagccataacatcactgacagaacgcc

SEQ ID NO: 113176 - DNA, 80 bp, synthetic construct
  source 1..80: mol_type = other DNA
cttcctggcttgcttctttggcagttttggagggctgtctacggggaccacgtcctcctcggaagacccggagcccaccc

SEQ ID NO: 113177 - DNA, 80 bp, synthetic construct
  source 1..80: mol_type = other DNA
gcttgggatatgatgatgaactggtcgccaactgctactatgattctatcatacctgatgcgcattcccgaggttgttct

SEQ ID NO: 113178 - DNA, 80 bp, synthetic construct
  source 1..80: mol_type = other DNA
tggggtcgctggggtccatggggtcgaaagcgtacttggcccggcatttgacctcgtaaaaggccaggtaggtcttggtg

SEQ ID NO: 113179 - DNA, 80 bp, synthetic construct
  source 1..80: mol_type = other DNA
ggctgggcaatatcatcatgtacgcgcccacgatctgggtacgcatggtactgatgacccacttcttcgggatcctgcag

SEQ ID NO: 113180 - DNA, 80 bp, synthetic construct
  source 1..80: mol_type = other DNA
ggtgaagtcaaatcatgcacgtggccggaaacacataccctgtggggtgacggggtccttgagagtgacctaataatacc

SEQ ID NO: 113181 - DNA, 80 bp, synthetic construct
  source 1..80: mol_type = other DNA
caccgagcggttatacgtaggtggccccatgcagaactctaagggccaatcctgcggctaccgccggtgccgggctagtg

SEQ ID NO: 113182 - DNA, 80 bp, synthetic construct
  source 1..80: mol_type = other DNA
accaggcggagacagcgggagccaggcttgtggtacttgccaccgccacgcccccgggctctgtcactgtgccgcatccc

SEQ ID NO: 113183 - DNA, 80 bp, synthetic construct
  source 1..80: mol_type = other DNA
tacctcaagtgccttcagcagcactgcaaatttaacttcgcttgcttcggttaatgaaaccgtcatcgcattgaaactgg

SEQ ID NO: 113184 - DNA, 80 bp, synthetic construct
  source 1..80: mol_type = other DNA
tcctgttgctggcccatcgcatcagccagctggcccacctggtttacgtcctgcattttgcgtgtctggtgtattttgcg

SEQ ID NO: 113185 - DNA, 80 bp, synthetic construct
  source 1..80: mol_type = other DNA
ccttaaggtctcttttgtgtggtgcgttccggtatggggggggctgccgccaggttggtggccgtgattttgtttgtcgt

SEQ ID NO: 113186 - DNA, 80 bp, synthetic construct
  source 1..80: mol_type = other DNA
cgtcaatgactggattctcgaaagactcgcgggaaagaaaacaccacgactgtgcacgcgagaagaattcatcgcaaagg

SEQ ID NO: 113187 - DNA, 80 bp, synthetic construct
  source 1..80: mol_type = other DNA
gatgagcttgccgcaaaattgaccagcatgggcatcaatgcagtagcttattaccgaggccttgacgtttccgttattcc

SEQ ID NO: 113188 - DNA, 80 bp, synthetic construct
  source 1..80: mol_type = other DNA
ggatgtagaagcctatgagaacagtaagaaagaacaagaagccaaaatcagcgaccctgtaagggtgggtaatgccgaag

SEQ ID NO: 113189 - DNA, 80 bp, synthetic construct
  source 1..80: mol_type = other DNA
acgaatggcagtcagtggagatgattgcgttgtgaagccaattgatgataggtttgcacatgccctcaggttcttgaatg

SEQ ID NO: 113190 - DNA, 80 bp, synthetic construct
  source 1..80: mol_type = other DNA
cggtcgcaacctcgtgggaggcgccaacctattcccaaggagcgccgacccgagggcaggtcctgggcgcagcccgggta

SEQ ID NO: 113191 - DNA, 80 bp, synthetic construct
  source 1..80: mol_type = other DNA
catacaagtcacttctcatatgcgcgctatggtggatccaatatttcatcgcgcgtgttgaggctctccttcacatctgg

SEQ ID NO: 113192 - DNA, 80 bp, synthetic construct
  source 1..80: mol_type = other DNA
tgtgctctgcgatgtacgtgggtgatgtttgtggagccctctttatcattgcccaggctttcgtctggaagcctggaggg

SEQ ID NO: 113193 - DNA, 80 bp, synthetic construct
  source 1..80: mol_type = other DNA
gtttcgctcacatatatacacaagccctaaactgacgtaatgggagtaaagtgtaaaaaatcccgccaagcccaacacac

SEQ ID NO: 113194 - DNA, 80 bp, synthetic construct
  source 1..80: mol_type = other DNA
ccagtggctttaactgtaaaatttaacagtgaaaatgattgtgcttattccattacatttgactttgtttggagcaagac

SEQ ID NO: 113195 - DNA, 80 bp, synthetic construct
  source 1..80: mol_type = other DNA
tctggagccaacgccaccgacttctttttgctcaacaacacaagaccaccgctgggcaactggtttggatgctcgtggat

SEQ ID NO: 113196 - DNA, 80 bp, synthetic construct
  source 1..80: mol_type = other DNA
cacggcgccggctcaaagaccctagctggcccaaaaggcccaatcattcaaatgtacaccaatgtagaccaggacctcgt

SEQ ID NO: 113197 - DNA, 80 bp, synthetic construct
  source 1..80: mol_type = other DNA
ctctctcatgagggtgccctactttgttcgggcgcgtattctgatacgggcgtgcatgctggcaaggagccttacccacg

SEQ ID NO: 113198 - DNA, 80 bp, synthetic construct
  source 1..80: mol_type = other DNA
ggatgctgcgcgccagctcgtccagcggcttgcgttctatcagcccttggttggcggcgtccgtcaggacggagagccag

SEQ ID NO: 113199 - DNA, 80 bp, synthetic construct
  source 1..80: mol_type = other DNA
tcacctggggcgctggtagtgggggtggtctgtgccgcagtcctgagacggcatgtaggccctagcgaaggtgctgccca

SEQ ID NO: 113200 - DNA, 80 bp, synthetic construct
  source 1..80: mol_type = other DNA
tggcagccgtcgccgcatattgcctggcgactggatgcgtttccatcatcggccgcttgcacgtcaaccagcgagtcgtc

SEQ ID NO: 113201 - DNA, 80 bp, synthetic construct
  source 1..80: mol_type = other DNA
aaaagactactcccatgaaaccatgctatggctcctatgccagacctaccaattctaacggaggtcagggcgttatggtt

SEQ ID NO: 113202 - DNA, 80 bp, synthetic construct
  source 1..80: mol_type = other DNA
actcctggacgggggccctcataacaccatgtgggcccgaggaggagaagttgccaatcaaccctctgagtaattcgctt

SEQ ID NO: 113203 - DNA, 80 bp, synthetic construct
  source 1..80: mol_type = other DNA
cagggggtagggaacgttggtggcggcgtagatgcgcttctccagggcctccagaaagaccagcttctcgccgatggaca

SEQ ID NO: 113204 - DNA, 80 bp, synthetic construct
  source 1..80: mol_type = other DNA
cagcaacacgtggcatggatcatttcccataaacgccttcaccacgggcccctgcacacccgcccccgcgccgaactact

SEQ ID NO: 113205 - DNA, 80 bp, synthetic construct
  source 1..80: mol_type = other DNA
tttggatttggatcaagcaagtgtcttgctgtctttatttaggggttttgcgcgcgcggtaggcccgggaccagcggtct

SEQ ID NO: 113206 - DNA, 80 bp, synthetic construct
  source 1..80: mol_type = other DNA
gacaacaatgaagtagaagttgtaacaaaacttggtgaaagaaagatccttagaccacgctgggctgacgcgagggtgta

SEQ ID NO: 113207 - DNA, 80 bp, synthetic construct
  source 1..80: mol_type = other DNA
acgtatgtggtgtgaccggaacagagaacgtcacaccgtcagcagcagcggcggcaaccgcctccccaatccaggtcctg

SEQ ID NO: 113208 - DNA, 80 bp, synthetic construct
  source 1..80: mol_type = other DNA
ggttaggtttttgttgagggaggaaagtactactgaacagacagaggctacctcaagtgccttcagcagcactgcaaatt

SEQ ID NO: 113209 - DNA, 80 bp, synthetic construct
  source 1..80: mol_type = other DNA
gtcttgttagactcctccagcatgggcccaatcagaggattcagcttatatacaccaatggtagctggcatgtcaaccgc

SEQ ID NO: 113210 - DNA, 80 bp, synthetic construct
  source 1..80: mol_type = other DNA
actcaacgacctaactcccgttgggagactggtgacagtgaatccctttgttgctgcagctactgctaattcaaaggttc

SEQ ID NO: 113211 - DNA, 80 bp, synthetic construct
  source 1..80: mol_type = other DNA
aaaaattcaccatttccccccataaataccccgattatattttatttgatttagaatttggaacttatttacaccccctt

SEQ ID NO: 113212 - DNA, 80 bp, synthetic construct
  source 1..80: mol_type = other DNA
atgaccagatactccgccccacctggcgatcccccacaaccggaatacgacttggagaagataacatcttgctcctccaa

SEQ ID NO: 113213 - DNA, 80 bp, synthetic construct
  source 1..80: mol_type = other DNA
gcggctatcgcagatgccgcgcaagcggcgttctgacaaccagctgtggtaataccctcacatgctacctaaaagctagc

SEQ ID NO: 113214 - DNA, 80 bp, synthetic construct
  source 1..80: mol_type = other DNA
tctcagtttatcatggataacaaccacccacacccccagggcacccaaggggccgtgcgggagtttctccgcggtcaggc

SEQ ID NO: 113215 - DNA, 80 bp, synthetic construct
  source 1..80: mol_type = other DNA
gaatcacccgacacgcttgcacaggctcttagagaggcatttgaaagaggcgtctgtggggtcgtgccccaaaacagact

SEQ ID NO: 113216 - DNA, 80 bp, synthetic construct
  source 1..80: mol_type = other DNA
ggccaccgtatggcgtgggacatgatgatgaactggtccccgactaccaccctgattgtgtcctacgctctcagggtgcc

SEQ ID NO: 113217 - DNA, 80 bp, synthetic construct
  source 1..80: mol_type = other DNA
agaggagaggcaggaccggcagagggaagcacggggtgtatcgatacgtctcgttaggggaacgaccgtcggtgttattc

SEQ ID NO: 113218 - DNA, 80 bp, synthetic construct
  source 1..80: mol_type = other DNA
agagaagaccatcttgaccttaggggaatatggagacgtctcactgctatgtagggtagccagtggcgtcgacttggctc

SEQ ID NO: 113219 - DNA, 80 bp, synthetic construct
  source 1..80: mol_type = other DNA
gcatggggaacaccattacgtgctatgtgaaagccctggcggcttgcaaagctgcggggatagttgcgcccacaatgctg

SEQ ID NO: 113220 - DNA, 80 bp, synthetic construct
  source 1..80: mol_type = other DNA
ggctttttgaagtgcatcacctgaccgggcagatagttcaccggggtgagaaaaaagagcaacaactgatttaggcaatt

SEQ ID NO: 113221 - DNA, 80 bp, synthetic construct
  source 1..80: mol_type = other DNA
ccctcaagggtcacgctccctgacgccgtgcacatgtggctcctcggacctgtatttggtcacgaggcacgccgatgtta

SEQ ID NO: 113222 - DNA, 80 bp, synthetic construct
  source 1..80: mol_type = other DNA
caactgtgaaggcgcgggtcctctccactgaggaggcctgcgctctgacgccccctcattcagccagatcaaaatttggc

SEQ ID NO: 113223 - DNA, 80 bp, synthetic construct
  source 1..80: mol_type = other DNA
gcctagtagactacccatacaggctttggcactacccctgcactctcaatttttccatctttaaggttaggatgtatgtg

SEQ ID NO: 113224 - DNA, 80 bp, synthetic construct
  source 1..80: mol_type = other DNA
aggaagaccccggcagttgcgggggcgccccccctcgagaggacggtgggagcgacgagggcgacgtgtgcgccgtgtgc

SEQ ID NO: 113225 - DNA, 80 bp, synthetic construct
  source 1..80: mol_type = other DNA
gcctgacgggggtgtttgacatgaatgtggaagtgtggaagattctaagatatgatgaatacaagaccaggtgtcgagcc

SEQ ID NO: 113226 - DNA, 80 bp, synthetic construct
  source 1..80: mol_type = other DNA
ccttaccgccagagaacgcgcgaagatggccaccccctcgatgatgccgcagtgggcgtacatgcacatcgccgggcagg

SEQ ID NO: 113227 - DNA, 80 bp, synthetic construct
  source 1..80: mol_type = other DNA
acgggaacagagaaacgcgaccgctccaacaagggtgcgtggtgggcctcgtccccacgcagacccgcgggcaaatgcga

SEQ ID NO: 113228 - DNA, 80 bp, synthetic construct
  source 1..80: mol_type = other DNA
cgtggcgctgcttgttctccgacgccatcgccgatgcggggcgatcctccggggatacggctgcgacggcggacgtagca

SEQ ID NO: 113229 - DNA, 80 bp, synthetic construct
  source 1..80: mol_type = other DNA
gcccgccatgaaaaagggaagagcctgatattcaagacagagaatggggtgaacatgtgcacattaatggctatggacct

SEQ ID NO: 113230 - DNA, 80 bp, synthetic construct
  source 1..80: mol_type = other DNA
aaaggtactaaaagaactcagtatgaggttatagttttagatcgatttccaaattctggtcagatgaaaattgaagaaca

SEQ ID NO: 113231 - DNA, 80 bp, synthetic construct
  source 1..80: mol_type = other DNA
ctccggtccgcggtggtgcagtaacatctggcatggcacgttccctatcaatgctacgacgactggtccaagcgtgccta

SEQ ID NO: 113232 - DNA, 80 bp, synthetic construct
  source 1..80: mol_type = other DNA
cgtacgtgcctgcgcagaacctgttcagggaccgcagcggggaggagcccgaggagatgcgcgactgccggtttcgggcg

SEQ ID NO: 113233 - DNA, 80 bp, synthetic construct
  source 1..80: mol_type = other DNA
cagaactggggtaaggaccatcaccacgggcgcccccatcacgtattccacctacggcaagttccttgctgacggtggtt

SEQ ID NO: 113234 - DNA, 80 bp, synthetic construct
  source 1..80: mol_type = other DNA
tcacagtctcccctaaaacccccgggaaaattttgggaggcccctaggcccctctttttcccaccctatctattgcctaa

SEQ ID NO: 113235 - DNA, 80 bp, synthetic construct
  source 1..80: mol_type = other DNA
agcaaactctcctttttaacatcttaggaggctgggtagcatcgcagatcgcgacccccacagcgtccacggctttcgtc

SEQ ID NO: 113236 - DNA, 80 bp, synthetic construct
  source 1..80: mol_type = other DNA
aaaatgggttactttcggccaccgttcccactgtttctcctccccttacaaacagtaacaactccttgggtttagccaca

SEQ ID NO: 113237 - DNA, 80 bp, synthetic construct
  source 1..80: mol_type = other DNA
ggttgagatgagtcctctgttgttttcgactacggagttgtccatcttaccctgttcttttacaactatgcctgcactat

SEQ ID NO: 113238 - DNA, 80 bp, synthetic construct
  source 1..80: mol_type = other DNA
ttcccgaaaggcgggcaggaggcggccggccgcctccgaggccacggccggccatgcccgcggtggcaggacgaccctgg

SEQ ID NO: 113239 - DNA, 80 bp, synthetic construct
  source 1..80: mol_type = other DNA
cacataactggacaccgtatggcgtgggacatgatgatgaactggtcgcctacggttaccatgatcctgggttacctgat

SEQ ID NO: 113240 - DNA, 80 bp, synthetic construct
  source 1..80: mol_type = other DNA
aattcccagtaattctacaaatggaagatcccgggatattgggcaaccaaccgcccataacacagcaaaacccaacacga

SEQ ID NO: 113241 - DNA, 80 bp, synthetic construct
  source 1..80: mol_type = other DNA
ctggagcgcgctgtccgacatggcgaccggcgtgcgcgctcggcgacgcggcgcggagaccgcgggcccaaacgggaatg

SEQ ID NO: 113242 - DNA, 80 bp, synthetic construct
  source 1..80: mol_type = other DNA
ttaagcagaaagtcctcgggctgctccaggccacgaccaagcaagccgaagagcttaagccaacagttcaatcggcttgg

SEQ ID NO: 113243 - DNA, 80 bp, synthetic construct
  source 1..80: mol_type = other DNA
aaggatcgaggccgtcctacacgtgtatgttccatcattcgatgtgcgcggcccccgagattctatcattatcctcatgg

SEQ ID NO: 113244 - DNA, 80 bp, synthetic construct
  source 1..80: mol_type = other DNA
ataaccctgttgctggggcaaaaaggcccgacgtcccagcaaatgcacatatatatgttgatcagccattgccccgtctt

SEQ ID NO: 113245 - DNA, 80 bp, synthetic construct
  source 1..80: mol_type = other DNA
gcaccccgccgtcggtacggaagcagcagtggagaaaaaagtgccggtggatgtcgtttatggtgagggcaaagcgtgcg

SEQ ID NO: 113246 - DNA, 80 bp, synthetic construct
  source 1..80: mol_type = other DNA
gggaaggaggtaaaaatagtcgccattttggatggtatggtccagatgctggggggccatcagcaggattccggcgtgca

SEQ ID NO: 113247 - DNA, 80 bp, synthetic construct
  source 1..80: mol_type = other DNA
ggggctggcagcaagaccatcagcggccccaagggaccagtcaatcaaatgtacaccaatgttgaccaagacctggtgtg

SEQ ID NO: 113248 - DNA, 80 bp, synthetic construct
  source 1..80: mol_type = other DNA
agatggaagacaaagcttggctggtgcacaggcaatggttcctagacctgccattaccatggctgcctggagcggacaca

SEQ ID NO: 113249 - DNA, 80 bp, synthetic construct
  source 1..80: mol_type = other DNA
agacatggtcatgtatgctgagaatatgaatctggagacgccagatacacatgtggtgtacaaacctggaacttcagatg

SEQ ID NO: 113250 - DNA, 80 bp, synthetic construct
  source 1..80: mol_type = other DNA
ctatgaccatctgacaccgttgcgggactgggccgccagcggccttaaggacctggcggtggctgtagagccggtagtgt

SEQ ID NO: 113251 - DNA, 80 bp, synthetic construct
  source 1..80: mol_type = other DNA
cccctggccctacttgtcctcttgctccctcagcgtgcttacgcttggacgggagaggacgacgccaccctcggggccgg

SEQ ID NO: 113252 - DNA, 80 bp, synthetic construct
  source 1..80: mol_type = other DNA
acagaactgccctaaactgcaatgagtccataaacaccgggttcatggctgggttgttctatttccacaagttcaactcc

SEQ ID NO: 113253 - DNA, 80 bp, synthetic construct
  source 1..80: mol_type = other DNA
actatcacccccatgtacaaggagctgttgacctgcttcatttggtggaaccagtatttccttgctctagctgaggccat

SEQ ID NO: 113254 - DNA, 80 bp, synthetic construct
  source 1..80: mol_type = other DNA
ataacggcgacaggagttttgccagcctcgggttgaacgcgtccgcgaaacctcgacgtacgttatcaatatcctttttg

SEQ ID NO: 113255 - DNA, 80 bp, synthetic construct
  source 1..80: mol_type = other DNA
tcgctcgtcacatccatttcaatcacgtgctccttatttatcataatgcttccgtgtagacacttaagctcgccttcgat

SEQ ID NO: 113256 - DNA, 80 bp, synthetic construct
  source 1..80: mol_type = other DNA
cgtggctctcggcctagctggggccccacagacccccggcgcaggtcgcgcaatttgggtaaggtcatcgataccctcac

SEQ ID NO: 113257 - DNA, 80 bp, synthetic construct
  source 1..80: mol_type = other DNA
tagtgctcctttttctgctgttggcagacgccagggtctgtgcctgcctatggatgcttatcctgttgggtcaggctgaa

SEQ ID NO: 113258 - DNA, 80 bp, synthetic construct
  source 1..80: mol_type = other DNA
gggccagctgatgggctgcaggaccaaggatggcggttgctcgcgcccattacagcctatgcccagcagactcgtggtct

SEQ ID NO: 113259 - DNA, 80 bp, synthetic construct
  source 1..80: mol_type = other DNA
tccctattatctcctccagaacgccctgttgtgcgtaccatactacgtgcgcgcgcatgcgttgctccggttatgcatgc

SEQ ID NO: 113260 - DNA, 80 bp, synthetic construct
  source 1..80: mol_type = other DNA
gggctaaggtggctgctgtcctcgttctgtttgccggagtggatgctactacccatgttactggcgctgccgcaggttcc

SEQ ID NO: 113261 - DNA, 80 bp, synthetic construct
  source 1..80: mol_type = other DNA
tcaccaacgactgccctaattccagcatagtttatgagactgagaatcacatcttacacctcccaggatgcgtgccctgt

SEQ ID NO: 113262 - DNA, 80 bp, synthetic construct
  source 1..80: mol_type = other DNA
cgttagagctgtcgaggacgggattaattatgcaacagggaaccttcctggttgctctttctctatcttcctcttggcac

SEQ ID NO: 113263 - DNA, 80 bp, synthetic construct
  source 1..80: mol_type = other DNA
gaggtaacctcgtactcctaggccccgctgatgatatgaagagtggaggttggcacctccttgctccgatcacagcatat

SEQ ID NO: 113264 - DNA, 80 bp, synthetic construct
  source 1..80: mol_type = other DNA
tgcaggacctcgggccccaggcgcgggagaaacagacaacggcgcgccgaaaatccgggcatggcgtactccccgatgac

SEQ ID NO: 113265 - DNA, 80 bp, synthetic construct
  source 1..80: mol_type = other DNA
gctcatggcgggctcacaaaagtaatattgtagcctgcttgcagcactgcgggtggaatatctcatttgcaaggcggtat

SEQ ID NO: 113266 - DNA, 80 bp, synthetic construct
  source 1..80: mol_type = other DNA
ccgatgcgcataccaccaccataggaggtcagaccgcccatagtgcctacgggcttgtcagtctctttacgcggggtgct

SEQ ID NO: 113267 - DNA, 80 bp, synthetic construct
  source 1..80: mol_type = other DNA
cccaggcgagggtgctgtgcagtggatgaaccgcttaatcgctttcgcctctcgggggaaccacgtttccccgacgcact

SEQ ID NO: 113268 - DNA, 80 bp, synthetic construct
  source 1..80: mol_type = other DNA
tctggaggcagagtactaaaaaagactactcccatgaaaccatgctacggatcgtatgccagacctacaaataaaaatgg

SEQ ID NO: 113269 - DNA, 80 bp, synthetic construct
  source 1..80: mol_type = other DNA
gggcatggcaccgtggtcttagagttgcaatacaccggaaccgatggtccttgtaaggtgcctgtctcttccgtggcttc

SEQ ID NO: 113270 - DNA, 80 bp, synthetic construct
  source 1..80: mol_type = other DNA
agtcagtggattacaaaacaaactaatgctggaaacgaaactacaaaaactcacacatacggtgtcgctgccatgggagg

SEQ ID NO: 113271 - DNA, 80 bp, synthetic construct
  source 1..80: mol_type = other DNA
accctatcatcggaacggcggccgccgtgctggaaaacctcgccacgcgcctgcgcccctttctgcagtgctacctgaag

SEQ ID NO: 113272 - DNA, 80 bp, synthetic construct
  source 1..80: mol_type = other DNA
agtacatcgtaaaaacgagtgtggcaacgttgtcccaaacgaaaacacttggcccgaattcgactagcggacatatttga

SEQ ID NO: 113273 - DNA, 80 bp, synthetic construct
  source 1..80: mol_type = other DNA
atggcattgagggaacaaaaactcccgtctctccaggagaaatgaggctaagagatgatcagagaagggtctttagagag

SEQ ID NO: 113274 - DNA, 80 bp, synthetic construct
  source 1..80: mol_type = other DNA
cagggacatgaactgtcttacactttgccttcgcaaaaacaaaccttctgcaccatgatgggctctacctccatcacaat

SEQ ID NO: 113275 - DNA, 80 bp, synthetic construct
  source 1..80: mol_type = other DNA
atgaatacttcggggtttgttaagacatgcggcgctccgccgtgcaacatcaggcccaaccccgaggagaacaggaccga

SEQ ID NO: 113276 - DNA, 80 bp, synthetic construct
  source 1..80: mol_type = other DNA
ggtgggcgcagccgcactctgctcagccatgtacgtcggagacttgtgcggtggcgcattcctggttggccagatgttca

SEQ ID NO: 113277 - DNA, 80 bp, synthetic construct
  source 1..80: mol_type = other DNA
gagagccaaggagctgaggaggatgagcgaaatctgagagtcttcacggaggccatgaccagatattccgctccccccgg

SEQ ID NO: 113278 - DNA, 80 bp, synthetic construct
  source 1..80: mol_type = other DNA
gcaagctgcctgaagcggttatggggtcagcttatggcttccaatactctcccaaggcacgcgtggattacctcctcaaa

SEQ ID NO: 113279 - DNA, 80 bp, synthetic construct
  source 1..80: mol_type = other DNA
tggaattttaagaggagattaccatgcccaatacattttcatctcgccaccttatcacatatgtctctggagcagttttt

SEQ ID NO: 113280 - DNA, 80 bp, synthetic construct
  source 1..80: mol_type = other DNA
acgcttggagccagcccgccctcacagggcgtgcccgcctcgggtgcgggactggccaatcggcggccgccagcgcggcg

SEQ ID NO: 113281 - DNA, 80 bp, synthetic construct
  source 1..80: mol_type = other DNA
ctcatggcaaatgcgatttgctcagcagtgccagtagattgggtgcccacaggcaggacatcctggtcaatacactcgaa

SEQ ID NO: 113282 - DNA, 80 bp, synthetic construct
  source 1..80: mol_type = other DNA
accgtccctcaggatgcggtatcgcggagccaacgacgaggccgcacggggcgaggtaaaccaggggtgtacagatttgt

SEQ ID NO: 113283 - DNA, 80 bp, synthetic construct
  source 1..80: mol_type = other DNA
tccggtctacccgggaaacgcagccccgggcccccaccccgtcggccccaagcccaaatgcaatgctacggcgctcggtg

SEQ ID NO: 113284 - DNA, 80 bp, synthetic construct
  source 1..80: mol_type = other DNA
gcaaaatattacacttattaatgttaatgctacatttgaagctgattactatggctcgaacaataagagtgaatcaaaac

SEQ ID NO: 113285 - DNA, 80 bp, synthetic construct
  source 1..80: mol_type = other DNA
ttagaaataattacttaataaaaattacttacttgaaatctaaaagtatgtctctggtgtagttgtttagcaatacctcg

SEQ ID NO: 113286 - DNA, 80 bp, synthetic construct
  source 1..80: mol_type = other DNA
gtgggtcctagccgggggagtccttgcagccgtcgccgcgtactgcttggcgaccgggtgtgtttccatcatcggccgtt

SEQ ID NO: 113287 - DNA, 80 bp, synthetic construct
  source 1..80: mol_type = other DNA
cctagagggagacggcaacgtatccccaaggctgcctcctcacagggtaaagcttggggtaaaccaggctacccctggcc

SEQ ID NO: 113288 - DNA, 80 bp, synthetic construct
  source 1..80: mol_type = other DNA
cggtttgttgggaacgatagtcaccagcctcaccggacgggacaagaatgaggttgaaggcgaggtgcaagtaatttcca

SEQ ID NO: 113289 - DNA, 80 bp, synthetic construct
  source 1..80: mol_type = other DNA
agacccctgatggggaaataggggctgtcaccctcgactacccaactggaacctctggctcacctatcgttgacaaaaat

SEQ ID NO: 113290 - DNA, 80 bp, synthetic construct
  source 1..80: mol_type = other DNA
ccctgcaggtgaacaccttcaccagtttgtttaccttcggacctcagcagaagcttcaactaatcaataccaatggcagt

SEQ ID NO: 113291 - DNA, 80 bp, synthetic construct
  source 1..80: mol_type = other DNA
tcatgggttattaaatgggagtacatagtgctcgccttcttgttgctggccgatgcgcgcatttgcgcgtgtctttggct

SEQ ID NO: 113292 - DNA, 80 bp, synthetic construct
  source 1..80: mol_type = other DNA
cgttggcgttccgtcacaaacgcaaaatataaccactctcgcaggcttaatagaatgtactcagcttcaggtgtgatttt

SEQ ID NO: 113293 - DNA, 80 bp, synthetic construct
  source 1..80: mol_type = other DNA
tatgtgcccatagacaaggaggttaaaatagatagcttttacatgcgcatggcgctaaaggtgttaacgctgagtgacga

SEQ ID NO: 113294 - DNA, 80 bp, synthetic construct
  source 1..80: mol_type = other DNA
gtggcggactacgaccgcgtgtatatttactacaaccaccgccggggcgactggctcgtgcgagaccccatcagcgggca

SEQ ID NO: 113295 - DNA, 80 bp, synthetic construct
  source 1..80: mol_type = other DNA
tctcagcaccatcgctgaaagcgacatgcacgacgcatggcgcgcaccccgatgcagacctgatagaggcagacctgctg

SEQ ID NO: 113296 - DNA, 80 bp, synthetic construct
  source 1..80: mol_type = other DNA
tgttgggcgctatagtggtgagtatgacgggacgcgacaaaacggagtacgctggggaggtgcaagtgctgtccagcgtc

SEQ ID NO: 113297 - DNA, 80 bp, synthetic construct
  source 1..80: mol_type = other DNA
aattttcctggcgtttgtacgccagtcaatctgcacacccggacgtgtttgcggctttaaaattcacctggaccgaacgt

SEQ ID NO: 113298 - DNA, 80 bp, synthetic construct
  source 1..80: mol_type = other DNA
ccgcgtgggccgcctcttccgccgccggggccgcgtcctcctccgcttccgcctcctcgggcgtggccgtcggtgccctg

SEQ ID NO: 113299 - DNA, 80 bp, synthetic construct
  source 1..80: mol_type = other DNA
cggcgacgtcggaatcgccgctgcgtgccgacagtaacgccagaagctcgatgccttcggacggacacgcgcgagcgtac

SEQ ID NO: 113300 - DNA, 80 bp, synthetic construct
  source 1..80: mol_type = other DNA
ccatgctggtgtgcggcgatgatctggtggtgatttgcgaaagcgcgggcgtgcaggaagatgcggcgagcctgcgtgcg

SEQ ID NO: 113301 - DNA, 80 bp, synthetic construct
  source 1..80: mol_type = other DNA
taaccatgactaaaaaaccaggagggcccggtaaaaaccgggctatcaatatgctgaaacgcggcctaccccgcgtattc

SEQ ID NO: 113302 - DNA, 80 bp, synthetic construct
  source 1..80: mol_type = other DNA
tggtgtccgagtctgtgaaaaaatggccctatatgacatcacacaaaagctccctatcgccgtaatgggggcttcttatg

SEQ ID NO: 113303 - DNA, 80 bp, synthetic construct
  source 1..80: mol_type = other DNA
tggtggacctcgaactgtacgcgcccctcgttcatgtaggccagctccggaaacttggtacacacgcacgccaccgacaa

SEQ ID NO: 113304 - DNA, 80 bp, synthetic construct
  source 1..80: mol_type = other DNA
gcgataacaggaggagtttactatccccccggcccatctcatacctaaaaggatcttcgggaggccctctgctctgcccc

SEQ ID NO: 113305 - DNA, 80 bp, synthetic construct
  source 1..80: mol_type = other DNA
gacggtcccgccatacgtatccagcctgacccgttggtgatacggacagggtcgggccaggcccatggtctccgtgaaaa

SEQ ID NO: 113306 - DNA, 80 bp, synthetic construct
  source 1..80: mol_type = other DNA
gtcgaggctgctctagccgacctgatcaccctcaatgccatctcagctgcgggcacccatggtttccactacgcactcat

SEQ ID NO: 113307 - DNA, 80 bp, synthetic construct
  source 1..80: mol_type = other DNA
tggtacaaacgctggctggcgcgaatactgtggtggttgcagtactttatagctagggccgaggccatgctacatgtata

SEQ ID NO: 113308 - DNA, 80 bp, synthetic construct
  source 1..80: mol_type = other DNA
gtatccgtagcccacgatgacagaggacagagatactactacctcacaagagacccgaccacaccactatcccgggccgc

SEQ ID NO: 113309 - DNA, 80 bp, synthetic construct
  source 1..80: mol_type = other DNA
tccatttgagactccccactagaaaaagaatccaattccctttgatccatgctcttgaaatcccgttttcctggacgacg

SEQ ID NO: 113310 - DNA, 80 bp, synthetic construct
  source 1..80: mol_type = other DNA
cactcgcatgttcttgaaagtaagggagggcaacaccactgaatgtgattcaaagatcataggtaccgccgtcaagaata

SEQ ID NO: 113311 - DNA, 80 bp, synthetic construct
  source 1..80: mol_type = other DNA
aacggcatcaaggtgaacttcaagatccgccacaacatcgaggacggcagcgtgcagctcgccgaccactaccagcataa

SEQ ID NO: 113312 - DNA, 80 bp, synthetic construct
  source 1..80: mol_type = other DNA
tccgcgctaggcttctgtccagaggaggcagggctgccatatgtggcaagtacctcttcaactgggcagtaagaacaaag

SEQ ID NO: 113313 - DNA, 80 bp, synthetic construct
  source 1..80: mol_type = other DNA
gaagtggatagaaccttagcaaaagaaggcatcaaaagaggagaaacggaccaccacgctgtgtcgcgaggctcagcaaa

SEQ ID NO: 113314 - DNA, 80 bp, synthetic construct
  source 1..80: mol_type = other DNA
cggagattccgacggggagccgatttacgacgaggtggcggacgaccaaaccgacgtattgtacgccaagatacaacacc

SEQ ID NO: 113315 - DNA, 80 bp, synthetic construct
  source 1..80: mol_type = other DNA
cttctttcgtgcctgaccgtgccagcctcggcagtcaattatgccaataagagcggcatttaccatctcaccaatgactg

SEQ ID NO: 113316 - DNA, 80 bp, synthetic construct
  source 1..80: mol_type = other DNA
agggctaagcgtgggactggcaagcgtaagggaaaactttaatgctccaaagctagcacccaaaaactgcatgctggaat

SEQ ID NO: 113317 - DNA, 80 bp, synthetic construct
  source 1..80: mol_type = other DNA
ccgaggctctcgcccttcttggggccccacagacccccggcatagatcacgcaatctgggcaaggtcatcgataccctta

SEQ ID NO: 113318 - DNA, 80 bp, synthetic construct
  source 1..80: mol_type = other DNA
agttctgggccaagcacatgtggaacttcatcagcggtatccaatatcttgctggactctccacactgccgggaaatcct

SEQ ID NO: 113319 - DNA, 80 bp, synthetic construct
  source 1..80: mol_type = other DNA
gctttcacggaagctatgaccaggtactctgctccccccggcgagcagccgcaggctacctacgacctggagctcatttc

SEQ ID NO: 113320 - DNA, 80 bp, synthetic construct
  source 1..80: mol_type = other DNA
aaaaaacagaccagcggccggccggcgcttaggtggaggatgtcgccgacgccccttggccgccccggctgcagggtggc

SEQ ID NO: 113321 - DNA, 80 bp, synthetic construct
  source 1..80: mol_type = other DNA
ggccaactgttcgccatcaggcctcggcagcatgagaccgtccaggaatgcaactgttccatctatgtgggccgcatcac

SEQ ID NO: 113322 - DNA, 80 bp, synthetic construct
  source 1..80: mol_type = other DNA
ccaactgatcatcgacgtctttgtcggcggccactggggcgtgctcgctggcttgctgtattacagcatggttgccaact

SEQ ID NO: 113323 - DNA, 80 bp, synthetic construct
  source 1..80: mol_type = other DNA
ccaaggacggcaaggaatcggtgccggtgtcgccgctcaccgaagcagactacctgggaggggaggacgacgtgcttcta

SEQ ID NO: 113324 - DNA, 80 bp, synthetic construct
  source 1..80: mol_type = other DNA
tgtcaggaaaatatcaatacatagaccacgctacaaatccaactcttaaatcatttaaaataaaacttctttttgataat

SEQ ID NO: 113325 - DNA, 80 bp, synthetic construct
  source 1..80: mol_type = other DNA
taatgtcggcggtgaggtcggcaccctcgtggttttcgtcaaacgccaggtgggcggccgcgcgggccacggcgtccacg

SEQ ID NO: 113326 - DNA, 80 bp, synthetic construct
  source 1..80: mol_type = other DNA
gccgccgccgcaccgccacccgccgccgtctggcccccgcccgcgtgcgccgcgtgaccacgcgccggggccgctcgctc

SEQ ID NO: 113327 - DNA, 80 bp, synthetic construct
  source 1..80: mol_type = other DNA
gaacatcaccagagtggagtcggagaacaagatcgtcgtcctggactctttcgacccgctcgtggcggaggaggatgatc

SEQ ID NO: 113328 - DNA, 80 bp, synthetic construct
  source 1..80: mol_type = other DNA
aagaccagcaaaaaatggaaccgtgatggatgttatatccagacgtgatcagagaggaagtggacaggtcggaacttatg

SEQ ID NO: 113329 - DNA, 80 bp, synthetic construct
  source 1..80: mol_type = other DNA
acaatgccaccagtgagcttccacgggagtgatggttgctggtatcctatggagattagaccaaagaagacacatgacag

SEQ ID NO: 113330 - DNA, 80 bp, synthetic construct
  source 1..80: mol_type = other DNA
tacgacagaaactaagtccgttgttaaggaggggatagaaaatcacgtatatccaacggatatgtccacgttacccgaaa

SEQ ID NO: 113331 - DNA, 80 bp, synthetic construct
  source 1..80: mol_type = other DNA
tggctgagcctgacgacagggaggtctccacagctgcagaagccttgcgtcgcgtgggaaagagattcccgccagccctg

SEQ ID NO: 113332 - DNA, 80 bp, synthetic construct
  source 1..80: mol_type = other DNA
ggtctggcgaggggacggtgtcaacaacacaacatgtccgtgtggtgcggccatcgtgggtcacgtgagaaatgggacca

SEQ ID NO: 113333 - DNA, 80 bp, synthetic construct
  source 1..80: mol_type = other DNA
gggggtgcttggcatggacggggtggttattatgaatgtaaggtttactggccccaattttagcggtacggttttcctgg

SEQ ID NO: 113334 - DNA, 80 bp, synthetic construct
  source 1..80: mol_type = other DNA
cgtgggactgccaagcgtgatggagtactttaatgctccaaagctagcacccaaaaactgcacgctggaataagctctct

SEQ ID NO: 113335 - DNA, 80 bp, synthetic construct
  source 1..80: mol_type = other DNA
acggttacagtttattcggtcgggcggataaacggccgaagccacgccccctttattcgcgtctccaaaaaaacgggaca

SEQ ID NO: 113336 - DNA, 80 bp, synthetic construct
  source 1..80: mol_type = other DNA
cagcgcatcaccattaataggcgttttagcccgttttgcatttttggatattcggcttgcataaaagcttctatctgcaa

SEQ ID NO: 113337 - DNA, 80 bp, synthetic construct
  source 1..80: mol_type = other DNA
aaccaggcctccaccccctcgaccaccacctccaccccctcgaccaccatccccgctccctcgaccaccatcaccgctcc

SEQ ID NO: 113338 - DNA, 80 bp, synthetic construct
  source 1..80: mol_type = other DNA
aacggtcccagccacgtgggagacgccagcccatccccaaagatcggcgttccactggcaggccctggggacgcccagga

SEQ ID NO: 113339 - DNA, 80 bp, synthetic construct
  source 1..80: mol_type = other DNA
agggatagattcctgtactgcagacgcgggtgccacttgaattctggaataacaagcctaggaagcgggccttcaaaatt

SEQ ID NO: 113340 - DNA, 80 bp, synthetic construct
  source 1..80: mol_type = other DNA
cattacctccctgggcccgtccagactacaaccctcctgtgatcgagacatggaagaggccggactatgaaccacccact

SEQ ID NO: 113341 - DNA, 80 bp, synthetic construct
  source 1..80: mol_type = other DNA
cagctaatgaacaccaatggtagttggcacatcaatcgcacggccttgaactgcaatgcgagcctggacactggctgggt

SEQ ID NO: 113342 - DNA, 80 bp, synthetic construct
  source 1..80: mol_type = other DNA
ctatggacaatgagcaagcggcatccctcggagctgttggtctgttggttatcaccattttcagcatcacccccatgtac

SEQ ID NO: 113343 - DNA, 80 bp, synthetic construct
  source 1..80: mol_type = other DNA
tacggggacacggactccatatttgtgctgtgccgcggcctcacggccgccgggctgacggccatgggcgacaagatggc

SEQ ID NO: 113344 - DNA, 80 bp, synthetic construct
  source 1..80: mol_type = other DNA
ttggcataggcacggtcctggaccaagcggagaccgctggagcacggctcgtcgtgctcgcgaccgctaccccgccaggg

SEQ ID NO: 113345 - DNA, 80 bp, synthetic construct
  source 1..80: mol_type = other DNA
acgcgccccccgagctcctccacggccccggcccgctcggcgctcttggcgcccaggacgccctggtacttggcgggaag

SEQ ID NO: 113346 - DNA, 80 bp, synthetic construct
  source 1..80: mol_type = other DNA
cacctaaaccttgtacagttgtcccagcattgaatgtctgcggccccgtgtactgcttcacaccatcgccggtggttgtg

SEQ ID NO: 113347 - DNA, 80 bp, synthetic construct
  source 1..80: mol_type = other DNA
caagaggtggacagccaagatcagcattccagctatcatgcttgcactcctagtcctagtgtttgggggtattacgtaca

SEQ ID NO: 113348 - DNA, 80 bp, synthetic construct
  source 1..80: mol_type = other DNA
tcgggcacgagcggtgcgcgccaagcttatcgcccagggggggaaggccaaaatatgcggcctttatctctttaattgtg

SEQ ID NO: 113349 - DNA, 80 bp, synthetic construct
  source 1..80: mol_type = other DNA
aaatagaacattgcagggcccaagtgttactccagttagttggtatgatggtgaaggaaatcggttttgcgatggagata

SEQ ID NO: 113350 - DNA, 80 bp, synthetic construct
  source 1..80: mol_type = other DNA
atacctctcgcggtcatttatggcaaatacttagaccgttttcaagcggactgaaaacgctcaaattgccttttggaggc

SEQ ID NO: 113351 - DNA, 80 bp, synthetic construct
  source 1..80: mol_type = other DNA
acacgggagtggccgtgtcgagagggactgcaaagctgagatggttccacgagcgtggctatgtgaagctagaaggaagg

SEQ ID NO: 113352 - DNA, 80 bp, synthetic construct
  source 1..80: mol_type = other DNA
tccttcccaaccggtagacggttgggcaaccactccaggcctttaggccctgtttaaacactccaggcctttaggccccg

SEQ ID NO: 113353 - DNA, 80 bp, synthetic construct
  source 1..80: mol_type = other DNA
gagctggccgtctcctcgatctgcaggcagacggcggccattaccccacccaggagctgccgcagcgcagggcaggtgtt

SEQ ID NO: 113354 - DNA, 80 bp, synthetic construct
  source 1..80: mol_type = other DNA
caggtaaaacccgcaaatgtcgattattttatttcatatgatgaagcccgtgatcaactaaagaccgcatacgcgctttc

SEQ ID NO: 113355 - DNA, 80 bp, synthetic construct
  source 1..80: mol_type = other DNA
tgcttcatatggattccagtattctccctcgcagcgggtagatttcctcctaaacgcttggcggagcaagaagaccccga

SEQ ID NO: 113356 - DNA, 80 bp, synthetic construct
  source 1..80: mol_type = other DNA
gtccgcgaggtccccgtaaaaggcgtccgtctcccgaataacgtccctggcgaccaggaccagcttagcgagggccaggc

SEQ ID NO: 113357 - DNA, 80 bp, synthetic construct
  source 1..80: mol_type = other DNA
cttggttggccaggcggaggctgctctagagaacttgattgtcctcaacgcggcctctgcagctagctgccagggcatac

SEQ ID NO: 113358 - DNA, 80 bp, synthetic construct
  source 1..80: mol_type = other DNA
cattacatcacgggggccacagaagatgagctcaagtgtccgtgccaagtgccggctcctgagttctttactgaagtgga

SEQ ID NO: 113359 - DNA, 80 bp, synthetic construct
  source 1..80: mol_type = other DNA
accgcttatgcccagcagacgcgtggtttgctgggtactatagtggtaagtatgacagggcgtgacaagacggaacaagc

SEQ ID NO: 113360 - DNA, 80 bp, synthetic construct
  source 1..80: mol_type = other DNA
ggttggcggtagagaggccatctttctgtagctggagcgccgggggcgaggtcttccaacataaggcggtgatagccgta

SEQ ID NO: 113361 - DNA, 80 bp, synthetic construct
  source 1..80: mol_type = other DNA
gaagtctgtattaatatatatcgggatttactgcagcatgtaagagcattacgccaaactataaccgattttacaataca

SEQ ID NO: 113362 - DNA, 80 bp, synthetic construct
  source 1..80: mol_type = other DNA
ggacgacgaggacgaagaggatgcggacgacgaggacgaggacccggagtccgacgaggtcgatgacgccgatggccgcc

SEQ ID NO: 113363 - DNA, 80 bp, synthetic construct
  source 1..80: mol_type = other DNA
tccaccaccggagagatccccttttacggcaaggctatcccccttgaggcaatcaagggggggagacatctcatcttttg

SEQ ID NO: 113364 - DNA, 80 bp, synthetic construct
  source 1..80: mol_type = other DNA
agttcaaacaaaaagtccttggcctcatacaatccacaagcaaacaagcagaggaactaaagccggcagtccacgcggcc

SEQ ID NO: 113365 - DNA, 80 bp, synthetic construct
  source 1..80: mol_type = other DNA
gcaggcgttggttgaaaattttacatccaacgcgttagtggtttctcggtacatgttaatgttacaaaaattttttgcgt

SEQ ID NO: 113366 - DNA, 80 bp, synthetic construct
  source 1..80: mol_type = other DNA
caaagtggagaaacagggatcgaccagaataccgtcgtaatctacgattcagacgttttttctcttctatacaccctaat

SEQ ID NO: 113367 - DNA, 80 bp, synthetic construct
  source 1..80: mol_type = other DNA
aaacaccacaacaaaacagcatattgacacctgggatagactaggagatcttctgctctgcacaaccagccacacggcac

SEQ ID NO: 113368 - DNA, 80 bp, synthetic construct
  source 1..80: mol_type = other DNA
tcctcgctgtccttctctactttgtctgctgcaaggccagagagaaatctaggcggcccatatacaggccagtaatcggg

SEQ ID NO: 113369 - DNA, 80 bp, synthetic construct
  source 1..80: mol_type = other DNA
tatgtgctcactggacgatcggccgatttggaactggagagagctgccgatgtgaaatgggaagatcaggcagaaatatc

SEQ ID NO: 113370 - DNA, 80 bp, synthetic construct
  source 1..80: mol_type = other DNA
agggacgcctcgcgcccccccgccgggccgagcgtctggccagactccaggcgtgcggccaggagggcgtcgaagctgtc

SEQ ID NO: 113371 - DNA, 80 bp, synthetic construct
  source 1..80: mol_type = other DNA
tttttcctcatagttttgctcattccagaaccagaaaaacagagaacaccccaagacaaccaattgacctacgtagtcat

SEQ ID NO: 113372 - DNA, 80 bp, synthetic construct
  source 1..80: mol_type = other DNA
ttgcctcgtgcctcaggaatggatacagcacttctaccaggagtctgctccctcccaatctgatgtggccctgatcagat

SEQ ID NO: 113373 - DNA, 80 bp, synthetic construct
  source 1..80: mol_type = other DNA
catgcggccatgaccatggcgtaggtgggggggcgatccgaggtcgcctctgcgtaagtagtgaggcccgacggtaggtc

SEQ ID NO: 113374 - DNA, 80 bp, synthetic construct
  source 1..80: mol_type = other DNA
agccactgtgcgtgagtattgttacgaagcaaccttggacacgctgtcaacagtggcaaggtgccctacaacaggagagg

SEQ ID NO: 113375 - DNA, 80 bp, synthetic construct
  source 1..80: mol_type = other DNA
agagccgtggcccatggagaacccaatgttaacgtggcaagtctaataaccccaaacccatccatggaaacaactggagg

SEQ ID NO: 113376 - DNA, 80 bp, synthetic construct
  source 1..80: mol_type = other DNA
tggcttgggaaaggtcctcgtggacatcctcgccggctacggtgcaggagtcgctggtgcactcgtggcctttaagatca

SEQ ID NO: 113377 - DNA, 80 bp, synthetic construct
  source 1..80: mol_type = other DNA
ccgagagcgaatccgtccgcggagtcccggcttgggttttatggggcccggccctcggaatcgcggcttgtcggcgtgga

SEQ ID NO: 113378 - DNA, 80 bp, synthetic construct
  source 1..80: mol_type = other DNA
gtttccagtattcgccatcgcagcgggtcgagttccttttgaacgcctggcgctcaaagaagacccctatggggttttca

SEQ ID NO: 113379 - DNA, 80 bp, synthetic construct
  source 1..80: mol_type = other DNA
acatctacatgggacagcctttaaacaacgatgaagaccatgctcactggacagaagcaaaaatgctccttgataatata

SEQ ID NO: 113380 - DNA, 80 bp, synthetic construct
  source 1..80: mol_type = other DNA
ttacagtaataaacggttccttagccttgtctacaactgctcccctcaacagcacaggatccactttaagtctgtctgtt

SEQ ID NO: 113381 - DNA, 80 bp, synthetic construct
  source 1..80: mol_type = other DNA
tctgcctacgaagtccgcaatgtctcaggtatctaccacgtcaccaatgactgtggcaattccagcattgtatacgagat

SEQ ID NO: 113382 - DNA, 80 bp, synthetic construct
  source 1..80: mol_type = other DNA
gcgggcgtatgcgtacgaccgggagcaagcagcttccattggactcgcggtaatcatcgttgttacggtgttatcgctga

SEQ ID NO: 113383 - DNA, 80 bp, synthetic construct
  source 1..80: mol_type = other DNA
tgccgtcagcttggcggcatccatggcccgcgcctgccgcagcgcttcctcggccatgcgcgtggcctctggcgacagcc

SEQ ID NO: 113384 - DNA, 80 bp, synthetic construct
  source 1..80: mol_type = other DNA
ggcccggcgcgtccccgcggggccggtccagatcgcggtcgcccggaagaactgcgcgaggcgcgccggaccagggcgtg

SEQ ID NO: 113385 - DNA, 80 bp, synthetic construct
  source 1..80: mol_type = other DNA
gctctcgtgcctcaccacccctgcatctgcaatccacgtcaggaatgcatcaggaatctaccatctcaccaatgactgtc

SEQ ID NO: 113386 - DNA, 80 bp, synthetic construct
  source 1..80: mol_type = other DNA
tcatatcgatctgcttgtcgggagcgccaccctctgctcggccctctacgtgggggacctgtgcgggtctgtctttcttg

SEQ ID NO: 113387 - DNA, 80 bp, synthetic construct
  source 1..80: mol_type = other DNA
catatagacgctcattttctgtctcagacaaaacaggccggggaaaatttcccctacctggtagcataccaggctactgt

SEQ ID NO: 113388 - DNA, 80 bp, synthetic construct
  source 1..80: mol_type = other DNA
gtggcgaaggagccatagagggcgtttgagagaagcttggcgatggatctcatggtctgatttttgtcacggtcggcgcg

SEQ ID NO: 113389 - DNA, 80 bp, synthetic construct
  source 1..80: mol_type = other DNA
ggtcccctgccgccaccaagatgaactgattggccgagcccgtgtctcaccaggggcaggatggagcatccgggagactg

SEQ ID NO: 113390 - DNA, 80 bp, synthetic construct
  source 1..80: mol_type = other DNA
gctaaccagcgtagcccctatgtaagcttgttgcatgggcggcgatataaaatgcaaggtgctgctcaaaaaatcaggca

SEQ ID NO: 113391 - DNA, 80 bp, synthetic construct
  source 1..80: mol_type = other DNA
actttaagacctggctaaaagctaagctcatgccacagctgcctgggatcccctttgtgtcctgccagcgcgggtataag

SEQ ID NO: 113392 - DNA, 80 bp, synthetic construct
  source 1..80: mol_type = other DNA
gagtgtctgcggtccggtgtattgtttcactcccagccccgtggtcgtaggcaccaccgaccgaaggggagtaccaactt

SEQ ID NO: 113393 - DNA, 80 bp, synthetic construct
  source 1..80: mol_type = other DNA
cctgttacaacgcaaccagatgccggcagataaacttacacacgaagagattaccactattgcagctgttaaacggttta

SEQ ID NO: 113394 - DNA, 80 bp, synthetic construct
  source 1..80: mol_type = other DNA
ccattgaagtcaggccacttgtgccacggcttgagcaaaccgtgctgcctgtagctccgccaataatgggaggcgtaaaa

SEQ ID NO: 113395 - DNA, 80 bp, synthetic construct
  source 1..80: mol_type = other DNA
gcctttgtttgctgaatgagttgatgtaagtttaataaaaagggtgagataatgtttaacttgcatggcgtgttaaatgg

SEQ ID NO: 113396 - DNA, 80 bp, synthetic construct
  source 1..80: mol_type = other DNA
ttgcacgatgctggtatgcggtgacgacctagtcgttatcgccgaaagcggtggtgtggaggaggacgcccgagcccttc

SEQ ID NO: 113397 - DNA, 80 bp, synthetic construct
  source 1..80: mol_type = other DNA
attcctgctcgtcgcaggggtgactctcgagcagccctactcagtcctaggccgataagcaccctcaaaggctcttcggg

SEQ ID NO: 113398 - DNA, 80 bp, synthetic construct
  source 1..80: mol_type = other DNA
tctgcggagacgatttggtcgtcatttcggagagcgcgggagtcgcggaggatgttgcaaacctgagagctttcacggaa

SEQ ID NO: 113399 - DNA, 80 bp, synthetic construct
  source 1..80: mol_type = other DNA
gaaggtatcggtctacaatatctaggctacgtgatcagggacctggctgcactagagggtggtggattctatgcggatga

SEQ ID NO: 113400 - DNA, 80 bp, synthetic construct
  source 1..80: mol_type = other DNA
catagtgggcctccatggggtccgcggcaaatatgccttggcggatgcctctctcaagatggccgaccccaatcgctttc

SEQ ID NO: 113401 - DNA, 80 bp, synthetic construct
  source 1..80: mol_type = other DNA
gtggccgcaggcccacctcgcacacctcgaccaggtccccgaacgcgccctccttcttgatcggcggaaacgcaagagtc

SEQ ID NO: 113402 - DNA, 80 bp, synthetic construct
  source 1..80: mol_type = other DNA
ttgttctcttgcatcaccgtgccggtttctgccgtgcaagttgcaaaccgcagtggctcctacatggtgaccaatgattg

SEQ ID NO: 113403 - DNA, 80 bp, synthetic construct
  source 1..80: mol_type = other DNA
agataaacgtagactaaaacgtggtcgcatcagggtgctggcttttcaagttccttaagaatggcctcaattttctctat

SEQ ID NO: 113404 - DNA, 80 bp, synthetic construct
  source 1..80: mol_type = other DNA
cctaaggggcctgtgtgccaaatgtacacaaatgtggaccaggatttggtggagtggccagcgccagctggctgtaggtc

SEQ ID NO: 113405 - DNA, 80 bp, synthetic construct
  source 1..80: mol_type = other DNA
cggccgcgtgcgggtctaacagttggatgattttagtggcgggatgccaccgcgccaccgcctcccgcaccgcgggcagg

SEQ ID NO: 113406 - DNA, 80 bp, synthetic construct
  source 1..80: mol_type = other DNA
ggtcgtgtcatcctgcttggcccagccgatgacgtcaaagacaagggctggaggttgttggcccccatcacagcctattg

SEQ ID NO: 113407 - DNA, 80 bp, synthetic construct
  source 1..80: mol_type = other DNA
aggcttgtcgtcctcaatgcggccagcgccgccggcactgctggctggtggtgggcggtgcttttcctgtgctgtgcttg

SEQ ID NO: 113408 - DNA, 80 bp, synthetic construct
  source 1..80: mol_type = other DNA
tactcagctccacccggcgatcatccagagcccgcttacgatcttgagcacataacatcatgctcatccaatgtctccgt

SEQ ID NO: 113409 - DNA, 80 bp, synthetic construct
  source 1..80: mol_type = other DNA
gcgcttcggcccggacacgccggtgcccatgtccccgcgcgagtaccgccgggccgtgctgccggcgctggacggccggg

SEQ ID NO: 113410 - DNA, 80 bp, synthetic construct
  source 1..80: mol_type = other DNA
agttcttcacggagctggatggcgtgaggattcaccgcttcgcgccaccctgtaaccccctcctaagggaggaggttact

SEQ ID NO: 113411 - DNA, 80 bp, synthetic construct
  source 1..80: mol_type = other DNA
acataaagagtctcaaaagcagccataatgccttaccagaaaaacagtacaaagccaggcacagcagacacaatctgccg

SEQ ID NO: 113412 - DNA, 80 bp, synthetic construct
  source 1..80: mol_type = other DNA
ctgtaggccatccccatccagttaatgctgccttgtctatcattcagagggggcggtggcaggattggaagaaccatttt

SEQ ID NO: 113413 - DNA, 80 bp, synthetic construct
  source 1..80: mol_type = other DNA
ggctggccggcgcccaccgggacgcgttctttgacaccatgcacctgcggcagctcagacctctacttggtcacgaggca

SEQ ID NO: 113414 - DNA, 80 bp, synthetic construct
  source 1..80: mol_type = other DNA
gcccctccccacgcgcccccaacccacggcgccctgcggttaggggcggtgatgggtgccgccctgttgttgtctgtgct

SEQ ID NO: 113415 - DNA, 80 bp, synthetic construct
  source 1..80: mol_type = other DNA
gtaggaggaatcttcacctctctagggaaggcagtgcaccaggtgtttggtggggcttttaggtcactctttggaggcat

SEQ ID NO: 113416 - DNA, 80 bp, synthetic construct
  source 1..80: mol_type = other DNA
gcctcctggaggtgatggacagtctcgacgccaagcagtggtccgtggcgcaggcgctcccgtgcctggagcccacccac

SEQ ID NO: 113417 - DNA, 80 bp, synthetic construct
  source 1..80: mol_type = other DNA
cttgtgtaaaagcgcggcgtcccgctctccgatccccgcccctgggcacgcgcaagcgcaagcgccctgcccgccccctc

SEQ ID NO: 113418 - DNA, 80 bp, synthetic construct
  source 1..80: mol_type = other DNA
atgtgcaccctcattgcgatggacttgggagagttatgtgaggacacaatgacctacaaatgcccccggatcactgaggc

SEQ ID NO: 113419 - DNA, 80 bp, synthetic construct
  source 1..80: mol_type = other DNA
ccggcgcctcgtggtacgaactcacgcccgcggagaccactgtcagactgcgggcttactttaatacgcccggcctgcct

SEQ ID NO: 113420 - DNA, 80 bp, synthetic construct
  source 1..80: mol_type = other DNA
tctccgttctgatggcccaagatactctgggccaagatctcaacttcgagatgtacggagctgtgtactcagtgagtcct

SEQ ID NO: 113421 - DNA, 80 bp, synthetic construct
  source 1..80: mol_type = other DNA
gggttgaccactgacaacctaaatgtcccttgccaattgccagccccggagttcttttcatgggtggatggggtacagat

SEQ ID NO: 113422 - DNA, 80 bp, synthetic construct
  source 1..80: mol_type = other DNA
tcatcaggcctcatccacctacaccaaaacatcgtggacgtgcagtacctctacggtctatccccctctgtggtcgcgtg

SEQ ID NO: 113423 - DNA, 80 bp, synthetic construct
  source 1..80: mol_type = other DNA
ggagggggtccttagggagatggcagacaaagtgctcagccctctccaagacaccaatgactccggtcactccactggtg

SEQ ID NO: 113424 - DNA, 80 bp, synthetic construct
  source 1..80: mol_type = other DNA
ctgtgagtgctacgacgccggatgtgcctggtatgagcttacccctgctgagacaaccgttaggttgcgcgcttacctaa

SEQ ID NO: 113425 - DNA, 80 bp, synthetic construct
  source 1..80: mol_type = other DNA
gtgcgcgcgcacatattagtccgcatctgcatgctggtgcggtctatcagtgggggaaaatactgccaactaatcatact

SEQ ID NO: 113426 - DNA, 80 bp, synthetic construct
  source 1..80: mol_type = other DNA
gagataaatcaattgctttggctttcctagcaacaggaggcgttttgttgttcctggccacaaatgtccatgctgacact

SEQ ID NO: 113427 - DNA, 80 bp, synthetic construct
  source 1..80: mol_type = other DNA
agcactcatccccgacaaacaagtgttataccaacaatttgacgagatggaggagtgctcccaggctgccccctacatcg

SEQ ID NO: 113428 - DNA, 80 bp, synthetic construct
  source 1..80: mol_type = other DNA
ggtacgcgccaagctcatcgctcagggggggaaggccagaatatgtggcatctacctcttcaactggtcggtgaaaacca

SEQ ID NO: 113429 - DNA, 80 bp, synthetic construct
  source 1..80: mol_type = other DNA
tgtgatgctgctctttgccggcgttgatgggggtaccaccataacgggagtgcgcgtagcccacaccacctccgcattcg

SEQ ID NO: 113430 - DNA, 80 bp, synthetic construct
  source 1..80: mol_type = other DNA
tgacaacgaagggatactagcaaacagtgccacgtggggttatcgacaaggacagtctgccaacactaacgtttccaatg

SEQ ID NO: 113431 - DNA, 80 bp, synthetic construct
  source 1..80: mol_type = other DNA
atgtggtggttgtgctacttcctggtcctggcagaagctctggttcaggaatgggtacctcccctccaggtacgcggcgg

SEQ ID NO: 113432 - DNA, 80 bp, synthetic construct
  source 1..80: mol_type = other DNA
cggtgtgtttgccaaacgaaaaataaacgccctacaagaaagcttttgtgtctgagtgtctggtttttctgggggtggag

SEQ ID NO: 113433 - DNA, 80 bp, synthetic construct
  source 1..80: mol_type = other DNA
ttatttgggagcactatcttaccaaccagttattataaagataagttttaatcaggaaaaagatgtaaactgtgcatact

SEQ ID NO: 113434 - DNA, 80 bp, synthetic construct
  source 1..80: mol_type = other DNA
aaggcggcatgcactacccatcacaactccccagaccttgatctcatcgaggccaacctcctgtggtggcaggagaaggg

SEQ ID NO: 113435 - DNA, 80 bp, synthetic construct
  source 1..80: mol_type = other DNA
ctcattgaggttctgggaaagatgcctgagcacttcatggggaagacatgggaagcacttgacaccatgtacgttgtggc

SEQ ID NO: 113436 - DNA, 80 bp, synthetic construct
  source 1..80: mol_type = other DNA
gagtgggagcaaaatgaaactgcacaagtggatgctcaagaacttgacgaagaggagaatgaagccaatgaagctcaggc

SEQ ID NO: 113437 - DNA, 80 bp, synthetic construct
  source 1..80: mol_type = other DNA
cctctttagatctggctccaagcagaacatccatttaatcaacaccaatggcagctggcacataaaccggaccgccctca

SEQ ID NO: 113438 - DNA, 80 bp, synthetic construct
  source 1..80: mol_type = other DNA
ttaaactacacaaagaaaacatcactctatttcaacctattaacctgggatactaccgctgctcagctccaccctgtacg

SEQ ID NO: 113439 - DNA, 80 bp, synthetic construct
  source 1..80: mol_type = other DNA
ctgacacgtcgggcgtcgcgagtgacgcgggacccctgccttcggaaccgccctcttgcgatgatggtaccgggtccgat

SEQ ID NO: 113440 - DNA, 80 bp, synthetic construct
  source 1..80: mol_type = other DNA
gccggacggtgggtctgagcgagagcaccataggagatgtcctccaacagctggccaacaagaccttcggccagcccctc

SEQ ID NO: 113441 - DNA, 80 bp, synthetic construct
  source 1..80: mol_type = other DNA
gacgtagttgtctgcgccacagatgccctcatgactgggtatacgggtaacttcgacaccgtcattgactgtaacgtgtc

SEQ ID NO: 113442 - DNA, 80 bp, synthetic construct
  source 1..80: mol_type = other DNA
gattgggcagcgtccgggctgcgcgacttagcagtggccacggagcccatcatattctcccctatggagacgaaggtcat

SEQ ID NO: 113443 - DNA, 80 bp, synthetic construct
  source 1..80: mol_type = other DNA
cctgcgcttgccgtattttgccaagatcggccccgacggctccgcatgcggccggttattgcccgtcttcgtgatccccc

SEQ ID NO: 113444 - DNA, 80 bp, synthetic construct
  source 1..80: mol_type = other DNA
caccccgccgatttaaagacccaacagccgacttctccagttacaggaaagagcccccttttttctttttgccagatgca

SEQ ID NO: 113445 - DNA, 80 bp, synthetic construct
  source 1..80: mol_type = other DNA
catgccaccaaatgggtactttagatttgaagcctgggtcaatcagttttactcactcgcccccgtgggatctggaaagg

SEQ ID NO: 113446 - DNA, 80 bp, synthetic construct
  source 1..80: mol_type = other DNA
cataaccgccttcacaatcacaccggcatataaaatcctcctcacccggagtctgtggtggacaagctacatgctggtct

SEQ ID NO: 113447 - DNA, 80 bp, synthetic construct
  source 1..80: mol_type = other DNA
ccccctaaattacatcaagggggggaggcatctcattttctgtcattccaagaagaagtgcgacgagctcgctgcaaagc

SEQ ID NO: 113448 - DNA, 80 bp, synthetic construct
  source 1..80: mol_type = other DNA
ccccccctctctggccagctcttcggccagccagctgtccgcaccatctctcaaggcaacttgcactaccaaccacgact

SEQ ID NO: 113449 - DNA, 80 bp, synthetic construct
  source 1..80: mol_type = other DNA
tgggggttaagcccattaaggttactcaacaatccggcccagttgagggaagcattctttgtcagtgcaccaattctgaa

SEQ ID NO: 113450 - DNA, 80 bp, synthetic construct
  source 1..80: mol_type = other DNA
cccagaaataaaccatacctgtaatgttcaaaatttaacacttttatttgtaaactatactcaccgtggagcatattttg

SEQ ID NO: 113451 - DNA, 80 bp, synthetic construct
  source 1..80: mol_type = other DNA
tctatcacacccgcccctccatcccacaaacacaaaacacacgggttggatgaaaacacgcatttattgacccaaaacac

SEQ ID NO: 113452 - DNA, 80 bp, synthetic construct
  source 1..80: mol_type = other DNA
tttctatcgcgaacttaaccacacttgtacagaaaaggaccttatcctgttatttgtaaacagaactcataatggtcctt

SEQ ID NO: 113453 - DNA, 80 bp, synthetic construct
  source 1..80: mol_type = other DNA
tggctcccgcccgcactggggccctaatgacccccggcgaaggtcccgcaacttgggtaaagtcatcgatacccttacct

SEQ ID NO: 113454 - DNA, 80 bp, synthetic construct
  source 1..80: mol_type = other DNA
ggcgccctggacccgcctgaaagtttttacgtagttggcatagtacccgtattcccgcgccaacccaaacacgttcgacc

SEQ ID NO: 113455 - DNA, 80 bp, synthetic construct
  source 1..80: mol_type = other DNA
atacctggtcacaagacatgctgatgtcgtgccagtacgacgtcgaggggacaccagagggagcctactttccccgcggc

SEQ ID NO: 113456 - DNA, 80 bp, synthetic construct
  source 1..80: mol_type = other DNA
gaagaggaagaagcaggagtcctgtggtaaaaagcagaactaacataaaacaaggctagaagtcaggtcggattaagcca

SEQ ID NO: 113457 - DNA, 80 bp, synthetic construct
  source 1..80: mol_type = other DNA
tacctgtgggaagtgaagaaacaacgggctggagtattgtgggacgtcccttcacccccaccagtgggaaaagccgaact

SEQ ID NO: 113458 - DNA, 80 bp, synthetic construct
  source 1..80: mol_type = other DNA
ggtttatagtggtatttaatgatgttagtgtaaatagtcaagaaaattttaaggaggaagtcaggccggaaaatttccgc

SEQ ID NO: 113459 - DNA, 80 bp, synthetic construct
  source 1..80: mol_type = other DNA
tatactgtttcacacccagtcccgtggtagtggggacgacggacaaagccggcgttcccacctacacatggggcgagaat

SEQ ID NO: 113460 - DNA, 80 bp, synthetic construct
  source 1..80: mol_type = other DNA
gtcgatgatgtccaaatgatcgtagtacagccaggaaagccggcgatgaacgtgcaaacaaagccaggagtgtttaagac

SEQ ID NO: 113461 - DNA, 80 bp, synthetic construct
  source 1..80: mol_type = other DNA
ttatgacaacacggtgcccatgcggtgccaacatcaccggcaacgtccgcttgggtaccatgagactatcagggcctaag

SEQ ID NO: 113462 - DNA, 80 bp, synthetic construct
  source 1..80: mol_type = other DNA
gtaagcctggctggaccacggtcgcattacaatcacattcctgggtatgcagaacaggttaggggaccgtggaaccaaac

SEQ ID NO: 113463 - DNA, 80 bp, synthetic construct
  source 1..80: mol_type = other DNA
gatccccaacaacccgacctaaactctgaggacggacaacccgtagtctcagacgacgagcttgctcgctggctaggtac

SEQ ID NO: 113464 - DNA, 80 bp, synthetic construct
  source 1..80: mol_type = other DNA
ctttgcttgtagtcaaaggaaaattttgcattataaataataaggttaatgcaactgatgattacaaaaagtttagtatc

SEQ ID NO: 113465 - DNA, 80 bp, synthetic construct
  source 1..80: mol_type = other DNA
atcactgctgagacggcagcccgtcgcctcaagagggggtcccctccgtctctggctagttcatctgccagccaattatc

SEQ ID NO: 113466 - DNA, 80 bp, synthetic construct
  source 1..80: mol_type = other DNA
cctcgagctcataacatcgtgctcgtccaatgtttccgtcgcccacgaaggcaatgggaagaaatattactacctcacac

SEQ ID NO: 113467 - DNA, 80 bp, synthetic construct
  source 1..80: mol_type = other DNA
aacatggctgtgcatagtgatctgtcgtactggatagagagcggactcaacgacacctggaagcttgagagggcggttct

SEQ ID NO: 113468 - DNA, 80 bp, synthetic construct
  source 1..80: mol_type = other DNA
tcgcccgaatttttcacggaactagacggggtgcgcctgcataggttcgcgcccccttgcaagcctttgctacgagatga

SEQ ID NO: 113469 - DNA, 80 bp, synthetic construct
  source 1..80: mol_type = other DNA
ctgttggtctcgctggcattgctttgggcgtgcggagtcggctatggaagcatggccggggtggctcttgtgttctacac

SEQ ID NO: 113470 - DNA, 80 bp, synthetic construct
  source 1..80: mol_type = other DNA
gcccctaccatttgggtccgcatggtgttgataacccacttcttttccatactgcaagcccaggagcagcttgaaagagc

SEQ ID NO: 113471 - DNA, 80 bp, synthetic construct
  source 1..80: mol_type = other DNA
tccttcaactatggcctcttttgctcatggtcctcctactgcccccccgagcctacgcctacgacgctgcacaagcaacg

SEQ ID NO: 113472 - DNA, 80 bp, synthetic construct
  source 1..80: mol_type = other DNA
ttggttcgttccaagcataaaagcaggaaatgacatagcagcttgcctgagaaaaaatggaaagaaagtaatacaactta

SEQ ID NO: 113473 - DNA, 80 bp, synthetic construct
  source 1..80: mol_type = other DNA
gcggcctagccgacctcatggggtacatccccgtcctaggcggcccacttggtggtgtcgcggctgctttagcacatggt

SEQ ID NO: 113474 - DNA, 80 bp, synthetic construct
  source 1..80: mol_type = other DNA
ttggatgctcatcatactgggccaagctgaggcggcgcttgagaagcttgtcatcttgcactctgctagcgctgctagtg

SEQ ID NO: 113475 - DNA, 80 bp, synthetic construct
  source 1..80: mol_type = other DNA
gccggggcgactggctcgtgcgagaccccatcagcgggcagcgcggagaatgtctggtgctgtggccccccttgtggacc

SEQ ID NO: 113476 - DNA, 80 bp, synthetic construct
  source 1..80: mol_type = other DNA
tgccgatgacacagctggttgggacacccgcatcacacaagctgaccttgagaacgaagctaaagttctggagttgatgg

SEQ ID NO: 113477 - DNA, 80 bp, synthetic construct
  source 1..80: mol_type = other DNA
ttggagcccgttgcaggtgcggctgccgccgcgccttttacgggccagaacaatgtcattgacccctggatatttcaaaa

SEQ ID NO: 113478 - DNA, 80 bp, synthetic construct
  source 1..80: mol_type = other DNA
gagcttagctacgccaccaccatgcactaccgggacgttgtgttttacgtcacaacggaccgaaaccgggcctactttgt

SEQ ID NO: 113479 - DNA, 80 bp, synthetic construct
  source 1..80: mol_type = other DNA
gaacgccgtcgccgaggccgtcttgaaggacaagaagaaggatctgagctaccgcgacatccccgcctactacgcctccg

SEQ ID NO: 113480 - DNA, 80 bp, synthetic construct
  source 1..80: mol_type = other DNA
agaaaatgattaggccacaacccatggaacacaaatactcgtggaaaagctggggaaaagccaaaatcataggagcagat

SEQ ID NO: 113481 - DNA, 80 bp, synthetic construct
  source 1..80: mol_type = other DNA
gtgaagggcacagcctctctgaagcataatatggtgaagggctgcacggatgagcgcatgtacaacatgctgacctgcga

SEQ ID NO: 113482 - DNA, 80 bp, synthetic construct
  source 1..80: mol_type = other DNA
acgtcacagacactcctgttcaacgtgttggggggttggctggcaacacagctcgccccccccagctcatccaccgcctt

SEQ ID NO: 113483 - DNA, 80 bp, synthetic construct
  source 1..80: mol_type = other DNA
aagctcgaggccttctgggcaaagcacatgtggaacttcataagcgggatacaatacctggcgggcctatcaacactgcc

SEQ ID NO: 113484 - DNA, 80 bp, synthetic construct
  source 1..80: mol_type = other DNA
cagggttgcagcactggaacaccatcagggccggatgcttcacgctcgccagcaccgtagcgtcggtgatcccgtccacg

SEQ ID NO: 113485 - DNA, 80 bp, synthetic construct
  source 1..80: mol_type = other DNA
ccacacgaccaaacactctcccttcatgcccgttacatcatcctttgccataattaatcttcggttataattataataaa

SEQ ID NO: 113486 - DNA, 80 bp, synthetic construct
  source 1..80: mol_type = other DNA
gctccgcgggccagggcccgggcacgggcctcgggccccaggcacggcccgatgaccgcttcggcctccgccacccggcg

SEQ ID NO: 113487 - DNA, 80 bp, synthetic construct
  source 1..80: mol_type = other DNA
ttagaagcagtagtgccttctcgcactaaccctacacatgaaaaagtgttaaccattgtgaatgccttgctggatagcaa

SEQ ID NO: 113488 - DNA, 80 bp, synthetic construct
  source 1..80: mol_type = other DNA
gccttcaccacaggcccctgcgtgcctatcccggcgcccaactacacgtttgcgctatggagagtgtccgctgaggagta

SEQ ID NO: 113489 - DNA, 80 bp, synthetic construct
  source 1..80: mol_type = other DNA
gggaactaaatcatacacaccatgcacctgtggtgccagtgacctcttccttgtcacacggaacgcagacgtcatcccag

SEQ ID NO: 113490 - DNA, 80 bp, synthetic construct
  source 1..80: mol_type = other DNA
ggggaggcacctcatcttctgccattcaaagaagaagtgcgacgagcttgccggaaagctagctgccctcggactcaacg

SEQ ID NO: 113491 - DNA, 80 bp, synthetic construct
  source 1..80: mol_type = other DNA
ccaagagaagagcctgatgacatagactgttggtgctatggagtggaaaatgtcagagtcgcttatggcaagtgtgattc

SEQ ID NO: 113492 - DNA, 80 bp, synthetic construct
  source 1..80: mol_type = other DNA
aaacagctaggccaaataatgttactgatactttgtacatcacagatcctcttgatgcggaccacatgggccttgtgtga

SEQ ID NO: 113493 - DNA, 80 bp, synthetic construct
  source 1..80: mol_type = other DNA
gacatcttcttttcctcggccctgctgatgatatgaagagtggaggttggaggctactcgctcccattacggcgtaccac

SEQ ID NO: 113494 - DNA, 80 bp, synthetic construct
  source 1..80: mol_type = other DNA
tgctctttttctatcttcctcttggctctgctttcctgcctgactgtacccgcgtcagcctaccaagtacgcaactcctc

SEQ ID NO: 113495 - DNA, 80 bp, synthetic construct
  source 1..80: mol_type = other DNA
cttgcgcagcttttcttaatgatgtatgagtaagagcaaatgtgtctctaaccattactttcaaatactgatatttaaag

SEQ ID NO: 113496 - DNA, 80 bp, synthetic construct
  source 1..80: mol_type = other DNA
ttacatgcggattcgccgatctcatggggtacattccgctcgttggtgcccccgctggtggcgtcgcgagagctctcgcg

SEQ ID NO: 113497 - DNA, 80 bp, synthetic construct
  source 1..80: mol_type = other DNA
gtgacagacgtactcagctcacttaccatcaccagcttgctgagaaggttgcacacgtggatcaccgaggattgtcctac

SEQ ID NO: 113498 - DNA, 80 bp, synthetic construct
  source 1..80: mol_type = other DNA
cccctggactcggggtgcagacggtggatatccagatccccgtcacgtcagcttcaaccgccgtggaagccatggaaacg

SEQ ID NO: 113499 - DNA, 80 bp, synthetic construct
  source 1..80: mol_type = other DNA
caaaacttatgaaaatgtgcagtttgattcctcctttttaactttctcctatattgcccaagaatgaaagaccaataaac

SEQ ID NO: 113500 - DNA, 80 bp, synthetic construct
  source 1..80: mol_type = other DNA
acgacagtcgataatcaccagcagcccgatggtggtgtgttgtatcaccacgcctccgcggggcaggcggtcctggcgcg

SEQ ID NO: 113501 - DNA, 80 bp, synthetic construct
  source 1..80: mol_type = other DNA
tggaaggcgaaggcgtggttggacctgacgatgtggagaagctggggaaaggcaaaggggtaaaggtacgagtctggctc

SEQ ID NO: 113502 - DNA, 80 bp, synthetic construct
  source 1..80: mol_type = other DNA
gaccctttgcggactccgcgaccttctccccatgaactgatgttgattaaaatcccagaaaccaatcagccccttacccc

SEQ ID NO: 113503 - DNA, 80 bp, synthetic construct
  source 1..80: mol_type = other DNA
accgttgtccttacggagtctactgtgtccactgccctggctgatcttgcggcgaaaacctttagtggctccaacacatc

SEQ ID NO: 113504 - DNA, 80 bp, synthetic construct
  source 1..80: mol_type = other DNA
cggctcatgaacgactgggccgaggtcccgtgcaacccttacctgcgcatccagaacaccggcgtgtcggtgctgtttca

SEQ ID NO: 113505 - DNA, 80 bp, synthetic construct
  source 1..80: mol_type = other DNA
ccacggaatgggccattttaccttgctcttactcggacctgcccgccttgtcgactggtcttctccacctccaccaaaac

SEQ ID NO: 113506 - DNA, 80 bp, synthetic construct
  source 1..80: mol_type = other DNA
tggccagaagccaacggcgtgggcgcacgggtagaggcaagccagggatatacaggtatgtctcgcaggtggagcgaccg

SEQ ID NO: 113507 - DNA, 80 bp, synthetic construct
  source 1..80: mol_type = other DNA
ggactgttccaccccgtgtgacacgagctggttgcgagacatctgggactgggtctgcactgtcctggctgactttaaga

SEQ ID NO: 113508 - DNA, 80 bp, synthetic construct
  source 1..80: mol_type = other DNA
cactgcagagaaaggaggaagagctcacagaatggctttggaggagctaccagacgccctccaaacaatagctctgatcg

SEQ ID NO: 113509 - DNA, 80 bp, synthetic construct
  source 1..80: mol_type = other DNA
caacaggacagcactcaattgtaatgactctctccacaccggctttatcgctggtttgctttatgctcataggttcaact

SEQ ID NO: 113510 - DNA, 80 bp, synthetic construct
  source 1..80: mol_type = other DNA
caatacacgccaaaggaaccaactgatcagagaccatattgctggcattacccccctaagccatgtgaggtggtccgggc

SEQ ID NO: 113511 - DNA, 80 bp, synthetic construct
  source 1..80: mol_type = other DNA
gcgagtctacagtgtcaaaagcactggccagcttagctgagaaaagcttcccgcaaccaacatgttccgcggaggatgag

SEQ ID NO: 113512 - DNA, 80 bp, synthetic construct
  source 1..80: mol_type = other DNA
gggaggtccacagacatgtggattgaaaggacagctgacatttcatgggagagtgacgctgagatcaccggaactagtga

SEQ ID NO: 113513 - DNA, 80 bp, synthetic construct
  source 1..80: mol_type = other DNA
gacaagaggtcccttgtgatgtcgggtggggccacaagcctggtttccggaagaaacaggtgggttgccaataacccgcc

SEQ ID NO: 113514 - DNA, 80 bp, synthetic construct
  source 1..80: mol_type = other DNA
tcaacagacgcgcggtctggtggggacaatagtcacgagcctcactggcagagacaaaaatgaggtggagtgtgaagtgc

SEQ ID NO: 113515 - DNA, 80 bp, synthetic construct
  source 1..80: mol_type = other DNA
ccccggggccaggaggactacaccaacttcattagcgccctgcggctaatggtgaccgaggtgccccagagcgaggtgta

SEQ ID NO: 113516 - DNA, 80 bp, synthetic construct
  source 1..80: mol_type = other DNA
tttaattgaaattaattgcactaactccaaatacccagctgtggttaaatttaatggcaggcaaagcaacttctaccatt

SEQ ID NO: 113517 - DNA, 80 bp, synthetic construct
  source 1..80: mol_type = other DNA
gttggtcgctgcggcgacgtcggacgtacacagggccgatgctatcagaaggctccggcgggcgcgttcccgctgcaccg

SEQ ID NO: 113518 - DNA, 80 bp, synthetic construct
  source 1..80: mol_type = other DNA
gtgactatcatgtctaaggacaagcctaccatcgatgtgaagatgatgaatatggaggctgctaacctggcagaggttcg

SEQ ID NO: 113519 - DNA, 80 bp, synthetic construct
  source 1..80: mol_type = other DNA
ttcttctgatgacagaccgtactgctggcactatgcacctaagccttgtgacgttgtctcagcatcaaccgtctgtggcc

SEQ ID NO: 113520 - DNA, 80 bp, synthetic construct
  source 1..80: mol_type = other DNA
acatcgatgcccacttcctatcccaaactaagcagggtggagagaacttcgcctatctcgtggcctatcaggccacggta

SEQ ID NO: 113521 - DNA, 80 bp, synthetic construct
  source 1..80: mol_type = other DNA
ccacggggccaggtccgcggccgccgcgtcgaactccgccagcaggcgccccagggcgtcaaagttcatctcccagggca

SEQ ID NO: 113522 - DNA, 80 bp, synthetic construct
  source 1..80: mol_type = other DNA
cacaaaaagccactctagaaacaggtgtttacaggataatgcagaggggattgtttggaagatcacaagttggagtggga

SEQ ID NO: 113523 - DNA, 80 bp, synthetic construct
  source 1..80: mol_type = other DNA
cgcgaccgggggctcgccctcaggcgaactggcagagcactctgaacagcatcgtgggtctgggagtgcagagtgtgaag

SEQ ID NO: 113524 - DNA, 80 bp, synthetic construct
  source 1..80: mol_type = other DNA
agtggcgtctaagcagcgcgcccgcctcacggacaaatgtggcgagcgcggtgggctttggtacaaatacctgatacgtc

SEQ ID NO: 113525 - DNA, 80 bp, synthetic construct
  source 1..80: mol_type = other DNA
ggaacagcagatacctctcctccgacagtcctttcgctgttgccgctcagtcatccaactgaagtacatccattcccgaa

SEQ ID NO: 113526 - DNA, 80 bp, synthetic construct
  source 1..80: mol_type = other DNA
ggctcttcgggcggtcccatcatgtgcccctctggtcatgtcgccggcatcttcagagcagctgtgtgtaccagaggtgt

SEQ ID NO: 113527 - DNA, 80 bp, synthetic construct
  source 1..80: mol_type = other DNA
ccgcccggctctgttacggtcccgcatccaaacatacaagagatagcgcttcccttgacgggagagataccgttctatgg

SEQ ID NO: 113528 - DNA, 80 bp, synthetic construct
  source 1..80: mol_type = other DNA
ccggccttgtccaccggcctgttgcacctccaccaaaacattgtggatgtgcagtacttatatggcttatcaccggctgt

SEQ ID NO: 113529 - DNA, 80 bp, synthetic construct
  source 1..80: mol_type = other DNA
ggacacagcctctcatacagcgagaggtttcgcttcaatctttgccccgggcgcccagcagcagcttcagcttataaaca

SEQ ID NO: 113530 - DNA, 80 bp, synthetic construct
  source 1..80: mol_type = other DNA
cccccgaagagcgccccggcgcgggagcggcggtgcggaggcgacccgcggaacctcccagcccgccgcgacccgaccgg

SEQ ID NO: 113531 - DNA, 80 bp, synthetic construct
  source 1..80: mol_type = other DNA
tcaccttccccacaacctcctccgtcaccatgccagtcttagcgcttctaactccggggatgagggctctatacctagac

SEQ ID NO: 113532 - DNA, 80 bp, synthetic construct
  source 1..80: mol_type = other DNA
gcgtctacaccaccagcttcgggaacacattgacgtgctacctcaaggcctcagccgctatcagagcggcggggctaaga

SEQ ID NO: 113533 - DNA, 80 bp, synthetic construct
  source 1..80: mol_type = other DNA
atcttactgtagtggctaatgcaaatttaactagcagaaaatttcaatcatatagctatactaacgatgatggttatgaa

SEQ ID NO: 113534 - DNA, 80 bp, synthetic construct
  source 1..80: mol_type = other DNA
tgcatgatccattacccataccgattatggcactacccatgtacagtcaattacacagtattcaagaccagaatatatat

SEQ ID NO: 113535 - DNA, 80 bp, synthetic construct
  source 1..80: mol_type = other DNA
cgtgcggcatcgtccctgcccgaggggtttgtggcccagtctactgtttcaccccgacccccgtcgtggtgggcaccact

SEQ ID NO: 113536 - DNA, 80 bp, synthetic construct
  source 1..80: mol_type = other DNA
attaccgcacccaaagtgaacatcatcacctgaattatccaaattcgccaattaagcgtatccatttgatgatctaacgc

SEQ ID NO: 113537 - DNA, 80 bp, synthetic construct
  source 1..80: mol_type = other DNA
acgctgctcagggctataaggtgttagtgctcaatccctccgtcgcagctaccctgggctttggggcatacatgtccaag

SEQ ID NO: 113538 - DNA, 80 bp, synthetic construct
  source 1..80: mol_type = other DNA
agcacggctcccacggccgtctcgatggcccgccgggcgtcctcgatcaccccggaagccgcatccgcgtcttggaggtc

SEQ ID NO: 113539 - DNA, 80 bp, synthetic construct
  source 1..80: mol_type = other DNA
ctccttcttgtcgcgggagtggatgcgaacacctattcctccggcgcgcaagcgggtcatactatgttagggatcagtag

SEQ ID NO: 113540 - DNA, 80 bp, synthetic construct
  source 1..80: mol_type = other DNA
ggggttaacccgccttttctcatcactgactctggattagctatggacttaggagacggtcttgcattaggtggctctaa

SEQ ID NO: 113541 - DNA, 80 bp, synthetic construct
  source 1..80: mol_type = other DNA
agttgggccagtgtcaaaaaagacttgatctcatatggaggaggttggaggtttcaaggatcctggaacgcgggagaaga

SEQ ID NO: 113542 - DNA, 80 bp, synthetic construct
  source 1..80: mol_type = other DNA
gccagccccgagctgcgccgcgcctgctggtcgttgatgccgtggatgctgcgcgccagctcttccaggggcttgcgttc

SEQ ID NO: 113543 - DNA, 80 bp, synthetic construct
  source 1..80: mol_type = other DNA
atggagaaactcttggggacatctggaagaggcggctgaatggttgctctagggaggagttttttcagtaccgacgaagt

SEQ ID NO: 113544 - DNA, 80 bp, synthetic construct
  source 1..80: mol_type = other DNA
tggagacatcgggccagggcagtcagagctaagcttatcgcccagggtgggaaggccgctatatgtggcatgtacctctt

SEQ ID NO: 113545 - DNA, 80 bp, synthetic construct
  source 1..80: mol_type = other DNA
aggctgttggttttatgccaagcacaacagcttatcctaagccaaccaacaacaccagcacagatccggataaaaaagtg

SEQ ID NO: 113546 - DNA, 80 bp, synthetic construct
  source 1..80: mol_type = other DNA
ctctatgaggcttttgatgagatggaggagtgcgcaaacacagccacattgctagctgaaggacagaaggtcgctgagat

SEQ ID NO: 113547 - DNA, 80 bp, synthetic construct
  source 1..80: mol_type = other DNA
tcgggcgagttggcattggatccggatacggtgcgggcggccctgcctccggataacccactcccgattaacgtggacca

SEQ ID NO: 113548 - DNA, 80 bp, synthetic construct
  source 1..80: mol_type = other DNA
taaaaacaggaaatgatatagcagcttgtctcaggaaaaatggaaagaaagtgatacaactcagtaggaaaacttttgac

SEQ ID NO: 113549 - DNA, 80 bp, synthetic construct
  source 1..80: mol_type = other DNA
aatactctattacatttgattttagttgggccaaaacttatgtaaatgttcaatttgaaactacctcttttaccttttcc

SEQ ID NO: 113550 - DNA, 80 bp, synthetic construct
  source 1..80: mol_type = other DNA
gtggcaccatttggagagggagaggcaaaacctgctctatatgagagaaaaatgagcctagtcttggcgatagtgctttg

SEQ ID NO: 113551 - DNA, 80 bp, synthetic construct
  source 1..80: mol_type = other DNA
gctctgggggcgcctatgacatcataatatgtgatgagtgccactcaactgactcgacttccatcttgggcatcggcaca

SEQ ID NO: 113552 - DNA, 80 bp, synthetic construct
  source 1..80: mol_type = other DNA
cccgggtataagacccttctcagccggtttttgtggtggttgtgctatcttctgaccctgggggaagctatggtccagga

SEQ ID NO: 113553 - DNA, 80 bp, synthetic construct
  source 1..80: mol_type = other DNA
gcccatgctcacaggtcctacccccctgttgtataggctaggggccgtgcagaacgaggtcattaccactcatccaatca

SEQ ID NO: 113554 - DNA, 80 bp, synthetic construct
  source 1..80: mol_type = other DNA
tgggcatcgcatggcgtgggatatgatgatgaactggtctccaactgcaacgtgggtcgtgtcgtacgcgctcagggtgc

SEQ ID NO: 113555 - DNA, 80 bp, synthetic construct
  source 1..80: mol_type = other DNA
acgcacatagatgctcacttcctgtctcagaccaagcaggggggtgataactatgcgtacctggtcgcatatcaggcaac

SEQ ID NO: 113556 - DNA, 80 bp, synthetic construct
  source 1..80: mol_type = other DNA
acaacatgatgggaaagagagagaaaaaacccggagagtttggaaaggccaagggaagcagagccatttggttcatgtgg

SEQ ID NO: 113557 - DNA, 80 bp, synthetic construct
  source 1..80: mol_type = other DNA
tgtaggattgcattcatatgcaattgggtcccagcttccatgtgaacccgagccagacgtcgcagtgttgacctcgatgt

SEQ ID NO: 113558 - DNA, 80 bp, synthetic construct
  source 1..80: mol_type = other DNA
gtccctggcgtcgggacgctccacgactgctgcgagcactcgccgctcttctcggccgtggcgcggcggctgctgtttaa

SEQ ID NO: 113559 - DNA, 80 bp, synthetic construct
  source 1..80: mol_type = other DNA
ctggcttggacatgtggtggttttctatagcgcttatgtttgtttgtctcattattatgtggctcatttgctgtgtaaag

SEQ ID NO: 113560 - DNA, 80 bp, synthetic construct
  source 1..80: mol_type = other DNA
cgaggtgggaatctctgacgacgaccttcaccgcgactccacctccgaggcgggcagcacggacacggagatgttcgagg

SEQ ID NO: 113561 - DNA, 80 bp, synthetic construct
  source 1..80: mol_type = other DNA
acacctggcacgggaccttccccatcaacgcctacacgactggcccctgcgtgcccatccctacgccagactatagtcgc

SEQ ID NO: 113562 - DNA, 80 bp, synthetic construct
  source 1..80: mol_type = other DNA
gatacccataatcgccgccgccatcggtgccatacccggcgtcgcttcagtggccttgcaagcagctcgtaataaataaa

SEQ ID NO: 113563 - DNA, 80 bp, synthetic construct
  source 1..80: mol_type = other DNA
tggcccttttccatccccacctggcctttgacattaccaaacatctcctggctgtgcttggccccctctaccttctgcaa

SEQ ID NO: 113564 - DNA, 80 bp, synthetic construct
  source 1..80: mol_type = other DNA
ttaccacgcggggcatcgctaacctgtttacccttggccctcgacagaaactgcagcttatccacaccaacggaagctgg

SEQ ID NO: 113565 - DNA, 80 bp, synthetic construct
  source 1..80: mol_type = other DNA
agccattccccttgaacacatcaaggggggcagacatcttatcttttgccattcaaagaagaaatgcgatgagctcgcca

SEQ ID NO: 113566 - DNA, 80 bp, synthetic construct
  source 1..80: mol_type = other DNA
tccaaaccctggaaacgccctggaccgtagaaggcgctctagaagcagtaaagattctagatgaaaaaacgacagcggga

SEQ ID NO: 113567 - DNA, 80 bp, synthetic construct
  source 1..80: mol_type = other DNA
accccgccaatttaaagacccgcagccagccgacttttccagttacgggagcgagcccccttttttctttttgccagatg

SEQ ID NO: 113568 - DNA, 80 bp, synthetic construct
  source 1..80: mol_type = other DNA
cgaaacacgtccatctcctggcgcccgacgatcacgccgccgtcgcagcgctccaggtaaaacagcatcttggccagcag

SEQ ID NO: 113569 - DNA, 80 bp, synthetic construct
  source 1..80: mol_type = other DNA
atctgatcatacccaagtccttagctggtccactcagccaccacaacaccagagagggttacagaactcaagtgaaaggg

SEQ ID NO: 113570 - DNA, 80 bp, synthetic construct
  source 1..80: mol_type = other DNA
acgtgacagctgccactgccgacaatcttaaatgtccttgccaggtcccagcacctgagttctttactgaggtagacggc

SEQ ID NO: 113571 - DNA, 80 bp, synthetic construct
  source 1..80: mol_type = other DNA
cctggctgaagctgtaggtcaggggaaggactagaggttagtggagaccccgtgccacaaaacaccacagcaaaacagca

SEQ ID NO: 113572 - DNA, 80 bp, synthetic construct
  source 1..80: mol_type = other DNA
atgtgggggaagccctccaagcgttggccgccaagaccttcagccaaccaccccccagcggcgactcaggtcattccacg

SEQ ID NO: 113573 - DNA, 80 bp, synthetic construct
  source 1..80: mol_type = other DNA
aacttagtagtgtttgtgaggattaacaacaattaacacggtgcgagctgtttcttagcacgaagatctcgatgtctaag

SEQ ID NO: 113574 - DNA, 80 bp, synthetic construct
  source 1..80: mol_type = other DNA
cggagcaggctcgaagaccttggcgggccccaaggggcccatctgtcaaatgtacaccaatgtggatcaagacatggtgg

SEQ ID NO: 113575 - DNA, 80 bp, synthetic construct
  source 1..80: mol_type = other DNA
ggactgggtgaacaaagctgcggagcgatccatgtaagccctcagaaccgcctcggaagtaggaccccacatgttgtagt

SEQ ID NO: 113576 - DNA, 80 bp, synthetic construct
  source 1..80: mol_type = other DNA
tccctggtgaatggcgtggtcaggctcctttcaaagccgtgggataccattaccaacgtcaccactatggctatgacaga

SEQ ID NO: 113577 - DNA, 80 bp, synthetic construct
  source 1..80: mol_type = other DNA
atcattgagaagttggaaaaactgcaacggaagtatggaggaggcctggtcagagtccccttgtctagaaactcgacaca

SEQ ID NO: 113578 - DNA, 80 bp, synthetic construct
  source 1..80: mol_type = other DNA
gattgctgtccttggtccactatacttgatacaagctgctttggtcagtaccccctacttcgtacgcgcacatgttctca

SEQ ID NO: 113579 - DNA, 80 bp, synthetic construct
  source 1..80: mol_type = other DNA
cggggatccagacatgataagatacattgatgagtttggacaaaccacaactagaatgcagtgaaaaaaatgctttattt

SEQ ID NO: 113580 - DNA, 80 bp, synthetic construct
  source 1..80: mol_type = other DNA
gtgaaggagcgagcgtctgaggtgaaggggcgcttactcacttttgaggaggcatgtgccctagtccctccccactctgc

SEQ ID NO: 113581 - DNA, 80 bp, synthetic construct
  source 1..80: mol_type = other DNA
atgaaaagggtgacctcgtagcatggaatgttaagcatgacactcgcaccctttggacaacaccagacacttctccaaac

SEQ ID NO: 113582 - DNA, 80 bp, synthetic construct
  source 1..80: mol_type = other DNA
ttgaagaaccacatgccaccaagcaaactgtggtcgccttaggctcgcaagaaggtgctctacacacagcactggccggg

SEQ ID NO: 113583 - DNA, 80 bp, synthetic construct
  source 1..80: mol_type = other DNA
ctctgctctcttgcttgacaatcccggcctcggccctggaagtgcgcaacgtctctgggagctatcacatcaccaatgat

SEQ ID NO: 113584 - DNA, 80 bp, synthetic construct
  source 1..80: mol_type = other DNA
ctgagacatggatgtcatcggaaggggcttggaaacatgctcagagagtggaaagctggatactcagaaacccaggattc

SEQ ID NO: 113585 - DNA, 80 bp, synthetic construct
  source 1..80: mol_type = other DNA
tttttttttaatgatacggcgaccaccgagatctacacaggcgaagacactctttccctacacgacgctcttccgatctc

SEQ ID NO: 113586 - DNA, 80 bp, synthetic construct
  source 1..80: mol_type = other DNA
aagaatcagccacttctcagagtgatgtggctttagtcaggtacataaaccccaccacaggcagagtactttttgaggca

SEQ ID NO: 113587 - DNA, 80 bp, synthetic construct
  source 1..80: mol_type = other DNA
ctgcagcaggcctctaagcaggcccaggacatacaacccgctatgcaggcttcatggcccaaagtggaacaattttgggc

SEQ ID NO: 113588 - DNA, 80 bp, synthetic construct
  source 1..80: mol_type = other DNA
ggccgggtgaggaagcgcggcatccgcgtggggactcggtgtgggtggcgagggccgtgagtcgtcgcgagtggccaccg

SEQ ID NO: 113589 - DNA, 80 bp, synthetic construct
  source 1..80: mol_type = other DNA
actgaggtcctttaaggaccgtacactccgccatgaatcactcccctgtgaggaactactgtcttcacgcagaaagcgtc

SEQ ID NO: 113590 - DNA, 80 bp, synthetic construct
  source 1..80: mol_type = other DNA
accgagccggccagccccccaacaacccccaagcccacctccacgcccaaaagccccgccacgtccacacccgaccgcaa

SEQ ID NO: 113591 - DNA, 80 bp, synthetic construct
  source 1..80: mol_type = other DNA
agcataccaggccaccgtgtgtgctagggcccaggccccacctccttcatgggaccaacaatggaagtgcctaataaggc

SEQ ID NO: 113592 - DNA, 80 bp, synthetic construct
  source 1..80: mol_type = other DNA
agtgggatgctcaagaaaaaaatggacaaggaggaaatgacatggttaccaaaactcacacatttggcgtggctgctatg

SEQ ID NO: 113593 - DNA, 80 bp, synthetic construct
  source 1..80: mol_type = other DNA
ttgatgctactcgtgggccaagctgaggcagcgttagaaaacctcatagttctcaacgctgcttcagcttcggcaaccca

SEQ ID NO: 113594 - DNA, 80 bp, synthetic construct
  source 1..80: mol_type = other DNA
aaaaccaccaagtacttgacaaaagtcgaaaactgggttttgcgcaatcctggatatgccctagttgcactagtgattgg

SEQ ID NO: 113595 - DNA, 80 bp, synthetic construct
  source 1..80: mol_type = other DNA
gaagtccaaacggactccgctagggttttcctatgacacccgctgttttgactcaactgtcactgaaagagacatccgct

SEQ ID NO: 113596 - DNA, 80 bp, synthetic construct
  source 1..80: mol_type = other DNA
gaaaccttctgctggatggcatgactggcagtatgtccccttctgctcaaaccactttgcagaattgattatgaaagatg

SEQ ID NO: 113597 - DNA, 80 bp, synthetic construct
  source 1..80: mol_type = other DNA
acctcgttcgggtgtacgccttagttggtaccaatctatcccttgattctatgaaaactcctcagattgacgaacttact

SEQ ID NO: 113598 - DNA, 80 bp, synthetic construct
  source 1..80: mol_type = other DNA
caaggatcaaattggatacagaaagagacattggtcactttcaaaaatccccacgcgaagaaacaggatgtcgttgtctt

SEQ ID NO: 113599 - DNA, 80 bp, synthetic construct
  source 1..80: mol_type = other DNA
tccagcggctcctcgcgaacggcaacgtgtacgcggaccgcctcaacaaccgcctgcagctgggcatgctgatccccgga

SEQ ID NO: 113600 - DNA, 80 bp, synthetic construct
  source 1..80: mol_type = other DNA
gcccttcttggggccccacagacccccggcaccgctccaggaatctgggtaaggtcgttgacaccatgacctgcggattt

SEQ ID NO: 113601 - DNA, 80 bp, synthetic construct
  source 1..80: mol_type = other DNA
tgccaggcgtgtacaccaatgaagcgtttcatccggatattgttctattgccggggtgcggagtggattttacgcagagt

SEQ ID NO: 113602 - DNA, 80 bp, synthetic construct
  source 1..80: mol_type = other DNA
gggagttcaggaggacgccacagccctgcgagttttcacggaagctatgaccaggtactccgcccctccgggagaccccc

SEQ ID NO: 113603 - DNA, 80 bp, synthetic construct
  source 1..80: mol_type = other DNA
tttttcaacggtttgaggccgtccgccgtaggcatgcttttgagcgtttgaccaagcagttccaggcggtcccacagctc

SEQ ID NO: 113604 - DNA, 80 bp, synthetic construct
  source 1..80: mol_type = other DNA
gtaaatttgagcccgaagattaccacgcccatactatacatttttacgaagaccaatccagacccccaaaggctccgtta

SEQ ID NO: 113605 - DNA, 80 bp, synthetic construct
  source 1..80: mol_type = other DNA
gtcaccgtaatggcacaggacaaaccgactgtcgacatagagctggttacaacaacagtcagcaacatggcggaggtaag

SEQ ID NO: 113606 - DNA, 80 bp, synthetic construct
  source 1..80: mol_type = other DNA
ctggagtagcaccttcaaccgggagtcctgacgcctcggtagaccagcaagaggacgactcaatttccaaccctgagtcg

SEQ ID NO: 113607 - DNA, 80 bp, synthetic construct
  source 1..80: mol_type = other DNA
aatggtagctcgggtccacagctgacgtcgtctggggtgggggtggcaggagacggaaggtggttgtcagcggaagactg

SEQ ID NO: 113608 - DNA, 80 bp, synthetic construct
  source 1..80: mol_type = other DNA
gaaagaggaatggtgaaaccaagaggtaaagtagtagacctaggatgtggaagaggaggttggtcatactacatggccac

SEQ ID NO: 113609 - DNA, 80 bp, synthetic construct
  source 1..80: mol_type = other DNA
agattcgagggccgccctgaagcgcggcccggatggcctggcccagggcccggaggcacgccagatgtatgcgcgcggta

SEQ ID NO: 113610 - DNA, 80 bp, synthetic construct
  source 1..80: mol_type = other DNA
ttgcaacccagcaactcgagagcaacatcctggacatagacctacgtcccgcatcagcttggacgctgtatgccgtggct

SEQ ID NO: 113611 - DNA, 80 bp, synthetic construct
  source 1..80: mol_type = other DNA
ggccttcaaaattttctccccatagctgtcgcacaagctgcaatgcacccatgacatcaggagctgatatcttgaagtcg

SEQ ID NO: 113612 - DNA, 80 bp, synthetic construct
  source 1..80: mol_type = other DNA
aggggagggaggcacctaatcttctgccactcaaagaagaagtgcgacgagctcgcagcggctcttcggtgcatgggctt

SEQ ID NO: 113613 - DNA, 80 bp, synthetic construct
  source 1..80: mol_type = other DNA
cagatgatcgttgttgaaccagggaagaatgtgaggaatgtccagacaaaaccgggcattttcaaaactcctgagggaga

SEQ ID NO: 113614 - DNA, 80 bp, synthetic construct
  source 1..80: mol_type = other DNA
taaaaatagaaaacgaaaacttaaccctaagcacaggcggacctttcactgtaagcgggggaaatctaaacttaacaaca

SEQ ID NO: 113615 - DNA, 80 bp, synthetic construct
  source 1..80: mol_type = other DNA
gcgacccgtctgcatgaggtataatgcgaacagggggcatgctgaatcccattattcctaagactgcctttggcgtttcc

SEQ ID NO: 113616 - DNA, 80 bp, synthetic construct
  source 1..80: mol_type = other DNA
gcgcggaagccgtgacggcgtcatcttgctgaccagtcttctgtatccctccctggtatttgacattaccaagttgctaa

SEQ ID NO: 113617 - DNA, 80 bp, synthetic construct
  source 1..80: mol_type = other DNA
tggctgatggggggtgttctggcggagcgtatgatataatcatatgcgatgaatgccattccactgaccccacgaccgtc

SEQ ID NO: 113618 - DNA, 80 bp, synthetic construct
  source 1..80: mol_type = other DNA
accacaaggaggcgagagcccgtcgctaacccaaagacacagtcacgagacacgatatcgactgtagttgcgatcgttta

SEQ ID NO: 113619 - DNA, 80 bp, synthetic construct
  source 1..80: mol_type = other DNA
ggcatcgccacactgggggtggtttggtgcttcattgttcggacgtcagtcagcagaatggtcttgggcaccctggtgct

SEQ ID NO: 113620 - DNA, 80 bp, synthetic construct
  source 1..80: mol_type = other DNA
gcgtggccaaagcttgagcagttctggcaaaagcacctgtggaactttgtcagtggtattcagtacttggccggcttgtc

SEQ ID NO: 113621 - DNA, 80 bp, synthetic construct
  source 1..80: mol_type = other DNA
gccggccgccatggcgtagcccaggtggggcacggcccgcgccacgctgccggtgatgaaggagctgctgttgcgcgcgg

SEQ ID NO: 113622 - DNA, 80 bp, synthetic construct
  source 1..80: mol_type = other DNA
attccggaaccagaaaaacagaggtcacagacagacaaccagttggcagtgtttcttatctgcgtcctgaccgtggtcgg

SEQ ID NO: 113623 - DNA, 80 bp, synthetic construct
  source 1..80: mol_type = other DNA
catgcctactggtttgtggagatgatctggtggtggtggctgaaagtgcaggtgttaacgaggacagagctgccctgcga

SEQ ID NO: 113624 - DNA, 80 bp, synthetic construct
  source 1..80: mol_type = other DNA
gaaggcaaggttgaatatgacattgacatgaactttttcgacctaagatcacaaatgactggcctcaagcctaaaattgt

SEQ ID NO: 113625 - DNA, 80 bp, synthetic construct
  source 1..80: mol_type = other DNA
aactgggccaaggtcatcctggtcctcttcctttttgccggagtcgacgccgacactatggtcaccgggaggcaggcagg

SEQ ID NO: 113626 - DNA, 80 bp, synthetic construct
  source 1..80: mol_type = other DNA
caaccggcttgattcatcttcaccagaacatcgtggacgtgcaatacctctatggagtgtccactgccattgtgtcgtgg

SEQ ID NO: 113627 - DNA, 80 bp, synthetic construct
  source 1..80: mol_type = other DNA
ctacaagacccgcgccgaggtgaagttcgagggcgacaccctggtgaaccgcatcgagctgaagggcatcgacttcaagg

SEQ ID NO: 113628 - DNA, 80 bp, synthetic construct
  source 1..80: mol_type = other DNA
gtcttagcagccctcgcagcctattgtttatcagtgggctgcgtcgtcataattgggcacattgagttgggtggcaaacc

SEQ ID NO: 113629 - DNA, 80 bp, synthetic construct
  source 1..80: mol_type = other DNA
tcgtgggtggacggggtccaaatccacaggtttgccccaacaccaaatccgctaatcagggacgaggtctcgtttagtgt

SEQ ID NO: 113630 - DNA, 80 bp, synthetic construct
  source 1..80: mol_type = other DNA
gcctggtatatcaaaggtcggatggttccgtttggtacctactccttgcttggcctgtggtcttttgccctgctgctcct

SEQ ID NO: 113631 - DNA, 80 bp, synthetic construct
  source 1..80: mol_type = other DNA
gggcttccggcagcccggcctccccgaggcccgcgagggcggccaggagctgggcctggagcccggagaaacaaaaccgc

SEQ ID NO: 113632 - DNA, 80 bp, synthetic construct
  source 1..80: mol_type = other DNA
tcaagaaaggcatctagccagtcacagtcacaaggtaggctaagttttgtttcttctaaagtaccaggaagctgagcaat

SEQ ID NO: 113633 - DNA, 80 bp, synthetic construct
  source 1..80: mol_type = other DNA
gatgtcaagaggacgattttggaaatcttttaaaaacgcttgagtacgggctacctattaccgaagcacatgcgcgtctg

SEQ ID NO: 113634 - DNA, 80 bp, synthetic construct
  source 1..80: mol_type = other DNA
tggcagaccagttcaagcaaaaagctcttggcgtcctgggtgttgccagcaaacaggcacaggaagcggcaccagtggtt

SEQ ID NO: 113635 - DNA, 80 bp, synthetic construct
  source 1..80: mol_type = other DNA
caaattcttggcggacggaggctgttcagggggcgcttacgacgtcatcatttgcgacgagtgccactccacggacccta

SEQ ID NO: 113636 - DNA, 80 bp, synthetic construct
  source 1..80: mol_type = other DNA
gtgcgagaatggcccgccaccggatcgcgccggacgggggggggccggtgttgggcaaggtttggtcgcaaggctccagc

SEQ ID NO: 113637 - DNA, 80 bp, synthetic construct
  source 1..80: mol_type = other DNA
tggaggcaggagatgggcagtaacatcacccgggtggagtctgagaacaaggtcgtcatactggactcctttgaccccat

SEQ ID NO: 113638 - DNA, 80 bp, synthetic construct
  source 1..80: mol_type = other DNA
ccgtgcgcatgccttgttgagagcttgcttgcttgtacgccagcttgctggagccaagtatgtccaagccctcatgctaa

SEQ ID NO: 113639 - DNA, 80 bp, synthetic construct
  source 1..80: mol_type = other DNA
atctggacaaaggaaggagaaaggaaaaaattgagacctaggtggcttgatgcccgcacttattcagatcccttagcact

SEQ ID NO: 113640 - DNA, 80 bp, synthetic construct
  source 1..80: mol_type = other DNA
cttggacaacatggaggtgaggggtggaatggtcgccccactctatggcgttgaaggaactaaaacaccagtttcccctg

SEQ ID NO: 113641 - DNA, 80 bp, synthetic construct
  source 1..80: mol_type = other DNA
cttaaacagtttcacggcctgttatttcctcggggtatgccaccaaacagtaaatcccccaacccgcagtggttttggac

SEQ ID NO: 113642 - DNA, 80 bp, synthetic construct
  source 1..80: mol_type = other DNA
tctccaagcgggcttgctgcgggtaccatactacgtgcgggctcacgctctgctgcgggtttgtttgctctgccgccggc

SEQ ID NO: 113643 - DNA, 80 bp, synthetic construct
  source 1..80: mol_type = other DNA
cagcattgccgcgcgcattgcgataaactggatttgcgcactgaaaaaccaacaaacacggatacttaatactggctaac

SEQ ID NO: 113644 - DNA, 80 bp, synthetic construct
  source 1..80: mol_type = other DNA
gaggtcatgcctagataaaagggcaccaggacccccgggacggacaccacaccggcgctgtcgccccggcattaagcgtc

SEQ ID NO: 113645 - DNA, 80 bp, synthetic construct
  source 1..80: mol_type = other DNA
gctgacatccatgcttacagatcccgcgcacatcaccgcggaggcagcaggtcggaaattggctagagggtccccgccct

SEQ ID NO: 113646 - DNA, 80 bp, synthetic construct
  source 1..80: mol_type = other DNA
ctgcctgaggcggttatggggtccgcttacggattccagtactcgcctaaagcgcgagtggattacctcttaaaaatgtg

SEQ ID NO: 113647 - DNA, 80 bp, synthetic construct
  source 1..80: mol_type = other DNA
aaatacggaggagctttggtgaggaatccactctcaagaaattccacacatgagatgtattgggtatccaatgcttccgg

SEQ ID NO: 113648 - DNA, 80 bp, synthetic construct
  source 1..80: mol_type = other DNA
tgagcggagacggcattcgggcctgcctgcggctcgtcgacggcgtcggcggtattgaccagttttgcgaggagcccgcc

SEQ ID NO: 113649 - DNA, 80 bp, synthetic construct
  source 1..80: mol_type = other DNA
agggtggttagctggaatgtctatcacgtggacagtctacaagaacgtggacaagcccaagggaaagcgtggaggaggaa

SEQ ID NO: 113650 - DNA, 80 bp, synthetic construct
  source 1..80: mol_type = other DNA
ttggaagcttttggctcccatcaccgcgtatgcgcagcagacgaggggcctagtcggcaccattgtgaccagcctaaccg

SEQ ID NO: 113651 - DNA, 80 bp, synthetic construct
  source 1..80: mol_type = other DNA
cttcttcaggcccggtgcccagcaaaacctccagctcatcaacaccagcggcagctggcacatcaaccgcacggcgctta

SEQ ID NO: 113652 - DNA, 80 bp, synthetic construct
  source 1..80: mol_type = other DNA
ttgcctgttgatcttgctcctaatctgtcaggcagaagcaacctgcaagaacgtcattgtcctaaacgcggctgcggccg

SEQ ID NO: 113653 - DNA, 80 bp, synthetic construct
  source 1..80: mol_type = other DNA
cagggagattcagcatcactcctgcggcgccttcatacacactaaagcttggagaatatggagaggtgacagtggactgt

SEQ ID NO: 113654 - DNA, 80 bp, synthetic construct
  source 1..80: mol_type = other DNA
cattgagaggctccatggccttggcgctttttcactccacagctactctccaggcgaaatcaacagggtggctgcatgcc

SEQ ID NO: 113655 - DNA, 80 bp, synthetic construct
  source 1..80: mol_type = other DNA
gcttgcatgtccgcggacttggaggtcatcaccagcacttgggttttagtagggggtgttgtggcggctctagcggccta

SEQ ID NO: 113656 - DNA, 80 bp, synthetic construct
  source 1..80: mol_type = other DNA
aaagaccccgacccgcgtctgtggtgtttttggcatcatgtcgccgggcgccatgcgtgccgttgttcccattatcccat

SEQ ID NO: 113657 - DNA, 80 bp, synthetic construct
  source 1..80: mol_type = other DNA
aaacggttacagaggaacgtaactttcaaaaaagctttaataaccatgtgcgcacactaatagcgcgagaagaagtagcc

SEQ ID NO: 113658 - DNA, 80 bp, synthetic construct
  source 1..80: mol_type = other DNA
ggcgactacctagatgtgggagacgacgtgctgttgaagcatctgcagcgccagtgcgccattatctgcgacgcgttgca

SEQ ID NO: 113659 - DNA, 80 bp, synthetic construct
  source 1..80: mol_type = other DNA
tcctggaggggggcgttgtggcggtcggccaacacgaccaaggaggccaggaaggcgcgatgctcgaatatcgtgttgat

SEQ ID NO: 113660 - DNA, 80 bp, synthetic construct
  source 1..80: mol_type = other DNA
agcgttccaataccagcccccaactataagcgtgctctttggcgggtctccgccgaagagtatgccgaagtagtaagggt

SEQ ID NO: 113661 - DNA, 80 bp, synthetic construct
  source 1..80: mol_type = other DNA
gtctgtgtgcgtattgcatacctcaggcatcatccgcaatacaggaacagaactatagccgatcttcttagaattcttta

SEQ ID NO: 113662 - DNA, 80 bp, synthetic construct
  source 1..80: mol_type = other DNA
ggacatacaaaaatcggtccgtgtggttaaagagcagcacagagagatcatgtcttctcccggcaaatatcacatcggac

SEQ ID NO: 113663 - DNA, 80 bp, synthetic construct
  source 1..80: mol_type = other DNA
cgagttgctgttctggaccaaagcccacgtctgctgcagcagcgcgaggagccgttgctgggccccggcggagagcggct

SEQ ID NO: 113664 - DNA, 80 bp, synthetic construct
  source 1..80: mol_type = other DNA
acagccacattggatagcagcttcaataatactggagttttttctcatagtcttgctcattccagaaccagaaaagcaga

SEQ ID NO: 113665 - DNA, 80 bp, synthetic construct
  source 1..80: mol_type = other DNA
acattggagaatcttcaccaagcccaacagtggaagagagcagaactataagagttttgaagatggttgaaccatggcta

SEQ ID NO: 113666 - DNA, 80 bp, synthetic construct
  source 1..80: mol_type = other DNA
cctcatcaaagaaaaaaggagctctgcagcaaaaaagaaaggggcttgcctcatctgcctagcgctggcgtctacaggag

SEQ ID NO: 113667 - DNA, 80 bp, synthetic construct
  source 1..80: mol_type = other DNA
tactgctcgtggtatggcagctgattttggactttacaatcaactggctgcgtctcggtcgttgagggaagaagatgccc

SEQ ID NO: 113668 - DNA, 80 bp, synthetic construct
  source 1..80: mol_type = other DNA
aagccaacttgctttggcggcaggagatgggcagcaacatcacccgggtggagtctgagacaaaggtggtaattcttgat

SEQ ID NO: 113669 - DNA, 80 bp, synthetic construct
  source 1..80: mol_type = other DNA
gaggaccccacatgttgtaacttcaaagcccaatgtcagaccacgctacggcgtgccactctgcggagagtgcagtctgc

SEQ ID NO: 113670 - DNA, 80 bp, synthetic construct
  source 1..80: mol_type = other DNA
aataaaaagatttaattgtctgccctgggccctgagctcgcgtcgcagcgtcagctgcaaaaagtcattcaagtcctcag

SEQ ID NO: 113671 - DNA, 80 bp, synthetic construct
  source 1..80: mol_type = other DNA
acacaggttctttgctggcaaagcgctgatccgtaatggaaatgaaaccttcagaaacatcgtccaacagcacggtggag

SEQ ID NO: 113672 - DNA, 80 bp, synthetic construct
  source 1..80: mol_type = other DNA
ctaaacaaaaaacattgcaaactacaattcaggttatgattcctattggaactaattatactttagtggggccttcgcca

SEQ ID NO: 113673 - DNA, 80 bp, synthetic construct
  source 1..80: mol_type = other DNA
ttggcaacacaatcacttgttacatcaaggccacagcggctgcgagggccgcaggcctccggaacccggactttcttgtc

SEQ ID NO: 113674 - DNA, 80 bp, synthetic construct
  source 1..80: mol_type = other DNA
gcgccgcctggggcgcggtcattcacaccgtgctcttgtggcgcgagcgaccttttcctcgtcactaggaacgccgatgt

SEQ ID NO: 113675 - DNA, 80 bp, synthetic construct
  source 1..80: mol_type = other DNA
cccaaggcaggatgaagctgtaatcctgctggaaggactagaggttagaggagacccccccaaaaacaaaacagcatatt

SEQ ID NO: 113676 - DNA, 80 bp, synthetic construct
  source 1..80: mol_type = other DNA
aggaagaattggtgctgtgtcattggactttgctccaggaacctcaggatcccccatcatagacaaaaaagggaaagtga

SEQ ID NO: 113677 - DNA, 80 bp, synthetic construct
  source 1..80: mol_type = other DNA
tgtcctccatgccccctctcgagggggaggcgggggacccggacctggagctcgtgccagtcgaagcccagcccgctcct

SEQ ID NO: 113678 - DNA, 80 bp, synthetic construct
  source 1..80: mol_type = other DNA
aggctttaaggtgctagtgctcaacccctcggttgctgcgacactgggcttcgggagctacatgtctaaggcgcacggca

SEQ ID NO: 113679 - DNA, 80 bp, synthetic construct
  source 1..80: mol_type = other DNA
tctggccgcgggggccgcccaggactactccagcaagatgaactggctcagcgccggcccccacatgatctcacgagtta

SEQ ID NO: 113680 - DNA, 80 bp, synthetic construct
  source 1..80: mol_type = other DNA
aaacataaagaaaggcccggcgccattctatccgctggaagatggaaccgctggagagcaactgcataaggctatgaaga

SEQ ID NO: 113681 - DNA, 80 bp, synthetic construct
  source 1..80: mol_type = other DNA
accggcccgatgcgcccaatggccccacgggcgcgcccaccgaacaggagaggttcgagtggagccgggcgctctaccgg

SEQ ID NO: 113682 - DNA, 80 bp, synthetic construct
  source 1..80: mol_type = other DNA
tgggcgacaggcttagtcccgggtccggggcgcgtgtggcccccggagtggagaagagggcagacccgccccagtcgtac

SEQ ID NO: 113683 - DNA, 80 bp, synthetic construct
  source 1..80: mol_type = other DNA
agatcatcggcctggtgggctcggccactcagcaagctgaagtcctcaaacctgcggccacatccatgtgggccaaggcc

SEQ ID NO: 113684 - DNA, 80 bp, synthetic construct
  source 1..80: mol_type = other DNA
caactccactgggtgtccgcagcggatggctagctgtaggcccctcgccgcattcgaccagggctggggaactatcagct

SEQ ID NO: 113685 - DNA, 80 bp, synthetic construct
  source 1..80: mol_type = other DNA
gagtacgtcgtcctcctattcctaatcttggctgacgcgcgcatatgcgcgtgtctctggttgatgctccttgttgggac

SEQ ID NO: 113686 - DNA, 80 bp, synthetic construct
  source 1..80: mol_type = other DNA
cttgaccctacttttaccattgagacaaccacactgccccaggacgcggtgtcccgtgcgcagcggcggggtaggaccgg

SEQ ID NO: 113687 - DNA, 80 bp, synthetic construct
  source 1..80: mol_type = other DNA
taggccggtacacacagcgccacggcctgtacgtccctcggcccgacgacccagtcttggccgatgccatcaacgggctg

SEQ ID NO: 113688 - DNA, 80 bp, synthetic construct
  source 1..80: mol_type = other DNA
tgaaccggaggccagaaaagtgatctcctccctcacggaacggctttactgcggtggccctatgtttaacagcaagggag

SEQ ID NO: 113689 - DNA, 80 bp, synthetic construct
  source 1..80: mol_type = other DNA
ccgggccgactatgacattatcgacgtcagcaagtccatggacgacgacacgtacgtcgccaacagttttcagcacccgt

SEQ ID NO: 113690 - DNA, 80 bp, synthetic construct
  source 1..80: mol_type = other DNA
taaaatcaaggggacgacttatggcatgtgtgactctgctttcaccttcagcaagaaccctgctgacacagggcatggga

SEQ ID NO: 113691 - DNA, 80 bp, synthetic construct
  source 1..80: mol_type = other DNA
aacctatgggacctgtaccactacgggagaacatagaagagaaaaaagatcagtggcactcgttccacatgtgggaatgg

SEQ ID NO: 113692 - DNA, 80 bp, synthetic construct
  source 1..80: mol_type = other DNA
tgttaagaacctattgcattgaagccttaatatcaaacataactacggcaacaagatgtccaacgcaaggagagccttat

SEQ ID NO: 113693 - DNA, 80 bp, synthetic construct
  source 1..80: mol_type = other DNA
cagggtgacccctgcccggacaagctcggcggccgccgccgggtcgttgcgcaccgcggatatctcctccgcggcgacgg

SEQ ID NO: 113694 - DNA, 80 bp, synthetic construct
  source 1..80: mol_type = other DNA
gagataaggcaggtgggggacttccactacgtgacgggcatgactactgacaatcttaaatgcccatgccaggtcccagc

SEQ ID NO: 113695 - DNA, 80 bp, synthetic construct
  source 1..80: mol_type = other DNA
ttaggacaagtcatgctactagtcctgtgtgttggacaattacttttgatgagaacaacatgggccctctgcgaagtatt

SEQ ID NO: 113696 - DNA, 80 bp, synthetic construct
  source 1..80: mol_type = other DNA
gatgttcgttttgtgcaagcgcgccaacgccgcgcaggtgcgcgagcagctgcgggcggttattcggtcgcgcaagccgc

SEQ ID NO: 113697 - DNA, 80 bp, synthetic construct
  source 1..80: mol_type = other DNA
tgtttcggccgcccttgcgcagttggctgcaaagacctttgacgcgcccagttcctcttccacgggatatgggtcggatc

SEQ ID NO: 113698 - DNA, 80 bp, synthetic construct
  source 1..80: mol_type = other DNA
gttagccttgggcatgatggtcctcaaaatagtgagaaatatggaaaaataccaattggcagtgactatcatggctatct

SEQ ID NO: 113699 - DNA, 80 bp, synthetic construct
  source 1..80: mol_type = other DNA
gcactacctccctgggcccgtccggactataaccctcctacgatcgagatatggaagaggccgggctatgaaccacctac

SEQ ID NO: 113700 - DNA, 80 bp, synthetic construct
  source 1..80: mol_type = other DNA
tgcggtcggaaatgacacaggaaaacacggccaggaaatcaaagtaacaccacagagttccatcacagaagcagaattga

SEQ ID NO: 113701 - DNA, 80 bp, synthetic construct
  source 1..80: mol_type = other DNA
ctcccctgctgaaacacgcatacaggaaaataatcgggacgtccttgagctaataaaacgggccgtaaacattgttaact

SEQ ID NO: 113702 - DNA, 80 bp, synthetic construct
  source 1..80: mol_type = other DNA
tagcacgaagatttcgatgtctaggaaaccaggagggcccggagataaccgggctgtcaatatgcaaaaacgcggtaagc

SEQ ID NO: 113703 - DNA, 80 bp, synthetic construct
  source 1..80: mol_type = other DNA
gttatttgatgataatggaaaacttttagaaggatctagtttagataaagattattggaacttcagaagtgatgattcta

SEQ ID NO: 113704 - DNA, 80 bp, synthetic construct
  source 1..80: mol_type = other DNA
gctaaggtcttgattgtgatgctgctttttgccggcgttgacgggaacactcgcgcggtggggatggtgcaaagccgaac

SEQ ID NO: 113705 - DNA, 80 bp, synthetic construct
  source 1..80: mol_type = other DNA
agcagcttgggaaacagcccgccacactccagtgaattcatggctgggcaacatcatcatgtacgcgcccactatatggg

SEQ ID NO: 113706 - DNA, 80 bp, synthetic construct
  source 1..80: mol_type = other DNA
cacccaatgtggccgtcagacgccgaggcgctctcaccaagggcctgagaactcacattgacaccatcgtgatgtcggca

SEQ ID NO: 113707 - DNA, 80 bp, synthetic construct
  source 1..80: mol_type = other DNA
aagttgctgggggtcattacgtccaaatggctttcatgaagctggccgcgctgacaggtacgtacgtctatgatcatctt

SEQ ID NO: 113708 - DNA, 80 bp, synthetic construct
  source 1..80: mol_type = other DNA
cggcggtcccagttagctgggtgcccacgggcaggactacctggtcaattcatgcgagaggcgagtggatgaccacagca

SEQ ID NO: 113709 - DNA, 80 bp, synthetic construct
  source 1..80: mol_type = other DNA
cccgacgccgggctaccgcggcacccggtattacgccagccgcaggcgcccagccagcaaacgccgccgccgcaccgcca

SEQ ID NO: 113710 - DNA, 80 bp, synthetic construct
  source 1..80: mol_type = other DNA
tacctgagctcattcttgagatcatcactggagcgcattggggcgtgatgttcggcctagcctacttctccatgcaggtg

SEQ ID NO: 113711 - DNA, 80 bp, synthetic construct
  source 1..80: mol_type = other DNA
accttccagccataattgaacgactccacgggcttgaagccttttcactccacacatacactccccacgaactctccagg

SEQ ID NO: 113712 - DNA, 80 bp, synthetic construct
  source 1..80: mol_type = other DNA
cccggggacccccctcgaccagaatacgacttagagctcataacatcgtgctcttctaatgtgtcagtcgcccacgacgg

SEQ ID NO: 113713 - DNA, 80 bp, synthetic construct
  source 1..80: mol_type = other DNA
ggaagccagttggcggcagaagcaggaggtcggtgtcgattccagtgcatgctcatagtgatcttaccggaagagggcat

SEQ ID NO: 113714 - DNA, 80 bp, synthetic construct
  source 1..80: mol_type = other DNA
tggagtgcttgtgattctgctcatggtacaggaagggctaaagaagagaatgaccacaaagatcatcataagcacatcaa

SEQ ID NO: 113715 - DNA, 80 bp, synthetic construct
  source 1..80: mol_type = other DNA
ggttcggttacggtccctcacccaaacatcacggaggaggccctgcccaccaccggcgagatccccttctacgggaagcg

SEQ ID NO: 113716 - DNA, 80 bp, synthetic construct
  source 1..80: mol_type = other DNA
aggagacacgtcgacgtgatggttggggccgcggccttctgctcggcgatgtacgtgggtgacctttgcggatctatctt

SEQ ID NO: 113717 - DNA, 80 bp, synthetic construct
  source 1..80: mol_type = other DNA
ttgacgcagaaacgcacaccgttggggcagtcgccggccgtcaagttggtgggattgcaggtcttttcatgccgggtgct

SEQ ID NO: 113718 - DNA, 80 bp, synthetic construct
  source 1..80: mol_type = other DNA
ttcgatcaagggtggggacccatcacctatgctgagcctcaaaaaacggatcagaggccctattgctggcactacgcgcc

SEQ ID NO: 113719 - DNA, 80 bp, synthetic construct
  source 1..80: mol_type = other DNA
caccaccccgttcggccagcaaagagtcttcaaagagaaagtggacacaaaggcaccagaacctcccgagggagtgagaa

SEQ ID NO: 113720 - DNA, 80 bp, synthetic construct
  source 1..80: mol_type = other DNA
tatgtccaggctttcttgctgagactgggggccatgacgggtacatacatctatgaccatctcagccctcttgccgactg

SEQ ID NO: 113721 - DNA, 80 bp, synthetic construct
  source 1..80: mol_type = other DNA
gaaaaaggcggccgaaaacctgcccgtttgatcgtgtacccggacttaggggttcgggtctgcgagaaaagggcgcttca

SEQ ID NO: 113722 - DNA, 80 bp, synthetic construct
  source 1..80: mol_type = other DNA
gtatcgcgcggccgggtagcacaggagagcggcgatgggatggcggtcgaagatgagggtgaggcccgggtgcgtggcat

SEQ ID NO: 113723 - DNA, 80 bp, synthetic construct
  source 1..80: mol_type = other DNA
tgttcaaactcaaaatcgtccacgtccaaagccccatacgagacggggtcgtgggtcattcccggggagagggactccac

SEQ ID NO: 113724 - DNA, 80 bp, synthetic construct
  source 1..80: mol_type = other DNA
gtcacctcgtgggtcatcaggtgggagtatgtagtcctcgctttcttgttcctggcagacgcgcgcatttgcgcgtgttt

SEQ ID NO: 113725 - DNA, 80 bp, synthetic construct
  source 1..80: mol_type = other DNA
agaactcgtcatcgacattcttgcgggtggccactggggcatcatggctggcttactgtactatggtatggtgggcaatt

SEQ ID NO: 113726 - DNA, 80 bp, synthetic construct
  source 1..80: mol_type = other DNA
tggttggatggccagcacctgcggggactaagtcccttgacccctgcacgtgcggttcttccgacttatacctggtgaca

SEQ ID NO: 113727 - DNA, 80 bp, synthetic construct
  source 1..80: mol_type = other DNA
tcgcagcgtaaagacgccgccgcgcatctccaggtggcccgggaggtccccgttgggcagggagagtgcgctgacgatgc

SEQ ID NO: 113728 - DNA, 80 bp, synthetic construct
  source 1..80: mol_type = other DNA
gagtctcgttcagcgtattcggcttatcgtcccatctacgttgcggggcggggacggggaggcgggcccctactctcgct

SEQ ID NO: 113729 - DNA, 80 bp, synthetic construct
  source 1..80: mol_type = other DNA
gacggggtgcgaattcatcgatatgcgcccgaatgtaaacctatgttgcgggacgaggttaccttctccgtgggattgtc

SEQ ID NO: 113730 - DNA, 80 bp, synthetic construct
  source 1..80: mol_type = other DNA
ggccgcggcgggagttctgcgcgcgggcgctgctcgagcccgacggcgacgcgcccccgctggtgctgcgcgacgacgcg

SEQ ID NO: 113731 - DNA, 80 bp, synthetic construct
  source 1..80: mol_type = other DNA
ttgcccgtttcggcgcggttgggccgcgagttgttgctgggtccggctgacgattacaagaagatgggatggcgcctact

SEQ ID NO: 113732 - DNA, 80 bp, synthetic construct
  source 1..80: mol_type = other DNA
cacccgtggccgatcgaggctccccagagacgcgcgccggacgaggaggtggcacgtcgccgccggcggtcgcctgtcgg

SEQ ID NO: 113733 - DNA, 80 bp, synthetic construct
  source 1..80: mol_type = other DNA
acataagcattagaatagccttcttgttcaggtaacatagccccgggtcccttaaaatacacatatacagcctcgaaaac

SEQ ID NO: 113734 - DNA, 80 bp, synthetic construct
  source 1..80: mol_type = other DNA
ttcggcgcctcaatgaacccgtcttccccccgagggggtcgatgggacacttccattaaagtagcgcgtaagcactgcgt

SEQ ID NO: 113735 - DNA, 80 bp, synthetic construct
  source 1..80: mol_type = other DNA
cctaaatgcaagaacgatgactgggacttcgtgatcacaactgacatctcagagatgggagccaacttcaaggctagccg

SEQ ID NO: 113736 - DNA, 80 bp, synthetic construct
  source 1..80: mol_type = other DNA
gttggctgcgcgccgccccggcctggtgtttatgctctggggcgcacatgcccagaatgccatcaggccggaccctcggg

SEQ ID NO: 113737 - DNA, 80 bp, synthetic construct
  source 1..80: mol_type = other DNA
caaggtgagttcacaatctctcctaacaataccccacaattaggtccacatctaaaccctttcttgtcacatttgtccca

SEQ ID NO: 113738 - DNA, 80 bp, synthetic construct
  source 1..80: mol_type = other DNA
ccatcaggctggcccagttcccggcctgaaacacacggtcgttgccggccatgccgtagtacttgctgatgctcaacccc

SEQ ID NO: 113739 - DNA, 80 bp, synthetic construct
  source 1..80: mol_type = other DNA
gtggacgttcagatacccactaccagtagcaccagtattgccaccgccacagagggcatggagacacaaacatccccggt

SEQ ID NO: 113740 - DNA, 80 bp, synthetic construct
  source 1..80: mol_type = other DNA
aatcagtcacgttgctgggtggcccttactcctaccgtcgcagcgccgtacatcggtgcgccacttgagtctctacggag

SEQ ID NO: 113741 - DNA, 80 bp, synthetic construct
  source 1..80: mol_type = other DNA
ccagagcaaaggatccaccagcagggaccaggaaaatcatgaaggttgtcaataggtggctattccgtcacttggccaga

SEQ ID NO: 113742 - DNA, 80 bp, synthetic construct
  source 1..80: mol_type = other DNA
cggggggcgtcgacccgggacgaaggaaaaaaataagggacgcccgccgtgtttgtggggaggggaggtcgggcgctggg

SEQ ID NO: 113743 - DNA, 80 bp, synthetic construct
  source 1..80: mol_type = other DNA
ctgcccgcactgttgtcacctggggcattggtagtgggagtggtctgcgctgcagtcctaaggcgccacgtgggccccag

SEQ ID NO: 113744 - DNA, 80 bp, synthetic construct
  source 1..80: mol_type = other DNA
caaagcagttcagtttgttcccatcgagaagatgcaggtggcccagaggtcgccatcattcagtgacaatagcacccctc

SEQ ID NO: 113745 - DNA, 80 bp, synthetic construct
  source 1..80: mol_type = other DNA
gagtgcgcgtgtgcgagaagagggctttgtatgacgtagtcaaacagctccctattgccgtgatgggagcctcctacggg

SEQ ID NO: 113746 - DNA, 80 bp, synthetic construct
  source 1..80: mol_type = other DNA
cacctttatgcatatataaaaaacttatagggtcagcattaaatactttactcataccatcccgtcgcatggaaacatca

SEQ ID NO: 113747 - DNA, 80 bp, synthetic construct
  source 1..80: mol_type = other DNA
ctacccgggccatatcacagggcagaggatggcgtgggacatgatgcaaaactggtcccccactgtcacttggttcacgg

SEQ ID NO: 113748 - DNA, 80 bp, synthetic construct
  source 1..80: mol_type = other DNA
gtcttgattcctgagtctgagaagcagcgctcccaaacagacaatcaactagctgtgtttctgatttgtgtgctgtcgct

SEQ ID NO: 113749 - DNA, 80 bp, synthetic construct
  source 1..80: mol_type = other DNA
tggggtcaaagcagaatctccagctcatcaataccaatggcagctggcacgtcaatcggacggctttaaattgtaatgac

SEQ ID NO: 113750 - DNA, 80 bp, synthetic construct
  source 1..80: mol_type = other DNA
aacttaaagagtcccactggtgtgagaaaggagtgctgtgccatgttaagcaggcagccctttcttacgatgtcagcctt

SEQ ID NO: 113751 - DNA, 80 bp, synthetic construct
  source 1..80: mol_type = other DNA
tcgagccgttgaaagatgaatatgatgacagggaaatatcaacagcggcggagtgccataggccccgacggcctgcgttt

SEQ ID NO: 113752 - DNA, 80 bp, synthetic construct
  source 1..80: mol_type = other DNA
accatcaatcttgacgaccggtcgcactggggcggcgacctgaaaaccatcctgcataccaacatgccaaatgtgaacga

SEQ ID NO: 113753 - DNA, 80 bp, synthetic construct
  source 1..80: mol_type = other DNA
cgtatccgtcctgggcgctcagcgcgagcagccgggggatgagcgtgaggatgagggtggttccttcggttatggagtag

SEQ ID NO: 113754 - DNA, 80 bp, synthetic construct
  source 1..80: mol_type = other DNA
cagaccgacaattgacgtgaagatggtcaccatgggagcaagcaatatggcggaggtgcgaagctactgctacgctgctt

SEQ ID NO: 113755 - DNA, 80 bp, synthetic construct
  source 1..80: mol_type = other DNA
ccctcgtggccgagtgcgatgacagggaaatatcaacagcggctgaatgccacagaccacgcagaccaaaatatccgcca

SEQ ID NO: 113756 - DNA, 80 bp, synthetic construct
  source 1..80: mol_type = other DNA
gtaccggatatcaaacgtcaatccgccgttgaagcgttacgaacacttcaaaccaagacggtagtcaatcccatgggagc

SEQ ID NO: 113757 - DNA, 80 bp, synthetic construct
  source 1..80: mol_type = other DNA
acgtcaagttcccgggtggcggagtgatctatgtgggagtatacgtgttgccgcgcaggaggccacgattgggtgtgcgc

SEQ ID NO: 113758 - DNA, 80 bp, synthetic construct
  source 1..80: mol_type = other DNA
tggaaccagtatttcatcgcacgggtggaagctttcctccaggtgtggataccgccactccaagttaggggtggtcgtga

SEQ ID NO: 113759 - DNA, 80 bp, synthetic construct
  source 1..80: mol_type = other DNA
aaagaaggtgacttttgaccgactccaggtgctagaccagcactaccaagacacattaaaggaggtcatggcccgggcgt

SEQ ID NO: 113760 - DNA, 80 bp, synthetic construct
  source 1..80: mol_type = other DNA
ttcctatttaacatcctcttctgtctcttcaacatctgcgctgccttcgcggccgtctcgcacgcctcgcccgactgtct

SEQ ID NO: 113761 - DNA, 80 bp, synthetic construct
  source 1..80: mol_type = other DNA
atgcgtcagcgctttggacgttttctacacgctcatgcatgaggaacctggcagtagggcaatgaagatggcagagagag

SEQ ID NO: 113762 - DNA, 80 bp, synthetic construct
  source 1..80: mol_type = other DNA
agaccttgaggtcatgaccagcacatgggttctggctggaggggttctggcagctgttgcagcttactgcctggcaactg

SEQ ID NO: 113763 - DNA, 80 bp, synthetic construct
  source 1..80: mol_type = other DNA
ggcagcattgacacatgcgcgaaattcacctgcacaaccaaagccattggaagaaccatattgaaagaaaatatcaagta

SEQ ID NO: 113764 - DNA, 80 bp, synthetic construct
  source 1..80: mol_type = other DNA
ggcgctgaggaggcgtggcgcagatccacgtgctccgcggccgcgcggacgtccgcccagaacttggcgtgggtggtgcg

SEQ ID NO: 113765 - DNA, 80 bp, synthetic construct
  source 1..80: mol_type = other DNA
gggcccacgggcgccggccgcgtgctttcggccgggacgcccggtcgtgcttcgcgagccgtgactgccggcccagggtg

SEQ ID NO: 113766 - DNA, 80 bp, synthetic construct
  source 1..80: mol_type = other DNA
cagcatcgcacagaaagctcatccaagtttttacaataggtacagcccaacaccaccatattattcatgattccataact

SEQ ID NO: 113767 - DNA, 80 bp, synthetic construct
  source 1..80: mol_type = other DNA
gaccatctaatgtggtagcccatccatttcgcaccagccggccccatgagcgccaactcgtttgatggaagcattgtgag

SEQ ID NO: 113768 - DNA, 80 bp, synthetic construct
  source 1..80: mol_type = other DNA
agtgctgaaagtggaggaactatagatgtaagacttggaagtggaggaggtttgtcatttgataaagacggaaacctagt

SEQ ID NO: 113769 - DNA, 80 bp, synthetic construct
  source 1..80: mol_type = other DNA
gcacctccaccagaacatcgtggacgtgcagtacttatatggcctaacaccagcaattacaaaatatgctgtgaagtggg

SEQ ID NO: 113770 - DNA, 80 bp, synthetic construct
  source 1..80: mol_type = other DNA
tactgggtcccgctgatggatacacttccaagggttggaggcttctcgcccccatcaccgcgtacgcccagcaaacccga

SEQ ID NO: 113771 - DNA, 80 bp, synthetic construct
  source 1..80: mol_type = other DNA
agacaccggggacgcccgtgcggatcacagggaaggcgtcggcgaaggaggcagagagcgtcggaaggcggcgagagagg

SEQ ID NO: 113772 - DNA, 80 bp, synthetic construct
  source 1..80: mol_type = other DNA
cggagacgacttagtagtcgttgccgagagtgctgggatccaggaggatgcgtctgccctgcgagctttcacggaagcta

SEQ ID NO: 113773 - DNA, 80 bp, synthetic construct
  source 1..80: mol_type = other DNA
aattctgacacaagtaaaattaggaatcgagttgaaagactaaaacaggaatatggatcgacgtggcaccacgatgagaa

SEQ ID NO: 113774 - DNA, 80 bp, synthetic construct
  source 1..80: mol_type = other DNA
tacgagcaagccttgaaagagggcgcctctccaccctcctacccgatgactaagccgatcgcacccatggctcgaccggt

SEQ ID NO: 113775 - DNA, 80 bp, synthetic construct
  source 1..80: mol_type = other DNA
actttgctatgatgtaacccaacaggggcacgagctatcatacactttaaacaagcaaagacagagctttatgactatgg

SEQ ID NO: 113776 - DNA, 80 bp, synthetic construct
  source 1..80: mol_type = other DNA
gggcgtattttttgagttatcgagattttcaggagctaaggaagctaaaatggagaaaaaaatcactggatataccaccg

SEQ ID NO: 113777 - DNA, 80 bp, synthetic construct
  source 1..80: mol_type = other DNA
aaacctcatcctcggagccgcgctccggaggcattggaactctacaatttattgaggagttcgtgccttcggtttacttc

SEQ ID NO: 113778 - DNA, 80 bp, synthetic construct
  source 1..80: mol_type = other DNA
ggccgcactggcagagggaagcacggggtgtatagatacgtctcgcagggagagcgaccgtcaggaatgtttgactctgt

SEQ ID NO: 113779 - DNA, 80 bp, synthetic construct
  source 1..80: mol_type = other DNA
ccctcaaagaacgtggtgttgggcgccggccaattcttcccgaagcgccgtcgtcgcccgcccgccgccctcgaacatgg

SEQ ID NO: 113780 - DNA, 80 bp, synthetic construct
  source 1..80: mol_type = other DNA
tgtacgcggaccgcctcgacaaccgcctgcagctgggcatgctgatcccgggagccgtcccggcggaggccatcgctcgg

SEQ ID NO: 113781 - DNA, 80 bp, synthetic construct
  source 1..80: mol_type = other DNA
ggtaagactccgggcttatttcaacacgcccggcttacccgtgtgtcaagaccacctggagttctgggaagcggtcttca

SEQ ID NO: 113782 - DNA, 80 bp, synthetic construct
  source 1..80: mol_type = other DNA
gacgtggcggcgacgtccggcgacatagccgcggtgttccgcgacccgctgcgcgttggggacctgcacgagctcgggcg

SEQ ID NO: 113783 - DNA, 80 bp, synthetic construct
  source 1..80: mol_type = other DNA
ggcgctatgtgccaattacgtgcttccgctgtaccgggccgacccggcggtcgagctgacccagctgtttcccggcctgg

SEQ ID NO: 113784 - DNA, 80 bp, synthetic construct
  source 1..80: mol_type = other DNA
tatcatgtcccaccacattggccactcctgcaatactacaaaaggcgcacaagatggaatagacctcacctcgctcacat

SEQ ID NO: 113785 - DNA, 80 bp, synthetic construct
  source 1..80: mol_type = other DNA
atggagcctgagagaaactgcttgcctaggcaagtcatatgcacaaatgtggcagctgatgtacttccacaggagagacc

SEQ ID NO: 113786 - DNA, 80 bp, synthetic construct
  source 1..80: mol_type = other DNA
aaacaccaatggcagctggcacctcaacaggacggccctgaactgttttgacagtctcaatacaggctttctcgcggccc

SEQ ID NO: 113787 - DNA, 80 bp, synthetic construct
  source 1..80: mol_type = other DNA
tcctggctggcttggcttatttttccatgcaggccaattgggcgaaggtcgtcctggtcctcttcctctttgctggggtc

SEQ ID NO: 113788 - DNA, 80 bp, synthetic construct
  source 1..80: mol_type = other DNA
ggcgggaatgactgtcgtgcgctgtagggagcggcgaattatcgatcccccgcggccctccaggacccccgcaggcgttg

SEQ ID NO: 113789 - DNA, 80 bp, synthetic construct
  source 1..80: mol_type = other DNA
tgggtgaatatggagaagttacaattgactgcgaaccacgctcaggcattgacacagatgcctattatgtgctctcagta

SEQ ID NO: 113790 - DNA, 80 bp, synthetic construct
  source 1..80: mol_type = other DNA
ccccacaagacaatcaattgatctacgttatattgaccattctcaccattattggtcttgtagcagccaatgagatggga

SEQ ID NO: 113791 - DNA, 80 bp, synthetic construct
  source 1..80: mol_type = other DNA
cggagagacccgactctccctccaccaatggatccggctttgagatcttatcaccaacggctccgtctgtatacccccgt

SEQ ID NO: 113792 - DNA, 80 bp, synthetic construct
  source 1..80: mol_type = other DNA
ccgtggttggcgccgagctcatgcccttccgcgccaagagcttttacaacgatctcgccgtctactcccagctcatccgc

SEQ ID NO: 113793 - DNA, 80 bp, synthetic construct
  source 1..80: mol_type = other DNA
ggccttgtgtgaatccattacactggctactggacccctgaccactctctgggagggatctccgggaaaattctggaata

SEQ ID NO: 113794 - DNA, 80 bp, synthetic construct
  source 1..80: mol_type = other DNA
caagcgcaggtcatagcccaacagttcaaggacaaggttctcggcttactacagcgggctaaccaacaacaagctgacat

SEQ ID NO: 113795 - DNA, 80 bp, synthetic construct
  source 1..80: mol_type = other DNA
ctctccacacgaactcaaccgggtggccggagccctcagaaaacttggggtacccccgctgagagcgtggagacatcggg

SEQ ID NO: 113796 - DNA, 80 bp, synthetic construct
  source 1..80: mol_type = other DNA
aagacccatacactgtggagcaatggagtgctggagagccagatgcttattccaaagtcatatgcaggccctttttcaca

SEQ ID NO: 113797 - DNA, 80 bp, synthetic construct
  source 1..80: mol_type = other DNA
tttgtggccgtgggtctcatcgtcggcaccgctttcatatcccggggggcatgtgcgatcacataccccctgtttctgac

SEQ ID NO: 113798 - DNA, 80 bp, synthetic construct
  source 1..80: mol_type = other DNA
ctggggctgtcgggcgatgcgacgccgcccctgccgacttccgtgcccctggactgggccgcgtttcggcgcgcgtttct

SEQ ID NO: 113799 - DNA, 80 bp, synthetic construct
  source 1..80: mol_type = other DNA
acgagctcgtcgtaactaaacagaatcacgcgggcacagctcgcccccgagccccacgcaaggcgcagcgccgccacggc

SEQ ID NO: 113800 - DNA, 80 bp, synthetic construct
  source 1..80: mol_type = other DNA
caaactgtacaaggaccgttttctgcagcgtgcggcctgttttgttgtatgttcttacatgcttttactcactggcctga

SEQ ID NO: 113801 - DNA, 80 bp, synthetic construct
  source 1..80: mol_type = other DNA
ccattgggtttacaaccacttctaatgtggcaacacctctgctggcactcctaaccccaggcctaaaatgcttacatcta

SEQ ID NO: 113802 - DNA, 80 bp, synthetic construct
  source 1..80: mol_type = other DNA
agtggtggctctcatcctgttgtggttggggggaatggactacggaaccatggcaggagtggctctcatcttctatttgc

SEQ ID NO: 113803 - DNA, 80 bp, synthetic construct
  source 1..80: mol_type = other DNA
tttgggtggcatcgagcacaggttcgatgctgcttgcaactggacccgtggagaacggtgcgatttggaggacagggaca

SEQ ID NO: 113804 - DNA, 80 bp, synthetic construct
  source 1..80: mol_type = other DNA
gctggcctatggcattgtgcgcagtgcggccacgaccgggagccccttcgtcatgttcaaagacgcggtgaaccgccact

SEQ ID NO: 113805 - DNA, 80 bp, synthetic construct
  source 1..80: mol_type = other DNA
ttctcccactcccactgagattagctactttaatctaacaggcggagatgactgacggcctagatctagaaatggacgga

SEQ ID NO: 113806 - DNA, 80 bp, synthetic construct
  source 1..80: mol_type = other DNA
cctagcgtgcctatcccggaccctaactacaagaaagccttgtggagggtatctgcggaggactacgttgaggtcattcg

SEQ ID NO: 113807 - DNA, 80 bp, synthetic construct
  source 1..80: mol_type = other DNA
gctgattcgccccggtctttggtaccatgggatgtcttactgtatatctttttaaataaaccaggtaataccaaataaga

SEQ ID NO: 113808 - DNA, 80 bp, synthetic construct
  source 1..80: mol_type = other DNA
ccccgcacttgcagcaatatatggcacggcactttccccatcaatgcgaccacgactggcccgagcatacccatcccccc

SEQ ID NO: 113809 - DNA, 80 bp, synthetic construct
  source 1..80: mol_type = other DNA
acactgtacttgggagttatggtgcaggctgatagtggttgcgttgtgagctggaaaaataaagaactgaaatgtggcag

SEQ ID NO: 113810 - DNA, 80 bp, synthetic construct
  source 1..80: mol_type = other DNA
ctctacaggctcggggctgtgcagaacgaggtgactcttactcatccaataacaaaatacatcatggcctgcatgtcagc

SEQ ID NO: 113811 - DNA, 80 bp, synthetic construct
  source 1..80: mol_type = other DNA
ggtgggccagccgcagtactacctggccacgggaggcttcctcatcgcgtaccagcccctcctcagcaacacgctcgccg

SEQ ID NO: 113812 - DNA, 80 bp, synthetic construct
  source 1..80: mol_type = other DNA
agattttgtggaagggctatcaggagctacgtgggttgacgtggtgctcgagcacggggggtgtgtgactaccatggcta

SEQ ID NO: 113813 - DNA, 80 bp, synthetic construct
  source 1..80: mol_type = other DNA
gctaaggtcttgatcgtgatgctactctttgccggcgtcgacggggaaacccgcgtgacggggcagcaagtaggccgcac

SEQ ID NO: 113814 - DNA, 80 bp, synthetic construct
  source 1..80: mol_type = other DNA
gtcgggctccacagctacgtcttgggatcccaactcccatgcgagcctgagcccgatgtaatggtgctgacatccatgct

SEQ ID NO: 113815 - DNA, 80 bp, synthetic construct
  source 1..80: mol_type = other DNA
ggtcctactatgcgcgagggacaagcttatcccgcaaactacccctatcctctcataggaaaaaccgctgtacaaagcgt

SEQ ID NO: 113816 - DNA, 80 bp, synthetic construct
  source 1..80: mol_type = other DNA
ggtcgtggactttagtctcgacccgacatttacaatagagaccaccactgtcccacaggatgctgtttcccgtagccaga

SEQ ID NO: 113817 - DNA, 80 bp, synthetic construct
  source 1..80: mol_type = other DNA
gtagtggtgctgttgctgtttgccggcgtcgatgcggaaacctacgtcaccggagggagtgttggccgggccactgccgg

SEQ ID NO: 113818 - DNA, 80 bp, synthetic construct
  source 1..80: mol_type = other DNA
tttgactccgttgtcctatgcgaggcgtatgatatcgggtgcgcctggtatgaactcaccccggctgagaccactgtccg

SEQ ID NO: 113819 - DNA, 80 bp, synthetic construct
  source 1..80: mol_type = other DNA
cgtggatgaagaccagcccttcccggctgtgccgaaatggtccatcaaaaaatggctttcgctacctggagagacgcgcc

SEQ ID NO: 113820 - DNA, 80 bp, synthetic construct
  source 1..80: mol_type = other DNA
tggactcatttgaaccacttagggcagagttcgatgatagggagatgtcggtggctgccgagtgccataggccaccaagg

SEQ ID NO: 113821 - DNA, 80 bp, synthetic construct
  source 1..80: mol_type = other DNA
aaccagcctgtgatgctggatgtgaccgaggagctgaggcccgatcacttggtgctggcctgcacccgcgctgagtttgg

SEQ ID NO: 113822 - DNA, 80 bp, synthetic construct
  source 1..80: mol_type = other DNA
gccgagcaagcggggtattcactacaagcttgggaaacaccatgacttgttacatcaaggccaaagcggcttgtaaggcc

SEQ ID NO: 113823 - DNA, 80 bp, synthetic construct
  source 1..80: mol_type = other DNA
tggagccaggacccgtcgagcaggagccttcccccccggggggggaggctgctcccggctctgattccgtgtcgtggtcc

SEQ ID NO: 113824 - DNA, 80 bp, synthetic construct
  source 1..80: mol_type = other DNA
tgaggatcattggtcccaagacatgcagcaatgtctggcacggtaccttcccagtaaacgctactacccagggccccagc

SEQ ID NO: 113825 - DNA, 80 bp, synthetic construct
  source 1..80: mol_type = other DNA
tctacggggacacggactccattttcgttttgtgccgcggcctcacggccgcgggcctggtggccatgggcgacaagatg

SEQ ID NO: 113826 - DNA, 80 bp, synthetic construct
  source 1..80: mol_type = other DNA
acagctctcccaacagtgatggattccgggtccattaaataacaactggccgttgccccggtctctcgacctaaaaacat

SEQ ID NO: 113827 - DNA, 80 bp, synthetic construct
  source 1..80: mol_type = other DNA
gtgacaacatccgagatcatgtcactcgagtcgagggctggatgtggaagaacaagcttctaactgtcgccattgtggcc

SEQ ID NO: 113828 - DNA, 80 bp, synthetic construct
  source 1..80: mol_type = other DNA
gcgacaagatggcgagccacatctcgcgcgcgctgtttctgccccccatcaaactcgagtgcgaaaagacgttcaccaag

SEQ ID NO: 113829 - DNA, 80 bp, synthetic construct
  source 1..80: mol_type = other DNA
gccaacataagtgggccatcagaagatagaccgtactgctggcactaccctccgagaccttgtggggtggtgtcggcctc

SEQ ID NO: 113830 - DNA, 80 bp, synthetic construct
  source 1..80: mol_type = other DNA
cccagaccttgtttgacatactggccggggcccattggggcatcttggcgtgcctagcctattattctatgcagggcaac

SEQ ID NO: 113831 - DNA, 80 bp, synthetic construct
  source 1..80: mol_type = other DNA
agtttgggggccttttgcaactcttcataggtaaggtaatcaggagaaaaaagacccatttccaagcaagcccattctgc

SEQ ID NO: 113832 - DNA, 80 bp, synthetic construct
  source 1..80: mol_type = other DNA
ccagttgccaagctctggtggtgtggttggtgggtggctggactgcctactccctcaggaatgggtccagcactttttcc

SEQ ID NO: 113833 - DNA, 80 bp, synthetic construct
  source 1..80: mol_type = other DNA
agtgggaatggtgagcatattagcaagttcactgctgagaaatgacataccaatggcaggaccactagttgctggagggt

SEQ ID NO: 113834 - DNA, 80 bp, synthetic construct
  source 1..80: mol_type = other DNA
atcaacgaggattgttccactccatgtgacaccagctggctttgggaggtctggagttgggtctgcaccgtactgagtga

SEQ ID NO: 113835 - DNA, 80 bp, synthetic construct
  source 1..80: mol_type = other DNA
aacacgctagcccagccgcgggccccgatggccttcgggacatccagcgacgtcgagtttaactgtacggcggacaacct

SEQ ID NO: 113836 - DNA, 80 bp, synthetic construct
  source 1..80: mol_type = other DNA
tcctctcgtgcctcactgtccccgcctcggccgtcaattatgctaacaagtctggcgtgtaccatctgaccaatgactgc

SEQ ID NO: 113837 - DNA, 80 bp, synthetic construct
  source 1..80: mol_type = other DNA
gactcgcagacgagcggccgctgccgccgccgcggccatctctagcatgaccagacccaggcgcggaaacgtgtactggg

SEQ ID NO: 113838 - DNA, 80 bp, synthetic construct
  source 1..80: mol_type = other DNA
gagtactctcagttgaggaagcttgcgacctgacgcccccccactcagccagatccaagtttggctttggggcgaaagat

SEQ ID NO: 113839 - DNA, 80 bp, synthetic construct
  source 1..80: mol_type = other DNA
aaaatctttcgccagccttttttcgcccggggcgtcgcagagcctgcaacttatcaacacaaatggcagctggcacatca

SEQ ID NO: 113840 - DNA, 80 bp, synthetic construct
  source 1..80: mol_type = other DNA
tgatgaggatcatgctcattggacagaagcaaaaatgctccttgacaatataaacacaccagaagggatcatcccagccc

SEQ ID NO: 113841 - DNA, 80 bp, synthetic construct
  source 1..80: mol_type = other DNA
gcgaaaacggtcaaccttctaaagatcaagatattacattagctttctttgatcttaaacaaaatgacactggaactact

SEQ ID NO: 113842 - DNA, 80 bp, synthetic construct
  source 1..80: mol_type = other DNA
actcacatcaaaggagactggactcttggtgatagggatggctatgaccacattaatcgcaattccacagaatgttatgg

SEQ ID NO: 113843 - DNA, 80 bp, synthetic construct
  source 1..80: mol_type = other DNA
gacggctcgggcaacagggtttattacctgacacgcgaccctcagactccactcgcgagggccgcgtgggagacagctaa

SEQ ID NO: 113844 - DNA, 80 bp, synthetic construct
  source 1..80: mol_type = other DNA
gaccgcgagctgatgatgagcctgcgccgggcgctggtaggaggcgccgccagcggcgaagagtcctactttgacatggg

SEQ ID NO: 113845 - DNA, 80 bp, synthetic construct
  source 1..80: mol_type = other DNA
ccacagaagacatgctggacgtctggaaccgggtgtggattttggataaccctttcatgcagaacaaggaaaaggtcatg

SEQ ID NO: 113846 - DNA, 80 bp, synthetic construct
  source 1..80: mol_type = other DNA
acgccgcctcgcgaccatctgttatggccgtgaaagcttacaccattggagggaaaggccatgaggcgccgcgattggtg

SEQ ID NO: 113847 - DNA, 80 bp, synthetic construct
  source 1..80: mol_type = other DNA
ggtgcccgaatatgacgacagagaaccatccatacccgcggagtgtcacaggccgaataggcccaagtttccaccagcac

SEQ ID NO: 113848 - DNA, 80 bp, synthetic construct
  source 1..80: mol_type = other DNA
gcatattcctggcgggccaaatgttcaccttccggcctcgccgccatacaaccacccaggactgcaactgttccatctat

SEQ ID NO: 113849 - DNA, 80 bp, synthetic construct
  source 1..80: mol_type = other DNA
ggaggccgcttggccccgagtggagcagttctggggtaaacatatgtggaattttgtgagtggcattcagtacctggcgg

SEQ ID NO: 113850 - DNA, 80 bp, synthetic construct
  source 1..80: mol_type = other DNA
cttggtgcctagctgtggtgtgcctcgcctggtatatcaaaggccgccttatcccagcgggtacctattgtgccttacaa

SEQ ID NO: 113851 - DNA, 80 bp, synthetic construct
  source 1..80: mol_type = other DNA
tgcctcctgcacccgactttagggtttgaggtcacaaaagtcatcctcgccatgttgggccccttatacctgctgcaatg

SEQ ID NO: 113852 - DNA, 80 bp, synthetic construct
  source 1..80: mol_type = other DNA
cgtcaatcacgctatcatctccgtcatccctgcatgcgtgggcatgcccagcccccaacgccatggtggggattcgcggc

SEQ ID NO: 113853 - DNA, 80 bp, synthetic construct
  source 1..80: mol_type = other DNA
tcgacgggtacgggcgcatgaacggccggggtgtgttccgcgtgtgggacatcggccagagccactttcagaagcgcagc

SEQ ID NO: 113854 - DNA, 80 bp, synthetic construct
  source 1..80: mol_type = other DNA
cctcggcgagtcagctttcgccccgtcttcttcaggccacgtgtaccgctccccatgactcccctggtactgatctcctc

SEQ ID NO: 113855 - DNA, 80 bp, synthetic construct
  source 1..80: mol_type = other DNA
cctgtatcaccggcgacaccacactaaatttttcgtgcgcatgcgcgacacccggcaccgcgcccattcggcgcttcgac

SEQ ID NO: 113856 - DNA, 80 bp, synthetic construct
  source 1..80: mol_type = other DNA
tagtcacatgattaatgtttctgggagttttcactttccccaaacaagcttacctgcaccctttgttcgtaatgcataaa

SEQ ID NO: 113857 - DNA, 80 bp, synthetic construct
  source 1..80: mol_type = other DNA
ggacttatgtcccatcaggctttgcagaactttcagcggtataccggcatacagcatgtgcatcgcataggaatggcgga

SEQ ID NO: 113858 - DNA, 80 bp, synthetic construct
  source 1..80: mol_type = other DNA
tgcggtgcacctccgccccgcctatggttaccttgtccgagcctcccaggtgcagaaaggtgttgttgatgcacacggcc

SEQ ID NO: 113859 - DNA, 80 bp, synthetic construct
  source 1..80: mol_type = other DNA
agcctctatcgcacttttgccggcaatcctcgggccgcatcgaccgccaaggccatgcgcgactgcgtgctgcgccaaga

SEQ ID NO: 113860 - DNA, 80 bp, synthetic construct
  source 1..80: mol_type = other DNA
gcaaattcattattttggaggcgggaattgtcccgtctgggcgttcctcaataaataaagtcattgattgactttggtca

SEQ ID NO: 113861 - DNA, 80 bp, synthetic construct
  source 1..80: mol_type = other DNA
ggcggcgcgctgagtgggcgttattccggaaatgccgtcaaaacagtaaaacctctgaaattcgctgacggcccaatcag

SEQ ID NO: 113862 - DNA, 80 bp, synthetic construct
  source 1..80: mol_type = other DNA
aattttgacgaaaggtcccgatggggcggtgatttgaaaactattttgcatactaacatgcccaacgtaaatgattttat

SEQ ID NO: 113863 - DNA, 80 bp, synthetic construct
  source 1..80: mol_type = other DNA
attaaaagctttggccaaccagcccctagtggtgactcaggtcactcaccggggccgagcactgccggcatcacaggaca

SEQ ID NO: 113864 - DNA, 80 bp, synthetic construct
  source 1..80: mol_type = other DNA
ccccgccgtgtgggatcacgccgtcaggcaacaaaacactagattgccccactgactgcttccgaaaacatccggaggcg

SEQ ID NO: 113865 - DNA, 80 bp, synthetic construct
  source 1..80: mol_type = other DNA
cgcagtagtccagggtttccttgatgatgtcatacttatcctgtcccttttttttccacagctcgcggttgaggacaaac

SEQ ID NO: 113866 - DNA, 80 bp, synthetic construct
  source 1..80: mol_type = other DNA
tgctcagcaaacccgtggtctcgtttccaccttggttgtgagcctcacggggcgcgaccgtaacgagatcgagggtgagg

SEQ ID NO: 113867 - DNA, 80 bp, synthetic construct
  source 1..80: mol_type = other DNA
tggagagatccaggtcttgtccacggtcactcaatcattcctcgggacgacaatctcgggaatcctgtggacggtcttcc

SEQ ID NO: 113868 - DNA, 80 bp, synthetic construct
  source 1..80: mol_type = other DNA
ttcgggaaaggaagcattgacacatgcgcaaaattttcttgcaccagtaaggccattggaagaatgatccaaccagagaa

SEQ ID NO: 113869 - DNA, 80 bp, synthetic construct
  source 1..80: mol_type = other DNA
acatcttgctcttcgaacgtgtccgtagcccacgataacaatggacagagatactactacctcacaagagacccgaccac

SEQ ID NO: 113870 - DNA, 80 bp, synthetic construct
  source 1..80: mol_type = other DNA
attctcctgacgtgcgcagtccacccagaactaatttttgacatcaccaagctcctgctcgccatatttggtccgatcat

SEQ ID NO: 113871 - DNA, 80 bp, synthetic construct
  source 1..80: mol_type = other DNA
taccaccatccttggtattggaacagtccttgaccaggcagagacagcgggagttcgtttagtggtcttggctacggcaa

SEQ ID NO: 113872 - DNA, 80 bp, synthetic construct
  source 1..80: mol_type = other DNA
cggagcgcggctaccgacgcggccgccaggatctacccgatcggcgcggagaggcgaaaagacacaggcacacgcacgca

SEQ ID NO: 113873 - DNA, 80 bp, synthetic construct
  source 1..80: mol_type = other DNA
gggaggggtcgtcaacggcgcccctggctcctccgtagccgcgctgcgcaccagcgggaggttaaggtgctcgcgaatgt

SEQ ID NO: 113874 - DNA, 80 bp, synthetic construct
  source 1..80: mol_type = other DNA
ttaactccatttacagtgtatttaatttttgcatttgtaactgctacctgcgtctgcagtcttattaccctgctaattac

SEQ ID NO: 113875 - DNA, 80 bp, synthetic construct
  source 1..80: mol_type = other DNA
cttatacctggggtgagaatgagaccgatgtcttcctactggaaagcagccgacccccccaagggggctggttcggctgt

SEQ ID NO: 113876 - DNA, 80 bp, synthetic construct
  source 1..80: mol_type = other DNA
accaacagtatgatgagatggaagagtgttccagacacctctcctacctggctgaggggcagcagatagccgaacaattc

SEQ ID NO: 113877 - DNA, 80 bp, synthetic construct
  source 1..80: mol_type = other DNA
ctacccccctgctatataggctgggggctgtccagaacgagatagtgacaacccaccccatcaccaagtacattatgaca

SEQ ID NO: 113878 - DNA, 80 bp, synthetic construct
  source 1..80: mol_type = other DNA
tttacctctttaattgggcggtacgcaccaagctcaaactcactccattgccggccgctggccacctggatttatccagt

SEQ ID NO: 113879 - DNA, 80 bp, synthetic construct
  source 1..80: mol_type = other DNA
ccaatacgcccccaccatatgggtgcgtatggtcctaatgacacatttcttcagcgtcttgtctgctcaggataccctga

SEQ ID NO: 113880 - DNA, 80 bp, synthetic construct
  source 1..80: mol_type = other DNA
cttgagggtgcggtactacatgttcctggttgcatcccctgcgagtcaatgaacaacacaccgcggtgctggataccagt

SEQ ID NO: 113881 - DNA, 80 bp, synthetic construct
  source 1..80: mol_type = other DNA
cttgtcagaagggatacaagggcgtgtggcggggggacggtgtaatgtcaacacgctgtccttgcggagcatcaataacc

SEQ ID NO: 113882 - DNA, 80 bp, synthetic construct
  source 1..80: mol_type = other DNA
caaagtgatgcacctcttggactagtagacaaaacactaaaggttttgttttctagccccctctatctagataataactt

SEQ ID NO: 113883 - DNA, 80 bp, synthetic construct
  source 1..80: mol_type = other DNA
cgaggggcagatgggcggccacgtcggccaggctcaggcgcgtggaggccagaaagtcccccacggccgttttccggtgc

SEQ ID NO: 113884 - DNA, 80 bp, synthetic construct
  source 1..80: mol_type = other DNA
cgcctcggctggctttgcatctttgttttccaccgggcccaagcagcggatccagctgataagcaccaatggaagttggc

SEQ ID NO: 113885 - DNA, 80 bp, synthetic construct
  source 1..80: mol_type = other DNA
ttggtcgttatcgcggaaagtggcggagtcgaggaggatagccaggccctccgagctttcacggaagctatgacgaggta

SEQ ID NO: 113886 - DNA, 80 bp, synthetic construct
  source 1..80: mol_type = other DNA
aactgacagcggctgttggtatggtatggagatcagaccacagagacatgatgaaaagaccctcgtgcagtcacaagtga

SEQ ID NO: 113887 - DNA, 80 bp, synthetic construct
  source 1..80: mol_type = other DNA
ccccttgagggagagccgggcgacccggacctggatgctgactcttggtccactgtcagtgacaccgaagagcagagcgt

SEQ ID NO: 113888 - DNA, 80 bp, synthetic construct
  source 1..80: mol_type = other DNA
gactttcacggggaggagttcgagaagctctaccagcacctcgaggtcatggggttcggcgagcagatacccatccagga

SEQ ID NO: 113889 - DNA, 80 bp, synthetic construct
  source 1..80: mol_type = other DNA
gttcaatagcaagggggacctatgcgggtaccggcggtgccgcgcaagcggcgtgttcaccaccagcttcgggaacacac

SEQ ID NO: 113890 - DNA, 80 bp, synthetic construct
  source 1..80: mol_type = other DNA
cttgttatttataagctagatattattgagcttccaactacaaaagcacccactaccactaaacccaccacagttaggac

SEQ ID NO: 113891 - DNA, 80 bp, synthetic construct
  source 1..80: mol_type = other DNA
agggaggtcctgagcgggacgtatctgcgtcaggtgcacggcctgatggagctggccccgacccatcatcgcgtcgtcgg

SEQ ID NO: 113892 - DNA, 80 bp, synthetic construct
  source 1..80: mol_type = other DNA
gcgttggtgcaactggaggacagtgggccggccagctggtacagaggcaaacacagctgagcctattgctatggacccag

SEQ ID NO: 113893 - DNA, 80 bp, synthetic construct
  source 1..80: mol_type = other DNA
cttcgacgtcacatcgacctgctcgtcgggagtgccaccctctgttcggccctctatgtgggggacttgtgcgggtctgt

SEQ ID NO: 113894 - DNA, 80 bp, synthetic construct
  source 1..80: mol_type = other DNA
catcatccttgtggccctgttccacccccatctggcttttgaggttacgaaacacctcctcgccattgttggcccccttt

SEQ ID NO: 113895 - DNA, 80 bp, synthetic construct
  source 1..80: mol_type = other DNA
ggagccaacggcgaggacgcacaggcaggtggaagccggaggtgtacaggtacgtctcgcagggcgaacggccgtcgggc

SEQ ID NO: 113896 - DNA, 80 bp, synthetic construct
  source 1..80: mol_type = other DNA
gaggggggagccgctcccggctcggactccgggtcctggtccacgtgctccgatgtggacgactctgtggtgtgttgctc

SEQ ID NO: 113897 - DNA, 80 bp, synthetic construct
  source 1..80: mol_type = other DNA
ggctgtgcccttccccccacacctcaggcaccagtgcctccacctcggaggcgccgtgctagagccctgactcaggacaa

SEQ ID NO: 113898 - DNA, 80 bp, synthetic construct
  source 1..80: mol_type = other DNA
caccattggcataagtctggaagcagcattggcaaagccttcacaaccactctcaaaggggcgcagagattagccgctct

SEQ ID NO: 113899 - DNA, 80 bp, synthetic construct
  source 1..80: mol_type = other DNA
gtatgatacccgctgtttcgactcaacagtcacggagagagatatcaggactgaggagtccatatacctggcctgctcat

SEQ ID NO: 113900 - DNA, 80 bp, synthetic construct
  source 1..80: mol_type = other DNA
gactttgacatgttggtctgtggagacgacctagttgtcatttccgagagcgcaggagtctcggaggacgctagtgccct

SEQ ID NO: 113901 - DNA, 80 bp, synthetic construct
  source 1..80: mol_type = other DNA
gcagaagtatgcaaagcatgcatctcaattagtcagcaaccaggtgtggaaagtccccaggctccccagcaggcagaagt

SEQ ID NO: 113902 - DNA, 80 bp, synthetic construct
  source 1..80: mol_type = other DNA
gatgattgtgttgtcaaaccactcgatgacagattcgcgaatgctctgcatttcttgaatgcgatgtcaaaggtgaggaa

SEQ ID NO: 113903 - DNA, 80 bp, synthetic construct
  source 1..80: mol_type = other DNA
ccacaaccactctggtcatatctagcatcttgagggtgcctgagatctgtgtgagtatggtacttggtggccattgggtg

SEQ ID NO: 113904 - DNA, 80 bp, synthetic construct
  source 1..80: mol_type = other DNA
ctggtcttccttggacccgctgacagtgtcaagagcaagggctggggtctactcgcgcccatcacagcttacgcccagca

SEQ ID NO: 113905 - DNA, 80 bp, synthetic construct
  source 1..80: mol_type = other DNA
ccgcggagcagcgcaccggggtccacgacggccgcctccggcgcgcccctaaggtgtactgcgggagtgacgagcgcgac

SEQ ID NO: 113906 - DNA, 80 bp, synthetic construct
  source 1..80: mol_type = other DNA
catcaactcagcagtgcctgtcgattgggttcctaccggccgcacgacatggagcatccatgccagtggggcctggatga

SEQ ID NO: 113907 - DNA, 80 bp, synthetic construct
  source 1..80: mol_type = other DNA
catcctgacaataaatgctgttgcttctaggaaagcatcaaataccatcttgcccctcatggctctgttgacacctgtca

SEQ ID NO: 113908 - DNA, 80 bp, synthetic construct
  source 1..80: mol_type = other DNA
cgctcctggagacttggaaaagaccagattatcaaccaccagtggtcgccgggtgtgccctccccccctctggaaccacc

SEQ ID NO: 113909 - DNA, 80 bp, synthetic construct
  source 1..80: mol_type = other DNA
tgcttctaccactcaattaaccttgcatggtgtgttttttcaaaattgcagcggtatctgcgtggattcctggggtaggg

SEQ ID NO: 113910 - DNA, 80 bp, synthetic construct
  source 1..80: mol_type = other DNA
gtgggatggccggcacctccgggtgccaagtctttgacgccttgcacctgcggtgctagcgatctttacctggtgacccg

SEQ ID NO: 113911 - DNA, 80 bp, synthetic construct
  source 1..80: mol_type = other DNA
cggcgtttccagcgacgtgccatccccggcccccaaggaggagctcgataagtctgacgcggggtctgaggttgagtcat

SEQ ID NO: 113912 - DNA, 80 bp, synthetic construct
  source 1..80: mol_type = other DNA
tatgacgctgggtgtgcttggtacgaacttacaccagctgagaccacggtcaggctacgagcatatctaaacaccccagg

SEQ ID NO: 113913 - DNA, 80 bp, synthetic construct
  source 1..80: mol_type = other DNA
ctgaggtggatggcgtgaggattcaccgttacgcgccaccttgcaagcccctgctaagggacgaggtgagcttttccgtg

SEQ ID NO: 113914 - DNA, 80 bp, synthetic construct
  source 1..80: mol_type = other DNA
ttgttccgaacccgaattttttttattgcctgtggaaacgaaaaaccgtctccaaaaaaagcaacaagaacgtaaaacgg

SEQ ID NO: 113915 - DNA, 80 bp, synthetic construct
  source 1..80: mol_type = other DNA
cttggggcaagatctatgctgatgacacagctggctgggacacccgcatcacgagagctgacttggaaaatgaagctaag

SEQ ID NO: 113916 - DNA, 80 bp, synthetic construct
  source 1..80: mol_type = other DNA
acagacagccaaatcaaaaattatgcgattctcaagatgctctactgtggcttccagcagaggctccacacgtacatcca

SEQ ID NO: 113917 - DNA, 80 bp, synthetic construct
  source 1..80: mol_type = other DNA
atcacttacctatcatcccttaaaagtaacctgaactttaaagacaaccaaaacatgactactggaaccataaccagtgc

SEQ ID NO: 113918 - DNA, 80 bp, synthetic construct
  source 1..80: mol_type = other DNA
cccagcggtccgaggaggatgtccacgcgcttgtcgggcttctggtaggcgctctggaggctggcgacccgcgccttggc

SEQ ID NO: 113919 - DNA, 80 bp, synthetic construct
  source 1..80: mol_type = other DNA
gggccggtcctgggctcagcctgggtacccttggcccctctatgggaacgagggctgtgggtgtgcaggatggttgctgt

SEQ ID NO: 113920 - DNA, 80 bp, synthetic construct
  source 1..80: mol_type = other DNA
cggccacagagatatccagtagtgcggcttgccccacgatgggggaggcacacaatgagaagagaacggactcaaacttc

SEQ ID NO: 113921 - DNA, 80 bp, synthetic construct
  source 1..80: mol_type = other DNA
ctcctgcccttccactgtgggccagacctgactataatccccctctcctacagaagtggcaaatgcccgggtatgaaccc

SEQ ID NO: 113922 - DNA, 80 bp, synthetic construct
  source 1..80: mol_type = other DNA
acaagaagacgaccaatacgttttctccggagacccactaaaaaatgatgaagatcatgcccactggacagaagcaaaga

SEQ ID NO: 113923 - DNA, 80 bp, synthetic construct
  source 1..80: mol_type = other DNA
tgaagacccatctgagacaatgatacctcattctcaaaggcccacacagatgatgtccctcctaggtgaagctgcactac

SEQ ID NO: 113924 - DNA, 80 bp, synthetic construct
  source 1..80: mol_type = other DNA
ctttcgtgcgctccgccgccgaggctcgaggccgcgcacacaaacccggcccggggacaggccaggacgaacttgcgggt

SEQ ID NO: 113925 - DNA, 80 bp, synthetic construct
  source 1..80: mol_type = other DNA
tggacactaccgatgctactgaccaaccagccttaaaggaatctactgactcggaagcaggctctgattcctccatgcct

SEQ ID NO: 113926 - DNA, 80 bp, synthetic construct
  source 1..80: mol_type = other DNA
tttggttgctcggaaaacactcaaagcgaggaggagcattgtgggacgtgccgtcaccaaaagtatatccaaaatgtgag

SEQ ID NO: 113927 - DNA, 80 bp, synthetic construct
  source 1..80: mol_type = other DNA
acagagatgcaccgcctactggcctcggagggggccgacgcgggctcgggccccgagcttctcttctaccactgcgagcc

SEQ ID NO: 113928 - DNA, 80 bp, synthetic construct
  source 1..80: mol_type = other DNA
gtatgaccatctaaccccactgaaggactgggcagctgagggccttgcagatctcgctgcggctacagaaccagtggtct

SEQ ID NO: 113929 - DNA, 80 bp, synthetic construct
  source 1..80: mol_type = other DNA
gtggctatcgtagatgccgcgccagcggcgttctcactactagctgcggcaacaccctcacatgctacctgaaggccaaa

SEQ ID NO: 113930 - DNA, 80 bp, synthetic construct
  source 1..80: mol_type = other DNA
cgtggaccttatggtcggggctgccgcgctgtgctctgccatgtacgtgggggacctctgcggaggcatcttcctagtcg

SEQ ID NO: 113931 - DNA, 80 bp, synthetic construct
  source 1..80: mol_type = other DNA
aggaacgattgtatcgttttttgacccaacactctccctactttcgtcgtcaccgcgagcgaattgaaaaagctacagct

SEQ ID NO: 113932 - DNA, 80 bp, synthetic construct
  source 1..80: mol_type = other DNA
gggaaatatcatccaatacgccccaacaatatgggcgcgtatggtcctgatgacacactttttctccgttctgatggccc

SEQ ID NO: 113933 - DNA, 80 bp, synthetic construct
  source 1..80: mol_type = other DNA
gtagcgcccgtgggtttgttagcctttttagtgtgggcgcccagcagaaattgcagttggtcaacaccaatggttcgtgg

SEQ ID NO: 113934 - DNA, 80 bp, synthetic construct
  source 1..80: mol_type = other DNA
gcaggtcgcccacgggccccacgccaggcgcagcgccgcgaccgtgtacgggtcgtacacgccttgggcgtcgcacgcga

SEQ ID NO: 113935 - DNA, 80 bp, synthetic construct
  source 1..80: mol_type = other DNA
ctttttggatttcaggcaagaaataacacgggaatgcgacacaggagtgatgggggctgctgtcaagaacgggatagcag

SEQ ID NO: 113936 - DNA, 80 bp, synthetic construct
  source 1..80: mol_type = other DNA
agccctgagtcatccgaggttggctcatcgcccgggtcgtgccgcaagtgcgtgtgggttgggcttccggtgtgtgggac

SEQ ID NO: 113937 - DNA, 80 bp, synthetic construct
  source 1..80: mol_type = other DNA
gattggcgccgcggtcattatcgccctgaccatcttcacgctcacaccaacatacaagactttgctagcacatttcttgt

SEQ ID NO: 113938 - DNA, 80 bp, synthetic construct
  source 1..80: mol_type = other DNA
ggtcttacgccaaaccaacaaatgaaaagggcggtcaggctagtctcataacgaacggaaccgatcaaactctaacaagc

SEQ ID NO: 113939 - DNA, 80 bp, synthetic construct
  source 1..80: mol_type = other DNA
catcactgcagagacggcggcgcgtagactgaatcgggggtctcccccctccctggctagctcttctgccagccaattgt

SEQ ID NO: 113940 - DNA, 80 bp, synthetic construct
  source 1..80: mol_type = other DNA
gacccaagaaccgaaagaaggcacaaagaagctgatgagaatcacggcagagtggctttggaaagaactaggaaagaaaa

SEQ ID NO: 113941 - DNA, 80 bp, synthetic construct
  source 1..80: mol_type = other DNA
agttcattgactgggtttgtgtgcgcatcgcgtacctcaggcaccatccgcaatacagagacaggactatagctgatctt

SEQ ID NO: 113942 - DNA, 80 bp, synthetic construct
  source 1..80: mol_type = other DNA
ctattctccaggagaactcaatcgtgtaggagcctgtctcaggaagcttggggcacctccgttgagagcctggagacatc

SEQ ID NO: 113943 - DNA, 80 bp, synthetic construct
  source 1..80: mol_type = other DNA
caacttcaccttgcacaaagtcaggatgttcgtgggaggcactgagcaccggtttgacgtcgcatgcaattggaccaggg

SEQ ID NO: 113944 - DNA, 80 bp, synthetic construct
  source 1..80: mol_type = other DNA
ttaatcatgaaggacggtcgtgtacttgtggttccatgtagaaaccaagatgaactgattggtagggcccgaatttccca

SEQ ID NO: 113945 - DNA, 80 bp, synthetic construct
  source 1..80: mol_type = other DNA
ggcgctggcgcatggcgtcagggccgtggaagacgggatcaattatgcaacagggaaccttcctggttgctctttctcta

SEQ ID NO: 113946 - DNA, 80 bp, synthetic construct
  source 1..80: mol_type = other DNA
cctggacgatcattaccgggacgtgctcaaggaggctaaggccaaggcatccacagtgaaggctaaactgctatccgtag

SEQ ID NO: 113947 - DNA, 80 bp, synthetic construct
  source 1..80: mol_type = other DNA
tcctggcagacgcgcgcgtgtgcgttgctctttggctgatgctgatgatatcacaggcggaagcagctttggagaatctt

SEQ ID NO: 113948 - DNA, 80 bp, synthetic construct
  source 1..80: mol_type = other DNA
attccgagacgttacatcgtttatcggccaataaattacgaacctcgtctaaatttggacccgtttcgatacacttcatt

SEQ ID NO: 113949 - DNA, 80 bp, synthetic construct
  source 1..80: mol_type = other DNA
tcaaccaccattctcggtatcgggacggtccttgaccaggctgagacggccggagctaggctaacggtcctggccacggc

SEQ ID NO: 113950 - DNA, 80 bp, synthetic construct
  source 1..80: mol_type = other DNA
cgggcctcgctcttgtagcaatgtgtggcacggtactttccccatcaatgcaacgacgactggtccgagcatacccgtcc

SEQ ID NO: 113951 - DNA, 80 bp, synthetic construct
  source 1..80: mol_type = other DNA
tcgccacgttggtgcgccacggggtgctaccggcggccccgggcgacgttccccgagacaccagcacccgcgtgaacccc

SEQ ID NO: 113952 - DNA, 80 bp, synthetic construct
  source 1..80: mol_type = other DNA
ccgggttggtggattgctacattaaccttggagcgcgttggtcattggactacatggacaacgtcaacccctttaaccat

SEQ ID NO: 113953 - DNA, 80 bp, synthetic construct
  source 1..80: mol_type = other DNA
tgacgccgtcaaacaacttcctgaggccgtgatgggagccgcttacggcttccaatactccccagcgcagcgggtagaat

SEQ ID NO: 113954 - DNA, 80 bp, synthetic construct
  source 1..80: mol_type = other DNA
cgtgaaggacgagagagccgtgcacgccgacatgggctactggatcgagagccagaagaacggcagctggaagctggaga

SEQ ID NO: 113955 - DNA, 80 bp, synthetic construct
  source 1..80: mol_type = other DNA
tcttgtctccgggggcgctcgtggtgggtgtggtgtgcgctgccatcctgcgtcgccacatcggcccttctgaaggtgct

SEQ ID NO: 113956 - DNA, 80 bp, synthetic construct
  source 1..80: mol_type = other DNA
caaacaaaaggccataggccttatgagcgtcgctggcaagcaggcccaggaagcagcaccggcggtccaatcaaaccttg

SEQ ID NO: 113957 - DNA, 80 bp, synthetic construct
  source 1..80: mol_type = other DNA
aggaccgacccctttgctttataggctaggggccgtacaaaatgagatcaccaccacacacccgatcaccaaatacattt

SEQ ID NO: 113958 - DNA, 80 bp, synthetic construct
  source 1..80: mol_type = other DNA
ctctttaactgggcggtaagaacaaagctcaaactcactccactgcgtggcgcggacaacctcgatctatccgggtggtt

SEQ ID NO: 113959 - DNA, 80 bp, synthetic construct
  source 1..80: mol_type = other DNA
tttgtcatggacaatgtccatacatggacggaacaatacaagttccagccagaatcaccctcaagaatagccgcctcgat

SEQ ID NO: 113960 - DNA, 80 bp, synthetic construct
  source 1..80: mol_type = other DNA
gaagagacctgcggcttatggccaacgccatttgctccgctgtccctgtgaattgggtccctaccggaagaaccacgtgg

SEQ ID NO: 113961 - DNA, 80 bp, synthetic construct
  source 1..80: mol_type = other DNA
gctattcccgcaaggccattaaccacatcaactccgtgtgggaggacttgctggatgacaacaatactccaataccaaca

SEQ ID NO: 113962 - DNA, 80 bp, synthetic construct
  source 1..80: mol_type = other DNA
ggggggggagggccgccatatgtggcaaatacctcttcaactgggctgtaaaaaccaagctcaaactcactccattaccg

SEQ ID NO: 113963 - DNA, 80 bp, synthetic construct
  source 1..80: mol_type = other DNA
gtatgacggggcgtgacaggacagaacaggccggggaagtccaaatcctgtccacagtctctcagtccttcctcggaaca

SEQ ID NO: 113964 - DNA, 80 bp, synthetic construct
  source 1..80: mol_type = other DNA
ttgactcaacggtcactgagaatgacatccgtgttgaggagtcaatttaccaatgttgtgacttggcccccgaagccaga

SEQ ID NO: 113965 - DNA, 80 bp, synthetic construct
  source 1..80: mol_type = other DNA
ccgccttggcagccccggtcaccggtcaaacaaatattatagacccttggattagagcaaattttgtccagcgcccccaa

SEQ ID NO: 113966 - DNA, 80 bp, synthetic construct
  source 1..80: mol_type = other DNA
gggctgatggcagtttcttacaccatttcaggcaaatcgacagacctgtggcttgagagagcagctgacataacatggga

SEQ ID NO: 113967 - DNA, 80 bp, synthetic construct
  source 1..80: mol_type = other DNA
actaaaaatggacaagttggccttgaaaggaaccacctatggcatgtgcacagagaagttctccttttcgaaaaacccag

SEQ ID NO: 113968 - DNA, 80 bp, synthetic construct
  source 1..80: mol_type = other DNA
agcggtcgcaacctcgtggaaggcgacaacctatccccaaggctcgccaacccgagggcaggtcctgggctcagcccggg

SEQ ID NO: 113969 - DNA, 80 bp, synthetic construct
  source 1..80: mol_type = other DNA
cataacaaccttgccaactttgtatatgggtaaccaagaagaatgttcgaaataacccgtgttacgtaattcagtgaata

SEQ ID NO: 113970 - DNA, 80 bp, synthetic construct
  source 1..80: mol_type = other DNA
tctggctggagccatcccggtggaattctcaagcaacacagtcaagctgacttcaggtcacctgaagtgtagagtcaaga

SEQ ID NO: 113971 - DNA, 80 bp, synthetic construct
  source 1..80: mol_type = other DNA
ccccaacccacggcgccctgcggttaggggcggtgatgggtgccgccctgctgctgtctgcactggtgttgtcggtgtgg

SEQ ID NO: 113972 - DNA, 80 bp, synthetic construct
  source 1..80: mol_type = other DNA
ggccgagctctacgcccgagtgcaacgccccgggcctgtgcccgacgccgagcccatttacgacaccgtggagtggtatg

SEQ ID NO: 113973 - DNA, 80 bp, synthetic construct
  source 1..80: mol_type = other DNA
tcgtggtaatcatcgttgttacggtgttatcgctgacccctgcttataagtggctactgatgaacatcatgtggtggaac

SEQ ID NO: 113974 - DNA, 80 bp, synthetic construct
  source 1..80: mol_type = other DNA
ccataagtttaattccagtgggtgttcagagcgaatgtccagctgcaggcccatcacggacttcatgcagggatggggtc

SEQ ID NO: 113975 - DNA, 80 bp, synthetic construct
  source 1..80: mol_type = other DNA
ccgtgtgggaggacctcctggaagaccaacaaaccccaatcagtactaccatcatggccaaaaatgaggtgttctgcgtg

SEQ ID NO: 113976 - DNA, 80 bp, synthetic construct
  source 1..80: mol_type = other DNA
gcctcccaaattgcaacccccacagcctctacggcttttgtcgtgagtggcctcgctggagctgccgtcggtagcgtggg

SEQ ID NO: 113977 - DNA, 80 bp, synthetic construct
  source 1..80: mol_type = other DNA
tattgccgcggccatcggagccgtacccggaattgcttcagttgccttgcaggcttctcgaaaaaattaaattaaaatca

SEQ ID NO: 113978 - DNA, 80 bp, synthetic construct
  source 1..80: mol_type = other DNA
acgcgcagcgcagtgctacgccagaagaaggtcaccttcgatcgcctccaggtggttgaccaatattacaatgatgtcct

SEQ ID NO: 113979 - DNA, 80 bp, synthetic construct
  source 1..80: mol_type = other DNA
ctgtcatagactgcaacgtggctgttgaacagtacgttgatttcagcctggaccccaccttttccattgagacccgcact

SEQ ID NO: 113980 - DNA, 80 bp, synthetic construct
  source 1..80: mol_type = other DNA
caacggattttttaactaacttgcagagtgttgcctctgtgatgcataggccgttgtccgataatccctttcggtttaaa

SEQ ID NO: 113981 - DNA, 80 bp, synthetic construct
  source 1..80: mol_type = other DNA
agcaaaagaagcagtggaagacgaaaggttttgggatcttgtgcacagagagagggagcttcataaacagggaaaatgtg

SEQ ID NO: 113982 - DNA, 80 bp, synthetic construct
  source 1..80: mol_type = other DNA
cacgccgtcacagcagcagaggaaaaaaggaagaggtcgtgcgtcgacgctgagttactttcaagatggccaccccatcg

SEQ ID NO: 113983 - DNA, 80 bp, synthetic construct
  source 1..80: mol_type = other DNA
ctggcatcagcagccctgggaccgctcatcgagggaaataccagcctcttgtggaatggacccatggctgtgtccatgac

SEQ ID NO: 113984 - DNA, 80 bp, synthetic construct
  source 1..80: mol_type = other DNA
caaatttggttatggggcaaaggacgtccgttgccatgccagaaaggccgtaaaccacatcaactccgtgtggaaagacc

SEQ ID NO: 113985 - DNA, 80 bp, synthetic construct
  source 1..80: mol_type = other DNA
gagacggaggcaaaactggaacgcgatccggcacttgaacattcttgcgcaacttctttttgggaggaagtgacggggcc

SEQ ID NO: 113986 - DNA, 80 bp, synthetic construct
  source 1..80: mol_type = other DNA
ggagagggtgcggcccgagtctgcctggctgctgcgtctcgctccgagtgccgaggtgcaaatgcgaccagaccgtcggg

SEQ ID NO: 113987 - DNA, 80 bp, synthetic construct
  source 1..80: mol_type = other DNA
tcctcctggagttaagtccctctcgccgtgcacttgcggagcatcagatctgttcctagttactcggcatgcagatgtca

SEQ ID NO: 113988 - DNA, 80 bp, synthetic construct
  source 1..80: mol_type = other DNA
ggaagatgcaagctctgaaattaatttaactcagcagtccatggccaacagacccaactacatcggcttcagggacaact

SEQ ID NO: 113989 - DNA, 80 bp, synthetic construct
  source 1..80: mol_type = other DNA
atgttgggaagctctagctcccagcatagctgtccgctaccgaggagccctcacgcgggagctacgccgccacattgaca

SEQ ID NO: 113990 - DNA, 80 bp, synthetic construct
  source 1..80: mol_type = other DNA
cgttggatgttgtgttgcaaaaacaaagacagtttgaagagaccgcgtctcgcttacgagctttaattgaacgtattcca

SEQ ID NO: 113991 - DNA, 80 bp, synthetic construct
  source 1..80: mol_type = other DNA
ttgtttgggcaaagaattgaggtcaaggagaattttagcatgggagagtttcttctggacttgaggccggcaacagcctg

SEQ ID NO: 113992 - DNA, 80 bp, synthetic construct
  source 1..80: mol_type = other DNA
cgtcaaaagaaagtgacctttgaccgtgtccagatcctggaccagcactattctgatgttctcaaggaggtaaaagctcg

SEQ ID NO: 113993 - DNA, 80 bp, synthetic construct
  source 1..80: mol_type = other DNA
caggttcaaaaactgaatggtataatggaaaacttgacaaactgtgcggtggaaagactggtttaaagattttgtgtaat

SEQ ID NO: 113994 - DNA, 80 bp, synthetic construct
  source 1..80: mol_type = other DNA
tctgtggcgatgacttggtcattatttgtgagagtaagggtgttgaggaggacaaagcagctctggctgctttcacagag

SEQ ID NO: 113995 - DNA, 80 bp, synthetic construct
  source 1..80: mol_type = other DNA
gagctgataacatcttgctcctccaatgtatccgtggcgctggacccgcgaggccgccgcagatactacctgactagaga

SEQ ID NO: 113996 - DNA, 80 bp, synthetic construct
  source 1..80: mol_type = other DNA
attgccaactgtttaagaaagaacggaaaacgggtaatccaactgagcagaaaaacctttgacactgagtaccagaaaac

SEQ ID NO: 113997 - DNA, 80 bp, synthetic construct
  source 1..80: mol_type = other DNA
tttatttgatttacaattgggacctcaattaaacccctttctatctcatttagcacaaatgtacaatggcgtgggttgga

SEQ ID NO: 113998 - DNA, 80 bp, synthetic construct
  source 1..80: mol_type = other DNA
ggagcagccctgagagccttcacggaggctatgaccaggtattctgctccacccggagatgctccacagcccacctacga

SEQ ID NO: 113999 - DNA, 80 bp, synthetic construct
  source 1..80: mol_type = other DNA
gatccatctcatatcacggcggagactgcagcgcggcgtttagcgcgggggtcacccccatccgaggcaagctcctcggc

SEQ ID NO: 114000 - DNA, 80 bp, synthetic construct
  source 1..80: mol_type = other DNA
ggtgatggtggctaggaaggtggtagatcagaatgataggagcaaggatgagttaaaatatgagtggtttgagtttaccc

SEQ ID NO: 114001 - DNA, 80 bp, synthetic construct
  source 1..80: mol_type = other DNA
acacttgaaatgtagactaaagatggacaagctgactctaaaagggatgtcatatgtaatgtgcacaggctcattcaagc

SEQ ID NO: 114002 - DNA, 80 bp, synthetic construct
  source 1..80: mol_type = other DNA
cgagagaaacctggtcacaccagaagggaaagtagtggacctcggttgcggcagagggggctggtcatactattgtggtg

SEQ ID NO: 114003 - DNA, 80 bp, synthetic construct
  source 1..80: mol_type = other DNA
tgacttgcatgtcggcagacttggaggtcataactagcacctgggtgcttgtaggtggggttctcgcggcattagcagcc

SEQ ID NO: 114004 - DNA, 80 bp, synthetic construct
  source 1..80: mol_type = other DNA
gggtcctcgggtggtccggtgctctgccccaggggccacgttgtaggaattttcggggcagctgtgtgctccagtggtgt

SEQ ID NO: 114005 - DNA, 80 bp, synthetic construct
  source 1..80: mol_type = other DNA
ttcctgtgatccgagccgacgtgaaggtactggcgtccatgctacagacccatctcatatcacggctgaggcggcagcag

SEQ ID NO: 114006 - DNA, 80 bp, synthetic construct
  source 1..80: mol_type = other DNA
cccggcgccgaactataagttcgcgaagtggagggtgtccgctgaggagtacgtggaagtgcgtagggtgtgcgactacc

SEQ ID NO: 114007 - DNA, 80 bp, synthetic construct
  source 1..80: mol_type = other DNA
catagagacggtcgcactgccccatccggacaatttaaaagaatgtttgtattgcggaagtgtttttcttaggtatctaa

SEQ ID NO: 114008 - DNA, 80 bp, synthetic construct
  source 1..80: mol_type = other DNA
ccacaacaacccatatagaacgtggaactatcatggaagttatgaagtgaaaccaaccggatcagctagctcgatggtga

SEQ ID NO: 114009 - DNA, 80 bp, synthetic construct
  source 1..80: mol_type = other DNA
tcccacccaagcggctttttgggtttttctcttcccccctccccacatcccccctctttaggcgttcgggtggtaacaac

SEQ ID NO: 114010 - DNA, 80 bp, synthetic construct
  source 1..80: mol_type = other DNA
atcgctttcttctgcttcgctgtttacgagcgccaactggttgggtgagtacacgcgctcaaaggcaggcattacctctg

SEQ ID NO: 114011 - DNA, 80 bp, synthetic construct
  source 1..80: mol_type = other DNA
tcccacggtatccggatgtgccctaccacctacaccatcacctcctgtccctcccccaaggaggaagaagctgatacggc

SEQ ID NO: 114012 - DNA, 80 bp, synthetic construct
  source 1..80: mol_type = other DNA
aatatccagcctgcgcacaattatggccgatgcttcctcagcccttagggaatgtgaaaatttaatgactaaaacctcca

SEQ ID NO: 114013 - DNA, 80 bp, synthetic construct
  source 1..80: mol_type = other DNA
gcgaagaaggggcagagatgccgtagtcaggtttagttcgtccggcggcgccagaaatccgcgcggtggtttttggtggt

SEQ ID NO: 114014 - DNA, 80 bp, synthetic construct
  source 1..80: mol_type = other DNA
cgaggatgtcccataaacttggttgcagagttttgtgaaatgttgcactccagtagaaggcagcagactaggctgggcgt

SEQ ID NO: 114015 - DNA, 80 bp, synthetic construct
  source 1..80: mol_type = other DNA
ttgttcggaaagtcaacagcaacgcggctcttggggccatgtttgccgagcagaaccaatggagctcagccagagaggct

SEQ ID NO: 114016 - DNA, 80 bp, synthetic construct
  source 1..80: mol_type = other DNA
caacgcagacgttgtgaactcggagctctttcttccggcgagtctcgcaggacccaggtcctggtacaataggatccccg

SEQ ID NO: 114017 - DNA, 80 bp, synthetic construct
  source 1..80: mol_type = other DNA
gtcaggccttggtctcaacgccgtggcttactacagaggcttggatgtctcggtgatccctacgtctggggacgttgtgg

SEQ ID NO: 114018 - DNA, 80 bp, synthetic construct
  source 1..80: mol_type = other DNA
ctctcacctgctatcacaaaatacgtcgttcgatgggagtgggtggtactcttattcctgctcttagcggacgccagagt

SEQ ID NO: 114019 - DNA, 80 bp, synthetic construct
  source 1..80: mol_type = other DNA
tgctggtcctgtttctgtttgcggaggtcgatgccaacacccgcactgtgggtggtagtgcggcccaaggcgcgcgcggg

SEQ ID NO: 114020 - DNA, 80 bp, synthetic construct
  source 1..80: mol_type = other DNA
tggcctcgcggcgatggcccgccttgcccaggaagaagctcgtgtcgcaaaagctccgcttcagctcggcgaccagggtc

SEQ ID NO: 114021 - DNA, 80 bp, synthetic construct
  source 1..80: mol_type = other DNA
cactatgtgcccaagccttgtgacattgtcccggcacggaaagtctgcggcccggtatactgttttactcccagccctgt

SEQ ID NO: 114022 - DNA, 80 bp, synthetic construct
  source 1..80: mol_type = other DNA
gagccacttgacctacctcagatcattcaacgactccatggtcttagcgcattctcactccacagttactctccaggtga

SEQ ID NO: 114023 - DNA, 80 bp, synthetic construct
  source 1..80: mol_type = other DNA
acagtgtagtgctttgtgagtgctacgacgcaggggctgcgtggtacgatctcacaccagcggagaccaccgtcaggctt

SEQ ID NO: 114024 - DNA, 80 bp, synthetic construct
  source 1..80: mol_type = other DNA
cccgtggcaccgacgcaggccaagcccctgttgcgtcggcgggagcggcatgctaatggggttctttcggcgacaccgtg

SEQ ID NO: 114025 - DNA, 80 bp, synthetic construct
  source 1..80: mol_type = other DNA
ttttcttttgccagatgcatcccgtcctgcgccaaatgcgtcccacccccccggcgaccaccgcaaccgcggccgtagca

SEQ ID NO: 114026 - DNA, 80 bp, synthetic construct
  source 1..80: mol_type = other DNA
attgttttacccccagcccagtcgtggtaggcaccaccgacaaacgcggggcgccaaccttcgcctgggtggcgaacgcc

SEQ ID NO: 114027 - DNA, 80 bp, synthetic construct
  source 1..80: mol_type = other DNA
cgcgcacgtagtcatacaactcgtgcgaggtggcgaggagcccggctccgagattggcgcggctgggtttttcggcgcgg

SEQ ID NO: 114028 - DNA, 80 bp, synthetic construct
  source 1..80: mol_type = other DNA
gacgcgtcctatcataatccataatagcaacattttgcatacactcaactaggcttgtgacaaccgccgcccctctggcc

SEQ ID NO: 114029 - DNA, 80 bp, synthetic construct
  source 1..80: mol_type = other DNA
agatcaaggtcatcacctggggcgcggatacagcggcttgcggagacatcctttgcgggctgcctgtctctgcgcgacta

SEQ ID NO: 114030 - DNA, 80 bp, synthetic construct
  source 1..80: mol_type = other DNA
gggtgcggattcatcggtacgcgcccgagtgtaaacccatgttacgggacgaggttaccttctccgtgggattgtcctcc

SEQ ID NO: 114031 - DNA, 80 bp, synthetic construct
  source 1..80: mol_type = other DNA
gagcacaggttctccgctgcctgtaactggaccaggggggacccttgtgagcttgatgacagagacaggatcgagatgag

SEQ ID NO: 114032 - DNA, 80 bp, synthetic construct
  source 1..80: mol_type = other DNA
ttggtaatacaccgcatccggacactgattgggaaagagagatacactgactacctgacagtcatggataggtactctgt

SEQ ID NO: 114033 - DNA, 80 bp, synthetic construct
  source 1..80: mol_type = other DNA
tgaaccggatgtggccgtggtgacgtccatgctcactgatccctcccatataacagcggaagcggctgggaggaggttgg

SEQ ID NO: 114034 - DNA, 80 bp, synthetic construct
  source 1..80: mol_type = other DNA
cgatggtgaagatgcccggacagagttccttgtaaaaataatctatttttgaggatgcatcatccaaggccatctgccac

SEQ ID NO: 114035 - DNA, 80 bp, synthetic construct
  source 1..80: mol_type = other DNA
aagctcgaaaagtccaccccttagttgtagggtaggaaatgcgttgcgaggtgcgtttggtagcgacacagcacttacta

SEQ ID NO: 114036 - DNA, 80 bp, synthetic construct
  source 1..80: mol_type = other DNA
aatcccccttgaattaatcaagggcgggagacatctgatcttctgccattccaagaagaagtgcgatgagcttgccggga

SEQ ID NO: 114037 - DNA, 80 bp, synthetic construct
  source 1..80: mol_type = other DNA
tatgccagacgcaagagccggcggcgacgcattgccaggcgccaccggagcacgcccgccatgcgcgccgcccgggctct

SEQ ID NO: 114038 - DNA, 80 bp, synthetic construct
  source 1..80: mol_type = other DNA
tgattgcgcccttcaccgacagtggcagcgtgaaccgcaactcgtacctgggtcacctgctgacgctgtaccgcgaggcc

SEQ ID NO: 114039 - DNA, 80 bp, synthetic construct
  source 1..80: mol_type = other DNA
gtggactatccctacaggctatggcattacccttgtactgtcaactataccatccactcagtccgcatgttcgtaagcgg

SEQ ID NO: 114040 - DNA, 80 bp, synthetic construct
  source 1..80: mol_type = other DNA
gtttgtgcaagggctaaagcccctcccccctcttgggacacaatgtggaagtgccttatccggctcaagcccatgctcac

SEQ ID NO: 114041 - DNA, 80 bp, synthetic construct
  source 1..80: mol_type = other DNA
gactgggctgatccatctccaccagaacatcgtcgatgtccagtacctttatgggatagggtcatccgttgtgtcctggg

SEQ ID NO: 114042 - DNA, 80 bp, synthetic construct
  source 1..80: mol_type = other DNA
agggctacaaagtgcttgtgctcaatccatcagtggcagccacccttggtttcggtgcttacatgagtaaggcttatggg

SEQ ID NO: 114043 - DNA, 80 bp, synthetic construct
  source 1..80: mol_type = other DNA
tagtgtagggctatccacttatgtcgtagggtcacaactgccctgcgagcccgagcccgatgagctggtggttaatgaat

SEQ ID NO: 114044 - DNA, 80 bp, synthetic construct
  source 1..80: mol_type = other DNA
tggtagtggtagatgtagcgggagagccaggtgatgccggccgaggtggtcgcggccctggtgaattcgcgaacgcggtt

SEQ ID NO: 114045 - DNA, 80 bp, synthetic construct
  source 1..80: mol_type = other DNA
gtatctcgtgaatgagttgtacctggcttcccttgacgagaaatttcagtgggaagccgaggcctggcgattgtatctcg

SEQ ID NO: 114046 - DNA, 80 bp, synthetic construct
  source 1..80: mol_type = other DNA
cgcagacctaccaagtgggatatctacacgcacccactggcagtggtaagagcaccaaggtccctgcggcttatgcggcc

SEQ ID NO: 114047 - DNA, 80 bp, synthetic construct
  source 1..80: mol_type = other DNA
catgtagacgcgcacttcttgtcccaggctaaacaggcaggtgagaactacccatacttggttgcctgtcaagctacggt

SEQ ID NO: 114048 - DNA, 80 bp, synthetic construct
  source 1..80: mol_type = other DNA
tcatgtggtggaaccagtacaccatatgtaggtgtgaagccgcgcttcaagtgtgggtcccccccctacttgcgcgcggg

SEQ ID NO: 114049 - DNA, 80 bp, synthetic construct
  source 1..80: mol_type = other DNA
tcaattgctcctcgatattttccttgagggtcattggggcgttatcggtgctatactgtattacagtatggtaggcaact

SEQ ID NO: 114050 - DNA, 80 bp, synthetic construct
  source 1..80: mol_type = other DNA
cgccgggcaactcaggtcgttgggcttgaactcagtcgctttctacaggggtatagacgtgtcagtgatccccaccgtgg

SEQ ID NO: 114051 - DNA, 80 bp, synthetic construct
  source 1..80: mol_type = other DNA
aatcacgctagcgggactgcgaagcaaccacaaccggaggcctgggtataaaacacaaagccagggtccatgggatgaag

SEQ ID NO: 114052 - DNA, 80 bp, synthetic construct
  source 1..80: mol_type = other DNA
tccattagacctaccggccataattgaaaggctacacgggcttgacgccttctcactgcacacatactctccccacgaac

SEQ ID NO: 114053 - DNA, 80 bp, synthetic construct
  source 1..80: mol_type = other DNA
atgcggtgtttaagaaaacccgcctgcaaacgtacctgacagacatcgcggccctgttcgtcgcggacgtccagcacgca

SEQ ID NO: 114054 - DNA, 80 bp, synthetic construct
  source 1..80: mol_type = other DNA
acgagaccatcacggcgctgatgggggcggtgacgtctctgcagcaggaactggcgcacatgcgggctcggaccagcgcc

SEQ ID NO: 114055 - DNA, 80 bp, synthetic construct
  source 1..80: mol_type = other DNA
gctctcaactgcaatgactcactgcacacagggttcatcgcggccttgttctacagctataaatttaactcctctggttg

SEQ ID NO: 114056 - DNA, 80 bp, synthetic construct
  source 1..80: mol_type = other DNA
tttgttggcaccaggaatgagagctcttcatctcgacacctacagaatttttctgctcatcattggagtctgtgctctgc

SEQ ID NO: 114057 - DNA, 80 bp, synthetic construct
  source 1..80: mol_type = other DNA
ccccgtgtgaccgtccatgaggaccccacacgtatgcacgttctcttcggcgaggtcgctgggttcgtggaagataaagc

SEQ ID NO: 114058 - DNA, 80 bp, synthetic construct
  source 1..80: mol_type = other DNA
cccttgccggctatcgcatcgggtttgttacatctccatcagaacatcgtggacgtgcagtatctgtatggcgtttcccc

SEQ ID NO: 114059 - DNA, 80 bp, synthetic construct
  source 1..80: mol_type = other DNA
ccttgctgagtgtgatgaccatgggaatcttctttctgcttatgcagaggaagggtatcgggaagattggcctgggaggc

SEQ ID NO: 114060 - DNA, 80 bp, synthetic construct
  source 1..80: mol_type = other DNA
cataaacattttcagggccgcattcattcactttggtcatgtcaggccacactccaacctacgcttctcataggcgtaac

SEQ ID NO: 114061 - DNA, 80 bp, synthetic construct
  source 1..80: mol_type = other DNA
tggagcgcggcttgtcgtgctcgccaccgctacgcctccaggatcggtcaccgtgccacaccccaatatcgaggaggtgg

SEQ ID NO: 114062 - DNA, 80 bp, synthetic construct
  source 1..80: mol_type = other DNA
ttgaggccagaggaggaaagctggtggaccatgccaatggcttgcgggatggctgggctggtgcggggaagtctgtggtg

SEQ ID NO: 114063 - DNA, 80 bp, synthetic construct
  source 1..80: mol_type = other DNA
tccaccgtggacgcggtcatcgacagcgtggtggccgacgcgcgcgactatgccagacgcaagagccggcggcgacggat

SEQ ID NO: 114064 - DNA, 80 bp, synthetic construct
  source 1..80: mol_type = other DNA
tgggctaaagtagtgctggtgctgtgcctgttcgcaggggtagatgccaacacatacgccaccggcggacgtgctgggta

SEQ ID NO: 114065 - DNA, 80 bp, synthetic construct
  source 1..80: mol_type = other DNA
actggtccttctgatgaaagaccgtactgttggcactacgcgcctagaccttgtgaaactgtcccagcatcaagtgtctg

SEQ ID NO: 114066 - DNA, 80 bp, synthetic construct
  source 1..80: mol_type = other DNA
taccactagaagtgaagagagaagcttgcccagggactagcgtgatcattgatggcaactgtgatggacggggaaaatca

SEQ ID NO: 114067 - DNA, 80 bp, synthetic construct
  source 1..80: mol_type = other DNA
attttaaaatggttctttctccccatcgccgtggctggcgggcaaagctacgttgcgatactgcaaacgagaggaccact

SEQ ID NO: 114068 - DNA, 80 bp, synthetic construct
  source 1..80: mol_type = other DNA
cacaacaaaaaacggactggataccgttagtcctcataataaaaggtctcaatccaactgctattttcttgacaactctg

SEQ ID NO: 114069 - DNA, 80 bp, synthetic construct
  source 1..80: mol_type = other DNA
cccgcgggtttgccgcccgttcctcctccacggaggaagaaacggccaatacaactgacagactccacggtttccaccat

SEQ ID NO: 114070 - DNA, 80 bp, synthetic construct
  source 1..80: mol_type = other DNA
atggcttcaagcgtactgctatggatggccagtgtagagccccattggatagcggcctccatcatactggagttcttcct

SEQ ID NO: 114071 - DNA, 80 bp, synthetic construct
  source 1..80: mol_type = other DNA
cacggagtggagcacaaggggccgcgggtatagatcgacggggacgccgaccgactccccgcctctgggacagacatgca

SEQ ID NO: 114072 - DNA, 80 bp, synthetic construct
  source 1..80: mol_type = other DNA
tccaacaggagcattgtgtatgaggccgacgacgtgatcttgcacttacccggatgcgtgccctgcgtcgaaaccgacaa

SEQ ID NO: 114073 - DNA, 80 bp, synthetic construct
  source 1..80: mol_type = other DNA
tacctggatgaattccaccggttttgttaaaacatgtggagcaccaccgtgtaacatcggccccgacactaacacctcat

SEQ ID NO: 114074 - DNA, 80 bp, synthetic construct
  source 1..80: mol_type = other DNA
gggaagtatgtccagatggcactcatcaccctcggtaagtggaccggcacatacatctacgaccatctctcccccatgac

SEQ ID NO: 114075 - DNA, 80 bp, synthetic construct
  source 1..80: mol_type = other DNA
tggcaaaaaagattttagaattgttgtaattacaccaacaccaaaaagcaaagttcctcaaactcataacgttttcatta

SEQ ID NO: 114076 - DNA, 80 bp, synthetic construct
  source 1..80: mol_type = other DNA
ggtggcgcgcgccagggagcgtgcccggcggtgtcggcgcgcgcgcgacccggacgaagaagcggcagaagcgcgtgagg

SEQ ID NO: 114077 - DNA, 80 bp, synthetic construct
  source 1..80: mol_type = other DNA
taatataacataaattcattactaactgtaatgagcatccacaacaaaatcgcccccacgctaatacagctacatcaatt

SEQ ID NO: 114078 - DNA, 80 bp, synthetic construct
  source 1..80: mol_type = other DNA
actcctcggggtgtccggaacggttggcagcatgtaggtctctggcagatttcaaacaagggtggtgccctataagatat

SEQ ID NO: 114079 - DNA, 80 bp, synthetic construct
  source 1..80: mol_type = other DNA
aaaggttagggcctaaatgtgtgcgttttggtttctctgcgcgatacaaaatttgtcgaaaaagcgcatgagagttagag

SEQ ID NO: 114080 - DNA, 80 bp, synthetic construct
  source 1..80: mol_type = other DNA
actctgtgttcggccctttatgtgggggacgtatgcggggctgtgatgatagccgctcaagctttcatcgcttcgccgac

SEQ ID NO: 114081 - DNA, 80 bp, synthetic construct
  source 1..80: mol_type = other DNA
ttaagaaaaatgagacacctgcaccttgtgtcttcaactgtgcctattgacatggccgcattattgctggaggactatgt

SEQ ID NO: 114082 - DNA, 80 bp, synthetic construct
  source 1..80: mol_type = other DNA
ggcgccctggcggagccccgatgcaacgccacaggccgcacgcccggtccgagcgcggaccgggtggcgtcgggtgacgt

SEQ ID NO: 114083 - DNA, 80 bp, synthetic construct
  source 1..80: mol_type = other DNA
ttcagccaggggtggggtcccatcacttacgctgattctcgccccgaggaccagaggccctattgctggcactacgcgcc

SEQ ID NO: 114084 - DNA, 80 bp, synthetic construct
  source 1..80: mol_type = other DNA
tacaagggagtctggcgtggagacggggtgatgacaacgcgctgcccctgcgggaagatgttgaccggacatgtcaagaa

SEQ ID NO: 114085 - DNA, 80 bp, synthetic construct
  source 1..80: mol_type = other DNA
acggaccaaagcatgtggatgagctcctttcggaatgacacgggcacgtacatccatgagctcattctcaccgacctcag

SEQ ID NO: 114086 - DNA, 80 bp, synthetic construct
  source 1..80: mol_type = other DNA
aattaccacaaagcattgtggagggtctctgcggaggactacgttgaggtcgtgcgcgttaatgaccaccactacatagt

SEQ ID NO: 114087 - DNA, 80 bp, synthetic construct
  source 1..80: mol_type = other DNA
cagggagagggcgctgacgatgcatcttatcaattgccccgtagggactccgcgcaaggacctaagcgtctctagatcca

SEQ ID NO: 114088 - DNA, 80 bp, synthetic construct
  source 1..80: mol_type = other DNA
cttctgtagggtcaggcaaaccccaggaaggacttggtgttctccgtgggccccgttttattacctctgcgcgaacctgc

SEQ ID NO: 114089 - DNA, 80 bp, synthetic construct
  source 1..80: mol_type = other DNA
atggaccaacgaccgtagacacacacagtaatttgtccgcccagaatgcagccgtgcaagctggaaggttcagtgtgtct

SEQ ID NO: 114090 - DNA, 80 bp, synthetic construct
  source 1..80: mol_type = other DNA
cgccggggcgcccgaggcctcgaaccggcgtcgcgcctcctccgcctcgggcgccccccagaggcccggtcggctgtcgc

SEQ ID NO: 114091 - DNA, 80 bp, synthetic construct
  source 1..80: mol_type = other DNA
gagcgtccctgctacgggtgccatactttgtgagggcccacgccctgctacgaatgtgtaccctggtgagacacctcgcg

SEQ ID NO: 114092 - DNA, 80 bp, synthetic construct
  source 1..80: mol_type = other DNA
gcgtcagaggaaggttaccttcgacaggctgcaggtgctcgacgaccactacaagactgcattaaaggaggtaaaggagc

SEQ ID NO: 114093 - DNA, 80 bp, synthetic construct
  source 1..80: mol_type = other DNA
ggccggacaggcctttagccccacaaagtcagggagaggccgcaggaccccctggagtttgtgcaagaacttctcccggg

SEQ ID NO: 114094 - DNA, 80 bp, synthetic construct
  source 1..80: mol_type = other DNA
gggaaacagcgcggcatactccagtcaattcgtggttgggtaacatcatcatgtatgcgcctacgatatgggtgcgtatg

SEQ ID NO: 114095 - DNA, 80 bp, synthetic construct
  source 1..80: mol_type = other DNA
agcaggccatcgccggggaccgcagcctggtcgaggcggccgaggcgattagccagcagacgctgctccgcctggcctgc

SEQ ID NO: 114096 - DNA, 80 bp, synthetic construct
  source 1..80: mol_type = other DNA
cggccacggttgcctggaaaagtgggcgcgggacggcgtcctgttactaaacacgaccctgaccgtcaagcgcggtgcgg

SEQ ID NO: 114097 - DNA, 80 bp, synthetic construct
  source 1..80: mol_type = other DNA
aactcaaactcactccattgccagccgctaggcagctcgatttatcgggctggtttacggtgggcgccggcgaggtggac

SEQ ID NO: 114098 - DNA, 80 bp, synthetic construct
  source 1..80: mol_type = other DNA
acggagcgacctcgccggccccaaaggggccggcgcgggccaacgggagcgcggagccggcatctcattaccacgaaccc

SEQ ID NO: 114099 - DNA, 80 bp, synthetic construct
  source 1..80: mol_type = other DNA
aacactgcggtgtcctaccgactgcttccggaagcacccaggcgctacttatgccaagtgcgggtcggggccgtggctca

SEQ ID NO: 114100 - DNA, 80 bp, synthetic construct
  source 1..80: mol_type = other DNA
agcgacagtgttaatgggtctagggaaaggatggccattgtcaaagatggacatcggagttccccttctcgccattggat

SEQ ID NO: 114101 - DNA, 80 bp, synthetic construct
  source 1..80: mol_type = other DNA
ttgaggctcggggcttggacaggcacctacatttatgaccatctagctccaatgtccgattgggcaagcaacggcctgcg

SEQ ID NO: 114102 - DNA, 80 bp, synthetic construct
  source 1..80: mol_type = other DNA
gccagccagttgtctgccgcttcgttaaaagccacatgctccaccaactgtgtccatcccgacgctgaactcatcagcgc

SEQ ID NO: 114103 - DNA, 80 bp, synthetic construct
  source 1..80: mol_type = other DNA
acccttcagggtgaatctcctctataaacattccagcaccttcaaccatgcccaaataattttcatctcgccaccttctc

SEQ ID NO: 114104 - DNA, 80 bp, synthetic construct
  source 1..80: mol_type = other DNA
acttcaactcctattcccacaaccatcatggcgaagaatgaggttttttgcgtcgacccagctaaggggggtcgcaaacc

SEQ ID NO: 114105 - DNA, 80 bp, synthetic construct
  source 1..80: mol_type = other DNA
cgtggcgtgcggcagcgggcggcggtcggggttgtttctggcggaggtgctgctgatgatgtaattaaagtaggcgttct

SEQ ID NO: 114106 - DNA, 80 bp, synthetic construct
  source 1..80: mol_type = other DNA
ccccctcgagtgggagccggaggaccccgacctggagcccgagccggtagagcgctcccctccctccttggagagtgaga

SEQ ID NO: 114107 - DNA, 80 bp, synthetic construct
  source 1..80: mol_type = other DNA
tggaaatcggatggaaggcatgggggaagagtataatgttcgcctcagaactggccaatcacaccttcgtggtagacgga

SEQ ID NO: 114108 - DNA, 80 bp, synthetic construct
  source 1..80: mol_type = other DNA
tgaggctccgcgcttacctcaacacgccgggacttcccgtatgccctgaccatctggaattctgggaaggcgtgtttaca

SEQ ID NO: 114109 - DNA, 80 bp, synthetic construct
  source 1..80: mol_type = other DNA
ccgcggctcccggcctagttggggccccacggacccccggcgtaggtcgcgtaacttgggtaaggtcatcgataccctta

SEQ ID NO: 114110 - DNA, 80 bp, synthetic construct
  source 1..80: mol_type = other DNA
gtatacagattggccggcggggccgcgcgaagctgcagctccaggtccgcgagttccccgtaaaaggcgtccgtctcccg

SEQ ID NO: 114111 - DNA, 80 bp, synthetic construct
  source 1..80: mol_type = other DNA
aagactaaaaaaaaagcccgcgcgcggactttacaggcgggaaagtgacgtcagcgctatgagtaaagaaattcccacgc

SEQ ID NO: 114112 - DNA, 80 bp, synthetic construct
  source 1..80: mol_type = other DNA
ctccacgggtaagtcctggggtaaaccaggatacccttggcccctgtatggtaatgagggctgcggctgggcaggttggc

SEQ ID NO: 114113 - DNA, 80 bp, synthetic construct
  source 1..80: mol_type = other DNA
ggtacgccagcacgagccacgaggcgcggctgctgagacgcctgaaccaccccgcgatcctacccctcctggacctgcac

SEQ ID NO: 114114 - DNA, 80 bp, synthetic construct
  source 1..80: mol_type = other DNA
tagatgcaaatacccgtatcaccggaacagcggttggtcaacagatgagtggttggaccagtctcttcactagagggtct

SEQ ID NO: 114115 - DNA, 80 bp, synthetic construct
  source 1..80: mol_type = other DNA
gcgcatgttcagagagggacgtgacatcagagagttcgtcgcgtatgcctcagggagacgcagcgtcggagacgtgctga

SEQ ID NO: 114116 - DNA, 80 bp, synthetic construct
  source 1..80: mol_type = other DNA
acatcgagcagggtatgcagctggccgagcaatttaagcaaaaggcgctcggcttgctgcaagtggcctccaaacaagcg

SEQ ID NO: 114117 - DNA, 80 bp, synthetic construct
  source 1..80: mol_type = other DNA
gctatcaagtgggaatatgtcgtcctgagcttcttagtgttggcagatgctcgcatttgtgcaatactttggctcatgct

SEQ ID NO: 114118 - DNA, 80 bp, synthetic construct
  source 1..80: mol_type = other DNA
tggtgggtgttttatgccgcagaccgggcgctggaggagccccgcgccgactctggcctcacccgcgaggaggtacgtgc

SEQ ID NO: 114119 - DNA, 80 bp, synthetic construct
  source 1..80: mol_type = other DNA
gcgctcaaagaagactccgatggggttcgcctatgacaccaggtgttttgactccactgtcactgagcgcgacataaaaa

SEQ ID NO: 114120 - DNA, 80 bp, synthetic construct
  source 1..80: mol_type = other DNA
atcgcccccaccgcatccgccggcacgtaggcggcaaacgccgaacgccacggggtgcagtcgccggtcgcgtgggcccg

SEQ ID NO: 114121 - DNA, 80 bp, synthetic construct
  source 1..80: mol_type = other DNA
cctcgcgccccttccgccttccgccgcgcctcgccctccgcctgcgcgtcaccgcggagcacctggcgcgcctgcgcctg

SEQ ID NO: 114122 - DNA, 80 bp, synthetic construct
  source 1..80: mol_type = other DNA
gtgtcaactggatcacagttggcgaagagttagaggagacccctcccatgacacaacgcagcagcggggcccgagcactg

SEQ ID NO: 114123 - DNA, 80 bp, synthetic construct
  source 1..80: mol_type = other DNA
aagtgagtgctagactcctctctacggaggaggcatgcagtctcacacccccgcactcagcccgatctaagttcgggtac

SEQ ID NO: 114124 - DNA, 80 bp, synthetic construct
  source 1..80: mol_type = other DNA
catagacggtcatttcctatcccagaccaagcaatcgggtgagaatttcccgtatcttgttgcttaccaagccacggtgt

SEQ ID NO: 114125 - DNA, 80 bp, synthetic construct
  source 1..80: mol_type = other DNA
agaaaacttggaaagggccgcagtatgaggaagatgttaacctgggcagtggaactagggccgttgggaagcctttgctc

SEQ ID NO: 114126 - DNA, 80 bp, synthetic construct
  source 1..80: mol_type = other DNA
gcgacccggacttgacatcagactcttggtccaccgtcagcggatcggagggtgtagtgtgctgctccatgtcatactcc

SEQ ID NO: 114127 - DNA, 80 bp, synthetic construct
  source 1..80: mol_type = other DNA
tgcttccgcaaacatccagacgccacatacgggaagtgcggctctggcccgtggctgacgccccgctgcctagtcgacta

SEQ ID NO: 114128 - DNA, 80 bp, synthetic construct
  source 1..80: mol_type = other DNA
ccccctcgaggtgatcaaggggggaagacatctcatcttctgccactcaaagaagaagtgcgacgagctcgccgcgaagc

SEQ ID NO: 114129 - DNA, 80 bp, synthetic construct
  source 1..80: mol_type = other DNA
gctgctccggcggcgcctacgacatcataatatgcgacgaatgccattcggtggattccacaaccattctcggtatcggg

SEQ ID NO: 114130 - DNA, 80 bp, synthetic construct
  source 1..80: mol_type = other DNA
agcccagcgcccgggccctggaggcggctggttatgttggcgcggaagaagatgaagaggactatgaggacgagccctga

SEQ ID NO: 114131 - DNA, 80 bp, synthetic construct
  source 1..80: mol_type = other DNA
tcggtgtgcggctcgtcaaagacggccatcgacacgatagactcgagggccagggcggcgtctccggccatgacggaggc

SEQ ID NO: 114132 - DNA, 80 bp, synthetic construct
  source 1..80: mol_type = other DNA
catcgcccgtggggcctccgggtccgactcgggggccatcaagagcggagacaacaatctggaggcgctatgtgccaatt

SEQ ID NO: 114133 - DNA, 80 bp, synthetic construct
  source 1..80: mol_type = other DNA
cttttcacccacccaccgctgtattttgctacataactgaacaataaaatcattgcaggcgcaatcttcgcatttctttt

SEQ ID NO: 114134 - DNA, 80 bp, synthetic construct
  source 1..80: mol_type = other DNA
cttgcaacaatgctcttctgcactgtggtcatcatcggcgttctccatcagaactcaaaggacacttccatgcagaagac

SEQ ID NO: 114135 - DNA, 80 bp, synthetic construct
  source 1..80: mol_type = other DNA
ggtacaggggggcttggcggggtgatggcgtgatgaccacaaagtgtccctgtggcgcaaatctatcaggccacatcaaa

SEQ ID NO: 114136 - DNA, 80 bp, synthetic construct
  source 1..80: mol_type = other DNA
ccaatatttcatagctaggactgaggctctgttgcatgtctatgctccatctttcgacgtgcgcgggcctcgtgactcat

SEQ ID NO: 114137 - DNA, 80 bp, synthetic construct
  source 1..80: mol_type = other DNA
tcgccgtcgaacagtatgttgactttagtcttgaccctacattttccattgagacccacacaaccccacaagatgcggtg

SEQ ID NO: 114138 - DNA, 80 bp, synthetic construct
  source 1..80: mol_type = other DNA
attttgggttgtgtcgggcttattgccgttgtggttttgtgtgtgcgggggggcttgccttcaaccgaatatgttattcg

SEQ ID NO: 114139 - DNA, 80 bp, synthetic construct
  source 1..80: mol_type = other DNA
gcggtctcggatccgtccgcgcgcttcagggccgagaaggcggcgtagtttcccagcacgtcgcagtcgctgtacatgct

SEQ ID NO: 114140 - DNA, 80 bp, synthetic construct
  source 1..80: mol_type = other DNA
ccgaaatcagcccactgctgttctcgacaactcagctttccatactgccttgcagcttcacacccatgccagctctctcc

SEQ ID NO: 114141 - DNA, 80 bp, synthetic construct
  source 1..80: mol_type = other DNA
gccgaggcgctcacacagcgcctcccccgtcgtctcgtgtttgaggtcgccgggccgggtggtgtagtccgaaaagccaa

SEQ ID NO: 114142 - DNA, 80 bp, synthetic construct
  source 1..80: mol_type = other DNA
gtggagctgttgtcctcgtcctcgtcctccgaggacgaggacgatgtgtggagagggcgcgggtggaggagccccccgca

SEQ ID NO: 114143 - DNA, 80 bp, synthetic construct
  source 1..80: mol_type = other DNA
ctggtttctacaccgggggatttgaggtgcccgagggtaacgatggattcctctgggacgacatagacgacagcgtgttt

SEQ ID NO: 114144 - DNA, 80 bp, synthetic construct
  source 1..80: mol_type = other DNA
ggtgcagatccatagatttgcgccccccccagggcccttctttcgtgacgaagtcaacttcagggtgtggttgcattcat

SEQ ID NO: 114145 - DNA, 80 bp, synthetic construct
  source 1..80: mol_type = other DNA
gacccgaggagtttgagggcgccggggacggcgagccccccgaggacgacgacagcgccaccggcctcgccttccgaact

SEQ ID NO: 114146 - DNA, 80 bp, synthetic construct
  source 1..80: mol_type = other DNA
tgactggtgaggtgcaggtgctgtccacagctacccagaccttcctaggtacaacagttgggggggttatgtggactgtc

SEQ ID NO: 114147 - DNA, 80 bp, synthetic construct
  source 1..80: mol_type = other DNA
tccagttggttcaccactggcgccggcgggggcgacatttttcacagcctgtcgcgtgctcgaccccgcatgttactcct

SEQ ID NO: 114148 - DNA, 80 bp, synthetic construct
  source 1..80: mol_type = other DNA
agtgattgatctagatccaataccttatgatccaaagtttgaaaagcagttgggacaagtaatgctactaatcctctgcg

SEQ ID NO: 114149 - DNA, 80 bp, synthetic construct
  source 1..80: mol_type = other DNA
tggaactctgttgaggcattcacatacacactagaaagcagttcactagcctccacgccaccacccacaccgcctccccg

SEQ ID NO: 114150 - DNA, 80 bp, synthetic construct
  source 1..80: mol_type = other DNA
gagacctcctacccatgaactaatcaacccagcccctcacttaccaattacataaagccaataaaaacacttacttgaaa

SEQ ID NO: 114151 - DNA, 80 bp, synthetic construct
  source 1..80: mol_type = other DNA
ctcggaagagctttcctactgacttagacaacccacctaccggctcagactctggttgcggtaccaatgacacggcgtca

SEQ ID NO: 114152 - DNA, 80 bp, synthetic construct
  source 1..80: mol_type = other DNA
taatgggatgtatcgtcaccagcctcactggccgcgacaacaacacggtggagtgggaggtgcaaattgtgtcgactgcg

SEQ ID NO: 114153 - DNA, 80 bp, synthetic construct
  source 1..80: mol_type = other DNA
cggggtggacgtatatcacagcgcgtcccgggcccgaccccgcatgttactcctgtgcctactcctactttcagtaggtg

SEQ ID NO: 114154 - DNA, 80 bp, synthetic construct
  source 1..80: mol_type = other DNA
gagcaaatcagaattcaacacctacaaaaggagtgggattatggaggtggacagatccgaagccaaagagggactgaaaa

SEQ ID NO: 114155 - DNA, 80 bp, synthetic construct
  source 1..80: mol_type = other DNA
aacccacgagatgtattatgtgtcgggagcccgcagtaacatcacgttcactgtgaatcaaacatcccgcctcttaatga

SEQ ID NO: 114156 - DNA, 80 bp, synthetic construct
  source 1..80: mol_type = other DNA
tggatatgatgacgtgaaccaaagacgagggccgacccgggccgtggccgagatcgtactggacctcgttggccaagtgc

SEQ ID NO: 114157 - DNA, 80 bp, synthetic construct
  source 1..80: mol_type = other DNA
aaagactcccatggccttctcctatgatacccgctgctttgactcaaccgttaccgaacatgacataatgactgaagagt

SEQ ID NO: 114158 - DNA, 80 bp, synthetic construct
  source 1..80: mol_type = other DNA
cgtttgagtaacctgttagggatcagaaagcgccgccccttccaagagggctttcagatcatgtatgaggacctggaagg

SEQ ID NO: 114159 - DNA, 80 bp, synthetic construct
  source 1..80: mol_type = other DNA
tcctcgacaccatcgtcctccgcgacagaccaagactctggcctcccgaccactagcaaaagctcaggccaagcggacga

SEQ ID NO: 114160 - DNA, 80 bp, synthetic construct
  source 1..80: mol_type = other DNA
cccacagagggcctttgctcaagaccaggagcaggcagccagcatcggggtgctggttgtcatagtcatcaccgccttca

SEQ ID NO: 114161 - DNA, 80 bp, synthetic construct
  source 1..80: mol_type = other DNA
acacccccggcctccctgtctgccaggaccatcttgaattctgggaggtggtatttacgggcctcactcacatcgatgcc

SEQ ID NO: 114162 - DNA, 80 bp, synthetic construct
  source 1..80: mol_type = other DNA
accagcattgtcaacaggccttctgcacctccaccagaacatcgtggacgtgcagtacttgtacggcctgtcgccagcca

SEQ ID NO: 114163 - DNA, 80 bp, synthetic construct
  source 1..80: mol_type = other DNA
tagcgttcacgcactgcgagctgacatggttgacccttttcagctgggcctcttggtagttttcctggccacccaggagg

SEQ ID NO: 114164 - DNA, 80 bp, synthetic construct
  source 1..80: mol_type = other DNA
caaaaacaaagcgtggatggaaaccgtgcatcgccagtggttttttgatctgccgctgccgtggaccagcggcgcgacca

SEQ ID NO: 114165 - DNA, 80 bp, synthetic construct
  source 1..80: mol_type = other DNA
ggcggtaggggcggctcgggccccggtggcatggccggcagtggcacgtcggcgccgcgtgcgggtaggttctggtactg

SEQ ID NO: 114166 - DNA, 80 bp, synthetic construct
  source 1..80: mol_type = other DNA
cataggccaggcggaggcagctttggagaacttgatcgtgctcaatgccgcttccgccgccagcttacaaggttggggtt

SEQ ID NO: 114167 - DNA, 80 bp, synthetic construct
  source 1..80: mol_type = other DNA
cccgcgtacgaacacgtcgatgcgtgtgtcagacagcaccagaaagcacaggccatcaacaggtcgtgcatgtgtcggtg

SEQ ID NO: 114168 - DNA, 80 bp, synthetic construct
  source 1..80: mol_type = other DNA
cagttgctaggctccctcaccatcaccagcttgctcagaagactccacacttggatcagcgaagactgtcctatcccctg

SEQ ID NO: 114169 - DNA, 80 bp, synthetic construct
  source 1..80: mol_type = other DNA
ctcggagacaggttctacctcctccatgccccccctcgagggggagcctggggatccagacctagagcctgaactggtag

SEQ ID NO: 114170 - DNA, 80 bp, synthetic construct
  source 1..80: mol_type = other DNA
aaaccacggttagactacgtgcctacctggacaccccccggctaccagtctgccaagaccatctggagtcttggggagct

SEQ ID NO: 114171 - DNA, 80 bp, synthetic construct
  source 1..80: mol_type = other DNA
tgcggattcgccgatctcatggggtacatcccggtcgtcggcggccctcttggtggggtcgcggcagctcttgcgcatgg

SEQ ID NO: 114172 - DNA, 80 bp, synthetic construct
  source 1..80: mol_type = other DNA
gcttcagtaaaggaagaccttgtcgcctatggtggctcatggaagttggaaggcagatgggatggagaggaagaggtcca

SEQ ID NO: 114173 - DNA, 80 bp, synthetic construct
  source 1..80: mol_type = other DNA
catcttgggggggtgggtcgcttcacagatcgcgacccccactgcctccacggctttcgtcgtgagtggcctcgctggtg

SEQ ID NO: 114174 - DNA, 80 bp, synthetic construct
  source 1..80: mol_type = other DNA
acgttactacagaaaagcaagtgcgcttttaccaaactacgttctacatccttcaatcgtgcccacacctggatatcgcg

SEQ ID NO: 114175 - DNA, 80 bp, synthetic construct
  source 1..80: mol_type = other DNA
cctttgcagtggggttgctgttaagaaaacttacttcaaaggaattgttgatggcaaccatcggagttgtcctcctctct

SEQ ID NO: 114176 - DNA, 80 bp, synthetic construct
  source 1..80: mol_type = other DNA
atactacagagggcttgacgtctcagtgatacctacgcagggagacgtggtagtcgtcgctaccgacgccctcatgactg

SEQ ID NO: 114177 - DNA, 80 bp, synthetic construct
  source 1..80: mol_type = other DNA
ggctatgtcaagttggaaggaagagtgactgacctgggatgtgggcgtggtggctggtgctactacgctgctgcacagag

SEQ ID NO: 114178 - DNA, 80 bp, synthetic construct
  source 1..80: mol_type = other DNA
ggagacaccgggccagagctgtcagagccaaactcattgcccagggagggaaagccgccatatgtggcaagtacctcttt

SEQ ID NO: 114179 - DNA, 80 bp, synthetic construct
  source 1..80: mol_type = other DNA
ggggaacctcgtcctgcttggcccaggggatgctctaggggaccttggatggaggttgcttgcccccattacagcttatg

SEQ ID NO: 114180 - DNA, 80 bp, synthetic construct
  source 1..80: mol_type = other DNA
tgggcccgcggacagctacacctccaaagggtggaggttgttggcacccattactgcctatgcccagcaaacacgaggcc

SEQ ID NO: 114181 - DNA, 80 bp, synthetic construct
  source 1..80: mol_type = other DNA
aggtgcatggtcgacttcccgtataggttgtggatgtatccttgtactgtgaactttaccatacataaggtcaggatgtt

SEQ ID NO: 114182 - DNA, 80 bp, synthetic construct
  source 1..80: mol_type = other DNA
ctctacgggggggggtaccaccggcgagaccagcaaatcaccaccagacgaacctgatgattcggaggcgtgatccgtgt

SEQ ID NO: 114183 - DNA, 80 bp, synthetic construct
  source 1..80: mol_type = other DNA
tcaaggcctgctgcagcaagctacgcagcaggctcagaatgtgcagcctgccgtccaggctacttggcccaagctggagc

SEQ ID NO: 114184 - DNA, 80 bp, synthetic construct
  source 1..80: mol_type = other DNA
cagcacgcggtccgtaaactgacggcagaaccgggccacgatctccgcgaaggagaccgtcgacgaaaaaatgcagatgt

SEQ ID NO: 114185 - DNA, 80 bp, synthetic construct
  source 1..80: mol_type = other DNA
tttgagatcaccaagatactgctagctctgttgggtcccctttacgtgctccagcatagcttgctcgcagtaccatactt

SEQ ID NO: 114186 - DNA, 80 bp, synthetic construct
  source 1..80: mol_type = other DNA
gctggatggcgcgcagctggcgatgcaggctaatgcccgtcccgtccagggcctcccccgtgagcagggcaatggcctcg

SEQ ID NO: 114187 - DNA, 80 bp, synthetic construct
  source 1..80: mol_type = other DNA
tgacacccagcagaaacctgtgctgccagggccgtccgccgttgttgtaacccgccctagccgcgcgtccctgcgccgtg

SEQ ID NO: 114188 - DNA, 80 bp, synthetic construct
  source 1..80: mol_type = other DNA
gtctgtccctggatcaggcaggcaaccttacatcaaatacaatcactgtttctcaaccgctaaaaaaaacaaagtccaat

SEQ ID NO: 114189 - DNA, 80 bp, synthetic construct
  source 1..80: mol_type = other DNA
caattcaacacctataccgaccactatcatggccaaaaatgaggtgttctgtgttgaccctcagaaggggggtcggaaac

SEQ ID NO: 114190 - DNA, 80 bp, synthetic construct
  source 1..80: mol_type = other DNA
gctgcctggtaaccccgccattgcttcattgatggcttttacagctgccgtcaccagcccactaaccactggccaaaccc

SEQ ID NO: 114191 - DNA, 80 bp, synthetic construct
  source 1..80: mol_type = other DNA
ctttaacaccacattcaggaatgggattggaaacaagagctgagacatggatgtcatcggaaggggcttggaagcatgct

SEQ ID NO: 114192 - DNA, 80 bp, synthetic construct
  source 1..80: mol_type = other DNA
tcgcaaggaggcaatcatcgaagttgaccgttcagctgcgaaacacgccaggagagaagggaacataacgggaggccacc

SEQ ID NO: 114193 - DNA, 80 bp, synthetic construct
  source 1..80: mol_type = other DNA
agcccagtcaacatagaagcagaacctccattcggagacagctacatcatcataggagtagagccgggacaactgaagct

SEQ ID NO: 114194 - DNA, 80 bp, synthetic construct
  source 1..80: mol_type = other DNA
gccgatgtcatcccggcccggagacgggtggatcggagaggagcgctgctctccccgaggcccctgtcctccctcaaggg

SEQ ID NO: 114195 - DNA, 80 bp, synthetic construct
  source 1..80: mol_type = other DNA
tttcccgacaccttcagcacccaccactgactcaggttcgggacatcccatcatcagcagcggtcccgacaatcccagcg

SEQ ID NO: 114196 - DNA, 80 bp, synthetic construct
  source 1..80: mol_type = other DNA
ttgaatggaaacgtttaggatttaaaggtgggagggcccttacagaactcgacgcccatcatttgggcctcaatcggaca

SEQ ID NO: 114197 - DNA, 80 bp, synthetic construct
  source 1..80: mol_type = other DNA
acccccccagaccggaatatgacctggagctgataacatcttgttcctcaaatgtatccgtggcaatcggcccacagggc

SEQ ID NO: 114198 - DNA, 80 bp, synthetic construct
  source 1..80: mol_type = other DNA
tactcctgttggcgctgccccaacgggcatacgcattggactcggaggtggccgcgtcgtgtggcggcgccgttcttggc

SEQ ID NO: 114199 - DNA, 80 bp, synthetic construct
  source 1..80: mol_type = other DNA
gaacctccttttggggaaagtaatatagtaattggaactggagacaatgccttgaaaatcaattggtacaagaaaggaag

SEQ ID NO: 114200 - DNA, 80 bp, synthetic construct
  source 1..80: mol_type = other DNA
gtaaagacctgtggggctccaccatgtcaaatcacaccgggtgtctacaaccggagcgcgggacatctgtactgtccaac

SEQ ID NO: 114201 - DNA, 80 bp, synthetic construct
  source 1..80: mol_type = other DNA
cgctctggcagggggccttctcgagtttgaggagacctcaatggtggttccctttgcaatagctggactgatgtacatca

SEQ ID NO: 114202 - DNA, 80 bp, synthetic construct
  source 1..80: mol_type = other DNA
tgtctttattcgctgtcagagagtggaggcgtgagcgtggcaggagggcgggccacgtcggggtcccgccgtctggtgtg

SEQ ID NO: 114203 - DNA, 80 bp, synthetic construct
  source 1..80: mol_type = other DNA
gctattgggcgaagtgccggggcaggatctcctgtcatctcaccttgctcctgccgagaaagtatccatcatggctgatg

SEQ ID NO: 114204 - DNA, 80 bp, synthetic construct
  source 1..80: mol_type = other DNA
atactctccaggcgagctcaacagggtggcagcctgcctcagaaaacttggggcgccaccgttgagagcctggagacatc

SEQ ID NO: 114205 - DNA, 80 bp, synthetic construct
  source 1..80: mol_type = other DNA
gctgttaaaggcagtttggctccaatatctggaacagttcaaagtgctcatcttattataagatttgacgaaaatggagt

SEQ ID NO: 114206 - DNA, 80 bp, synthetic construct
  source 1..80: mol_type = other DNA
ggttgctggcgaacgcgacgacgcggcggttgatctcctgaatctggcgcctctgcgtgaagacgacgggcccggtgagc

SEQ ID NO: 114207 - DNA, 80 bp, synthetic construct
  source 1..80: mol_type = other DNA
ggtactgtatcggcagttcgatgagatggaggaatgttccagtcatattccttacctccctgaggcccaagccatcgctg

SEQ ID NO: 114208 - DNA, 80 bp, synthetic construct
  source 1..80: mol_type = other DNA
ggaacagcagcacaggccaaatgctgagggacaagttgaaagagcaaaatttccaacaaaaggtggtagatggcctggcc

SEQ ID NO: 114209 - DNA, 80 bp, synthetic construct
  source 1..80: mol_type = other DNA
cagtagggaagcctctcctcaattctgatactagcaagatcaagaaccgaattgagaggctgaagaaagaatacagctcc

SEQ ID NO: 114210 - DNA, 80 bp, synthetic construct
  source 1..80: mol_type = other DNA
tcattataaccggaggcaatcccgccgacagcggatatcgtctaataccacagactccccccgtcacacacacggaacac

SEQ ID NO: 114211 - DNA, 80 bp, synthetic construct
  source 1..80: mol_type = other DNA
cgtcccactaaacccaaaaaccagttttcgcaggcgcgcggtcaccgcgatctggctgttgaggacgtaagtgacgtcgt

SEQ ID NO: 114212 - DNA, 80 bp, synthetic construct
  source 1..80: mol_type = other DNA
cccggagagacagagactaacacccggcaagagagagaccgcgggccgccgtctcgagtctaccctaccccggctcatgg

SEQ ID NO: 114213 - DNA, 80 bp, synthetic construct
  source 1..80: mol_type = other DNA
aagtccccgccgcttatgtagcgcaggggtacagtgtcctcgtgctgaatccatctgtagcggccacccaaggtttcggc

SEQ ID NO: 114214 - DNA, 80 bp, synthetic construct
  source 1..80: mol_type = other DNA
tggtacatgtggctgggagcacgctttctggagttcgaagcccttggttttatgaatgaagatcactggtttagtagaga

SEQ ID NO: 114215 - DNA, 80 bp, synthetic construct
  source 1..80: mol_type = other DNA
cgctcccgcgctccctcgagcattgcctccagggagcgcgcgcgctcccgcaaacgggcacgcgcatcggtggcgagctc

SEQ ID NO: 114216 - DNA, 80 bp, synthetic construct
  source 1..80: mol_type = other DNA
cacactccagtcaattcatggctaggcaacatcatcttgtatgcgccaactatctgggtgcgtatggtgctgatgaccca

SEQ ID NO: 114217 - DNA, 80 bp, synthetic construct
  source 1..80: mol_type = other DNA
caataccacctccacggagaaaaaggacggttgtcctgacggactccaccgtgtcttctgttttggcggagctcgctacc

SEQ ID NO: 114218 - DNA, 80 bp, synthetic construct
  source 1..80: mol_type = other DNA
aggggcgtcgcgaaggctctcgacttcgtgcctgtagaaaacatggaaactactatgaggtcccccacgttcacagacaa

SEQ ID NO: 114219 - DNA, 80 bp, synthetic construct
  source 1..80: mol_type = other DNA
tgttgtcggtgttcccccatacccacgcccacatccaccgtagggggcctctgggccgtgttacgtcgccgcccgcgatg

SEQ ID NO: 114220 - DNA, 80 bp, synthetic construct
  source 1..80: mol_type = other DNA
cggctgttcctcaaacataccaagtggggtatctacatgcccctacaggcagtggtaagagcactaaggttcctgcagct

SEQ ID NO: 114221 - DNA, 80 bp, synthetic construct
  source 1..80: mol_type = other DNA
ttgaaatgagccctcttctgcattcgacaactgagctcgcaatactcccatgtacattcaccaccatgccagccttatca

SEQ ID NO: 114222 - DNA, 80 bp, synthetic construct
  source 1..80: mol_type = other DNA
ccaatgtgtccgcggcgctagctgcgctggcggaaaagtcatttccgtcctcgaaccctcaggaagagaatagctcatcc

SEQ ID NO: 114223 - DNA, 80 bp, synthetic construct
  source 1..80: mol_type = other DNA
gggattgggaccgtcctggaccaagctgagacggcaggctgtcgtctcactgtcctcgccacagccacacctcccggatc

SEQ ID NO: 114224 - DNA, 80 bp, synthetic construct
  source 1..80: mol_type = other DNA
ccaaagtgttttacaacaagccacgaagcaagctcaagacatacagcctgttgtccaagcctcgtggcccaaactagaac

SEQ ID NO: 114225 - DNA, 80 bp, synthetic construct
  source 1..80: mol_type = other DNA
gaggttggggctgttagtctggattacccgcgaggaacatccggctcacccattctggattccaatggagacattatagg

SEQ ID NO: 114226 - DNA, 80 bp, synthetic construct
  source 1..80: mol_type = other DNA
tctgcatcaagctttggctggagccatccctgtggaattttcaagcaacactgtcaagttgacgtcgggtcatttgaagt

SEQ ID NO: 114227 - DNA, 80 bp, synthetic construct
  source 1..80: mol_type = other DNA
acaggattcgtggtaagtggcctagctggcgccgcagtgggcagcattggcctcgggagagtcctggttgacatcttagc

SEQ ID NO: 114228 - DNA, 80 bp, synthetic construct
  source 1..80: mol_type = other DNA
aagatctcaattttgagatgtatggagcagtttactcagtttccccgctggatctcccagccataattcaaagactccat

SEQ ID NO: 114229 - DNA, 80 bp, synthetic construct
  source 1..80: mol_type = other DNA
agtgcaggtgattgctgttgaaccggggaagaaccccaaaaatgtacagacagcgccgggtaccttcaagacccctgaag

SEQ ID NO: 114230 - DNA, 80 bp, synthetic construct
  source 1..80: mol_type = other DNA
ggcgtactgacgactagctgcggtaacacccttacatgttacttgaaggcctctgcggcctgtcgagctgcaaagctcca

SEQ ID NO: 114231 - DNA, 80 bp, synthetic construct
  source 1..80: mol_type = other DNA
ccagacaggccataaggtcgctcacagagcggctttacatcgggggtcccctgactaattcaaaagggcagaactgcggt

SEQ ID NO: 114232 - DNA, 80 bp, synthetic construct
  source 1..80: mol_type = other DNA
ggcttttgcttataccaacgatgaagcggcttccattgggtttctcgcgcttgctataatcactatattcaccctcaccc

SEQ ID NO: 114233 - DNA, 80 bp, synthetic construct
  source 1..80: mol_type = other DNA
taaagtgaaaaaaaaataccgccaagcccaacacacaccccgaaactgcgtcagcaggaaaaagtacagtttcacttccg

SEQ ID NO: 114234 - DNA, 80 bp, synthetic construct
  source 1..80: mol_type = other DNA
cgtggggcagtttcttgagctcctcgtaggtgagctcgtcggggtcgctgagcccgtgctgctcgagggcccagtcggcg

SEQ ID NO: 114235 - DNA, 80 bp, synthetic construct
  source 1..80: mol_type = other DNA
tccgggacgttttctggatggccgacatttccccaggcgcttttgcgccttgtgtaaaagcgcggcgtcccgctctccga

SEQ ID NO: 114236 - DNA, 80 bp, synthetic construct
  source 1..80: mol_type = other DNA
ggggttaacgtgcttttttgtgcttactaggtccgatttcagatgcggaaggagagtgtgagttggggtcaaatgaggag

SEQ ID NO: 114237 - DNA, 80 bp, synthetic construct
  source 1..80: mol_type = other DNA
tcccgtagtcccatcccccgatcccaacaactcccccgcgcgccccgagaccagtcgcccgaagacacccgccaccatta

SEQ ID NO: 114238 - DNA, 80 bp, synthetic construct
  source 1..80: mol_type = other DNA
tggatggatgcttggcagcaacagtggccaacgtgtggtgttcactattctcttgctgttggtcgctccggcttacagct

SEQ ID NO: 114239 - DNA, 80 bp, synthetic construct
  source 1..80: mol_type = other DNA
tggccaaagcttgaacagttttggaacaagcatttgtggaactttgtaagcggcatccaatacttagccggcctgtcaac

SEQ ID NO: 114240 - DNA, 80 bp, synthetic construct
  source 1..80: mol_type = other DNA
cctggggtggaggtaggaccactggagggcgtcatgctcggtggtggtgttgtaaataatccagtcgtaacagggttttt

SEQ ID NO: 114241 - DNA, 80 bp, synthetic construct
  source 1..80: mol_type = other DNA
tttcgtgtaggtacaaacattcgtggcattatggtaactcaacggatcggatatcaacagagccggatgctggtgtaatg

SEQ ID NO: 114242 - DNA, 80 bp, synthetic construct
  source 1..80: mol_type = other DNA
actgacccgctgttccttgcatttgggtaacaggaggggggtgttcctaccttaccaatgcaatttgagtcacactaaga

SEQ ID NO: 114243 - DNA, 80 bp, synthetic construct
  source 1..80: mol_type = other DNA
gccgctacctcttcaactgggcggtgaagacaaagctcaaactcactccattgcctgcggcgcgccttctggatctttcc

SEQ ID NO: 114244 - DNA, 80 bp, synthetic construct
  source 1..80: mol_type = other DNA
aggtttaacgcttaatctcatcatctgaatacacgtcaaacccgccgcaactgttgatgttagaattataatagctcccc

SEQ ID NO: 114245 - DNA, 80 bp, synthetic construct
  source 1..80: mol_type = other DNA
gagaagatggtcagccaactaaaaatcatgatatcacaatgaatttctttgacactcctggtggcactattggtcaagct

SEQ ID NO: 114246 - DNA, 80 bp, synthetic construct
  source 1..80: mol_type = other DNA
aacatacacatgcctaatggactagtggctcagctgtacgggccagagagggaaaaggctttcacaatggatggagagta

SEQ ID NO: 114247 - DNA, 80 bp, synthetic construct
  source 1..80: mol_type = other DNA
cgtggtgagtggtttggccggtgccgccatcggtagcatcggcttgggcagggttattgttgacattatcagcggctatg

SEQ ID NO: 114248 - DNA, 80 bp, synthetic construct
  source 1..80: mol_type = other DNA
ttccatgcttaccgatccctcccatatcacagcagagacggctaagcgtaggctggccagggggtcccccccctctctgg

SEQ ID NO: 114249 - DNA, 80 bp, synthetic construct
  source 1..80: mol_type = other DNA
agaaacgctctggacaatctggtgatgctgcacacatcagaacatggcggtagggcctacaggcatgcggtggaggaact

SEQ ID NO: 114250 - DNA, 80 bp, synthetic construct
  source 1..80: mol_type = other DNA
attgtttatgcccaaacagcagagagaccactaaaggttgtggctgaagctggtcataatgtcacacttcctcatttgct

SEQ ID NO: 114251 - DNA, 80 bp, synthetic construct
  source 1..80: mol_type = other DNA
aacatgtctgcaggaacccgcagacatgtaaattgagagaaaaatggtgtctttttgtggtgtttttcctgtcttacaac

SEQ ID NO: 114252 - DNA, 80 bp, synthetic construct
  source 1..80: mol_type = other DNA
caggcggtcggcttccccccgggaaccgcacgggaggaaggtggcccgcatccaacccccgtcgaccaaggcaccgcatc

SEQ ID NO: 114253 - DNA, 80 bp, synthetic construct
  source 1..80: mol_type = other DNA
cgcttggactcgatatcccgggtggagccttcgcatgtcgcggtgaggtaggttaggaacagtgggcgtcggacgtcgac

SEQ ID NO: 114254 - DNA, 80 bp, synthetic construct
  source 1..80: mol_type = other DNA
ccactttcgcgctccctggggcgcttacaagcgcgggcggacctctgcccccgccgccgtgcgcaccaccgtcgacgatg

SEQ ID NO: 114255 - DNA, 80 bp, synthetic construct
  source 1..80: mol_type = other DNA
gaccagatggcaaacccacaaaagagtttgacatagatttggctttcttcgacactcctggcggcaaacttccaggcaat

SEQ ID NO: 114256 - DNA, 80 bp, synthetic construct
  source 1..80: mol_type = other DNA
tggtggaaccagtacgccatatgcagatgcgaggccgctctccaagtgtggatcccccccttacttgcacgcggaggtag

SEQ ID NO: 114257 - DNA, 80 bp, synthetic construct
  source 1..80: mol_type = other DNA
agaccatcaggaatgttcgactccgtcgtcctcgctgaagcatatgacacagggtgcgcgtggtacgagctaagcccttc

SEQ ID NO: 114258 - DNA, 80 bp, synthetic construct
  source 1..80: mol_type = other DNA
gggacggcgtggtgcatacccaatgccgttgcggggcgcgcctggctggccacatcaaaaatgggtccatgaggatcgtt

SEQ ID NO: 114259 - DNA, 80 bp, synthetic construct
  source 1..80: mol_type = other DNA
ccccctaggtggcgttgccagggccctggcgcatggcgtccgggttctggaggacggcgtgaactacgcaacagggaatc

SEQ ID NO: 114260 - DNA, 80 bp, synthetic construct
  source 1..80: mol_type = other DNA
tagcgcaagctctggccgagcttgcacagaagagcttccccaccgacctggacaattcacccagaaacccagactctggt

SEQ ID NO: 114261 - DNA, 80 bp, synthetic construct
  source 1..80: mol_type = other DNA
cttcttctctgggtggacgacggtggggacgacgacgccccgtgtgccgcaagtccagatctccgccacggagtggcgca

SEQ ID NO: 114262 - DNA, 80 bp, synthetic construct
  source 1..80: mol_type = other DNA
tttccctacatgggtactctccaactgaactcaacagggtgggagcgagcctcaggaagcttggggcgccacccttaaga

SEQ ID NO: 114263 - DNA, 80 bp, synthetic construct
  source 1..80: mol_type = other DNA
gacccccgcggtgcagcagcgcccccgcgagaaggccggcaccagcacgtaatagtagattttgtggtggacggtccagt

SEQ ID NO: 114264 - DNA, 80 bp, synthetic construct
  source 1..80: mol_type = other DNA
cttgttgacagtgctgcagccagaagctggcaagcagaggagtagcgacgacaacaagctggcttatttcctcctgacac

SEQ ID NO: 114265 - DNA, 80 bp, synthetic construct
  source 1..80: mol_type = other DNA
cgtttgcgcactctggtattagcacccaccagggttgttttgtcagagatgaaagaagcttttcaggggttggatgtgaa

SEQ ID NO: 114266 - DNA, 80 bp, synthetic construct
  source 1..80: mol_type = other DNA
gaccctcaatcagaaccaccactgacagcgggaaattaatcactgattggtgctgtaggagctgtactttgcccccgctg

SEQ ID NO: 114267 - DNA, 80 bp, synthetic construct
  source 1..80: mol_type = other DNA
ctagcatgctgcgcgtgccgtattatgtgcgtgcccacgcactaatacgggccttactcctcgtgcgcaaggccgctggc

SEQ ID NO: 114268 - DNA, 80 bp, synthetic construct
  source 1..80: mol_type = other DNA
tgcgcctagcctccatggccatatgttcagcagttccaacagaatggtttccaacaagcagaacaacatggtcaatccac

SEQ ID NO: 114269 - DNA, 80 bp, synthetic construct
  source 1..80: mol_type = other DNA
gctgtctcagcagttgcaagatctgtctgccaaaatggctctgcttaaccctcccgctaatacttcttaataaagacaca

SEQ ID NO: 114270 - DNA, 80 bp, synthetic construct
  source 1..80: mol_type = other DNA
cttggcccctgaggcccgacgggtcgtatcgtctctcaccgagaggctttacatcgggggccctctgacaaattccaaag

SEQ ID NO: 114271 - DNA, 80 bp, synthetic construct
  source 1..80: mol_type = other DNA
ggggcgtgctgggggcgctgctatactactccatggtggccaactgggccaaagtccttgccgtccttctcctgtttgca

SEQ ID NO: 114272 - DNA, 80 bp, synthetic construct
  source 1..80: mol_type = other DNA
gaaatgctccgcccgccgcccgaacagcgccagttccacggccaccgcggcggtctcctgctgcaactcgcgccgcgcca

SEQ ID NO: 114273 - DNA, 80 bp, synthetic construct
  source 1..80: mol_type = other DNA
gggtcgccgccggtactacctgaccagagaccccaccactccaatctcccgagccgcttgggaaacagtgagacactccc

SEQ ID NO: 114274 - DNA, 80 bp, synthetic construct
  source 1..80: mol_type = other DNA
gcgcgcgatttggcacgcgtccggcgggacctgcgcacgcgcggcacggcggcggagaaagcggcggcagagccggaaaa

SEQ ID NO: 114275 - DNA, 80 bp, synthetic construct
  source 1..80: mol_type = other DNA
atgtagcaatgtctggcagggcacgttcccaatcaatgcaacaacaactgggccaagcgtcccaatcccggcgcccaatt

SEQ ID NO: 114276 - DNA, 80 bp, synthetic construct
  source 1..80: mol_type = other DNA
agtggctaaggcggtggattttatccccgtagagaacctagagacaaccatgaggtccccggtgttcacagacaactcct

SEQ ID NO: 114277 - DNA, 80 bp, synthetic construct
  source 1..80: mol_type = other DNA
ggatcgctcgggcactcctcgccgggggcgatctccgggaccaccatgttctgcagcgtggcgtacacgcggtcgaagcg

SEQ ID NO: 114278 - DNA, 80 bp, synthetic construct
  source 1..80: mol_type = other DNA
gtgcttaagaggatcgcggcgctcttctgcgtgcccgtggccaccaagaccaaaccccgagccgcctccgaatgagagtg

SEQ ID NO: 114279 - DNA, 80 bp, synthetic construct
  source 1..80: mol_type = other DNA
actctacgtggtcggccccatgcacaacaacacggaggaccgttgtgggtacccgacataccgtgcccggggtgtcgaca

SEQ ID NO: 114280 - DNA, 80 bp, synthetic construct
  source 1..80: mol_type = other DNA
agctctctttgaaccagagagggagaagtcagccgccatagatggtgaatatcgcctgaaaggtgaatccaggaagactt

SEQ ID NO: 114281 - DNA, 80 bp, synthetic construct
  source 1..80: mol_type = other DNA
ccgcctcttcgggggcgtcgtcgtccgggagatcgagcaggccctcgatggtagacccgtaattgtttttcgtacgcgcg

SEQ ID NO: 114282 - DNA, 80 bp, synthetic construct
  source 1..80: mol_type = other DNA
cttggggcccacccacccgacgcgtcatatgcaaatgaaaatcggtcccccgaggccacgtgtagcctggatcccaacga

SEQ ID NO: 114283 - DNA, 80 bp, synthetic construct
  source 1..80: mol_type = other DNA
tgtgagtgctatgatgctggatgtgcctggtatgacctcactcccgcggaaaccaccgtaaggctgcgtgcgtatttgaa

SEQ ID NO: 114284 - DNA, 80 bp, synthetic construct
  source 1..80: mol_type = other DNA
aggggtccgcgtcggcggcgctcgccgcgagaacgtcccccgcggtagccacaaacggaagctcctcggtggcctcgctg

SEQ ID NO: 114285 - DNA, 80 bp, synthetic construct
  source 1..80: mol_type = other DNA
ctcgttgcgggtgcccgcgtggccgcaggcccacctcgcacacctcgaccaggtccccgaacgcgccctccttcttgatc

SEQ ID NO: 114286 - DNA, 80 bp, synthetic construct
  source 1..80: mol_type = other DNA
tagttctttcccccaccaccaaataatcagacgacaaccgcaggttttgtaatgtatgtgctcgtgtttattgtggatac

SEQ ID NO: 114287 - DNA, 80 bp, synthetic construct
  source 1..80: mol_type = other DNA
acatgcagtaatgtatggcgtggtagcttcccgataaacgcgaccacaaccggccctagcgtgcccatccctgagcccag

SEQ ID NO: 114288 - DNA, 80 bp, synthetic construct
  source 1..80: mol_type = other DNA
ggccgcacaggcactggctgatctcgcccgtaagtcttttccatctgacacaagtgtttcacaggaagagtcgggggtag

SEQ ID NO: 114289 - DNA, 80 bp, synthetic construct
  source 1..80: mol_type = other DNA
tttgttaagtgactcaaatcttgatgggacatattggaactatagaagcaacaataacaacataggcactccttataaag

SEQ ID NO: 114290 - DNA, 80 bp, synthetic construct
  source 1..80: mol_type = other DNA
gcacgcatgcagacgcaatttattttgctcccccgcgtcctcccctcccccgcgtcctcccctcccccgcgtcctcgcct

SEQ ID NO: 114291 - DNA, 80 bp, synthetic construct
  source 1..80: mol_type = other DNA
cctcgaaaagctcgagcagttttggtgcaagcacatgtggaacttcatcagtggcatccaataccttgccgggttatcca

SEQ ID NO: 114292 - DNA, 80 bp, synthetic construct
  source 1..80: mol_type = other DNA
catatgcttttgatggcgagacagcagggtccctaggctgtggtgccttgcttgtgataaccatcttgacattgtccccc

SEQ ID NO: 114293 - DNA, 80 bp, synthetic construct
  source 1..80: mol_type = other DNA
ctagcgtcgtatgctgctctatgtcgtatacatggacgggggctcttattaccccgtgtgctgcggaggaagaaaagttg

SEQ ID NO: 114294 - DNA, 80 bp, synthetic construct
  source 1..80: mol_type = other DNA
gaaacacccaatggtgctgatcctcaatatgatgtggacatggccttcttcgattcaaccactataaacattccagatgt

SEQ ID NO: 114295 - DNA, 80 bp, synthetic construct
  source 1..80: mol_type = other DNA
tctcttgtcttgcatgtctgtaccagtatccgctgtggaggtcaagaacaccagtcagatctacatggccaccaatgatt

SEQ ID NO: 114296 - DNA, 80 bp, synthetic construct
  source 1..80: mol_type = other DNA
aatctccccgtcgtatctctgttaaaagagcttattaaagaaggggaagatttaaacacagacacggctctcgtatcgtg

SEQ ID NO: 114297 - DNA, 80 bp, synthetic construct
  source 1..80: mol_type = other DNA
acgtattcaatcactccgcttgatctcccagtgatcattcaaagactccacggcatggccgcattctcactccatgggta

SEQ ID NO: 114298 - DNA, 80 bp, synthetic construct
  source 1..80: mol_type = other DNA
ccttctcgtgttggcgttgccccagagggcatacgcacaggaccacgagcaggccgcttgcattggaatctcagtcatct

SEQ ID NO: 114299 - DNA, 80 bp, synthetic construct
  source 1..80: mol_type = other DNA
aatacccaacaaccttaccagtggactgacttacaccaccagaaagactaagctagtgctctacaatccttttgtagagg

SEQ ID NO: 114300 - DNA, 80 bp, synthetic construct
  source 1..80: mol_type = other DNA
aggtcaaaccgctttttttctaaccaagctctttacccaaggtccacaacagcgaatccacctgatcaacaccaatggca

SEQ ID NO: 114301 - DNA, 80 bp, synthetic construct
  source 1..80: mol_type = other DNA
gtatatggctcctacggagggcagaaacagcattcgttactcggagctggctccgcagtacgacaccactcgcgtgtact

SEQ ID NO: 114302 - DNA, 80 bp, synthetic construct
  source 1..80: mol_type = other DNA
caggtcggaacttatggcttaaacactttcaccaacatggaagcccagctgataagacagatggagtctgagggaatttt

SEQ ID NO: 114303 - DNA, 80 bp, synthetic construct
  source 1..80: mol_type = other DNA
tggcccgatgggcgccgacggaggcgctgtccgagccgcggccggcgtggaggctgcgttagacgcccgcccgtcgacgg

SEQ ID NO: 114304 - DNA, 80 bp, synthetic construct
  source 1..80: mol_type = other DNA
ctgggccaaggtcgctatcatcatgattatgttttcgggggtcgatgccgacacacacaccattggtggtgtcgtagctc

SEQ ID NO: 114305 - DNA, 80 bp, synthetic construct
  source 1..80: mol_type = other DNA
aggggtgcggtggtccgacagaaacgctcctggctgtccaccgcggcccgcagatactcgttgttcaggctgtcggtggc

SEQ ID NO: 114306 - DNA, 80 bp, synthetic construct
  source 1..80: mol_type = other DNA
gagcgaatgggaagaccctgggtgaggtctggaaaagggagctgaacctgctggacaaacagcagtttgagctgtataaa

SEQ ID NO: 114307 - DNA, 80 bp, synthetic construct
  source 1..80: mol_type = other DNA
tgggattccttttgtgtcctgccaacgcgggtataagggagtctggcaaggagatggcatcatgcacactcgctgccact

SEQ ID NO: 114308 - DNA, 80 bp, synthetic construct
  source 1..80: mol_type = other DNA
tggacttggtggagtcccagatctgctgcggttgcgttgcacggcggcatgggatgttgtctacacactgctcaatgaga

SEQ ID NO: 114309 - DNA, 80 bp, synthetic construct
  source 1..80: mol_type = other DNA
aacaagaaggatcaagaacaaggcgttcagtgctgatcccgtcccacgctcagggagatctcacaggaaggggacacaaa

SEQ ID NO: 114310 - DNA, 80 bp, synthetic construct
  source 1..80: mol_type = other DNA
cagcaaccgcctgcacacgctgtttaccattgacgccggcacgccatgctcgccgtccgttccctgcagcacctctcaac

SEQ ID NO: 114311 - DNA, 80 bp, synthetic construct
  source 1..80: mol_type = other DNA
attctggggtggtgggtggctgcccagctcgcagcccccggtgccgctaccgcctttgtgggcgctggcttagctggcgc

SEQ ID NO: 114312 - DNA, 80 bp, synthetic construct
  source 1..80: mol_type = other DNA
aggaggtccgaggtcttgccagcaaagccgtcaaccacatcaactccgtgtgggaggacttgctggaagacaattctaca

SEQ ID NO: 114313 - DNA, 80 bp, synthetic construct
  source 1..80: mol_type = other DNA
acattttcatcggaggtcattggggcgtgatcgctggcctgctgtactattctatggttgccaactgggccaaagtcatc

SEQ ID NO: 114314 - DNA, 80 bp, synthetic construct
  source 1..80: mol_type = other DNA
tgcctcaattggcgcagcggtgatcgtaggtattaccatcttcacactcacaccgcactataggtggttgcttgtgcagt

SEQ ID NO: 114315 - DNA, 80 bp, synthetic construct
  source 1..80: mol_type = other DNA
tgcgtcccagtttaaacgccaccgccgaggaaaatcccgcgtcagaaacgcgatgtttattacgagtgcttgcggggaga

SEQ ID NO: 114316 - DNA, 80 bp, synthetic construct
  source 1..80: mol_type = other DNA
cacccagcttcgtgtacacatcggtcctcatgtccacccccctcttctcggccgggccggaatctcgctacctggtgtgg

SEQ ID NO: 114317 - DNA, 80 bp, synthetic construct
  source 1..80: mol_type = other DNA
cagggctgaaggaagggacgcggcaacgcaggtgcgtgtggagagcggcacctgtgtgatcctggccacagacatggggt

SEQ ID NO: 114318 - DNA, 80 bp, synthetic construct
  source 1..80: mol_type = other DNA
gaggtttttctggtggtcggtcctggctagcgcggcccggagatcggcgtgggtcgccgcggcgacgtcggacgtacaca

SEQ ID NO: 114319 - DNA, 80 bp, synthetic construct
  source 1..80: mol_type = other DNA
acgtgtcccaagtcctggccgacttggcgcatgccaggttcaaggccgacacgcaatccattgaaggccaggattctgcg

SEQ ID NO: 114320 - DNA, 80 bp, synthetic construct
  source 1..80: mol_type = other DNA
cgtcaccacaatatggtgtacgccacgacttcccgttccgccgtgacccggcaaaagaaggtgaccttcgaccgcatgca

SEQ ID NO: 114321 - DNA, 80 bp, synthetic construct
  source 1..80: mol_type = other DNA
catcccgggttaatgtaaataaacttggtattgcccaacactttcccgcgtgtcgcgtgtggttcatgtgtgtgcctggc

SEQ ID NO: 114322 - DNA, 80 bp, synthetic construct
  source 1..80: mol_type = other DNA
gaatgacagccggttctgggaactggttgacaaagaaagggctctgcaccaggaaggaaaatgtgaatcgtgcgtctaca

SEQ ID NO: 114323 - DNA, 80 bp, synthetic construct
  source 1..80: mol_type = other DNA
tataaatgaagaaatttcaacattaccaggtttggcaggacaccttgtagttttaactggagttggaattggcactgaga

SEQ ID NO: 114324 - DNA, 80 bp, synthetic construct
  source 1..80: mol_type = other DNA
catcagtgctctgtgagtgctatgacaccgggtgtgcttggtacgaactgacaccggcagaaacaactgttaggctgaga

SEQ ID NO: 114325 - DNA, 80 bp, synthetic construct
  source 1..80: mol_type = other DNA
gcaggcaggaaaacgatctttgcggccccagcccactgagctgaagtactcatggaaaacatggggaaaggcgaaaatgc

SEQ ID NO: 114326 - DNA, 80 bp, synthetic construct
  source 1..80: mol_type = other DNA
tccacgagcgatttatggacgccatcacgcccgccgggaccgtcatcacgcttctgggtctgacccccgaaggccatcgc

SEQ ID NO: 114327 - DNA, 80 bp, synthetic construct
  source 1..80: mol_type = other DNA
ccggcgcggattggcctgaactgccagctggcgcaggtagcagagcgggtaaactggctcggattagggccgcaagaaaa

SEQ ID NO: 114328 - DNA, 80 bp, synthetic construct
  source 1..80: mol_type = other DNA
gtggtcccggcgcgcgcaaaccccacgcacgagaaggtgctggcgatcgtaaacgcgctggccgaaaacagggccatccg

SEQ ID NO: 114329 - DNA, 80 bp, synthetic construct
  source 1..80: mol_type = other DNA
cacctcatattctgccactcgaagaagaaatgcgacgagctggccgggaaactgacgtcactcggcttaaacgctgtcgc

SEQ ID NO: 114330 - DNA, 80 bp, synthetic construct
  source 1..80: mol_type = other DNA
cacagaaaaaattcctgtgcgatcgcaccatgtggcgcattccgttttccagcaacttcatgtctatgggggcactgacc

SEQ ID NO: 114331 - DNA, 80 bp, synthetic construct
  source 1..80: mol_type = other DNA
gtcaatcttctgcctgccatcttatcccctggagcgttggttgttggcgtgatatgtgctgcagtgttgcgccggcatgt

SEQ ID NO: 114332 - DNA, 80 bp, synthetic construct
  source 1..80: mol_type = other DNA
ttttgaactctctctccgttgcgtggatgattctcagagctataagcttcaccaacacttcaaatgtggtggtgccgctg

SEQ ID NO: 114333 - DNA, 80 bp, synthetic construct
  source 1..80: mol_type = other DNA
ttcttggatcaacccgctctatgcctggagatttgggcgtgcccccgcgagactgctagccgagtagtgttgggtcgcga

SEQ ID NO: 114334 - DNA, 80 bp, synthetic construct
  source 1..80: mol_type = other DNA
cgaaacagcagaatgtcccaacacaaatagagcttggaactcactagaggttgaagactatggctttggagtattcacca

SEQ ID NO: 114335 - DNA, 80 bp, synthetic construct
  source 1..80: mol_type = other DNA
ctaataacagacaaaagccatctcaaaggccatcaagaagacggccgacaaacactcctgagacaaaacaacttacagtg

SEQ ID NO: 114336 - DNA, 80 bp, synthetic construct
  source 1..80: mol_type = other DNA
ttccaattccatttgattcttcctcatttaccttctcctatattgcccaagaaaacaaagacacgaacaaataaaatgtt

SEQ ID NO: 114337 - DNA, 80 bp, synthetic construct
  source 1..80: mol_type = other DNA
attcgtacgggaggtggttcacggcaagtttatccagatggctatgcttaagctgggcgccctaaccggcacgtatgtgt

SEQ ID NO: 114338 - DNA, 80 bp, synthetic construct
  source 1..80: mol_type = other DNA
ctgctctgtggctcgggtcccccggcccccctaacccccatccggtccgcgtcatccgccccctccgcctgcgacacaaa

SEQ ID NO: 114339 - DNA, 80 bp, synthetic construct
  source 1..80: mol_type = other DNA
acaggaagtagccggaggctagatgttaagttggacgacgacggcgactttcacttgattgatgatcccggtgttccatg

SEQ ID NO: 114340 - DNA, 80 bp, synthetic construct
  source 1..80: mol_type = other DNA
tccaccagcgccagcgtaaacagggcccgcgtgagggaggtcagggcggcgtcgtcgatgcgctgtaggtgcgccgagaa

SEQ ID NO: 114341 - DNA, 80 bp, synthetic construct
  source 1..80: mol_type = other DNA
atgggcaacaccatcacgtgctacttgaaagcaagtgccgcctgccgggcagctggcctggtcgattatgacatgctggt

SEQ ID NO: 114342 - DNA, 80 bp, synthetic construct
  source 1..80: mol_type = other DNA
tttactgaggtggatggggtgagactccaccgttacgcccctccatgcaagcccctgttgagggatgaaatcactttcat

SEQ ID NO: 114343 - DNA, 80 bp, synthetic construct
  source 1..80: mol_type = other DNA
caacaactccagctcatcaataccaacggtagctggcacattaacaggacggcactcaattgcaatgactccctccagac

SEQ ID NO: 114344 - DNA, 80 bp, synthetic construct
  source 1..80: mol_type = other DNA
agtagatgcaaacacccacatcatcggaggagtaactggcggtacaacccaaggtttaaccagtctcttcactctcgggg

SEQ ID NO: 114345 - DNA, 80 bp, synthetic construct
  source 1..80: mol_type = other DNA
cagcaaactcgcggcctgcttgggacgatcgtcaccagtctcacgggtcgcgataagaacgaggccgagggcgaagtgca

SEQ ID NO: 114346 - DNA, 80 bp, synthetic construct
  source 1..80: mol_type = other DNA
gggtcatactcctatataacaggactgactactgacagtttgaaagttccctgtcaattaccttctccagagtttttttc

SEQ ID NO: 114347 - DNA, 80 bp, synthetic construct
  source 1..80: mol_type = other DNA
acctggcttaagactaagcttgtgccggcattgcccggagtcccctttctatcatgccagcagggattcaagggcctttg

SEQ ID NO: 114348 - DNA, 80 bp, synthetic construct
  source 1..80: mol_type = other DNA
tggaatgccatagatgccatgaaccaccccacttttccagcgcccgctattattcccctacagcaggttgttgccggtgg

SEQ ID NO: 114349 - DNA, 80 bp, synthetic construct
  source 1..80: mol_type = other DNA
agggggggcgcaaacccgctcgtctcattgtctatcctgatctggtggtgcgggtctgtgagaaacgcgccctgtatgac

SEQ ID NO: 114350 - DNA, 80 bp, synthetic construct
  source 1..80: mol_type = other DNA
ttttagcctggaccccaccttctcaattgagaccaccactgtcccacaggacgcagttgccaggagtcaacggcgtgggc

SEQ ID NO: 114351 - DNA, 80 bp, synthetic construct
  source 1..80: mol_type = other DNA
gggcatggagtgggtcagggccgaggcgtacatgccgcagatgtcgtacacgtacaggggctccctcaacaccccgatgt

SEQ ID NO: 114352 - DNA, 80 bp, synthetic construct
  source 1..80: mol_type = other DNA
tgatagcatttgcttcccgaggcaaccatgtctccccgacgcactatgtgcacgaggacgacgctgcgaagcgcgtcaca

SEQ ID NO: 114353 - DNA, 80 bp, synthetic construct
  source 1..80: mol_type = other DNA
caggtgctgcagtcgggagtgttggtctggggaaaatcctagtggacattcttgctggatacggcgccggcgtggccggt

SEQ ID NO: 114354 - DNA, 80 bp, synthetic construct
  source 1..80: mol_type = other DNA
caggcctcggcataatataaaacgcctgatgatcagaggccgaggtatccagctcaacgacgagtcggtgagctctccgc

SEQ ID NO: 114355 - DNA, 80 bp, synthetic construct
  source 1..80: mol_type = other DNA
acccccatccggtggtccgtgtggaggtcgttttcagtgcccggtctcgctttgccgggaacgctagccgatccctcgcg

SEQ ID NO: 114356 - DNA, 80 bp, synthetic construct
  source 1..80: mol_type = other DNA
cgtcgaagccctccgccagcgcctccaggatcccgcggcaggcggccaggcactccacggccacgcggcccgcctccgcg

SEQ ID NO: 114357 - DNA, 80 bp, synthetic construct
  source 1..80: mol_type = other DNA
cacccagagccttacgtcccttttcaaccctggaccgattcagaagatccaacttataaacactaatggcagctggcaca

SEQ ID NO: 114358 - DNA, 80 bp, synthetic construct
  source 1..80: mol_type = other DNA
cgtcgggatgctccgagcgcctatctgcctgccgagacatcggggacttccgaatagggtgtggcagcctgcattacgag

SEQ ID NO: 114359 - DNA, 80 bp, synthetic construct
  source 1..80: mol_type = other DNA
tcagtactttattgctcgagttgaggcccttttgcacacgtgggtccccccccttcgggttcgaggtggacgtgatgcgg

SEQ ID NO: 114360 - DNA, 80 bp, synthetic construct
  source 1..80: mol_type = other DNA
cctctctcaaacaaagcaagcgggggaaaattttccgtacctagtggcttatcaggccacggtatgtgccagggcaaaag

SEQ ID NO: 114361 - DNA, 80 bp, synthetic construct
  source 1..80: mol_type = other DNA
aggaaagaagccatagtcgaggtggaccgcacagaggcacgcagggctagacgagagaacaacaaagtgggaggccatcc

SEQ ID NO: 114362 - DNA, 80 bp, synthetic construct
  source 1..80: mol_type = other DNA
agcgcgcccggtggcgacccaccggcactgcccccacctccaggacccgcaggtcctcggcttcttcggccgcgtccccg

SEQ ID NO: 114363 - DNA, 80 bp, synthetic construct
  source 1..80: mol_type = other DNA
ttgtccctgatcgcgagatcttataccagcagtttgacgagatggaggagtgctctaggcacatcccctacctcgctgag

SEQ ID NO: 114364 - DNA, 80 bp, synthetic construct
  source 1..80: mol_type = other DNA
ggttggcgttggatgagtgcgtgcgcaaacagcgcccccacgcgggcacgcgtagcttgaagcgcgcgcccgcaaactcc

SEQ ID NO: 114365 - DNA, 80 bp, synthetic construct
  source 1..80: mol_type = other DNA
acccaaggctctcccaccaattccccctcctcggaggaagaggaaacaggtggagctatccgaatctacagtatcccaag

SEQ ID NO: 114366 - DNA, 80 bp, synthetic construct
  source 1..80: mol_type = other DNA
gtgcgcttcctcccccaagccagcccccggtaccaccaccccggaggaagaagacaatcacacttacagagtctactgtt

SEQ ID NO: 114367 - DNA, 80 bp, synthetic construct
  source 1..80: mol_type = other DNA
ccagtttattcagcagcacctccttgccctcctcccagctctggtattgcagcttcctcctggctgcaaactttctccac

SEQ ID NO: 114368 - DNA, 80 bp, synthetic construct
  source 1..80: mol_type = other DNA
cctgccactgtcacgtgaaggcactgtcgctattggcagcagaacaggcgcatgtggacgagcatactttccaggagatt

SEQ ID NO: 114369 - DNA, 80 bp, synthetic construct
  source 1..80: mol_type = other DNA
tgcaggcagacggcggccatgaccccgccgagcagctgccggagcgcggggcaggcgtcgcacgcgtccggcaccaggcg

SEQ ID NO: 114370 - DNA, 80 bp, synthetic construct
  source 1..80: mol_type = other DNA
cacaagtctctctgactatgatccccacagcctttagcatcagtctcctggtgcgtcgggcacagcaccgcatcctgatc

SEQ ID NO: 114371 - DNA, 80 bp, synthetic construct
  source 1..80: mol_type = other DNA
ggtggaaccagtacttgctggcacgggctgaggccgtgctccaggtgtgggtccctagtttgacggctcggtgaggccgt

SEQ ID NO: 114372 - DNA, 80 bp, synthetic construct
  source 1..80: mol_type = other DNA
tggccactgctcctgcttctcctggcgttgccccaacgggcatacgccttggatcaggagttggccgcgtcgtgtggggc

SEQ ID NO: 114373 - DNA, 80 bp, synthetic construct
  source 1..80: mol_type = other DNA
gttcttcaagtttacagcattagccccgaccaaggcgctttcaggccgatggaaagcagtggaaaagagtgtggcaatga

SEQ ID NO: 114374 - DNA, 80 bp, synthetic construct
  source 1..80: mol_type = other DNA
ataataccacacacgctcgcaggacccaaaagtaagcacaatagaagagaggggtataaaacacagaaccaaggaccatg

SEQ ID NO: 114375 - DNA, 80 bp, synthetic construct
  source 1..80: mol_type = other DNA
ttatcacagcgtgtcccatgcccgaccccgctatttactcctgtgcctactcctactttcggtaggggtaggcatctttt

SEQ ID NO: 114376 - DNA, 80 bp, synthetic construct
  source 1..80: mol_type = other DNA
gagcgggtggcggcctgtaaacccctagacttcttccaccagggatggtgccctattagctatgccaatgttagcggccc

SEQ ID NO: 114377 - DNA, 80 bp, synthetic construct
  source 1..80: mol_type = other DNA
gaaatatgacagacacttatttcagcgaatatcaacaattaaaaatgtataatttaacaataattgaaccaccaactact

SEQ ID NO: 114378 - DNA, 80 bp, synthetic construct
  source 1..80: mol_type = other DNA
gcgcccacggttgccgggggagagcgactacctgaacgaccccttgctgcggccggctaggaagaaaaatttccccaaca

SEQ ID NO: 114379 - DNA, 80 bp, synthetic construct
  source 1..80: mol_type = other DNA
ccagaagtgtccgcgctaagctactgtcccaaggggtgagggctgctacgtgtggcaagtacctcttcaactgggcagta

SEQ ID NO: 114380 - DNA, 80 bp, synthetic construct
  source 1..80: mol_type = other DNA
ctggactaggggggatccctgtgcacttgaagaccgagacagggccgaaatcagcccactgctgttctcgacaactcagc

SEQ ID NO: 114381 - DNA, 80 bp, synthetic construct
  source 1..80: mol_type = other DNA
acctacgtcactggaggtacccaggcccaggccgcttacggtcttaccactttgttctccccggggcccagccagaacct

SEQ ID NO: 114382 - DNA, 80 bp, synthetic construct
  source 1..80: mol_type = other DNA
tttatttttttttatttaaaatggttctttctccccatcgccgtggctggcgggcaaagctacgttgcgatactgcaaac

SEQ ID NO: 114383 - DNA, 80 bp, synthetic construct
  source 1..80: mol_type = other DNA
gattggctgttgcaagaaccgttagtgacgtcacgacgcacggcgtcaacggtcggcgcggaggcgtggcctaggccgga

SEQ ID NO: 114384 - DNA, 80 bp, synthetic construct
  source 1..80: mol_type = other DNA
tcctaccgactgttttaggaagcaccccgctgccacgtacacccgctgcgggtctggaccctggattacgccaaggtgtt

SEQ ID NO: 114385 - DNA, 80 bp, synthetic construct
  source 1..80: mol_type = other DNA
cacaggccttatacacttacaccagaacattgtggacgtccagtacctctacggagtatccacgaacatcgtgtcgtggg

SEQ ID NO: 114386 - DNA, 80 bp, synthetic construct
  source 1..80: mol_type = other DNA
acgttgtcctcgcattcctggtgcttgcagatgcacgggtgtgtgctgttttttggctcatgatgatggtcgcgcaggca

SEQ ID NO: 114387 - DNA, 80 bp, synthetic construct
  source 1..80: mol_type = other DNA
ggatgatgctactaatagcacaagcggaggcggccatggaaaacctgattatcctcaatactgtctcagctgctggaaca

SEQ ID NO: 114388 - DNA, 80 bp, synthetic construct
  source 1..80: mol_type = other DNA
cctaccaacggaacgtctggacggaccccggttctgccgccggacgatgaagcgggcctgcagccgaagcccctcaccac

SEQ ID NO: 114389 - DNA, 80 bp, synthetic construct
  source 1..80: mol_type = other DNA
gtgccccactgattgcttccggaagcatccagacgcctcatttgtgaagtgcgggtcgggtccctggctcactccccgct

SEQ ID NO: 114390 - DNA, 80 bp, synthetic construct
  source 1..80: mol_type = other DNA
gccaacgtgtccgggtcctcagaagacagaccgtactgctggcactatgcaccacggccctgtggcgtcgtctcagctcg

SEQ ID NO: 114391 - DNA, 80 bp, synthetic construct
  source 1..80: mol_type = other DNA
ggtgaggcaggcccaccgcggagcggccccgtccccggggaccaacccggcgcccccaaagaatatcattagcatgcacg

SEQ ID NO: 114392 - DNA, 80 bp, synthetic construct
  source 1..80: mol_type = other DNA
ggaacagtttcgctaggaatcttctttgtcttgatgcggaacaagggcatcgggaagatgggcttcggaatggtaaccct

SEQ ID NO: 114393 - DNA, 80 bp, synthetic construct
  source 1..80: mol_type = other DNA
ggacgcgggccgggccttttcgccccgggccccgccgtcgggttgcccacgttggtggctctgtggccaatgggaacccg

SEQ ID NO: 114394 - DNA, 80 bp, synthetic construct
  source 1..80: mol_type = other DNA
ctaagctcatcgctcagggaggtaaggccgccatctgcggcatctatctcttcaactgggcggtgaaaacaaagcgcaaa

SEQ ID NO: 114395 - DNA, 80 bp, synthetic construct
  source 1..80: mol_type = other DNA
gcatgagatgtacttctccactgctgttagtggcaacatcgtcaattcagtgaacatccagtccaggaagttgttagcca

SEQ ID NO: 114396 - DNA, 80 bp, synthetic construct
  source 1..80: mol_type = other DNA
atttatccagttggtttacggttggcgtcggcgggaacgacatttatcacagcgtgtcacgtgcccggacccgccatttg

SEQ ID NO: 114397 - DNA, 80 bp, synthetic construct
  source 1..80: mol_type = other DNA
caaccgacgagatggctacaaggtgcaaactcagggaccttgggatgaggaagacatcactcttgattttgactactgtc

SEQ ID NO: 114398 - DNA, 80 bp, synthetic construct
  source 1..80: mol_type = other DNA
aagaaactggatgtgaatactctataacatttgactttagttggtccaaaacctatgaaaatgttgaatttgaaaccacc

SEQ ID NO: 114399 - DNA, 80 bp, synthetic construct
  source 1..80: mol_type = other DNA
cgtccgatcgcagcatcacgaggacgttggcgcacttgatgtccaggtggctgatcccgcacctggtgttcaggaacacc

SEQ ID NO: 114400 - DNA, 80 bp, synthetic construct
  source 1..80: mol_type = other DNA
cacattggctttgcactgctagtagtggtatgtgttttcacgctcactccggcatacaagaccctcctctgccgctgcct

SEQ ID NO: 114401 - DNA, 80 bp, synthetic construct
  source 1..80: mol_type = other DNA
ctccatggttactctccgggtgagctcaatagggttgtggcgtgcctcaggaagcttggggccccacccttgagagcctg

SEQ ID NO: 114402 - DNA, 80 bp, synthetic construct
  source 1..80: mol_type = other DNA
tatcgtggctacacctaccgccccagaagacgagcaactacccgacgccgaaccaccactggaacccgccgccgccgtcg

SEQ ID NO: 114403 - DNA, 80 bp, synthetic construct
  source 1..80: mol_type = other DNA
tggctcaagagcaagctcgtgccatcattgccagggatcccctttctctcgtgccagcgggggttcagaggcgtttggag

SEQ ID NO: 114404 - DNA, 80 bp, synthetic construct
  source 1..80: mol_type = other DNA
gcgggtattaacatcacccgcaccatctacgacggccagcagatccgcgtctttacgtgcctgctgcgcctggccgacca

SEQ ID NO: 114405 - DNA, 80 bp, synthetic construct
  source 1..80: mol_type = other DNA
ttttcatttgttgtgcttggtacatcaaaggacgggttgtcccgggcgccacttacgccatattacatctatggcccctc

SEQ ID NO: 114406 - DNA, 80 bp, synthetic construct
  source 1..80: mol_type = other DNA
gttgtgtgatataggggagtcatcaccaaatcccacagtggaagcaggacgaacactcagagtccttaatttagtagaaa

SEQ ID NO: 114407 - DNA, 80 bp, synthetic construct
  source 1..80: mol_type = other DNA
tctggggatgtagctccatctggggatgtaccatctgggatgtagctccatcgtgggatgtagctccatcgtgggatgta

SEQ ID NO: 114408 - DNA, 80 bp, synthetic construct
  source 1..80: mol_type = other DNA
acaagagaggagttcacaagaaaggttaggtcaaacgcggccataggagcagtgttcgttgatgaaaaccaatggaactc

SEQ ID NO: 114409 - DNA, 80 bp, synthetic construct
  source 1..80: mol_type = other DNA
ctcagtggattgctgaaggcgtaaaaaaagaaaatggggaatctgacgaagaggaagagaaaaatcttaccacttacact

SEQ ID NO: 114410 - DNA, 80 bp, synthetic construct
  source 1..80: mol_type = other DNA
cggcctaatccacctccaccaaaacatcgtggacgtccagtacatctatggcataggatccaccatggtgtcatgggcta

SEQ ID NO: 114411 - DNA, 80 bp, synthetic construct
  source 1..80: mol_type = other DNA
ggagacaatcattacattacaggggttacggctgataacatcaagtgcccctgccaagtccctgctccagagttcttcac

SEQ ID NO: 114412 - DNA, 80 bp, synthetic construct
  source 1..80: mol_type = other DNA
gacacagcctgcctggccaaagcgtatgcacagatgtggctgcttctatacttccatcggagggacctacgcctcatggc

SEQ ID NO: 114413 - DNA, 80 bp, synthetic construct
  source 1..80: mol_type = other DNA
cacagtccattctcttatacacatctgtccctgcctgccaatagagaggtgtagagctgggttgaccccgtatcattaaa

SEQ ID NO: 114414 - DNA, 80 bp, synthetic construct
  source 1..80: mol_type = other DNA
ccgtggagtcgatcgactcgacaaactcactgatgttggtattgacgacagacatgaagccgtgctggtcccgcaggacg

SEQ ID NO: 114415 - DNA, 80 bp, synthetic construct
  source 1..80: mol_type = other DNA
gcgtgattcacagcacgccacgagcccggtctcgccacttactcctgtgcctactcctactcaccgtaggggtaggcatc

SEQ ID NO: 114416 - DNA, 80 bp, synthetic construct
  source 1..80: mol_type = other DNA
tgcaccagaacgtggtcgatgtgcagtacctctacggcattagctcatcgatcgtgtcatgggcgatcgctgcggcttct

SEQ ID NO: 114417 - DNA, 80 bp, synthetic construct
  source 1..80: mol_type = other DNA
aaggaatctccatcttgaaggaaagtgtgagacgtgtgtgtacaacatgatgggaaaaagagaaaagaagctaggggaat

SEQ ID NO: 114418 - DNA, 80 bp, synthetic construct
  source 1..80: mol_type = other DNA
ccccaggcccccaggtcatgacggttcgtgagcacgacgaggtctgcggccgggctggtgggcgcgtcctcggtcgcgtg

SEQ ID NO: 114419 - DNA, 80 bp, synthetic construct
  source 1..80: mol_type = other DNA
gtaggaccctggtcgtcccatgcagggggcaggatgagctcattggccgtgccagaatctcgcctggtgctggatggaac

SEQ ID NO: 114420 - DNA, 80 bp, synthetic construct
  source 1..80: mol_type = other DNA
tggagtgctagaaagtgagatgataattccaaagaatctcgctggaccagtgtctcaacacaactatagaccaggctacc

SEQ ID NO: 114421 - DNA, 80 bp, synthetic construct
  source 1..80: mol_type = other DNA
agaacatcaagaggccactcttgagtgcgagcgagtagagttttctcctccattgctgttggcgcttttgacatagccgt

SEQ ID NO: 114422 - DNA, 80 bp, synthetic construct
  source 1..80: mol_type = other DNA
tactaggtggagcttgctctctccccggcccatctcgtacttgaagggctcttcgggcggtccactcctttgcccgtcgg

SEQ ID NO: 114423 - DNA, 80 bp, synthetic construct
  source 1..80: mol_type = other DNA
gctcttcaggaggccccattatgtgtccctcggggcatgtagcgggtctcttccgcgctgccgtgtgcacgcgggtggtc

SEQ ID NO: 114424 - DNA, 80 bp, synthetic construct
  source 1..80: mol_type = other DNA
gaaaagagggtgataacttggggcgctgatacagcggcctgcggtgatatcataaaaggcctgcctgtctcggccaggtt

SEQ ID NO: 114425 - DNA, 80 bp, synthetic construct
  source 1..80: mol_type = other DNA
taactctcttacattggccaccgccgcaccactgacagtaagcaacaaccagcttagtattaacacgggcagaggcttag

SEQ ID NO: 114426 - DNA, 80 bp, synthetic construct
  source 1..80: mol_type = other DNA
aggagtggggttcttgcctaagatcctagtgggagtggtcctggcctggttgggcctgaacatgaggaatccgaccatgt

SEQ ID NO: 114427 - DNA, 80 bp, synthetic construct
  source 1..80: mol_type = other DNA
caagatatcgggctcctgagacacctgcagcagatttaacagacccaggtcaggttgctctccgcgatcgcgaatctcca

SEQ ID NO: 114428 - DNA, 80 bp, synthetic construct
  source 1..80: mol_type = other DNA
gcttaggtggaggatgtcgccgacgcccctcggccgccccggctgcagggtggcccggagagccgcggcacccggacgcg

SEQ ID NO: 114429 - DNA, 80 bp, synthetic construct
  source 1..80: mol_type = other DNA
ggtgctccaggctggtctaactcggatgccgtactttgtacgcgctcaagggctcattcgtgcatgcatgttagtgcgga

SEQ ID NO: 114430 - DNA, 80 bp, synthetic construct
  source 1..80: mol_type = other DNA
cttacttctggcggcttacgtaatgagtggcagctcagcagatctgtcactagagaaggccgctaatgtgcagtgggatg

SEQ ID NO: 114431 - DNA, 80 bp, synthetic construct
  source 1..80: mol_type = other DNA
ctcagaaggttactccagctgggaggaggtccccttttgttcccaccatttccatgagttgacgatgaaggatggcaggg

SEQ ID NO: 114432 - DNA, 80 bp, synthetic construct
  source 1..80: mol_type = other DNA
tctgggcgttaggatacagcgccttcataaaggcctggatctgcttaaaagccacctgggcctttgcgccttcggaaaaa

SEQ ID NO: 114433 - DNA, 80 bp, synthetic construct
  source 1..80: mol_type = other DNA
gaacagatcttaagatacatggaaggagaacacaaacgattggcggccacaataatgcaaaaagcataccatgctaaggt

SEQ ID NO: 114434 - DNA, 80 bp, synthetic construct
  source 1..80: mol_type = other DNA
gaccaagcagagaccgccggcgctcgtcttgtggtgctggctacggccacccctcctgggagtgttaccgtgccacaccc

SEQ ID NO: 114435 - DNA, 80 bp, synthetic construct
  source 1..80: mol_type = other DNA
caccatgttcctgttcttggttaaaggatgtttgggattgggtctgtacggtattgtctgacttcaagacgtggctgaga

SEQ ID NO: 114436 - DNA, 80 bp, synthetic construct
  source 1..80: mol_type = other DNA
ctgacatacatctttttaaaatttttatttcctctggggtcaggatcatatcccaggggactggaaactcttggagcagg

SEQ ID NO: 114437 - DNA, 80 bp, synthetic construct
  source 1..80: mol_type = other DNA
tactataaaaaacccatgtgtaagcttctttggaccctcagcaaacccaagtacacgcgaggccttaataacggatcacg

SEQ ID NO: 114438 - DNA, 80 bp, synthetic construct
  source 1..80: mol_type = other DNA
aaggaaagcatcgagccaatcacagtcgcaaggtaagctcagaacggtgggctgtgggtttccacgggaggtgatgctgc

SEQ ID NO: 114439 - DNA, 80 bp, synthetic construct
  source 1..80: mol_type = other DNA
atttccaaagggcactgatattcgtgctattgacagctgtggctccatcaatgacaatgcgctgcgtgggcattgccaac

SEQ ID NO: 114440 - DNA, 80 bp, synthetic construct
  source 1..80: mol_type = other DNA
tcacggtgtggacccaaacattaggacaggggtcaggacaataacaacaggagcacccataacatactctacgtacggga

SEQ ID NO: 114441 - DNA, 80 bp, synthetic construct
  source 1..80: mol_type = other DNA
cgagacagcgggggtacgtcttacagtcctggccacggcaacgccgcccgggtccgtgacgactccccactctaacattg

SEQ ID NO: 114442 - DNA, 80 bp, synthetic construct
  source 1..80: mol_type = other DNA
agtggatgaatcgtctcattgctttcgcatcacgaggcaatcacgtttcgcccacgcactacgttccggagtcggacgcc

SEQ ID NO: 114443 - DNA, 80 bp, synthetic construct
  source 1..80: mol_type = other DNA
acctggccggcttgtccaccctacccgggaacccagccatagcgtcgttgatggcatttacagctgctgtcaccagcccg

SEQ ID NO: 114444 - DNA, 80 bp, synthetic construct
  source 1..80: mol_type = other DNA
gccaagagggctataagagcgctcactgagcgcctttattgtggaggccccatgtttaacaccagaggtgagaaatgcgg

SEQ ID NO: 114445 - DNA, 80 bp, synthetic construct
  source 1..80: mol_type = other DNA
ggggctgtgcagtggatgaaccgtcttattgccttcgcctcgcgaggcaatcacgtgtctcctacgcactatgtccctga

SEQ ID NO: 114446 - DNA, 80 bp, synthetic construct
  source 1..80: mol_type = other DNA
agcaggaggcgcagtttgctaggctgttggccgatactcctggagtttttgtggctctggatctaggccatcactctctt

SEQ ID NO: 114447 - DNA, 80 bp, synthetic construct
  source 1..80: mol_type = other DNA
ggtgatggtggctaggaagcacccacagggggtagctgaaacagatttaagtcaggataagcttgaatatgagtggtttg

SEQ ID NO: 114448 - DNA, 80 bp, synthetic construct
  source 1..80: mol_type = other DNA
tgctaacatcacagacacaatggacatcaggccctattgctggcattacgcccctaagccgtgtgatgtcgtgcccgcgc

SEQ ID NO: 114449 - DNA, 80 bp, synthetic construct
  source 1..80: mol_type = other DNA
taagccccttaagcaattctcttatacgccatcacaacttggtgtattcaaccacttctcgcacagcgagtcttcggcaa

SEQ ID NO: 114450 - DNA, 80 bp, synthetic construct
  source 1..80: mol_type = other DNA
tcttgcacttgccattgtcaccgtgttcactctcaccccagcttacaaacaactgctcgtaagtgtaatctggtggctgc

SEQ ID NO: 114451 - DNA, 80 bp, synthetic construct
  source 1..80: mol_type = other DNA
cgagaatttctcaaggagcaggatggagccttaaagaaactgcatgtctagggaaagcctacgctcaaatgtggagtctc

SEQ ID NO: 114452 - DNA, 80 bp, synthetic construct
  source 1..80: mol_type = other DNA
gaaacatcaccagggtggagtcagaaaacaaagtggtcatcttggattcttttgacccgctggtaccggagtgtgacgac

SEQ ID NO: 114453 - DNA, 80 bp, synthetic construct
  source 1..80: mol_type = other DNA
gcggcttcgccgacctcatggggtacatccctgtcgtaggcgctcccttgggaggcgtcgcggcagccctggcgcatggc

SEQ ID NO: 114454 - DNA, 80 bp, synthetic construct
  source 1..80: mol_type = other DNA
tggaaaacccctactcaactcagataccagtaagatcaagagcagaattgagagactgaagaaagaatacagttcaacgt

SEQ ID NO: 114455 - DNA, 80 bp, synthetic construct
  source 1..80: mol_type = other DNA
ggggaacaacaccaaactggtgtgccccaccgattgcttccgcaaacatcccgacgccacctacgcgaggtgcgggtcag

SEQ ID NO: 114456 - DNA, 80 bp, synthetic construct
  source 1..80: mol_type = other DNA
ggctgagccccggggtccccctcttcggagcggcctcccgcgggcccgccgaccggcaagccgggagtcggcggcgcgtg

SEQ ID NO: 114457 - DNA, 80 bp, synthetic construct
  source 1..80: mol_type = other DNA
aatgaggccaaaattactgacatcatggaacccgaacatgccttactggcgaaagcaatcttcaagctaacctaccaaaa

SEQ ID NO: 114458 - DNA, 80 bp, synthetic construct
  source 1..80: mol_type = other DNA
ggtgagaaggggtctgggctcgccagggaggcatacttgcccgggctatacagacccgcgagccgtacgtggttcgcgtg

SEQ ID NO: 114459 - DNA, 80 bp, synthetic construct
  source 1..80: mol_type = other DNA
accaagcaagcaggggagaatttcccatacctggtggcgtaccaggccactgtgtgtgcccgggctcaggctcccccccc

SEQ ID NO: 114460 - DNA, 80 bp, synthetic construct
  source 1..80: mol_type = other DNA
tgaagtcacaaagtacctcctggctcttctgggccccctttgcctgctccaagcatcattgctgcgcgtcccttactatg

SEQ ID NO: 114461 - DNA, 80 bp, synthetic construct
  source 1..80: mol_type = other DNA
ccacctgtatggcagctgatttggaggtagttaccagtacatgggtaatcgctggcggcatcctcgcagctttggcagca

SEQ ID NO: 114462 - DNA, 80 bp, synthetic construct
  source 1..80: mol_type = other DNA
tgccgctgcgcgccagaagaaggttaccttcgacaggctgcaggtgctcgatgaccattacaagaatgcacttaaggagg

SEQ ID NO: 114463 - DNA, 80 bp, synthetic construct
  source 1..80: mol_type = other DNA
gacaactcctccccaccagcagtgccccagagcttccaggtggcccacctgcatgctcccactggcagcggtaagagtac

SEQ ID NO: 114464 - DNA, 80 bp, synthetic construct
  source 1..80: mol_type = other DNA
gcttaagacccgagtaggaacgaaacatgcaacactactagttgcagtttcttttgtgacattgatcacagggaacatgt

SEQ ID NO: 114465 - DNA, 80 bp, synthetic construct
  source 1..80: mol_type = other DNA
ttacaacctgatcatcatggacgaagcccacttcacagacccagcaagtatagcagctagaggatatatttcaactcgag

SEQ ID NO: 114466 - DNA, 80 bp, synthetic construct
  source 1..80: mol_type = other DNA
tacgagctcgtgtccggcggcaagcagcatcgcctcgcctatgagctgccccagcagaagcagaagttcacctgcatggt

SEQ ID NO: 114467 - DNA, 80 bp, synthetic construct
  source 1..80: mol_type = other DNA
tataagtataggtcacgtgacctttggggtcttgcgtgggtgtataaagggcgtgtccgcgttcttcatcactttcttcc

SEQ ID NO: 114468 - DNA, 80 bp, synthetic construct
  source 1..80: mol_type = other DNA
aataataccgacggaggagcagcagcagcagcaggaggaagccaggcggcggcggcggcaggagcagagcccatggaacc

SEQ ID NO: 114469 - DNA, 80 bp, synthetic construct
  source 1..80: mol_type = other DNA
gggccgaaaccacggcctgcggtgacatcctgtgtggcctgcccgtctccgctcggctcggcagggaagtcctgctaggc

SEQ ID NO: 114470 - DNA, 80 bp, synthetic construct
  source 1..80: mol_type = other DNA
tccatttgatcagaaaaaacaatttttttgttatctaattttgtagcaaaggatccgtacagggcgtttgaaagtaactt

SEQ ID NO: 114471 - DNA, 80 bp, synthetic construct
  source 1..80: mol_type = other DNA
gaaacaacagcacattgaaagcgggcccgccatcctgctcctcaatcatcatgttacagtcctgcaccatccccaggtaa

SEQ ID NO: 114472 - DNA, 80 bp, synthetic construct
  source 1..80: mol_type = other DNA
cagggcttcaattaagaaatgcctctttgaaaggtgtaccttgggtatcctgtctgagggtaactccagggtgcgccaca

SEQ ID NO: 114473 - DNA, 80 bp, synthetic construct
  source 1..80: mol_type = other DNA
tgacaacagaagacatgctggaggtctggaaccgtgtttggatagaggagaatgaatggatggaagacaaaaccccagtg

SEQ ID NO: 114474 - DNA, 80 bp, synthetic construct
  source 1..80: mol_type = other DNA
cccggggaccccccacaaccagaatacgacttggagctcataacatcatgctcctccaacgtgtcagtcgcccacgacaa

SEQ ID NO: 114475 - DNA, 80 bp, synthetic construct
  source 1..80: mol_type = other DNA
ttcataggggaggtaatattacattagatggaccattaaaaaataccacatggttaaggtttcatttaaataattggcat

SEQ ID NO: 114476 - DNA, 80 bp, synthetic construct
  source 1..80: mol_type = other DNA
cgaaacaaacccgcgcctcaatttttatcccgtctttgcggtgcctgaagcactggctacttatcacatctttttcaaga

SEQ ID NO: 114477 - DNA, 80 bp, synthetic construct
  source 1..80: mol_type = other DNA
tcccagttgctctggttgatttactctcaggggggcattggggtatcctggctggtgtggcgtatttcagcatgcaggca

SEQ ID NO: 114478 - DNA, 80 bp, synthetic construct
  source 1..80: mol_type = other DNA
ccgaggggacgcccgccaagaacggctgccggaggacagccgaggcgtaaaatagcgcccggtggacgaccggtgtggtc

SEQ ID NO: 114479 - DNA, 80 bp, synthetic construct
  source 1..80: mol_type = other DNA
cgaggttgagagcctattacaacacgccaggcctccccgtctgccaagaccaccttgagttctgggagagtgttttcact

SEQ ID NO: 114480 - DNA, 80 bp, synthetic construct
  source 1..80: mol_type = other DNA
cgcaacttattaaaaagtcaaatccagccattgtacacgaagctgctttgcagtcaatgaagatggcgtctaatgacgcc

SEQ ID NO: 114481 - DNA, 80 bp, synthetic construct
  source 1..80: mol_type = other DNA
atgccgccgtgtcgggccccagtgatgacaagccctattgctggcactaccccccacgcccgtgcggaatagtgccagcg

SEQ ID NO: 114482 - DNA, 80 bp, synthetic construct
  source 1..80: mol_type = other DNA
cagggcgatggcataatgtgcaccacttgcccttgtggtgcgcaaatcaccggccatgtaaagaatggatccatgaagat

SEQ ID NO: 114483 - DNA, 80 bp, synthetic construct
  source 1..80: mol_type = other DNA
tattatcattcagcagcaccactttaccctcttcccaactctcatatgggatatgatggtgggcggcaaacttcctccaa

SEQ ID NO: 114484 - DNA, 80 bp, synthetic construct
  source 1..80: mol_type = other DNA
tcagaccgtgcagacctgcaactgcagcctgtatccgggccagattaccggccatcgtatggcgtgggatatgatgatga

SEQ ID NO: 114485 - DNA, 80 bp, synthetic construct
  source 1..80: mol_type = other DNA
cggccaggaggctcgctcgcgggtcccccccatctctggcaagttcttccgccagtcagttgtctgccccgtctttaaag

SEQ ID NO: 114486 - DNA, 80 bp, synthetic construct
  source 1..80: mol_type = other DNA
ggcatagatcccaacatccgcaccggggtgaggaccattacaaccggcgggccgatcacctactctacttatgggaaatt

SEQ ID NO: 114487 - DNA, 80 bp, synthetic construct
  source 1..80: mol_type = other DNA
ggcacagccgtggtcccacagggcactgccggtgcactcccagtttttgtgcgcgatcccgctgtggctaaagatgtaac

SEQ ID NO: 114488 - DNA, 80 bp, synthetic construct
  source 1..80: mol_type = other DNA
cccagcacacataaccgcagaaacggcgggtcgacgcctcgggaggggctcccctccgtcgctggccagctcctcggcta

SEQ ID NO: 114489 - DNA, 80 bp, synthetic construct
  source 1..80: mol_type = other DNA
ggctgtgcccttcctcctaaggggttaccaccagtaccaccccccaggaggaagagagccgtacagcttgatgaagccaa

SEQ ID NO: 114490 - DNA, 80 bp, synthetic construct
  source 1..80: mol_type = other DNA
accttagcgacgggtcctggtcgaccgtgagctccaccagcggtactgaagatgtcgtctgctgctccatgtcctactca

SEQ ID NO: 114491 - DNA, 80 bp, synthetic construct
  source 1..80: mol_type = other DNA
ctggctgtgggcccacttgtcacgggagaaacgaccccgcttgtgcactaaggaagaattcataaagaaagtcaacagca

SEQ ID NO: 114492 - DNA, 80 bp, synthetic construct
  source 1..80: mol_type = other DNA
ttgcttggccccgccgatagctacacctcgaaggggtggaagctcctagcccccattactgcttatgcccagcagacaag

SEQ ID NO: 114493 - DNA, 80 bp, synthetic construct
  source 1..80: mol_type = other DNA
ggcctctatgtggatagcgccggtcctaaccaaaaactacaggttaatttaaataccacaaaaggccttgcttttgacaa

SEQ ID NO: 114494 - DNA, 80 bp, synthetic construct
  source 1..80: mol_type = other DNA
agaccttagctggcccaaaagggcccgtctgtcagatgtacaccaatgtagaccaggacatggtagggtggcccgctccc

SEQ ID NO: 114495 - DNA, 80 bp, synthetic construct
  source 1..80: mol_type = other DNA
gtctacctatgtgatcgggtctcagatgccttgtgagcctgaaccggacgtcatggtcctcacttccatgctcacagacc

SEQ ID NO: 114496 - DNA, 80 bp, synthetic construct
  source 1..80: mol_type = other DNA
tttactacgaaaatattaagggttgtgatttttttcattaggatgaaaagaacgtttcctagccacacccacaaaggagt

SEQ ID NO: 114497 - DNA, 80 bp, synthetic construct
  source 1..80: mol_type = other DNA
catcatggatgaggcccacttcattgatccagcaagcattgctgctcgtgggtatatctcaacaaaagtggaattgggtg

SEQ ID NO: 114498 - DNA, 80 bp, synthetic construct
  source 1..80: mol_type = other DNA
gggctctcgtcacaccttgcgctgcagaggaagagaaattgccgatcagtccgctgagcaattctctaatccgccaccat

SEQ ID NO: 114499 - DNA, 80 bp, synthetic construct
  source 1..80: mol_type = other DNA
gctgagggtgctagtcagctggtgttggactgtccagaaaacccgggacgaggttgtcgggcttgtgattttcatcggtg

SEQ ID NO: 114500 - DNA, 80 bp, synthetic construct
  source 1..80: mol_type = other DNA
ccgggggctcggccgcccacaccaccaacaggttcacatccctctttacacttggggcttctcagaagatccaacttgta

SEQ ID NO: 114501 - DNA, 80 bp, synthetic construct
  source 1..80: mol_type = other DNA
acaatgcgcgttgttaaacttccgcctccttcccattttattttatacaccaccctttccccctttatagccgaaaacag

SEQ ID NO: 114502 - DNA, 80 bp, synthetic construct
  source 1..80: mol_type = other DNA
aggagcagtacagtggatgaacaggctcatcgcattcgcatctcggggcaaccacgtctctccgacgcactatgttcccg

SEQ ID NO: 114503 - DNA, 80 bp, synthetic construct
  source 1..80: mol_type = other DNA
ggcaacatcatactgtacgcgcccacaatatgggttcgcatggtgttgacgacccacttcttttcaatactccaaagcca

SEQ ID NO: 114504 - DNA, 80 bp, synthetic construct
  source 1..80: mol_type = other DNA
ccgccggccctcgcggagccggccggggacccccgccttgcttgaggcaaaacttttacaacccctacctcgccccagtc

SEQ ID NO: 114505 - DNA, 80 bp, synthetic construct
  source 1..80: mol_type = other DNA
ttcccccatcgttcaccaccacgccccccaccgcgccttggctgtttggggagtggcgacggtggtcggcgtgctgccgg

SEQ ID NO: 114506 - DNA, 80 bp, synthetic construct
  source 1..80: mol_type = other DNA
ggcggggtgacagcaggtggagcctgctctcccccaggcctgtctcctacctgaaaggctcttcgggtggtccactgctc

SEQ ID NO: 114507 - DNA, 80 bp, synthetic construct
  source 1..80: mol_type = other DNA
ggcgcttagcgggtgcgtctcgaaggtgcgctgggcgtgctctagccagataaccgcgggcacgtcgagctcgcgcgttt

SEQ ID NO: 114508 - DNA, 80 bp, synthetic construct
  source 1..80: mol_type = other DNA
tcagtcacagtcccccatccaaacataacggagtcagcgttacctaccacgggtgagatccctttctacgggaaggcggt

SEQ ID NO: 114509 - DNA, 80 bp, synthetic construct
  source 1..80: mol_type = other DNA
cctgctgctgcctcgacgggcgtatgccttcgacggcactgaagcaacatcgattggccttctggttattatagccttga

SEQ ID NO: 114510 - DNA, 80 bp, synthetic construct
  source 1..80: mol_type = other DNA
catcattgtggatgaccaatccgatgatgggtcttactcatcaatgcctccacttgaaggtgagcccggcgacccggact

SEQ ID NO: 114511 - DNA, 80 bp, synthetic construct
  source 1..80: mol_type = other DNA
cgaactgggccaaggtgatagtcgtgctccttctgtttgctggggttgatgccaatacaggagttggttctgttgcgggc

SEQ ID NO: 114512 - DNA, 80 bp, synthetic construct
  source 1..80: mol_type = other DNA
cagtggatgaacaggcttatagcgtttgcgtcgcgaggcaaccatgtttcgccaacgcattatgtgcctgaaacagacgc

SEQ ID NO: 114513 - DNA, 80 bp, synthetic construct
  source 1..80: mol_type = other DNA
gggcggtgaagaccaagctcaaactcactccattgccggaggcgcgccttctggatttatccagttggttcaccgtcggc

SEQ ID NO: 114514 - DNA, 80 bp, synthetic construct
  source 1..80: mol_type = other DNA
tcgtcagaatgtgatgggatcgacggtggacgggcgcccagtgcttccagcaaattcctcgaccatgacctacgcgaccg

SEQ ID NO: 114515 - DNA, 80 bp, synthetic construct
  source 1..80: mol_type = other DNA
gcagcccgggccccccgcgggcgcgcgcgcgcgcaaaaaaggcgtgcggcggtccggtcggcgtgctcgcgctcggcgcg

SEQ ID NO: 114516 - DNA, 80 bp, synthetic construct
  source 1..80: mol_type = other DNA
gatgctgctggtttcacaagtggaggcggcactagccaacctgattaacatcaatgctgcctcagccgtcggttgccatg

SEQ ID NO: 114517 - DNA, 80 bp, synthetic construct
  source 1..80: mol_type = other DNA
cgggtggacttgaggtccggctcctggaggcaaaactgcccccgggcgatcgtggagttggagttgagggtgacgaggct

SEQ ID NO: 114518 - DNA, 80 bp, synthetic construct
  source 1..80: mol_type = other DNA
ggcaacaccgttacctgcttcttaaaagcatcagctgcgtgccgcgcagcgggcttcactgattttgacatgttggtctg

SEQ ID NO: 114519 - DNA, 80 bp, synthetic construct
  source 1..80: mol_type = other DNA
tggactttgtcccggtcgaatctcttgaaacaaccatgagatcaccagtattcactgacaattcaacacccccagcggtg

SEQ ID NO: 114520 - DNA, 80 bp, synthetic construct
  source 1..80: mol_type = other DNA
atccttaaaggaacttatgaatatataagtaacgctatagctaataagagttttactattaagttactgtttaatgacaa

SEQ ID NO: 114521 - DNA, 80 bp, synthetic construct
  source 1..80: mol_type = other DNA
ggcggccccggccgcccttcccgcttccggcaattcccgcggcccttaatgggcaaccccggtattccccgcctcccgcg

SEQ ID NO: 114522 - DNA, 80 bp, synthetic construct
  source 1..80: mol_type = other DNA
acggccacggagggctgcgtggccgtggtgaggtccacgagccaggcctcgacggcctcccggcggtggcccgccttgcc

SEQ ID NO: 114523 - DNA, 80 bp, synthetic construct
  source 1..80: mol_type = other DNA
tagtgtgcccaacgcgtcagggtcgaggcgaggccgtgggtctgctgggccaggacttcgaccggggtctcggatcgggt

SEQ ID NO: 114524 - DNA, 80 bp, synthetic construct
  source 1..80: mol_type = other DNA
atgaaccggctgatagcgttcgcctcgcgggggaaccacgtttcccccacgcactacgtgcctgaggatgacgccgcagc

SEQ ID NO: 114525 - DNA, 80 bp, synthetic construct
  source 1..80: mol_type = other DNA
tacgccgatgataccgcaggctgggacacacgcatcaccaaagctgatctcgagaacgaagcgaaggttcttgaactgct

SEQ ID NO: 114526 - DNA, 80 bp, synthetic construct
  source 1..80: mol_type = other DNA
caccgccaggcgctaggtcactgaccgcatgtacttgcggatccagtgacttatacctggtaacgcggaacgccgacgtc

SEQ ID NO: 114527 - DNA, 80 bp, synthetic construct
  source 1..80: mol_type = other DNA
cgagcgcctcggtatcatccgagtccgagaaacgcagggagtctgcgtcggagtgttcatcatcggaggagatgtgcagc

SEQ ID NO: 114528 - DNA, 80 bp, synthetic construct
  source 1..80: mol_type = other DNA
agttttacgcccgcaagatataccataccccttacgttcccatagacaaggaggtaaagatcgaggggttctacatgcgc

SEQ ID NO: 114529 - DNA, 80 bp, synthetic construct
  source 1..80: mol_type = other DNA
tctctaccggcagttcgacgagatggaggagtgttcgcgtcacatcccttacctcgccgaaggtcaacagatcgcagagc

SEQ ID NO: 114530 - DNA, 80 bp, synthetic construct
  source 1..80: mol_type = other DNA
gcattgaagtgggagtatgtggtcctcgctttcctggttttggccgatgcacgcatctgcgcgtgcttgtggttgatgtt

SEQ ID NO: 114531 - DNA, 80 bp, synthetic construct
  source 1..80: mol_type = other DNA
ctccttgcgacgtcacgtggacttgatggtgggtgctgccactgcttgctccgccctttatgtgggagacctgtgtggag

SEQ ID NO: 114532 - DNA, 80 bp, synthetic construct
  source 1..80: mol_type = other DNA
gattggactgaagagggctatgttgagcctgatcgacggcaaggggccaatacgatttgtgttggctctcttggcgttct

SEQ ID NO: 114533 - DNA, 80 bp, synthetic construct
  source 1..80: mol_type = other DNA
ttttctaacaactctttcgagaaccagtaagaaaaggagctggccgctaaatgaagctatcatggcagtcgggatggtga

SEQ ID NO: 114534 - DNA, 80 bp, synthetic construct
  source 1..80: mol_type = other DNA
gagcgcagtaatgaatcaggtattaattaagcttgccaaaccaattgatgaacaagcaaacttgcaagatactgaaacaa

SEQ ID NO: 114535 - DNA, 80 bp, synthetic construct
  source 1..80: mol_type = other DNA
gtggcttaccaagcaacagtttgcgcgagagcaaaggcgccccctccttgctgggacacgatgtggaaatgtctgattcg

SEQ ID NO: 114536 - DNA, 80 bp, synthetic construct
  source 1..80: mol_type = other DNA
ctccctgagtggagtagagggagaagggctgcacaaactaggctacattctaagagacgtgagtaagaaagaaggaggag

SEQ ID NO: 114537 - DNA, 80 bp, synthetic construct
  source 1..80: mol_type = other DNA
gggatcggcaccgtcctagaccaagcagagacagcgggtgtacgcctcacagttctggcgaccgccacgcctcccgggtc

SEQ ID NO: 114538 - DNA, 80 bp, synthetic construct
  source 1..80: mol_type = other DNA
ctcaactactgaggcagccgcaggcaatggtgataacttgactcctaaagtggtattgtacagtgaagatgtagatatag

SEQ ID NO: 114539 - DNA, 80 bp, synthetic construct
  source 1..80: mol_type = other DNA
ccaggacttcaagcaaaagcaaccagagaagctcagaaaagagcagcagcaggcatcatgaaaaacccaacagtcgatgg

SEQ ID NO: 114540 - DNA, 80 bp, synthetic construct
  source 1..80: mol_type = other DNA
ctctgtgggtctttcaagctatgccatagggtctcagctcccttgtgagccagagcctgacgtgaccgtagtcacctcaa

SEQ ID NO: 114541 - DNA, 80 bp, synthetic construct
  source 1..80: mol_type = other DNA
ggggcgttgctgtcaccaagacccctctcgtccctgaagggatcctcgggagtgcctgttctctgtcctaggtgccacgc

SEQ ID NO: 114542 - DNA, 80 bp, synthetic construct
  source 1..80: mol_type = other DNA
ataatgggagcattactattactgccacaaatattacttccggcagatacaaagctgacagttacaaaaaagaaattaga

SEQ ID NO: 114543 - DNA, 80 bp, synthetic construct
  source 1..80: mol_type = other DNA
gatagtgggcattggcttagcagctttccatttggccatcgtggtgtctggactggaggctgagctgacacagagagccc

SEQ ID NO: 114544 - DNA, 80 bp, synthetic construct
  source 1..80: mol_type = other DNA
tcgcggcggtgagccgccgtccccaaagacgtgcggctcgtacacgtacacgtaccagggcgtcgggcctccgacccggt

SEQ ID NO: 114545 - DNA, 80 bp, synthetic construct
  source 1..80: mol_type = other DNA
ctcggaccatcaagccttgaaggctttcaaggacttcgcttctggtaagcgttcacatgtggaatggatcgaggtgttag

SEQ ID NO: 114546 - DNA, 80 bp, synthetic construct
  source 1..80: mol_type = other DNA
cgccttcctcccgcggtgcctgtttccccggtgccgccctccccgagatcgaccgacagacaaacacagccagacgcgag

SEQ ID NO: 114547 - DNA, 80 bp, synthetic construct
  source 1..80: mol_type = other DNA
atgaacactacggggtttgttaaaacatgcggcgctccgccgtgcaatatcaggcctgaccccgaggagggaagcaacac

SEQ ID NO: 114548 - DNA, 80 bp, synthetic construct
  source 1..80: mol_type = other DNA
tcggtagccggccggcgggtggactcgcgggtggccggagagtggaaggcagtgaggtgtaggatgggtatcaggacttc

SEQ ID NO: 114549 - DNA, 80 bp, synthetic construct
  source 1..80: mol_type = other DNA
gcacagcagaccagaggcctcttaggcaccattgttaccagccttacaggccgcgataagaacgtggtagaaggcgagat

SEQ ID NO: 114550 - DNA, 80 bp, synthetic construct
  source 1..80: mol_type = other DNA
tgtgaccaccatacttagttccctcaccataaccagcctcttacgcagactccacgagtggatcagcggggactggtcag

SEQ ID NO: 114551 - DNA, 80 bp, synthetic construct
  source 1..80: mol_type = other DNA
ccacgcgaggcgcagcgccgccacggcgtacgggtcatagacgccctgcgcgtcacacaccacgggcagggagacgaaca

SEQ ID NO: 114552 - DNA, 80 bp, synthetic construct
  source 1..80: mol_type = other DNA
agcaaagggcaatcctgcggttacaggcgttgccgcgcgagcggtgttttcaccaccagcatggggaataccatgacatg

SEQ ID NO: 114553 - DNA, 80 bp, synthetic construct
  source 1..80: mol_type = other DNA
ccagcaacaccgcttgctgtaatatttgtgcaaacccctttaaagtggaagaccccactaacgcatagggatttgggatt

SEQ ID NO: 114554 - DNA, 80 bp, synthetic construct
  source 1..80: mol_type = other DNA
ctgagaccaccgtacggctaagagcttacttatctacccccggactgcccgtctgccaagatcatctggacttctgggag

SEQ ID NO: 114555 - DNA, 80 bp, synthetic construct
  source 1..80: mol_type = other DNA
caggacgctaggggagcagtggaaggaaaaactaaatgccatgagtagagaagggttttttaaataccggagagaggcca

SEQ ID NO: 114556 - DNA, 80 bp, synthetic construct
  source 1..80: mol_type = other DNA
attccagagcccaactatcggaaggccctgctccgagtatcggcgactgattatgtggaggtgctgcgggtaggagacta

SEQ ID NO: 114557 - DNA, 80 bp, synthetic construct
  source 1..80: mol_type = other DNA
gcacctcccggatcacgttccttgacaccgtgcaattgtggctcgagtgatctttatctagtcacaaggaacgctgacct

SEQ ID NO: 114558 - DNA, 80 bp, synthetic construct
  source 1..80: mol_type = other DNA
gttgcccgtctgccaggaccatctggagttttgggagagcgtcttcacaggcctcacccacatagacgctcatttcctgt

SEQ ID NO: 114559 - DNA, 80 bp, synthetic construct
  source 1..80: mol_type = other DNA
tttatattgcatttgtcctgttcccggattacatgaagatttctgctgtcatttgtgtgctgaatttaatcatctgtagt

SEQ ID NO: 114560 - DNA, 80 bp, synthetic construct
  source 1..80: mol_type = other DNA
tttcggttattggctcactttaaaaacaacaaaaagagggggcgtgttttgggacacgccatccccaaaaccttgctcaa

SEQ ID NO: 114561 - DNA, 80 bp, synthetic construct
  source 1..80: mol_type = other DNA
gagcaccacctgagaggagagtgccagagttgtgtgtacaacatgatgggaaaaagagaaaagaaacaaggggaatttgg

SEQ ID NO: 114562 - DNA, 80 bp, synthetic construct
  source 1..80: mol_type = other DNA
atggatctggagccacaggaaagcttaaccgcccccaccgctcccgccattggcgctacggctgtcatggagaaggacaa

SEQ ID NO: 114563 - DNA, 80 bp, synthetic construct
  source 1..80: mol_type = other DNA
tgaagtcaggagttactgctatcatgcttcagtcactgacatttcaacggtggctcgatgccccacgacaggagaagctc

SEQ ID NO: 114564 - DNA, 80 bp, synthetic construct
  source 1..80: mol_type = other DNA
tatggggcctgattttcatctgctgcgtctggcatgtgcgtgggcgccttgtgcccctttccacctacgcatttttgcag

SEQ ID NO: 114565 - DNA, 80 bp, synthetic construct
  source 1..80: mol_type = other DNA
ttggagctcgctacctggaatttgaggcacttgggttcttgaacgaggaccattggttgagtagggagaattcaggagga

SEQ ID NO: 114566 - DNA, 80 bp, synthetic construct
  source 1..80: mol_type = other DNA
agggagagccaggagatcccgacctcagctcaggctcgtggtcaacggtgagcgaggagggcgacagcgttgtctgctgt

SEQ ID NO: 114567 - DNA, 80 bp, synthetic construct
  source 1..80: mol_type = other DNA
cggtcgaggccctcgagaccacgatgaggtcccctgtattcactgacaattctactcccccagctgtgccccaatcatat

SEQ ID NO: 114568 - DNA, 80 bp, synthetic construct
  source 1..80: mol_type = other DNA
taatgtgtgtggacccgtgtattgttttaccccgagccctgtggttgtggggaccactgacaagagaggccttccaacct

SEQ ID NO: 114569 - DNA, 80 bp, synthetic construct
  source 1..80: mol_type = other DNA
aggacggccgtggcgtaaaacagcgctcggcggaccatcggggcggttagcgcgcggccgccgagaaactcggcgtacag

SEQ ID NO: 114570 - DNA, 80 bp, synthetic construct
  source 1..80: mol_type = other DNA
tgcgggttcgccgatctcatggggtatattccgctcgtcggcgctccggtaggaggcgtcgcgagggccctcgcacacgg

SEQ ID NO: 114571 - DNA, 80 bp, synthetic construct
  source 1..80: mol_type = other DNA
gatccaatcaatccaatcaaccacacctcctaccgtttagcacgtcagctatgtgacatgctccaaacatacgtaaacat

SEQ ID NO: 114572 - DNA, 80 bp, synthetic construct
  source 1..80: mol_type = other DNA
atggccagcacccccaggagtgaaatcccttgcgccatgcacctgtggtgcgtcggatttattcctggttaccaggcacg

SEQ ID NO: 114573 - DNA, 80 bp, synthetic construct
  source 1..80: mol_type = other DNA
ttgttaacttaactcataagggtacttactatggttttggcagtgataacaaaaactctaaagtgtaccaggttactatt

SEQ ID NO: 114574 - DNA, 80 bp, synthetic construct
  source 1..80: mol_type = other DNA
gagggcgcggtgggtcgcagcccctttcctagcttagggagtttgcatagcttgccgggctcggtgaacagcggcagggt

SEQ ID NO: 114575 - DNA, 80 bp, synthetic construct
  source 1..80: mol_type = other DNA
atccttctccttgttgcaggggtggatgcaaccacttactccactggtggacatgcaggccgtgtcaccggtggccttac

SEQ ID NO: 114576 - DNA, 80 bp, synthetic construct
  source 1..80: mol_type = other DNA
gcagaacgggtaggggtaggcgtggcatctacaggtttgtgacaccggaggagcggccctcaggcatgtttgactcgtca

SEQ ID NO: 114577 - DNA, 80 bp, synthetic construct
  source 1..80: mol_type = other DNA
gccgccaggatcggtgaccaccccccaccccaatatagaggaggttgccttgccgacaacgggagagatacccttctacg

SEQ ID NO: 114578 - DNA, 80 bp, synthetic construct
  source 1..80: mol_type = other DNA
ctccatcgtgggatttgtcatcaagtgggaatgggtagtcctagcattcttgctcctagccgacgctcggatatgtgctt

SEQ ID NO: 114579 - DNA, 80 bp, synthetic construct
  source 1..80: mol_type = other DNA
tctacttcgggccttgggagttcagatgccgacgcgcctcctccaccaccgcaggacgatgttgagtccgataccgggtc

SEQ ID NO: 114580 - DNA, 80 bp, synthetic construct
  source 1..80: mol_type = other DNA
tgataacatcatgctcttccaatgtatctgtggctttggacccccagggtcgccgtaggtactatctaaccagagatcct

SEQ ID NO: 114581 - DNA, 80 bp, synthetic construct
  source 1..80: mol_type = other DNA
gacatatctgaaatgggggccaacctcgatgtgagccgtgtcatagatggacgaacaaacatcaaaccggaagaggttga

SEQ ID NO: 114582 - DNA, 80 bp, synthetic construct
  source 1..80: mol_type = other DNA
gatttcacaaccccgtgcgccggctcttggctaagggatatttgggactgggtatgtacggtgctgagcgactttaagac

SEQ ID NO: 114583 - DNA, 80 bp, synthetic construct
  source 1..80: mol_type = other DNA
agacatccaggcttcaccataatggcagcaatcctggcatacaccatagggacgacacatttccagagagtcctgatttt

SEQ ID NO: 114584 - DNA, 80 bp, synthetic construct
  source 1..80: mol_type = other DNA
gaggtggggtgttaaatagttttggtacattaatcgctgataaaagcctgtccgcgctgaatttcacgtattgtgtaatt

SEQ ID NO: 114585 - DNA, 80 bp, synthetic construct
  source 1..80: mol_type = other DNA
cccgagaacgcctcgtgctgaccctggaggccgccatggtggagattgctttgggtggcatgatgggaggtctgtggaag

SEQ ID NO: 114586 - DNA, 80 bp, synthetic construct
  source 1..80: mol_type = other DNA
tctggagagtatgcatcagagccgcagaagttacaaacagtttcacattcaactgaccaggtcagctcaggacaagatgg

SEQ ID NO: 114587 - DNA, 80 bp, synthetic construct
  source 1..80: mol_type = other DNA
caaaggactagaggttagaggagaccccccgcaaataaaaacagcatattgacgctgggagagaccagagatcctgctgt

SEQ ID NO: 114588 - DNA, 80 bp, synthetic construct
  source 1..80: mol_type = other DNA
acaggggattgcatgttacaacaggagatgcaattgaaagcaacatcagttgggctaaaggtataaaatttgaagatggt

SEQ ID NO: 114589 - DNA, 80 bp, synthetic construct
  source 1..80: mol_type = other DNA
gttaccgtattgggccggagtgcgtcagaatgtggtaggatctactccagacggacgacctgtagcgcctgcaaattcgt

SEQ ID NO: 114590 - DNA, 80 bp, synthetic construct
  source 1..80: mol_type = other DNA
accctgaccgtcaagcgcggtgcggcggcgtcccactctagaatcggttgggaccgcttcgtgggcggagttatccgccg

SEQ ID NO: 114591 - DNA, 80 bp, synthetic construct
  source 1..80: mol_type = other DNA
aaagaaggtgttcggtggcaaccgcagcgccttggggcgcgtcagatacagaaaaatctcgcagaagagggcgcgcccgg

SEQ ID NO: 114592 - DNA, 80 bp, synthetic construct
  source 1..80: mol_type = other DNA
gatacatattttacagatgaacaatattgcgaaaaactggttacagctcaacatccgttgcttctttcacctcctaattc

SEQ ID NO: 114593 - DNA, 80 bp, synthetic construct
  source 1..80: mol_type = other DNA
gaaggtctgtggtcatcccgacacatgcacaaaaggacatggttgggcgaggacacgcgtggctcaagggtgataacatc

SEQ ID NO: 114594 - DNA, 80 bp, synthetic construct
  source 1..80: mol_type = other DNA
caacataaccggccccagtgaggacagaccatattgctggcactacccacctaaaccctgcttcacagttcaagggcaat

SEQ ID NO: 114595 - DNA, 80 bp, synthetic construct
  source 1..80: mol_type = other DNA
tacaggtacgtctcgcaaggtgagcggccatctggcacgttcgacaccattgtgctttgcgaggcgtacgacactggatg

SEQ ID NO: 114596 - DNA, 80 bp, synthetic construct
  source 1..80: mol_type = other DNA
gtggatggggtgagaatccatcgttacgcccctccatgtaagcccctgttgagggatgaaatcacttttacagtagggtt

SEQ ID NO: 114597 - DNA, 80 bp, synthetic construct
  source 1..80: mol_type = other DNA
cattggcagcataggtcttgggaaggtgcttgtggacattctggcgggctacggagcaggtgtggcaggcgcactcgtgg

SEQ ID NO: 114598 - DNA, 80 bp, synthetic construct
  source 1..80: mol_type = other DNA
gtcaggcttcgggcctacttaaacacacccgggctccccgtttgtcaggaccacctagagttctgggaggccgtttttac

SEQ ID NO: 114599 - DNA, 80 bp, synthetic construct
  source 1..80: mol_type = other DNA
ggggcctgttgggcacaattgtgaccagcctcactggcagagataccaatgagaactgcggcgaggtccaggtgctgtcc

SEQ ID NO: 114600 - DNA, 80 bp, synthetic construct
  source 1..80: mol_type = other DNA
taaaaaacccaggttatgcacaagggaagagtttacaaaaaaggtcagaactaacgcagccatgggagctgttttcacag

SEQ ID NO: 114601 - DNA, 80 bp, synthetic construct
  source 1..80: mol_type = other DNA
aatacaagctgcactcaccagtaccccttattttgtacgcgctcacatattgattcgtatctgtatgatggtgcgctctg

SEQ ID NO: 114602 - DNA, 80 bp, synthetic construct
  source 1..80: mol_type = other DNA
tgcttttttttagatgcatcccgtcctgcgacagatgcgacctcaatccagggcacccacgccctcaggaccaatagcgc

SEQ ID NO: 114603 - DNA, 80 bp, synthetic construct
  source 1..80: mol_type = other DNA
caggctctgccagtatacctaatgactctcatgaaaggagcctcaaaaagatcttggccccttaatgagggtataatggc

SEQ ID NO: 114604 - DNA, 80 bp, synthetic construct
  source 1..80: mol_type = other DNA
aggcaggagatgggggggaacattaccagagtggagtcggagaataagatcgtcatcctggattctttcgacccgctcgt

SEQ ID NO: 114605 - DNA, 80 bp, synthetic construct
  source 1..80: mol_type = other DNA
ggttggatgatcaaggagacagcatgccttagcaaggcctacgccaacatgtggtcactgatgtactttcacaagaggga

SEQ ID NO: 114606 - DNA, 80 bp, synthetic construct
  source 1..80: mol_type = other DNA
aaaagatgtggatttgggagcagggaccagaagtgtgtcaactgaaactgaaaaaccaaacctcgagatcataggaagga

SEQ ID NO: 114607 - DNA, 80 bp, synthetic construct
  source 1..80: mol_type = other DNA
gagataatggtcaacccactgaaaaccatgacataacaatggctttctttgacactcctggtggtacaatcacaggaggt

SEQ ID NO: 114608 - DNA, 80 bp, synthetic construct
  source 1..80: mol_type = other DNA
ggaacttggtgctttgaccaacgcgatgaataaacggagcggaaaacaaaaaagaggaggaacagttggggtggcagcca

SEQ ID NO: 114609 - DNA, 80 bp, synthetic construct
  source 1..80: mol_type = other DNA
atgttgattccaacagcgatggcgttccatttaaccacacgcaatggagaaccacacatgatcgttggtaggcaggagaa

SEQ ID NO: 114610 - DNA, 80 bp, synthetic construct
  source 1..80: mol_type = other DNA
agaggagggaaggcctaccaacacgctctgaacgaactcccagagtcactagaaacactcatgcttgtagctttattagg

SEQ ID NO: 114611 - DNA, 80 bp, synthetic construct
  source 1..80: mol_type = other DNA
gagagggcgtactggtagggggaggctggggacctaccggtttgttactccggtggagagaccgtccggcatatttgaca

SEQ ID NO: 114612 - DNA, 80 bp, synthetic construct
  source 1..80: mol_type = other DNA
cggacttggaggtcattaccagtacctgggtgctggtggggggcgtgctggcagctgcggcagcgtactgcttggccgta

SEQ ID NO: 114613 - DNA, 80 bp, synthetic construct
  source 1..80: mol_type = other DNA
gtgcggggcggccgcgatgctatcatcctcctcgcgtgcttggtccaccctggtcttatgtttgacatcactaagctgtt

SEQ ID NO: 114614 - DNA, 80 bp, synthetic construct
  source 1..80: mol_type = other DNA
gcattggacgtggggtacctctgtgacgacatgatcacatacgagtgtccagtacttgcagctggcaacgatccagagga

SEQ ID NO: 114615 - DNA, 80 bp, synthetic construct
  source 1..80: mol_type = other DNA
gaaccactgcagacggggcacttgcgctccgtcgagctgttgttgcgagagctctcggatgcgcttaaggattggctgca

SEQ ID NO: 114616 - DNA, 80 bp, synthetic construct
  source 1..80: mol_type = other DNA
tcgttagtggaggcagcttctcgaggccaaacccccgttcccagtctgccatcgctgaccagcagcagcagcggacgggt

SEQ ID NO: 114617 - DNA, 80 bp, synthetic construct
  source 1..80: mol_type = other DNA
gacctggagcttataacatcctgctcctcaaacgtatcggtagcgctggactctcggggtcgccgccggtacttcctaac

SEQ ID NO: 114618 - DNA, 80 bp, synthetic construct
  source 1..80: mol_type = other DNA
cagcagacttggaggtaatcactagtagttgggtacttttgggcggagttctggcagctttagccgcatattgtatgtca

SEQ ID NO: 114619 - DNA, 80 bp, synthetic construct
  source 1..80: mol_type = other DNA
agaagtccagatactttccacggctactcagaccttcctggcaacaagcattaatggggtaatgtggacagtctaccatg

SEQ ID NO: 114620 - DNA, 80 bp, synthetic construct
  source 1..80: mol_type = other DNA
gcatcaggctacaccgccacgccccgaagtgcaaacccttgctgcgggaagaagtgtcgttctcagtgggactcaattcg

SEQ ID NO: 114621 - DNA, 80 bp, synthetic construct
  source 1..80: mol_type = other DNA
ctagtgacaccttgtgcagcggaggaatcgaagctgccaattagccccctgagcaattcacttctgcgccatcacaacat

SEQ ID NO: 114622 - DNA, 80 bp, synthetic construct
  source 1..80: mol_type = other DNA
ggcggccccatgtacaactcccgaggccagtcatgtgggtaccgcaggtgccgggctagtggtgtcttcaccacaagcct

SEQ ID NO: 114623 - DNA, 80 bp, synthetic construct
  source 1..80: mol_type = other DNA
actcctggctaggcaacatcatcatgtttgcccccactctgtgggtacggatggtcctcatgacccatttcttctccata

SEQ ID NO: 114624 - DNA, 80 bp, synthetic construct
  source 1..80: mol_type = other DNA
ggcttcagctctcagaaagcttgaagcgccgcccctcagggtgtggaagagccgggcacgtgctgtgagggcgtctctca

SEQ ID NO: 114625 - DNA, 80 bp, synthetic construct
  source 1..80: mol_type = other DNA
gccgtcatggaggctatgaaacctgcagctgcggctgccgcccccgtggtggaaaccaacctccaaagagtcgagaagct

SEQ ID NO: 114626 - DNA, 80 bp, synthetic construct
  source 1..80: mol_type = other DNA
tcttgcaaaccagcctgctgtgtgtgccatactatgtgcgtgcgcacgcgttgctgcggatgtgcatgctcgcgcgccgc

SEQ ID NO: 114627 - DNA, 80 bp, synthetic construct
  source 1..80: mol_type = other DNA
aacaactcgaggtgctggcaccccgtctcccctactctggccgtgccgaattcctcgacgccagcgactggattccgcag

SEQ ID NO: 114628 - DNA, 80 bp, synthetic construct
  source 1..80: mol_type = other DNA
ttgtcctcgaggaaacgccgatcccaagatgttttgactatacaatttttaattctgggaatgctgctgatggttggtgg

SEQ ID NO: 114629 - DNA, 80 bp, synthetic construct
  source 1..80: mol_type = other DNA
gagggctgcgtggccgtggtgaggtccacgagccaggcctcgacggcctcccggcggtggcccgccttgcccaggaaaaa

SEQ ID NO: 114630 - DNA, 80 bp, synthetic construct
  source 1..80: mol_type = other DNA
cacccccggactccctgtctgtcaagaccacctggaattttgggaggtggtgttcacagggctcactaacatcgacgccc

SEQ ID NO: 114631 - DNA, 80 bp, synthetic construct
  source 1..80: mol_type = other DNA
ggacgaacgtcaggtccatggcgcccaccaggaggtagggcacgttggtggcggcgtagatgcgcttctccagggcctcc

SEQ ID NO: 114632 - DNA, 80 bp, synthetic construct
  source 1..80: mol_type = other DNA
agaagaagagaggaggaaagaccggaattgcattcatgattggcttgattgctggcgtgggagcagtcactctctccaac

SEQ ID NO: 114633 - DNA, 80 bp, synthetic construct
  source 1..80: mol_type = other DNA
ttttcagtcctcttcaagtggaaccactaccgcccgtggagcgcgtcgaaacgatgtcaactccacgtctaagcctagcc

SEQ ID NO: 114634 - DNA, 80 bp, synthetic construct
  source 1..80: mol_type = other DNA
ctatagtttgtacagcatcaggtcgaataaaattagcttcatccacaaacagaagattaaaatcttgacctcggataccc

SEQ ID NO: 114635 - DNA, 80 bp, synthetic construct
  source 1..80: mol_type = other DNA
ctggtttgatccatctccatcagaacatcgtggacgtgcaatacctgtacggtgtagggtcagcgtttgtctcctttgca

SEQ ID NO: 114636 - DNA, 80 bp, synthetic construct
  source 1..80: mol_type = other DNA
ggattcggcaagagcggaaacagccgcgggtctgcgggccaggaccagggggtgcgggcgccgcagcttcgccatgcctt

SEQ ID NO: 114637 - DNA, 80 bp, synthetic construct
  source 1..80: mol_type = other DNA
cggggcaccgcatggcctgggatatgatgatgaactggtcgcccactaccaccatgctcctggcgtacttggtgcgcatc

SEQ ID NO: 114638 - DNA, 80 bp, synthetic construct
  source 1..80: mol_type = other DNA
ctatttctctgttctcgctattattccaaccgctgtttggtctgctttctgacaaactcggcctcgactctaggcggccg

SEQ ID NO: 114639 - DNA, 80 bp, synthetic construct
  source 1..80: mol_type = other DNA
cagcctaggcaacaccatgacatgttacatcaaagctatggcagcctgcaaggcggccaagctaaaagactttgacatgc

SEQ ID NO: 114640 - DNA, 80 bp, synthetic construct
  source 1..80: mol_type = other DNA
gaagaggcggatgccgcgcgggacgccgaggcgaggggtgagggcgctgcggacggagcagcgccgtcgcccaccgcgtg

SEQ ID NO: 114641 - DNA, 80 bp, synthetic construct
  source 1..80: mol_type = other DNA
tgttggtgggcccccacctgggggccgttgccgccacgggcatcgtcggcctggcctgcgagcactattacaccaacggc

SEQ ID NO: 114642 - DNA, 80 bp, synthetic construct
  source 1..80: mol_type = other DNA
acctaagctgggcaataacacgttcgtgattgacggtccagaaaccagggaatgcccaacgaccaatagagcgtggaata

SEQ ID NO: 114643 - DNA, 80 bp, synthetic construct
  source 1..80: mol_type = other DNA
ggggctgaagtggagatctgtctccaggatagagtggctttcagatgctgcatgatgaatatgtacccgggagtggtgga

SEQ ID NO: 114644 - DNA, 80 bp, synthetic construct
  source 1..80: mol_type = other DNA
acatggggtcacagaacatgtgcttaaagatggcctcgggccccgcggcccgaagcaggctcacaaaccggcccccgtcc

SEQ ID NO: 114645 - DNA, 80 bp, synthetic construct
  source 1..80: mol_type = other DNA
cgacctgcttgttggggcggcggcgttttgctccgccatgtacgtgggcgacctctgcggatccgtctttcttgtcagcc

SEQ ID NO: 114646 - DNA, 80 bp, synthetic construct
  source 1..80: mol_type = other DNA
ggagcttacaagcgaggactctctggccgaacggctgtagacgataccatagatgccgtgattgccgacgcccgccggta

SEQ ID NO: 114647 - DNA, 80 bp, synthetic construct
  source 1..80: mol_type = other DNA
cggcttttgtcgttagcggtctcgcgggggccgcggttggcagcgtcggcttgggaagagtcctggtcgacattctcgcc

SEQ ID NO: 114648 - DNA, 80 bp, synthetic construct
  source 1..80: mol_type = other DNA
gcggcggctattgccagcatggctcagccccgccggtggaatatctactgggtgcgagatgcgtcgggcgtgcgggtgcc

SEQ ID NO: 114649 - DNA, 80 bp, synthetic construct
  source 1..80: mol_type = other DNA
acctcttcaactgggcggtacgcaccaaaaccaaactcactccattgccggctgcaggcctgctggatttatccagttgg

SEQ ID NO: 114650 - DNA, 80 bp, synthetic construct
  source 1..80: mol_type = other DNA
atatttctattcactgaggctgatccaaggactttcctactttagaccatcctatgttctctctgatgaaggctcaactc

SEQ ID NO: 114651 - DNA, 80 bp, synthetic construct
  source 1..80: mol_type = other DNA
aagaaaaaatgtgatgagatagcatccaaactcagaggtatggggctcaacgctgtagcgtactatagaggtcttgatgt

SEQ ID NO: 114652 - DNA, 80 bp, synthetic construct
  source 1..80: mol_type = other DNA
gcatgataaatgtgtgaaaatagggtatggattgtattccgccgtgaacgcattgtatattttcaaatagaaaaggtggt

SEQ ID NO: 114653 - DNA, 80 bp, synthetic construct
  source 1..80: mol_type = other DNA
taagtcctcttttctttcgcatggctctcccaaggggccccgggtcgacccgacccacacccacccacccacatacacac

SEQ ID NO: 114654 - DNA, 80 bp, synthetic construct
  source 1..80: mol_type = other DNA
cctcaccaccaccgatagcagtacccttactatcactgcctcaccccctctaactactgccactggtagcttgggcattg

SEQ ID NO: 114655 - DNA, 80 bp, synthetic construct
  source 1..80: mol_type = other DNA
caccgaccgtgtgggagagggtgcggggcagggctcagcagcacgcacgaggaggtctgtcgtgcgcaggagccccaggt

SEQ ID NO: 114656 - DNA, 80 bp, synthetic construct
  source 1..80: mol_type = other DNA
gtagagccaagatctgtggcatatacctctttaactgggcgacaaaaaccaaactcaaactcactccattgcccgccgca

SEQ ID NO: 114657 - DNA, 80 bp, synthetic construct
  source 1..80: mol_type = other DNA
tttgtgtcatgacccttgtgagcgcagtggcagccaacgagatgggttggctagataagaccaagagtgacataagcagt

SEQ ID NO: 114658 - DNA, 80 bp, synthetic construct
  source 1..80: mol_type = other DNA
ttgactacccctacagattgtggcactacccctgcactgttaactacaccttgttcaagatccggatgtatgtgggaggt

SEQ ID NO: 114659 - DNA, 80 bp, synthetic construct
  source 1..80: mol_type = other DNA
cacgtctcccccacgcactatgtgcctgagagcgacgccgcagggcctgttacccagatcctctccagccttaccatcac

SEQ ID NO: 114660 - DNA, 80 bp, synthetic construct
  source 1..80: mol_type = other DNA
acacctggcacgggaccttccccatcaacgcgtacaccacaggcccatgctcaccactcccatcaccggactacaaggtc

SEQ ID NO: 114661 - DNA, 80 bp, synthetic construct
  source 1..80: mol_type = other DNA
cccaccagtgtcgccctttcttattaatactgaatatttagactctaatcccttgcttgcatacggaggtcttgcagctc

SEQ ID NO: 114662 - DNA, 80 bp, synthetic construct
  source 1..80: mol_type = other DNA
caatggatgaaccggctaatagccttcgcctcccgggggaaccatgtttcccccacgcactacgtgccggagagcgatgc

SEQ ID NO: 114663 - DNA, 80 bp, synthetic construct
  source 1..80: mol_type = other DNA
cgttgtggatgggatggtggccactgacgtgccagaactggaaagaacaacacctctaatgcagaaaaaggtggggcaag

SEQ ID NO: 114664 - DNA, 80 bp, synthetic construct
  source 1..80: mol_type = other DNA
aggtcccgatggccgccccgcagtttcaccgccccagcaccattaccgccgacaacgtccgggcgctcggcatgcgcggg

SEQ ID NO: 114665 - DNA, 80 bp, synthetic construct
  source 1..80: mol_type = other DNA
ccgcaagccagcccgcctcatcgtgtaccctgacctctccgtccgggtgtgcgagaaaatggcgctgtatgacatcacgc

SEQ ID NO: 114666 - DNA, 80 bp, synthetic construct
  source 1..80: mol_type = other DNA
ggcacatcaacagtactgccttgaattgcaacgattcgctgcaaacgggcttcattgcgtcgctgttctatgtccacaag

SEQ ID NO: 114667 - DNA, 80 bp, synthetic construct
  source 1..80: mol_type = other DNA
tgcttattgtctccctcttcactccatacatgcttcaccagctgcaaacaaaaatccagaggctggtgaacagctcagtt

SEQ ID NO: 114668 - DNA, 80 bp, synthetic construct
  source 1..80: mol_type = other DNA
ggtaggtttgcttgtacagctcgatggtgcggcagaccagacagggccggtccagcgcgaaggtgtcgatggccgccgcg

SEQ ID NO: 114669 - DNA, 80 bp, synthetic construct
  source 1..80: mol_type = other DNA
catatcacagcagaaacggcaggccgtcgcctcgcgagggggagtcctccctctctcgccagctcgtcagcaagccagct

SEQ ID NO: 114670 - DNA, 80 bp, synthetic construct
  source 1..80: mol_type = other DNA
accgaggcggaaccagatgacattgactgctggtgcaatgccacagacacatgggtgacctatgggacgtgttctcaaaa

SEQ ID NO: 114671 - DNA, 80 bp, synthetic construct
  source 1..80: mol_type = other DNA
gtggccggaccggacggggaaaaccgggggtgtataggtatgtctcgcaggaggaacggccatccggcacgtttgacacg

SEQ ID NO: 114672 - DNA, 80 bp, synthetic construct
  source 1..80: mol_type = other DNA
cttctgaggaggtggttagcccatacgaagtggtcgggtatttgattttaggggtggtcctgggtgtgtgcatagcggtg

SEQ ID NO: 114673 - DNA, 80 bp, synthetic construct
  source 1..80: mol_type = other DNA
gggtgttttaatggatggttctagtcttgacaaagattactggaactataaaagtgatgactcagtgatgtcaaaggcat

SEQ ID NO: 114674 - DNA, 80 bp, synthetic construct
  source 1..80: mol_type = other DNA
aatatttcatagctaggaccgaggccacgctgcatgtctatgttccatccttcgacgtgcgcggacctcgcgactcactg

SEQ ID NO: 114675 - DNA, 80 bp, synthetic construct
  source 1..80: mol_type = other DNA
gttgaaccacacacgggagactatgttgccgccaacgagacgcacaaggggaggaaaacggcgactttcacggtttcttc

SEQ ID NO: 114676 - DNA, 80 bp, synthetic construct
  source 1..80: mol_type = other DNA
gcgccagggccccaggcgctcgtgggcgtctgcgaccacggcgtacaggcggtgcccgtcgctctcgaaccggcactcaa

SEQ ID NO: 114677 - DNA, 80 bp, synthetic construct
  source 1..80: mol_type = other DNA
tccacacaggagcgcgcgtgcggcagaaacgcgggcgcggcgacggtcggcgtgggagtggtggtgagggacacgaaaac

SEQ ID NO: 114678 - DNA, 80 bp, synthetic construct
  source 1..80: mol_type = other DNA
tgtaaaagaccacaataaacgtatatcgctactacacccttgtgtgtcaatggacgcctctccgggggggggggggggag

SEQ ID NO: 114679 - DNA, 80 bp, synthetic construct
  source 1..80: mol_type = other DNA
tacggtccggtccaccctgcccatttcgtacgactacagcgagtacatctgtcggttgaccggatatccggccgggattc

SEQ ID NO: 114680 - DNA, 80 bp, synthetic construct
  source 1..80: mol_type = other DNA
tgctcacagacaaagaagtacataacccaacgccgaagagtcatttcgttgatattgccaagggcttccaagcgttccat

SEQ ID NO: 114681 - DNA, 80 bp, synthetic construct
  source 1..80: mol_type = other DNA
gttctctgcgagtgctacgactcagcatgtgcctggtacgagcttacacctgccgagaccacggttaggcttcgggctta

SEQ ID NO: 114682 - DNA, 80 bp, synthetic construct
  source 1..80: mol_type = other DNA
aaggtggttggcttgattggactcgccagccggcaggctgaggagatcaagccagtggcgacatccgcgtggaccaaggc

SEQ ID NO: 114683 - DNA, 80 bp, synthetic construct
  source 1..80: mol_type = other DNA
gaggaggagtcggagggagccatttggtgaacgtaggaagctaactgtcaggccacattaagccacagtacggaagaagc

SEQ ID NO: 114684 - DNA, 80 bp, synthetic construct
  source 1..80: mol_type = other DNA
acaatacatgtatggcctgtcacccgccctcacaagatatgttgtccgatgggagtgggtagtgctcttgttcctgctcc

SEQ ID NO: 114685 - DNA, 80 bp, synthetic construct
  source 1..80: mol_type = other DNA
caggacaccgtatggcatgggatatgatgatgaattggtctccaacagtgactatggctgcggcatatttgatgcgtgtc

SEQ ID NO: 114686 - DNA, 80 bp, synthetic construct
  source 1..80: mol_type = other DNA
tgagcagcttttcgtagcgaagcgtgagtaagggcgaaggtgtctctaaccatgactttgagaaattggtatttaaagtc

SEQ ID NO: 114687 - DNA, 80 bp, synthetic construct
  source 1..80: mol_type = other DNA
acgtccggggggggcgcgacgctgtcatcctaattatgtgtgttgtacacccggccttggtatttgacatcaccaagctg

SEQ ID NO: 114688 - DNA, 80 bp, synthetic construct
  source 1..80: mol_type = other DNA
ccggctttgtcgtcagtggcctggtgggggctgccgtgggcagcataggcctgggtaaggtgctggtggacatcctggca

SEQ ID NO: 114689 - DNA, 80 bp, synthetic construct
  source 1..80: mol_type = other DNA
gcaaaaagaatggcaatattgggagacacagcatgggactttggctcactagggggagttttcaactccataggaaaagc

SEQ ID NO: 114690 - DNA, 80 bp, synthetic construct
  source 1..80: mol_type = other DNA
aattcttcccgctgctgggtggcgctcacccccacgctcgcggccaggaacgccagcgtcccgactacgacaatacgacg

SEQ ID NO: 114691 - DNA, 80 bp, synthetic construct
  source 1..80: mol_type = other DNA
attggctgacctctaaattgttccccaagctgcccggcctccccttcatctcttgtcaaaaggggtacaagggtgtgtgg

SEQ ID NO: 114692 - DNA, 80 bp, synthetic construct
  source 1..80: mol_type = other DNA
gctcagcagaccagaggcttagtgggaacaatcgtcaccagcctcacgggccgcgacaaaaatgaggtggagtgggaaat

SEQ ID NO: 114693 - DNA, 80 bp, synthetic construct
  source 1..80: mol_type = other DNA
ggcctggcgggagctgcagtgggcagcattggcctcggcagggtgctggtggatgtgattgccggctatggtgcaggcgt

SEQ ID NO: 114694 - DNA, 80 bp, synthetic construct
  source 1..80: mol_type = other DNA
aggggtcgggatccaaaggacggacccagaccacctttggttgcagacccctttctcccccctcttccgaggccagcagg

SEQ ID NO: 114695 - DNA, 80 bp, synthetic construct
  source 1..80: mol_type = other DNA
aacggctgtaggtcaacatacattggggattcagatggtttatctcgacgtccaagtccaatcaaaaaagcgtgtaaatc

SEQ ID NO: 114696 - DNA, 80 bp, synthetic construct
  source 1..80: mol_type = other DNA
aatgtacactaatgtagaccaggatctcgtcggctggccggcgccccccggggcgcgttccctgacaccatgcacctgtg

SEQ ID NO: 114697 - DNA, 80 bp, synthetic construct
  source 1..80: mol_type = other DNA
ccctgtggataatggtactggttggccaggccgaggcggcgttagagaatctggtggttcttaacgccgcctcggctgta

SEQ ID NO: 114698 - DNA, 80 bp, synthetic construct
  source 1..80: mol_type = other DNA
gatggtacgtctacctacgccacgtttttggtcacctggaaaggggatgaaaaaacaagaaaccctacgcccgcagtaac

SEQ ID NO: 114699 - DNA, 80 bp, synthetic construct
  source 1..80: mol_type = other DNA
ggtatttaaagtcctggtcgtcacatcctccttgctcccacagcaggaagtcagtgcgctttttgtagtaaggattaggg

SEQ ID NO: 114700 - DNA, 80 bp, synthetic construct
  source 1..80: mol_type = other DNA
tttaccctgaaacaccggcggcccttgcttcggctttgaaggagatggttgaagagggggattgtggtatagttccccaa

SEQ ID NO: 114701 - DNA, 80 bp, synthetic construct
  source 1..80: mol_type = other DNA
ggtgataagctcctgcattaatggtgtagctgcagtttgtcattactgaccaattaacagtttgcgtgcctggctgtaca

SEQ ID NO: 114702 - DNA, 80 bp, synthetic construct
  source 1..80: mol_type = other DNA
acagagacttcgttgagggagtgtctggagggacatgggtggatctggtactggaacacggaggctgcgtgacaacaatg

SEQ ID NO: 114703 - DNA, 80 bp, synthetic construct
  source 1..80: mol_type = other DNA
attgtgggactgggagtaaagtctttaaaacgcagacgctgctattaacattaacaaacatgtgttactccgtctgtata

SEQ ID NO: 114704 - DNA, 80 bp, synthetic construct
  source 1..80: mol_type = other DNA
agcccgagccacgtgggcagagaacatccaggtggctatcaaccaagtcagagcaatcattggagatgagaagtatgtgg

SEQ ID NO: 114705 - DNA, 80 bp, synthetic construct
  source 1..80: mol_type = other DNA
tgtttggtggactacccctaccggttgtggcattacccgtgcaccgtgaattattccatcttcaaggtgcgcacgtacat

SEQ ID NO: 114706 - DNA, 80 bp, synthetic construct
  source 1..80: mol_type = other DNA
tacatcactggggtgacacaggatgccatcaaatgcccctgtcaggtccctgccccagaattcttcactgaggtggatgg

SEQ ID NO: 114707 - DNA, 80 bp, synthetic construct
  source 1..80: mol_type = other DNA
gggcgtcacagcagagggcctcaagtgtccttgccaggtcccgagtccagaattcttcacggagatagacggcgttagga

SEQ ID NO: 114708 - DNA, 80 bp, synthetic construct
  source 1..80: mol_type = other DNA
acaagctagtgcgctgttcacgctagctagaggctttccctttgtggatgtcggaatttcagctcttctcctagctgttg

SEQ ID NO: 114709 - DNA, 80 bp, synthetic construct
  source 1..80: mol_type = other DNA
ccaaacggttgacttcagtttggaccccacgttttcaatagagacaacaacagtcccacaagatgcagtctcccgcagcc

SEQ ID NO: 114710 - DNA, 80 bp, synthetic construct
  source 1..80: mol_type = other DNA
ttaaatacatgcccgggacccatgaagcatgcgcgacttccgggcatcagaacccacccgaaacggccaacggacgtctg

SEQ ID NO: 114711 - DNA, 80 bp, synthetic construct
  source 1..80: mol_type = other DNA
tggtgctgatgacccattttttccaaacactccaagcacaggagacgttggacaaagtacttgacttcgatatatacgga

SEQ ID NO: 114712 - DNA, 80 bp, synthetic construct
  source 1..80: mol_type = other DNA
ccccggatgaaattttaatgaatttgaagttggggccgaatttcactccttatttagttcatctttcaggaaggtacaag

SEQ ID NO: 114713 - DNA, 80 bp, synthetic construct
  source 1..80: mol_type = other DNA
acccgaacatagaggaggtggcgttgaccaatgagggggaaatccccttctacggcaaggccattcctcttgctaccatc

SEQ ID NO: 114714 - DNA, 80 bp, synthetic construct
  source 1..80: mol_type = other DNA
acagctggggtgcaaatgatacggatgtcttcgtccttaacaacaccaggccaccgctgggcaattggttcggttgtacc

SEQ ID NO: 114715 - DNA, 80 bp, synthetic construct
  source 1..80: mol_type = other DNA
gttcaccgccccctgcatcatgggccaggcctcggtggggagctccgacagcgccgcctccaggatgatgtcagcgttgg

SEQ ID NO: 114716 - DNA, 80 bp, synthetic construct
  source 1..80: mol_type = other DNA
aattaatactacatggacagcttatcataatagcggagatggaggaaaacatggatggttgccaatctgcacatggggtg

SEQ ID NO: 114717 - DNA, 80 bp, synthetic construct
  source 1..80: mol_type = other DNA
gtcccgcagaaggtctccggtaatatcaccgcagtcgtgcggatgctccagagcctgtccacgtatacggtccccattga

SEQ ID NO: 114718 - DNA, 80 bp, synthetic construct
  source 1..80: mol_type = other DNA
gacatgagaccatactgctggcactatccccctaaaccatgtggtatagttcctgcacagactgtgtgtggtccggtgta

SEQ ID NO: 114719 - DNA, 80 bp, synthetic construct
  source 1..80: mol_type = other DNA
aggtaaagctgcgagcgtccaaggtgagcgctaagcttctcaccactgaggaagcgtgtgacctcacgccgccccactcg

SEQ ID NO: 114720 - DNA, 80 bp, synthetic construct
  source 1..80: mol_type = other DNA
agcgcaagccagaggcaaaagaaggtcacatttgacagactgcaagtcctggataatcactaccagggcgtgcttgagga

SEQ ID NO: 114721 - DNA, 80 bp, synthetic construct
  source 1..80: mol_type = other DNA
tctcggctcggaggtgcgtctcggccaggcgtcggcgcagggccgcgtgggcggcatctcggtccattccgccaccctgc

SEQ ID NO: 114722 - DNA, 80 bp, synthetic construct
  source 1..80: mol_type = other DNA
tgtcgaggactccacgttttgggagatggttgatgaagaacgcgaagctcacctgcgtggagaatgcaacacctgcatct

SEQ ID NO: 114723 - DNA, 80 bp, synthetic construct
  source 1..80: mol_type = other DNA
tggggccggttcaaagactctcgctggaccgaaaggaccagtgtgtcaaatgtacaccaatgtggacaaggacctagtag

SEQ ID NO: 114724 - DNA, 80 bp, synthetic construct
  source 1..80: mol_type = other DNA
cggagacgatttggtcatcgtatgtgagagtgaaggcgtccaggaggatgtggctgccctgcgagcatttacagatgcta

SEQ ID NO: 114725 - DNA, 80 bp, synthetic construct
  source 1..80: mol_type = other DNA
ttactcctcaacatcttgggagggtgggtagcctcacagattgcgccacccacggcatccacggcattcgttgttagcgg

SEQ ID NO: 114726 - DNA, 80 bp, synthetic construct
  source 1..80: mol_type = other DNA
cgacccgggagtaccatggaaggtatggctactgcggatgacgtgcataggattggcttctgtcacaccctgggccataa

SEQ ID NO: 114727 - DNA, 80 bp, synthetic construct
  source 1..80: mol_type = other DNA
ggggcttcggggtgaatgagctgggcggcctcccgcgtgacactctgcatctgcagtagagcgttcacgtacccgtcctg

SEQ ID NO: 114728 - DNA, 80 bp, synthetic construct
  source 1..80: mol_type = other DNA
ggaaagtctagacgaggagctggaggacaaaccccccaaggacaaggaggaagaaatcatcgccagcgccgcggcaccgt

SEQ ID NO: 114729 - DNA, 80 bp, synthetic construct
  source 1..80: mol_type = other DNA
acacgtctcttatctgccccactgactgcttcaggaaacatcctggtgctacttacagtcggtgcggatctggaccctgg

SEQ ID NO: 114730 - DNA, 80 bp, synthetic construct
  source 1..80: mol_type = other DNA
gcccagtggatgaacaggttaatagcctttgcctctaggggcaaccacgtgtcacctacccactatgtgcccgagacaga

SEQ ID NO: 114731 - DNA, 80 bp, synthetic construct
  source 1..80: mol_type = other DNA
acgtcagggctcacgagcctcttcagcactgggcctcagcagaaccttcagctggttaacaccaacggcagttggcacat

SEQ ID NO: 114732 - DNA, 80 bp, synthetic construct
  source 1..80: mol_type = other DNA
tggatgaacggctctgggtacgtcaagacatgcggggcacccccctgcctgactcgaccctcgaagtcgaataccacctt

SEQ ID NO: 114733 - DNA, 80 bp, synthetic construct
  source 1..80: mol_type = other DNA
tcctcaacgccaccacttaccgggacctcgaggcggactggctcggccacgtggcggcccgcggtctgcagccccaacgg

SEQ ID NO: 114734 - DNA, 80 bp, synthetic construct
  source 1..80: mol_type = other DNA
cccgagcccaactacaccagggctctttggagggtttctgctgaggagtatgtcgaggttaagagagtggtggatagcca

SEQ ID NO: 114735 - DNA, 80 bp, synthetic construct
  source 1..80: mol_type = other DNA
cagtaagccgacccccgtgcccccccctaggaggaagcgggcagtcgtgctttctgaatctgtcatctccagcgctttgg

SEQ ID NO: 114736 - DNA, 80 bp, synthetic construct
  source 1..80: mol_type = other DNA
ctccccgggggcgggcaccactcagggccgcgccggcggggcgccggatggacccccatctgcgtcggccggggggggcg

SEQ ID NO: 114737 - DNA, 80 bp, synthetic construct
  source 1..80: mol_type = other DNA
actgaacggatggagctccgttgtggtgagggtctggttgtgtggagagaggtatccgagtggtatgacaattatgcata

SEQ ID NO: 114738 - DNA, 80 bp, synthetic construct
  source 1..80: mol_type = other DNA
gcaggacatatatctgtgttgccagctggacccagaagcccaacaggctatcaagtctcttaccgagaggctttatgttg

SEQ ID NO: 114739 - DNA, 80 bp, synthetic construct
  source 1..80: mol_type = other DNA
gagacaagaggttgggggcaacataacgcgggtcgagtctgagaataagatcatagtgctcgactcttttgaccccttgg

SEQ ID NO: 114740 - DNA, 80 bp, synthetic construct
  source 1..80: mol_type = other DNA
gctgctgggtgcggggccccaggcttttcacggtcgccacgaacacgctactggcgacggccgccccgccctcggagata

SEQ ID NO: 114741 - DNA, 80 bp, synthetic construct
  source 1..80: mol_type = other DNA
attcgcaagaagcaacctttccaagagggcttcagaatcatgtatgaggatctagaagggggcaatatccccgccctgct

SEQ ID NO: 114742 - DNA, 80 bp, synthetic construct
  source 1..80: mol_type = other DNA
acaacattgccctgtatgctaacttttttcccatggcacataacacagcttctactttagaagccatgttaagaaatgac

SEQ ID NO: 114743 - DNA, 80 bp, synthetic construct
  source 1..80: mol_type = other DNA
aggtcctgggcacagccaggatatccatggcctctttacggtaatgagggttgcgggtgtgcaggatggctcttgtcccc

SEQ ID NO: 114744 - DNA, 80 bp, synthetic construct
  source 1..80: mol_type = other DNA
agccagctcgtctcatcgtgttccccgacctgggtgttcgcgtatgcgagaagatggccctgtacgacgtggtcagcaaa

SEQ ID NO: 114745 - DNA, 80 bp, synthetic construct
  source 1..80: mol_type = other DNA
tttattagctcattggagtacaagcttgactgttttattaaaaatcaaatggctcttcgcgacagtcgccgtggttggtg

SEQ ID NO: 114746 - DNA, 80 bp, synthetic construct
  source 1..80: mol_type = other DNA
ccgaccctcccatggatttaacaaacgggggggtgtcgcctgcggcgacctcggcgcctctggactggaccacgtttcgg

SEQ ID NO: 114747 - DNA, 80 bp, synthetic construct
  source 1..80: mol_type = other DNA
gcgtacagcttccatggaagctgtacgcatggccatggatgcgtacgcatggatggattgcgtacacgcttccatggatg

SEQ ID NO: 114748 - DNA, 80 bp, synthetic construct
  source 1..80: mol_type = other DNA
cctgccgcgcgggggcgggcgcgggaaaaaagccgcgcgggatcgcccgcgggaaggcaaccccgcggcgcgcgctggga

SEQ ID NO: 114749 - DNA, 80 bp, synthetic construct
  source 1..80: mol_type = other DNA
ccaacagacccgcggcctacttgggacaatcgtcaccagtctcacaggtcgtgacaaaaatgaggtcgagggcgagatac

SEQ ID NO: 114750 - DNA, 80 bp, synthetic construct
  source 1..80: mol_type = other DNA
ctgattggactaccccatgctccggttcgtggttgagggatatctgggactgggtttgtactgtgctatctgatttcaag

SEQ ID NO: 114751 - DNA, 80 bp, synthetic construct
  source 1..80: mol_type = other DNA
gtgggcgtccaacaaccccacgattgtctgtttggtgaggtttttaacgcgccccgccccgggaaacgtctgcgtgcttt

SEQ ID NO: 114752 - DNA, 80 bp, synthetic construct
  source 1..80: mol_type = other DNA
agacatttcagaaatgggggcaaatcttgatgtgagtcgcgtcatagatgggcgaacgaacattaagccagaggaggttg

SEQ ID NO: 114753 - DNA, 80 bp, synthetic construct
  source 1..80: mol_type = other DNA
gatctgtgtccgggtctggtgcattctgcccgcgccaccgacacctacttcaccctgggaaaaaagtttcaggaaacccc

SEQ ID NO: 114754 - DNA, 80 bp, synthetic construct
  source 1..80: mol_type = other DNA
gacgccagggtatgtcgccatctcaaacttcaatttcgacggattcgagggccgcgcgcgtctgttattccagatgattt

SEQ ID NO: 114755 - DNA, 80 bp, synthetic construct
  source 1..80: mol_type = other DNA
cgttccacatgtgggaatgggactggagacgcgaaccgaaacatggatgtcatcagaaggggcttggaaacatgcccaga

SEQ ID NO: 114756 - DNA, 80 bp, synthetic construct
  source 1..80: mol_type = other DNA
tgaggctaacctcatgtgggaccacacagccgggcctatcacccgggtggaaacaaccaacaaggtggtagtggtggact

SEQ ID NO: 114757 - DNA, 80 bp, synthetic construct
  source 1..80: mol_type = other DNA
cagggggatgtagtcatctgtgctaccgacgctctcatgactggctacacgggcgatttcgactctgttatagactgcaa

SEQ ID NO: 114758 - DNA, 80 bp, synthetic construct
  source 1..80: mol_type = other DNA
caacgcaatctttcctagcgacctgtgttaatggcgtgtgttggaccgtctaccatggcgctggctcaaaaactctggcc

SEQ ID NO: 114759 - DNA, 80 bp, synthetic construct
  source 1..80: mol_type = other DNA
aagtttgggtacggcgccaaggacgttcgcagccatgccagcaaggcgattgcccacatcaactccgtgtgggaggactt

SEQ ID NO: 114760 - DNA, 80 bp, synthetic construct
  source 1..80: mol_type = other DNA
cttcgtggtgggcgccaccacggataatttaaagtgtccgtgccaggttccagctcccgaattcttcactgaagttgatg

SEQ ID NO: 114761 - DNA, 80 bp, synthetic construct
  source 1..80: mol_type = other DNA
acaagcgggaaagtgacgtcacatttataacaggatgagtaaagatattcccacgccttacatgtggagttttcaacctc

SEQ ID NO: 114762 - DNA, 80 bp, synthetic construct
  source 1..80: mol_type = other DNA
gtcgcgggtccctgggtatgcgcgggaccctgggttctctgggagatcgtggaactcgcggttccctgggctctcgtgga

SEQ ID NO: 114763 - DNA, 80 bp, synthetic construct
  source 1..80: mol_type = other DNA
tggccatcagcggggatgattgcgtggtgaaaccgatcgatgacaggtttgccaatgccctgcttgccctgaacgacatg

SEQ ID NO: 114764 - DNA, 80 bp, synthetic construct
  source 1..80: mol_type = other DNA
caattcaacaggtgagaagccttataggcaatgaagagttcctggactacatgccttcaatgaagagattcaggaaggaa

SEQ ID NO: 114765 - DNA, 80 bp, synthetic construct
  source 1..80: mol_type = other DNA
ggggcgtggccaaatccatcgatttcatccccgttgagacactcgacgttgttacaaggtctcccactttcagtgacaac

SEQ ID NO: 114766 - DNA, 80 bp, synthetic construct
  source 1..80: mol_type = other DNA
taccatattgggccggagtacgtcagaatgtggtaggatctacagtggacggtcgacctgtggcacctgcaaattcatca

SEQ ID NO: 114767 - DNA, 80 bp, synthetic construct
  source 1..80: mol_type = other DNA
aagacttgtggtgtggatctctcatagggcacagaccgcgcaccacctgggctgagaacattaaaaacacagtcaacatg

SEQ ID NO: 114768 - DNA, 80 bp, synthetic construct
  source 1..80: mol_type = other DNA
acctctagacaaatcatgaccatactcagttcccttaccgtgaccagcctactccggaaattgcatgagtggatcaacag

SEQ ID NO: 114769 - DNA, 80 bp, synthetic construct
  source 1..80: mol_type = other DNA
acctggacaggagtcagctgagcccactgcttcactccaccacggagtgggccattctgccctgcactttttctgactta

SEQ ID NO: 114770 - DNA, 80 bp, synthetic construct
  source 1..80: mol_type = other DNA
aaccacacacccggtatcgcgtgtgtgtggtttcccgggaagccacatcccaccccatgaagttttgccctttttttccg

SEQ ID NO: 114771 - DNA, 80 bp, synthetic construct
  source 1..80: mol_type = other DNA
ttcgcgcgcaagccctgcttcgatgttgcttgttggtacgccaactagccggagcaaagtacattcaggcttgtttgctg

SEQ ID NO: 114772 - DNA, 80 bp, synthetic construct
  source 1..80: mol_type = other DNA
ttgggccaaagtcatcctagtcctcttcctctttgcaggggttgatgctgagactcatgttactggtgcggcagctgcca

SEQ ID NO: 114773 - DNA, 80 bp, synthetic construct
  source 1..80: mol_type = other DNA
taatcgaggacggtgtgaattatgcaacagggaaccttcctggttgctctttctctatcttccttttagctcttctatcc

SEQ ID NO: 114774 - DNA, 80 bp, synthetic construct
  source 1..80: mol_type = other DNA
gagaaatggagtgacgtcccatactcaggaaaacgggaggacatctggtgtggcagcttgattggcacaagaacccgagc

SEQ ID NO: 114775 - DNA, 80 bp, synthetic construct
  source 1..80: mol_type = other DNA
tcaaccggccttatccatcttcaccagaatatcgtggatacgcagtacctctacggtgtgtccacagtacttgtatcgtg

SEQ ID NO: 114776 - DNA, 80 bp, synthetic construct
  source 1..80: mol_type = other DNA
accgggacgtgcttaaggagatgaaggcaaaggcgtccacagtcaaggctaaacttctatccatagaagaagcctgccgc

SEQ ID NO: 114777 - DNA, 80 bp, synthetic construct
  source 1..80: mol_type = other DNA
gtttcattctgaacatcctttaatcattgctttgcgtttttttattaaatcttgcaatttactgcaaagcaacaacaaaa

SEQ ID NO: 114778 - DNA, 80 bp, synthetic construct
  source 1..80: mol_type = other DNA
gggcgaaagtcatctgcgtcctcctcctgttcgccggggtcgacgcgacgaccatggtgggcagcgctgtcagtgagaac

SEQ ID NO: 114779 - DNA, 80 bp, synthetic construct
  source 1..80: mol_type = other DNA
gtagcgcaggttgaagcggcactcgccaacttggtcaccatcaacgccatttcggcggttggcactcacgggttccatta

SEQ ID NO: 114780 - DNA, 80 bp, synthetic construct
  source 1..80: mol_type = other DNA
tccgcgtgctccgcagccgctcccgtcgttcgtggccggcgccgtctgcgggcgtcggtcgcgccgggcctttatgtgcg

SEQ ID NO: 114781 - DNA, 80 bp, synthetic construct
  source 1..80: mol_type = other DNA
ctgagaccacagtgcgactgagagcatacctgtccaccccggggctacctgtctgccaagaccacctagacttctgggag

SEQ ID NO: 114782 - DNA, 80 bp, synthetic construct
  source 1..80: mol_type = other DNA
gtcgtctgcgccacggacgcattgatgaccggctacacaggcaacttcgacactgtgatagactgcaatgtcgccgtcac

SEQ ID NO: 114783 - DNA, 80 bp, synthetic construct
  source 1..80: mol_type = other DNA
ggagctggacggcgtgaggattcaccgctacgcgccaccctgcaaccccctcctaagggaggaggtctgcttctccgtgg

SEQ ID NO: 114784 - DNA, 80 bp, synthetic construct
  source 1..80: mol_type = other DNA
catgcgcgcccccgggccctattccatgcgcatcatctacggggacacggactccatctttgtgctgtgccgcggcctca

SEQ ID NO: 114785 - DNA, 80 bp, synthetic construct
  source 1..80: mol_type = other DNA
cgccttaataataataacgccgtaatcgtgtcaattgttaaccttaatagagtttggtcttccataagaaacacgttttg

SEQ ID NO: 114786 - DNA, 80 bp, synthetic construct
  source 1..80: mol_type = other DNA
tgcacttcctccgaaggggctaccccctgttcctccaccgaggaggaagaagcttattcagctagacgagtcggccgcag

SEQ ID NO: 114787 - DNA, 80 bp, synthetic construct
  source 1..80: mol_type = other DNA
tccgtgtgggaggacctcctggaggaccattgttcaccaattgacacaaccatcatggccaaaaatgaggtgttctgcgt

SEQ ID NO: 114788 - DNA, 80 bp, synthetic construct
  source 1..80: mol_type = other DNA
gatacctttcctcctgctgtccttccgctgctgccgctcagtcatccaactgaaatacagccattcccgcaggttctcga

SEQ ID NO: 114789 - DNA, 80 bp, synthetic construct
  source 1..80: mol_type = other DNA
tgtctctcagtgggcagcgtagtgattgtcgggagagtcgtcctgtcaggccaacctgctgtcattcctgaccgcgaagt

SEQ ID NO: 114790 - DNA, 80 bp, synthetic construct
  source 1..80: mol_type = other DNA
gttcggggccactcccgcagggccattaaccacatcaactccgtgtgggaggacctgctggaagacaactgtacccccat

SEQ ID NO: 114791 - DNA, 80 bp, synthetic construct
  source 1..80: mol_type = other DNA
tctattttagcagagcaatataaaaatgcagttggctttatgccaaatttagcagcttatcccaaatctaccaccactca

SEQ ID NO: 114792 - DNA, 80 bp, synthetic construct
  source 1..80: mol_type = other DNA
ctcctcctagtcctggccctgccacagcaggcgtatgccttggacgctgctgaacaaggggaactggggctggttatatt

SEQ ID NO: 114793 - DNA, 80 bp, synthetic construct
  source 1..80: mol_type = other DNA
tcttagctccggatcttggtccacggtcagcgatgagggcgacagcgttgtctgttgctccatgtcctactcatggacgg

SEQ ID NO: 114794 - DNA, 80 bp, synthetic construct
  source 1..80: mol_type = other DNA
tcttgcggtacacggctccctggtcgggcagaaacttaaaagcccctctgctctcgttgtccacgtggaacttctccatc

SEQ ID NO: 114795 - DNA, 80 bp, synthetic construct
  source 1..80: mol_type = other DNA
cagctacgggaatatggctggggtggcacttattttttacacactgctgacagttctgcagcccgagactgggaaacaga

SEQ ID NO: 114796 - DNA, 80 bp, synthetic construct
  source 1..80: mol_type = other DNA
gcaatacgattacctgctacctcaaggcacaggcagcctgtcgtgcagcaaaactcaaggactatgacatgttggtctgc

SEQ ID NO: 114797 - DNA, 80 bp, synthetic construct
  source 1..80: mol_type = other DNA
cctggggagcagacaccgcggcgtgtggggacatcatcttgggcctacccgtctccgcccgaagggtgaaggagatactt

SEQ ID NO: 114798 - DNA, 80 bp, synthetic construct
  source 1..80: mol_type = other DNA
tgaagaacttaatcacacctgtaacgaacagaacctcacattgctgtttgttaatatgacacacaacgggccatattttg

SEQ ID NO: 114799 - DNA, 80 bp, synthetic construct
  source 1..80: mol_type = other DNA
gaggtcccaagactgatcacaagcctcgggtggaacctcatcaagttcagaaccgggatggatgtgtattccctagaggc

SEQ ID NO: 114800 - DNA, 80 bp, synthetic construct
  source 1..80: mol_type = other DNA
ttggtggcatgaggttcagaaagagggaagggatgaagtttctgtattgcaggagaaatattcactggaacaggtgaaaa

SEQ ID NO: 114801 - DNA, 80 bp, synthetic construct
  source 1..80: mol_type = other DNA
cggggggatggcgtgatgtcgacacgctgtccttgcggagcagcactagccggtcatgtgaagaatgggtccatgcggct

SEQ ID NO: 114802 - DNA, 80 bp, synthetic construct
  source 1..80: mol_type = other DNA
cctcgagctcattacatcttgctcctctaacgtctccgtggcacaggacaacaaggggaagaggtactattacctcaccc

SEQ ID NO: 114803 - DNA, 80 bp, synthetic construct
  source 1..80: mol_type = other DNA
cgagccgccctcgtacgaggaggccctcaaggccggcatgcccaccacacgcatcattgcgccaatggccacgggtgtca

SEQ ID NO: 114804 - DNA, 80 bp, synthetic construct
  source 1..80: mol_type = other DNA
tactgtctttcagtaggctgcgtggtcatctgcggcagggtttctactagtggccagccagctctaattcctgatcggga

SEQ ID NO: 114805 - DNA, 80 bp, synthetic construct
  source 1..80: mol_type = other DNA
atgggtgcattcggggtgaaattatgtgcattttggattggatttttaagttggcaatattgccgccaagatcccgtctt

SEQ ID NO: 114806 - DNA, 80 bp, synthetic construct
  source 1..80: mol_type = other DNA
gcggaccagaaaccccgcaaaatcaagcgggttaaaaaaaaggatgaggtggacgagggggcagtagagtttgtgcgcga

SEQ ID NO: 114807 - DNA, 80 bp, synthetic construct
  source 1..80: mol_type = other DNA
cagtttaagcagaaggccttaggcctcctacagaatacagccaagcaggcagaagaactgaaaccagcggttcagtctgc

SEQ ID NO: 114808 - DNA, 80 bp, synthetic construct
  source 1..80: mol_type = other DNA
cggacgggctgtagtgcgagggcataagcttgagggacaccgcggtccccccaaggcccgtcgtgcgggacccgacgacc

SEQ ID NO: 114809 - DNA, 80 bp, synthetic construct
  source 1..80: mol_type = other DNA
agcccttggcgtgctgaatatcgctagcaagcaggcccaggaggcgacgccggtggtgaagtccaactttgctaaactcg

SEQ ID NO: 114810 - DNA, 80 bp, synthetic construct
  source 1..80: mol_type = other DNA
gcccccgtcgtcctggagtttgacagcgaattcgagatgctgctggccttcatgaccttcgtcaagcagtacggccccga

SEQ ID NO: 114811 - DNA, 80 bp, synthetic construct
  source 1..80: mol_type = other DNA
cgaggccaaaattactgacatcatggaacctgaacatgccctactggctaagtcaatcttcaaactaacataccaaaaca

SEQ ID NO: 114812 - DNA, 80 bp, synthetic construct
  source 1..80: mol_type = other DNA
cggttgaggtcctgaatgtgtctccgctgggagaaaaccaccggccctcggactcggaacctgaaagagagttcaacaga

SEQ ID NO: 114813 - DNA, 80 bp, synthetic construct
  source 1..80: mol_type = other DNA
atgatattgagagccataacattcacaacgacatcaaacgtggttgttccgttgatggccctgctaacacccgggctgag

SEQ ID NO: 114814 - DNA, 80 bp, synthetic construct
  source 1..80: mol_type = other DNA
tttgacacgcacgccatacttcgttagggcgcacgcccttttgaggatgtgtgcattggtgaagcaactcgcgggaggca

SEQ ID NO: 114815 - DNA, 80 bp, synthetic construct
  source 1..80: mol_type = other DNA
gttggggctggggttggggctggggttggagctggagttgtggctgggtttgtggctggggttgtggctggggttggggc

SEQ ID NO: 114816 - DNA, 80 bp, synthetic construct
  source 1..80: mol_type = other DNA
gccctggggcggctgtccgccgcgcccgcctcccccgcggtgggcgacgaccccgacgccgcccgccacgccgacgccga

SEQ ID NO: 114817 - DNA, 80 bp, synthetic construct
  source 1..80: mol_type = other DNA
ggtggctgaatccatttggtcagaaaatacaatttttttgttatcaagtttggtagcaaaggatccatagagggcgttgg

SEQ ID NO: 114818 - DNA, 80 bp, synthetic construct
  source 1..80: mol_type = other DNA
aaaaagcttgttgagagcgccctctactgtcatacgcaggcacaccttcatggttgaaaaagatcaggttcccgtgtcac

SEQ ID NO: 114819 - DNA, 80 bp, synthetic construct
  source 1..80: mol_type = other DNA
catggtcgctctatgccgtaacgacagccgttcttacccctttgctgaaacatctaatcacgtcagactacatcaacact

SEQ ID NO: 114820 - DNA, 80 bp, synthetic construct
  source 1..80: mol_type = other DNA
taccacaagcataccaggtggggtatctccatgcccccaccgggagtgggaaaagcaccaaagttccagcagcgtatgct

SEQ ID NO: 114821 - DNA, 80 bp, synthetic construct
  source 1..80: mol_type = other DNA
tatggagaatgctggacccaagacagggcttagttgtcctgaggaaggttaagagggtggtggcgagtctgatgagaggt

SEQ ID NO: 114822 - DNA, 80 bp, synthetic construct
  source 1..80: mol_type = other DNA
cgccacactccagtgaattcatggttgggcaacatcattatgtacgcgcctaccatatgggtgcgcatggtgatgatgac

SEQ ID NO: 114823 - DNA, 80 bp, synthetic construct
  source 1..80: mol_type = other DNA
tagtggcacagagatagtggatgttatgtgtcatgccactctaacccacagactcatgtcacctctaagagctccaaact

SEQ ID NO: 114824 - DNA, 80 bp, synthetic construct
  source 1..80: mol_type = other DNA
gtaatgtctacttaggtgctcttacctaccaacctgtaattatcactattgcatttaatcaggaaactgaaaatggatgt

SEQ ID NO: 114825 - DNA, 80 bp, synthetic construct
  source 1..80: mol_type = other DNA
attgctggtatgccatggagatcaggccagtccactcgcagggtggtctggtgcgttccatggtagtggctgacaacggc

SEQ ID NO: 114826 - DNA, 80 bp, synthetic construct
  source 1..80: mol_type = other DNA
cagactttggcactacccctgcactgtcaatttcaccatctttaaggtcaggatgtacgtggggggtgtggagcacaggc

SEQ ID NO: 114827 - DNA, 80 bp, synthetic construct
  source 1..80: mol_type = other DNA
agagggccgtgcatgccgacatgggctactggatagaaagccaaaagaatggaagttggaagctagaaaaagcatccctc

SEQ ID NO: 114828 - DNA, 80 bp, synthetic construct
  source 1..80: mol_type = other DNA
gtcaaggctcacgtgcgagagagcctcctcagcatcctcctgcgggactggctcgccatgcgaaagcagatccgctcgcg

SEQ ID NO: 114829 - DNA, 80 bp, synthetic construct
  source 1..80: mol_type = other DNA
ggcgccaaactataagtttgcgctgtggagggtgtccgccgaggactacgtggaggttcgtagggttggcgatttccatt

SEQ ID NO: 114830 - DNA, 80 bp, synthetic construct
  source 1..80: mol_type = other DNA
gtacctggcgggactttccaccttgccgggaaaccccgcagtggcatcaatgatggctttcagcgccgcattgactagcc

SEQ ID NO: 114831 - DNA, 80 bp, synthetic construct
  source 1..80: mol_type = other DNA
tctggactacatggacaacgttaatccctttaaccaccaccgcaatgcgggcctgcgttaccgctccatgttgttgggaa

SEQ ID NO: 114832 - DNA, 80 bp, synthetic construct
  source 1..80: mol_type = other DNA
gttgttgaaatactggtaaccgggaaaccgggtcacgggtacgcccaggctcggggcgacgtacacgctaaccaccaact

SEQ ID NO: 114833 - DNA, 80 bp, synthetic construct
  source 1..80: mol_type = other DNA
cggccgtggtcaacaacatcaacggcatgctggagggctatatcaataatctctttggaaccatagaacgcctgcgagag

SEQ ID NO: 114834 - DNA, 80 bp, synthetic construct
  source 1..80: mol_type = other DNA
acccccggcaccatgataaggccgaacatggtgcaagaacgggaggcccccggaagcatgcttccgggaggaaggaagag

SEQ ID NO: 114835 - DNA, 80 bp, synthetic construct
  source 1..80: mol_type = other DNA
atttcatacccgttgagaacatggaaacgacccagcgttccccctctttcactgacaactccacaccaccagctgtgcct

SEQ ID NO: 114836 - DNA, 80 bp, synthetic construct
  source 1..80: mol_type = other DNA
gcgccagctctctccacggaggaagcttgccgcctgacgcccccgcactcggccagatccaagtttggctatggggcaaa

SEQ ID NO: 114837 - DNA, 80 bp, synthetic construct
  source 1..80: mol_type = other DNA
catgtgaagtggtgccggcccgctcagtgtgcggccctgtctactgcttcacgcccagccctgttgtggtaggaaccact

SEQ ID NO: 114838 - DNA, 80 bp, synthetic construct
  source 1..80: mol_type = other DNA
cagcctccaggcccccccctcccgggagagccatagtggtctgcggaaccggtgagtacaccggaattgccgggaagact

SEQ ID NO: 114839 - DNA, 80 bp, synthetic construct
  source 1..80: mol_type = other DNA
gatatcattaaataagattttgccagctcttggcatgaaatttctagaaattttaaagggtccaggaacgtctgagcggc

SEQ ID NO: 114840 - DNA, 80 bp, synthetic construct
  source 1..80: mol_type = other DNA
tccatccatgcaggaagagagtggatgacaacagaggacatgttggaggtctggaaccgtgtttggatagaggagaatga

SEQ ID NO: 114841 - DNA, 80 bp, synthetic construct
  source 1..80: mol_type = other DNA
ctgttacctgatgggatactgccgagcccgtctggccccgcgcacgtggtgccgcttgctgcaggtgtccggcggaacct

SEQ ID NO: 114842 - DNA, 80 bp, synthetic construct
  source 1..80: mol_type = other DNA
tggcccctccacctagttgggataccatgtggaaatgtctgattcgcctcaagcccacactgcacggccccactcccctc

SEQ ID NO: 114843 - DNA, 80 bp, synthetic construct
  source 1..80: mol_type = other DNA
agtgtcgtcgcaggcgccctgctcccagaggtgatagtcggtgcgctttttggatagcggatttggcagggcaaatgtaa

SEQ ID NO: 114844 - DNA, 80 bp, synthetic construct
  source 1..80: mol_type = other DNA
ctcaaccaataacatcgtctggcagctcaaggaagccgtgcttcatgctcctgggtgcgtcccctgcgaagaccgagaca

SEQ ID NO: 114845 - DNA, 80 bp, synthetic construct
  source 1..80: mol_type = other DNA
tcgcatggtcctaatgactcatttcttctccattctcatggcccaagacaccctgggccagaaccttaactttgagatgt

SEQ ID NO: 114846 - DNA, 80 bp, synthetic construct
  source 1..80: mol_type = other DNA
gctgccaaacctaaagttaacggctcagggtgtctggagcgactatctagctgccaccccatcacccacttcgatcaggg

SEQ ID NO: 114847 - DNA, 80 bp, synthetic construct
  source 1..80: mol_type = other DNA
tggcctgcaccgccaggtgcacggtcactaaccccctgtacgtgtggcgccagcgacctctacctcatcaccaggaacgc

SEQ ID NO: 114848 - DNA, 80 bp, synthetic construct
  source 1..80: mol_type = other DNA
gctacagaggaggctaggaatctagcttttagcttaatgaccagacaccgtcctgagtgtattacttttcaacagatcaa

SEQ ID NO: 114849 - DNA, 80 bp, synthetic construct
  source 1..80: mol_type = other DNA
aggacgtgactgtcctcggatcgcaagagggtgcaatgcatacagccctggctggagccacggaagtggatgcaggaaat

SEQ ID NO: 114850 - DNA, 80 bp, synthetic construct
  source 1..80: mol_type = other DNA
aggcaaaaggtacagagtgaaagtaaatactacaaattctcaagctgtaaaaattcagccatataccagacctactactc

SEQ ID NO: 114851 - DNA, 80 bp, synthetic construct
  source 1..80: mol_type = other DNA
gagttactgttacgtggcttccgttagtgatctgtcaacaaaggcggcctgtcccactatgggagaggctcacaatgata

SEQ ID NO: 114852 - DNA, 80 bp, synthetic construct
  source 1..80: mol_type = other DNA
cccaaggagacgccggacagtgggtctgagcgagagcaccatatcagaagccctccagcaactggccatcaagacctttg

SEQ ID NO: 114853 - DNA, 80 bp, synthetic construct
  source 1..80: mol_type = other DNA
gtgccccaccgactgcttcagaaaacacccggatgctacgtatgcgaggtgcggctctggcccttggctcacaccaaggt

SEQ ID NO: 114854 - DNA, 80 bp, synthetic construct
  source 1..80: mol_type = other DNA
caacggggtgtgctggaccgcttaccacggggctggaacaaggaccattgcatcacccaagggtcctgtcatccagatgt

SEQ ID NO: 114855 - DNA, 80 bp, synthetic construct
  source 1..80: mol_type = other DNA
ggttgttaaactcggcccgctcgttgttgaggtactttaccaagagctccggcggctggttgtacccgtgccccaccaga

SEQ ID NO: 114856 - DNA, 80 bp, synthetic construct
  source 1..80: mol_type = other DNA
tttatttggggctcctttggttattgccatggaacttacatccgttttttcacaaaattccggacttactttggggttaa

SEQ ID NO: 114857 - DNA, 80 bp, synthetic construct
  source 1..80: mol_type = other DNA
attgtaccgcgacattacgcagaatcccccagtccgttgattgtagtatcttacaacggatcctctgcctggggaggacg

SEQ ID NO: 114858 - DNA, 80 bp, synthetic construct
  source 1..80: mol_type = other DNA
tggtggttagcgggtacagggccttcatggggttgctctgcagccgcatgacgtagcgaaaggcgaagaaggccgccgcc

SEQ ID NO: 114859 - DNA, 80 bp, synthetic construct
  source 1..80: mol_type = other DNA
aagccgttacgcgtgttactttcgcgacctcccgaccggagaagcaagccccggcgccttctccgccttccgtggtggcc

SEQ ID NO: 114860 - DNA, 80 bp, synthetic construct
  source 1..80: mol_type = other DNA
tggctctttgaaaacacttccttcgcagtctccaacgcctgcgccaacgacggtattgaaatacccaacaaccttaccag

SEQ ID NO: 114861 - DNA, 80 bp, synthetic construct
  source 1..80: mol_type = other DNA
caggcacgcggatgtaatacccgtgcgcaggagaggagacaccagaggagctctcttgagccctagaccaatatccattc

SEQ ID NO: 114862 - DNA, 80 bp, synthetic construct
  source 1..80: mol_type = other DNA
gcacgtggatgaactcttctggctacaccaagacttgcggcgcaccaccctgccgtactagagctgacttcaacgccagc

SEQ ID NO: 114863 - DNA, 80 bp, synthetic construct
  source 1..80: mol_type = other DNA
ccgagaagctctttaccaacagttcgatgagatggaagaatgctcaaagcatctcccattgatcgagcatggcttgcaac

SEQ ID NO: 114864 - DNA, 80 bp, synthetic construct
  source 1..80: mol_type = other DNA
ggcagcagctggctggcggtgatccaatggaaaagcccgtcgggactgaacgtctcatgggcggccgccaccagggcgca

SEQ ID NO: 114865 - DNA, 80 bp, synthetic construct
  source 1..80: mol_type = other DNA
agtgcaggtcctggatgcccattaccaggacgtgctcaaggaggttaaggcggcggcgtcaaaagtgaaggctaacttgc

SEQ ID NO: 114866 - DNA, 80 bp, synthetic construct
  source 1..80: mol_type = other DNA
gcaggacagcaggcgtgattattatgttgattccaacagcaatggcgttccatttaaccacacgtaatggagaaccacac

SEQ ID NO: 114867 - DNA, 80 bp, synthetic construct
  source 1..80: mol_type = other DNA
gtgggagacagctcggcacactccagtaaattcctggttggggaacataatcatgtacgctcctgcaatctgggtacgta

SEQ ID NO: 114868 - DNA, 80 bp, synthetic construct
  source 1..80: mol_type = other DNA
gctggggtggaaatgaaacggatgtattcttgttgcaaagtgccaggcctcctcgtggcgcctggttcggatgcacatgg

SEQ ID NO: 114869 - DNA, 80 bp, synthetic construct
  source 1..80: mol_type = other DNA
actgcaacgacggtgttgaacttccaaacaacctttccagtggactgagttacgatacacatagagctaagctcgtcctc

SEQ ID NO: 114870 - DNA, 80 bp, synthetic construct
  source 1..80: mol_type = other DNA
ttcgtgcaagtcaaacacattgaccgcgtgggccccgctggcgtttcgccggcgcctccgccaaacaacaccgactcgag

SEQ ID NO: 114871 - DNA, 80 bp, synthetic construct
  source 1..80: mol_type = other DNA
gctgcttgttctcccgccgcgagctctcgccctcgactacgagcaggcagcttcgttgggggtgttggttaccttactgg

SEQ ID NO: 114872 - DNA, 80 bp, synthetic construct
  source 1..80: mol_type = other DNA
caaggggagtttaccatttccccaaataatacaccgcaattaggaccacatcttaatcctttcttggctcatttgtctag

SEQ ID NO: 114873 - DNA, 80 bp, synthetic construct
  source 1..80: mol_type = other DNA
gcgacgaggaagacttcggaacggtcccaggccagaggtaggcgccaaccaatacctaaggcgcgccagaaccaaggccg

SEQ ID NO: 114874 - DNA, 80 bp, synthetic construct
  source 1..80: mol_type = other DNA
ggaggcagtaatatttctaaggacggtttgcagattggaactgacacaacaccagatgctgtaaaaccaatatatgcaga

SEQ ID NO: 114875 - DNA, 80 bp, synthetic construct
  source 1..80: mol_type = other DNA
tgtgagagcacttgaggacggagtgaactacgcaacagggaatcttcctggttgctccttctctatcttcctcctcgctc

SEQ ID NO: 114876 - DNA, 80 bp, synthetic construct
  source 1..80: mol_type = other DNA
ttgattgtgatgctactctttgccggcgttgacggagagacccgcgtggcggggggggcggcggcccgtagcactcacag

SEQ ID NO: 114877 - DNA, 80 bp, synthetic construct
  source 1..80: mol_type = other DNA
agagtacaagcgttgcatctttctctgtctgtggtggctccagtactttttggccagggccgaggcagcgttgcatacat

SEQ ID NO: 114878 - DNA, 80 bp, synthetic construct
  source 1..80: mol_type = other DNA
tggggggttacagcgacaccggccgaccccctggcggtcttccagccggcccttagataaggtggcagttggtggtcgga

SEQ ID NO: 114879 - DNA, 80 bp, synthetic construct
  source 1..80: mol_type = other DNA
acttggtcgtgatatgcgagagcgagggggtcgaccaggacaaagctgcactgagagccttcaccgaggctatgaccaga

SEQ ID NO: 114880 - DNA, 80 bp, synthetic construct
  source 1..80: mol_type = other DNA
ccaccacccaatctttcctggggacgtgcatcaatggggtcttgtggacagtctaccatggtgctgggccaaggactatc

SEQ ID NO: 114881 - DNA, 80 bp, synthetic construct
  source 1..80: mol_type = other DNA
ttacgccgtctaggctgtttctcagaatacggttcacccgaaatcggcacatcatctgcttttacgtcttccgtaaccac

SEQ ID NO: 114882 - DNA, 80 bp, synthetic construct
  source 1..80: mol_type = other DNA
catccagtctcacggggaaccgcgaaattacggtggttagtggaaaggcgtttcctcgagccagtgggaaaggttgtgga

SEQ ID NO: 114883 - DNA, 80 bp, synthetic construct
  source 1..80: mol_type = other DNA
agtctcacctggttaggttcttcacccagcaacccttcctggtcgagcgggaccgggctgcaaccacctacaccgtgtac

SEQ ID NO: 114884 - DNA, 80 bp, synthetic construct
  source 1..80: mol_type = other DNA
acgggcctgacctccccaactgagacatctgacccggagcctcccccggtggacggcggctcagacgatgagtcctactc

SEQ ID NO: 114885 - DNA, 80 bp, synthetic construct
  source 1..80: mol_type = other DNA
gaccccgtggtcgataaggaggacgaacgcgagccttcaataccatcagagtacttgcttcccaaaagcagattcccacc

SEQ ID NO: 114886 - DNA, 80 bp, synthetic construct
  source 1..80: mol_type = other DNA
gaggatttgctggaagacaatgtgacacctattcctactactataatggcaaagaatgaggtgttttgtgtggacgtctc

SEQ ID NO: 114887 - DNA, 80 bp, synthetic construct
  source 1..80: mol_type = other DNA
acaaccagaaatatgagaatatatgacggagcgctttaccatggccttattatgatggcatatcaggcgtacgatgaaac

SEQ ID NO: 114888 - DNA, 80 bp, synthetic construct
  source 1..80: mol_type = other DNA
gtaggcatattccgagccgcagtgtgtacgcgtggagtagcaaaggcagtggatttcgtgccggtcgaatctctcgaaac

SEQ ID NO: 114889 - DNA, 80 bp, synthetic construct
  source 1..80: mol_type = other DNA
agcatacgcacagcagacccgcggtctcatctctacccttgtcgtgagcctcactggccgtgataagaacgagactgccg

SEQ ID NO: 114890 - DNA, 80 bp, synthetic construct
  source 1..80: mol_type = other DNA
cttggtccttggcctaatcaccatctttactcttactccagcttataaacagcttctcataagcatgctctggtggatac

SEQ ID NO: 114891 - DNA, 80 bp, synthetic construct
  source 1..80: mol_type = other DNA
ggtggcgggagatgggcggcaacatcacacgggtggagtccgaaacaaaggttgtgattcttgattcattcgaacctctg

SEQ ID NO: 114892 - DNA, 80 bp, synthetic construct
  source 1..80: mol_type = other DNA
gaccaaggtcatcacctggggagcagacaccgctgcgtgtggggacatcatcttgggtctacccgtctccgcccgaaggg

SEQ ID NO: 114893 - DNA, 80 bp, synthetic construct
  source 1..80: mol_type = other DNA
gaagctgcctgcaactggacccggggagagcgctgtgacttagaggacagggaccggtcagagcttagtccattgctgct

SEQ ID NO: 114894 - DNA, 80 bp, synthetic construct
  source 1..80: mol_type = other DNA
acaacatttgttacaccaatgctgagacatagcattgagaattcctcagtgaatgtgtccctaacagctatagccaacca

SEQ ID NO: 114895 - DNA, 80 bp, synthetic construct
  source 1..80: mol_type = other DNA
ccctgccggtgggtggttcggatgtgtttggatgaacggcactgggttcacgaagacctgcggtgcccctccctgctggg

SEQ ID NO: 114896 - DNA, 80 bp, synthetic construct
  source 1..80: mol_type = other DNA
tcgacgggatctgcgcctgatggccaacgccatatgctcttcagtcccagttgactgggttccaaccggcaggactactt

SEQ ID NO: 114897 - DNA, 80 bp, synthetic construct
  source 1..80: mol_type = other DNA
acaagcgccaacagcagcgactgactacccactgacccagctccctatttaaaggcaccttacactgacgtaatgaccaa

SEQ ID NO: 114898 - DNA, 80 bp, synthetic construct
  source 1..80: mol_type = other DNA
atcgcatcagccagctggcccacctggtttacgtcctgcactttgcgtgtctggtgtattttgcggcccatttttgcacc

SEQ ID NO: 114899 - DNA, 80 bp, synthetic construct
  source 1..80: mol_type = other DNA
ggcactttagtcagtgtccgcggcgttcttttgaacgtgagtgtgttgaggaaaagacagcttaggagaacaagagctgg

SEQ ID NO: 114900 - DNA, 80 bp, synthetic construct
  source 1..80: mol_type = other DNA
ccacatccgctccgtgtgggaggacttgctggaggacactgtgacaccaattgacaccaccgtcatggcaaagaatgagg

SEQ ID NO: 114901 - DNA, 80 bp, synthetic construct
  source 1..80: mol_type = other DNA
ccatggacgtcgtctggatgcggtttgacgtgccgtcctcgtgcgccgagatgcggatctacgaagcttgtctgtatcac

SEQ ID NO: 114902 - DNA, 80 bp, synthetic construct
  source 1..80: mol_type = other DNA
catgggagactgcccggcacactccagtgaattcctggttggggaacattatcatgtatgctcctacaatctgggtgcgc

SEQ ID NO: 114903 - DNA, 80 bp, synthetic construct
  source 1..80: mol_type = other DNA
cacgggtgcgggcgccgccgaatccggcggtccgacgtcccctggtgagccggccccctcagagacaggttccgcctcct

SEQ ID NO: 114904 - DNA, 80 bp, synthetic construct
  source 1..80: mol_type = other DNA
gccatgtggacgtgatggtgggtgccgctactctctgctccgccctttacatcggcgatttgtgtgggggagccttctta

SEQ ID NO: 114905 - DNA, 80 bp, synthetic construct
  source 1..80: mol_type = other DNA
ctaccctacgccatcatgggggatgcctatggcttccaatattcaccacagcaaagggtggaacgcctgctcaaaatgtg

SEQ ID NO: 114906 - DNA, 80 bp, synthetic construct
  source 1..80: mol_type = other DNA
gtatgggcaaggccggggtatgacccacccctcctggagacttggaagcagcctgattatgaccccccccaggtgtcagg

SEQ ID NO: 114907 - DNA, 80 bp, synthetic construct
  source 1..80: mol_type = other DNA
gacagagaggctttaccttggtggacccatgttcaactcgcgaggccagctctgcggaacacgcagatgccgggcgagcg

SEQ ID NO: 114908 - DNA, 80 bp, synthetic construct
  source 1..80: mol_type = other DNA
gtttactgtttcacgcccagccccgtagtagtggggacgactgacagggctggagtccccacgtacacctgggaggcaaa

SEQ ID NO: 114909 - DNA, 80 bp, synthetic construct
  source 1..80: mol_type = other DNA
ctaaaagcatcccagctgacatacactgtaatgaacccggacgctggcaatgacaatgtattagccaccgctcataacca

SEQ ID NO: 114910 - DNA, 80 bp, synthetic construct
  source 1..80: mol_type = other DNA
ctggcaaatacaaggcagaaagttacaaaaatgaaattaagaaatcagtatttaaaactaataaaactacatttgaagat

SEQ ID NO: 114911 - DNA, 80 bp, synthetic construct
  source 1..80: mol_type = other DNA
gctgttttcgtgggcctggcgctcttgaccttgtcaccacactacaaagcgttcctcgctaggctcatatggtggttgca

SEQ ID NO: 114912 - DNA, 80 bp, synthetic construct
  source 1..80: mol_type = other DNA
cacgaggggaatgctagtgatgaccagcggccatattgttggcactatgccctacgcccgtgtggcattgtgccagcgaa

SEQ ID NO: 114913 - DNA, 80 bp, synthetic construct
  source 1..80: mol_type = other DNA
cagacctcgggcaaaatatgctgtatgcaaattcggcccatgcgttagatatgacatttgaagttgaccccatggaagag

SEQ ID NO: 114914 - DNA, 80 bp, synthetic construct
  source 1..80: mol_type = other DNA
cgcccgaagagggaacctcattctacttggccccgctgacgatgcaaagggcatgggctggtcgttactagcgcccatta

SEQ ID NO: 114915 - DNA, 80 bp, synthetic construct
  source 1..80: mol_type = other DNA
ccgccaggcgttcagaaaacgctgctgcatgtccgcgccggggccggccggggccgcgacgtacgccccgtacggattcg

SEQ ID NO: 114916 - DNA, 80 bp, synthetic construct
  source 1..80: mol_type = other DNA
tgtgcgttgccccctctggggcaaccgccggtcccccctcctaggaggaaaagaacggtgttgcttgatagctccactgt

SEQ ID NO: 114917 - DNA, 80 bp, synthetic construct
  source 1..80: mol_type = other DNA
ctcactgtgtgctacgtgctcactggacgatcggccgacttggaactggagagagcaaccgatgtcaaatgggaagacca

SEQ ID NO: 114918 - DNA, 80 bp, synthetic construct
  source 1..80: mol_type = other DNA
gtgcctattcaagaaagtaacggggtgctatccctgaatgtcataacaggacaatcatacttttcatttaatggaatgat

SEQ ID NO: 114919 - DNA, 80 bp, synthetic construct
  source 1..80: mol_type = other DNA
aaccaaacaccaattcctacaaccatcatggcgaaaaatgaagtgttttgcgctgacgtttcgaagggagggcgcaagcc

SEQ ID NO: 114920 - DNA, 80 bp, synthetic construct
  source 1..80: mol_type = other DNA
cagagcgtggaagagtcgggcgcgtgctgtgagggcctcactcatcgcccagggagggagagcggccacttgtggccgct

SEQ ID NO: 114921 - DNA, 80 bp, synthetic construct
  source 1..80: mol_type = other DNA
tgttatctgactttaagacatggctcacctctaagatcatgccagcacttcctgggttgcccttcatttcctgtcaaaag

SEQ ID NO: 114922 - DNA, 80 bp, synthetic construct
  source 1..80: mol_type = other DNA
gcgacgagaaagacttcggaacggtcccagcccagagggaggcggcagcccataccaaaggcgcgccaccagacgggccg

SEQ ID NO: 114923 - DNA, 80 bp, synthetic construct
  source 1..80: mol_type = other DNA
ccgggacagggaaggatacatggttatgcgggccagtggaagggacgctgcaagccaggtcagagtacaaaacggaacgt

SEQ ID NO: 114924 - DNA, 80 bp, synthetic construct
  source 1..80: mol_type = other DNA
ctgacagcacctcagattctgggctgccaccggccagcaaggcgtcatccgaacctgtcgtcgagagcgacgcggcgtca

SEQ ID NO: 114925 - DNA, 80 bp, synthetic construct
  source 1..80: mol_type = other DNA
gaactgaaacatggatgtcatcagaaggggcctggaaacatgcacagagaattgaaacttgggtcttgagacatccaggc

SEQ ID NO: 114926 - DNA, 80 bp, synthetic construct
  source 1..80: mol_type = other DNA
tcatacttagctccctcacaattaccagtctcctccgtcgactccaccagtggatcaacgaggactggtccactccatgt

SEQ ID NO: 114927 - DNA, 80 bp, synthetic construct
  source 1..80: mol_type = other DNA
gagctctgtgggatgtcccgtcaccaaaggtatacccaaagtgtgaaaccaaaccaggaatttatcgaattatgacaaga

SEQ ID NO: 114928 - DNA, 80 bp, synthetic construct
  source 1..80: mol_type = other DNA
agcttcttttcatcaggcgccaaacagaacatccagctcatcaacaccaacggtagttggcacatcaataggacggcctt

SEQ ID NO: 114929 - DNA, 80 bp, synthetic construct
  source 1..80: mol_type = other DNA
aacctgcatgaacatgtggcaggggaccttccccatcaactgttacacggaaggagcctgcgtacccaagcctgcgccaa

SEQ ID NO: 114930 - DNA, 80 bp, synthetic construct
  source 1..80: mol_type = other DNA
ttcctacacaactgcgtaacctttaaatgcggaacagtcttttcacaatcttcatttgattccccaacacccaacgcgag

SEQ ID NO: 114931 - DNA, 80 bp, synthetic construct
  source 1..80: mol_type = other DNA
ccaaggctttggcacccccacccagttgggacaccatgtggaagtgcctcctccgcctcaaaccaactttgcggggaccg

SEQ ID NO: 114932 - DNA, 80 bp, synthetic construct
  source 1..80: mol_type = other DNA
tcgccgcggccattggcacgatcccgggcatagcttccgttgcgctgcaagcgtcgcagcgccgttaatgtgcaaataaa

SEQ ID NO: 114933 - DNA, 80 bp, synthetic construct
  source 1..80: mol_type = other DNA
ttcaggttacaattcctattggaagtaattatactttagtgggaccttcaccgccagtgagctggcatactacaaaaaat

SEQ ID NO: 114934 - DNA, 80 bp, synthetic construct
  source 1..80: mol_type = other DNA
cccgagccttctccgtcccccctggggaccacaccgacaaagagcgcccctagccccccgatctcgccccgcaggaggtg

SEQ ID NO: 114935 - DNA, 80 bp, synthetic construct
  source 1..80: mol_type = other DNA
tagttaagaaaattttgaggagaaagtcaggccgggaagttcccgccaccggaagttgagtagacggtgctgcctgcgac

SEQ ID NO: 114936 - DNA, 80 bp, synthetic construct
  source 1..80: mol_type = other DNA
gcaccaaaacatcgtggacgtgcagtacctatacgggatagggtcggccgtcgtctcgtgggctattaagtgggagtacg

SEQ ID NO: 114937 - DNA, 80 bp, synthetic construct
  source 1..80: mol_type = other DNA
tcaggaggggcttcagcctacaacaccaggggttttgcgggtctcttcaaccttggagcgtcccagaaaatccagctcgt

SEQ ID NO: 114938 - DNA, 80 bp, synthetic construct
  source 1..80: mol_type = other DNA
cgcatgttcgtgggtggcgtcgagcacaggttcgatgccgcctgcaactggactaggggagagcgctgtgagctcgatga

SEQ ID NO: 114939 - DNA, 80 bp, synthetic construct
  source 1..80: mol_type = other DNA
agcgtgggagctaaagacgttaaagtaaagccacaataagcagcttgaaaaactggagtaacacaatgtaaaatgtgcag

SEQ ID NO: 114940 - DNA, 80 bp, synthetic construct
  source 1..80: mol_type = other DNA
aaaagtcgacaccaaggcacccgaaccagccgaaggagtgaaactggttttgaacgaaaccacaaactggctgtggacct

SEQ ID NO: 114941 - DNA, 80 bp, synthetic construct
  source 1..80: mol_type = other DNA
acacactgacgtgcttcctcaaggccacagcggccgccaaggccgccggcctgaaggactgcactatgctggtgaacggt

SEQ ID NO: 114942 - DNA, 80 bp, synthetic construct
  source 1..80: mol_type = other DNA
aaacttggggtaccgcccttgcgagtctggagacatcgggccagggacgtccgcgctaaactactgtcccaggcgtggag

SEQ ID NO: 114943 - DNA, 80 bp, synthetic construct
  source 1..80: mol_type = other DNA
tgtatccacagtagatcattttgtaaacgcaattgaagagcgtggatttccgccaacggccggtcagccaccggcgacta

SEQ ID NO: 114944 - DNA, 80 bp, synthetic construct
  source 1..80: mol_type = other DNA
ccagctcttcagccagccagttgtcagcgccttccctgatggcgacaggcacttcccataattcctggaacgactccccg

SEQ ID NO: 114945 - DNA, 80 bp, synthetic construct
  source 1..80: mol_type = other DNA
caatgggaaacaaaagaaaagcaaggaactaccggagtccaaacggaaaaagatgtcacaaaaacatttggtgtggccgc

SEQ ID NO: 114946 - DNA, 80 bp, synthetic construct
  source 1..80: mol_type = other DNA
agcagtggccagcgtcctcctctgggtggcagagatgccgccccaatggatagccgcctccatcatactggagttttttc

SEQ ID NO: 114947 - DNA, 80 bp, synthetic construct
  source 1..80: mol_type = other DNA
ttgtgctctttgctgccctcttgttgctgtggattggtggggtggactacggatacatggcagggatagccctgatattc

SEQ ID NO: 114948 - DNA, 80 bp, synthetic construct
  source 1..80: mol_type = other DNA
agactttgtagaaggggtttcaggaggaagttgggttgacatagtcttagaacatggaagctgtgtgacgacgatggcaa

SEQ ID NO: 114949 - DNA, 80 bp, synthetic construct
  source 1..80: mol_type = other DNA
cattctcatggtccaagacaccctggaccagaacctcaactttgagatgtatggatcagtatactccgtgaatcctttgg

SEQ ID NO: 114950 - DNA, 80 bp, synthetic construct
  source 1..80: mol_type = other DNA
gttggtatgcggagatgatttggtcgtgatcgctgagagtgcaggcgtgcccgaggacgaagccgccctgcgagccttca

SEQ ID NO: 114951 - DNA, 80 bp, synthetic construct
  source 1..80: mol_type = other DNA
ggcggtgctgttggaccgagattttgtggaggccatcgggagctacgtaaaaaacttcctgttgatcgatacggtggtgt

SEQ ID NO: 114952 - DNA, 80 bp, synthetic construct
  source 1..80: mol_type = other DNA
caaattaacggtagttgtgggcgacacaattggggtcttagagcaaggaaaaagaacactaacaccacaacccatggagc

SEQ ID NO: 114953 - DNA, 80 bp, synthetic construct
  source 1..80: mol_type = other DNA
ccttcttggcagttggaggtgttctcttgtttctgtcagtcaacgtccatgccgacacaggctgtgccattgacatgagt

SEQ ID NO: 114954 - DNA, 80 bp, synthetic construct
  source 1..80: mol_type = other DNA
ccgcatgtactccggaaaacgcaacggtgccgcggacgacctcatggtcgcggtcatcatggccatttacctggcggccc

SEQ ID NO: 114955 - DNA, 80 bp, synthetic construct
  source 1..80: mol_type = other DNA
tttgacaaatacaatgttgacagagagcagtatgaggtttctataattagtttattcaaagtaggggcgggtcaaaaaaa

SEQ ID NO: 114956 - DNA, 80 bp, synthetic construct
  source 1..80: mol_type = other DNA
ttaatcttactagaggagaaaacattacactaacaggtgcaggaattaataatacatggtcagtatatcaccatgatgga

SEQ ID NO: 114957 - DNA, 80 bp, synthetic construct
  source 1..80: mol_type = other DNA
acatacgtggatagaggttggggaaacggttgtggtttgtttggaaaaggaagcttggtgacatgcgcgaaatttcaatg

SEQ ID NO: 114958 - DNA, 80 bp, synthetic construct
  source 1..80: mol_type = other DNA
aataacccccgataacattactttacccgacaacaaaaatacatatgcctacatgaacggtcgggttgccgtccccagcg

SEQ ID NO: 114959 - DNA, 80 bp, synthetic construct
  source 1..80: mol_type = other DNA
ctactgcggcagcacacacagtgacgggaagttggtcgctcccgacgcagttaggtcaggaaaaattttgtgagaccaaa

SEQ ID NO: 114960 - DNA, 80 bp, synthetic construct
  source 1..80: mol_type = other DNA
actggaagttgaaagaccaacgtcaggccacaaatttgtgccactccgctagggagtgcggcctgcgcagccccaggagg

SEQ ID NO: 114961 - DNA, 80 bp, synthetic construct
  source 1..80: mol_type = other DNA
agaatccaccgtgtcttctgccttggcggagctcgctgcaaagtccttcagtagctccgagtcgtcggccgttgacagcg

SEQ ID NO: 114962 - DNA, 80 bp, synthetic construct
  source 1..80: mol_type = other DNA
agtaacacagtgtaaaatgttcagccaaaaatcactaagctgctcctttaaaaagtccagtacttctatattcagtccgt

SEQ ID NO: 114963 - DNA, 80 bp, synthetic construct
  source 1..80: mol_type = other DNA
ctccattgccgcaggcgcgcctgctggacttgtccagctggttcaccgtcagcgccggcggtggcgacatatatcacagc

SEQ ID NO: 114964 - DNA, 80 bp, synthetic construct
  source 1..80: mol_type = other DNA
ttgtcttctgtgcatgcgcaccccacagcataaaaactaaccctgtacggttctcgcataacctctgtagcacgcgttgc

SEQ ID NO: 114965 - DNA, 80 bp, synthetic construct
  source 1..80: mol_type = other DNA
ttgaaggggtcctcggtcgggccactgctatgcccctccgggcacgtcgtgggcttgttcagagccgcggtgtgtacccg

SEQ ID NO: 114966 - DNA, 80 bp, synthetic construct
  source 1..80: mol_type = other DNA
gcccagtttacatccttcaacaatccctcctcaaggtcccatacttcgttcgtgcccgcggtctattgcaggcctgcatg

SEQ ID NO: 114967 - DNA, 80 bp, synthetic construct
  source 1..80: mol_type = other DNA
gtttttatctaacccatttggggcattggccgtgggattattggttttggcgggactggtagcggccttttttgcgtacc

SEQ ID NO: 114968 - DNA, 80 bp, synthetic construct
  source 1..80: mol_type = other DNA
cgaaatacgtcgtcaagtgggagtgggtcattcttctgttcttactcctagcagatgccagggtttgcgcctgtctgtgg

SEQ ID NO: 114969 - DNA, 80 bp, synthetic construct
  source 1..80: mol_type = other DNA
atgcgaaccagaggtggacacgcaagtggtatcttgcttactcactgatccatctcacatcacagcggcagcggctgcac

SEQ ID NO: 114970 - DNA, 80 bp, synthetic construct
  source 1..80: mol_type = other DNA
tcgggtctcataccggtccgtgatgtcgggcgtgagggaagagagggtcccctctgcgtttactatccttgcctcgtggg

SEQ ID NO: 114971 - DNA, 80 bp, synthetic construct
  source 1..80: mol_type = other DNA
cggccacgtaaagaatgggactttgaagatccttggtcccaaaacgtgcagcaacacatggcacggctcattccccataa

SEQ ID NO: 114972 - DNA, 80 bp, synthetic construct
  source 1..80: mol_type = other DNA
cagtggactgacaaagaacggcaaaatggtggacaaccacccactacaaaagatgttacaaaaacattcggagtagcagc

SEQ ID NO: 114973 - DNA, 80 bp, synthetic construct
  source 1..80: mol_type = other DNA
actacccaccaaggcagtgtggcgtggtctccgcgaagactgtgtgtggcccagtgtactgtttcacccccagcccagtg

SEQ ID NO: 114974 - DNA, 80 bp, synthetic construct
  source 1..80: mol_type = other DNA
atgccgacgtcatcccggctcggagacaaggggaccggcggggagccctgctctctccaaggcctctttctagcttgaag

SEQ ID NO: 114975 - DNA, 80 bp, synthetic construct
  source 1..80: mol_type = other DNA
cggagaggccgcacgggaagaggcaggcacggcatataccggtatgtctcgcccggggaaaggccgtctggcattttcga

SEQ ID NO: 114976 - DNA, 80 bp, synthetic construct
  source 1..80: mol_type = other DNA
tgctcaaggtgccgtacttcgtgcgcgcccacggcctcattaggctctgcatgctggtgcgcaatacaacgggcggtcag

SEQ ID NO: 114977 - DNA, 80 bp, synthetic construct
  source 1..80: mol_type = other DNA
ggcaaggccgttaaccacatccactccgtgtggaaggacttgctggaagacactgaaacaccaattgacaccaccatcat

SEQ ID NO: 114978 - DNA, 80 bp, synthetic construct
  source 1..80: mol_type = other DNA
catggcaccatgacaaggaccacccatatcggacctggacctaccacggaagttatgaagtgaaaccgaccggttcagca

SEQ ID NO: 114979 - DNA, 80 bp, synthetic construct
  source 1..80: mol_type = other DNA
acggccctcaactgcaacgacagtttgaaaacggggtttttggccgcactcttttacgtcaacaaattcaacagctccgg

SEQ ID NO: 114980 - DNA, 80 bp, synthetic construct
  source 1..80: mol_type = other DNA
gacgccgagatcggaacggcgcctagcttagaggaggtgatggtaaacgtgtcggccccgcccgggggccaactggtgta

SEQ ID NO: 114981 - DNA, 80 bp, synthetic construct
  source 1..80: mol_type = other DNA
caccagctgggtgattaaatgggagtacatcgttctcctgtttctctacctggctgatgcccgtctctgcacctgtttgt

SEQ ID NO: 114982 - DNA, 80 bp, synthetic construct
  source 1..80: mol_type = other DNA
agtcgagtccgtcaagaggccactcttgagtgccagcgagtagagatttctctgagctccgctcccagagaccgagaaaa

SEQ ID NO: 114983 - DNA, 80 bp, synthetic construct
  source 1..80: mol_type = other DNA
gggcccgcgcctcctgcaagtacgctctccccctgcgcatccccccggcagcgtgcctcacctcgaaggcctaccaacag

SEQ ID NO: 114984 - DNA, 80 bp, synthetic construct
  source 1..80: mol_type = other DNA
aacaggcaacaacagccttaagtgtcctactgattgcttccgcaagcacccagacgccacctacaccagatgtgggtcag

SEQ ID NO: 114985 - DNA, 80 bp, synthetic construct
  source 1..80: mol_type = other DNA
gatagcaggtgctcactggggtgtcctaatgggcgttgcctactattccatggtggcgaactgggcgaaggtcttgcttg

SEQ ID NO: 114986 - DNA, 80 bp, synthetic construct
  source 1..80: mol_type = other DNA
cccataagcccactgagcaatacgctcattaggcatcacaacttagtgtattccaccacatcccgcagcgcagccctccg

SEQ ID NO: 114987 - DNA, 80 bp, synthetic construct
  source 1..80: mol_type = other DNA
ttgacatggcttccacatactttgacattcgcggcgtgctggaccggggtcccacttttaagccatactccggcactgcc

SEQ ID NO: 114988 - DNA, 80 bp, synthetic construct
  source 1..80: mol_type = other DNA
cgccttgcggccccaaccgttgctgtggccactccggctcgcagagttcgcggtgccaattggcagagcactttgaacag

SEQ ID NO: 114989 - DNA, 80 bp, synthetic construct
  source 1..80: mol_type = other DNA
gataccaagatgaagccttgctatggctcgtttgctagacctactaatgaaaaaggtgggcaggcgaaactaaaggaccc

SEQ ID NO: 114990 - DNA, 80 bp, synthetic construct
  source 1..80: mol_type = other DNA
caaatcaggaaatgacattgccaactgcttaagaaagaatgggaaacgggtgattcaattgagcagaaaaacttttgata

SEQ ID NO: 114991 - DNA, 80 bp, synthetic construct
  source 1..80: mol_type = other DNA
cttggccgaagcttgagcagttttggcaaaagcacatgtggaatttcatcagcggcatacaatatctcgctggcttatcg

SEQ ID NO: 114992 - DNA, 80 bp, synthetic construct
  source 1..80: mol_type = other DNA
ttagaatttccaaattatcccgtttaattgtacccatcttcacgctcaatgaacagttatgtttttctaaattacagatt

SEQ ID NO: 114993 - DNA, 80 bp, synthetic construct
  source 1..80: mol_type = other DNA
tcttctggcgtcggtgggggaggggggacacggcggcgacgacggcgcaccgagaggcgttcgacaaagccctcgatcat

SEQ ID NO: 114994 - DNA, 80 bp, synthetic construct
  source 1..80: mol_type = other DNA
actggctcctccgcgagctgttcggtggttgggtcggtggtttcctccggggtggtggccgcccgtatgcgggcgaacgt

SEQ ID NO: 114995 - DNA, 80 bp, synthetic construct
  source 1..80: mol_type = other DNA
atccacctctgctgccaatatggaaggacccggactacactccgcccgtggtccatggatgcccactaccaccaactcgt

SEQ ID NO: 114996 - DNA, 80 bp, synthetic construct
  source 1..80: mol_type = other DNA
tccatgaggataacagggcccaagacctgcatgaacacctggcagggtacttttcccatcaactgctacacagagggcca

SEQ ID NO: 114997 - DNA, 80 bp, synthetic construct
  source 1..80: mol_type = other DNA
gcagccgctcagggcgtcggccacgcgcttaaccgcgtcctccgacagcaaggggccgtcggtcacgttacagtggccca

SEQ ID NO: 114998 - DNA, 80 bp, synthetic construct
  source 1..80: mol_type = other DNA
tgggctttggcagtacttgaacgccgtttcactgtgtgtgctcaccataaatgcaatctcatcaaggaaggcctcaaata

SEQ ID NO: 114999 - DNA, 80 bp, synthetic construct
  source 1..80: mol_type = other DNA
tatacttgctgccgcgcaggggccccaagttgggtgtgcgcgcggtgaggaagacttccgaacgatcccagcccagaggg

SEQ ID NO: 115000 - DNA, 80 bp, synthetic construct
  source 1..80: mol_type = other DNA
cggcagttggcacatcaatcgcacggccttgaactgtaatgcgagccttgagaccggctggatagcggggctcatctacc

SEQ ID NO: 115001 - DNA, 80 bp, synthetic construct
  source 1..80: mol_type = other DNA
tacgaaacccacgtcaccaacgatgaggacatgaggccgtactgctggcattaccctccgaggccttgcggcatcgtccc

SEQ ID NO: 115002 - DNA, 80 bp, synthetic construct
  source 1..80: mol_type = other DNA
ttcagatcggcggcgccggccgctcttcattcacgcctcgtcaggcaatcctaactttgcagacctcgtcctcggagccg

SEQ ID NO: 115003 - DNA, 80 bp, synthetic construct
  source 1..80: mol_type = other DNA
ctgctgctattcgccggcgtcgacgcgacaacccacatcaccgggggaaccgccgcccgcaccacgtctgcttttgccag

SEQ ID NO: 115004 - DNA, 80 bp, synthetic construct
  source 1..80: mol_type = other DNA
agcgagacgacctccccgtcgtcggtgatgaggacgttgtttcggcagcagcagggccgggccccggagaacgagaggcc

SEQ ID NO: 115005 - DNA, 80 bp, synthetic construct
  source 1..80: mol_type = other DNA
ccagccggggaggttggcgaggttggtgatgtagttttccgggacgacgaagcgatccacgaactgcatgtgctcctcgg

SEQ ID NO: 115006 - DNA, 80 bp, synthetic construct
  source 1..80: mol_type = other DNA
cacccccgctaactactgccacgggtagcttgggcattaacatggaagatcctatttatgtaaataatggaaaaatagga

SEQ ID NO: 115007 - DNA, 80 bp, synthetic construct
  source 1..80: mol_type = other DNA
ccatcataggacccctgtggatcctacaatccagcctgctcagagtgccatactttgtgcgtgcgcaggccctcctccgc

SEQ ID NO: 115008 - DNA, 80 bp, synthetic construct
  source 1..80: mol_type = other DNA
aacgcttcgaggtgctgggtctcccttagtcctactgttgccgctaaggatccgggcgtccccgtcaacgagattcggcg

SEQ ID NO: 115009 - DNA, 80 bp, synthetic construct
  source 1..80: mol_type = other DNA
ttgaactctcgatagaagtcaacacaacagagagccaaattggcagcagcttagaaatcatggtaaattctccccagaac

SEQ ID NO: 115010 - DNA, 80 bp, synthetic construct
  source 1..80: mol_type = other DNA
gaggggtagaacaccggatcaacgctgcgtgtaacttcacccgtggggaccggtgcaggctacaagatcgggacaggagt

SEQ ID NO: 115011 - DNA, 80 bp, synthetic construct
  source 1..80: mol_type = other DNA
tgtgcccttcgggacacgtggtagggctcttccgtgctgctgtgtgcacgcgaggagtcgccaaagccctggactttgtt

SEQ ID NO: 115012 - DNA, 80 bp, synthetic construct
  source 1..80: mol_type = other DNA
tatgaacacctggcaagggactttccccatcaattgctacaccgaagggcattgcgtgccgaagcccgcaccaaattaca

SEQ ID NO: 115013 - DNA, 80 bp, synthetic construct
  source 1..80: mol_type = other DNA
ggaaagaccgtttggtttgttccaagtgtgaaaatgggaaatgagattgccctctgtctgcaacgggcggggaagaaggt

SEQ ID NO: 115014 - DNA, 80 bp, synthetic construct
  source 1..80: mol_type = other DNA
acacgtgtgtcacccagacagtcgactttagccttgaccctaccttcaccattgagacaaccacgcttccccaagatgct

SEQ ID NO: 115015 - DNA, 80 bp, synthetic construct
  source 1..80: mol_type = other DNA
caaccccgagatcgaagatgacattttccgaaagagaagactgaccatcatggacctccacccaggagcgggaaagacga

SEQ ID NO: 115016 - DNA, 80 bp, synthetic construct
  source 1..80: mol_type = other DNA
ggcagcggcaagagcactagagtgccggccgcatatgcggcccaagggtacaaggtgcttgtcctgaacccgtctgttgc

SEQ ID NO: 115017 - DNA, 80 bp, synthetic construct
  source 1..80: mol_type = other DNA
atctcgtcctcagcgacgaggaaaaggagcagagcttaagcattccaccgcccagtcctgccaccacctctaccctagaa

SEQ ID NO: 115018 - DNA, 80 bp, synthetic construct
  source 1..80: mol_type = other DNA
accgggctgatacacttgcatcagaacatcgtggatgtccagtacctctacggagtaagctcatctgttatctcatgggc

SEQ ID NO: 115019 - DNA, 80 bp, synthetic construct
  source 1..80: mol_type = other DNA
ggaggacaatgaaactccaattgacactaccatcatggcgaagacggaggttttctgcgttcagcctgagaagggaggtc

SEQ ID NO: 115020 - DNA, 80 bp, synthetic construct
  source 1..80: mol_type = other DNA
cggctggaaggcttgggggaaatcgtacttcgtcagagcagcaaagacaaataacagctttgtcgtggatggtgacacac

SEQ ID NO: 115021 - DNA, 80 bp, synthetic construct
  source 1..80: mol_type = other DNA
gatgacagggaggtttctgtggcggcggaagctctgcgcaagaccaagaagtttccgcaagctataccggtgtgggcacg

SEQ ID NO: 115022 - DNA, 80 bp, synthetic construct
  source 1..80: mol_type = other DNA
ggtcccctccacagaggacctggtcaatctactgcccgccattctttcgcccggagcccttgtagttggtgtggtctgcg

SEQ ID NO: 115023 - DNA, 80 bp, synthetic construct
  source 1..80: mol_type = other DNA
acaagtggatcaatgaagattgctccaccccatgtgccgaatcttggctatgggaggtatgggattgggtcttgcacgtg

SEQ ID NO: 115024 - DNA, 80 bp, synthetic construct
  source 1..80: mol_type = other DNA
gcctgtcaacattgaggctgaacctccttttggggaaagcaacatagtgattggaattggagacaaagccttgaaaatta

SEQ ID NO: 115025 - DNA, 80 bp, synthetic construct
  source 1..80: mol_type = other DNA
tattcccttggctagattgcttggaggagagggctccgggataagattgctggctttctgggaactggcagcccacaaag

SEQ ID NO: 115026 - DNA, 80 bp, synthetic construct
  source 1..80: mol_type = other DNA
ggtcacggcactgtggtgttggaattgcagtacactggcacggatggaccttgcaaagttcctatctcgtcagtggcttc

SEQ ID NO: 115027 - DNA, 80 bp, synthetic construct
  source 1..80: mol_type = other DNA
tggcccacctacacgctcccactggcagcggtaagagcaccaaggtgcctgctgcgtatgcggcccaagggtacaaggtg

SEQ ID NO: 115028 - DNA, 80 bp, synthetic construct
  source 1..80: mol_type = other DNA
tctgtgaaagtcagggtgtccaggaggatgcagcaagcttgagagccttcacggaggctatgaccaggtattccgctccc

SEQ ID NO: 115029 - DNA, 80 bp, synthetic construct
  source 1..80: mol_type = other DNA
ttataacccacctctcattgagacgtggaaacaaccagactatgaaccaccagtcgtgcacggctgcgcactgcccccag

SEQ ID NO: 115030 - DNA, 80 bp, synthetic construct
  source 1..80: mol_type = other DNA
ctcccgtaacgttagaattgccaccacccgcgcccaccgtaccgcctatgccggctcccaccctgggtaccaacgttccc

SEQ ID NO: 115031 - DNA, 80 bp, synthetic construct
  source 1..80: mol_type = other DNA
gcgcttcgtagtagagcccgaggccgtcgcgggtggccggaagcgtcgggaaggccacgtcgccgtgggcgcgaatgtcg

SEQ ID NO: 115032 - DNA, 80 bp, synthetic construct
  source 1..80: mol_type = other DNA
ctgattttatataatttaacaatcattgagcatccaaccactaaagcgccaactactactaggcccaccacaattaggtc

SEQ ID NO: 115033 - DNA, 80 bp, synthetic construct
  source 1..80: mol_type = other DNA
cctccatcatgggaccagatgtggaagtgcctcatacggctgaaacctacattgcatgggcctacgcctttgctatatag

SEQ ID NO: 115034 - DNA, 80 bp, synthetic construct
  source 1..80: mol_type = other DNA
ctgctgttccacagagctatcaagtagggtaccttcatgccccgaccggcagtggtaagagcacaaaggtcccagccgct

SEQ ID NO: 115035 - DNA, 80 bp, synthetic construct
  source 1..80: mol_type = other DNA
acaaagaactaatgcatagcttgcaaagggcgctcacgggcgcgggaacagaggaggaggagtcgttttttgatatggga

SEQ ID NO: 115036 - DNA, 80 bp, synthetic construct
  source 1..80: mol_type = other DNA
ttgagctgggagggatgcatgcggggggagatgatgtgcagtttggcctggatcttgaggttggcgatgttgccacccag

SEQ ID NO: 115037 - DNA, 80 bp, synthetic construct
  source 1..80: mol_type = other DNA
cggttaagctgggatgggtgcatacgtggggatatgagatgcatcttggactgtatttttaggttggctatgttcccagc

SEQ ID NO: 115038 - DNA, 80 bp, synthetic construct
  source 1..80: mol_type = other DNA
agtgttacgacgctggcgccgcttggtacgagctcacaccggcagagaccactgtcaggctacgggcatattttaacaca

SEQ ID NO: 115039 - DNA, 80 bp, synthetic construct
  source 1..80: mol_type = other DNA
ttatcagtcggttgtgttgtcatcatagggcacatcgagctggggggcaaacctgcgcttgtccctgacagacaggtgct

SEQ ID NO: 115040 - DNA, 80 bp, synthetic construct
  source 1..80: mol_type = other DNA
gcgctggcggcgaggacgtccttgccgcccgccacaaacgggagctcctcggtggcctcgctgccaacaaaccgcacgtc

SEQ ID NO: 115041 - DNA, 80 bp, synthetic construct
  source 1..80: mol_type = other DNA
tgcaatttaggatttacacaacgattcttctgtgacaaaatcaacacaggttctttgctggcaaagcgctgatccgtaat

SEQ ID NO: 115042 - DNA, 80 bp, synthetic construct
  source 1..80: mol_type = other DNA
ctctctttctgtgtgtccaccggatgatcgtttacgaactccgcgcaagcgcaagtcccagccagtcgagagcagaagcc

SEQ ID NO: 115043 - DNA, 80 bp, synthetic construct
  source 1..80: mol_type = other DNA
tagcccaggaacaacttgcacgggccctcgatttcgaaatctatggggcccaacactccataagtccactggacttacca

SEQ ID NO: 115044 - DNA, 80 bp, synthetic construct
  source 1..80: mol_type = other DNA
ggcgcacaagatggaatagacctcacctcgctcacataatgcatattcaaatgttcacactctaaaagtccaggagtcct

SEQ ID NO: 115045 - DNA, 80 bp, synthetic construct
  source 1..80: mol_type = other DNA
agcttttcagaagtgacctaacggtgaagcttcccaaaactttcgccgccttggcgagcaaccgccgcgtccgacgggca

SEQ ID NO: 115046 - DNA, 80 bp, synthetic construct
  source 1..80: mol_type = other DNA
gcctcccacgccagggttggccccaatcatagtttccggtagaaacagggtggtctccacaaacaacccccctgggccaa

SEQ ID NO: 115047 - DNA, 80 bp, synthetic construct
  source 1..80: mol_type = other DNA
tgtcgggagggtcggcggcctttaccacttccggcttggtcagcttctttaagcaagggccgtctcagaaaatccagctt

SEQ ID NO: 115048 - DNA, 80 bp, synthetic construct
  source 1..80: mol_type = other DNA
aagttaggaaggacatttcagaatggcaaccctccaaaggatggacagattgggaaaatgttcctttctgctctcaccac

SEQ ID NO: 115049 - DNA, 80 bp, synthetic construct
  source 1..80: mol_type = other DNA
aattttaaggcagagagttatactaatcatgatgattatgaagttgtaaaatcatgttattataatattaaaatcattga

SEQ ID NO: 115050 - DNA, 80 bp, synthetic construct
  source 1..80: mol_type = other DNA
ggatggactcccgactcggtcctgggcttggtggcagaagatctatgacatctcccggtaggatgtcgatggaatcttca

SEQ ID NO: 115051 - DNA, 80 bp, synthetic construct
  source 1..80: mol_type = other DNA
accatggctaccgagcctccaaggaggcgaagatggggcgccgccagccggctgatgcccaactacgtgttgcatccttc

SEQ ID NO: 115052 - DNA, 80 bp, synthetic construct
  source 1..80: mol_type = other DNA
cggatattctccgggcgaactcaatcgggtggcatcatgcctcaggaaacttggggctcccccattgagggcttggagac

SEQ ID NO: 115053 - DNA, 80 bp, synthetic construct
  source 1..80: mol_type = other DNA
tgctattttgatttgcccgaggagcatatcgagggcccggcgcacggcgtccggtttaccacccagggagagcttacacg

SEQ ID NO: 115054 - DNA, 80 bp, synthetic construct
  source 1..80: mol_type = other DNA
tggcgaagcgccgtccgagttcatgtcggcaaacagctcgtcgaccaagaggtccattgggtggggttgatacgggaaag

SEQ ID NO: 115055 - DNA, 80 bp, synthetic construct
  source 1..80: mol_type = other DNA
tgcatagatttgcaccgccctgccgtccactcatgagggatgacataacattctcagtagggctctctacttacgtagta

SEQ ID NO: 115056 - DNA, 80 bp, synthetic construct
  source 1..80: mol_type = other DNA
gatggatatatcacattaaatgtaacaattgataatactacctggacaagatatcatttaaataagtggcaccaaatttg

SEQ ID NO: 115057 - DNA, 80 bp, synthetic construct
  source 1..80: mol_type = other DNA
acccttacactggaaccggccgccatgttggaggacccccactcatacacgggagccgggcgccatgttggggcgccatg

SEQ ID NO: 115058 - DNA, 80 bp, synthetic construct
  source 1..80: mol_type = other DNA
gatcaccttgcacccctttccacatgggctagtgacggattgcgtgatctggccatcgccgtagaaccaatcacgttctc

SEQ ID NO: 115059 - DNA, 80 bp, synthetic construct
  source 1..80: mol_type = other DNA
caacccggagtaaaacgaaggagcctccgccaccaccctcccacggggtgttggaaagatggggtctagaggttagagga

SEQ ID NO: 115060 - DNA, 80 bp, synthetic construct
  source 1..80: mol_type = other DNA
acgtacaccatgtgtgataaatcaaagtttgcatggaagagaactccaacagacagtgggcatgacacagtggttatgga

SEQ ID NO: 115061 - DNA, 80 bp, synthetic construct
  source 1..80: mol_type = other DNA
cgtccgcctggggcaccagcagccagcgccgcaggagcgaggacgcggccggcgcgctctcgaccgcggttcccgagtcg

SEQ ID NO: 115062 - DNA, 80 bp, synthetic construct
  source 1..80: mol_type = other DNA
cgccgacgcatacagcgccaccgaccgaccggccacgggtggaagcacgagtggttctgcggcagggtcgggttccagca

SEQ ID NO: 115063 - DNA, 80 bp, synthetic construct
  source 1..80: mol_type = other DNA
cctagtcagataggtgatgagtaccactatggaggaggcacaagcgaagatgacacgatcgcagctcattggactgaagc

SEQ ID NO: 115064 - DNA, 80 bp, synthetic construct
  source 1..80: mol_type = other DNA
aggttcgctaacgccctgctcgctctgaacgatatgggaaaggttcggaaagacatacctcaatggctgccatcaaaggg

SEQ ID NO: 115065 - DNA, 80 bp, synthetic construct
  source 1..80: mol_type = other DNA
tgtccagttcatgcctaacataacagcttataaacccacaaattctaaaagctatgctagaagtgttatatttggaaatg

SEQ ID NO: 115066 - DNA, 80 bp, synthetic construct
  source 1..80: mol_type = other DNA
tggtggagccatgctgcactggacgctcatacttcctgggattaaagcccagcaatcaaagctggctcaaaaaagagttt

SEQ ID NO: 115067 - DNA, 80 bp, synthetic construct
  source 1..80: mol_type = other DNA
tcaaacagcagcatagtatatgaggcggaagatgtgatcctgcacatgcctggttgcgttccctgcgtgcagaacggcaa

SEQ ID NO: 115068 - DNA, 80 bp, synthetic construct
  source 1..80: mol_type = other DNA
gcggcttgatagcaggccgacagacgccgccagcgcgctagaaactgacccatgaagcaaaacccggggacctggtctcc

SEQ ID NO: 115069 - DNA, 80 bp, synthetic construct
  source 1..80: mol_type = other DNA
tacgggcctatctcaacaccccaggtctcccagtttgtcaagaccacttggaattctgggaggtggtcttcaccggtctc

SEQ ID NO: 115070 - DNA, 80 bp, synthetic construct
  source 1..80: mol_type = other DNA
acgggtttaaaaaacagaaaccgtaaccccccccacccccgaaacggggaaaacaaaaaacagaccagcggccggtcggc

SEQ ID NO: 115071 - DNA, 80 bp, synthetic construct
  source 1..80: mol_type = other DNA
ctccccagttaactcctggttggggaacatcatcatgtacgctccgaccctgtgggctcggatagtgctgatgacgcact

SEQ ID NO: 115072 - DNA, 80 bp, synthetic construct
  source 1..80: mol_type = other DNA
gcgatggcatcgcgtgggccgtcactatattctgcccgggtgtggtgtttgacattaccaaatggcttttggcgttgctt

SEQ ID NO: 115073 - DNA, 80 bp, synthetic construct
  source 1..80: mol_type = other DNA
gccttctcctatgatacccgctgctttgactcaaccgttaccgaacatgacataatgactgaagagtctatctaccaatc

SEQ ID NO: 115074 - DNA, 80 bp, synthetic construct
  source 1..80: mol_type = other DNA
gccacacacctgtgaaggctgggtgtgtgaactttgactattcgcgcacccgccgctgtgtagggcgacaggatttggga

SEQ ID NO: 115075 - DNA, 80 bp, synthetic construct
  source 1..80: mol_type = other DNA
cacagcttgcgttctgattagcatagtcacattaacaacagctatccacaaacaatatcattcttataatgttaccagag

SEQ ID NO: 115076 - DNA, 80 bp, synthetic construct
  source 1..80: mol_type = other DNA
caactcgtcagggtgtcctgaacgcttgtccgcctgccgcggtatccaggccttccggatagggtgtggcaccttgcgat

SEQ ID NO: 115077 - DNA, 80 bp, synthetic construct
  source 1..80: mol_type = other DNA
atgcaccaggggacacgcagtggggatcttcagagcggctgtatgctccaggggtgtggcgaaagccatcgacttcatcc

SEQ ID NO: 115078 - DNA, 80 bp, synthetic construct
  source 1..80: mol_type = other DNA
cacgtggtgggctgacacggccgcatgtggggacatacttgccggccttcctgtatcagctaggcgaggccatgaaatct

SEQ ID NO: 115079 - DNA, 80 bp, synthetic construct
  source 1..80: mol_type = other DNA
tcatctcgccgcccccgcgcgcgcccgacgtcggactccttcgccccgacccccctgacctcagccgccctcgcctcgcc

SEQ ID NO: 115080 - DNA, 80 bp, synthetic construct
  source 1..80: mol_type = other DNA
gactcccgcgcgctaggtccttggggtaagggaaaaggccctactccccatccaagccagccaagttaacgggctacgcc

SEQ ID NO: 115081 - DNA, 80 bp, synthetic construct
  source 1..80: mol_type = other DNA
gggccagagcggtcagagcaaagctcattgctcaggtggggaaagccgctatttgcggtaagtaccttttcaactgggct

SEQ ID NO: 115082 - DNA, 80 bp, synthetic construct
  source 1..80: mol_type = other DNA
ctgctgagatggccgaagcccttcgtggactgcccattcggtatcaaacctcggcggtcagcagagaacacagcgggaat

SEQ ID NO: 115083 - DNA, 80 bp, synthetic construct
  source 1..80: mol_type = other DNA
ttcggaggtggaagcgaggctactcacagttgaggaagcctgcgatttaacccctccgcactctgcccgttccaagtacg

SEQ ID NO: 115084 - DNA, 80 bp, synthetic construct
  source 1..80: mol_type = other DNA
ggaaggccacgtcgccgtgggcgcgaatgtcgatttgggcgcgttcggggacgtacgcgtccccccattccaccacatcg

SEQ ID NO: 115085 - DNA, 80 bp, synthetic construct
  source 1..80: mol_type = other DNA
gtgggtggcagggccacgagctccagctctccggtgacgttgatcgtggggatgacgcccgtggcgtagtggtcatagat

SEQ ID NO: 115086 - DNA, 80 bp, synthetic construct
  source 1..80: mol_type = other DNA
gtgagatgaagctgtagtctcactggaaggactagaggttagaggagacccccccaaaacaaaaaacagcatattgacgc

SEQ ID NO: 115087 - DNA, 80 bp, synthetic construct
  source 1..80: mol_type = other DNA
cctatgtgctggggaatggagctgtggtgcggtttcaaacatgtgaccgagtagcctttaactgcgcaatgcagagcttg

SEQ ID NO: 115088 - DNA, 80 bp, synthetic construct
  source 1..80: mol_type = other DNA
tgaacgggagaaaaaggtcaacgataacattgttgtgcttgattcccaccgtaatggcgtttcacttgtcaacaagagat

SEQ ID NO: 115089 - DNA, 80 bp, synthetic construct
  source 1..80: mol_type = other DNA
actccacggggtgccctgctcgcatgagcagctgtaggcccttagattcattcgaccagggttggtgccctatttcatat

SEQ ID NO: 115090 - DNA, 80 bp, synthetic construct
  source 1..80: mol_type = other DNA
catcgcgcccacaacggactatcgcaacaccactgctaccggactaacatctgccctaaatttaccccaagttcatgcct

SEQ ID NO: 115091 - DNA, 80 bp, synthetic construct
  source 1..80: mol_type = other DNA
atgccgcccttggaaggcgagcccggcgatcccgacttcgattcgggctcgtgggccacggtcagtgaagagagcgatag

SEQ ID NO: 115092 - DNA, 80 bp, synthetic construct
  source 1..80: mol_type = other DNA
ccaggggtacaaagtactagtgcttaacccctcggtagctgccaccctggggtttgtggcgtacctatccaaggcacatg

SEQ ID NO: 115093 - DNA, 80 bp, synthetic construct
  source 1..80: mol_type = other DNA
atcatgctgatcttggtgtccctagcggcagtggtggtcaacccatccgtgaaaacagcccgtgaggccggaatactcat

SEQ ID NO: 115094 - DNA, 80 bp, synthetic construct
  source 1..80: mol_type = other DNA
acaagtcaacatggcattatgatgaggacaatccatacaaaacatgggcctatcacggatcatatgaggtcaggccatca

SEQ ID NO: 115095 - DNA, 80 bp, synthetic construct
  source 1..80: mol_type = other DNA
ggacgccgccgactccggcagtcggacgccccccgatgagtcggctctttcggagacaggttctatctcctccatgcccc

SEQ ID NO: 115096 - DNA, 80 bp, synthetic construct
  source 1..80: mol_type = other DNA
cgtcagggcgcttatatcgtcaggcgcagaaattttaaaatcacaattggggccagcgctaccgcgcgaattgcggtata

SEQ ID NO: 115097 - DNA, 80 bp, synthetic construct
  source 1..80: mol_type = other DNA
ccggcggacctgtgatgtgcccctcgggtcatgtcgtgggccttttccgcgcggctgtatgtactagaggtgtggccaag

SEQ ID NO: 115098 - DNA, 80 bp, synthetic construct
  source 1..80: mol_type = other DNA
actatggcttttcaagttgtgaagggaacttatgaaaatatcagtaagaacacagcaaaaaatagcttctcaattaaatt

SEQ ID NO: 115099 - DNA, 80 bp, synthetic construct
  source 1..80: mol_type = other DNA
tggtgttctccccaatggaaaagaaggtgatcgtctggggagcagagacggctgcttgcggcgacatcctagatggtctc

SEQ ID NO: 115100 - DNA, 80 bp, synthetic construct
  source 1..80: mol_type = other DNA
attcccgttgagcaccgccaggtgcgaataagggacagtgaagaaggaacacccgctcgcgggtgggcctacttcaccta

SEQ ID NO: 115101 - DNA, 80 bp, synthetic construct
  source 1..80: mol_type = other DNA
cgttgggaagccccagccacataccaaccaggagaagattaaagccaggattcaaagattgaaagaggagtatgcagcca

SEQ ID NO: 115102 - DNA, 80 bp, synthetic construct
  source 1..80: mol_type = other DNA
ttacaccgatgttacgccacacgatagagaacacttcagcgaatctgtccttggctgcaatagccaaccaggcagctgtg

SEQ ID NO: 115103 - DNA, 80 bp, synthetic construct
  source 1..80: mol_type = other DNA
acatgcccctccgattgcttccgtaaacatccagaagcaacttacgggaagtgcgggtcagggccgtggctcactcccag

SEQ ID NO: 115104 - DNA, 80 bp, synthetic construct
  source 1..80: mol_type = other DNA
tggctgcaaacaccacctgtgtgacagaccggaaatggacctgggagggtcccgaggagaatgccattgatggtcctgat

SEQ ID NO: 115105 - DNA, 80 bp, synthetic construct
  source 1..80: mol_type = other DNA
gtaatagatgaaaaaacttcttcaggtcttcaaagtctaattggaaatctcgtagttttaacaggaaaaggaattggcac

SEQ ID NO: 115106 - DNA, 80 bp, synthetic construct
  source 1..80: mol_type = other DNA
tgacaccactccgtttgggcagcagagggttttcaaagaaaaggttgacaccaaggccccggaacccccttctggagtta

SEQ ID NO: 115107 - DNA, 80 bp, synthetic construct
  source 1..80: mol_type = other DNA
gattgctgttctagccgctattactatcatcacactttcacccttttacaagaccctgcttgttggactgctttggtgga

SEQ ID NO: 115108 - DNA, 80 bp, synthetic construct
  source 1..80: mol_type = other DNA
ctcctgtggaggcaggagatcggaggcaacataacaagagtcgagtctgagaacaagataatagttctcgactcttttga

SEQ ID NO: 115109 - DNA, 80 bp, synthetic construct
  source 1..80: mol_type = other DNA
gggttcgctgtttgtcttgccgcgaggcgtgcctttcactgacttggatctaaccgttggtcttgtctttctaggctgtt

SEQ ID NO: 115110 - DNA, 80 bp, synthetic construct
  source 1..80: mol_type = other DNA
aacaccgcctggctccgtaactgtcccacacccgaacatacaagaagttgctttgcccacgacaggggaggtccccttct

SEQ ID NO: 115111 - DNA, 80 bp, synthetic construct
  source 1..80: mol_type = other DNA
gtttactgtttcacgcccagcccggtggtggtgggcaccactgacaagcaggtggtgcctgcttatacctggtgggagaa

SEQ ID NO: 115112 - DNA, 80 bp, synthetic construct
  source 1..80: mol_type = other DNA
gccaccagcccccgccgcgggaccccaccgagcggcaggtgatccgtgcggtggagggtgcgaggatcggagtggctgtc

SEQ ID NO: 115113 - DNA, 80 bp, synthetic construct
  source 1..80: mol_type = other DNA
cgtagtgtcatgccaaatggaacgccggacgtagtcatatttcctgaagcaaaaccaggtgcgggcgtgacaaacagatc

SEQ ID NO: 115114 - DNA, 80 bp, synthetic construct
  source 1..80: mol_type = other DNA
gcccccacactcagccagatccaagtttggctatggggcaaaagacgtccgttgccatgccagaaaggccgtaaaccaca

SEQ ID NO: 115115 - DNA, 80 bp, synthetic construct
  source 1..80: mol_type = other DNA
gccgcgcaagcggagtatacaccacaagcttcgggaatacagtgacctgctatcttaaggctgtagcagccaccagggat

SEQ ID NO: 115116 - DNA, 80 bp, synthetic construct
  source 1..80: mol_type = other DNA
tatgccggaccacttgcccctgcggagccgacatcaccggccatgtgaaaaacgggacaatgaagatcttgggcccgaag

SEQ ID NO: 115117 - DNA, 80 bp, synthetic construct
  source 1..80: mol_type = other DNA
gacagctgcttgacaatcatggcaaacgacaaaccaacactagatgtccgcatgatcaacattgaagctagccaacttgc

SEQ ID NO: 115118 - DNA, 80 bp, synthetic construct
  source 1..80: mol_type = other DNA
cctgccaccggaagttgagtagacggtgctgcctgcgactcaaccccaggcggactgggttaacaaagctgaccgctgat

SEQ ID NO: 115119 - DNA, 80 bp, synthetic construct
  source 1..80: mol_type = other DNA
gacggaacaccgcagtttctggtgctcgaaggtcgactccagggacgccgtctgcgtcggcgagcccacacacaccaaca

SEQ ID NO: 115120 - DNA, 80 bp, synthetic construct
  source 1..80: mol_type = other DNA
ggtgtcgcaggagagacgctcgcatgaaccggtgcgcgtcgaacacgcccggcgccgagcggttgtcgatgaccgtgccc

SEQ ID NO: 115121 - DNA, 80 bp, synthetic construct
  source 1..80: mol_type = other DNA
tccatggggtccgcggcaaatatgccttggtggatgcctctctcaagatggccgaccccaatcgctttcgcggcaaagac

SEQ ID NO: 115122 - DNA, 80 bp, synthetic construct
  source 1..80: mol_type = other DNA
acacgcggtcccctgtggtgtttttggttatttttattaaatctcgtcgacaaacaggtggaaaggggcgtggtctagcg

SEQ ID NO: 115123 - DNA, 80 bp, synthetic construct
  source 1..80: mol_type = other DNA
gtacccatcccggagcccaattacaagcgggctttgtggagggtgtccgcagaggactacgttgagatcgtccgggtcaa

SEQ ID NO: 115124 - DNA, 80 bp, synthetic construct
  source 1..80: mol_type = other DNA
ccaacagcagcatcgtgtacgaggcggaagatttcatcatgcacctacctgggtgtgtcccgtgtatcaagtcaggtaac

SEQ ID NO: 115125 - DNA, 80 bp, synthetic construct
  source 1..80: mol_type = other DNA
tgttgacgctgtccccgtggtacaagcggtggttagcttgggggatatggtggcttcagtactacttagccagggtcgag

SEQ ID NO: 115126 - DNA, 80 bp, synthetic construct
  source 1..80: mol_type = other DNA
cttggccctattgtcctgcttgacggttccaactacagcttatgaggtgcgcaacgcatccggggtgtaccatgtcacta

SEQ ID NO: 115127 - DNA, 80 bp, synthetic construct
  source 1..80: mol_type = other DNA
acttgggaaatttgtcatgtagcttagaaggaaatgcgtggaagaacttggagacgcccttgtgacctccaagattttcc

SEQ ID NO: 115128 - DNA, 80 bp, synthetic construct
  source 1..80: mol_type = other DNA
gcaccgtcttggaccaagctcaaacggctggagttcggttaaccgtactcgccactgctacccctccaggctctgtcacg

SEQ ID NO: 115129 - DNA, 80 bp, synthetic construct
  source 1..80: mol_type = other DNA
cttagcgacactattaccgccgatggtattaaagttggaacagacaccacccaggcaaacgcggcggtgtatgccaacaa

SEQ ID NO: 115130 - DNA, 80 bp, synthetic construct
  source 1..80: mol_type = other DNA
agccaggtgtgaggctctaatacatgtctacattccacccttggtggtcaggggcccacgggattctgtcatccttctcg

SEQ ID NO: 115131 - DNA, 80 bp, synthetic construct
  source 1..80: mol_type = other DNA
catccggctctggtatttgacatcaccaaactgctgctggccatcctcggacccctttggattcttcaagccagtttgct

SEQ ID NO: 115132 - DNA, 80 bp, synthetic construct
  source 1..80: mol_type = other DNA
atcccaggctggcaggctgaagcaatgagagcagcccagcggagaacagcggctggcattatgaaaaacgctgtggtcga

SEQ ID NO: 115133 - DNA, 80 bp, synthetic construct
  source 1..80: mol_type = other DNA
accaaatattcggaagtgcttacacagccctattcagtggagtctcttgggtaatgaaaattggaataggagttctcttg

SEQ ID NO: 115134 - DNA, 80 bp, synthetic construct
  source 1..80: mol_type = other DNA
cagtcagagctaagctcatcgcccaaggggggaaacacgctatatgcggtaagtacctcttcaattgggccgtgagaact

SEQ ID NO: 115135 - DNA, 80 bp, synthetic construct
  source 1..80: mol_type = other DNA
ggcggtaatgggagcttcctatggcttccagtactcccctgcccaacgggtggagtatctcttgaaagcatgggcggaaa

SEQ ID NO: 115136 - DNA, 80 bp, synthetic construct
  source 1..80: mol_type = other DNA
ctcctctacagattggggtctgtgcaaaatgaggtgacattaacccatcccgtaaccaaatacatcatggcctgcatgtc

SEQ ID NO: 115137 - DNA, 80 bp, synthetic construct
  source 1..80: mol_type = other DNA
tacttctccataagcatagccatggcttccatacccttctcccaagccgttactaggggctcgttcgcaggatttcggac

SEQ ID NO: 115138 - DNA, 80 bp, synthetic construct
  source 1..80: mol_type = other DNA
tcgccgctaaaacctttggcgactcagacacctcaggtatagccagcggcaccgagcccccccccccggactcacttacc

SEQ ID NO: 115139 - DNA, 80 bp, synthetic construct
  source 1..80: mol_type = other DNA
cagcgccgaactaccgtaaggctctgtggagggtgagtgctgaggagtacgtcgaagtagtacgggtgagggagaatcac

SEQ ID NO: 115140 - DNA, 80 bp, synthetic construct
  source 1..80: mol_type = other DNA
acgacaagtagcatggtcggcttgttctctccgggagctaggcagaacctgtagctcatcaacagcaatggtagctggca

SEQ ID NO: 115141 - DNA, 80 bp, synthetic construct
  source 1..80: mol_type = other DNA
ggcacccccgcttgaggaggaggaagtgattatcgagcaggacccaggttttgtaagcgaagacgacgaggaccgctcag

SEQ ID NO: 115142 - DNA, 80 bp, synthetic construct
  source 1..80: mol_type = other DNA
attcccggtagcaaatctttgtcaaaatagctgatggtggcgggatcacccaaggtcatctgccattctcgaactgccag

SEQ ID NO: 115143 - DNA, 80 bp, synthetic construct
  source 1..80: mol_type = other DNA
gaggggagatggtatctgcaccaccacgtgtccctgcggagctcaaattactggccatgtcaaaaatgggactatgagat

SEQ ID NO: 115144 - DNA, 80 bp, synthetic construct
  source 1..80: mol_type = other DNA
gtttattggcaccggaggctaaagggtggtaaccggatagcagatgtgaggaagtcggggccgttcgccgcgaacggcga

SEQ ID NO: 115145 - DNA, 80 bp, synthetic construct
  source 1..80: mol_type = other DNA
atacaagaatacgtgtacaagaaattgcggcttacacggctactggctacgggtggatgttatggttcttggacgttgtg

SEQ ID NO: 115146 - DNA, 80 bp, synthetic construct
  source 1..80: mol_type = other DNA
actgggtgtcaggagcggatgagttcatgcaagccgttgagctcgttctgtcaggcctggggtcccgtttcatatgccaa

SEQ ID NO: 115147 - DNA, 80 bp, synthetic construct
  source 1..80: mol_type = other DNA
cgcgtgccttacttcgtaagagcccacgcgctaattaagatctgcagcctggtacgaggggccacgcatggcaagtattg

SEQ ID NO: 115148 - DNA, 80 bp, synthetic construct
  source 1..80: mol_type = other DNA
tcggggacggccgcgcgccagcgcaagcgcggagcaccgccgcaacgcacatgcgtaccacgcagcaacaagagcctcca

SEQ ID NO: 115149 - DNA, 80 bp, synthetic construct
  source 1..80: mol_type = other DNA
tccagctataaaaagagtactcatcagagggaaaggtattcagctgaacgacgaagtcacatcgccattgggagtcagac

SEQ ID NO: 115150 - DNA, 80 bp, synthetic construct
  source 1..80: mol_type = other DNA
cgcggtggcccttcgagggatgggcctcaatgcggtggcatactacagagggcttgacgtctcaataataccaacacaag

SEQ ID NO: 115151 - DNA, 80 bp, synthetic construct
  source 1..80: mol_type = other DNA
ctactcaccgtaggggtaggcatctttttgctccccgctcggtagacgagcggccctagcaacactccatcgttcctttt

SEQ ID NO: 115152 - DNA, 80 bp, synthetic construct
  source 1..80: mol_type = other DNA
gatacagaaaagaagccatcactgaagtcgaccgctccgcggcaaaacatgccaggaaagagggaaacatcactggaggc

SEQ ID NO: 115153 - DNA, 80 bp, synthetic construct
  source 1..80: mol_type = other DNA
ccgccgccaggcactcgctggagatgatgacgtgaatcagcgaggcggggctgctcgggtcccgggtgagatcgtattgg

SEQ ID NO: 115154 - DNA, 80 bp, synthetic construct
  source 1..80: mol_type = other DNA
aacataaataaaaaccagactctgtttggatttggatcaagcaagtgtcttgctgtctttatttaggggttttgcgcgcg

SEQ ID NO: 115155 - DNA, 80 bp, synthetic construct
  source 1..80: mol_type = other DNA
gtatagaccatcattgcttgcgttttttggtgacgtggcagatgtgcttgcatccgacatcgcgaccgtatctactaacc

SEQ ID NO: 115156 - DNA, 80 bp, synthetic construct
  source 1..80: mol_type = other DNA
acgccgacgcggcctccggcgccttctacgcgcgctaccgcgacgggtacgtcagcggggagccgtggcccggagccggc

SEQ ID NO: 115157 - DNA, 80 bp, synthetic construct
  source 1..80: mol_type = other DNA
gaacaactactagggaaacaacacatctagacactacagtgcagaatactactttattgattgggtttttaataagagga

SEQ ID NO: 115158 - DNA, 80 bp, synthetic construct
  source 1..80: mol_type = other DNA
agtagtaatgacccaggacctagttcagactcggggctatcaataaccagtcccgttccacctgacccaacaacaccgga

SEQ ID NO: 115159 - DNA, 80 bp, synthetic construct
  source 1..80: mol_type = other DNA
cgacgaaccaccggcgcccccgcgcggtggcgccctggcgcatggcgggactacggtggcccgtcgtgccccccgtcagg

SEQ ID NO: 115160 - DNA, 80 bp, synthetic construct
  source 1..80: mol_type = other DNA
ccgagccgcttatggtcttgcctcttttctctcgcctgggcccaagcagaatatccagcttatgaacaccaacggcagct

SEQ ID NO: 115161 - DNA, 80 bp, synthetic construct
  source 1..80: mol_type = other DNA
tttttgaacgaagaccattggcttggcagggaaaattctggaggaggtgttgagggactcggtctgcaaaagcttggcta

SEQ ID NO: 115162 - DNA, 80 bp, synthetic construct
  source 1..80: mol_type = other DNA
aactacacagctatacacaacagtgcagaatagtactgtgattgttaggtatctgttgagggaggaaagtactactgaac

SEQ ID NO: 115163 - DNA, 80 bp, synthetic construct
  source 1..80: mol_type = other DNA
gggcgcgaactggttccgagcaccggtgaccacgatgtcgcgatcccccccgcgttccatcgtggagtgcggtgtggtgc

SEQ ID NO: 115164 - DNA, 80 bp, synthetic construct
  source 1..80: mol_type = other DNA
ccatcggagttgtcctcctctctcagagtaacataccaggaacagttttggaactaactgacgcaatagcattaggaata

SEQ ID NO: 115165 - DNA, 80 bp, synthetic construct
  source 1..80: mol_type = other DNA
acgagaccccctcggctataaactatgctttgatagacggtatatttttgcgttatcactgtcccggattggacacggtc

SEQ ID NO: 115166 - DNA, 80 bp, synthetic construct
  source 1..80: mol_type = other DNA
ctccacggtgtttacttttttaactttaacaatacatgtgtggagtcatggggtagggtgtctctgaggggctgcagttt

SEQ ID NO: 115167 - DNA, 80 bp, synthetic construct
  source 1..80: mol_type = other DNA
ggtgtcatactgtggtccatggaagctagatgccgcctgggacgggcacagcgaggtgcagctcttggccgtgccccccg

SEQ ID NO: 115168 - DNA, 80 bp, synthetic construct
  source 1..80: mol_type = other DNA
tacgagccggatgttgacctcggaagcggaacccgtaacattggaattgaaagtgaaataccaaacctagacataattgg

SEQ ID NO: 115169 - DNA, 80 bp, synthetic construct
  source 1..80: mol_type = other DNA
ggtggccccatgtacaactcacggggccaactctgcgggatacgcaggtgccgcgcaagtggggtgcttcccactagtct

SEQ ID NO: 115170 - DNA, 80 bp, synthetic construct
  source 1..80: mol_type = other DNA
gtcctccgcgaatgctggccctgacataatcatacatttcatgtgagggggctagtagtccattgcctagatccgaacgc

SEQ ID NO: 115171 - DNA, 80 bp, synthetic construct
  source 1..80: mol_type = other DNA
ggttcaactcttcagggtgtccgcagcggctttcttcttgcaagcccattacagacttcatgcagggatggggaccgctg

SEQ ID NO: 115172 - DNA, 80 bp, synthetic construct
  source 1..80: mol_type = other DNA
atggtagaggaaaagctaccacctctagaaactgtgcccggatccgttccaaccaaaggagaaaagcggccacggccgga

SEQ ID NO: 115173 - DNA, 80 bp, synthetic construct
  source 1..80: mol_type = other DNA
atcatatcctgcatcttccaggatgcgttccctgtgtgagatctgggaaccagtcacaatgctggatagctctgactcct

SEQ ID NO: 115174 - DNA, 80 bp, synthetic construct
  source 1..80: mol_type = other DNA
ctgtgaagtgggaatacgtcgtcttggcgtttctggtcctagctgatgcacgggtttgtgcctgtttgtggttaatgttc

SEQ ID NO: 115175 - DNA, 80 bp, synthetic construct
  source 1..80: mol_type = other DNA
gctacccgaagaaggtggcgtccgggtgggcgtccggggggggcgcaccgctcgccggccccggcgggcgcaggggcgcc

SEQ ID NO: 115176 - DNA, 80 bp, synthetic construct
  source 1..80: mol_type = other DNA
gcgtcgcagcgtgtgacccaactacttggctctcttactataaccagcctactcagaagactccacaattggataactga

SEQ ID NO: 115177 - DNA, 80 bp, synthetic construct
  source 1..80: mol_type = other DNA
cacagggcccacccccctgctgtacaggctaggggccgtacaaaatgaaattgtcacaacacacccaatcaccaagtaca

SEQ ID NO: 115178 - DNA, 80 bp, synthetic construct
  source 1..80: mol_type = other DNA
acttgccgcctgcgcatccccgtcccgaattaccgaggaagatcccgccgcaggagaggcatggcaggcagcggcctgaa

SEQ ID NO: 115179 - DNA, 80 bp, synthetic construct
  source 1..80: mol_type = other DNA
gtcctaccaggtgggatacctccacgcccccactggaagcgggaaaagcaccaaggtccccgccgcttatgtagcacagg

SEQ ID NO: 115180 - DNA, 80 bp, synthetic construct
  source 1..80: mol_type = other DNA
ctactgtttgtcagtgggctgcgtcgtgatatgcggtaggatcaccactactggcaagcccgcagtgattccggatcggg

SEQ ID NO: 115181 - DNA, 80 bp, synthetic construct
  source 1..80: mol_type = other DNA
ctcagattctctccagccttaccatcacccagctgttgaagaggctccaccagtggattaatgaggactgctccacgcca

SEQ ID NO: 115182 - DNA, 80 bp, synthetic construct
  source 1..80: mol_type = other DNA
ctttctagtgcatcgtgagtggttcaatgatttgctcttgccatggacatcacctgcaagcacggaatggaggaatagag

SEQ ID NO: 115183 - DNA, 80 bp, synthetic construct
  source 1..80: mol_type = other DNA
agccgcccgcgtcactgccatactcagcagcctcactgtaacccagctcctgaggcgactgcatcagtggataagctcgg

SEQ ID NO: 115184 - DNA, 80 bp, synthetic construct
  source 1..80: mol_type = other DNA
gtttgccaaacccacgcatttcagtttaaatatttctaagcattcttagtgcgtacttggcagcgtgcttaaaatatcaa

SEQ ID NO: 115185 - DNA, 80 bp, synthetic construct
  source 1..80: mol_type = other DNA
gcggtggagcggccggttccgggggagggccggggaagggggcgcgcggagctgccctgccgctcgcccccggttcgccc

SEQ ID NO: 115186 - DNA, 80 bp, synthetic construct
  source 1..80: mol_type = other DNA
aacaaggaccagagccacctgggctgagaacatctacgctccaatcatgcagatccgcaacctcatcggggaagaggagt

SEQ ID NO: 115187 - DNA, 80 bp, synthetic construct
  source 1..80: mol_type = other DNA
gttacccgtgtgccaggaccacctagagttctgggagggtgtcttcaccggtctcacgcacatagatgcccatttcctgt

SEQ ID NO: 115188 - DNA, 80 bp, synthetic construct
  source 1..80: mol_type = other DNA
gtgtgtcacccagacagtcgatttcagcttggaccctaccttcaccattgagacaacgaccgtgccccaagacgcggtgt

SEQ ID NO: 115189 - DNA, 80 bp, synthetic construct
  source 1..80: mol_type = other DNA
atgggatacacggataaccaaagcggatctggaaaatgaaggcaaagtcttgagattcctcgagggagagcaccgcttac

SEQ ID NO: 115190 - DNA, 80 bp, synthetic construct
  source 1..80: mol_type = other DNA
ccataggattctcaatggacattgacctgcggccagcctcagcttgggccatctatgctgccttgacaactttcattacc

SEQ ID NO: 115191 - DNA, 80 bp, synthetic construct
  source 1..80: mol_type = other DNA
attcatggactggagcgcttgtgacaccttgtgcagctgaggaaaccaagctgccaattagccccttgagcaactcgttg

SEQ ID NO: 115192 - DNA, 80 bp, synthetic construct
  source 1..80: mol_type = other DNA
ccaggtggaagctaggctcctctcaacggaggatgcctgcagcttgacccccccccactcggctcgttctagattcgggt

SEQ ID NO: 115193 - DNA, 80 bp, synthetic construct
  source 1..80: mol_type = other DNA
cagacggtgaacctaagccaggctttcaagaacctacgcgggctgtggggcgtgcaggcgcccgtgggcgaccggtcaac

SEQ ID NO: 115194 - DNA, 80 bp, synthetic construct
  source 1..80: mol_type = other DNA
gggaaaagagaggatttgtggtgtggatccttgattggactctcttccagggccacctgggctaagaacatccacacggc

SEQ ID NO: 115195 - DNA, 80 bp, synthetic construct
  source 1..80: mol_type = other DNA
ccttcatgacggcgctggtactgtccctgcaggcgtgcggccggctgtatgtgggccagcgccgctattccgccttcgag

SEQ ID NO: 115196 - DNA, 80 bp, synthetic construct
  source 1..80: mol_type = other DNA
ggaaagaggtggtgcgaaggtgaggaggcccaaacggggaggtgggtgcggtcccagggagcggaggtaggaaccgccac

SEQ ID NO: 115197 - DNA, 80 bp, synthetic construct
  source 1..80: mol_type = other DNA
actggaaactcttggagcagggtaaagccagcagcacatggtaatccgcggacagaacttacattatgataatctgcatg

SEQ ID NO: 115198 - DNA, 80 bp, synthetic construct
  source 1..80: mol_type = other DNA
cgcggtctcctaggcgccatcgtggttagcctaacgggccgcgacaagaatgagcaggctgggcaagttcaggttctgtc

SEQ ID NO: 115199 - DNA, 80 bp, synthetic construct
  source 1..80: mol_type = other DNA
cggcggcccgagtgaccactatcctatcatccctcactgtgacatcccttctcagacgcctccataagtggatcaacgaa

SEQ ID NO: 115200 - DNA, 80 bp, synthetic construct
  source 1..80: mol_type = other DNA
aggtggagggggaggtccagatcgtgtccaccgcgacccagaccttcctagccacttgcgtcaacggcgcgtgctggaca

SEQ ID NO: 115201 - DNA, 80 bp, synthetic construct
  source 1..80: mol_type = other DNA
gacccccacagtagcgagtgctaatgcaagcttccccgttcaatcgttccgacgccatgtggacctgatggtcggggcag

SEQ ID NO: 115202 - DNA, 80 bp, synthetic construct
  source 1..80: mol_type = other DNA
atgggtcccaattggccgtcccgttaccaagaccaacccagccagcatatccacccccgcccgggtccccgcggaagcgg

SEQ ID NO: 115203 - DNA, 80 bp, synthetic construct
  source 1..80: mol_type = other DNA
tgggattgaacaccggctaaatgccgcatgcaattggaccaggggggaaccctgcaacttggagcatcgagaccgtgcag

SEQ ID NO: 115204 - DNA, 80 bp, synthetic construct
  source 1..80: mol_type = other DNA
ccagaaacagaggaatgcccatcgcagagtcgcgcctggaatagtatggaggtggaagactttgggtttggtctcaccag

SEQ ID NO: 115205 - DNA, 80 bp, synthetic construct
  source 1..80: mol_type = other DNA
ggaggttttctgcgtggcccctgagaaggggggccgcaagccggctcgcctcatcgtataccccgacttggtggtgcgcg

SEQ ID NO: 115206 - DNA, 80 bp, synthetic construct
  source 1..80: mol_type = other DNA
ctcttcaacttccggcatcacgggcgacaatacaacaacgtcctccgagcccaccccttctgtttgccccccagactccg

SEQ ID NO: 115207 - DNA, 80 bp, synthetic construct
  source 1..80: mol_type = other DNA
tcatcgcgctcgtggcgctcccggagcggatttaagttcatgcgaaggaattcggaggaggtggtgcgggacatggccac

SEQ ID NO: 115208 - DNA, 80 bp, synthetic construct
  source 1..80: mol_type = other DNA
gggagtcatgaccgcagggttttttctcctcatgatgcaaagaaaaggaattggtaaactgggactcggagcactcgtct

SEQ ID NO: 115209 - DNA, 80 bp, synthetic construct
  source 1..80: mol_type = other DNA
cgacgcgcgctcggaaaacagcacgttctcggtcacgaagcggtcctgccgcacgacggtgaacccgaacccggtgtgga

SEQ ID NO: 115210 - DNA, 80 bp, synthetic construct
  source 1..80: mol_type = other DNA
caaaaaacttgtacttgcttttccggtatttgttgatgaaacaaaaataattttacaattggtttgatttaaaaatccga

SEQ ID NO: 115211 - DNA, 80 bp, synthetic construct
  source 1..80: mol_type = other DNA
ctggtgggcgtggccacgacgtgctctgcgctctacgtgggtgatgcgtgtggggccgtcttcctcataggacaagcctt

SEQ ID NO: 115212 - DNA, 80 bp, synthetic construct
  source 1..80: mol_type = other DNA
aattacaggtaataatgatggcgatcttgaaaccgaatgggaaagagatgaagcaatctctagacaaaaccaaatctgca

SEQ ID NO: 115213 - DNA, 80 bp, synthetic construct
  source 1..80: mol_type = other DNA
ctacgggtcttgccggagctggtattaccttaaaactcactaccagtcatttctatccatctgtctttgtctttcacgga

SEQ ID NO: 115214 - DNA, 80 bp, synthetic construct
  source 1..80: mol_type = other DNA
ggttctataacggtcccacatccaaacattacggagtcagccctacccactacgggggaaatacccttctatgggaaggc

SEQ ID NO: 115215 - DNA, 80 bp, synthetic construct
  source 1..80: mol_type = other DNA
ggccgtgctcctggacaagcagcaggccgccatcaaggtcgtgtgtaactcggtgtacgggttcacgggagtgcagcacg

SEQ ID NO: 115216 - DNA, 80 bp, synthetic construct
  source 1..80: mol_type = other DNA
ttcctcgcgtccctgttctacgcccggcagttcaacgcatcaggatgtcccgaacgcctgtccgtctgccgtaagatcga

SEQ ID NO: 115217 - DNA, 80 bp, synthetic construct
  source 1..80: mol_type = other DNA
ttcccggaaccgccgggaaccaagcggaggcacgccggggccgaagttgtccccgcggacgacgccaccaagcgcccgaa

SEQ ID NO: 115218 - DNA, 80 bp, synthetic construct
  source 1..80: mol_type = other DNA
aagtgaggaaacagaacagaaacatactgagcaaaataaggctggacaaaagcagggtatagatacaaatcaaaagaaat

SEQ ID NO: 115219 - DNA, 80 bp, synthetic construct
  source 1..80: mol_type = other DNA
ccctttgagtaactcgctgttgcgataccataacaaggtgtactgtacaacatcaaagagcgcctcacagagggctaaaa

SEQ ID NO: 115220 - DNA, 80 bp, synthetic construct
  source 1..80: mol_type = other DNA
gggaaggctgtccatcaagtgtttggtggagcgttccgctcactgtttggaggtatgtcctggataacgcagggattgct

SEQ ID NO: 115221 - DNA, 80 bp, synthetic construct
  source 1..80: mol_type = other DNA
ggctccattggaggggtattcaactccatagggaaagctgttcaccaagtatttggcggtgcattcagaacgctctttgg

SEQ ID NO: 115222 - DNA, 80 bp, synthetic construct
  source 1..80: mol_type = other DNA
tgccgcgcaagcggcgtcttcactaccagcatggggaataccatgacatgttacatcaaagcccttgcagcgtgtaaagc

SEQ ID NO: 115223 - DNA, 80 bp, synthetic construct
  source 1..80: mol_type = other DNA
ttggaacgcgcatttgttgaacatataatcgccgtggtaactccattgacccgcggtcgcctaaagttaatgaaacgtgt

SEQ ID NO: 115224 - DNA, 80 bp, synthetic construct
  source 1..80: mol_type = other DNA
cgctgccatattacgtcggcacgtaggacctggggagagggcggtacagtggatgaaccggaggaagcacgtttccccca

SEQ ID NO: 115225 - DNA, 80 bp, synthetic construct
  source 1..80: mol_type = other DNA
gtgatagaataggcaacggtactccttaacacaatgcccccccaaatttacggaaaagggcaaccctggtaggacattga

SEQ ID NO: 115226 - DNA, 80 bp, synthetic construct
  source 1..80: mol_type = other DNA
ctgagcgccaagaatctaaagcccgcaaaaaaaataagactagcgcccttttaacttcacgtcttaccggccttgcttta

SEQ ID NO: 115227 - DNA, 80 bp, synthetic construct
  source 1..80: mol_type = other DNA
tgtcccaactcgagtgttgtgtacgaggtggagggagccatcctgcatctgcccgggtgtgtcccttgcgtccgcgaggg

SEQ ID NO: 115228 - DNA, 80 bp, synthetic construct
  source 1..80: mol_type = other DNA
tcacctggcgcactggttgtgggcgtcgtttgcgctgctgttctgcggcgccatgttggcccaacggaaggcgctgccca

SEQ ID NO: 115229 - DNA, 80 bp, synthetic construct
  source 1..80: mol_type = other DNA
taccgggctgtgtgccctgtgtgaggaccgggaacacctcgcgctgctgggtggccttaacacctactgtggcttctccc

SEQ ID NO: 115230 - DNA, 80 bp, synthetic construct
  source 1..80: mol_type = other DNA
ggaaaatgaagctaaggtgcttgagctgcttgatggggaacatcggcgtcttgccagggccatcattgagctcacctatc

SEQ ID NO: 115231 - DNA, 80 bp, synthetic construct
  source 1..80: mol_type = other DNA
ctacaagtttgctttgtggagggtcagtgcggaggagtacgttgaggtccgccgtgtaggggaacaccattacatcactg

SEQ ID NO: 115232 - DNA, 80 bp, synthetic construct
  source 1..80: mol_type = other DNA
acacttaaaatatttaccgtatggacgggcgtcagaaagatgcccggcccaagttgagagggtacattcaacacgaccac

SEQ ID NO: 115233 - DNA, 80 bp, synthetic construct
  source 1..80: mol_type = other DNA
cagaaagccacactgactgagggagtatacaggatcatgcaaagagggctgttagggaaaactcaggttggagtgggagt

SEQ ID NO: 115234 - DNA, 80 bp, synthetic construct
  source 1..80: mol_type = other DNA
acatggtgaagaaactgccacatgcggtgatgggagcctcctacggatttcagtactcaccagcgcagcgggttgacttt

SEQ ID NO: 115235 - DNA, 80 bp, synthetic construct
  source 1..80: mol_type = other DNA
cgcctaactacaagtttgcactgtggagggtatccgcggaggaatacgtggaggttcgcagggtaggggaattccattat

SEQ ID NO: 115236 - DNA, 80 bp, synthetic construct
  source 1..80: mol_type = other DNA
cgcttttaaaatcatgagcggagagaagcccagcactgaagacctagtaaacctgttgccctccattctgtgcccaggag

SEQ ID NO: 115237 - DNA, 80 bp, synthetic construct
  source 1..80: mol_type = other DNA
tgaccaggtattcggcgacccccggagatcctcccagcccctcatacgacctggagctgattacatcgtgctcctccaac

SEQ ID NO: 115238 - DNA, 80 bp, synthetic construct
  source 1..80: mol_type = other DNA
catgggagtagtgggtggcgtggtgtcggccgtctcgggcgtgtcctcctttatgtccaaccccttcggggcgcttgccg

SEQ ID NO: 115239 - DNA, 80 bp, synthetic construct
  source 1..80: mol_type = other DNA
cactcaagacgcagtcggaggtcactgacagtgcagacacacggagaaagcactctagcgaacaagaagggggcttggat

SEQ ID NO: 115240 - DNA, 80 bp, synthetic construct
  source 1..80: mol_type = other DNA
gcatggttgactacccatacaggttgtggcattacccttgcactgtgaacttcaccagacaccgggttcgcatgtacgtg

SEQ ID NO: 115241 - DNA, 80 bp, synthetic construct
  source 1..80: mol_type = other DNA
gggccatcggatggcctgggacatgatgcagaactggtcacctgctgtgtcactggttgtggcgcaagtcctgcggctgc

SEQ ID NO: 115242 - DNA, 80 bp, synthetic construct
  source 1..80: mol_type = other DNA
tctaagaagactcctatggggttttcctatgacaccaggtgcttcgactctacagtcacggagcatgacatcaaaactga

SEQ ID NO: 115243 - DNA, 80 bp, synthetic construct
  source 1..80: mol_type = other DNA
cagaacatagtcgactcccagtacctttatggcctttcaccagccattgtgggctgggccattaaatgggagtgtgtggt

SEQ ID NO: 115244 - DNA, 80 bp, synthetic construct
  source 1..80: mol_type = other DNA
ttcacagcctctatcaccagcccgctcaccacccagaacaccctcctgtttaacatcttggggtggtgggtagccgccca

SEQ ID NO: 115245 - DNA, 80 bp, synthetic construct
  source 1..80: mol_type = other DNA
gggtgtcaaagttcatctcccaggccacccttggcaccacctcgtcccgcagccgggcgctcaggtcggcgtgttgggcc

SEQ ID NO: 115246 - DNA, 80 bp, synthetic construct
  source 1..80: mol_type = other DNA
cgaggctgaaaacgacagtgttgtgtgttgctccatgtcgtattcctggacgggggcccttataacaccgtgtgctgctg

SEQ ID NO: 115247 - DNA, 80 bp, synthetic construct
  source 1..80: mol_type = other DNA
tggaggcctggctgaaagagtacggagaggaacgtctcacccgtatgctggtcagcggggatgattgtgttgtgagacct

SEQ ID NO: 115248 - DNA, 80 bp, synthetic construct
  source 1..80: mol_type = other DNA
gggcacaggatggcgtgggacatgatgatgaattggtcaccaaccgtcacattcgtgatttccagcgctctaagggcgcc

SEQ ID NO: 115249 - DNA, 80 bp, synthetic construct
  source 1..80: mol_type = other DNA
agtcatagggccaaccaggcagtgcaaaataagattaacagtaagcttgatccccgccctcccgtagaggagcctccacc

SEQ ID NO: 115250 - DNA, 80 bp, synthetic construct
  source 1..80: mol_type = other DNA
agagcatcgattgaccgcagcatgcaacttcacgcgcggggaccgctgcagattggacgacagggataggtggcagcaga

SEQ ID NO: 115251 - DNA, 80 bp, synthetic construct
  source 1..80: mol_type = other DNA
ggatggctgatatcccacttcaatggatcgcgtcggctatagtcctggaatttttcatgatggtgttgctcataccagaa

SEQ ID NO: 115252 - DNA, 80 bp, synthetic construct
  source 1..80: mol_type = other DNA
gcctcctctcagagcgtggaagagtcgagcgcgtgcagtgagggcgtctctcatcgcccggtggtggagtgcggccgtct

SEQ ID NO: 115253 - DNA, 80 bp, synthetic construct
  source 1..80: mol_type = other DNA
cgcccgagtgccagaaattatgctaaaaagtagcgttaaaggcatcaatcacgttatctatcattatgacgccaaacagg

SEQ ID NO: 115254 - DNA, 80 bp, synthetic construct
  source 1..80: mol_type = other DNA
agagtggaagactgcagtggaagctgtgaacgatccaaggttctgggctctagtggacaaggaaagagagcaccacctga

SEQ ID NO: 115255 - DNA, 80 bp, synthetic construct
  source 1..80: mol_type = other DNA
cttccaaagaacccgctcggagccagcctccgacggggaaagtcggaccgtccccgccgcggccaggcttgttgaaagcc

SEQ ID NO: 115256 - DNA, 80 bp, synthetic construct
  source 1..80: mol_type = other DNA
tgacgcagaaaaagttcctctgtgaccgggtgatgtggaggatacccttctctagcaacttcatgtctatgggctccctc

SEQ ID NO: 115257 - DNA, 80 bp, synthetic construct
  source 1..80: mol_type = other DNA
tttgcgctgcgcagaggcttcaccgtccgagagatggttactacctacttcctcctgttggtcctggagatgggactgcc

SEQ ID NO: 115258 - DNA, 80 bp, synthetic construct
  source 1..80: mol_type = other DNA
gacccctggctcccagcctccaccgctaccgtctccacttctaccgccgccacggctaccgagcctcccaggaggcgaag

SEQ ID NO: 115259 - DNA, 80 bp, synthetic construct
  source 1..80: mol_type = other DNA
ccccggccgtacggtttctgggcttgctttcatttgttttatattggatcaatggagcgcccaaacccatctgtcggagg

SEQ ID NO: 115260 - DNA, 80 bp, synthetic construct
  source 1..80: mol_type = other DNA
ctcctccttaacatcctagggggttgggttgcctcccagctcgctcccccaacagcatcgacggcctttgtcgtcagcgg

SEQ ID NO: 115261 - DNA, 80 bp, synthetic construct
  source 1..80: mol_type = other DNA
gcggtcctatgctatgcccctcaggccatgttgcaggaattttccgagcagcagtatgcacaaggggcgtggccaagtcg

SEQ ID NO: 115262 - DNA, 80 bp, synthetic construct
  source 1..80: mol_type = other DNA
cgctggggctgccgtgaggcgcgtgtactgcggtctgtctcgtctcctcttctccccttccctccccctccgcatcccag

SEQ ID NO: 115263 - DNA, 80 bp, synthetic construct
  source 1..80: mol_type = other DNA
aaccaacgaggggctccaaagccatgacctctctgttgacctctggtactaggttggctgtaaaccaatcagatggtctg

SEQ ID NO: 115264 - DNA, 80 bp, synthetic construct
  source 1..80: mol_type = other DNA
ccctcacactggactgctcacctagaacagggctggactttaatgagatggtgctattgacaatgaaagaaaaatcatgg

SEQ ID NO: 115265 - DNA, 80 bp, synthetic construct
  source 1..80: mol_type = other DNA
tccaggggctccagcggtgaggcggccggcgtcgtcgcggcgcgggcggccgccacgacggcctggacggagacgtccgc

SEQ ID NO: 115266 - DNA, 80 bp, synthetic construct
  source 1..80: mol_type = other DNA
ttgtcgtcgacgacggcgccggacgggcagccggtcaatgaaacgttgaatcatttctccgcgacggcgacgcatggttt

SEQ ID NO: 115267 - DNA, 80 bp, synthetic construct
  source 1..80: mol_type = other DNA
cattgactgctggtgcgacaagatggctatctatgtgcgttatggaagatgcatcagagggaagaacccaaggcgtagcc

SEQ ID NO: 115268 - DNA, 80 bp, synthetic construct
  source 1..80: mol_type = other DNA
gtgtggctttgccgacctcatggggtacatccccgtcgtaggcgccccgcttagtggcgccgccagagctgtcgcgcacg

SEQ ID NO: 115269 - DNA, 80 bp, synthetic construct
  source 1..80: mol_type = other DNA
cgaggaccaggcactccaggagaagtagaagatctgtgtcagtgcaaacccacggagaaagctccctagtgaacaaaaaa

SEQ ID NO: 115270 - DNA, 80 bp, synthetic construct
  source 1..80: mol_type = other DNA
gtccccctggacacggaggacgactccgatgcggcggacgggacggcggcccgtcccgccgctccagacgcccggagcgg

SEQ ID NO: 115271 - DNA, 80 bp, synthetic construct
  source 1..80: mol_type = other DNA
gcaactcttcaatctgcttacatgccagattccgaccagataccccatattacgtggtacttacaaacctccaaacctaa

SEQ ID NO: 115272 - DNA, 80 bp, synthetic construct
  source 1..80: mol_type = other DNA
gcggccgttttacggcggcacatcggcccatcggaggggctaaaccagtggatgaatcgactgatagccttcgcctccag

SEQ ID NO: 115273 - DNA, 80 bp, synthetic construct
  source 1..80: mol_type = other DNA
gatggaggcagaggcacgttttcgtgaggattcggcagcggttgatgacgagcccggagactgctggcgtgggcgacgac

SEQ ID NO: 115274 - DNA, 80 bp, synthetic construct
  source 1..80: mol_type = other DNA
ttgaccgtctccaggtggttgacgatcactacaaagcagtcctaaaggagatcaagcaccgggcatccggagtgaaggcg

SEQ ID NO: 115275 - DNA, 80 bp, synthetic construct
  source 1..80: mol_type = other DNA
acctaatcgttatcgccgagagcgcgggcgtggaggaggacgcacgagccctccgagccttcacggaggctatgacgagg

SEQ ID NO: 115276 - DNA, 80 bp, synthetic construct
  source 1..80: mol_type = other DNA
cactctaccaggcaacccagctgtggcgtcactgatgtctttctcggcgtcccttacaagcccactgtcaacttccacga

SEQ ID NO: 115277 - DNA, 80 bp, synthetic construct
  source 1..80: mol_type = other DNA
cagttgtcattgagctcacatactctggaagtgatggtccctgtaaaattccgattgtctcagtcgcgagcttaaacgac

SEQ ID NO: 115278 - DNA, 80 bp, synthetic construct
  source 1..80: mol_type = other DNA
ataaagcccacttccctcaagaggctgtttgctgtatccacaatggtccgtattaaatcttgagcaacttgatccgtgtc

SEQ ID NO: 115279 - DNA, 80 bp, synthetic construct
  source 1..80: mol_type = other DNA
gagatagttgacgtgatgtgccatgccacgctcacacagaaactgctgacaccgacccgggttcccaactaccaagtgta

SEQ ID NO: 115280 - DNA, 80 bp, synthetic construct
  source 1..80: mol_type = other DNA
tctgcccggttgctctttctctatcttcttgcttgctctcctgtcttgcatctcagtgccagtgtcggccgtggaggtca

SEQ ID NO: 115281 - DNA, 80 bp, synthetic construct
  source 1..80: mol_type = other DNA
cggctcccggtgggcctggcgtcgcctggggacgccagagtgcccgctgtgccaggttggtggtgtggaagggaccggag

SEQ ID NO: 115282 - DNA, 80 bp, synthetic construct
  source 1..80: mol_type = other DNA
gcaagggacctttcctatcaacagttacacggaaggccagtgcgtgccaaagccttcgcccaacttcaagaccgctatct

SEQ ID NO: 115283 - DNA, 80 bp, synthetic construct
  source 1..80: mol_type = other DNA
ttattgatgaaattgtagcccgcacaccagacctgattcagactatagtttcggtgttaacggaaatgtcaatggatgcg

SEQ ID NO: 115284 - DNA, 80 bp, synthetic construct
  source 1..80: mol_type = other DNA
ggagccgggggatcctgatctcagtgacgggtcctggtctactgttagcggggaaagcggtcaggaggacgtcgtgtgct

SEQ ID NO: 115285 - DNA, 80 bp, synthetic construct
  source 1..80: mol_type = other DNA
gtccaattgaacagaaagtcgtacgagacggagtacccaaaatgtaagaacgatgattgggactttgttatcacaacaga

SEQ ID NO: 115286 - DNA, 80 bp, synthetic construct
  source 1..80: mol_type = other DNA
tgtggcttcgccgacctcatggggtacattcccgtcgtgggcgcccccctaggtggcgtcgcggcggccctggctcatgg

SEQ ID NO: 115287 - DNA, 80 bp, synthetic construct
  source 1..80: mol_type = other DNA
atggacaggtattctgtggatgctgacctgcaactgggtgagcttatctgaaacaccatctaacaggaataaccgggata

SEQ ID NO: 115288 - DNA, 80 bp, synthetic construct
  source 1..80: mol_type = other DNA
ccgagctcaaatcgcatccgagcaccccccccaaatcccggcgccggtcgtcacgcacgccaatgccctccctgacggcc

SEQ ID NO: 115289 - DNA, 80 bp, synthetic construct
  source 1..80: mol_type = other DNA
tcctcgggagggcctgtcttgtgcccccaaagtcattgcgttggcatcttcagagctgctgtctgcacccgcggtgtagc

SEQ ID NO: 115290 - DNA, 80 bp, synthetic construct
  source 1..80: mol_type = other DNA
tgtctccggtgatgccttccaaaatgtgagtgataaagcgtggtagtttttctttaatcatttgcgtaatagaaaagtcc

SEQ ID NO: 115291 - DNA, 80 bp, synthetic construct
  source 1..80: mol_type = other DNA
gtggatgaactctacggtgttcgtgaagacgtgcggcgcccccccctgcaatatctatgggggcgtgcggtggagcaaaa

SEQ ID NO: 115292 - DNA, 80 bp, synthetic construct
  source 1..80: mol_type = other DNA
cacatggaaggagaacacaagaaacttgctgaagccattttcagattaacgtaccaaaacaaagtggtgcgtgtgcaaag

SEQ ID NO: 115293 - DNA, 80 bp, synthetic construct
  source 1..80: mol_type = other DNA
gacacaatccccgactgcgcgctgcggtcccagaccctggagagtctagacgcgcgctacgtctcgcgagacggcgcgca

SEQ ID NO: 115294 - DNA, 80 bp, synthetic construct
  source 1..80: mol_type = other DNA
cacgccccctggatctgtaacgaccccccatcccaacatagaggagatagctcttgggcacgagggcgaaatcccctttt

SEQ ID NO: 115295 - DNA, 80 bp, synthetic construct
  source 1..80: mol_type = other DNA
tgctatcatcatggttatgttttcaggggtcgatgccagcacacgtaccgtcggtggcagtgcagctcagtctgccaggg

SEQ ID NO: 115296 - DNA, 80 bp, synthetic construct
  source 1..80: mol_type = other DNA
ggttgtcgggggaggcgaagtgcatgacccccacgcgcgataacccgaacgcgctatccggacacgggtaaaacccggcc

SEQ ID NO: 115297 - DNA, 80 bp, synthetic construct
  source 1..80: mol_type = other DNA
ggaagaattggaagaggtggaagaggagcaggcaacagagcagcccgtcgccgcaccatccgcgccggcagccccgccgg

SEQ ID NO: 115298 - DNA, 80 bp, synthetic construct
  source 1..80: mol_type = other DNA
tgctgtctttaacatttgtcaaaacaactttttcattgcactatgcatggaagacaatggctatgatactgtcaattgta

SEQ ID NO: 115299 - DNA, 80 bp, synthetic construct
  source 1..80: mol_type = other DNA
ctgcttttcctcctgctggcggacgcgcgcgtgtgcgcctgcctgtggatgatgtttttggtggctcaagccgaggcggc

SEQ ID NO: 115300 - DNA, 80 bp, synthetic construct
  source 1..80: mol_type = other DNA
tgctaacaaaaccctgggatgtaattccgatggtgactcagttagccatgacagacacaaccccttttgggcaacaaaga

SEQ ID NO: 115301 - DNA, 80 bp, synthetic construct
  source 1..80: mol_type = other DNA
catcgggcccggggcgctgccgggacgctcggcgatgggatgtgggcgcggcttccgacgcgcgccgtcgtcgtgctcgc

SEQ ID NO: 115302 - DNA, 80 bp, synthetic construct
  source 1..80: mol_type = other DNA
gtattgttcctggcggccctacaaaagcaatattgtcgcctgcctccagcactgccggggcaacatctcctttgcgcgac

SEQ ID NO: 115303 - DNA, 80 bp, synthetic construct
  source 1..80: mol_type = other DNA
tgcatttgtccaaccccgaagttgcatgaaaatttttgctgtactctttgtggtgagtttaataaaagctgaaataagac

SEQ ID NO: 115304 - DNA, 80 bp, synthetic construct
  source 1..80: mol_type = other DNA
gtagggcgctctactttctgaatgacatggcaaaaaccaggaaagacattggggaatgggagcattcggttggcttctcg

SEQ ID NO: 115305 - DNA, 80 bp, synthetic construct
  source 1..80: mol_type = other DNA
aaggctgggggccgctcaccgtcggaaatgtcatgccttccgacgataggccctactgctggcattatgcgccccgccca

SEQ ID NO: 115306 - DNA, 80 bp, synthetic construct
  source 1..80: mol_type = other DNA
gtgctttaccaacaatatgacgagatggaggagtgctcaaggaacattccatatctcgcggagggagttcagatagctga

SEQ ID NO: 115307 - DNA, 80 bp, synthetic construct
  source 1..80: mol_type = other DNA
gcaggccaaacttacctacgaaaaaaccactaccggcaaccgcctcagctacaagctacccacccagcgccaaaaactgg

SEQ ID NO: 115308 - DNA, 80 bp, synthetic construct
  source 1..80: mol_type = other DNA
atggctcctgtccccccgaggctctcgcccctcctggggccccactgacccccggcataggtcgcgcaacgtgggtaaag

SEQ ID NO: 115309 - DNA, 80 bp, synthetic construct
  source 1..80: mol_type = other DNA
ctcgtcattgtcatcctcgtcgtaatcggctggggtcgggggtggggtcggaactggagccggttgcaccaccaggacca

SEQ ID NO: 115310 - DNA, 80 bp, synthetic construct
  source 1..80: mol_type = other DNA
ggtggacgcgcggtcggtgtacccgtacgatgagtttgtgctggcgacgggcgactttgtgtacatgtccccgttttacg

SEQ ID NO: 115311 - DNA, 80 bp, synthetic construct
  source 1..80: mol_type = other DNA
cccaacataccctcctgtttaacatcttgggtggatgggtggccgcccaactcgccccccctagtgctgcctcagctttc

SEQ ID NO: 115312 - DNA, 80 bp, synthetic construct
  source 1..80: mol_type = other DNA
aggtgacagaaggtgaggatggagctgaggaaagcgaatgggaacttgaaaacaaactcgctgcccgtaaccaaatatgc

SEQ ID NO: 115313 - DNA, 80 bp, synthetic construct
  source 1..80: mol_type = other DNA
ttgctccgccctctacatcggggacatctgtggtgcggtgatgatatcagcccagattttcatcgtctcgccgaagcacc

SEQ ID NO: 115314 - DNA, 80 bp, synthetic construct
  source 1..80: mol_type = other DNA
gcacggaagaagccatgctgcctgtgagcccctcagaggacactgagtcaaaaaaccccatgcgcttggaggcgcaggat

SEQ ID NO: 115315 - DNA, 80 bp, synthetic construct
  source 1..80: mol_type = other DNA
atgaagagagtgtcactaatgatgaggacatgagaccctattgttggcattatccgcccaagccatgcggcacagttcca

SEQ ID NO: 115316 - DNA, 80 bp, synthetic construct
  source 1..80: mol_type = other DNA
ttactgggctcacacatattgatgctcactttctctctcagaccaagcaagggggagagaactttgcgtatctagtggcc

SEQ ID NO: 115317 - DNA, 80 bp, synthetic construct
  source 1..80: mol_type = other DNA
acccttcccacccccgcgtgccagagatcaccccggtcccccggcacccgccactcctccatatcctcgctttaggaaca

SEQ ID NO: 115318 - DNA, 80 bp, synthetic construct
  source 1..80: mol_type = other DNA
caggggccgtggggtcggcgcggtcccagggtgaagggaaggattcccgcgattcggacagcgacgcgacagcgtggcgc

SEQ ID NO: 115319 - DNA, 80 bp, synthetic construct
  source 1..80: mol_type = other DNA
tgtccaatacctttatggtgttggagctggtgtggtggggtgggcgttgaaatgggagttcgtcatcctcgttttcctcc

SEQ ID NO: 115320 - DNA, 80 bp, synthetic construct
  source 1..80: mol_type = other DNA
cacaagtgctcacggtggaaccatagatgtgagaatagggaaaaacggaagtcttgcatttgacaaagatggagatttgg

SEQ ID NO: 115321 - DNA, 80 bp, synthetic construct
  source 1..80: mol_type = other DNA
tggacccatggcaatcacatcagcgagcgcagcacaacgtagaggccgtattgggagaaacccttcccagattggagatg

SEQ ID NO: 115322 - DNA, 80 bp, synthetic construct
  source 1..80: mol_type = other DNA
tcgagacatctgcgagtttacttactttgagctgccagaggaacaccctcagggaccagctcacggcgtaaggataacag

SEQ ID NO: 115323 - DNA, 80 bp, synthetic construct
  source 1..80: mol_type = other DNA
tggcctcctatattttgccatcttcttcgtggcagcttggtacatcaggggtcgggtggtccccttgaccacctattgcc

SEQ ID NO: 115324 - DNA, 80 bp, synthetic construct
  source 1..80: mol_type = other DNA
ttgagttaggagaagcagcggcgatcttcatgacggccaccccacctgggacgtcagacccgtttccagatacgaactca

SEQ ID NO: 115325 - DNA, 80 bp, synthetic construct
  source 1..80: mol_type = other DNA
atggcagtattggggtagctaccgcactcctgccactggatcagcggcttcacttatcaatggagtggtgaagttgttga

SEQ ID NO: 115326 - DNA, 80 bp, synthetic construct
  source 1..80: mol_type = other DNA
atcgtgggcttgtacgggaatggagtcatcttgggcaacggctcgtatgtcagtgccatcgtgcaaggcgaaagagaaga

SEQ ID NO: 115327 - DNA, 80 bp, synthetic construct
  source 1..80: mol_type = other DNA
cctatcatggatcatatgaggtcaagccatcaggatcagcctcatccatggtcaatggtgtggtgagactgctaaccaaa

SEQ ID NO: 115328 - DNA, 80 bp, synthetic construct
  source 1..80: mol_type = other DNA
gccctcatgggcccctcgtatgggtttcaatactccccagcgcagcgggttgagttcttactgaagacgtggaggtccaa

SEQ ID NO: 115329 - DNA, 80 bp, synthetic construct
  source 1..80: mol_type = other DNA
acttacaccaaaatatagtagacacccagtatctttacggtctgagctccagcatcgtctcgtgggccgttaagtgggag

SEQ ID NO: 115330 - DNA, 80 bp, synthetic construct
  source 1..80: mol_type = other DNA
aatcacagcatacgcccagcaaaccaggggccttcttgggactattgtgaccagcttgactggcagggataagaatgtgg

SEQ ID NO: 115331 - DNA, 80 bp, synthetic construct
  source 1..80: mol_type = other DNA
ttcaactcgtccgggtgtcctgaacgcatgtcttcctgtaggccgatcaccttttttgaccagggttggggccctatcac

SEQ ID NO: 115332 - DNA, 80 bp, synthetic construct
  source 1..80: mol_type = other DNA
gcgagaacaggaacaagctaagaaaacccatgtatatgcccaggctccactgtccggaataaaaataaccaaagaaggtc

SEQ ID NO: 115333 - DNA, 80 bp, synthetic construct
  source 1..80: mol_type = other DNA
ataatcaactggagatttcactggctgatccattcgaagtaaaaaacaaaaaactaagtttaaaggttggccatggttta

SEQ ID NO: 115334 - DNA, 80 bp, synthetic construct
  source 1..80: mol_type = other DNA
acgggtgcatccggggtgaaattatatgcattttggactggatcttgaggttggcaatgttgccgcctagatcccgtctc

SEQ ID NO: 115335 - DNA, 80 bp, synthetic construct
  source 1..80: mol_type = other DNA
gtccgagaacaaaataatcgtcctcgattcattcgacccgctggtcgccgaaactgatgacagggaaatctcagtggcgg

SEQ ID NO: 115336 - DNA, 80 bp, synthetic construct
  source 1..80: mol_type = other DNA
ctagccctggtaatggtgttaaccagggcgaaaggactagaggttagaggagaccccgcggtctgaagtgcacggcccag

SEQ ID NO: 115337 - DNA, 80 bp, synthetic construct
  source 1..80: mol_type = other DNA
agacgttcatctgcgtgagcttccgatctcagtattgtttggaaggatcattgattaacgcggtttgaacagttttttgg

SEQ ID NO: 115338 - DNA, 80 bp, synthetic construct
  source 1..80: mol_type = other DNA
gcgggtggaggacgaccctgacccccaccgcgggccaggcccccaggagcgcggcgtaagcggccgcggccccgcgcacc

SEQ ID NO: 115339 - DNA, 80 bp, synthetic construct
  source 1..80: mol_type = other DNA
cgctgagcgacgacctcggcgtgtaccgtaacgacaagatccacaaggcggtgagcgccagccgccggcgggagctgagc

SEQ ID NO: 115340 - DNA, 80 bp, synthetic construct
  source 1..80: mol_type = other DNA
gagtcgggcgcgtgcagttagggcgtccctcatctcccgtggagggagagcggccgtttgcggccagtatctcttcaact

SEQ ID NO: 115341 - DNA, 80 bp, synthetic construct
  source 1..80: mol_type = other DNA
gctcacatggagcccgtcccggggctggcgtggcaggcggcctccgtcaatctggagttccgggacgcgtccccacaaca

SEQ ID NO: 115342 - DNA, 80 bp, synthetic construct
  source 1..80: mol_type = other DNA
cgaaagctgtccccaatcctcccgccacgacccgccgccctgcagataccgcaccgtattggcaagcagcccgtaaacgc

SEQ ID NO: 115343 - DNA, 80 bp, synthetic construct
  source 1..80: mol_type = other DNA
atctggcctctcctgttgctagtgctcactctacctcggagggcctatgcccaggacactgaccaggcggtgtcggctgg

SEQ ID NO: 115344 - DNA, 80 bp, synthetic construct
  source 1..80: mol_type = other DNA
ccagactccgacgctgagtcctattcttccatgccccccctggaggtggagcctggggatccggacctcagcgacgggtc

SEQ ID NO: 115345 - DNA, 80 bp, synthetic construct
  source 1..80: mol_type = other DNA
cgtccattattatggcaattggccctacagcggccgcctgagcaaaaatgttttttggatcagaaacatcatagttgtgg

SEQ ID NO: 115346 - DNA, 80 bp, synthetic construct
  source 1..80: mol_type = other DNA
ccctgaacagccccatccctaggaggccaatggttaggagcgtgtacgacaggtggcgcagggcccacgggccggcgaag

SEQ ID NO: 115347 - DNA, 80 bp, synthetic construct
  source 1..80: mol_type = other DNA
tgcagggccggcgaaagtagttgatgtccgtggccacgggggtggcgatgaactcacacacggcatcctgcccgtggtcc

SEQ ID NO: 115348 - DNA, 80 bp, synthetic construct
  source 1..80: mol_type = other DNA
gggagtggacaagttgtcacctacgccctaaacactttcaccaacctggccgtccagctggtgaggatgatggaagggga

SEQ ID NO: 115349 - DNA, 80 bp, synthetic construct
  source 1..80: mol_type = other DNA
ggaggggagatggcgttaacaacaccacatgctcctgcggagcggccattgcaggccacgtgaggaacggctccatgagg

SEQ ID NO: 115350 - DNA, 80 bp, synthetic construct
  source 1..80: mol_type = other DNA
cactgatgggacccttaatccttatacaggccagcctcttgcgagtgccgtattacgtgcgtgcgcacgtgcttctccgc

SEQ ID NO: 115351 - DNA, 80 bp, synthetic construct
  source 1..80: mol_type = other DNA
gcttggaggggcgatgatctttctctccacggccgtctcggcagacgtggggtgctcagttgacttcgctagaaaagaga

SEQ ID NO: 115352 - DNA, 80 bp, synthetic construct
  source 1..80: mol_type = other DNA
tggctttcacagccgccgtcaccagcccactaaccactagccagaccctcctcttcaacatcctgggggggtgtgtggct

SEQ ID NO: 115353 - DNA, 80 bp, synthetic construct
  source 1..80: mol_type = other DNA
aacaataattgagccaccaactactaaggcgcccactaccactaaacccaccacagttaggacaactagggaaacaacca

SEQ ID NO: 115354 - DNA, 80 bp, synthetic construct
  source 1..80: mol_type = other DNA
gctgccttttcactacatggttactctccgggcgagctcaatagggtcgcatcatgtctcaggaaacttgggtcgccacc

SEQ ID NO: 115355 - DNA, 80 bp, synthetic construct
  source 1..80: mol_type = other DNA
agttggagatgaataccactatgggggggctaccagtgaagatgacagtaacctagcccattggacagaggcaaagatca

SEQ ID NO: 115356 - DNA, 80 bp, synthetic construct
  source 1..80: mol_type = other DNA
cggcctaccaggccacagtatgcgctagggcaaaagcccctcctccttcttgggacgtgatgtggaagtgtctcattagg

SEQ ID NO: 115357 - DNA, 80 bp, synthetic construct
  source 1..80: mol_type = other DNA
ggcatgttccaaccaggcgaccgcctgcacgtcgagctcgcgcgccttctccgtctggtccaacagaatttcgacctgat

SEQ ID NO: 115358 - DNA, 80 bp, synthetic construct
  source 1..80: mol_type = other DNA
ctcgctgtttggtggactatccctatcgactctggcattacccttgcaccgtgaacttcactcttcatcgtgttcgggtc

SEQ ID NO: 115359 - DNA, 80 bp, synthetic construct
  source 1..80: mol_type = other DNA
gaagtccaaaaagaccccgatggggttttcatatgatacccgctgctttgactccacagtcactgagagcgatatccgta

SEQ ID NO: 115360 - DNA, 80 bp, synthetic construct
  source 1..80: mol_type = other DNA
gcgcgacgatgcaaacacggcccgggcgagtccttctgtgaccgccgagtctggccatcggacgacggcctgggcgtccg

SEQ ID NO: 115361 - DNA, 80 bp, synthetic construct
  source 1..80: mol_type = other DNA
ccacttcgccaaggagtgcagcctgtacggccccaggaggactgggttaccaaagccgaaaggcccccacggcccaagcg

SEQ ID NO: 115362 - DNA, 80 bp, synthetic construct
  source 1..80: mol_type = other DNA
gggaaggcatatgggatagagccaaacatcagaactggagttaggaccataacaacaggaggctccatcacatactctac

SEQ ID NO: 115363 - DNA, 80 bp, synthetic construct
  source 1..80: mol_type = other DNA
gcgattagaaaacgggttagaagtaaccaacgaaggaaagcttaacgttaagttgggatcaggcctccaatttgacaata

SEQ ID NO: 115364 - DNA, 80 bp, synthetic construct
  source 1..80: mol_type = other DNA
acgtaagccctcagaaccgtctcggaagcaggaccccacgtgctttagcctcaaagcccagtgtcagaccacacctgatg

SEQ ID NO: 115365 - DNA, 80 bp, synthetic construct
  source 1..80: mol_type = other DNA
ctctaatgacagcattacctggcagcttcaggccgcggtcctccacgtccccgggtgcgtcccgtgtgagaaaatgggaa

SEQ ID NO: 115366 - DNA, 80 bp, synthetic construct
  source 1..80: mol_type = other DNA
tgtactccaggcctcactcctacgcgtcccttactttgtgagggcacacgcgctggttaagatctgtggcttgttgcgag

SEQ ID NO: 115367 - DNA, 80 bp, synthetic construct
  source 1..80: mol_type = other DNA
cccctgacctacttcgatcaaggctggggccccattacggacgccaatgtatctggtagctcccaagataggccttactg

SEQ ID NO: 115368 - DNA, 80 bp, synthetic construct
  source 1..80: mol_type = other DNA
ccctggacgcgggccgccgtctggctgcggcccgcatggccatgccgcacgccacgctgatcgccggaaacgtctgctct

SEQ ID NO: 115369 - DNA, 80 bp, synthetic construct
  source 1..80: mol_type = other DNA
gtgactgtactactccactcgcgcgggccgcctgggagacagcccgccacactccagtcaattcctggttgggcaacatc

SEQ ID NO: 115370 - DNA, 80 bp, synthetic construct
  source 1..80: mol_type = other DNA
gtggcgacgcgttgttctgcataagctctgtatgctgatacataaacacagagtctgtatcgctatcagattcccgaaca

SEQ ID NO: 115371 - DNA, 80 bp, synthetic construct
  source 1..80: mol_type = other DNA
gtcgtgccatgtcgagatcaggacgaactggtggtgagggcacgtgtctcaccggggtgtggttggagtgtccgcgagac

SEQ ID NO: 115372 - DNA, 80 bp, synthetic construct
  source 1..80: mol_type = other DNA
ggtcagcccacagaggagttagacattgacctgaacttctttgatattaatggaggggcaggtgataatgaatttaaccc

SEQ ID NO: 115373 - DNA, 80 bp, synthetic construct
  source 1..80: mol_type = other DNA
ggagcggcgagaggtcatggttccacgaacacgctagggtcggatgcgcggacaattaggcctgggttcggacggcgtgg

SEQ ID NO: 115374 - DNA, 80 bp, synthetic construct
  source 1..80: mol_type = other DNA
tcagaattggctccgcgtctgctttaattatgagcggagtaacacaaacattaaacgtcaatgccagtaccagcaaaggt

SEQ ID NO: 115375 - DNA, 80 bp, synthetic construct
  source 1..80: mol_type = other DNA
aggaaaccagcgtatgctgttccatgtcttactcatggacaggcgctcccatcaccccttgcgcagctgaggaggaaaag

SEQ ID NO: 115376 - DNA, 80 bp, synthetic construct
  source 1..80: mol_type = other DNA
ccgtagtctggagaagcatcgccagggttgagtcgcggcagaacccggttcgcggacggccgcggcgagcgggacttggt

SEQ ID NO: 115377 - DNA, 80 bp, synthetic construct
  source 1..80: mol_type = other DNA
gtggacgcctcgcagacccgtgtaattggcgccctaacaggtcagacattgtctggctttacgggtttgtttactactgg

SEQ ID NO: 115378 - DNA, 80 bp, synthetic construct
  source 1..80: mol_type = other DNA
ctttactgtggaggccctatgttcaacagcaagggggcccagtgtggttatcgccgctgccgtgccagtggagttctgcc

SEQ ID NO: 115379 - DNA, 80 bp, synthetic construct
  source 1..80: mol_type = other DNA
gtggatgaaccgcctgatagcctttgcttcacgtggtaaccatgtatcccccacccattacgtgcctgagacggatgcgt

SEQ ID NO: 115380 - DNA, 80 bp, synthetic construct
  source 1..80: mol_type = other DNA
agccacccaagtggctcccccccccgcgtctacagcttttgtcgtgagcggcctagcaggagccacggttggaagcatcg

SEQ ID NO: 115381 - DNA, 80 bp, synthetic construct
  source 1..80: mol_type = other DNA
gaaaatggagaaattgaaactgaaaggaaccacttatgggatgtgcacagaaaaatttactttctcaaagaatccagccg

SEQ ID NO: 115382 - DNA, 80 bp, synthetic construct
  source 1..80: mol_type = other DNA
ggcctccaaaaactgggttacatcctgcgtgaagttggtacccggcctgggggcaagatctatgctgacgacacagctgg

SEQ ID NO: 115383 - DNA, 80 bp, synthetic construct
  source 1..80: mol_type = other DNA
acgcaatggatgaaccgactgatagcgtttgcctccagaggtaatcatgtgtcgcccactcactacgtgcctgagactga

SEQ ID NO: 115384 - DNA, 80 bp, synthetic construct
  source 1..80: mol_type = other DNA
tcgccgcctcgtaaaatcccataagcgggcgcgtggcgacggcttcggcggcggacgcgagggcgcggcgcgtcaggcgc

SEQ ID NO: 115385 - DNA, 80 bp, synthetic construct
  source 1..80: mol_type = other DNA
aacaattcaaacagaaggtgctcggtcttattcaggcctccgccaagcaggctgaagagctcaagcccgctgtccattcc

SEQ ID NO: 115386 - DNA, 80 bp, synthetic construct
  source 1..80: mol_type = other DNA
cctggacgaccattaccgggacgtgctcaaggagatgaaggcgaaggcgtccacagtcaaggctaaacttctatccgtgg

SEQ ID NO: 115387 - DNA, 80 bp, synthetic construct
  source 1..80: mol_type = other DNA
cttccagctccggggcctacggggcgcggcccgacccagaaactactatgggccgtggaacccctggatgggtgcggccc

SEQ ID NO: 115388 - DNA, 80 bp, synthetic construct
  source 1..80: mol_type = other DNA
accgcggctaacgagggcgtggctgccccgtcgtttccaagaccccataagccagccgacttctccagttacggagcgag

SEQ ID NO: 115389 - DNA, 80 bp, synthetic construct
  source 1..80: mol_type = other DNA
tcttgctcacgtgcattttacatccggccctaggctttgaggtaaccaaaatactgctagcagtgataggccccatgtac

SEQ ID NO: 115390 - DNA, 80 bp, synthetic construct
  source 1..80: mol_type = other DNA
cgtgaccatcgtaccagatgcggcagtatatcaggtgcctgcccctcatgaacacactgcccatatacatgatctctttg

SEQ ID NO: 115391 - DNA, 80 bp, synthetic construct
  source 1..80: mol_type = other DNA
gctaaaatacactcctacaaatgtggaaatatctcccaaccctaattcatacgattatatgaacaagcgagtggtggctc

SEQ ID NO: 115392 - DNA, 80 bp, synthetic construct
  source 1..80: mol_type = other DNA
gtgccagttgactccaccccattctgcaagatccaagtatggattcggggccaaggaggtccgcagcttgtccgggagtg

SEQ ID NO: 115393 - DNA, 80 bp, synthetic construct
  source 1..80: mol_type = other DNA
tctatgggaacatatatcttggaggtttggcatatcagccagttgtaattaaggttacttttaatgaagaagcagatagt

SEQ ID NO: 115394 - DNA, 80 bp, synthetic construct
  source 1..80: mol_type = other DNA
agggtctttaaagagaaggttgacacgaaggctccagaaccaccagcaggagtcaaggaagtgctcaacgagactaccaa

SEQ ID NO: 115395 - DNA, 80 bp, synthetic construct
  source 1..80: mol_type = other DNA
ccctgcgatacccccggttttgtactttttcatttgggagagttcaccctatccccccctttcctcccccgtctctcact

SEQ ID NO: 115396 - DNA, 80 bp, synthetic construct
  source 1..80: mol_type = other DNA
tggagacatcgggcaagagcggtgcgcgcaaagctcatttcccaaggaggaaaggccaaaatttgcggcctttacctctt

SEQ ID NO: 115397 - DNA, 80 bp, synthetic construct
  source 1..80: mol_type = other DNA
ggctggggaactatcagctatgccaccatatcgggccccagtgatgacaagccgtattgctggcactatcccccacgacc

SEQ ID NO: 115398 - DNA, 80 bp, synthetic construct
  source 1..80: mol_type = other DNA
ccagaaacgaaagccaaaaaacccacaacttcctcaaatcttcacttccgttttcccacgatacgtcacttcccatttta

SEQ ID NO: 115399 - DNA, 80 bp, synthetic construct
  source 1..80: mol_type = other DNA
ttcaaagctcatgtcagcagcggtgaaagacgagagagccatccacgcagacatggggtattggatagaaagcaaactca

SEQ ID NO: 115400 - DNA, 80 bp, synthetic construct
  source 1..80: mol_type = other DNA
gccatcctcagttctctcacagtcacccaactgttgaggcgacttcacacatggatcaatgaggactgcaccacgccgtg

SEQ ID NO: 115401 - DNA, 80 bp, synthetic construct
  source 1..80: mol_type = other DNA
actacgcaacagggaatcttcccggttgctccttttctatcttccttctggccctcctctcatgcctgacagtcccagcc

SEQ ID NO: 115402 - DNA, 80 bp, synthetic construct
  source 1..80: mol_type = other DNA
tgacaaggtcaaatgcccatgccaagtcccagcgcccgaattcttcacagagctcgacggggtgcgcctgcacaggttcg

SEQ ID NO: 115403 - DNA, 80 bp, synthetic construct
  source 1..80: mol_type = other DNA
tagaaagaagatttctcgaccccattgggaaggttgtggacctggggtgtggaagaggaggctggtgctactacatggcg

SEQ ID NO: 115404 - DNA, 80 bp, synthetic construct
  source 1..80: mol_type = other DNA
tcaggcattaaaggcgttcaaggactttgcttcgggaaagcgttctcagatagggctcattgaggttctgggaaagatgc

SEQ ID NO: 115405 - DNA, 80 bp, synthetic construct
  source 1..80: mol_type = other DNA
gccgcccacaagacgttaggtttccgggcggtggccagatcgttggcggagtttacttgttgcctcgcaggggccctaga

SEQ ID NO: 115406 - DNA, 80 bp, synthetic construct
  source 1..80: mol_type = other DNA
cttctgtggccgtaaccaaaatactcagttctctcaccattacagccatgctccggaggctccacgagtggattaacgga

SEQ ID NO: 115407 - DNA, 80 bp, synthetic construct
  source 1..80: mol_type = other DNA
atggcgctactagcccttggcaggtggactggcacttacatctatgaccacctcacccctatgtcggattgggctgctag

SEQ ID NO: 115408 - DNA, 80 bp, synthetic construct
  source 1..80: mol_type = other DNA
tggtaggagcgacgcccacttctctggcattgggagtggctttggccatcctccatctggctgtggtcacatctgggcta

SEQ ID NO: 115409 - DNA, 80 bp, synthetic construct
  source 1..80: mol_type = other DNA
tggtccgctgctgtgcccccagggacacgccgtcgggatattccgtgctgcggtgtgtacccggggtgtggctaaagcat

SEQ ID NO: 115410 - DNA, 80 bp, synthetic construct
  source 1..80: mol_type = other DNA
gagccaactgtcagcaccatcacttaaggccacgtgtaccactcatgggaagaactttgacattgacatggtggacgtta

SEQ ID NO: 115411 - DNA, 80 bp, synthetic construct
  source 1..80: mol_type = other DNA
ctatgactcaaacggtggtatgattcccaaacttggaacaggccttagttttgatactacaggggctataacagtgggaa

SEQ ID NO: 115412 - DNA, 80 bp, synthetic construct
  source 1..80: mol_type = other DNA
tgttggacatggttgaggaatggttgaagaaaggagccactgagttctgcataaaagtcctgtgtccatacacgcccaaa

SEQ ID NO: 115413 - DNA, 80 bp, synthetic construct
  source 1..80: mol_type = other DNA
cacaacacccggttctaccaacgcactgttctttaagacgtccacacagcctcaggagccgcatccggaagagttagcat

SEQ ID NO: 115414 - DNA, 80 bp, synthetic construct
  source 1..80: mol_type = other DNA
gtctccgtggcccacgaccacactggacagagatattactacctcacacgtgacccaaccacaccactgtcacgagctgc

SEQ ID NO: 115415 - DNA, 80 bp, synthetic construct
  source 1..80: mol_type = other DNA
cccacggtcttcttcgacatggtcgctggaggccattggggtgtcctcgcgggcttggcgttcttcagcatgcagggcaa

SEQ ID NO: 115416 - DNA, 80 bp, synthetic construct
  source 1..80: mol_type = other DNA
gctctaccaatctgggctagaccagattataaccctcccttgctggagaactggaagaagccggactaccaagcccctca

SEQ ID NO: 115417 - DNA, 80 bp, synthetic construct
  source 1..80: mol_type = other DNA
actggagcccgtcgcaggggcggccttggccgcgcctgtcgtagggcaacataacgttattgacccctggattaggaata

SEQ ID NO: 115418 - DNA, 80 bp, synthetic construct
  source 1..80: mol_type = other DNA
gccttctgtaccatcagagtacctggtcaggaggaggaagttcccaccggcactacctccttgggcccgtccagactaca

SEQ ID NO: 115419 - DNA, 80 bp, synthetic construct
  source 1..80: mol_type = other DNA
atggagccaggacacccaactgagcaggggctacatcctggacttcgcagccatgcacctgtggagggcctggatcaggc

SEQ ID NO: 115420 - DNA, 80 bp, synthetic construct
  source 1..80: mol_type = other DNA
acaccatagccggaccaaaaagcaagcacaatcggagggaagggtataagacacaaaaccagggaccttgggatgagaat

SEQ ID NO: 115421 - DNA, 80 bp, synthetic construct
  source 1..80: mol_type = other DNA
caaggtagggcgacatttaattttctgtcactcaaagaagaagtgcgatgaactcgcaacggccctccgtgggatgggcc

SEQ ID NO: 115422 - DNA, 80 bp, synthetic construct
  source 1..80: mol_type = other DNA
tctccagggcaagggtcaccgccttggcgttggttcccagcgcctgctcggcccgctttcggaagtcccggtggttgtag

SEQ ID NO: 115423 - DNA, 80 bp, synthetic construct
  source 1..80: mol_type = other DNA
gaagagatctccggctgatggccaatgccatctgttcagcggtcccagcggactgggttcctacgggaaggaccacctgg

SEQ ID NO: 115424 - DNA, 80 bp, synthetic construct
  source 1..80: mol_type = other DNA
agatctctgggtcccggtggtgtagcaatatctggcacggtacattccccattaatgcgaccacgacaggcccaagcgtg

SEQ ID NO: 115425 - DNA, 80 bp, synthetic construct
  source 1..80: mol_type = other DNA
acaccagaccttactgttggcattaccccccaaaaccatgtggcattgtgcccgctagaagtgtgtgtggcccggtctac

SEQ ID NO: 115426 - DNA, 80 bp, synthetic construct
  source 1..80: mol_type = other DNA
tggtacttatgacccatttcttccaaatactccaggcgcaggagacgctggacaaaatacttgacttcgacatatacgga

SEQ ID NO: 115427 - DNA, 80 bp, synthetic construct
  source 1..80: mol_type = other DNA
ggacaactactcacactacagtgcaaaatactactttattgattgggtttttactgagagagaatgaaagtactactgaa

SEQ ID NO: 115428 - DNA, 80 bp, synthetic construct
  source 1..80: mol_type = other DNA
aaaaggaggctgcgaaccttgattctggcccccacgagagtggtggcggccgagatggaagaggccttacgcggactgcc

SEQ ID NO: 115429 - DNA, 80 bp, synthetic construct
  source 1..80: mol_type = other DNA
cggccacaggatggcatgggacatgatgatgaactggtcccccaccgtcacgctggtggtttccagtgcactgaggatac

SEQ ID NO: 115430 - DNA, 80 bp, synthetic construct
  source 1..80: mol_type = other DNA
gcccttccaggtcccacctgacgccatgaatcgtcggatcatgaacgtccacgaggcagttaactgtctggagaccctat

SEQ ID NO: 115431 - DNA, 80 bp, synthetic construct
  source 1..80: mol_type = other DNA
ttttgtatctgttttgcagcagccgccgccgccatgagcaccaactcgtttgatggaagcattgtgagctcatatttgac

SEQ ID NO: 115432 - DNA, 80 bp, synthetic construct
  source 1..80: mol_type = other DNA
cgcgcgatcgaagtgctccgcccgccgcccgaacagcgccagctccacggccaccgcggcggtctcctgctgcagctcgc

SEQ ID NO: 115433 - DNA, 80 bp, synthetic construct
  source 1..80: mol_type = other DNA
gcccccctccgaggccagctcctcagccagccagctgtccgctccatctctcagggcaacttgcactactaatcatgact

SEQ ID NO: 115434 - DNA, 80 bp, synthetic construct
  source 1..80: mol_type = other DNA
aaccttttcatgggaggcgatgtgacccgaattgagtccgactccaaggtgatcgttcttgactccctcgattccatgac

SEQ ID NO: 115435 - DNA, 80 bp, synthetic construct
  source 1..80: mol_type = other DNA
aattggcaaggccgttcaccaactatttggaggagcattccgctccttgttcggtggtatgtcatggataacacaaggac

SEQ ID NO: 115436 - DNA, 80 bp, synthetic construct
  source 1..80: mol_type = other DNA
aggcggcgttcagggcccggcggtcgataatcttggtcatgtaattgtgtgtgggttgctcgatggtgtgcgggccgtcg

SEQ ID NO: 115437 - DNA, 80 bp, synthetic construct
  source 1..80: mol_type = other DNA
ccaagtaccgactccggggtagaccaggcctcccccaccgacacttctgaatccgatccccccatcgcggatgaccagtc

SEQ ID NO: 115438 - DNA, 80 bp, synthetic construct
  source 1..80: mol_type = other DNA
cgcctcctgtgagaccagcggcacaatccactgctttttctttgcggtatacaaggacacccaccacacccctccgctga

SEQ ID NO: 115439 - DNA, 80 bp, synthetic construct
  source 1..80: mol_type = other DNA
tcttctagataggaacgtacggtttcggtaatatctccaacatgtctcatgttttttaagttaactattagctttacaag

SEQ ID NO: 115440 - DNA, 80 bp, synthetic construct
  source 1..80: mol_type = other DNA
acccccactgaaatcagctactttaatctaacaggaggagatgactgacaccctagatctagaaatggacggaattatta

SEQ ID NO: 115441 - DNA, 80 bp, synthetic construct
  source 1..80: mol_type = other DNA
gtcagccacgcacccgtcagggccgggtgtgtaaactttgactactcacgcactcgccgctgcgtcgggcgacgcgattt

SEQ ID NO: 115442 - DNA, 80 bp, synthetic construct
  source 1..80: mol_type = other DNA
tgtaattctgtttattcttatactagcacttctgtgccttagggttgccgcctgctgcacgcacgtttgtacctattgtc

SEQ ID NO: 115443 - DNA, 80 bp, synthetic construct
  source 1..80: mol_type = other DNA
ccaattgtgtttatgtatattatatatcgtctgtagacacacgatgattggttgttatttaaacatatgtaaatgaaatt

SEQ ID NO: 115444 - DNA, 80 bp, synthetic construct
  source 1..80: mol_type = other DNA
cgaggatctgctgtgccccactgactgcttcaggaagcactctgaggctacttacaccagatgtggggccggaccatggt

SEQ ID NO: 115445 - DNA, 80 bp, synthetic construct
  source 1..80: mol_type = other DNA
gatggatgagccggttcccgccggattcgaacctgagatgttgaggaaaaaacagatcaccgttttggatcttcaccctg

SEQ ID NO: 115446 - DNA, 80 bp, synthetic construct
  source 1..80: mol_type = other DNA
ctagaaagactacaaaggaaacacggaggaatgcttgtgagaaatccactttcacgaaactccacgcacgaaatgtactg

SEQ ID NO: 115447 - DNA, 80 bp, synthetic construct
  source 1..80: mol_type = other DNA
gaccatctggcacctcttaagacctgggccagcgacggcttacgtgaccttgctgtcgctgtagaaccggtcgtgttctc

SEQ ID NO: 115448 - DNA, 80 bp, synthetic construct
  source 1..80: mol_type = other DNA
gacacgccgtaggcatattcagagccgcggtgtgtacccgaggggtcgcaaaggccgtcgagttcgtacccgtggaggcc

SEQ ID NO: 115449 - DNA, 80 bp, synthetic construct
  source 1..80: mol_type = other DNA
cagtgacttcaagatctggctctcggccaagatcatgcccaagatgccaggcgtgcccttcttttcatgccagcgggggt

SEQ ID NO: 115450 - DNA, 80 bp, synthetic construct
  source 1..80: mol_type = other DNA
tgctcagcatcccagccgtggtgctcgcgatgctcgtgttgatttttggaggaataacgtatactgacgtcttgagatac

SEQ ID NO: 115451 - DNA, 80 bp, synthetic construct
  source 1..80: mol_type = other DNA
cccgccgaggtagttgttgtagatgtaacacgaggccgtcgtgtgcacggcctcgtcccggctgatgaggtcgtttgact

SEQ ID NO: 115452 - DNA, 80 bp, synthetic construct
  source 1..80: mol_type = other DNA
aattgcgccacccgcggtggctaccggctttgtcgtcagtggcctggtgggagctgccgtgggcagtataggcttgggaa

SEQ ID NO: 115453 - DNA, 80 bp, synthetic construct
  source 1..80: mol_type = other DNA
ggcaaagaatgaggttttctgtgtccaaccagagaagggaggccgcaagccagctcgcctcatcgtgtacccagacttgg

SEQ ID NO: 115454 - DNA, 80 bp, synthetic construct
  source 1..80: mol_type = other DNA
gctcgcgcgaaggcaccccccccctcatgggacactatgtggaaatgccttatacggctaaagcccatgctaacgggccc

SEQ ID NO: 115455 - DNA, 80 bp, synthetic construct
  source 1..80: mol_type = other DNA
attccacccagaatcgccccctgttcttgcggcatctctaaaggaagcatatgaggagggagtctgtgggattgtgcccc

SEQ ID NO: 115456 - DNA, 80 bp, synthetic construct
  source 1..80: mol_type = other DNA
gcagacatcgccatacgtccggtgtgtgcaccgcgaagaatccagaaacatgtccgtcgttttcagggcccaagacatcc

SEQ ID NO: 115457 - DNA, 80 bp, synthetic construct
  source 1..80: mol_type = other DNA
gatcgtgcagagcacgcacgtctggccggccagacccggagggtggtgcgcaggagtgggagcgcgcctggctcgaggag

SEQ ID NO: 115458 - DNA, 80 bp, synthetic construct
  source 1..80: mol_type = other DNA
aagccacaatttaccccaacggaacgggaaatgttagcgtcattttttacgttgtatgttactcttggtggaggaatgtt

SEQ ID NO: 115459 - DNA, 80 bp, synthetic construct
  source 1..80: mol_type = other DNA
ctgatcatcatggatgaggcccacttcaccgaccccgcaagtgtggctgcgagaggttacatagccactagagtagaaat

SEQ ID NO: 115460 - DNA, 80 bp, synthetic construct
  source 1..80: mol_type = other DNA
gccgtcatatttcactggcactggagattataacgggtcgatgggtttgcatcccgcgtgtgtttccggataccccagag

SEQ ID NO: 115461 - DNA, 80 bp, synthetic construct
  source 1..80: mol_type = other DNA
attaaaaaacaccactcgacacggcaccagctcaatcagtcacagtgtataaaaagggccaagtgcagagcgagtatata

SEQ ID NO: 115462 - DNA, 80 bp, synthetic construct
  source 1..80: mol_type = other DNA
cgcatatcgatttaatcgtgacgtccgctacactttgctccgccctctacataggagacatttgtggtgcggttatgata

SEQ ID NO: 115463 - DNA, 80 bp, synthetic construct
  source 1..80: mol_type = other DNA
gaccaacgcccctactgctggcattacgatccacccccttgcggtattgtgccagcacgcaatgtttgcgggccggtgtt

SEQ ID NO: 115464 - DNA, 80 bp, synthetic construct
  source 1..80: mol_type = other DNA
gcgacgaagacgcgtcaatctagagtccaaatgccaaatggactggtgttgatgcgcatgatggggatcttgtggcatgc

SEQ ID NO: 115465 - DNA, 80 bp, synthetic construct
  source 1..80: mol_type = other DNA
agtccctcaccccatgcacgtgcggtgccagcgacctgtacctggtcacccggaatgccgatgtcatcccggcaaggcgc

SEQ ID NO: 115466 - DNA, 80 bp, synthetic construct
  source 1..80: mol_type = other DNA
ccgacaggtcacagggggtgaaggtgggatttggtcccgtcggccgggaagacacctgttttttttcaaagtgcggtttc

SEQ ID NO: 115467 - DNA, 80 bp, synthetic construct
  source 1..80: mol_type = other DNA
ggccagcaagtcacaccattgacaacgacggagtcttggactcccgtctttttctgcctgtcactctcgctgggcctcgt

SEQ ID NO: 115468 - DNA, 80 bp, synthetic construct
  source 1..80: mol_type = other DNA
cccatgcccccgtaccatggccccggttcccctgattaggctacgagtcgcggtgatcgcttcccaaaaaccgagctgcg

SEQ ID NO: 115469 - DNA, 80 bp, synthetic construct
  source 1..80: mol_type = other DNA
cgatacgtaacgccctggggttgccgtgaggcgcgcgtccgacggtcccgcttctcgcctctcttcttccccctccccac

SEQ ID NO: 115470 - DNA, 80 bp, synthetic construct
  source 1..80: mol_type = other DNA
ctacgaccggtgcgttgcacgtagcgtcgcgacagaactgcgtttgccgatacgggcgcggggccgaattgtaagcgcgt

SEQ ID NO: 115471 - DNA, 80 bp, synthetic construct
  source 1..80: mol_type = other DNA
cggagaataccgtctaagaggagaatccaggaaaacatttgttgaactcatgagaagaggagaccttccagtgtggctgg

SEQ ID NO: 115472 - DNA, 80 bp, synthetic construct
  source 1..80: mol_type = other DNA
cgtctgcgccactgatgctctcatgactggctatacaggcgatttcgactccgtcatagactgcaatgtcgcggttacac

SEQ ID NO: 115473 - DNA, 80 bp, synthetic construct
  source 1..80: mol_type = other DNA
aaccagcaagactgattgtcttccccgatctcggggtaagggtctgtgagaaaattgctctctacgatcctattaaaaaa

SEQ ID NO: 115474 - DNA, 80 bp, synthetic construct
  source 1..80: mol_type = other DNA
agtagcgtgggcattttctgctccgggcggacttccgtggcttcttgctgccggcgagggcgcaacgccgtacgtcggtt

SEQ ID NO: 115475 - DNA, 80 bp, synthetic construct
  source 1..80: mol_type = other DNA
cacggcgacgtgctggcccgtgggccggtagagggcgttgggtggagcgggtggtgacgcctcgcgccccaccgagaggc

SEQ ID NO: 115476 - DNA, 80 bp, synthetic construct
  source 1..80: mol_type = other DNA
taatgtggcgcggagagcaaaggcatccagcctgggaggagtggacaaatgtggacatccagccagcacgatcctggtgg

SEQ ID NO: 115477 - DNA, 80 bp, synthetic construct
  source 1..80: mol_type = other DNA
gctgcccgtatgtcaggaccatttggagttctgggagagcgtgtttacaggcctcaccaacatagacgctcattttctgt

SEQ ID NO: 115478 - DNA, 80 bp, synthetic construct
  source 1..80: mol_type = other DNA
aaccattggatctacactctatgtgccttgtcagaggtcacaggcctggcccctgatgttctgcaagcccaatcctactt

SEQ ID NO: 115479 - DNA, 80 bp, synthetic construct
  source 1..80: mol_type = other DNA
cgcgactcggaagacttcggagcggtcacaaccccgcggcagacgtcagcctatccccaaggcgcgtcggtccgagggca

SEQ ID NO: 115480 - DNA, 80 bp, synthetic construct
  source 1..80: mol_type = other DNA
aacatcaggacatttgtcggcggtatagagcatcggatgcaagcggcatgcaactggaccaggggggaagtctgtggctt

SEQ ID NO: 115481 - DNA, 80 bp, synthetic construct
  source 1..80: mol_type = other DNA
cgctcccggagcggatttaagttcatgcgaaggaattcggaggaggtggtgcgggacatggccacgtacgcgctgttgag

SEQ ID NO: 115482 - DNA, 80 bp, synthetic construct
  source 1..80: mol_type = other DNA
attccggagtccccactgccagtggctcctctctggagcaacctgacgacgactccgtgatatccgatgccgagtcctat

SEQ ID NO: 115483 - DNA, 80 bp, synthetic construct
  source 1..80: mol_type = other DNA
ttgatgtgctcgccggatacggagccggtgtgtctggtgctctagtcgctttcaagatcatgagcggcgagtgcccgagc

SEQ ID NO: 115484 - DNA, 80 bp, synthetic construct
  source 1..80: mol_type = other DNA
tttcgtgcgggtagagagctgaggtcgggcttcgatcgggagcggctcctgagggcggaggatttcgagcccgacgagcg

SEQ ID NO: 115485 - DNA, 80 bp, synthetic construct
  source 1..80: mol_type = other DNA
ggacgcctttctccgggatcgtggccttgggacatcaaccagtggaataagaaccgccggtggtcttgcccgaacgacga

SEQ ID NO: 115486 - DNA, 80 bp, synthetic construct
  source 1..80: mol_type = other DNA
atcacagaccctcctccttaacatactgggagggtgggtggcatcccaattggccagccctgtgccgtccactgccttcg

SEQ ID NO: 115487 - DNA, 80 bp, synthetic construct
  source 1..80: mol_type = other DNA
tgccgaccgcgctggcgtttcatctgaccacccgcggcggcgaaccgcatatggaaaccattctgaccaaacaggaacgc

SEQ ID NO: 115488 - DNA, 80 bp, synthetic construct
  source 1..80: mol_type = other DNA
cctagggggctgggtggcttcccaactagccactcctgccggatctacaagctttgtggtatgcggcatggcgtgcgctg

SEQ ID NO: 115489 - DNA, 80 bp, synthetic construct
  source 1..80: mol_type = other DNA
ccacactgcagggaagacctcgcacgtaactcacgttgtgcattgtcaaagtgttacattcgggcagcagcggatgatcc

SEQ ID NO: 115490 - DNA, 80 bp, synthetic construct
  source 1..80: mol_type = other DNA
tcgaaggaaccaccactgtcggccacgctgtgtctcacagcacgaatagcatcgtcggcctgttcagaccggggtccaaa

SEQ ID NO: 115491 - DNA, 80 bp, synthetic construct
  source 1..80: mol_type = other DNA
ggtctctgggttgctgtgtcatagtcttagtaaccattctgacaatgtccccttggtacaagcggtggttagccctggtg

SEQ ID NO: 115492 - DNA, 80 bp, synthetic construct
  source 1..80: mol_type = other DNA
gccacacagtctctgggcttggcggcctcttcacccccggggctaagcagaacatccagctcataaacaccaacggaagc

SEQ ID NO: 115493 - DNA, 80 bp, synthetic construct
  source 1..80: mol_type = other DNA
gtgttcccagacctgggtgtgcgagtttgcgagaaaaaggcgctctacaatgtcatccagacactgccaaaggcggtaat

SEQ ID NO: 115494 - DNA, 80 bp, synthetic construct
  source 1..80: mol_type = other DNA
agcaggccttgctacttgcggggggttcatgctcctttctctgaaggggaaaggcagtgtgaagaagaacttaccatttg

SEQ ID NO: 115495 - DNA, 80 bp, synthetic construct
  source 1..80: mol_type = other DNA
aaggtaatagatagatcaatatctgatttgccaggtttgttaaactatcttgtagttttgactggcaaaggaattggaaa

SEQ ID NO: 115496 - DNA, 80 bp, synthetic construct
  source 1..80: mol_type = other DNA
tacttgttgccgcgcaggggcccccggttgggtgtgcgcgcgacgagaaagacttccgagcgatcccagcccagaggcag

SEQ ID NO: 115497 - DNA, 80 bp, synthetic construct
  source 1..80: mol_type = other DNA
acggggagtagcaggctcactcactcggctacctcgcggaccaccaggctccccgcgcccgccccccccaaagactcccg

SEQ ID NO: 115498 - DNA, 80 bp, synthetic construct
  source 1..80: mol_type = other DNA
ggaggagaagttgcccatcagtccactcagcaattccttgctgagacatcacaatctagtatattcaacgtcatctcgaa

SEQ ID NO: 115499 - DNA, 80 bp, synthetic construct
  source 1..80: mol_type = other DNA
tgggggacacagcctgggactttggatcagttggtggtgtgtttaattcattgggtaagggtattcaccaaatctttgga

SEQ ID NO: 115500 - DNA, 80 bp, synthetic construct
  source 1..80: mol_type = other DNA
tttcggtggtgacgcagtagaaggtgcgggggtcgccgtgccaacggtcccattttagctggagtgcgagatcaagggcg

SEQ ID NO: 115501 - DNA, 80 bp, synthetic construct
  source 1..80: mol_type = other DNA
tgcatgatcacaatcgggcaatacagggtgttgttcagtcaaagaggccctggtctccttatcatatcgtggtaaacggg

SEQ ID NO: 115502 - DNA, 80 bp, synthetic construct
  source 1..80: mol_type = other DNA
ggtgaggcagcttccaggtggccgaaggctagggtgcacagcagcggggtccggtggtgcgttacgctgcggaggtggac

SEQ ID NO: 115503 - DNA, 80 bp, synthetic construct
  source 1..80: mol_type = other DNA
gagatagcatccaagctcagaggcatggggctcaacgctgtagcattctataggggtcttgatgtgtccatcataccaac

SEQ ID NO: 115504 - DNA, 80 bp, synthetic construct
  source 1..80: mol_type = other DNA
ccaagcgttgccctccagtttctgttgtcggtgttcccccatacccacgcccacatccaccgtaggtggcctctgggccg

SEQ ID NO: 115505 - DNA, 80 bp, synthetic construct
  source 1..80: mol_type = other DNA
tgcaaagtttcagaagagaaggattccaagcttactctagttttaacaaagtgcggaagtcagattctggccagtgtatc

SEQ ID NO: 115506 - DNA, 80 bp, synthetic construct
  source 1..80: mol_type = other DNA
gcagcaggagcgggccgccaaggagcttcttgatgccatcaacatccaccagtgcaagaagggcattttctgcctggtca

SEQ ID NO: 115507 - DNA, 80 bp, synthetic construct
  source 1..80: mol_type = other DNA
gtgttggtggtctccctgttcacaccatacataatccaccaacttcagaccaagattcaacagctcgtcaacagcgctgt

SEQ ID NO: 115508 - DNA, 80 bp, synthetic construct
  source 1..80: mol_type = other DNA
cgtgtgggcgcgcccagattacaaccctccactggtggagccttggaagcaaccgggttacactccgccagtggttcacg

SEQ ID NO: 115509 - DNA, 80 bp, synthetic construct
  source 1..80: mol_type = other DNA
actgtgctaaggttttgattgtgatgctactttttgctggcgttgatggaggaacctacgtgacggggggggaggcgggc

SEQ ID NO: 115510 - DNA, 80 bp, synthetic construct
  source 1..80: mol_type = other DNA
gattacaatcctcctctggtcgagccatggaagcagccagattacgaccctccggtcgtccatggatgcgctctacctcc

SEQ ID NO: 115511 - DNA, 80 bp, synthetic construct
  source 1..80: mol_type = other DNA
gcgtctcggccaggcgtcggcgcagggccgcgtgggcggcatctcggtccattccgccaccctgcgggcgacccggtgtg

SEQ ID NO: 115512 - DNA, 80 bp, synthetic construct
  source 1..80: mol_type = other DNA
gattcagctcggcctgagcctgcccgcccagctccgggcccggcagggtaaagtcgtccaccagctgggccagggcctcg

SEQ ID NO: 115513 - DNA, 80 bp, synthetic construct
  source 1..80: mol_type = other DNA
ggcttactgcctgacaacaggctgcgctgtcatatgcggtaggatcgtcacaagcggaaagcccgcagtggtccctgacc

SEQ ID NO: 115514 - DNA, 80 bp, synthetic construct
  source 1..80: mol_type = other DNA
tcggctcggctgggtcgagagattctactaggtcccgctgatgactaccggcaaatgggttggagacttctggccccgat

SEQ ID NO: 115515 - DNA, 80 bp, synthetic construct
  source 1..80: mol_type = other DNA
cattgactgttggtgctcaaaaacagccgtctatgtcaggtacggaaggtgcacaaagacccgacactcacgccgcagca

SEQ ID NO: 115516 - DNA, 80 bp, synthetic construct
  source 1..80: mol_type = other DNA
tctagggccagctcgcaggcttggcgaacgagggtctcctcgcccgagacgtgcatgaccagcatgaagggtaccaactg

SEQ ID NO: 115517 - DNA, 80 bp, synthetic construct
  source 1..80: mol_type = other DNA
gacctggagcccgaagcccgcaaagtcatcaccgccctcacagatagactctatgtgggcggccctatgcacaacagcaa

SEQ ID NO: 115518 - DNA, 80 bp, synthetic construct
  source 1..80: mol_type = other DNA
gacagagtacagtgcctcgatgaccaccacaagagagtcgtagacgagatgaagcaaaaggcctccacagtcagggcaag

SEQ ID NO: 115519 - DNA, 80 bp, synthetic construct
  source 1..80: mol_type = other DNA
actccttggcctactcctacttactgtaggggtaggcatctttttactccccgcccgatagggcggcacaccttagctac

SEQ ID NO: 115520 - DNA, 80 bp, synthetic construct
  source 1..80: mol_type = other DNA
aaggagagggaagagtgatcttgggggaaccatccgctgtgacggcagccagtgcagcccagagacgaggacgcattggt

SEQ ID NO: 115521 - DNA, 80 bp, synthetic construct
  source 1..80: mol_type = other DNA
tgcaggcctttctactctgcccgggaatccagcggtggcctctctaatgtctttctccgccgcactcacctgcccattgt

SEQ ID NO: 115522 - DNA, 80 bp, synthetic construct
  source 1..80: mol_type = other DNA
cacctgctgaaggacaggaacctaaagaacttgacattgaccttgctttctttgacactgacggcggaacagctgacact

SEQ ID NO: 115523 - DNA, 80 bp, synthetic construct
  source 1..80: mol_type = other DNA
cgtttccccccgctctgccagtgtgggcaaggccggggtatgacccgcccctcttggagacttggaagcgaccggattat

SEQ ID NO: 115524 - DNA, 80 bp, synthetic construct
  source 1..80: mol_type = other DNA
ctgtgatggcccctgacaaaccttctctggacatctcactacaaacagtggcaatcgatggaccggctgaagcgaggaag

SEQ ID NO: 115525 - DNA, 80 bp, synthetic construct
  source 1..80: mol_type = other DNA
tgcacttgcctggttgcgtcccttgcacaaaggacaatggctcggccacctgctgggtgccaatgactcccaccttggcc

SEQ ID NO: 115526 - DNA, 80 bp, synthetic construct
  source 1..80: mol_type = other DNA
caggctacggtgtgtgctagagctaaagccccccccccgtcttgggatgtcatgtggaaatgcctgattcgactcaagcc

SEQ ID NO: 115527 - DNA, 80 bp, synthetic construct
  source 1..80: mol_type = other DNA
catgcctgtcacacatgccagcgctgcccagaggagggggcgcataggcaggaatcccaacaaacctggagatgagtatc

SEQ ID NO: 115528 - DNA, 80 bp, synthetic construct
  source 1..80: mol_type = other DNA
ataacggactggataaatatgtacgaggtcgccttaaaggatgcaacaacagccattgaatcaccattcactcacgctcg

SEQ ID NO: 115529 - DNA, 80 bp, synthetic construct
  source 1..80: mol_type = other DNA
acagcattcgttactcggaactggcacctcagtacgataccaccaggttgtatctggtggacaacaagtcggcggacatt

SEQ ID NO: 115530 - DNA, 80 bp, synthetic construct
  source 1..80: mol_type = other DNA
ggcgcgcgggagaccgccggcaggcacgtggggtaccaggaggccagggtccttgaccccacttccgggtttcacgtgaa

SEQ ID NO: 115531 - DNA, 80 bp, synthetic construct
  source 1..80: mol_type = other DNA
gcggcctcgccgacctcatggggtacattcccgttatcggagcgccgcttggcggcgttgctgctgccttagcacacggt

SEQ ID NO: 115532 - DNA, 80 bp, synthetic construct
  source 1..80: mol_type = other DNA
tgtctcggttgcgcacgacgctactgggaaaagggtatactatcttacccgtgaccctgagacccccctggcacgagctg

SEQ ID NO: 115533 - DNA, 80 bp, synthetic construct
  source 1..80: mol_type = other DNA
acacagtaatttatgctgataaaactttccaaccagaaccacaagttggaaatgacaccaatggtgcagaggaaaaatat

SEQ ID NO: 115534 - DNA, 80 bp, synthetic construct
  source 1..80: mol_type = other DNA
ccccgggaggtctcgtagaccgtgcatcatgaacacaaatcctaaacctcaaagaccaaccaaaagaaacaccaaccgtc

SEQ ID NO: 115535 - DNA, 80 bp, synthetic construct
  source 1..80: mol_type = other DNA
tgtctgccagagggtgtacgtttgttgcatgttggaaaggggtggtggggcgaaacaagagtcaaatgtctgtaaagaag

SEQ ID NO: 115536 - DNA, 80 bp, synthetic construct
  source 1..80: mol_type = other DNA
ccgcgtattgcctatccacgggctgcgtggtcatagtaggcaggattgtcttgtccgggaggccggcaatcatacccgat

SEQ ID NO: 115537 - DNA, 80 bp, synthetic construct
  source 1..80: mol_type = other DNA
tgcgtcagacggggcacggccacggagggctgcgtggccgtggtgaggtccacgagccaggcctcgacggcctcccggcg

SEQ ID NO: 115538 - DNA, 80 bp, synthetic construct
  source 1..80: mol_type = other DNA
gtcacattcaagatcatgagcggcgaggtaccgtccacggaggacctggtcaatctgctcccggccatattatcgcccgg

SEQ ID NO: 115539 - DNA, 80 bp, synthetic construct
  source 1..80: mol_type = other DNA
gtagacaccaccgatgccatcgaccagccaactttgagggaatctgctgactcggaagcaggctctgattcctctatgcc

SEQ ID NO: 115540 - DNA, 80 bp, synthetic construct
  source 1..80: mol_type = other DNA
tagcggcctggttagcatgttcgcccctggagctagccaaaagttgcagctcgttaacaccaatgggagctggcatataa

SEQ ID NO: 115541 - DNA, 80 bp, synthetic construct
  source 1..80: mol_type = other DNA
gtgatttgcctaaacagcaagacctttgaaaaagactattccagagttagagatgagaaaccagattttgtggtgacaac

SEQ ID NO: 115542 - DNA, 80 bp, synthetic construct
  source 1..80: mol_type = other DNA
gacactcttggtgatctctggaagaggaggctgaacaactgcaccaaagaggaattctttgcctaccggcgcactggcat

SEQ ID NO: 115543 - DNA, 80 bp, synthetic construct
  source 1..80: mol_type = other DNA
tggggctggtgtgtctggcgctctcgttgcctttaagatcatgagcggcgagcctccagcactagaggacatggttaatc

SEQ ID NO: 115544 - DNA, 80 bp, synthetic construct
  source 1..80: mol_type = other DNA
atacccatcccggcgccaaactacaagaaagcgctgtggagggtaagtgctactgactacgtcgaagtcgtacgggtgtg

SEQ ID NO: 115545 - DNA, 80 bp, synthetic construct
  source 1..80: mol_type = other DNA
taataatacccctggtgatgttttgtttgatctacaattgggacctcatcttaacccatttctagcccatctatcacaga

SEQ ID NO: 115546 - DNA, 80 bp, synthetic construct
  source 1..80: mol_type = other DNA
tagctctagcagtagaggggtacggacggatcaggaataacgccgcatctgagaatggatgttttcttttgctgaaaggt

SEQ ID NO: 115547 - DNA, 80 bp, synthetic construct
  source 1..80: mol_type = other DNA
tcatatgacacccgctgctttgactcaacagtcaccgagcacgacatccgtacggaggagtctatctaccagtgttgtga

SEQ ID NO: 115548 - DNA, 80 bp, synthetic construct
  source 1..80: mol_type = other DNA
cagggctctgagggagcggccaccaccagcgcgtccagtcttgctaggcccgtccggccgtggtggtccgccagcccgct

SEQ ID NO: 115549 - DNA, 80 bp, synthetic construct
  source 1..80: mol_type = other DNA
ccatcggttcgcccctcgaccagggcccttcttccgggatgtggtgacattctgcgtgggcttaaactcgtatgaggtcg

SEQ ID NO: 115550 - DNA, 80 bp, synthetic construct
  source 1..80: mol_type = other DNA
gcgtgtgcgttgccctttggctgatgctgatgatatcacaagtagaagcagccttggagaaccttgtcacgctgaacgcc

SEQ ID NO: 115551 - DNA, 80 bp, synthetic construct
  source 1..80: mol_type = other DNA
cacatccaatcatggagtgacagccacgataactcccaggtcaccatcggtggaagtcaaattgccggactatggagaac

SEQ ID NO: 115552 - DNA, 80 bp, synthetic construct
  source 1..80: mol_type = other DNA
tttcggcatcgcagtgccacggcggcgggtcccacgaccgcctcgaacaggaggcggttgagggtgcggttaaagaacgg

SEQ ID NO: 115553 - DNA, 80 bp, synthetic construct
  source 1..80: mol_type = other DNA
tatgaaaagaagctggctctttacctccttctggccctaagcctcatgtcagttgccatgtgcagaacccctttttcctt

SEQ ID NO: 115554 - DNA, 80 bp, synthetic construct
  source 1..80: mol_type = other DNA
agatggaggagtgctcgagggcctcagagctcctagagcatggccaggctatcggccgcatgttcaaggataaggccttt

SEQ ID NO: 115555 - DNA, 80 bp, synthetic construct
  source 1..80: mol_type = other DNA
gcgctggctccaagaccttggccggcccgaagggcccagtgtgccaaatgtacaccaatgttgaccaggatttggtagga

SEQ ID NO: 115556 - DNA, 80 bp, synthetic construct
  source 1..80: mol_type = other DNA
ggcactatgatgacgaaaacccctacaaaacgtgggcttaccacggatcttatgaagtcaaggccacaggctcagcctcc

SEQ ID NO: 115557 - DNA, 80 bp, synthetic construct
  source 1..80: mol_type = other DNA
tgtcaacggagttgtttggtccgtctaccacggtgctgggacgaggttcctcgctggactgaaggggcctgtgacccaaa

SEQ ID NO: 115558 - DNA, 80 bp, synthetic construct
  source 1..80: mol_type = other DNA
acggtgaatggatgcgctcctggttgagcgctggccagtgtgcgctttaaactgaggcggctggtgctgaagcgcgtgtc

SEQ ID NO: 115559 - DNA, 80 bp, synthetic construct
  source 1..80: mol_type = other DNA
acgcccggatatgaggtaattctgggcggatgcaagtgaaattaggtcattttggcgcgaaaactgaatgaggaagtgaa

SEQ ID NO: 115560 - DNA, 80 bp, synthetic construct
  source 1..80: mol_type = other DNA
tcttgaacagcgagataggacagagatcagcccactgctcttttctaccacagagcttgccatactaccttgctcgttca

SEQ ID NO: 115561 - DNA, 80 bp, synthetic construct
  source 1..80: mol_type = other DNA
tctaagacccttgctggccccaaaggcccagtggtgcaaatgtacactaatgtagacaaagatctggtgggatggcctac

SEQ ID NO: 115562 - DNA, 80 bp, synthetic construct
  source 1..80: mol_type = other DNA
tgagtcagtgcttcgggccccccgggtaggcgcgcccatcacgggctccgatgtcatcctgggagaggaggagttatggg

SEQ ID NO: 115563 - DNA, 80 bp, synthetic construct
  source 1..80: mol_type = other DNA
cggggtgttgcgaaggcgctcgagttcgtcccggtcgaaaacctggagaccacgatgcgctcacctgtgttcactgacaa

SEQ ID NO: 115564 - DNA, 80 bp, synthetic construct
  source 1..80: mol_type = other DNA
gctaacatcagtggctcatcggacgacaagccttattgctggcattacgcccccagaccctgcgaggtggtgccagcagt

SEQ ID NO: 115565 - DNA, 80 bp, synthetic construct
  source 1..80: mol_type = other DNA
aggacatcagggtggaagaggcggtttaccaatgttgtaatcttgagccggagccaggacaggccatctcctccctcacg

SEQ ID NO: 115566 - DNA, 80 bp, synthetic construct
  source 1..80: mol_type = other DNA
aggcatagggtgtgttagtgctgatgcatacatgccacaaatatcatatacatatatgggttgttttaatactcctatgt

SEQ ID NO: 115567 - DNA, 80 bp, synthetic construct
  source 1..80: mol_type = other DNA
ccagtttgggcactggggtctcgcggaagggtctcgctccacatgcgccggctcatctgcagggcgcccagcatgtcagg

SEQ ID NO: 115568 - DNA, 80 bp, synthetic construct
  source 1..80: mol_type = other DNA
tactgctggcattacgcgccccgccaatgcggggtggtacctgcatccacagtgtgtggccctgtctactgttttacgcc

SEQ ID NO: 115569 - DNA, 80 bp, synthetic construct
  source 1..80: mol_type = other DNA
cgggggcgccggggtccgcggggtcgaacgcgtacttggctcggcacttaacctcgtagaaggccaggtaggtcttggtg

SEQ ID NO: 115570 - DNA, 80 bp, synthetic construct
  source 1..80: mol_type = other DNA
tcgcttggccctcgaacacgggcgggacgaggctgatggggtccccgttacagagatctacgggtgaggtgttgcgaagg

SEQ ID NO: 115571 - DNA, 80 bp, synthetic construct
  source 1..80: mol_type = other DNA
cttatagcagaaaacaaaatctggggaaggaaaagttggcccctcaatgaaggaatcatggctgttggaatagtcagcat

SEQ ID NO: 115572 - DNA, 80 bp, synthetic construct
  source 1..80: mol_type = other DNA
catctgaccgcggaaacggccgcccggagattggcccgagggtccccaccctctttggctagctcctcggcgagccaatt

SEQ ID NO: 115573 - DNA, 80 bp, synthetic construct
  source 1..80: mol_type = other DNA
gtagtcatctgcgagagtgccggcgttcaggaggacgttgctgccctgcgagctttcacggaagctatgaccaggtattc

SEQ ID NO: 115574 - DNA, 80 bp, synthetic construct
  source 1..80: mol_type = other DNA
tttagtggttcgtgtgggaacaaccgcgatgttttccggtggcggcggcccgctgtcccccggaggaaagtcggcggcca

SEQ ID NO: 115575 - DNA, 80 bp, synthetic construct
  source 1..80: mol_type = other DNA
gacaggctctcactacgtggtgggcgttaccacagagggtctgaaatgtccttgtcaagtcccagatccagagttcttca

SEQ ID NO: 115576 - DNA, 80 bp, synthetic construct
  source 1..80: mol_type = other DNA
ccattttgtagtgggtgccaccaaccaagacctcaaatgtccttgccaggtaccagccccagaattcttcactgaagtag

SEQ ID NO: 115577 - DNA, 80 bp, synthetic construct
  source 1..80: mol_type = other DNA
cggaggggggatactcgaggtgctctcctgagccccaagcccatagccactctcaaaggatcgtctggtggcccgctact

SEQ ID NO: 115578 - DNA, 80 bp, synthetic construct
  source 1..80: mol_type = other DNA
tggacttggggggaaccggcgccgcttctgatccctttgctcatctgcggcctcagggtcaactgggtcgtttgtattaa

SEQ ID NO: 115579 - DNA, 80 bp, synthetic construct
  source 1..80: mol_type = other DNA
tacacatggcccctttgactcagacgcagggcccggggtcgccgtgggaccccctgactcatacacagagacacgccccc

SEQ ID NO: 115580 - DNA, 80 bp, synthetic construct
  source 1..80: mol_type = other DNA
gaccagggaggccagaaatgtgcggtgctcaaagatcgtattgatctgctgcacgaaggccaggatgagggcctcgcggc

SEQ ID NO: 115581 - DNA, 80 bp, synthetic construct
  source 1..80: mol_type = other DNA
ttccgccctcaagcgcgtacgcagttccatgcgcggatcgcgagacggccgccacaggcccgcacccggcagcccgcccg

SEQ ID NO: 115582 - DNA, 80 bp, synthetic construct
  source 1..80: mol_type = other DNA
aagcattgtgagctcatatttgacaacgcgcatgcccccatgggccggggtgcgtcagaatgtgatgggctccagcattg

SEQ ID NO: 115583 - DNA, 80 bp, synthetic construct
  source 1..80: mol_type = other DNA
agatgcgcgtctcgtggaccgaaattctaacccaacagatcgccggcggatacgaagacgacgaggacctccccctggat

SEQ ID NO: 115584 - DNA, 80 bp, synthetic construct
  source 1..80: mol_type = other DNA
aagaattggcaaagcgactctaatttaccttcctctaacttagttaaataaaagtcttcgtactttaaagcagactgtag

SEQ ID NO: 115585 - DNA, 80 bp, synthetic construct
  source 1..80: mol_type = other DNA
cccatatgggcaaggcctgactacaacccacctcttttggagaattggaaagcccctgactacgaccctcccgtggtgtc

SEQ ID NO: 115586 - DNA, 80 bp, synthetic construct
  source 1..80: mol_type = other DNA
tgatgagagcgccataggggaagctcttcaacagctggccattaagaccttcggccagcccccctcaaatggcgactcag

SEQ ID NO: 115587 - DNA, 80 bp, synthetic construct
  source 1..80: mol_type = other DNA
agccgactctgcaaggccccactcctctcctgtataggttaggagcgatccaacatgacatctgcacaacacaccctatc

SEQ ID NO: 115588 - DNA, 80 bp, synthetic construct
  source 1..80: mol_type = other DNA
gtcgtaacaaatacattgtgtcctgcaacaaaaaaaaatattaatgcccaaagcacctgggaaaacctgttctaaaacca

SEQ ID NO: 115589 - DNA, 80 bp, synthetic construct
  source 1..80: mol_type = other DNA
cggtatcccgcagccagcggagaggccgcactggtagggagaggttgggcacataccggtatgtcaccccgggagagaga

SEQ ID NO: 115590 - DNA, 80 bp, synthetic construct
  source 1..80: mol_type = other DNA
ggtaaataaaccgcgtgcgtcccatcaggctgttgaggttgcgcatgagcgcgacaatttccgccggcgcgacatcggac

SEQ ID NO: 115591 - DNA, 80 bp, synthetic construct
  source 1..80: mol_type = other DNA
ttgcgctcgcggggttaccaccgcttccatcagtaaggccacggcctcaccctccatggtgttttgtccggccatagaaa

SEQ ID NO: 115592 - DNA, 80 bp, synthetic construct
  source 1..80: mol_type = other DNA
atctcagaaagcgagccgtagatgggacaccactgaagccagcgtcgtaaacatgggtaagaaatgcaagcaggtgcggc

SEQ ID NO: 115593 - DNA, 80 bp, synthetic construct
  source 1..80: mol_type = other DNA
tggttacgccatgcgcagccgaggaagccaagctaccaatcaaccccctgagcaactctcttctgcgtcaccacaatttg

SEQ ID NO: 115594 - DNA, 80 bp, synthetic construct
  source 1..80: mol_type = other DNA
tgcaatgagcagaatttaactctaattaatgtaaacaaaacatatgaggctaagtactatggttacagacatgacaatac

SEQ ID NO: 115595 - DNA, 80 bp, synthetic construct
  source 1..80: mol_type = other DNA
tgacccccaggtgcctgatagactacccttacagactgtggcattatccatgcaccgtaaatttcaccatcttcaaggtg

SEQ ID NO: 115596 - DNA, 80 bp, synthetic construct
  source 1..80: mol_type = other DNA
ctgttgcctccagaaaagcatcaaatgtcatcctgcccttgatggctctgttaacacctgtgacaatggctgaggtgaga

SEQ ID NO: 115597 - DNA, 80 bp, synthetic construct
  source 1..80: mol_type = other DNA
cgtatgtagatgattcgccaccacaagttccagcattaatgatacaaataggatacatatcgccatcaacgcagccatca

SEQ ID NO: 115598 - DNA, 80 bp, synthetic construct
  source 1..80: mol_type = other DNA
cccggtgcccttcgcagcttcaccgagagcgccgtcgggccccgggtgcgggatgtgtcgcggggacagccccgaggtcg

SEQ ID NO: 115599 - DNA, 80 bp, synthetic construct
  source 1..80: mol_type = other DNA
acgaaaagtatgtggactacatgacatcactcaggaggtatgaagacactttggtccaggaagatagagtcatttaaaga

SEQ ID NO: 115600 - DNA, 80 bp, synthetic construct
  source 1..80: mol_type = other DNA
aggacagggacccctatatgtaaactcaagcacacacaacttggatttaaactacaataaaggccttcacttgtttacaa

SEQ ID NO: 115601 - DNA, 80 bp, synthetic construct
  source 1..80: mol_type = other DNA
gaattgtaatgcgagcctcgaaaccggctggttggcggggctcttctattataacagattcaattcgacgggctgccccg

SEQ ID NO: 115602 - DNA, 80 bp, synthetic construct
  source 1..80: mol_type = other DNA
tttcgtcgtgagcggcttagcaggcgccacggtggccagcataggactggggagggttattgttgacatccttgccgggt

SEQ ID NO: 115603 - DNA, 80 bp, synthetic construct
  source 1..80: mol_type = other DNA
caatcaaacaccaatccctacaaccatcatggccaagaatgaggtgttctgtgtggatccgtcaaagggggggcggaagc

SEQ ID NO: 115604 - DNA, 80 bp, synthetic construct
  source 1..80: mol_type = other DNA
accatcgcccaactaccgcagggccctgtggagggtcgctgccgaggaatatgtagaggttttgaaacatcaggataacc

SEQ ID NO: 115605 - DNA, 80 bp, synthetic construct
  source 1..80: mol_type = other DNA
cgttgttcttgtcgggttaatggcgctgactctgtcgccatattacaagcgctatatcagctggtgcatgtggtggcttc

SEQ ID NO: 115606 - DNA, 80 bp, synthetic construct
  source 1..80: mol_type = other DNA
tcctccaccttcaggaaggactgcaggaggcgctgtttgatggcggcggtggtgaccagcaccccgtcgaccggccgccc

SEQ ID NO: 115607 - DNA, 80 bp, synthetic construct
  source 1..80: mol_type = other DNA
acggagttcttaaacagggctctactatggattcttcatattggaattatagaagtgataattccaatttatcccaacca

SEQ ID NO: 115608 - DNA, 80 bp, synthetic construct
  source 1..80: mol_type = other DNA
cccgcgcgaggcataaagttgcgtgtgatgcggaagggtcccggcacctcggaacggttgttaattacctgggcggcgag

SEQ ID NO: 115609 - DNA, 80 bp, synthetic construct
  source 1..80: mol_type = other DNA
ggactatccacattgccggggaaccccgccgtggcttcgatgatggcgttcagcgccgccctcacaagcccgttgtctac

SEQ ID NO: 115610 - DNA, 80 bp, synthetic construct
  source 1..80: mol_type = other DNA
acttccgcgttctcacttcctcgtatcaattttgtgacttaacttccgggttcccacgttacgtcacttttgcccttaca

SEQ ID NO: 115611 - DNA, 80 bp, synthetic construct
  source 1..80: mol_type = other DNA
gcgtgaagtttacccccccgccagtttcgtgccgggccacctggagctggcccaggaagtacgcctccgacgcgcgctcc

SEQ ID NO: 115612 - DNA, 80 bp, synthetic construct
  source 1..80: mol_type = other DNA
ccccaacacgcctcgcccccccgcccaagctcccgctaaggacatgccctcgggccccacaccccaacacatccgcctgt

SEQ ID NO: 115613 - DNA, 80 bp, synthetic construct
  source 1..80: mol_type = other DNA
agaggagaggtagaacaggaaggggaaaacatggggtatacaggtacgtctcgctgggagagcggccgtcgggcttgttc

SEQ ID NO: 115614 - DNA, 80 bp, synthetic construct
  source 1..80: mol_type = other DNA
gtccaaaatcacctcccagtagtacgtcagatctcgtcgctgcaggtcctccagcgaggcggggttgctggtcagggtgt

SEQ ID NO: 115615 - DNA, 80 bp, synthetic construct
  source 1..80: mol_type = other DNA
cttacagatttgtcaccccgggggagaggccgtccggcatgtttgacacctcggtgctttgtgagtgctacgacgccggg

SEQ ID NO: 115616 - DNA, 80 bp, synthetic construct
  source 1..80: mol_type = other DNA
gaaggagaggaagtccaagtcttggcattggaacctggaaaaaatccaagagccgtccaaacgaaacctggacttttcaa

SEQ ID NO: 115617 - DNA, 80 bp, synthetic construct
  source 1..80: mol_type = other DNA
ttttcttctcctggccgtacggtttctgggcttgcttttatttgttttatattggatcaatggagcgcccaaactcatct

SEQ ID NO: 115618 - DNA, 80 bp, synthetic construct
  source 1..80: mol_type = other DNA
ggatgaccactgaagacatgctacaagtctggaacagagtatggattgaagaaaatgaatggatgatggacaagacccca

SEQ ID NO: 115619 - DNA, 80 bp, synthetic construct
  source 1..80: mol_type = other DNA
gacgcgccgtaggcatattcagggccgcggtgtgcacccgtggagtggctaaggcagtggactttatccctgtggagaac

SEQ ID NO: 115620 - DNA, 80 bp, synthetic construct
  source 1..80: mol_type = other DNA
acgcggtacgccccaccggcaccaacaacgacaccgccctcgtgtggatgaaaatgaaccagaccctattgtttctgggg

SEQ ID NO: 115621 - DNA, 80 bp, synthetic construct
  source 1..80: mol_type = other DNA
ttgcaagcccttgctcagggacgaagtgactttctctgtgggtctttcaaactatgtcatagggtcccagctcccttgcg

SEQ ID NO: 115622 - DNA, 80 bp, synthetic construct
  source 1..80: mol_type = other DNA
gactcaaatgatggtgggtcgacgaaacaaaatatccaaccgggatatcgatccatcagcggtcccgatccgaggattcg

SEQ ID NO: 115623 - DNA, 80 bp, synthetic construct
  source 1..80: mol_type = other DNA
caggaaagggtctggagtttgatacaaacacatctgagtctccagatatcaacccaataaaaactaaaattggctctggc

SEQ ID NO: 115624 - DNA, 80 bp, synthetic construct
  source 1..80: mol_type = other DNA
ggcagaagaactgaagcctgctgtccattccgcgtggcctagggtggaggatttttggaggaagcacatgtggaactttg

SEQ ID NO: 115625 - DNA, 80 bp, synthetic construct
  source 1..80: mol_type = other DNA
ttgcccacggctttgatgggaccggcctacggctttcaatactcccccagtcaacgggtagaacacctcctcaggatgtg

SEQ ID NO: 115626 - DNA, 80 bp, synthetic construct
  source 1..80: mol_type = other DNA
acgcttgtgttttcccttcactacgacgttgtcgtatcctttgaaaaacttgaccactctaatggaagcatggacaagta

SEQ ID NO: 115627 - DNA, 80 bp, synthetic construct
  source 1..80: mol_type = other DNA
ctcagaggacagagggaacaaaaggggctatcctggatagtcccactcactggaaggctcggaggaaagggctctggaat

SEQ ID NO: 115628 - DNA, 80 bp, synthetic construct
  source 1..80: mol_type = other DNA
gcactagacttcgacatgtacggagtcacatattcaatcactccacttgatcttccacaaatcattcaaagactccatgg

SEQ ID NO: 115629 - DNA, 80 bp, synthetic construct
  source 1..80: mol_type = other DNA
tggcggacggcggttgctcggggggcgcatatgatattatcatatgcgatgagtgtcattccacggacgcaacaacagtc

SEQ ID NO: 115630 - DNA, 80 bp, synthetic construct
  source 1..80: mol_type = other DNA
aggcatcttcttagtgggtcagatgttcacctttcggcctcgcctccactggaccacccaggagtgcaattgctccatct

SEQ ID NO: 115631 - DNA, 80 bp, synthetic construct
  source 1..80: mol_type = other DNA
gagccacatgcaccacccacgccaagggtcctgacatcgacatggtggacgccaatctttttatgggaggcagtgtgact

SEQ ID NO: 115632 - DNA, 80 bp, synthetic construct
  source 1..80: mol_type = other DNA
cccggcgcctctaacgatgcctcgacggaaacccgtccgggttcgggaggcgaaccggccgcctgtcgctcgtcagggcc

SEQ ID NO: 115633 - DNA, 80 bp, synthetic construct
  source 1..80: mol_type = other DNA
caatatgagaacttgaaatattcagtgatagttactgtccacactggggaccagcaccaggtgggaaacgagaccacaga

SEQ ID NO: 115634 - DNA, 80 bp, synthetic construct
  source 1..80: mol_type = other DNA
ggttaccattacttttaacaaagagattggctgtacttattcaataacatttgactttggatgggctaaaacctatgatg

SEQ ID NO: 115635 - DNA, 80 bp, synthetic construct
  source 1..80: mol_type = other DNA
gcgcgggaggtgtgtggccctgtctactgttttacacccagcccagtagtcgtcggcacgaccgaccggctcggggctcc

SEQ ID NO: 115636 - DNA, 80 bp, synthetic construct
  source 1..80: mol_type = other DNA
tgctttacggatttgtcacccttaccctcatctgcagcctcatcactgtagtcatcgccttcatccagtgcattgactgg

SEQ ID NO: 115637 - DNA, 80 bp, synthetic construct
  source 1..80: mol_type = other DNA
cgatcgagtgggtggggattggaatcggggttctcgcggcggtggtcctggtcgtaacggcaatcgtgtacgtcgtccgc

SEQ ID NO: 115638 - DNA, 80 bp, synthetic construct
  source 1..80: mol_type = other DNA
agtgtggcgggatttgcaggtcttttcagctcaggggccaagcagaacttacaactcatcaacaccaacggcagctggca

SEQ ID NO: 115639 - DNA, 80 bp, synthetic construct
  source 1..80: mol_type = other DNA
cgcggttcccgcccatcttggggcccgaacgacccccggcgaaggtcccgcaatttgggtaaggtcatcgataccctcac

SEQ ID NO: 115640 - DNA, 80 bp, synthetic construct
  source 1..80: mol_type = other DNA
aggtgcgcggtgacgtgtggatgaggaacaggagttgttgcgcggtgagttgtcgctgtgagttgtgttgttgggcaggt

SEQ ID NO: 115641 - DNA, 80 bp, synthetic construct
  source 1..80: mol_type = other DNA
caacaaaccctcctattcaacatcttagggggttgggttgcctcgcagatcgcgacccccaccgcgtccacggcttttgt

SEQ ID NO: 115642 - DNA, 80 bp, synthetic construct
  source 1..80: mol_type = other DNA
gcaagggtataatgttcttgtgttgaatccatcggtggcggccacgttaggcttcggctctttcatgtcgcgtgcctatg

SEQ ID NO: 115643 - DNA, 80 bp, synthetic construct
  source 1..80: mol_type = other DNA
ctctgccgccggggctcggtgcggctgctgcagatgggatcgggatcgcaagtctctctgactatgatccccacagcctt

SEQ ID NO: 115644 - DNA, 80 bp, synthetic construct
  source 1..80: mol_type = other DNA
tcactgatgagaacaagtggaagtctgcacgtgaggctgttgaagacagtggattttgggaactggttgataaggaaagg

SEQ ID NO: 115645 - DNA, 80 bp, synthetic construct
  source 1..80: mol_type = other DNA
ccatgacaccctgtaccgaagctggtacctgtcctatacctacggggaccccgagaaggtggtgcagtcgtggacgctgc

SEQ ID NO: 115646 - DNA, 80 bp, synthetic construct
  source 1..80: mol_type = other DNA
gcttatttcaacacgccaggcctgcctgtgtgccaggatcatcttgagttctgggagagcgtcttcaccgggttaaccca

SEQ ID NO: 115647 - DNA, 80 bp, synthetic construct
  source 1..80: mol_type = other DNA
gaccacctggcccctctacacacctgggctagcaacggcctacgtgatctcgccgtcgcagtagaacccgtcgtcttttc

SEQ ID NO: 115648 - DNA, 80 bp, synthetic construct
  source 1..80: mol_type = other DNA
cctagctgcttactgcctgtcggtcggctgcgttgtcatcataggccgcatagagctggggggcaagcctgcactcgtcc

SEQ ID NO: 115649 - DNA, 80 bp, synthetic construct
  source 1..80: mol_type = other DNA
agagatgggcgcgaactttggggccagcagagtcattgactgtcggaaaagcgtgaaacccaccatcttggaggaaggcg

SEQ ID NO: 115650 - DNA, 80 bp, synthetic construct
  source 1..80: mol_type = other DNA
taacaaccagtccatctgttggcatgctgtgtcccccaccctagccataccaaatgcttccacacctgcaacgggattcc

SEQ ID NO: 115651 - DNA, 80 bp, synthetic construct
  source 1..80: mol_type = other DNA
tggtatggaatggagataagaccaacgagacatgatgagagaacgctggtgcagtctaaagtggaagcttacaatgctga

SEQ ID NO: 115652 - DNA, 80 bp, synthetic construct
  source 1..80: mol_type = other DNA
agaaaaagagggcaaagaaggtgttcgggggcaaccgcagcgccttggggcgcgtcagatacagaaaaatctcgcagaag

SEQ ID NO: 115653 - DNA, 80 bp, synthetic construct
  source 1..80: mol_type = other DNA
tacgcgatgggatcccaactgccctgcgagcctgagccagatgtgatggtgctcacatccatgctgacagacccagacca

SEQ ID NO: 115654 - DNA, 80 bp, synthetic construct
  source 1..80: mol_type = other DNA
cacacaatcctttcttgggacatcaatctcaggggtcctatggaccgtcttccacggcgccggaaacaaaacgctggccg

SEQ ID NO: 115655 - DNA, 80 bp, synthetic construct
  source 1..80: mol_type = other DNA
tcagattcacagcaattgctccgactcgagctgtgttggaaagatggaagagagtaaacaaacaaacggccatgaagcat

SEQ ID NO: 115656 - DNA, 80 bp, synthetic construct
  source 1..80: mol_type = other DNA
ttgcgggggcttcctattcgataccagacttcggcagtcacacgggagcacacagggaatgagatagtcgacgtgatgtg

SEQ ID NO: 115657 - DNA, 80 bp, synthetic construct
  source 1..80: mol_type = other DNA
atgcagtctttgagtacactatggattgtgatggatccatcctgggtgcagcagtgaatggaaagaagagcgcgcatggg

SEQ ID NO: 115658 - DNA, 80 bp, synthetic construct
  source 1..80: mol_type = other DNA
gagggcgcggtgggtcggagcccctttcctagcttgggcagcttgcatagcctgcctgactcagtaaacagcggcagggt

SEQ ID NO: 115659 - DNA, 80 bp, synthetic construct
  source 1..80: mol_type = other DNA
ggggtccggtggggggcggcttcccttcgggcagcaagccgagtgttagctccccatacttcccgtggcccggggggggg

SEQ ID NO: 115660 - DNA, 80 bp, synthetic construct
  source 1..80: mol_type = other DNA
gacacggaccccatggacacgacccacggccccctcccggacgacgaggccgcgtacctcgacctgctacacgaacagat

SEQ ID NO: 115661 - DNA, 80 bp, synthetic construct
  source 1..80: mol_type = other DNA
gtactcttacaaaatttccttcttcccaactatcaaagccaatagacttgcaaacagcaaattttctccaaattttaaat

SEQ ID NO: 115662 - DNA, 80 bp, synthetic construct
  source 1..80: mol_type = other DNA
actagggagccctcagtgccggcggaatgccacagaccaccgcggcccaagtttccacctgcccttcctgtctgggcgag

SEQ ID NO: 115663 - DNA, 80 bp, synthetic construct
  source 1..80: mol_type = other DNA
tcttccaatagagcatttattaatcgtttaatggattaccttcaccgagccgcggccatgaacggagaatactttaccaa

SEQ ID NO: 115664 - DNA, 80 bp, synthetic construct
  source 1..80: mol_type = other DNA
gtcctaaccactagctgcggcaatacccttacatgttacctgaaagccaaagcggcctgtagagctgcaaagctccagga

SEQ ID NO: 115665 - DNA, 80 bp, synthetic construct
  source 1..80: mol_type = other DNA
aatattacaacagtgcggggaccagttgccaccttctatgggccagaacaagggaaaatgcttgaggtggccggacactt

SEQ ID NO: 115666 - DNA, 80 bp, synthetic construct
  source 1..80: mol_type = other DNA
gggtattttgggttgggtgcggggtagactgtggcacgccttgggccgcgtgcggtgatccggttgttggctggacagtg

SEQ ID NO: 115667 - DNA, 80 bp, synthetic construct
  source 1..80: mol_type = other DNA
ctcggcggcgttgagcataggtttgatgccgcatgcaactggacacgtggggaacgatgcgaacttgaagacagagatag

SEQ ID NO: 115668 - DNA, 80 bp, synthetic construct
  source 1..80: mol_type = other DNA
gatggagaaaaagttgagcatgcagaatttaatcatacatgtaacatccagaacctgacactgctctttgtcaacttaac

SEQ ID NO: 115669 - DNA, 80 bp, synthetic construct
  source 1..80: mol_type = other DNA
gaacctggcaacgacctccgcgaaggagaccgtcgacgagaagatgcagacgttatctccgccggccaggcgcgcctcca

SEQ ID NO: 115670 - DNA, 80 bp, synthetic construct
  source 1..80: mol_type = other DNA
ataattgagaggttacacgggcttgacgccttttctatgcacacatactctcaccacgaactgacgcgggtggcttcagc

SEQ ID NO: 115671 - DNA, 80 bp, synthetic construct
  source 1..80: mol_type = other DNA
tttaaaatcatgagcggcgaggccccctccactgaagacctagtcaacctgctgccggccatcctatcgcctggagccct

SEQ ID NO: 115672 - DNA, 80 bp, synthetic construct
  source 1..80: mol_type = other DNA
aacctgtcgagcatgtgcaacgaaaccttttcgccttaaccgcgacagccaatacgactacttaaacacatgtccagggg

SEQ ID NO: 115673 - DNA, 80 bp, synthetic construct
  source 1..80: mol_type = other DNA
gataccgttgtcctgtgcgaggcgtacgatacagggtgcgcgtggtacgaactgactcctgcagaaacaactgtaagact

SEQ ID NO: 115674 - DNA, 80 bp, synthetic construct
  source 1..80: mol_type = other DNA
tggctcaaagccaagctcgtgccctccttgccgggcattcccttcctctcgtgtcagcgggggtttagggtggtttggcg

SEQ ID NO: 115675 - DNA, 80 bp, synthetic construct
  source 1..80: mol_type = other DNA
tgtgggcttggtcagcctcttaggaagcgcccttctaaagaatgatgtccctttagctggcccaatggtggcaggaggct

SEQ ID NO: 115676 - DNA, 80 bp, synthetic construct
  source 1..80: mol_type = other DNA
cgggcgcgctgggccgccatcttcgccgtcaggtcggcgacggcggcctcaagttcgtcggcgcggcgtcgcgtggcgcc

SEQ ID NO: 115677 - DNA, 80 bp, synthetic construct
  source 1..80: mol_type = other DNA
gagctgtgtcaggcgcttgcgccctgggaccttacggacccgctgctgtttgttcacgccggactgcaggtcatcaacct

SEQ ID NO: 115678 - DNA, 80 bp, synthetic construct
  source 1..80: mol_type = other DNA
gagtgaaggcgcgggccctcacagttgaggaggcctgcgacctgacgcccccgcattccgccagatccaagtttggctat

SEQ ID NO: 115679 - DNA, 80 bp, synthetic construct
  source 1..80: mol_type = other DNA
gcgtgcatgcgcgctccggtcccgctggcgatggcgtacgcccccccggccccatctgcgaccggaggtctacggacgga

SEQ ID NO: 115680 - DNA, 80 bp, synthetic construct
  source 1..80: mol_type = other DNA
ccgactacagaatcattattggccgatatgtctgaaggaacggacgtaaaactcactattcaacctgtagaaaaagatag

SEQ ID NO: 115681 - DNA, 80 bp, synthetic construct
  source 1..80: mol_type = other DNA
cccagctatcttgtctcccggcgctctagtagtgggtgtcatctgcgcagccatcctgcgtcgtcatgtgaggcaggtgg

SEQ ID NO: 115682 - DNA, 80 bp, synthetic construct
  source 1..80: mol_type = other DNA
cggggtcaggcttactgtattggccacggccacgccccccgggtcagtgacaaccccccatcccaatatagaggagatag

SEQ ID NO: 115683 - DNA, 80 bp, synthetic construct
  source 1..80: mol_type = other DNA
gaaactgtagttgtaaatgttaaatctggtacaaaccacacccttgaaggtcctagaaaaactccagttcagtggtatgg

SEQ ID NO: 115684 - DNA, 80 bp, synthetic construct
  source 1..80: mol_type = other DNA
agcctgggaaacaccctgacctgctacttaaaagcgcaagcagcctgcagagcagccaagctcaaagactatgacatgtt

SEQ ID NO: 115685 - DNA, 80 bp, synthetic construct
  source 1..80: mol_type = other DNA
ccactggttgcccagaaagattgtccgcgtgtaagaccttggactctttcgatcaaggttggggccccattacgtatgcc

SEQ ID NO: 115686 - DNA, 80 bp, synthetic construct
  source 1..80: mol_type = other DNA
cctccccccttccactttatcttatacacctccctctccccctgtaccgccgcaaacaactgcaatttagaatttacaca

SEQ ID NO: 115687 - DNA, 80 bp, synthetic construct
  source 1..80: mol_type = other DNA
agagtaattctagcgggaccgattcccgtcactccagccagcgctgcccaaagaagagggcgcatagggagaaatccctc

SEQ ID NO: 115688 - DNA, 80 bp, synthetic construct
  source 1..80: mol_type = other DNA
gacctgaacaaacacatcgccgaggtgatgctgctgtcggcgatgaagaccagcaacgcgctgtgcgttcgcggggcccg

SEQ ID NO: 115689 - DNA, 80 bp, synthetic construct
  source 1..80: mol_type = other DNA
gctgagagcgctgcagagagcggttcgggtgattctggggttggcgaagagttgttgccggttgatctggatttgaaatg

SEQ ID NO: 115690 - DNA, 80 bp, synthetic construct
  source 1..80: mol_type = other DNA
agccagctcttcactttccaaccacgcagatactggactactcaagagtgtaactgttccatctaccttgggcatgtctc

SEQ ID NO: 115691 - DNA, 80 bp, synthetic construct
  source 1..80: mol_type = other DNA
gaagagaatggccattttgggtgacacagcctgggacttcggatccctgggaggagtgtttacatctataggaaaagctc

SEQ ID NO: 115692 - DNA, 80 bp, synthetic construct
  source 1..80: mol_type = other DNA
gcccgatccaagtttggatatggtgccaaggacgttcgcagccattctagcaaggccattaaccacatcaactccgtgtg

SEQ ID NO: 115693 - DNA, 80 bp, synthetic construct
  source 1..80: mol_type = other DNA
gctcagcccgctgttgttctcgacaaccgagcttgcgatactgccttgcacttttacacccatgccagccctctccactg

SEQ ID NO: 115694 - DNA, 80 bp, synthetic construct
  source 1..80: mol_type = other DNA
aggcgaacttaatagagtggcatcttgtctcaggaagcttggggcaccacccctaagagcctggaggcaccgagccaggg

SEQ ID NO: 115695 - DNA, 80 bp, synthetic construct
  source 1..80: mol_type = other DNA
ctttcactttggtgaacgttaccggcagcagcacagccgctccagaaacatctaaccttctttttgatactaacactcct

SEQ ID NO: 115696 - DNA, 80 bp, synthetic construct
  source 1..80: mol_type = other DNA
ctttcacggaggctatgaccagatactccgctcctccgggagacgagccccatcctgagtatgacctcgagctgatagca

SEQ ID NO: 115697 - DNA, 80 bp, synthetic construct
  source 1..80: mol_type = other DNA
tgccaatatcagcggctctcaggaggacaagccctattgctggcattacgcccctagaccgtgtggtgttgtgttggcgc

SEQ ID NO: 115698 - DNA, 80 bp, synthetic construct
  source 1..80: mol_type = other DNA
gcctggggaacaagttcagaaaccccactgtggctccgacccacgatgtaaccacagacaggtcacagcgactgacgctg

SEQ ID NO: 115699 - DNA, 80 bp, synthetic construct
  source 1..80: mol_type = other DNA
ggtgtcttcctaatgggccagatgttcaccttccagccgcggcgccattggaccacccaggactgtaactgctccatcta

SEQ ID NO: 115700 - DNA, 80 bp, synthetic construct
  source 1..80: mol_type = other DNA
acaccaaaagcaaaaagaggcacagcacagatcatggaggtgacagccaagtggttatggggttttctttctagaaacaa

SEQ ID NO: 115701 - DNA, 80 bp, synthetic construct
  source 1..80: mol_type = other DNA
ggaactggccttagttttgacagcacaggtgccattacagtaggaaacaaaaataatgataagctaactttgtggaccac

SEQ ID NO: 115702 - DNA, 80 bp, synthetic construct
  source 1..80: mol_type = other DNA
gctgatgtcatcccggctcggagacgcggggacaagcgtggagcattgctctccccgagacccatttcgaccttgaaggg

SEQ ID NO: 115703 - DNA, 80 bp, synthetic construct
  source 1..80: mol_type = other DNA
cgtcgtctcgtgtttgaggtcgccgggccggggggtgtagtccgaaaagccaaaatggcggcgtgcccgctcgcagagtc

SEQ ID NO: 115704 - DNA, 80 bp, synthetic construct
  source 1..80: mol_type = other DNA
tagaagcacgttggcctggagctcgggtagcggttgatgctgagcccgcagctgactggcgtgcgcgacaacgcggcggt

SEQ ID NO: 115705 - DNA, 80 bp, synthetic construct
  source 1..80: mol_type = other DNA
tgcccaccacgcgcatcatcgcgccgctggccacgggagtgatgaaacccgccaccctagacttgcctccaccacccgcg

SEQ ID NO: 115706 - DNA, 80 bp, synthetic construct
  source 1..80: mol_type = other DNA
aatcctttttggctcaactttagctaatgtgatttatagagctaaggaggagtactcttcgcggtttgctgaccttttgt

SEQ ID NO: 115707 - DNA, 80 bp, synthetic construct
  source 1..80: mol_type = other DNA
aagccagccctatatgaaaggaaaatgagtctggctttggccatagtgctgtgtctcgtgtctgtggtcatgaaccgcac

SEQ ID NO: 115708 - DNA, 80 bp, synthetic construct
  source 1..80: mol_type = other DNA
gggtggcccgctccaccgggatctaggtctttgaccgcttgtacctgcgggtcaagcgatctttacctgatcacccgaga

SEQ ID NO: 115709 - DNA, 80 bp, synthetic construct
  source 1..80: mol_type = other DNA
acaccaatggatcgtggcatatcaacagtacagctctcaattgcaacgacacgctcgagacagggttccttaaagcccta

SEQ ID NO: 115710 - DNA, 80 bp, synthetic construct
  source 1..80: mol_type = other DNA
aagctacggtgtgcgccagagccaaggcccctcccccgtcctgggacgccatgtggaagtgcctggcccgactcaagcct

SEQ ID NO: 115711 - DNA, 80 bp, synthetic construct
  source 1..80: mol_type = other DNA
cttgccgtacatcgagcaagggatgatgctcgccgagcagttcaagcagaaggccctcggcctcctgcagaccgcgtccc

SEQ ID NO: 115712 - DNA, 80 bp, synthetic construct
  source 1..80: mol_type = other DNA
gactacccttacagattgtggcattatccgtgtactgtgaattttaccatcttcaaggtgcggatgtacgtagggggagt

SEQ ID NO: 115713 - DNA, 80 bp, synthetic construct
  source 1..80: mol_type = other DNA
tatagacggacatttcctatcccagaccaagcaagcgggcgagaacttcccgtacctcgttgcttaccaggccacagtgt

SEQ ID NO: 115714 - DNA, 80 bp, synthetic construct
  source 1..80: mol_type = other DNA
atttcctccctcacggagcggctttactgcggtggccctatgtttaacagcaaaggggcccagtgtggttatcgccgctg

SEQ ID NO: 115715 - DNA, 80 bp, synthetic construct
  source 1..80: mol_type = other DNA
ggcttgtagcctgacgcccccccactcggccagatcaaaatttggctacggggcgaaggatgtccgaagccattccagga

SEQ ID NO: 115716 - DNA, 80 bp, synthetic construct
  source 1..80: mol_type = other DNA
tcaccagaacacagtggacgtgcagtatctatatggattatcagcttctgttgttaattgggccataaagtgggagtata

SEQ ID NO: 115717 - DNA, 80 bp, synthetic construct
  source 1..80: mol_type = other DNA
gatgccaacggaattttggcccaagggaaaaaaatgattaggccacaacctatggaacacaaatattcatggaaaagctg

SEQ ID NO: 115718 - DNA, 80 bp, synthetic construct
  source 1..80: mol_type = other DNA
ccctgagcgacgatctgggggtgtaccgcaacgacaggatgcgccgcgcggtaagcgccagcaggcggcgcgagctgagc

SEQ ID NO: 115719 - DNA, 80 bp, synthetic construct
  source 1..80: mol_type = other DNA
tcctatgcaattgggtcccaattaccatgtgagcccgagccggacgtgacagtggttacatcaatgctagtcgacccatc

SEQ ID NO: 115720 - DNA, 80 bp, synthetic construct
  source 1..80: mol_type = other DNA
tcaaagccacggccgccatcagggcggcggggctgagagactgcactatgttggtttgcggtgatgacttagtcgtcatc

SEQ ID NO: 115721 - DNA, 80 bp, synthetic construct
  source 1..80: mol_type = other DNA
ggaagcacccgggtgatgaccgcggggaagcgccttcggtacgccagcaacaaccccaacgtgtcgggactgacgcctcc

SEQ ID NO: 115722 - DNA, 80 bp, synthetic construct
  source 1..80: mol_type = other DNA
agaccatcatcctggagttagacaagacagcggagcaccttccaacagcttggcaggtccaccgagactggtttaatgac

SEQ ID NO: 115723 - DNA, 80 bp, synthetic construct
  source 1..80: mol_type = other DNA
gtgacgacgacggtgttttaatccccaacaacctcaccagtggacttactttcagcaccagaaaaactaagctcgtcctc

SEQ ID NO: 115724 - DNA, 80 bp, synthetic construct
  source 1..80: mol_type = other DNA
tgggggaagctcttagagagctagctcttaagagttttgggcaacctctccccaacgatgactcgggtcactctacggtg

SEQ ID NO: 115725 - DNA, 80 bp, synthetic construct
  source 1..80: mol_type = other DNA
tttcagtcaggcaggaattattaacttaaatgtattatggggaatcaatttaactttagtgggaccattagacctgccag

SEQ ID NO: 115726 - DNA, 80 bp, synthetic construct
  source 1..80: mol_type = other DNA
catagtgtataaacctggcaaagaagatgacaattctgaaattaacttaacacaacagtccatgccaaacagacccaact

SEQ ID NO: 115727 - DNA, 80 bp, synthetic construct
  source 1..80: mol_type = other DNA
tggccacgatgaggtgcagatgatagtggtgaagccaggagaaagcgtcaagaatgtgcagaccaagccgggggttttta

SEQ ID NO: 115728 - DNA, 80 bp, synthetic construct
  source 1..80: mol_type = other DNA
aggtctcggctgcccgccccaaccggggtttgggggtgggccggggaaaccccggatgccatggagaggtcacaccctaa

SEQ ID NO: 115729 - DNA, 80 bp, synthetic construct
  source 1..80: mol_type = other DNA
gtgcagggtcaaagaccttggcagggcccaaggggcccgtctgccagatgtacactaatgtagaccaagacatggttggc

SEQ ID NO: 115730 - DNA, 80 bp, synthetic construct
  source 1..80: mol_type = other DNA
cttggagtctgaggtcgaatccgagacagcatcggattcgaccgagtctggggaccaggaggaagccccccgcatcggtg

SEQ ID NO: 115731 - DNA, 80 bp, synthetic construct
  source 1..80: mol_type = other DNA
tcagcccggggcctcaacaaaacctccacttgatcaacaccaacggcagttggcacatcaatcggacagccttgaactgt

SEQ ID NO: 115732 - DNA, 80 bp, synthetic construct
  source 1..80: mol_type = other DNA
ggacatttccaagatacccggaggagccatgtatgctgatgacacagctggttgggacacaagaataacagaagatgacc

SEQ ID NO: 115733 - DNA, 80 bp, synthetic construct
  source 1..80: mol_type = other DNA
agagctgtcgcgcacggcgtgagagtcctggaggacggggttaattatgcaacagggaacctacccggtttccccttttc

SEQ ID NO: 115734 - DNA, 80 bp, synthetic construct
  source 1..80: mol_type = other DNA
cccgaggtcatcatagacatcgttagcggggctcactggggcgtcatgttcggcttggcctacttctctatgcagggagc

SEQ ID NO: 115735 - DNA, 80 bp, synthetic construct
  source 1..80: mol_type = other DNA
tttcctatcccagactaaacaagcgggtgagaatttcccctacctggttgcttaccaagctacggtttgcgccaaagcgc

SEQ ID NO: 115736 - DNA, 80 bp, synthetic construct
  source 1..80: mol_type = other DNA
tttacggcaaggctattcctcttgaggtgatcaagggggggagacatctcatcttttgccactcgaagaagaagtgcgac

SEQ ID NO: 115737 - DNA, 80 bp, synthetic construct
  source 1..80: mol_type = other DNA
aacgctagtagcagcaaccatggcaaatgaaatgggttatttggaaaagaccaaaaaagatctgggatttggaaacccat

SEQ ID NO: 115738 - DNA, 80 bp, synthetic construct
  source 1..80: mol_type = other DNA
ttacggcgccggcgtacgtggcgctgtggttaccttcaagatcatgagcggcgagatgccttccacagaggacttggtaa

SEQ ID NO: 115739 - DNA, 80 bp, synthetic construct
  source 1..80: mol_type = other DNA
agtcacatactctatcactccgctggacctgccagccataatccaaagactccacggcttaagcgcttttacactccatg

SEQ ID NO: 115740 - DNA, 80 bp, synthetic construct
  source 1..80: mol_type = other DNA
gggcccccggtgacgtggggcggggtggggcggggcgaggcccaaagacggtcgccagatctaggctgtttggtcgtgtc

SEQ ID NO: 115741 - DNA, 80 bp, synthetic construct
  source 1..80: mol_type = other DNA
tgctgctgctatttgccggcgtcgacgcggaaaccaccgtcaccgggggaagcgccgcccaaagcgtgcttggagttgcc

SEQ ID NO: 115742 - DNA, 80 bp, synthetic construct
  source 1..80: mol_type = other DNA
gaggagttcgagaagctctaccagcacctcgaggtcatggggttcggcgagcagatacccatccaggagctggcctatgg

SEQ ID NO: 115743 - DNA, 80 bp, synthetic construct
  source 1..80: mol_type = other DNA
acctccgtcatgggctccaatatgacgtcctctcttgagggggctgatggggtttcagatgacggttcatacgattcgat

SEQ ID NO: 115744 - DNA, 80 bp, synthetic construct
  source 1..80: mol_type = other DNA
cactgatgtgcccgaactggaaagaaccactcctttgatgcaaaagaaagtcggccaagtgctcctcataggggtcagcg

SEQ ID NO: 115745 - DNA, 80 bp, synthetic construct
  source 1..80: mol_type = other DNA
gctgatctagaggtgatcaccagcacctgggtcatagcagggggagtactcgccgccctggcagcttactgcttatgcgt

SEQ ID NO: 115746 - DNA, 80 bp, synthetic construct
  source 1..80: mol_type = other DNA
ggaagaggagaagttgccaataagccctttgagcaattcgctgattcggcatcacaacttggtatactcaactacatcac

SEQ ID NO: 115747 - DNA, 80 bp, synthetic construct
  source 1..80: mol_type = other DNA
ccaggtgatcgtcgatgtgttcatcggcggtcattggggcgtgcttgcggggttgctgtactatagtatggtagccaact

SEQ ID NO: 115748 - DNA, 80 bp, synthetic construct
  source 1..80: mol_type = other DNA
ctgtcccagacgaaacagagcggggaaaacttcccctacctagtcgcataccaagcaaccgtgtgcgctagagctaaagc

SEQ ID NO: 115749 - DNA, 80 bp, synthetic construct
  source 1..80: mol_type = other DNA
gagtatgtggtacttgctttcctgctgttggctgacgcgcgtatttgcgcgtgcctgtggatggtgttactcatatcaca

SEQ ID NO: 115750 - DNA, 80 bp, synthetic construct
  source 1..80: mol_type = other DNA
cgttgttgtaggaaccaccgatcgcaggggcaatccaacctattcttggggagagaatgagacagatgtcttcctgcttg

SEQ ID NO: 115751 - DNA, 80 bp, synthetic construct
  source 1..80: mol_type = other DNA
ggaacatcagcctctttacggggcgacactccaccatgatcactcccctgtgaggaactactgtcttcacgcagaaagcg

SEQ ID NO: 115752 - DNA, 80 bp, synthetic construct
  source 1..80: mol_type = other DNA
tcttgagaaaattgacctccaaggaactaatgatggccaccataggaatcgcactcctttcccaaagcaccataccagag

SEQ ID NO: 115753 - DNA, 80 bp, synthetic construct
  source 1..80: mol_type = other DNA
gctacagcgggggggacatttttcacagcgtgtcctatgcccgaccccgcgtattactcctgtgcctactcctgctcacc

SEQ ID NO: 115754 - DNA, 80 bp, synthetic construct
  source 1..80: mol_type = other DNA
gaggtcagcacagttcacggtggcatctgagaaagtgatcctgcagctcggcgactatggagatgtgtcgctgacgtgta

SEQ ID NO: 115755 - DNA, 80 bp, synthetic construct
  source 1..80: mol_type = other DNA
acgagaagcgcgatcacatggtcctgctggagttcgtgaccgccgccgggatcactctcggcatggacgagctgtacaag

SEQ ID NO: 115756 - DNA, 80 bp, synthetic construct
  source 1..80: mol_type = other DNA
ttattgacccttgttgcgcttttctgtgcgtgctctacattggccgcggtcgctcacatcgaagtagattgcatcccacc

SEQ ID NO: 115757 - DNA, 80 bp, synthetic construct
  source 1..80: mol_type = other DNA
ttctggctgcccaggacaccttgggccaagacttgaacttcgagatgtacggggcagtatactccgtctctccactagat

SEQ ID NO: 115758 - DNA, 80 bp, synthetic construct
  source 1..80: mol_type = other DNA
acttttaaaatgagaccaatgttcgctgttgggctattattccgcaaactaacatccagagaagttcttctcctcacgat

SEQ ID NO: 115759 - DNA, 80 bp, synthetic construct
  source 1..80: mol_type = other DNA
ttgatcatgaaagatggaagaacactggtggttccatgccgaggacaggatgaattggtaggcagagctcgcatatctcc

SEQ ID NO: 115760 - DNA, 80 bp, synthetic construct
  source 1..80: mol_type = other DNA
agacggcgtgaattacgcaacagggaatcttcctggttgctccttttctatcttcctccttgctcttctatcctgcttga

SEQ ID NO: 115761 - DNA, 80 bp, synthetic construct
  source 1..80: mol_type = other DNA
tcatggccctgggactaaccgctgtgaggctggtcgaccccatcaacgtggtgggactgctgttgctcacaaggagtggg

SEQ ID NO: 115762 - DNA, 80 bp, synthetic construct
  source 1..80: mol_type = other DNA
gtctaaactttatgcaagaaacactatttttggaaatatttacctagattcgcaagcatataatccagtggttattaaaa

SEQ ID NO: 115763 - DNA, 80 bp, synthetic construct
  source 1..80: mol_type = other DNA
taatcgaggtggaccgcactgaagcacgcagggccagacgtgaaaataacatagtgggaggacatccggtttcgcgaggc

SEQ ID NO: 115764 - DNA, 80 bp, synthetic construct
  source 1..80: mol_type = other DNA
tcgagaccaagatgaactggttggaagagcccgcgtctcaccaggctgcggctggagcgtccgtgaaactgcctgccttt

SEQ ID NO: 115765 - DNA, 80 bp, synthetic construct
  source 1..80: mol_type = other DNA
tggggagggggcggtgcagtggatgaacaggctcatcgcattcgcatcccgtggtaaccacgtctcaccgacgcactatg

SEQ ID NO: 115766 - DNA, 80 bp, synthetic construct
  source 1..80: mol_type = other DNA
cacggcccgattacaatccgcccttactgcagccgtggaaggctcccgactacgagcctcccctggtgcatgggtgcgct

SEQ ID NO: 115767 - DNA, 80 bp, synthetic construct
  source 1..80: mol_type = other DNA
ctcccgtggaggtgaccgcgctttatgcgaccgacgggtgcgttattacctcttcgatcgccctcctcacaaactctcta

SEQ ID NO: 115768 - DNA, 80 bp, synthetic construct
  source 1..80: mol_type = other DNA
ctgggtttctggccgcgttattcgcccgcaaggtgaattcctcgggctgtccgcaggccatggcagcgtgtagggacata

SEQ ID NO: 115769 - DNA, 80 bp, synthetic construct
  source 1..80: mol_type = other DNA
ggagaggcgactctcggggtgccctgttgagtcctaggccgatatccaccctcaaggggtcctcaggaggtccgctgctg

SEQ ID NO: 115770 - DNA, 80 bp, synthetic construct
  source 1..80: mol_type = other DNA
tcgtgcgccacctccagggccgcgtccgtcgaccactcgccgttgccgcgctccagggcacgcgcggtcagctccatcat

SEQ ID NO: 115771 - DNA, 80 bp, synthetic construct
  source 1..80: mol_type = other DNA
tgggctcccctatgctctcctcttcttttgcgtagcttggtacatcaggggtagacttcccgccgccgcagcttacgcag

SEQ ID NO: 115772 - DNA, 80 bp, synthetic construct
  source 1..80: mol_type = other DNA
aacagctcccgttgctgggtagcgctcactcccacgctcgcggccaggaatgccagcgtccccactacgacaatacgacg

SEQ ID NO: 115773 - DNA, 80 bp, synthetic construct
  source 1..80: mol_type = other DNA
tccacaaacctatcaagtggggtaccttcacgcacctacgggaagcgggaagagcactaaagtcccggcggcctacgcgg

SEQ ID NO: 115774 - DNA, 80 bp, synthetic construct
  source 1..80: mol_type = other DNA
ggttaggttgcgggcttacctaaatacaccagggttgcccgtctgccaggaccatctggagttctgggagagcgtcttta

SEQ ID NO: 115775 - DNA, 80 bp, synthetic construct
  source 1..80: mol_type = other DNA
gaggtggcagccaaactcagaggcatggggctcaacgctgtggcgtactataggggtctcgatgtgtccgtcataccaac

SEQ ID NO: 115776 - DNA, 80 bp, synthetic construct
  source 1..80: mol_type = other DNA
cggacttacacatatagacgctcactttctgtcccagacgaagcagggaggggaaaacttcgcgtacttggtggcctatc

SEQ ID NO: 115777 - DNA, 80 bp, synthetic construct
  source 1..80: mol_type = other DNA
ccggcgcccccgacgtgtcggcgctgggcgcgcagggcgtgctgctgctgtccacgcgggacctggccttcgccgtggcc

SEQ ID NO: 115778 - DNA, 80 bp, synthetic construct
  source 1..80: mol_type = other DNA
catcaagtgggagtatgtcgttcttgccttcttgattctggcggacgcgcgcgtttgcgcgtgtctttggcttatgctac

SEQ ID NO: 115779 - DNA, 80 bp, synthetic construct
  source 1..80: mol_type = other DNA
ctataatatggttcctgaggcacaagcccaggtatggaaatctggaaaaggaaaaattgctataaatgtttttctttcca

SEQ ID NO: 115780 - DNA, 80 bp, synthetic construct
  source 1..80: mol_type = other DNA
acagcagacagagatggacttggaagagggcgaagggctggcgagactggaggcgccgtccccggagcaacacccccgcg

SEQ ID NO: 115781 - DNA, 80 bp, synthetic construct
  source 1..80: mol_type = other DNA
gtaccatcctgactccccccgtagattggcagcagcagtcaagcaagcctgggaagatggtatctgcgggatctcctctg

SEQ ID NO: 115782 - DNA, 80 bp, synthetic construct
  source 1..80: mol_type = other DNA
gccctcgccacacccgcgacccccgggctacacggccgttgtctccccgatggccctccaggctgtcgacgccccctccc

SEQ ID NO: 115783 - DNA, 80 bp, synthetic construct
  source 1..80: mol_type = other DNA
ttgtccaggtacatgcatttcccccggacagtggacacaaaatccaccaatgccagccaggaaagttgaatcttgaggga

SEQ ID NO: 115784 - DNA, 80 bp, synthetic construct
  source 1..80: mol_type = other DNA
agttacagacatacaagctgaggtgcctgacagagcctggagtagtgggtttgagtggataacagaatacaccgggaaaa

SEQ ID NO: 115785 - DNA, 80 bp, synthetic construct
  source 1..80: mol_type = other DNA
cccctgattcagtacttagaagagccccctccccgacccccttccactgttagctactttcacataaccggcggcgatga

SEQ ID NO: 115786 - DNA, 80 bp, synthetic construct
  source 1..80: mol_type = other DNA
tttggccatcctttggttaaaagcaactgagatagtgtatctttcatttggccagaatgtataatggccatgccggcggg

SEQ ID NO: 115787 - DNA, 80 bp, synthetic construct
  source 1..80: mol_type = other DNA
gttgctttgttcgggcaggaacttgaagccattcttctcttcggcctccacatgatacttttccattagctttatcatta

SEQ ID NO: 115788 - DNA, 80 bp, synthetic construct
  source 1..80: mol_type = other DNA
ggaaatcacactttcggtttcaaattcatttttgaagtcatgtgtgatatcacactgcatgtggctagacttcatggctt

SEQ ID NO: 115789 - DNA, 80 bp, synthetic construct
  source 1..80: mol_type = other DNA
cggcgtccggcgtgcgggaccggtggcccggggacggccaacgggcgcgcggtggctcgtatctcattaccgccgaaccg

SEQ ID NO: 115790 - DNA, 80 bp, synthetic construct
  source 1..80: mol_type = other DNA
aacactgcggggggaatatctcattcgcaaggagatatttgctattccatgatggagtagcaattccaaggaatgtcctg

SEQ ID NO: 115791 - DNA, 80 bp, synthetic construct
  source 1..80: mol_type = other DNA
ggtggtaggtttggatggcattacatttatgaatgttaggtttgctggagaaaaatttaagggcattatgtttgaggcta

SEQ ID NO: 115792 - DNA, 80 bp, synthetic construct
  source 1..80: mol_type = other DNA
aaggggctcttgctgattatcctttccctggtggggggtgtactgtcatgccacgaacagccacgatgtaacatcaccac

SEQ ID NO: 115793 - DNA, 80 bp, synthetic construct
  source 1..80: mol_type = other DNA
ctagaggacaattccacaccaattccaacaaccatcatggcaaagaatgaggttttctgcctggacccccaaaagggcgg

SEQ ID NO: 115794 - DNA, 80 bp, synthetic construct
  source 1..80: mol_type = other DNA
ccggggacttaaattataatccctttatacacgccggagagctgaacacccgtatttcccggaattctttacgccggata

SEQ ID NO: 115795 - DNA, 80 bp, synthetic construct
  source 1..80: mol_type = other DNA
ggaaacaatgggtcgtcgaccagacgggcgatggtttcggaggtacagtacgccttgcgagcctggtccgacgggaccgg

SEQ ID NO: 115796 - DNA, 80 bp, synthetic construct
  source 1..80: mol_type = other DNA
gccagatcgttggtggagtctacgtgctaccgcgcaggggccctagattgggtgtgcgcgcagcgcggaagacttcggag

SEQ ID NO: 115797 - DNA, 80 bp, synthetic construct
  source 1..80: mol_type = other DNA
gctgagccacagggtcggtggctacttgatttaattaatatcttgcaaagtattgtggttcaggaacgcagtctcagttt

SEQ ID NO: 115798 - DNA, 80 bp, synthetic construct
  source 1..80: mol_type = other DNA
tttctcccggagagcgaacggttatgcgtcccctaaagcgcgagtacgacgaagtgtacgcagacgatgacattttggag

SEQ ID NO: 115799 - DNA, 80 bp, synthetic construct
  source 1..80: mol_type = other DNA
aaggtcattatcatcatggtcatgttttcagggatcgacgctgaaacatacgtcactggtggccaagcagctagcacaac

SEQ ID NO: 115800 - DNA, 80 bp, synthetic construct
  source 1..80: mol_type = other DNA
atcaaatgggagtacgtggtcctcgcgttcctgctgttggcggacgcgcgcatatgcgcgtgtctctggctcatgatgct

SEQ ID NO: 115801 - DNA, 80 bp, synthetic construct
  source 1..80: mol_type = other DNA
ttagtcgggttggttttcatctgcatcgcatggcacatacggggcagggctgcccccctatttgcttatgcttggcttca

SEQ ID NO: 115802 - DNA, 80 bp, synthetic construct
  source 1..80: mol_type = other DNA
ggagacgccccgcagccagcgtatgacttggaacacataacatcctgctcctccaatgtctcggttgcacatgatgcgac

SEQ ID NO: 115803 - DNA, 80 bp, synthetic construct
  source 1..80: mol_type = other DNA
gtgcactccctcccccaagccggcctccggtaccaccacctcggaggaagaagacaatcacacttacagattccaatgtc

SEQ ID NO: 115804 - DNA, 80 bp, synthetic construct
  source 1..80: mol_type = other DNA
caagacctcctcgttttcgggaaacgccccgcgccaccacagacgcggggcgttccagcgcggcacgcgggcgccgcgca

SEQ ID NO: 115805 - DNA, 80 bp, synthetic construct
  source 1..80: mol_type = other DNA
atacccattccccagcccaactatcgtagggccttgtggagggtggcagctgaggagtacgttgaggtagtacgcgtaaa

SEQ ID NO: 115806 - DNA, 80 bp, synthetic construct
  source 1..80: mol_type = other DNA
ccataaccccctgtattaaatgggaaggcaggcgggtgtggagatccatatggcccgacgatatactgtccgttatttgg

SEQ ID NO: 115807 - DNA, 80 bp, synthetic construct
  source 1..80: mol_type = other DNA
aacaagtaatagcgtgtagccaacactagcgttttttcagagggtccaaatcgaacaatataccaaaacggcgagcatcc

SEQ ID NO: 115808 - DNA, 80 bp, synthetic construct
  source 1..80: mol_type = other DNA
ccaacgcccttgctataccgtttgggcgctgtttccaatgaagtcactctcacacatccagttaccaaatacatagccac

SEQ ID NO: 115809 - DNA, 80 bp, synthetic construct
  source 1..80: mol_type = other DNA
cctgggagggagcggagccaacccctttgctcacttgcaacccaaagggcgttcgagtcgcctgtactaataaaaaaaga

SEQ ID NO: 115810 - DNA, 80 bp, synthetic construct
  source 1..80: mol_type = other DNA
atctacaactcatcaagaacggtagcagctggcacataaacaggactgctttgaactgcaatgattccctccagacgggg

SEQ ID NO: 115811 - DNA, 80 bp, synthetic construct
  source 1..80: mol_type = other DNA
gggggtcgtggaggggcgacgggatctgccacactacgtgaacctgaggggcaaccattaaggggcatgccaagaacggg

SEQ ID NO: 115812 - DNA, 80 bp, synthetic construct
  source 1..80: mol_type = other DNA
ccatctgtggtcgctatctcttcaactgggcggtgaagaccaagctcaaactcactccattgccagaggcacgccgcctg

SEQ ID NO: 115813 - DNA, 80 bp, synthetic construct
  source 1..80: mol_type = other DNA
catgaacagcgagtactttactaatgccattttgaacccccattggatgcgcccctctggtttttatacgggagaatttg

SEQ ID NO: 115814 - DNA, 80 bp, synthetic construct
  source 1..80: mol_type = other DNA
ccgaacatgacatcaggacggaggaggggatataccaatgttgtgaccttgaaccagaggctcggaaggcaatcagcgct

SEQ ID NO: 115815 - DNA, 80 bp, synthetic construct
  source 1..80: mol_type = other DNA
cggtgctggcgggccaaggagggccctttgacgccgagaccagacgggtctcctgggaaaccttggtcgcccacggcccg

SEQ ID NO: 115816 - DNA, 80 bp, synthetic construct
  source 1..80: mol_type = other DNA
ggcccgtcttgagctggtgatacagggccacggggctcatcttgaagtaccccgccatgagcgcgtaggtcagcgcgttc

SEQ ID NO: 115817 - DNA, 80 bp, synthetic construct
  source 1..80: mol_type = other DNA
gtatgttaaaacatgcggcgccccgccatgcaatatccaacctaatcctaacaccaccgatgagaggacgctgcgctgcc

SEQ ID NO: 115818 - DNA, 80 bp, synthetic construct
  source 1..80: mol_type = other DNA
ggtagagcccgaatttctcagggagccgggtggtcgttgaaggagacggcctgtttggggaagtcttacgcccaaatgtg

SEQ ID NO: 115819 - DNA, 80 bp, synthetic construct
  source 1..80: mol_type = other DNA
tttacaaacgtctaatggagctattactttagcactagatgcagcgctgcctttgcaatataaaaacaaccaacttcaac

SEQ ID NO: 115820 - DNA, 80 bp, synthetic construct
  source 1..80: mol_type = other DNA
ctgggcgtggtacgtacggggtaggatggtccctgcctgtgcgtacggcatactccaaatatggccactcctgctgctga

SEQ ID NO: 115821 - DNA, 80 bp, synthetic construct
  source 1..80: mol_type = other DNA
gcatgtggcatggttagaacaatgttaggaggcaggtacgtccaagctgctctactcactcttggcaggtggacaggcac

SEQ ID NO: 115822 - DNA, 80 bp, synthetic construct
  source 1..80: mol_type = other DNA
caaatcaatggtctctgcagggtcaggggaagtggacagcttttcactaggactgctatgcatatcaataatgatcgaag

SEQ ID NO: 115823 - DNA, 80 bp, synthetic construct
  source 1..80: mol_type = other DNA
gtggtggatccagtacttcatagcccgggccgaagcctacttgcatgtgtggattcctcccctacaagttcgtgggtggc

SEQ ID NO: 115824 - DNA, 80 bp, synthetic construct
  source 1..80: mol_type = other DNA
tcactgtagtggctggggacgtgaaaggggtgttgaccaaaggcaagagagcactcacacctccagtgaatgatctgaaa

SEQ ID NO: 115825 - DNA, 80 bp, synthetic construct
  source 1..80: mol_type = other DNA
cgagttccgatgttggacaagaactttgcatgtttacaaaccgtttgttttgatcacacaccccagtaatctcactgttt

SEQ ID NO: 115826 - DNA, 80 bp, synthetic construct
  source 1..80: mol_type = other DNA
catggccaaaaacgaagtgttctcagtcaaaccggagaagggcggccgaaaacctgcgcgcctaatcgtataccctgacc

SEQ ID NO: 115827 - DNA, 80 bp, synthetic construct
  source 1..80: mol_type = other DNA
gacaaaccttactgctggcactacgcacccaggccgtgcggtgttgtgcccgcgagagaagtatgtggccccgtgtactg

SEQ ID NO: 115828 - DNA, 80 bp, synthetic construct
  source 1..80: mol_type = other DNA
ccagcgcaacgggttgagtacctcttgaaggcgtggaactcaaagagggtacccatggggttttcatatgacacccgttg

SEQ ID NO: 115829 - DNA, 80 bp, synthetic construct
  source 1..80: mol_type = other DNA
caaggtgacccgggacggcgagacgctgcgccccaacacgctcctgctaaaggaactggaacgcacgtttagcgggaagc

SEQ ID NO: 115830 - DNA, 80 bp, synthetic construct
  source 1..80: mol_type = other DNA
gacctgctcttgcctatcttctttggctctcggtgcgattcgtcaggcagcggccttgtcgaatctcgaccccaccactc

SEQ ID NO: 115831 - DNA, 80 bp, synthetic construct
  source 1..80: mol_type = other DNA
tgtgggtaccttctctgcacgtccgaggcgggcgtgatgcacttatactccttgcttgtctactgcacccgcagcttggg

SEQ ID NO: 115832 - DNA, 80 bp, synthetic construct
  source 1..80: mol_type = other DNA
tgacctgcatgtctgcggacttggaagttataaccagtacctgggttctggtgggtggggtcctcgcggcattagcagcc

SEQ ID NO: 115833 - DNA, 80 bp, synthetic construct
  source 1..80: mol_type = other DNA
atatcgcttgccactggccttttgaacgacctgcacgccggggtgactgaacccggtgtacaccacctcttcttcctcct

SEQ ID NO: 115834 - DNA, 80 bp, synthetic construct
  source 1..80: mol_type = other DNA
gcctcatcgccttcgcgtcgcggggcaatcatgtatcccccacgcattatgttccagaatccgacgcagcagcccgcgta

SEQ ID NO: 115835 - DNA, 80 bp, synthetic construct
  source 1..80: mol_type = other DNA
gccattaaccacatcaactccgtgtgggaggacttgttagaagacaactctacacctatacctacaaccataatggccaa

SEQ ID NO: 115836 - DNA, 80 bp, synthetic construct
  source 1..80: mol_type = other DNA
ggaagtcactaattgaggaaaacgaggtccatatccctccctttgattttttcaccctggatttgaagcctgctactgct

SEQ ID NO: 115837 - DNA, 80 bp, synthetic construct
  source 1..80: mol_type = other DNA
agttatggctttgatgactatggccatggcaacttccatccatcgggatagagagggatacatggtcatgcgagctagcg

SEQ ID NO: 115838 - DNA, 80 bp, synthetic construct
  source 1..80: mol_type = other DNA
ccgcattcgtggtgagcggcttggccggcgctgctatagggggcgtaggcctaggcagggtcctgcttgacatcctggca

SEQ ID NO: 115839 - DNA, 80 bp, synthetic construct
  source 1..80: mol_type = other DNA
ggcctgccctgtcgcaatgcttttcaggagactttcatccatctggtcagaaaagactatttttttattgtcaagcttgg

SEQ ID NO: 115840 - DNA, 80 bp, synthetic construct
  source 1..80: mol_type = other DNA
gatcccgcattactgattttaaagaaacccggacaacgcttcaaggttgaagtacaaacaagatatcatgctacaggtca

SEQ ID NO: 115841 - DNA, 80 bp, synthetic construct
  source 1..80: mol_type = other DNA
tggcgggcccttgagaccttctgggcgaagcacatgtggaatttcatcagcgggatacaatacttagcaggcttgtccac

SEQ ID NO: 115842 - DNA, 80 bp, synthetic construct
  source 1..80: mol_type = other DNA
cgtcgaggccgacggggagaaatacacgtacctacctggggatctcaacaggccccgggtggccaaccaggtcgtggacg

SEQ ID NO: 115843 - DNA, 80 bp, synthetic construct
  source 1..80: mol_type = other DNA
gtagaataattttagatgttaattatccctttgatgcgagcaataacctgtccttaagacggggattgggactaatttat

SEQ ID NO: 115844 - DNA, 80 bp, synthetic construct
  source 1..80: mol_type = other DNA
tcccagacctctgtcaacactcaagggctcatctggaggtccagtcatgtgctcttccggacacgctgtcggcttgttcc

SEQ ID NO: 115845 - DNA, 80 bp, synthetic construct
  source 1..80: mol_type = other DNA
ggatacggtggcgttttgtttccggtcagtacaagtaataagatacgacggatgtccccggattagaacgagcgctttta

SEQ ID NO: 115846 - DNA, 80 bp, synthetic construct
  source 1..80: mol_type = other DNA
aaaggagtacaagagaggggacacgaccactggtgtctataggatcatgactcgtggattacttggtagttaccaagcag

SEQ ID NO: 115847 - DNA, 80 bp, synthetic construct
  source 1..80: mol_type = other DNA
tgggttcccttcgtacagacctcacggaagagattcatgttatgaatctcctgtcggcaataccaacacgcccaggactt

SEQ ID NO: 115848 - DNA, 80 bp, synthetic construct
  source 1..80: mol_type = other DNA
caggagagtggagacagacacaaaggtcatcatactagactcctttgactcagcatcctccgtcgaggatgatagggagc

SEQ ID NO: 115849 - DNA, 80 bp, synthetic construct
  source 1..80: mol_type = other DNA
aaatgatggccagccaactactgagcatgacataacaatggctttctttgatactcctggcgacactaatgctgaagaca

SEQ ID NO: 115850 - DNA, 80 bp, synthetic construct
  source 1..80: mol_type = other DNA
ctacggcggaggaaactcgtcgaatgttgcatagagcctttgatactctagcatgagccccccgtcgaagctgatgtccc

SEQ ID NO: 115851 - DNA, 80 bp, synthetic construct
  source 1..80: mol_type = other DNA
gcctggaaaagtgggctcgcgacggcgtgctgttgttgaacacgaccctgaccgtcaagcgcgggacggcggcgtcccac

SEQ ID NO: 115852 - DNA, 80 bp, synthetic construct
  source 1..80: mol_type = other DNA
tggctggcacgggcagcggcgatagagaggccgagtcctactttgacgcgggcgctgacctgcgctgggccccaagccga

SEQ ID NO: 115853 - DNA, 80 bp, synthetic construct
  source 1..80: mol_type = other DNA
agtttgcgcgcgcaaccgaatcctacttcaatgtgggcaacaagtttaggaatcccaccgtagccccgagtcacgatgtg

SEQ ID NO: 115854 - DNA, 80 bp, synthetic construct
  source 1..80: mol_type = other DNA
cgatgacacaggcaagagatactactacctcacacgtgacccgtccataccccttgcgcgagctgcgtgggagacggctc

SEQ ID NO: 115855 - DNA, 80 bp, synthetic construct
  source 1..80: mol_type = other DNA
cggcgcccgcaaccgcagagcactcagctggcgcgcccccccccaacgtgggagtgcttaatggaagggcgtgaggccgg

SEQ ID NO: 115856 - DNA, 80 bp, synthetic construct
  source 1..80: mol_type = other DNA
ccttggccgccatggggcctgcctatggcttccagtactccccgaaacaacgggtagagcaccttctgaagctgtggcgc

SEQ ID NO: 115857 - DNA, 80 bp, synthetic construct
  source 1..80: mol_type = other DNA
tcctggaccggggcgctcataaccccctgtggtcccgaggaagagaagttgccgatcaacccgctgagcaattcgctgtt

SEQ ID NO: 115858 - DNA, 80 bp, synthetic construct
  source 1..80: mol_type = other DNA
ctccggctcgcggtccccggcgaccgtctcgaattccccgttgcgagcggcggcgcgcgtacagcagctgtccccgcccc

SEQ ID NO: 115859 - DNA, 80 bp, synthetic construct
  source 1..80: mol_type = other DNA
ttgttagatgcagcgaccggcgatcatcgcggagagggctcctaacctggatcccgcggttttggcggccatgcaaagcc

SEQ ID NO: 115860 - DNA, 80 bp, synthetic construct
  source 1..80: mol_type = other DNA
atgttgtgggccagcacctgcagcgtgagcatggcgggaccgtccactaccacgcgcccgttgtgaaacatggcgttgac

SEQ ID NO: 115861 - DNA, 80 bp, synthetic construct
  source 1..80: mol_type = other DNA
ggcgtccgacgtccagcagtacctggagcgcctcgagaaacagaggcaacttaaggtgggcgcggacgaggcgtcggcgg

SEQ ID NO: 115862 - DNA, 80 bp, synthetic construct
  source 1..80: mol_type = other DNA
cgcagcccagggctataaggtgctggtgctcaacccctcggttgctgcaacattgggctttggcgcttatatgtccaagg

SEQ ID NO: 115863 - DNA, 80 bp, synthetic construct
  source 1..80: mol_type = other DNA
aggtgctttctacggctacccagaccttcctaggtacaacagtagggggggttatgtggactgtttaccatggtgcaggt

SEQ ID NO: 115864 - DNA, 80 bp, synthetic construct
  source 1..80: mol_type = other DNA
gagtcatcatcgtcatcggtcacagagggggaaaggaccgtgagagttcttgatactgtagaaaaatggctggcttgtgg

SEQ ID NO: 115865 - DNA, 80 bp, synthetic construct
  source 1..80: mol_type = other DNA
tgcgcgcgggcaaaggccccccccccctcatgggacgtgatgtggaagtgtctcacgcgcctcaagcctatgcttacggg

SEQ ID NO: 115866 - DNA, 80 bp, synthetic construct
  source 1..80: mol_type = other DNA
tgggtgatgagtactgttacggaggacacaccaatgaggatgactcaaactcagcccattggacggaggcccgcatcatg

SEQ ID NO: 115867 - DNA, 80 bp, synthetic construct
  source 1..80: mol_type = other DNA
tgccgtactacgtgcgtgcccacgcattactgcgtgtgtgcttactggtgcggcgcgtggcaggaggaaggtacatccaa

SEQ ID NO: 115868 - DNA, 80 bp, synthetic construct
  source 1..80: mol_type = other DNA
ctgtacgtggggggacccatgttcaactctcgtggtgagcgttgtggctaccgcaggtgcagagctagcggtgtcttgcc

SEQ ID NO: 115869 - DNA, 80 bp, synthetic construct
  source 1..80: mol_type = other DNA
ggtaaaactcacctgcagaccacacaagacctatatcatctggttcttcgagaacacctcatttgcagtctcaaacactc

SEQ ID NO: 115870 - DNA, 80 bp, synthetic construct
  source 1..80: mol_type = other DNA
gtccgacccccctgctttaccggcttggggccgtccaaaatgaaattgtcaccactcacccaatcaccaagtacatcatg

SEQ ID NO: 115871 - DNA, 80 bp, synthetic construct
  source 1..80: mol_type = other DNA
acacttatgtgtattctggacaatgtgatgatgatgacagctctctggtgcagtggaaagaagcccagatcttactcgac

SEQ ID NO: 115872 - DNA, 80 bp, synthetic construct
  source 1..80: mol_type = other DNA
tcactttgcctacccggcagtaaatcttccgccaaaggtaatgagcgcagtgatgaatcagctactaattaagcgagccc

SEQ ID NO: 115873 - DNA, 80 bp, synthetic construct
  source 1..80: mol_type = other DNA
aggactggctgcaccgagggccaaaggaattttgtgtgaaggtgctctgcccctatatgccaaaagtcatagaaaagatg

SEQ ID NO: 115874 - DNA, 80 bp, synthetic construct
  source 1..80: mol_type = other DNA
ggtgaacccatacgtgtcagtagccacagccaacgccaaaatcttggtggagctggaacctccatttggcgattcataca

SEQ ID NO: 115875 - DNA, 80 bp, synthetic construct
  source 1..80: mol_type = other DNA
tgtaaacacacgagtttcgttaatatgtttgtttaacccgatccggtgacttaagtacataaacaggcatgatatttgaa

SEQ ID NO: 115876 - DNA, 80 bp, synthetic construct
  source 1..80: mol_type = other DNA
tctatggcaaagccattccattggcaatgatcaagggaggaagacatcttgtgttttgccattcaaagaaaaagtgcgac

SEQ ID NO: 115877 - DNA, 80 bp, synthetic construct
  source 1..80: mol_type = other DNA
tggccggcacggtgaacgtgggccaacccggaaaccccaggacggcaaagtacgggacgggtcccccccggaccgcaaac

SEQ ID NO: 115878 - DNA, 80 bp, synthetic construct
  source 1..80: mol_type = other DNA
ggtgctggaacttggtggatgtgtcactatcacagctgaagggaaaccgtcaatggacgtgtggcttgactccatctatc

SEQ ID NO: 115879 - DNA, 80 bp, synthetic construct
  source 1..80: mol_type = other DNA
taagatgcgggtctttgtcggtggagttgagcatcggttggatgtcgcttgcaactggactaggggggaacgttgtgatc

SEQ ID NO: 115880 - DNA, 80 bp, synthetic construct
  source 1..80: mol_type = other DNA
ccggaccagggcggtggcatcgggcaccgggatggccgccgcgacggccgacgatgaggggtcggccgtcaccatcctca

SEQ ID NO: 115881 - DNA, 80 bp, synthetic construct
  source 1..80: mol_type = other DNA
ttacgggcgaccatgcggtctgcacggccggctgtgtgcccgagggggtgacgtttgcctggttcctggtggacgactcc

SEQ ID NO: 115882 - DNA, 80 bp, synthetic construct
  source 1..80: mol_type = other DNA
atccagcccgtggtggtgtctcactggcaaaaattggaagctttctggcacaagcacctgtggaactttgtcagtgggat

SEQ ID NO: 115883 - DNA, 80 bp, synthetic construct
  source 1..80: mol_type = other DNA
gtgttgggctgggcgccggaggcgtgcgtgcgcaagcagcgcccccacgcgggcgcgcgcagcttgaagcgcgcgcccgc

SEQ ID NO: 115884 - DNA, 80 bp, synthetic construct
  source 1..80: mol_type = other DNA
aaatgcaacggcatggttaacgggaccatatccattaaagctcaaaaaggcactttacttaaacccacagctagctttat

SEQ ID NO: 115885 - DNA, 80 bp, synthetic construct
  source 1..80: mol_type = other DNA
tgagcctgatcccgaagagggtactagcagaaggaggacaaagagaaagatggaaaacgagggggaggactttttaaagg

SEQ ID NO: 115886 - DNA, 80 bp, synthetic construct
  source 1..80: mol_type = other DNA
aatttaggcagaagatcctagggctgcttcagaacacggcaaaacaagcagaggaactcaagccagcagttcaatcggca

SEQ ID NO: 115887 - DNA, 80 bp, synthetic construct
  source 1..80: mol_type = other DNA
cgccatcaaagctaaaaccagcaactattgaggcaatgcttgttacagtaactgctggttctaacttaactttagttggg

SEQ ID NO: 115888 - DNA, 80 bp, synthetic construct
  source 1..80: mol_type = other DNA
tggccgcctcgtaaaaccccatgaggtgccggggcgccacggcgtccgcggcggccggtggcccgcggcgcgtcaggcgc

SEQ ID NO: 115889 - DNA, 80 bp, synthetic construct
  source 1..80: mol_type = other DNA
cctccagggctatctatgaaagcatacagagattcagccatagctcagcccgcttaccagtagacagagagcacagcagt

SEQ ID NO: 115890 - DNA, 80 bp, synthetic construct
  source 1..80: mol_type = other DNA
aggtggcgctgcggcccgcgctccttgcgcggcggctgcggtgggcaggcgccggcaggcgcggcgcgcggagcctccgg

SEQ ID NO: 115891 - DNA, 80 bp, synthetic construct
  source 1..80: mol_type = other DNA
cgttcgttgttaaggtatttcaccaacagctccgggggctggttatacccgtgacccaccagggtgtgaaagttggctgt

SEQ ID NO: 115892 - DNA, 80 bp, synthetic construct
  source 1..80: mol_type = other DNA
gtctacctctgacaaacacgctccccataaataacacttccttgggcatgccacagtttacaatttctcgataccaaggg

SEQ ID NO: 115893 - DNA, 80 bp, synthetic construct
  source 1..80: mol_type = other DNA
gtactcatggactggggcgcttgtgacaccttgcgcggctgaggaatcaaagctgccaattagccccctgagcaattcac

SEQ ID NO: 115894 - DNA, 80 bp, synthetic construct
  source 1..80: mol_type = other DNA
tactcaggaaaacgggaggacatctggtgtggcagcctaattggcacaagagcccgagccacgtgggcagaaaacatcca

SEQ ID NO: 115895 - DNA, 80 bp, synthetic construct
  source 1..80: mol_type = other DNA
aatccctgagcgttcgtggaattcaggacatgaatgggtcacggattttaaggggaagactgtttggtttgttccaagca

SEQ ID NO: 115896 - DNA, 80 bp, synthetic construct
  source 1..80: mol_type = other DNA
ggtacctctatcccaacctctgatgacacgccatcacctgatgacgaggacgccacgtccgaagccggctcttacagctc

SEQ ID NO: 115897 - DNA, 80 bp, synthetic construct
  source 1..80: mol_type = other DNA
tggcactatccgtgcactgtgaattacaccatcttcaaagtgcggatgtacgttgggggaatagagcacaggctgagcgt

SEQ ID NO: 115898 - DNA, 80 bp, synthetic construct
  source 1..80: mol_type = other DNA
ctcattagaacaggattgctggtgatctcaggactttttcctatatcaataccaatcacggcagcagcatggtacctgtg

SEQ ID NO: 115899 - DNA, 80 bp, synthetic construct
  source 1..80: mol_type = other DNA
tcctacgccatcatataacaaacgcgtcttttgtgaagcggtccggcgcgtagccgccatgcaggcacaaaaggctgccg

SEQ ID NO: 115900 - DNA, 80 bp, synthetic construct
  source 1..80: mol_type = other DNA
ctgtcaattcttgcctgggcaacatcatccaatacgcccctacaatctgggtccggatggtcataatgacccacttcttc

SEQ ID NO: 115901 - DNA, 80 bp, synthetic construct
  source 1..80: mol_type = other DNA
acactaccagcggcctgacgtacctcttctcacccgggccatctcagaaaatccagctcataaacaccaacggcagctgg

SEQ ID NO: 115902 - DNA, 80 bp, synthetic construct
  source 1..80: mol_type = other DNA
cagccctcctccagcagtggcctcggccactctataggtggggacaccccaaacgccatcggcgattcaccccaggatga

SEQ ID NO: 115903 - DNA, 80 bp, synthetic construct
  source 1..80: mol_type = other DNA
gacccatccaggtgcccgagattgatctaggaaccgggaccaggtgcgtgacactggcagaagacaaggtgaaacctagt

SEQ ID NO: 115904 - DNA, 80 bp, synthetic construct
  source 1..80: mol_type = other DNA
cagttaatactgaaccacctttgcatcttacaaataacaaattagggatagctttagacgctccatttgatgttatagac

SEQ ID NO: 115905 - DNA, 80 bp, synthetic construct
  source 1..80: mol_type = other DNA
tgggaagaagaagctgagattagtggaagttctgcccgttatgatgtaactctcagtgagcaaggggaatttaaactact

SEQ ID NO: 115906 - DNA, 80 bp, synthetic construct
  source 1..80: mol_type = other DNA
cgcctcagacgttgtcatcctgaacagcaccaggccgcctggcggagcgtggttcggatgtacgtggatgaatggcaccg

SEQ ID NO: 115907 - DNA, 80 bp, synthetic construct
  source 1..80: mol_type = other DNA
ttggcatcacatttgtacttggtctggtatttcatacaaatgtcatgaaaatggaagtatttcaatttttgcttataaca

SEQ ID NO: 115908 - DNA, 80 bp, synthetic construct
  source 1..80: mol_type = other DNA
ggttcgagttcactttgccagagggcaactattcggaaactatgactatagaccttatgaataacgcgatcgtagacaac

SEQ ID NO: 115909 - DNA, 80 bp, synthetic construct
  source 1..80: mol_type = other DNA
tgtagtaaatttgggcgtaaccgagtaagatttggccattttcgcgggaaaactgaataagaggaagtgaaatctgaata

SEQ ID NO: 115910 - DNA, 80 bp, synthetic construct
  source 1..80: mol_type = other DNA
gtacctttcatgccaaatttaaaggcatacccaaaacctgatacaactactcaaacaactccaggagataaaaaaagcag

SEQ ID NO: 115911 - DNA, 80 bp, synthetic construct
  source 1..80: mol_type = other DNA
gagtaactcatcctcaggggtcgacacacagtccagcactacttcccaggtgcccccctctccggagagggagtccgaca

SEQ ID NO: 115912 - DNA, 80 bp, synthetic construct
  source 1..80: mol_type = other DNA
ggttgcagatgaggtacgtgagcacgttctcgctctggcggacggaacaccgcagtttctggtgctcgaaggtcgactcc

SEQ ID NO: 115913 - DNA, 80 bp, synthetic construct
  source 1..80: mol_type = other DNA
agggacatctgggactggatatgcgaggtgctgagcgattttaagacctggcttaaggccaagctcatgccacaattacc

SEQ ID NO: 115914 - DNA, 80 bp, synthetic construct
  source 1..80: mol_type = other DNA
ttctctcaggggtggggccccatctcttacgctgagcctggcgaactagatcagaggccctattgctggcactacgcgca

SEQ ID NO: 115915 - DNA, 80 bp, synthetic construct
  source 1..80: mol_type = other DNA
aggatctccaatcctagataagtgtgggagagtgataggactctatggtaatggggtcgtgatcaaaaatgggagttacg

SEQ ID NO: 115916 - DNA, 80 bp, synthetic construct
  source 1..80: mol_type = other DNA
ggaccgaagctggacatgggagggaccggaggccaacgccgtggacgaggcaagcggggatctggtcaccttcaggagcc

SEQ ID NO: 115917 - DNA, 80 bp, synthetic construct
  source 1..80: mol_type = other DNA
gacacacgcaggcgcgcccccccccggagcctgggtcccccggcggacggctcacgcggcgcggcgtctcggtgggacga

SEQ ID NO: 115918 - DNA, 80 bp, synthetic construct
  source 1..80: mol_type = other DNA
cagctccagactaccagtttgcgctgtggagggtttcagctgaggagtacgtggagattcgcagggtgggtgattaccac

SEQ ID NO: 115919 - DNA, 80 bp, synthetic construct
  source 1..80: mol_type = other DNA
accaaggtgtgcggagcgcctccctgtatcatcggggggaacggcaacaacaccctgacctgccccaccgactgtttccg

SEQ ID NO: 115920 - DNA, 80 bp, synthetic construct
  source 1..80: mol_type = other DNA
tgccaggtaatccggccgtggccggcttgatggcattctcagcctccttgaccagccctctgactacatcacaaacactg

SEQ ID NO: 115921 - DNA, 80 bp, synthetic construct
  source 1..80: mol_type = other DNA
ggaattgatacacacctcattaaatttttcaccaaacgcccgctattggtggaaaaagatcaaggaaatactatattaac

SEQ ID NO: 115922 - DNA, 80 bp, synthetic construct
  source 1..80: mol_type = other DNA
ttcaccgaggtggacggggtgaggctccaccgctacgcccccccctgcaaacccctgctgagggacgagatcaccttcaa

SEQ ID NO: 115923 - DNA, 80 bp, synthetic construct
  source 1..80: mol_type = other DNA
caggctggggcctgcgcttcccaagcaagatgtttggcgtggccaagaagcgctccgaccaacacccagtgcgcgtgcgc

SEQ ID NO: 115924 - DNA, 80 bp, synthetic construct
  source 1..80: mol_type = other DNA
ggacaatgaagatcatcggtcccaggacatgcagcaatgtctggcacggcacttttcctataaacgccacaacaaccggc

SEQ ID NO: 115925 - DNA, 80 bp, synthetic construct
  source 1..80: mol_type = other DNA
ttagagcagttctggtacaaacatatgtggaacttcgtgagtggaatccagtacctcgcggggctgtccacactgccagg

SEQ ID NO: 115926 - DNA, 80 bp, synthetic construct
  source 1..80: mol_type = other DNA
gaactatacgttcgcgctgtggagggtgtctgcggaggaatacgtggaaataaggcgggtgcgggacttccactacgtga

SEQ ID NO: 115927 - DNA, 80 bp, synthetic construct
  source 1..80: mol_type = other DNA
agacctgcggatacaggcgttgccgcgccagcggggtgctcaccactagcatggggaacaccatcacatgctacataaaa

SEQ ID NO: 115928 - DNA, 80 bp, synthetic construct
  source 1..80: mol_type = other DNA
tcccgtgttcggggtcctggctccaggacatttggaattgggtttgttccattcttacagactttaagaactggctgtct

SEQ ID NO: 115929 - DNA, 80 bp, synthetic construct
  source 1..80: mol_type = other DNA
tctatatcatttgactacacttgctctaaagagtatacaggtatgcaattcgatgttacatctttcaccttctcctatat

SEQ ID NO: 115930 - DNA, 80 bp, synthetic construct
  source 1..80: mol_type = other DNA
aaccactgtcccacacccaaacataacagagacagcgcttcccctaaccggggaggtgcccttttatggaaaggctatcc

SEQ ID NO: 115931 - DNA, 80 bp, synthetic construct
  source 1..80: mol_type = other DNA
ctctgaggtcggcgccgtcgaactagtggaacatgaggatgatgagcgagtggagcaagacccgggctatgtgacgccgc

SEQ ID NO: 115932 - DNA, 80 bp, synthetic construct
  source 1..80: mol_type = other DNA
caggggtggggtcctatcacctatgcaaacatcagcggcccctcccaggatagaccttattgttggcattatgcgcccag

SEQ ID NO: 115933 - DNA, 80 bp, synthetic construct
  source 1..80: mol_type = other DNA
gaccctcgaacccgggcaccacgtgtccctcgcggtccacctgtgggttggccgccacgtgggtcccgggcacgaggaag

SEQ ID NO: 115934 - DNA, 80 bp, synthetic construct
  source 1..80: mol_type = other DNA
gatcagcgaggactatgccacgccatgtgacctaacgtggcttaggcaaatttgggactgggtgtgtactatcttgactg

SEQ ID NO: 115935 - DNA, 80 bp, synthetic construct
  source 1..80: mol_type = other DNA
ctcaaacaataacattgtcctagacaatagcagcggcactgcctacgaccctcttacactgtggacaactcccgaccctc

SEQ ID NO: 115936 - DNA, 80 bp, synthetic construct
  source 1..80: mol_type = other DNA
ccgccggcaaaaaattccatcgcaatttactttaaattctgaagaggaacgtattttgcgctatgtgcagcagtccgtca

SEQ ID NO: 115937 - DNA, 80 bp, synthetic construct
  source 1..80: mol_type = other DNA
acgtactagccggggcccattggggtatcctagcgggtctggcctattactctatgcagggcaactgggctaaggtcact

SEQ ID NO: 115938 - DNA, 80 bp, synthetic construct
  source 1..80: mol_type = other DNA
gggcccacaacgggctgcgcgacctcgctgttgcggtggagcccgtggtgttctcccccatggaaaccaagctgatcatc

SEQ ID NO: 115939 - DNA, 80 bp, synthetic construct
  source 1..80: mol_type = other DNA
tccctgagagcgatgctgcggcaaaagtgacagcactgctaagctctctgaccgtcacccgactgctccgccgattacat

SEQ ID NO: 115940 - DNA, 80 bp, synthetic construct
  source 1..80: mol_type = other DNA
atgaccatttggctcccttatccacctgggcaagtgacggtctgcgagaccttgccgttgcggtcgagcctgttgtcttc

SEQ ID NO: 115941 - DNA, 80 bp, synthetic construct
  source 1..80: mol_type = other DNA
actggcacctacatctatgaccacctcacacctatgtcggactgggccgctagcggcctgcgcgacttagcggtcgccgt

SEQ ID NO: 115942 - DNA, 80 bp, synthetic construct
  source 1..80: mol_type = other DNA
tcagagggtcagtttcttgcggaccacggcccggtgatgtgggttgctcgtctgggacctcgggcatgcccatacacgca

SEQ ID NO: 115943 - DNA, 80 bp, synthetic construct
  source 1..80: mol_type = other DNA
agcggctctagagaagttggtcatactgcacgcagctagcgctgccagttccaatggcctcctgtacttcatcttgttct

SEQ ID NO: 115944 - DNA, 80 bp, synthetic construct
  source 1..80: mol_type = other DNA
acgagtgggcagaatttgtgttacccgaaggtaactactcggaaaccatgactatcgacttaatgaacaacgcaatcatc

SEQ ID NO: 115945 - DNA, 80 bp, synthetic construct
  source 1..80: mol_type = other DNA
caatggaagctggcacatcaataggactgccctcaattgtaatgacagccttaatacagggtggttggccagcttgttct

SEQ ID NO: 115946 - DNA, 80 bp, synthetic construct
  source 1..80: mol_type = other DNA
ggggcgatggcatatgccataccacgtgcccttgtggagcaaacattacgggtcatgtgaagcatgggaccatgaagatc

SEQ ID NO: 115947 - DNA, 80 bp, synthetic construct
  source 1..80: mol_type = other DNA
catcggccgcttgcacgtcaaccagcgagtcgtcgttgcgccggataaggaggtcctgtatgaggcttttgatgagatgg

SEQ ID NO: 115948 - DNA, 80 bp, synthetic construct
  source 1..80: mol_type = other DNA
agtcgtttccacggccacacaatctttcctcgccactgccgtcaacggggtcctgtggactgtatattatggtgctggct

SEQ ID NO: 115949 - DNA, 80 bp, synthetic construct
  source 1..80: mol_type = other DNA
atctattttctcctcttggtcctggaacttggcctgccgagcgcaaacctggaggccttgtgggggtgggcagacgcatt

SEQ ID NO: 115950 - DNA, 80 bp, synthetic construct
  source 1..80: mol_type = other DNA
tggctgaagactaagcttgtacccgccttgccgggcatcccctttatctcgtgccaacgagggtttaggggtgcctggcg

SEQ ID NO: 115951 - DNA, 80 bp, synthetic construct
  source 1..80: mol_type = other DNA
gtcggtgccagaccgaagaggtgctgccgccgcgggaggatgtgttctcctggacgcggtattgtacccccgacgacgtg

SEQ ID NO: 115952 - DNA, 80 bp, synthetic construct
  source 1..80: mol_type = other DNA
tggtagttcaaggagatgcagctgccgtcgtcccggaggaggggggctacctggttaagcatgtctctgacttggaggtt

SEQ ID NO: 115953 - DNA, 80 bp, synthetic construct
  source 1..80: mol_type = other DNA
agtggatcagcggggattggacatcgccatgcggcaccagctggttaagggatgtgtgggactgggtgtgcacagtgtta

SEQ ID NO: 115954 - DNA, 80 bp, synthetic construct
  source 1..80: mol_type = other DNA
ggaatgcctcttacctcacttacattatgtaaagtcagactattacactcaggccataaagaattttccgaagtactcaa

SEQ ID NO: 115955 - DNA, 80 bp, synthetic construct
  source 1..80: mol_type = other DNA
gtcgtcgtcgggaaaatcgtccgggcccccgtcccgcggccccagttgcttaaaatcaaacgcacgctcgccggtggcgc

SEQ ID NO: 115956 - DNA, 80 bp, synthetic construct
  source 1..80: mol_type = other DNA
tgccattcttaacccgcactggatgccaccgtccggtttttacacgggcgagtttgacgtgcctgagggcgacgacggat

SEQ ID NO: 115957 - DNA, 80 bp, synthetic construct
  source 1..80: mol_type = other DNA
ttcaatgtgggcaacaagtttaggaatcccaccgtagccccgagtcacgatgtgaccaccgagcgctctcagaggctgca

SEQ ID NO: 115958 - DNA, 80 bp, synthetic construct
  source 1..80: mol_type = other DNA
ggaatgcaactgctccatttatacaggccacgttaccggccacaggatggcttgggacatgatgatgagctggtcgccca

SEQ ID NO: 115959 - DNA, 80 bp, synthetic construct
  source 1..80: mol_type = other DNA
tggccctctggatgatgttactgatttctcaggcggaagcagcaatggagaacttggtgatgctgaacgccctcagcgca

SEQ ID NO: 115960 - DNA, 80 bp, synthetic construct
  source 1..80: mol_type = other DNA
gaaagatcatcccagagtggtgctgccgggcttgtgaattgccaccggtgacgttccgcagcggcacagattgttggtat

SEQ ID NO: 115961 - DNA, 80 bp, synthetic construct
  source 1..80: mol_type = other DNA
tgccgaagcggcccggcggaggttggccagggggtccgcgccctctatggccagctcctcagcatcccagctgtccgctc

SEQ ID NO: 115962 - DNA, 80 bp, synthetic construct
  source 1..80: mol_type = other DNA
cccctcgtctcccatcagcagtttcctaaactgggacatgatgtccaccacgcggacccgcgggcccaacacggacccgc

SEQ ID NO: 115963 - DNA, 80 bp, synthetic construct
  source 1..80: mol_type = other DNA
acgaagaagacatcgttctcgactttgactattgcccaggtaccaccgtcacaatcactgaagcatgtgggaagagagga

SEQ ID NO: 115964 - DNA, 80 bp, synthetic construct
  source 1..80: mol_type = other DNA
ggtctggccggagcagcagtggggagtattgggcttggaaaggtcattgtggacgttctcgcgggatacggagcaggcat

SEQ ID NO: 115965 - DNA, 80 bp, synthetic construct
  source 1..80: mol_type = other DNA
ggccgcggcggccgggtttccgctttacgtggagcgccgtattgcggccgacgtccgcgagaccagtgcgctggagaagt

SEQ ID NO: 115966 - DNA, 80 bp, synthetic construct
  source 1..80: mol_type = other DNA
tatttcatagctagggctgaggcattgttgcacgtctatatgccatctatggaagtgcgcgggccccgagactcaattat

SEQ ID NO: 115967 - DNA, 80 bp, synthetic construct
  source 1..80: mol_type = other DNA
cttcaatgagatggtgctgctgcagatggaagacaaagcctggctggtgcacaggcaatggttcctagacctgccgttac

SEQ ID NO: 115968 - DNA, 80 bp, synthetic construct
  source 1..80: mol_type = other DNA
tggttaggcttctttcaaaaccatgggatacgatcacgaatgtgactacaatggccatgactgacaccactccttttggg

SEQ ID NO: 115969 - DNA, 80 bp, synthetic construct
  source 1..80: mol_type = other DNA
tgccagccgctgcacagttggacttgtccaattggttcacggccggtttcagcgggggggacatatatcacagcgtgtcc

SEQ ID NO: 115970 - DNA, 80 bp, synthetic construct
  source 1..80: mol_type = other DNA
tgggctaaggttgttggtatcctactcctgttctcgggcgtggacgcggaaacacacgtcactggggctgtgacagggca

SEQ ID NO: 115971 - DNA, 80 bp, synthetic construct
  source 1..80: mol_type = other DNA
caccagattggccgggtgcaggtggtgcgcggggtccgtcacggggtcgctgaggcactcctcgccggtggcgatctccg

SEQ ID NO: 115972 - DNA, 80 bp, synthetic construct
  source 1..80: mol_type = other DNA
cgactcgtatgggggaatcaatactttatagcactgattggagcctacttacatcaatgggtcccttcccttcgagtccg

SEQ ID NO: 115973 - DNA, 80 bp, synthetic construct
  source 1..80: mol_type = other DNA
gggtcgagatgagtcccctcctgttttcgacgaccgagctctcaatccttccatgctcgttcacaacgatgccagccctc

SEQ ID NO: 115974 - DNA, 80 bp, synthetic construct
  source 1..80: mol_type = other DNA
tctgcgcagggccagccagtaagcccgcaccagtaacaggttacacagcaggcattctccgccggtgcgcccgcgccccc

SEQ ID NO: 115975 - DNA, 80 bp, synthetic construct
  source 1..80: mol_type = other DNA
acgtgggcagcgactacgacctgttgtactttttgtgtctcgggttcattccccagtacctgtccgtggcctagggaagg

SEQ ID NO: 115976 - DNA, 80 bp, synthetic construct
  source 1..80: mol_type = other DNA
ccccttgaggtggagccgggggaccctgacctggagtttgagccagcgagatccgctcccccttccgaggtggagtgtga

SEQ ID NO: 115977 - DNA, 80 bp, synthetic construct
  source 1..80: mol_type = other DNA
gaggttagaggagaccccgctgtaacttggcaaggcccaaacccgctcaaagctgtagagacgggggaaggactagaggt

SEQ ID NO: 115978 - DNA, 80 bp, synthetic construct
  source 1..80: mol_type = other DNA
aggccgaaagccacggttcgagcaagccgtgctgcctgtagctccatcgtggggatgtaaaaacccgggaggctgcaaac

SEQ ID NO: 115979 - DNA, 80 bp, synthetic construct
  source 1..80: mol_type = other DNA
aatgccccacggactgttttaggaagcatccagagaccacctatctcaaatgtggttctgggccctggcttacgccgcgg

SEQ ID NO: 115980 - DNA, 80 bp, synthetic construct
  source 1..80: mol_type = other DNA
tgtgacaacagactggctgtgggacttcgttgcccgggaaaagaaaccaagagtttgtaccccagaagaattcaaagcaa

SEQ ID NO: 115981 - DNA, 80 bp, synthetic construct
  source 1..80: mol_type = other DNA
tagaggtgcttgggcgcatgccggaacatttcatggggaaaactcgtgaagcccttgacacaatgtacctagttgccaca

SEQ ID NO: 115982 - DNA, 80 bp, synthetic construct
  source 1..80: mol_type = other DNA
agtgtgtcagatgtacaccaatgtggacaaagacctagtaggatggccatctcccccgggagcaaggtcgctcaccccat

SEQ ID NO: 115983 - DNA, 80 bp, synthetic construct
  source 1..80: mol_type = other DNA
caggcctccagcaacgccaggtaaataaaccgcgtgcgtcccatcaggctgttgaggttgcgcatgagcgcgacaatttc

SEQ ID NO: 115984 - DNA, 80 bp, synthetic construct
  source 1..80: mol_type = other DNA
tcctaggggggtgggttgcttcccagattgctccaccctcggcggctaccgcgtttgtcgtgagcggcatagctggtgct

SEQ ID NO: 115985 - DNA, 80 bp, synthetic construct
  source 1..80: mol_type = other DNA
aattcaggagaattgtgaccatagaggcccatctttgaggaccaccactgcatctggaaaactagtcacgcaatggtgtt

SEQ ID NO: 115986 - DNA, 80 bp, synthetic construct
  source 1..80: mol_type = other DNA
tccttgtatgtggggacgatttggtggtggtcgctgagagcctcggcatcgaggaggacaaggctaccctgcgagctttc

SEQ ID NO: 115987 - DNA, 80 bp, synthetic construct
  source 1..80: mol_type = other DNA
atggaggcaggagatggggagtaatataactcgggtggagtctgagaccaaggtgattgtgctcgactcctttgacccca

SEQ ID NO: 115988 - DNA, 80 bp, synthetic construct
  source 1..80: mol_type = other DNA
tcgtctggttcgaggacggtcgccgggtattcgatccggcccagatacacacgcagacgcaggagaaccccgacggcttt

SEQ ID NO: 115989 - DNA, 80 bp, synthetic construct
  source 1..80: mol_type = other DNA
gatcagggatggggtcctattacgtatgctaacatatctggcccgtccacggataggccgtactgctggcattacgcacc

SEQ ID NO: 115990 - DNA, 80 bp, synthetic construct
  source 1..80: mol_type = other DNA
ctgacctccaaggaattgatgatgaccaccataggaattgtactcctctcccaaagcactataccagagaccattcttga

SEQ ID NO: 115991 - DNA, 80 bp, synthetic construct
  source 1..80: mol_type = other DNA
gcatcccgggcagtgaccagcatactcagctccctaaccatcaccagcctcctccggcggattcaccagtggatcactga

SEQ ID NO: 115992 - DNA, 80 bp, synthetic construct
  source 1..80: mol_type = other DNA
agcgagcgtccggtgtgaaggcaaggctcctcagcgttgaggaagcatgcgacctcacgccaagacactcggcccgttcc

SEQ ID NO: 115993 - DNA, 80 bp, synthetic construct
  source 1..80: mol_type = other DNA
catcaaccgcaccgcgctcaactgcaatgattcccttaacacgggttttttggctggcctgctctattacaagcatttca

SEQ ID NO: 115994 - DNA, 80 bp, synthetic construct
  source 1..80: mol_type = other DNA
gacatgctgggcgtgtggaatcgagtctggatagaagaaaatgaatggatggaagacaagacacccgtcgaaaggtggtc

SEQ ID NO: 115995 - DNA, 80 bp, synthetic construct
  source 1..80: mol_type = other DNA
cctactgctcctcttatgtctaccacaccgagcatatgccatggacggcgagcaggccgcatccctcggcgcgttggcca

SEQ ID NO: 115996 - DNA, 80 bp, synthetic construct
  source 1..80: mol_type = other DNA
cacaaagaagcactggcggaactgccagattccctggaaacacttctcctgattggaatgttgtgtgtcatgtcaatggg

SEQ ID NO: 115997 - DNA, 80 bp, synthetic construct
  source 1..80: mol_type = other DNA
cgccacgctctgctctgccctttatatcggggacgtgtgtggcgcgttgatgataaccgctcaggtcttcgtcgtatcgc

SEQ ID NO: 115998 - DNA, 80 bp, synthetic construct
  source 1..80: mol_type = other DNA
tatcgaaaggaagctatcatagaggtagatagaacagacgcgaggaaggccaggaaggctggcaatgttacaggagggca

SEQ ID NO: 115999 - DNA, 80 bp, synthetic construct
  source 1..80: mol_type = other DNA
tcctcctgcccttcctatctgggctagacctgactataacccaccactgatagagaactggaaggacccgggttacgagc

SEQ ID NO: 116000 - DNA, 80 bp, synthetic construct
  source 1..80: mol_type = other DNA
actgataaatggatacataacattaatgggagcctcacaatatactaacaccttgtttaaaaacaaacaagttacaatcg

SEQ ID NO: 116001 - DNA, 80 bp, synthetic construct
  source 1..80: mol_type = other DNA
gtcactgagagcgacatccgtacggaggaggcaatttatcagtgttgtgacttggacccccaagcccgcgtggccatcaa

SEQ ID NO: 116002 - DNA, 80 bp, synthetic construct
  source 1..80: mol_type = other DNA
gcgttttgtgcccgtggatcgggaagatactgcttactcatacaaggctcgttttacgctagctgtgggtgataaccgcg

SEQ ID NO: 116003 - DNA, 80 bp, synthetic construct
  source 1..80: mol_type = other DNA
tggttccaaaaacaaaaccggggcgctgtatccacctctatttccggaccatacccccccatctagggtggcgttaaata

SEQ ID NO: 116004 - DNA, 80 bp, synthetic construct
  source 1..80: mol_type = other DNA
gtcggtgttgtgtgagtgctacgacgctgggtgcgcgtggtacgaactgactccggcggaaaccacacttaggttgaggg

SEQ ID NO: 116005 - DNA, 80 bp, synthetic construct
  source 1..80: mol_type = other DNA
caacgtcggaccaacccaggactggctcggactcaggtcatgacgccgtcgccacaggaccctcagttccaaccgaggga

SEQ ID NO: 116006 - DNA, 80 bp, synthetic construct
  source 1..80: mol_type = other DNA
ataggaagtcgggtgtattgggacagttactccattagaggcgtacagacaatactgggatagggtaatgcaagtccccc

SEQ ID NO: 116007 - DNA, 80 bp, synthetic construct
  source 1..80: mol_type = other DNA
cgccaataccctcacgtccatgttcaaccctggggcgcgtcagaacatccaacttataaacactaacggcagctggcacg

SEQ ID NO: 116008 - DNA, 80 bp, synthetic construct
  source 1..80: mol_type = other DNA
tggacctatggtcttcacactcgaagatttcgttggggactggcgacagacagccggctacaacctggaccaagtccttg

SEQ ID NO: 116009 - DNA, 80 bp, synthetic construct
  source 1..80: mol_type = other DNA
tgaggccaacctcctttggaggcaggagatgggaggcaacatcactcgggtcgagtcggagaacaaagttgtaatacttg

SEQ ID NO: 116010 - DNA, 80 bp, synthetic construct
  source 1..80: mol_type = other DNA
ccaggtgatcatcgacatttttgtcggtggccattggggtatcattcttggcatattgtattacagcatggtggctaatt

SEQ ID NO: 116011 - DNA, 80 bp, synthetic construct
  source 1..80: mol_type = other DNA
gtccactgcccttgctgagcttgccgtcaagagctttggcagctcctcgacttctggcattgttggggacaccgcggcgc

SEQ ID NO: 116012 - DNA, 80 bp, synthetic construct
  source 1..80: mol_type = other DNA
taaaaaatatacaagaggatcgtgtaaatgccccaacctcatatatgagtcacgcccgaaatctggaagatcacaaggca

SEQ ID NO: 116013 - DNA, 80 bp, synthetic construct
  source 1..80: mol_type = other DNA
gctaatgggtcttgggaaaggatggccattgtcaaaaatggacattggagttcccctgcttgccattgggtgctattcac

SEQ ID NO: 116014 - DNA, 80 bp, synthetic construct
  source 1..80: mol_type = other DNA
cttgcctggcaatccggctattgcttccctcatgtccttcactgccgccgttacaagccccctgaccactcagcaaaccc

SEQ ID NO: 116015 - DNA, 80 bp, synthetic construct
  source 1..80: mol_type = other DNA
ccctacattcaccattgagactaccacgctgccccaagacgccgtgagccgctcccaaaggagaggcagaaccggcaggg

SEQ ID NO: 116016 - DNA, 80 bp, synthetic construct
  source 1..80: mol_type = other DNA
agaccctaagttttgggagatggttgatgctgagcgcaaactacaccaacaggggcgttgccagtcttgtgtctataaca

SEQ ID NO: 116017 - DNA, 80 bp, synthetic construct
  source 1..80: mol_type = other DNA
ggaacagttttgggccaagcacatgtggaacttcatcagcggcatccaataccttgcggggttatccacattaccgtgga

SEQ ID NO: 116018 - DNA, 80 bp, synthetic construct
  source 1..80: mol_type = other DNA
tccaccaagtctttggagcaatctatggagctgcctttagtggggtttcatggactatgaaaatcctcataggagtcatt

SEQ ID NO: 116019 - DNA, 80 bp, synthetic construct
  source 1..80: mol_type = other DNA
aggctcacgccacgaaacaatcagtggtggccctggggtcgcaagaaggtgctctccaccatgccctggctggagcaatt

SEQ ID NO: 116020 - DNA, 80 bp, synthetic construct
  source 1..80: mol_type = other DNA
tcttctcatagtagttggcttaataataatttccgctagtttaatattgctttattgccaccgcaaaaaaatcaaggcca

SEQ ID NO: 116021 - DNA, 80 bp, synthetic construct
  source 1..80: mol_type = other DNA
gctccaactcaagcattgtgtatgaggcagcggacgtgatcatgcatactcccgggtgcgtgccctgtgttcaggagggt

SEQ ID NO: 116022 - DNA, 80 bp, synthetic construct
  source 1..80: mol_type = other DNA
ttgttcgtccatgcccccccttgagggggagcccggcgacccagacctgagctcgggctcttggtccacggtgagtggtg

SEQ ID NO: 116023 - DNA, 80 bp, synthetic construct
  source 1..80: mol_type = other DNA
cggccacagaatggcgtgggacatgatgatgaattggtctcctaccactacttttatactatccagcatcctgagaatcc

SEQ ID NO: 116024 - DNA, 80 bp, synthetic construct
  source 1..80: mol_type = other DNA
aagatgagggttggaagcgacgaatgagctccacaggtcacgggccattagcatttgcaggtggtcgcgaaaggtcctaa

SEQ ID NO: 116025 - DNA, 80 bp, synthetic construct
  source 1..80: mol_type = other DNA
ggaccaggctacctcctcgcgaagaccctgactcatgtgccgtacttcgttagagcccaggctctggtgagggtgtgcac

SEQ ID NO: 116026 - DNA, 80 bp, synthetic construct
  source 1..80: mol_type = other DNA
gacacgcgcgtccttcttgtcgtctctcttcccccccatcaccccgcaatttgcacccagcctttaactacattaaattg

SEQ ID NO: 116027 - DNA, 80 bp, synthetic construct
  source 1..80: mol_type = other DNA
cacagcagcgggagctccgggtcggtcaccgcagttctggccgcctctcggtcctcccgttcccttttatggatctccgc

SEQ ID NO: 116028 - DNA, 80 bp, synthetic construct
  source 1..80: mol_type = other DNA
ccttggcataggcacggtcctggaccaagcggagacgtgcggagtgcgtttggtggtgctcgcgaccgccactccaccag

SEQ ID NO: 116029 - DNA, 80 bp, synthetic construct
  source 1..80: mol_type = other DNA
cccatcagtcctctgagcaatagtctcatacgccatcacaacatggtgtactcaacaacatcgcgcagcgcggcgctccg

SEQ ID NO: 116030 - DNA, 80 bp, synthetic construct
  source 1..80: mol_type = other DNA
tcttgagatcatgaccagcacgtgggtgttagcggggggagtcctggctgccgtggcagcctactccttggcaactggct

SEQ ID NO: 116031 - DNA, 80 bp, synthetic construct
  source 1..80: mol_type = other DNA
tacagttaacccaatcgtaacagaaaaagatagcccagtcaacatagaagcagaacctccattcggagacagctacatca

SEQ ID NO: 116032 - DNA, 80 bp, synthetic construct
  source 1..80: mol_type = other DNA
ccatttggtctatctcgcctacgcctaactgctccatctatgaaacccaagatgcaaatctatttctttgtctgactaaa

SEQ ID NO: 116033 - DNA, 80 bp, synthetic construct
  source 1..80: mol_type = other DNA
tcgccggccggcgcgggcgcgccctgctcccgagaccacgggtggcgcgaccggaggccgtggaagtccagcgcgcccac

SEQ ID NO: 116034 - DNA, 80 bp, synthetic construct
  source 1..80: mol_type = other DNA
cgtaacatctacccccgccaccaatgttaaatgcgtcacggggagggacacgagataatctgcgagcgtagggtcctcca

SEQ ID NO: 116035 - DNA, 80 bp, synthetic construct
  source 1..80: mol_type = other DNA
atggactgaatacattcaccaacatggaagcccagttaatcagacaaatggaaggagaaggtgtgctgtcaaaggcagac

SEQ ID NO: 116036 - DNA, 80 bp, synthetic construct
  source 1..80: mol_type = other DNA
gaatcttcctattcttaatgagcggaaaaggtatagggaagatgaccctgggaatgtgttgcataatcacggctagtgtc

SEQ ID NO: 116037 - DNA, 80 bp, synthetic construct
  source 1..80: mol_type = other DNA
gagacagtgcatgggaggtaacatcacgcgagtggaagccgagaacaaggtcgtgatccttgactcctttgagccgctta

SEQ ID NO: 116038 - DNA, 80 bp, synthetic construct
  source 1..80: mol_type = other DNA
catcaaatcgctaacagagagactatacgtgggcggcccgatggaaaacagtaagggccaggcttgcggatataggcgtt

SEQ ID NO: 116039 - DNA, 80 bp, synthetic construct
  source 1..80: mol_type = other DNA
gctgtcatcctacgcccacgccttgtgtttgaggtcacgaaatggttgttagcaatcctggggcctgcccacctccttag

SEQ ID NO: 116040 - DNA, 80 bp, synthetic construct
  source 1..80: mol_type = other DNA
acactcccccgttaactcctggctaggaaacatcatcatgtacgctccgaccctatgggttcggttggtgttaatgaccc

SEQ ID NO: 116041 - DNA, 80 bp, synthetic construct
  source 1..80: mol_type = other DNA
gggtaaactccagcagggcggcggccgggccggccaccccggcctgggtgtgcgtccgggccccgttctcgatgagaaag

SEQ ID NO: 116042 - DNA, 80 bp, synthetic construct
  source 1..80: mol_type = other DNA
gagttcttcaccgagctggatggggtcaggcttcatcgctacgcccctccatgcagacctctgatgagagatgagatctc

SEQ ID NO: 116043 - DNA, 80 bp, synthetic construct
  source 1..80: mol_type = other DNA
ccgaacggttatacgtgggtggccctatgtacaactcacggggtcagtcctgcggctaccgtcggtgtagggccagcgtg

SEQ ID NO: 116044 - DNA, 80 bp, synthetic construct
  source 1..80: mol_type = other DNA
gtacagaaaccactactgagtccggcgactcgcctgaacctggcgaagagtcggacgctgagtcatattcgtccatgccc

SEQ ID NO: 116045 - DNA, 80 bp, synthetic construct
  source 1..80: mol_type = other DNA
tgggtccgagcaatcgacgttggttacatgtgtgaagacaccatcacgtacgaatgtccgaagcttgccgtgggcaacga

SEQ ID NO: 116046 - DNA, 80 bp, synthetic construct
  source 1..80: mol_type = other DNA
gtactggtccgcctttgcatgcttgtgcgctccgtggtggggggaaaatacttccagatggtcatattgaacattggcag

SEQ ID NO: 116047 - DNA, 80 bp, synthetic construct
  source 1..80: mol_type = other DNA
cgcgcgggtgcgcttctcgccccacgtccgggtgcgccacctggtggtctgggcctcggccgcccgcctggcgcgccgcg

SEQ ID NO: 116048 - DNA, 80 bp, synthetic construct
  source 1..80: mol_type = other DNA
ccccgctccgactgcgtggcctataaccccgccgggatcatggggagctgctgggcgtcggaggaggtgcgcgcgcctct

SEQ ID NO: 116049 - DNA, 80 bp, synthetic construct
  source 1..80: mol_type = other DNA
aacgaggtattgcatacccaactagacgaatctgaaatattcgacgcggcatttaaaaccatgatgatttttaccacatg

SEQ ID NO: 116050 - DNA, 80 bp, synthetic construct
  source 1..80: mol_type = other DNA
aatgcccatgccaggttccatcgcccgaatttttcacggaactagacggggtgcgcctgcataggttcgcgcccccttgc

SEQ ID NO: 116051 - DNA, 80 bp, synthetic construct
  source 1..80: mol_type = other DNA
atggatggaagacaagactccagttgagagatggagcgatgtgccatactcaggcaagcgtgaagacatctggtgtggga

SEQ ID NO: 116052 - DNA, 80 bp, synthetic construct
  source 1..80: mol_type = other DNA
gtccacgtgttccgaggaggacgactcagtggtgtgttgctccatgtcgtattcctggaccggggcgctaataactccct

SEQ ID NO: 116053 - DNA, 80 bp, synthetic construct
  source 1..80: mol_type = other DNA
aaacgcaaccccgggcccccaccccgtcggccccaagcccaaatgcaatgctacggcgctcggtgcgccaggcccagagg

SEQ ID NO: 116054 - DNA, 80 bp, synthetic construct
  source 1..80: mol_type = other DNA
ctcatccgccagccagctatcggctccgtcgttgaaggccacttgccaaacgcacaggcctcatcccgacgttgagctgg

SEQ ID NO: 116055 - DNA, 80 bp, synthetic construct
  source 1..80: mol_type = other DNA
tggcctttctcacgccgggattgaaatgcttgaacttggatgtgtacagaattttgttgctcatggtgggaatagggagt

SEQ ID NO: 116056 - DNA, 80 bp, synthetic construct
  source 1..80: mol_type = other DNA
caactatctgggctggctgctaagagaacttggaatgaaagacggtggcaaactgtacgccgacgataccgctggctggg

SEQ ID NO: 116057 - DNA, 80 bp, synthetic construct
  source 1..80: mol_type = other DNA
gggcgcggcggcggtcggtgtggttggagagtgtcgtgggtgtgttttcgtgtcccccaccaccactcccaccccgaccg

SEQ ID NO: 116058 - DNA, 80 bp, synthetic construct
  source 1..80: mol_type = other DNA
ggaggcgcgaagggacgcacattgggtgaggcgtggaaggagagacttaaccagttaaccaaggaggagttcaccaggta

SEQ ID NO: 116059 - DNA, 80 bp, synthetic construct
  source 1..80: mol_type = other DNA
ggtataaggtggaatggcggagggacggggtgatgcataccatctgcccttgcggtgctgagctcgccggccacatcaag

SEQ ID NO: 116060 - DNA, 80 bp, synthetic construct
  source 1..80: mol_type = other DNA
cgaggccctggcgtccgcggatgagacgctggcgtggtgcaagatgtgcattcaccacaatctgccgctccgcccccagg

SEQ ID NO: 116061 - DNA, 80 bp, synthetic construct
  source 1..80: mol_type = other DNA
aatatcttgaataggagacgcagaactgcaggcgtggtcatcatgctaattccaacagcgatggcgttccatttaaccac

SEQ ID NO: 116062 - DNA, 80 bp, synthetic construct
  source 1..80: mol_type = other DNA
gcagactttctcgaacgttagagcgcacaaaaaaaagacgttttcctccaactgtaaaggtggcataatcggatggattc

SEQ ID NO: 116063 - DNA, 80 bp, synthetic construct
  source 1..80: mol_type = other DNA
gggtatgggactggagacacgaactgaaacatggatgtcatcagaaggggcctggaaacatgttcagagaattgaaacct

SEQ ID NO: 116064 - DNA, 80 bp, synthetic construct
  source 1..80: mol_type = other DNA
ccatgcaggcgtggtacgtgcgggccaaggcgcgggccttcacgaggcgtcgggtgtcgtccagggaccccagggcgtca

SEQ ID NO: 116065 - DNA, 80 bp, synthetic construct
  source 1..80: mol_type = other DNA
cccgaccccaaacccaagaacaacaccacccccgccaagtcgggccgccccactaaaccccccgggcccgtgtggtgcga

SEQ ID NO: 116066 - DNA, 80 bp, synthetic construct
  source 1..80: mol_type = other DNA
tttttttcgcgaatttccgcgtccgtgtcaaagtccggtgtttatgtcacagatcagctgatccgcagggtatttaaacc

SEQ ID NO: 116067 - DNA, 80 bp, synthetic construct
  source 1..80: mol_type = other DNA
ccggtaaataccacgcgacgaaccagcatgtgtgttaacgcgacttttattcgttgtatcgcgggaggggggaagcttac

SEQ ID NO: 116068 - DNA, 80 bp, synthetic construct
  source 1..80: mol_type = other DNA
catgatcgattatccatatcgactgtggcactacccatgcaccgtcaattacacaatatttaagaccagaatgtatgttg

SEQ ID NO: 116069 - DNA, 80 bp, synthetic construct
  source 1..80: mol_type = other DNA
gagatacgccaggcgctggacagtcgcaagcaggccgccagccacacacctgtgaaggctgggtgtgtgaactttgacta

SEQ ID NO: 116070 - DNA, 80 bp, synthetic construct
  source 1..80: mol_type = other DNA
gtggcaaccgccgtgcgccgcgttcccgcccgccgccaggcccagaactggcagagcacgctacacagtatcgtgggcct

SEQ ID NO: 116071 - DNA, 80 bp, synthetic construct
  source 1..80: mol_type = other DNA
gctgatatgagaccgtattgctggcactatcctcccaaaccatgcggcatagttccagcacggactgtgtgtggcccggt

SEQ ID NO: 116072 - DNA, 80 bp, synthetic construct
  source 1..80: mol_type = other DNA
gtcggctcaaaattgtgcagtaacacctggcacggaaccttcccaatcaacgccacgacaacagggcccagcgtacccgc

SEQ ID NO: 116073 - DNA, 80 bp, synthetic construct
  source 1..80: mol_type = other DNA
aaaatttagaaaatacagatggtagcagcagaggaattggtataaatgtaagagcaagagaagggttgacatttgacaat

SEQ ID NO: 116074 - DNA, 80 bp, synthetic construct
  source 1..80: mol_type = other DNA
ctatagcgtcgctgatgtcgttcacggctgcggtaacgagtccactaaccacccagcagaccctcctctttaacatcctt

SEQ ID NO: 116075 - DNA, 80 bp, synthetic construct
  source 1..80: mol_type = other DNA
gtgaggagcgggaacgtgtcgcgatgctgggtgtccttaacccccaccctggcagcgccacaacttaacgcaccacttca

SEQ ID NO: 116076 - DNA, 80 bp, synthetic construct
  source 1..80: mol_type = other DNA
gggagacgcctatggattccagtactctccagcgcagcgggttgagtacctcttgaagtcgtggaattcaaagagggtac

SEQ ID NO: 116077 - DNA, 80 bp, synthetic construct
  source 1..80: mol_type = other DNA
cgagtaccccgcgtcttcgcggggtgttatacggccacttaagtcccggcatcccgttcgcggacccaggcccggtggat

SEQ ID NO: 116078 - DNA, 80 bp, synthetic construct
  source 1..80: mol_type = other DNA
cacgtttggagcacttaatgtgggagagcatacagaaagagctaaacgcgatctttgaagacaatgaaattgacttgtca

SEQ ID NO: 116079 - DNA, 80 bp, synthetic construct
  source 1..80: mol_type = other DNA
tgatttagacgtgacggcccccgaagatcccaacgaggaggcggtttcgcagatttttcccgactctgtaatgttggcgg

SEQ ID NO: 116080 - DNA, 80 bp, synthetic construct
  source 1..80: mol_type = other DNA
ttgttgatgttggcggctgttttctttcaaatggcttatcacgatgcccgccaaattctgctctgggagatccctgatgt

SEQ ID NO: 116081 - DNA, 80 bp, synthetic construct
  source 1..80: mol_type = other DNA
atctctcataaccatgtaataattgggttctctctacatctatggttgcacagcatatacacacgctcatgtacttcttt

SEQ ID NO: 116082 - DNA, 80 bp, synthetic construct
  source 1..80: mol_type = other DNA
agaagatccttggactgttgcagaacactgccaagcaagcagaggacctgaagccagcggttcagtccgcatggcctaag

SEQ ID NO: 116083 - DNA, 80 bp, synthetic construct
  source 1..80: mol_type = other DNA
gaacctgagagtcttcgcggaggctatgaccaggtattctgctcccccaggtgatcccccccaaccagaatatgacctgg

SEQ ID NO: 116084 - DNA, 80 bp, synthetic construct
  source 1..80: mol_type = other DNA
gtaggcaaggcagtgccccattctgacttaaagaagatttccgctagagttgagagactccgggacgaatatagcgctac

SEQ ID NO: 116085 - DNA, 80 bp, synthetic construct
  source 1..80: mol_type = other DNA
acacatagacgcccacttcctctcccaaacaaagcaagcgggggagaacttcgcgtacctagtagcctaccaagctacgg

SEQ ID NO: 116086 - DNA, 80 bp, synthetic construct
  source 1..80: mol_type = other DNA
tgctgcgctgaaacagcgccctgcgggtccgctgcagctgttgttgtatgcggcggcatgcgcggatcaaaaccgccagg

SEQ ID NO: 116087 - DNA, 80 bp, synthetic construct
  source 1..80: mol_type = other DNA
caacatatcgttgacatggcgctgtatgtggttgtacgtaaactgcagcctggcgaactcgatggaggaggtggtcttga

SEQ ID NO: 116088 - DNA, 80 bp, synthetic construct
  source 1..80: mol_type = other DNA
ccggcccttcccatctgggccagaccggactacaacccaccattagtggaaccatggagggaccctgactatgtgccgcc

SEQ ID NO: 116089 - DNA, 80 bp, synthetic construct
  source 1..80: mol_type = other DNA
atatgcacaaatgtggcagctgatgtacttccacaggagagacttgagattagcggctaatgctatctgttcagccgttc

SEQ ID NO: 116090 - DNA, 80 bp, synthetic construct
  source 1..80: mol_type = other DNA
acatcactgcggaagcagcagcgcgtaggctgaggcgggggtcccccccctcactcgccagctcttccgccagccagttg

SEQ ID NO: 116091 - DNA, 80 bp, synthetic construct
  source 1..80: mol_type = other DNA
gtgagaaacccactctcacgaaactccacgcatgaaatgtactggatatccaatggtaccggcaacatcgtctcttcagt

SEQ ID NO: 116092 - DNA, 80 bp, synthetic construct
  source 1..80: mol_type = other DNA
agctgttcacagtgacctatcgtattggattgagagcaaaaagaatgagacatggcaactggaacgagccgtcatgggag

SEQ ID NO: 116093 - DNA, 80 bp, synthetic construct
  source 1..80: mol_type = other DNA
gacaatgacagctgcttgaccgattttggcccttccggatttatggccgataacattaccgcgtttatggaaaagtatct

SEQ ID NO: 116094 - DNA, 80 bp, synthetic construct
  source 1..80: mol_type = other DNA
agccgtgactcttgatttcccaaaaggaacatcaggttctccaatcatcaataagaaaggggagatcattgggctctatg

SEQ ID NO: 116095 - DNA, 80 bp, synthetic construct
  source 1..80: mol_type = other DNA
tccgtcactccacttgacttgccgtatatcatccagcgattgcacggcatggctgccttctcactccatggttactctcc

SEQ ID NO: 116096 - DNA, 80 bp, synthetic construct
  source 1..80: mol_type = other DNA
catgattgatccttttcaattgggcctcctggtagtgttcttggccacccaggaggtcttgcgcaagaggtggacggcca

SEQ ID NO: 116097 - DNA, 80 bp, synthetic construct
  source 1..80: mol_type = other DNA
aaatcaacatcaatacggacgcgatcgacgacgagggagaggcggaggagggagaggcggaggaggacgcgatcgacgac

SEQ ID NO: 116098 - DNA, 80 bp, synthetic construct
  source 1..80: mol_type = other DNA
gtgcagcctgtagctccacctgaggaggtgtaaaaaacctgggaggccacaaaccatggaagctgtacgcatggtgtagt

SEQ ID NO: 116099 - DNA, 80 bp, synthetic construct
  source 1..80: mol_type = other DNA
agttcactgccatacttagcagccttactgtcacccagcttctgagacgactacaccagtggataagctcggagtgcact

SEQ ID NO: 116100 - DNA, 80 bp, synthetic construct
  source 1..80: mol_type = other DNA
aatgtgcccttctgttcccaccacttccatgaactacagctgaaggatggcaggaggattgtggtgccttgccgagaaca

SEQ ID NO: 116101 - DNA, 80 bp, synthetic construct
  source 1..80: mol_type = other DNA
ccctactttcaccattgagacaaccacgcttccccaggatgctgtctcccgcactcaacgtcggggcaggactggcaggg

SEQ ID NO: 116102 - DNA, 80 bp, synthetic construct
  source 1..80: mol_type = other DNA
cggagccttcacggaggctatgacgaggtactcggctcccccaggagacgtcccgcagccagcatatgaccttgaacaca

SEQ ID NO: 116103 - DNA, 80 bp, synthetic construct
  source 1..80: mol_type = other DNA
ttccttgccttaaaattattcgaaatgtaacagatataaacgactttaaatgggacgattttcagcttgatggatataat

SEQ ID NO: 116104 - DNA, 80 bp, synthetic construct
  source 1..80: mol_type = other DNA
ggatttatccctaagatgctgctgggggtcgctctggtctggctggggctcaatgccagaaatccaacaatgtccatgac

SEQ ID NO: 116105 - DNA, 80 bp, synthetic construct
  source 1..80: mol_type = other DNA
ttttttcccgtccccaaatggtgtttggtgcactctaccaaaaaatagagcgcctaaatatgctatataacgcctcccag

SEQ ID NO: 116106 - DNA, 80 bp, synthetic construct
  source 1..80: mol_type = other DNA
gaaagtctacatcaagtatgaggtttgtgattataagatttgtattaaatagctcattcctgtttatataaagctgatct

SEQ ID NO: 116107 - DNA, 80 bp, synthetic construct
  source 1..80: mol_type = other DNA
caactctacacctatacctacaaccataatggccaagaatgaggtgttctgcgtggacgcacagaagggaggccgtaaac

SEQ ID NO: 116108 - DNA, 80 bp, synthetic construct
  source 1..80: mol_type = other DNA
ctggattgtgaacctaggagtggactgaacactgaagcgttctatgtcatgaccgtgggttcgaagtcattcttagtcca

SEQ ID NO: 116109 - DNA, 80 bp, synthetic construct
  source 1..80: mol_type = other DNA
caccggcagccttgcgaaccttttttccctggggccgactcagaaaatcagcctcgtaaacaccaacggcagctggcaca

SEQ ID NO: 116110 - DNA, 80 bp, synthetic construct
  source 1..80: mol_type = other DNA
ggcgacggattgccaggcgccaccggagcacgcccgccatgcgcgccgcccgggctctgctgcgccgcgccagacgcacg

SEQ ID NO: 116111 - DNA, 80 bp, synthetic construct
  source 1..80: mol_type = other DNA
cacatcaaccgtactgccttgaattgcaatgactccttgaacaccggctttctcgcggccttgttctacaccaaccgctt

SEQ ID NO: 116112 - DNA, 80 bp, synthetic construct
  source 1..80: mol_type = other DNA
aaggctgggggccactcagagtcggtaatgtcacgccttccgacactaggccttactgctggcactatgcgccccaccaa

SEQ ID NO: 116113 - DNA, 80 bp, synthetic construct
  source 1..80: mol_type = other DNA
acctccattccgacagatgactcgatatcttaccggacttggattgaaaaatcaaatcaaacacaaaaacggcatcaaaa

SEQ ID NO: 116114 - DNA, 80 bp, synthetic construct
  source 1..80: mol_type = other DNA
tgacaaaaagactgtctgtgtctccgtatacagatttaatgggtctgtcctttagggctattccacggtcctcctcgtac

SEQ ID NO: 116115 - DNA, 80 bp, synthetic construct
  source 1..80: mol_type = other DNA
gcgaagtatgtccaaatgttcctccttaaacttggagcctggacgggcacatatatatatgaccatctagcccccctctc

SEQ ID NO: 116116 - DNA, 80 bp, synthetic construct
  source 1..80: mol_type = other DNA
atggcgactgacattgatatgctaattgacctcggcctggacctctccgacagcgatctggacgaggacccccccgagcc

SEQ ID NO: 116117 - DNA, 80 bp, synthetic construct
  source 1..80: mol_type = other DNA
tcgtaggagacgacgacgaagcgctgcttggttccgtagtggtggcgcaggaccacggagatagaacgacggctccacag

SEQ ID NO: 116118 - DNA, 80 bp, synthetic construct
  source 1..80: mol_type = other DNA
aagaacagaagccttcaaaaagacctagacaaaaaacattgcaaactacaattcaggttatgattcctattggaactaat

SEQ ID NO: 116119 - DNA, 80 bp, synthetic construct
  source 1..80: mol_type = other DNA
atgggagctacccaagctggaagattcacagtgtccccttcagcccccacgtacacaatgaagttgggggagtatggtga

SEQ ID NO: 116120 - DNA, 80 bp, synthetic construct
  source 1..80: mol_type = other DNA
caagcaacatcaacaacagctgccgccatgggctccagtgagcaggaactgaaagccattgtcaaagatcttggttgtgg

SEQ ID NO: 116121 - DNA, 80 bp, synthetic construct
  source 1..80: mol_type = other DNA
gtacgggtacaccgaccgcgcgtccacctcctcgacgatgcagttgaccgtcgtgccgtaccgatggaacgcctccaccc

SEQ ID NO: 116122 - DNA, 80 bp, synthetic construct
  source 1..80: mol_type = other DNA
cgtctgtgggcccgtctactgctttacacctagccccgtagtggtggagactactgatcggggaggcctccccacttacg

SEQ ID NO: 116123 - DNA, 80 bp, synthetic construct
  source 1..80: mol_type = other DNA
gcgtcaaccgtgtgtggtcccgtgtactgcttcacacccagtcccgtggtggttggcaccaccgaccgccgcggggctcc

SEQ ID NO: 116124 - DNA, 80 bp, synthetic construct
  source 1..80: mol_type = other DNA
catcattaagtacagcggttaatagatagttatggactaggcactttggcggtcatttccacaaccaggttaaaattggg

SEQ ID NO: 116125 - DNA, 80 bp, synthetic construct
  source 1..80: mol_type = other DNA
ttttacgcccggtgagcgctccacccgcacctacaagcgcgtgtatgatgaggtgtacggcgacgaggacctgcttgagc

SEQ ID NO: 116126 - DNA, 80 bp, synthetic construct
  source 1..80: mol_type = other DNA
taaaagaagagggaagagaaggtcaaccaccggattgctcacgccaatcttgctagcttgcctggcgaccctggtgttct

SEQ ID NO: 116127 - DNA, 80 bp, synthetic construct
  source 1..80: mol_type = other DNA
cggacgtgatccctgtgagaaggcagggcgacacgagaggggctctcctcagcccgcggccacttgctaccttgaagggc

SEQ ID NO: 116128 - DNA, 80 bp, synthetic construct
  source 1..80: mol_type = other DNA
gcgccgcttcttcagcgaccccgagaccatgcgcaaggtcgaggagaccctgcactacactttcaggcacggtttcgtca

SEQ ID NO: 116129 - DNA, 80 bp, synthetic construct
  source 1..80: mol_type = other DNA
ccacgggcgcccccattacgtactccacctatggcaagttccttgccgacggtggttgctccggtggcgcttacgacatc

SEQ ID NO: 116130 - DNA, 80 bp, synthetic construct
  source 1..80: mol_type = other DNA
cataggctggaggcagcttgcaattggactcgaggggaacggtgtgagttggaggatagagatagagctgaattaagccc

SEQ ID NO: 116131 - DNA, 80 bp, synthetic construct
  source 1..80: mol_type = other DNA
agacccaggtttattacagtgacagtgtatagtccagcgctcaaaacctcttacaatttgattaaaatcaacattaagag

SEQ ID NO: 116132 - DNA, 80 bp, synthetic construct
  source 1..80: mol_type = other DNA
gatgatggcgtcgagtgatgccaacgctccaactgatggagctgccggtctcgttccagaggtcaccaatgagaccatgg

SEQ ID NO: 116133 - DNA, 80 bp, synthetic construct
  source 1..80: mol_type = other DNA
aggcaggaggcgggtggcaacatcacaagggtcgagtctgagaataaggtcattgtcctcgactctttcgacccccttgt

SEQ ID NO: 116134 - DNA, 80 bp, synthetic construct
  source 1..80: mol_type = other DNA
ggaaaggggacactcacttcgtggtggaggccacgaatgatggtctaaagatcccatgccaggtaccagcaccagagttc

SEQ ID NO: 116135 - DNA, 80 bp, synthetic construct
  source 1..80: mol_type = other DNA
aacaaaggcacggcaacgccccacgcggcccaaatcctggtgatggtgttatgccagggtggaaggactagaggttagag

SEQ ID NO: 116136 - DNA, 80 bp, synthetic construct
  source 1..80: mol_type = other DNA
tatgggggcgacactccgccatatatcactcccctgtgaggaactactgtccccacgcagaaagcgtctaaccatggcgt

SEQ ID NO: 116137 - DNA, 80 bp, synthetic construct
  source 1..80: mol_type = other DNA
ccacagtcctaccaggtcgggtacctccacgcacccacaggaagcgggaagagcacaaaagtccccgtggcctacgcatc

SEQ ID NO: 116138 - DNA, 80 bp, synthetic construct
  source 1..80: mol_type = other DNA
ccgggcccccggtcccgcccgccggacgttgggaccaacgggacggcgtgcggcccaagggccgcccgccttgccgcccc

SEQ ID NO: 116139 - DNA, 80 bp, synthetic construct
  source 1..80: mol_type = other DNA
ctaccaaacaaaccccattagacggcgggttttgataaagggaatcgcttatttaaactaaagattttactctataagta

SEQ ID NO: 116140 - DNA, 80 bp, synthetic construct
  source 1..80: mol_type = other DNA
caaccatgcgctctccctccttcacagacaactccgcgcctcctgcggtgccccagacctatcaggtagggtacctgcac

SEQ ID NO: 116141 - DNA, 80 bp, synthetic construct
  source 1..80: mol_type = other DNA
caacgtcacggttggagcacttgatgtgggagaacatacagagagagctaaacgcaatctttgaagacaatgagattgac

SEQ ID NO: 116142 - DNA, 80 bp, synthetic construct
  source 1..80: mol_type = other DNA
ccctacctcgctgagggccagcagatcgccgaacagttcagacaaaaggtgttgggactcctccaagcgagcgctaagca

SEQ ID NO: 116143 - DNA, 80 bp, synthetic construct
  source 1..80: mol_type = other DNA
cctgattttcaaggggttgtgtttggcattcttagccagagaaacactgacgggcagactagggcgcatgaagccaaagt

SEQ ID NO: 116144 - DNA, 80 bp, synthetic construct
  source 1..80: mol_type = other DNA
gtgtcctcgggccccggtgtgggaggtctgccacagtcgtcggggcgcgcggcgcgcccccgcgcggccgtcgccccgcg

SEQ ID NO: 116145 - DNA, 80 bp, synthetic construct
  source 1..80: mol_type = other DNA
ctcactgtaggggtaggcatctttttactccccgctcggtagacgagcggccctaaacaacactccataacatttttttt

SEQ ID NO: 116146 - DNA, 80 bp, synthetic construct
  source 1..80: mol_type = other DNA
aagtgctaggccggatgccagagcattttgcagggaaaacacgtgaagctctggacaccatgtacctggtggcaacatca

SEQ ID NO: 116147 - DNA, 80 bp, synthetic construct
  source 1..80: mol_type = other DNA
tccggcctactcagctcactgcattggaattactgacagggatttcattgagggggtgcatggaggaacttgggtttcag

SEQ ID NO: 116148 - DNA, 80 bp, synthetic construct
  source 1..80: mol_type = other DNA
ccccatattacgcaagcgacaagaagggggtgtgacgcagggtctgagggcgtttctcaagcagcacccgctgacccgcc

SEQ ID NO: 116149 - DNA, 80 bp, synthetic construct
  source 1..80: mol_type = other DNA
cctacaagagcctcctaacatgtctgttgtggtggaatcagtacttcatagcgcgggcagaagcagccctacaagtctgg

SEQ ID NO: 116150 - DNA, 80 bp, synthetic construct
  source 1..80: mol_type = other DNA
tggatgaactccactgggttcgtcaagacatgcggtgcccccccatgcgccttggggccgcgcaaacgtaacaccagcct

SEQ ID NO: 116151 - DNA, 80 bp, synthetic construct
  source 1..80: mol_type = other DNA
gccagcggttccccagacctatcaggtggggtacttgcatgctccaacaggcagcggaaagagcacacgtgtcccggctg

SEQ ID NO: 116152 - DNA, 80 bp, synthetic construct
  source 1..80: mol_type = other DNA
accacacctgcgaaacggtgacgtctttgtagtacatggtggccttgaacttgtacggggcgatgttctccttgaagacc

SEQ ID NO: 116153 - DNA, 80 bp, synthetic construct
  source 1..80: mol_type = other DNA
tacgtttatgcgtgccgggttgaagatttggatctggaggaaatttcatttttggccgctcgtagcacggactctgattt

SEQ ID NO: 116154 - DNA, 80 bp, synthetic construct
  source 1..80: mol_type = other DNA
ccgcgctggctgcgaggtggtgcgggtgctggccgtggtcgacgacccccgcgggccgttttttgtgggactgatcgcct

SEQ ID NO: 116155 - DNA, 80 bp, synthetic construct
  source 1..80: mol_type = other DNA
cccttgaggtggagccgggggatcccgacctcagcgacgggtcctggtctaccgtgagcgaggaggccaatgaggacgtc

SEQ ID NO: 116156 - DNA, 80 bp, synthetic construct
  source 1..80: mol_type = other DNA
aacggcacacacaggtccgccgccccgaccacccacaggtggtatagccgatggaggccggggcgctcttgatgcaggag

SEQ ID NO: 116157 - DNA, 80 bp, synthetic construct
  source 1..80: mol_type = other DNA
cgtctcgcacgcctcgcctgactgtctcgggcccttcccaacctacctcctctttgccctgctcacctgcacctgcgtct

SEQ ID NO: 116158 - DNA, 80 bp, synthetic construct
  source 1..80: mol_type = other DNA
cgggtggccggagccctcagaaaacttggggtacccccgctgagagcgtggagacatcgggcccgagcagtccgcgctaa

SEQ ID NO: 116159 - DNA, 80 bp, synthetic construct
  source 1..80: mol_type = other DNA
aaattaaaacattgctggccggcgtggttattacatttaatgttttagtagaaaatcgacatcgtttgtttctttatcag

SEQ ID NO: 116160 - DNA, 80 bp, synthetic construct
  source 1..80: mol_type = other DNA
tttaaggtgcgcatgttcatcggaggcctagagcacaggcttgaagcggcatgcaattggacctatggtgagcggtgtga

SEQ ID NO: 116161 - DNA, 80 bp, synthetic construct
  source 1..80: mol_type = other DNA
ccagttatcgcggcttcgcggtggcggtcctgacggccaacgaggaccacgtgcacagcctggccgtgccccccctcgtt

SEQ ID NO: 116162 - DNA, 80 bp, synthetic construct
  source 1..80: mol_type = other DNA
ccctgtccaccggcctgatacatctacaccagaacgtagtggatgtccaatacttgtatgggctctcgacttccatcgtt

SEQ ID NO: 116163 - DNA, 80 bp, synthetic construct
  source 1..80: mol_type = other DNA
tccgcaaggtcatttgcaaataattaaatagatctgcgccgactaaatctgttaactccgcgctaggaactaaatcaggt

SEQ ID NO: 116164 - DNA, 80 bp, synthetic construct
  source 1..80: mol_type = other DNA
tacgggtccagcgtcagggacatggcgtggttggcctcgcccagaccgtcgcgaaacttgaagttcctcccctccaccag

SEQ ID NO: 116165 - DNA, 80 bp, synthetic construct
  source 1..80: mol_type = other DNA
ctcccctacgagcgtggagacatcgggcacgagctgtacgcgccaagcttatcgcccagggcgggaaggccagaatatgt

SEQ ID NO: 116166 - DNA, 80 bp, synthetic construct
  source 1..80: mol_type = other DNA
ttggttgggctatcaagtgggagtatgtcgtgctggttttcctgatgttggcagacgctcggttttgcttggccctgtgg

SEQ ID NO: 116167 - DNA, 80 bp, synthetic construct
  source 1..80: mol_type = other DNA
atgatgaatcagacgatcaaaaacaaattccttcaactactgtggctatcgtggtgggtgtgattgcgggcttcgtaact

SEQ ID NO: 116168 - DNA, 80 bp, synthetic construct
  source 1..80: mol_type = other DNA
agctggcagaaccaagagtcaattgtctctgaagaaatgcatatttcaaagatgtaacctgggcattctgaatgaaggcg

SEQ ID NO: 116169 - DNA, 80 bp, synthetic construct
  source 1..80: mol_type = other DNA
gcggaaggagagtgtgagttggggtcaaatgaggagactgagctgccttgttctttgaccgccacggcaccagtaagacc

SEQ ID NO: 116170 - DNA, 80 bp, synthetic construct
  source 1..80: mol_type = other DNA
tgtggggactgattttcatctgttttgcctggcacgttcgtggcaggctcgtccctctcaccacttatgctttgctgcag

SEQ ID NO: 116171 - DNA, 80 bp, synthetic construct
  source 1..80: mol_type = other DNA
ccggggccacaacctattcctgtgggaggaccagactctgctgcgggcaaccgcgaacaccataacggccctgggcgtta

SEQ ID NO: 116172 - DNA, 80 bp, synthetic construct
  source 1..80: mol_type = other DNA
cagccatttttatgacggcgaccccgcccgggaccactgatccctttcccgactcaaatgccccaatccatgacctgcag

SEQ ID NO: 116173 - DNA, 80 bp, synthetic construct
  source 1..80: mol_type = other DNA
acacacgccctgggtgtttttcgcgaaaacacttccgcgttctcacttcctcgtatcgatttcgtgactcaacttccggg

SEQ ID NO: 116174 - DNA, 80 bp, synthetic construct
  source 1..80: mol_type = other DNA
tgcgccaccgatgcccttatgactggatacacaggggattttgactctgttatagactgcaacgtggctgtcgagcagta

SEQ ID NO: 116175 - DNA, 80 bp, synthetic construct
  source 1..80: mol_type = other DNA
gggttcgccaaggcagacatagagatggctgggcccatggccgcggtcggtctgctaattgtcagttacgtggtctcagg

SEQ ID NO: 116176 - DNA, 80 bp, synthetic construct
  source 1..80: mol_type = other DNA
gtatccgagcccgtgaccatcacctcgggccctgtggtggatccccccgccgtaataacgatgccacttgacggaccggc

SEQ ID NO: 116177 - DNA, 80 bp, synthetic construct
  source 1..80: mol_type = other DNA
ttcaactgtctgggaatgggcaatcgtgacttcatagaaggagccagtggagccacttgggtggacttggtgctagaagg

SEQ ID NO: 116178 - DNA, 80 bp, synthetic construct
  source 1..80: mol_type = other DNA
aatccacagcggcggcggcggcaggtggactgaggatcgcggcgaacgagccggcgcagacccgggaactgaggaaccgg

SEQ ID NO: 116179 - DNA, 80 bp, synthetic construct
  source 1..80: mol_type = other DNA
cgcatcatctctaagcgcgcgcgggactttagccgcgcctccaattccaagtgggccgcctttgcagccataaaggcgcc

SEQ ID NO: 116180 - DNA, 80 bp, synthetic construct
  source 1..80: mol_type = other DNA
ttgatttccctgaaccttctgaggcttctgaagaaatgtcgcttcatgatctttttgatgtggaggtggatggtttcgaa

SEQ ID NO: 116181 - DNA, 80 bp, synthetic construct
  source 1..80: mol_type = other DNA
aaggggcgcgctccgggttgggcgcttgccagggttctcttcaggctcatcctgctggtgtgaaaacgcgcgtcttcgcc

SEQ ID NO: 116182 - DNA, 80 bp, synthetic construct
  source 1..80: mol_type = other DNA
ggggctcaacacatacgtagtggggtctcagctgccctgcgaccccgagccagatgtcttcgtggtaacatcaatgctga

SEQ ID NO: 116183 - DNA, 80 bp, synthetic construct
  source 1..80: mol_type = other DNA
agcacaaatggtaattgtgtctccccaacaccatcactttgagcagacctgcaactgttccatataccctggccatgtca

SEQ ID NO: 116184 - DNA, 80 bp, synthetic construct
  source 1..80: mol_type = other DNA
aggggcctatgacataatcatctgtgatgaatgccactcaactgactcgactacaatactgggcatcggtacggtcttgg

SEQ ID NO: 116185 - DNA, 80 bp, synthetic construct
  source 1..80: mol_type = other DNA
gactttggatctattggaggagttttcaattcaattggcaaagctgtccaccaagttttcggaggagcgttcaggaccct

SEQ ID NO: 116186 - DNA, 80 bp, synthetic construct
  source 1..80: mol_type = other DNA
catcttcattccggcgacctattaacacgcgcaaaggggctgtatttaaaacttggcagacgcgagcatgttcacgtaat

SEQ ID NO: 116187 - DNA, 80 bp, synthetic construct
  source 1..80: mol_type = other DNA
cagacctatcaggttgcccacttgcacgcacccacggggagcggcaagagcaccaaagtcccggcggcgtatgccgctca

SEQ ID NO: 116188 - DNA, 80 bp, synthetic construct
  source 1..80: mol_type = other DNA
tcgcagtcgctgtacgcgctgttcatcgttccgaagaccccaatggccccccgggcggcgctcgcgaacttggtgtggcg

SEQ ID NO: 116189 - DNA, 80 bp, synthetic construct
  source 1..80: mol_type = other DNA
ttcgatatgtacggggtcacttactctatcactccattggatttgccgcggatcattcagcgtctccacggcatggccgc

SEQ ID NO: 116190 - DNA, 80 bp, synthetic construct
  source 1..80: mol_type = other DNA
gccaagcaattgtcatctcttggcgtcaacgcggtggccttctataggggcctagacgtctcagtaataccaacttctgg

SEQ ID NO: 116191 - DNA, 80 bp, synthetic construct
  source 1..80: mol_type = other DNA
taacgagctcccccgaccggcgtgcgggtgtggttttccccgaggtgtggagaaacgacagacctatccgcgcggcgcaa

SEQ ID NO: 116192 - DNA, 80 bp, synthetic construct
  source 1..80: mol_type = other DNA
gcacatgtagggctgtggacttataccttgtcaccagaaatgctgacgtcatcccagccaggaggaaggtggaccggcgg

SEQ ID NO: 116193 - DNA, 80 bp, synthetic construct
  source 1..80: mol_type = other DNA
agcacgttgaggtctggcagccctccggggtttctggcgctggggttcaggtcccggatgcccctggccacgagccgcgc

SEQ ID NO: 116194 - DNA, 80 bp, synthetic construct
  source 1..80: mol_type = other DNA
tgctttaagatcatgagcggggagacccccaccatggaagacatggcaaacctgctgccggctctcctgtcaccaggagc

SEQ ID NO: 116195 - DNA, 80 bp, synthetic construct
  source 1..80: mol_type = other DNA
aacaagtgcctttctgttcacaccatttccaccagctgattatgaaggatgggagggagatagtggtgccatgccgcaac

SEQ ID NO: 116196 - DNA, 80 bp, synthetic construct
  source 1..80: mol_type = other DNA
tttagcagtcgctgacgatggccttcgcaccaactatgttttagtgggcgaacagtgttctcagcaattactttaacaac

SEQ ID NO: 116197 - DNA, 80 bp, synthetic construct
  source 1..80: mol_type = other DNA
ccggcttatccactttgccaggcaacccagccatcgcctcactcatgtccttcactgccgccgtcaccagtcctctaacc

SEQ ID NO: 116198 - DNA, 80 bp, synthetic construct
  source 1..80: mol_type = other DNA
tggctggaacacagtgaccatgaagagtggggtagatgtgtactacagggcctcagaagcgagtgacactttgctttgtg

SEQ ID NO: 116199 - DNA, 80 bp, synthetic construct
  source 1..80: mol_type = other DNA
atcctgttagcttgcctattccatccggagttagggtttgaggtaactaagatcttgctggctttgatcggtccgctcta

SEQ ID NO: 116200 - DNA, 80 bp, synthetic construct
  source 1..80: mol_type = other DNA
tcctcgttgttttcctctgacgggggaggcacacctttgggctccaagcgtcttacatatcgcttgccactggccttttg

SEQ ID NO: 116201 - DNA, 80 bp, synthetic construct
  source 1..80: mol_type = other DNA
ggagcacagtcgtgctaacccctcttctgaagcacctgatcacgtcggaatacgtcaccacatcgctagcttcaattaac

SEQ ID NO: 116202 - DNA, 80 bp, synthetic construct
  source 1..80: mol_type = other DNA
atcgtgaccgcagtgaaatacatccgctgcttcactccacaaccgagtttgccatactgccctgctcgtttgcaccaatg

SEQ ID NO: 116203 - DNA, 80 bp, synthetic construct
  source 1..80: mol_type = other DNA
aggaatgtccaacagcaaacagagcatggaacagtttcaaggtggaagactttggatttggcatggtgttcacgcgattg

SEQ ID NO: 116204 - DNA, 80 bp, synthetic construct
  source 1..80: mol_type = other DNA
gaccggaatatgacctggagctaataacatcctgttcctcaaatgtgtctgtggcgttgggcccgcggggccgccgcaga

SEQ ID NO: 116205 - DNA, 80 bp, synthetic construct
  source 1..80: mol_type = other DNA
tttattagtgggatacaatacctggcgggcctgtcaacgttacccggtaatcccgccattgcatcattgatggcttttac

SEQ ID NO: 116206 - DNA, 80 bp, synthetic construct
  source 1..80: mol_type = other DNA
accaccagtcagactctcctctttaacatcttgggaggttgggtggctgcccagcttgcagctcccggcgctgctaccgc

SEQ ID NO: 116207 - DNA, 80 bp, synthetic construct
  source 1..80: mol_type = other DNA
ctctcgccaaatcatgactatactctcttccctgactgtaaccagccttctacgcaaattgcacgagtggatcaacactg

SEQ ID NO: 116208 - DNA, 80 bp, synthetic construct
  source 1..80: mol_type = other DNA
gatttggtggtgtggccagcgccagctggctgtaggtccctaacgccatgcacttgcggggcgtccgacctctacctgat

SEQ ID NO: 116209 - DNA, 80 bp, synthetic construct
  source 1..80: mol_type = other DNA
tttagtgggtgttaagggtaatctcctaaatatccaaagtactactaccactgtaggagtgcatttagtgtttgatgaac

SEQ ID NO: 116210 - DNA, 80 bp, synthetic construct
  source 1..80: mol_type = other DNA
ctgtggcgacaatggggccagcatatggcttccaatactcgcccaagcagcgggtcgactacctcctcaagttgtggaag

SEQ ID NO: 116211 - DNA, 80 bp, synthetic construct
  source 1..80: mol_type = other DNA
cgccaacctcctctggagacaagagatgggtagcaatatcacccgggtagagtctgagacgaaggtggtgatccttgact

SEQ ID NO: 116212 - DNA, 80 bp, synthetic construct
  source 1..80: mol_type = other DNA
tacctcggcgggcacgccaagcccccgcccgaccgcgtgtatgggctgttccgccaggcggtcgagatcgagatcggatt

SEQ ID NO: 116213 - DNA, 80 bp, synthetic construct
  source 1..80: mol_type = other DNA
aggagtgaaaagtctgaagcgccgccgatgctattaagaaaggaaagaggacactaaagggagagcttaacttgtatgtg

SEQ ID NO: 116214 - DNA, 80 bp, synthetic construct
  source 1..80: mol_type = other DNA
ccgcagccaacgccgcggaagaactgggaggggaagaatgggcatttataggtatgtctctagcggtgaaaggccctccg

SEQ ID NO: 116215 - DNA, 80 bp, synthetic construct
  source 1..80: mol_type = other DNA
gcggggtgtgctctaccgcctgccaagcagacgccaattcctccacccaggaggaagcggccaatacgcctagacgactc

SEQ ID NO: 116216 - DNA, 80 bp, synthetic construct
  source 1..80: mol_type = other DNA
tcaagtgggaatacgtcgtgctcgcgtttctgctcctcgcagacgcgcgggtatgcgcttgcttgtggatgatgctactg

SEQ ID NO: 116217 - DNA, 80 bp, synthetic construct
  source 1..80: mol_type = other DNA
cgaccatcggtggtggactcctgcttctgatcggactgctgactctctccccacattacaagaaatggctcgcccgtatc

SEQ ID NO: 116218 - DNA, 80 bp, synthetic construct
  source 1..80: mol_type = other DNA
aacccagttgcttagctccctgaccgtgacatcactacttaagagactccatgcctggattggcgaagactacgccactc

SEQ ID NO: 116219 - DNA, 80 bp, synthetic construct
  source 1..80: mol_type = other DNA
acaaaacattccagcctgagcctcaggtcggagaggaaaactggcatgaaacttttaatttctatggaggcaggactctc

SEQ ID NO: 116220 - DNA, 80 bp, synthetic construct
  source 1..80: mol_type = other DNA
gtggctgagccagaagacggcgagatttctgtcccggcagagattctccgtcgctcaaagaaattccctccggccatgcc

SEQ ID NO: 116221 - DNA, 80 bp, synthetic construct
  source 1..80: mol_type = other DNA
gctccccaagacgcggtttcccgcagccaacgtcgcggccgtacgggccgaggtagactcggtacgtaccgatacgttac

SEQ ID NO: 116222 - DNA, 80 bp, synthetic construct
  source 1..80: mol_type = other DNA
aaaattcatcattatactagacagcctactactattactaatcacaaacaaaactttgaaatgcaagttgatgattctat

SEQ ID NO: 116223 - DNA, 80 bp, synthetic construct
  source 1..80: mol_type = other DNA
catggtatgagctcacaccagcggagaccaccgtcaggcttagagcgtatttcaacacgcctggcttgcctgtgtgccaa

SEQ ID NO: 116224 - DNA, 80 bp, synthetic construct
  source 1..80: mol_type = other DNA
tcctgaccacatcaccgcggaggaagcatctcgccgccttaagaggggatctccaccgtcgctagccagctcgtctgcca

SEQ ID NO: 116225 - DNA, 80 bp, synthetic construct
  source 1..80: mol_type = other DNA
tatgctgcccagggctacaaggtgctggtgctcaacccctctgttgcggccactttgggttttggggcatacatgtccaa

SEQ ID NO: 116226 - DNA, 80 bp, synthetic construct
  source 1..80: mol_type = other DNA
accgccctggagcacgtcctcctgttttcgctcggttcctgcgacctccccgaatcccacctgaacgagctggcggccag

SEQ ID NO: 116227 - DNA, 80 bp, synthetic construct
  source 1..80: mol_type = other DNA
gcacctctctcaacgtgggccagcgacggcctccgtgatcttgcggtcgcggtggagccggtcgtcttttcgcctatgga

SEQ ID NO: 116228 - DNA, 80 bp, synthetic construct
  source 1..80: mol_type = other DNA
gtgggcggcatcgagcacagattcggagctgcttgcaactggactcgcggagatcgctgcgagctggatgacagagatag

SEQ ID NO: 116229 - DNA, 80 bp, synthetic construct
  source 1..80: mol_type = other DNA
catgaggctgctttcactggctgtttcttctgctgttcccacatcttgggttccacagggacgcaccacgtggtctgttc

SEQ ID NO: 116230 - DNA, 80 bp, synthetic construct
  source 1..80: mol_type = other DNA
cggaaccctgcggtggtggagaagtaaacatggaacaacaggtgcaagaaggccatgtacttgactctggcgaagggcct

SEQ ID NO: 116231 - DNA, 80 bp, synthetic construct
  source 1..80: mol_type = other DNA
ccggcgcccgcgcccaactataagcgggcactatggcgagtgtcggcggaagactacgccgaggtggtgcgagtggtgga

SEQ ID NO: 116232 - DNA, 80 bp, synthetic construct
  source 1..80: mol_type = other DNA
atatggttgcccaaaacagatttggcagggaagaaactcatgtggtaggaggagcgttgtagattaaaatgtgaatagtg

SEQ ID NO: 116233 - DNA, 80 bp, synthetic construct
  source 1..80: mol_type = other DNA
aattcacgaacactgcgcgcgtaggccccgcaaggcgatataaaaagacgctctgctgtcgtaaatttgcgaccgctttt

SEQ ID NO: 116234 - DNA, 80 bp, synthetic construct
  source 1..80: mol_type = other DNA
tacctaggcgagggagatgtcctgcttaagcatctgcagcgacaaaccactatcgtacgcgacgctatagccgaccgctt

SEQ ID NO: 116235 - DNA, 80 bp, synthetic construct
  source 1..80: mol_type = other DNA
acagcgccacgtgaacgacatgctggggcgcatcgccgtcgcgtggtgcgagctgcagaaccacgagctgactctctgga

SEQ ID NO: 116236 - DNA, 80 bp, synthetic construct
  source 1..80: mol_type = other DNA
agtcctggggacgtccaggatatccctggcccctgtacgggaatgagggcctcgtgtgggcaggatggctcctgtccccc

SEQ ID NO: 116237 - DNA, 80 bp, synthetic construct
  source 1..80: mol_type = other DNA
gctatccgccgcgacgaggcggggctgatctacaacgctctgttggaacgggtggcgcgctacaacagcactaacgttca

SEQ ID NO: 116238 - DNA, 80 bp, synthetic construct
  source 1..80: mol_type = other DNA
catcttcggcggccactggggcgtgatgttcggcttggcctacttctccatgcagggagcgtgggccaaagtcattgcca

SEQ ID NO: 116239 - DNA, 80 bp, synthetic construct
  source 1..80: mol_type = other DNA
tggcttgcctacaaagtggcttcaaatggtatacagtacaccgacaggaagtggtgttttgatggaccaaggtcaaacat

SEQ ID NO: 116240 - DNA, 80 bp, synthetic construct
  source 1..80: mol_type = other DNA
gcgccgtgtaggggactaccactacataacgggggtgacacaagacaatctgaagtgtccctgccaggtaccatctccag

SEQ ID NO: 116241 - DNA, 80 bp, synthetic construct
  source 1..80: mol_type = other DNA
agccttgcagctatggccccttcttttgcttgtcctcgcactgccaccgcgggcgtatgcctacgacggggagcaggcag

SEQ ID NO: 116242 - DNA, 80 bp, synthetic construct
  source 1..80: mol_type = other DNA
agccctcccccaggggaggatgccgcctccgacgctgggtcatgcagttccatgccacctcttgagggtgaaccaggtga

SEQ ID NO: 116243 - DNA, 80 bp, synthetic construct
  source 1..80: mol_type = other DNA
gaaagtccccctggagttctctctctacgcgtctccgaacctttggacacctcccacggcatgcttgcgcttaaaatggg

SEQ ID NO: 116244 - DNA, 80 bp, synthetic construct
  source 1..80: mol_type = other DNA
ctcccagccatactgtcacccggggcgttagtggtaggggtcgtgtgcgctgcaatcctgcggcgccatgtcggccccgg

SEQ ID NO: 116245 - DNA, 80 bp, synthetic construct
  source 1..80: mol_type = other DNA
ctgtccacggcgacgcagtccttcttgggcactgccatcaacggcgtcatgtggacggtttaccacggagcgggcagcaa

SEQ ID NO: 116246 - DNA, 80 bp, synthetic construct
  source 1..80: mol_type = other DNA
taagattactagacggattaatatccggaatgcttgttacatatctggaaatggggctgaggtggtaatagatactcaag

SEQ ID NO: 116247 - DNA, 80 bp, synthetic construct
  source 1..80: mol_type = other DNA
aggtatgggggaggactggtcagagtgccactctcccgcaactccacacatgagatgtactgggtctctggagcgaaaag

SEQ ID NO: 116248 - DNA, 80 bp, synthetic construct
  source 1..80: mol_type = other DNA
cagggctacaaggtgcttgtgcttaacccctccgtcgcagcaactttgggctttggggcttacatgtctaaggcgtatgg

SEQ ID NO: 116249 - DNA, 80 bp, synthetic construct
  source 1..80: mol_type = other DNA
ggcggtcccgggaggcgtacggggccgaggccgggctggaggtggccggaacgggtttccgtgccaggagtgacggtttt

SEQ ID NO: 116250 - DNA, 80 bp, synthetic construct
  source 1..80: mol_type = other DNA
tgcaaaccaacgtgccattaactgtaagcgacgggaccctaggcttagccataaagcgcccacttattgttcaggacaac

SEQ ID NO: 116251 - DNA, 80 bp, synthetic construct
  source 1..80: mol_type = other DNA
aaagacgctggctggccctaaggggcccgtttgccagatgtacaccaacgtggaccaggatatggttggctggcccgccc

SEQ ID NO: 116252 - DNA, 80 bp, synthetic construct
  source 1..80: mol_type = other DNA
ggcctgacgtcggtggcgtggtgacgggttggaccgcgggacgcggaggagagggacctgcgggagaggatgaggtcggc

SEQ ID NO: 116253 - DNA, 80 bp, synthetic construct
  source 1..80: mol_type = other DNA
cactttaattacccttttaacgacctttgtcaaacaaccagcgctctacaatataatgacaatgtccaggtagtcctcat

SEQ ID NO: 116254 - DNA, 80 bp, synthetic construct
  source 1..80: mol_type = other DNA
gtcgccctcttctgcacctgcacgctcttgctgtgggtggatgatggagggaacgacaacgccccgcgagccacaggtcc

SEQ ID NO: 116255 - DNA, 80 bp, synthetic construct
  source 1..80: mol_type = other DNA
cactatgtggaaatgtctccaacggctgaagcccatgttaacaggtccgacccccttgctttaccggcttggggccgtcc

SEQ ID NO: 116256 - DNA, 80 bp, synthetic construct
  source 1..80: mol_type = other DNA
acggggatactgctcctggcgagcccataaaagcaatattgtcgcatgcctccagcactgccggggcaatatctcattcg

SEQ ID NO: 116257 - DNA, 80 bp, synthetic construct
  source 1..80: mol_type = other DNA
tctcgtagaccgtgcaccatgagcacatctcctaaacctcaaagaaaacctaaaagaaacaacatccgccgcccacagga

SEQ ID NO: 116258 - DNA, 80 bp, synthetic construct
  source 1..80: mol_type = other DNA
cgtgtaccacatccaggcgggcctaccggacccgttccagccccccagcctcccgatcacggtttactacgccgtgttgg

SEQ ID NO: 116259 - DNA, 80 bp, synthetic construct
  source 1..80: mol_type = other DNA
gaacaccgcccctactgctggcactaccccccaaaaccctgtggtatcgtgccggcacagagagtatgtggcccggtata

SEQ ID NO: 116260 - DNA, 80 bp, synthetic construct
  source 1..80: mol_type = other DNA
tcttataaccaaacctttctcattgatggccccgagacggcagagtgccccaacacaaatagagcttggaactcgttgga

SEQ ID NO: 116261 - DNA, 80 bp, synthetic construct
  source 1..80: mol_type = other DNA
gcatattaaccgcacggccttgaattgcaatgattcattgaaaacagggttcattgcggcattgttctactcccataaat

SEQ ID NO: 116262 - DNA, 80 bp, synthetic construct
  source 1..80: mol_type = other DNA
cccttaagtaacaccctgttgcgccatcacaatcttgtatattccacctcctcccggagcgcaggtcagaggcagaagaa

SEQ ID NO: 116263 - DNA, 80 bp, synthetic construct
  source 1..80: mol_type = other DNA
tgcttttgctcaagatcatgaacaagcagcttgcatcggggtatcagtcatcatagtccttactatttttactctcaccc

SEQ ID NO: 116264 - DNA, 80 bp, synthetic construct
  source 1..80: mol_type = other DNA
cgctgatggcgctgtccctgacccccccgcacgcggacggccgcgccccggtcccggagcgaaaggcgccctctgccgac

SEQ ID NO: 116265 - DNA, 80 bp, synthetic construct
  source 1..80: mol_type = other DNA
gctaaccactagcatgggtaacaccatcacatgctatgtgaaagccctagcggcctgcaaggctgcggggatagttgcgc

SEQ ID NO: 116266 - DNA, 80 bp, synthetic construct
  source 1..80: mol_type = other DNA
gcagaactgccatgcgttctaaattgtgagttgtggcgagtacatttttataattggtaccaacgaagacacacccctat

SEQ ID NO: 116267 - DNA, 80 bp, synthetic construct
  source 1..80: mol_type = other DNA
ctgtggtctttagccccatggagattaaagtcatcacctggggtgccgacacagcagcctgcggggacatcctatgcgtg

SEQ ID NO: 116268 - DNA, 80 bp, synthetic construct
  source 1..80: mol_type = other DNA
cacttcgtggtgggcgctacaaaccaagacctgaagtgcccatgccaggtgccggcgccagaattcttcactgaagtgga

SEQ ID NO: 116269 - DNA, 80 bp, synthetic construct
  source 1..80: mol_type = other DNA
acgtatgcgaaaggagacaccacccctggcgtttataggataatggcaaaaggactcttagggagataccaagcaggagt

SEQ ID NO: 116270 - DNA, 80 bp, synthetic construct
  source 1..80: mol_type = other DNA
ttgctgacgcccaactcgcggctgctgctgctgctgatcgcacccttcaccgacagcggcagcgtaaaccgcaactcgta

SEQ ID NO: 116271 - DNA, 80 bp, synthetic construct
  source 1..80: mol_type = other DNA
atcattcccaccaccttggctggaccgcgtagcaaacataatagaagacaaggttacaaagtgcagctacagggtccttg

SEQ ID NO: 116272 - DNA, 80 bp, synthetic construct
  source 1..80: mol_type = other DNA
gtcctcgggagggccggttctctgccctaggtggcacgcagttggcattttccgtgctgctgtgtgttctaggtgggttg

SEQ ID NO: 116273 - DNA, 80 bp, synthetic construct
  source 1..80: mol_type = other DNA
gttgaccacaaaacccggaatttacgcctacgccccaatgcccacgcaagatgaggtaggtaacccccccgtgggtgtga

SEQ ID NO: 116274 - DNA, 80 bp, synthetic construct
  source 1..80: mol_type = other DNA
ggattgaggtccgtctcacgtctggaacacgtgatgtgggagaacatcagagatgaactcaacaccctcctcagagagaa

SEQ ID NO: 116275 - DNA, 80 bp, synthetic construct
  source 1..80: mol_type = other DNA
caggagatgtccggaatgatctgatctcgtatggaggtccctggaagctgagtgccacttgggatggaactgaggaggtc

SEQ ID NO: 116276 - DNA, 80 bp, synthetic construct
  source 1..80: mol_type = other DNA
tactaagatgaaaccatgctacgggtcctttgccaaacctactaatgtgaaaggcggtcaggcaaaacaaaaaacaacgg

SEQ ID NO: 116277 - DNA, 80 bp, synthetic construct
  source 1..80: mol_type = other DNA
caacgccagcagcgcagcacacgtggacgttgacacggcccgcgccgccgatttgttcgtctctcagatgatgggggccc

SEQ ID NO: 116278 - DNA, 80 bp, synthetic construct
  source 1..80: mol_type = other DNA
catgaaattgcgggtgatacggaaagggcccgggacgcaggctcggttgttgataacctgggcggctaggacaatctcgt

SEQ ID NO: 116279 - DNA, 80 bp, synthetic construct
  source 1..80: mol_type = other DNA
gcctgcatgtcagctgacttggaagtgatcaccagcacgtgggtcatagcagggggagtccttgccgctttagcggctta

SEQ ID NO: 116280 - DNA, 80 bp, synthetic construct
  source 1..80: mol_type = other DNA
cttggcgtacccgggaatacaagtgggagtgacccttaatataaaacaggcgtgtttatgtacattaaagtatttgtggt

SEQ ID NO: 116281 - DNA, 80 bp, synthetic construct
  source 1..80: mol_type = other DNA
gcattggaaggaaccctaacagagacggggattcatactactactctgagcccacaagtgaagacaatgcgcatcatgtc

SEQ ID NO: 116282 - DNA, 80 bp, synthetic construct
  source 1..80: mol_type = other DNA
ctttgttagtccaaggagcacacgacggttatgtaaatttattgatacaaacggccaattgcgttagagaaaccggccag

SEQ ID NO: 116283 - DNA, 80 bp, synthetic construct
  source 1..80: mol_type = other DNA
cactttttttagaagggcggccacgccccctttgacgtcacgctcacccgggcggccggccgcccataagcgcggcctgc

SEQ ID NO: 116284 - DNA, 80 bp, synthetic construct
  source 1..80: mol_type = other DNA
ttaaagagggggtcccccccctctttggccagctcttcggccagccagctgtctgcaccgtccctcaaggctacttgcac

SEQ ID NO: 116285 - DNA, 80 bp, synthetic construct
  source 1..80: mol_type = other DNA
acctggtacatcaagggtaggctcccagcagccactgcctatgcattctgcgggttgtggcccctactcctcctgctcct

SEQ ID NO: 116286 - DNA, 80 bp, synthetic construct
  source 1..80: mol_type = other DNA
ctcggcatactccagtgaactcctggttgggcaacattatcatgtacgcgcccgctatctgggtccgcatggtgatgatg

SEQ ID NO: 116287 - DNA, 80 bp, synthetic construct
  source 1..80: mol_type = other DNA
tctcgcgagggtgcgcggcgactggccgccgaggccgagctcgcgctgtccgggcgcacctgggcgcccggcgtggaggc

SEQ ID NO: 116288 - DNA, 80 bp, synthetic construct
  source 1..80: mol_type = other DNA
gaaccaggtcgagggggaggttcaagtggtttctaccgcaacacaatctttcctggcgacctgcgtcaacggcgtgtgtt

SEQ ID NO: 116289 - DNA, 80 bp, synthetic construct
  source 1..80: mol_type = other DNA
ggcattgacccgaatgtgcgcactggtgtgaggaccatcactaccggcggggcaatcacctactccacgtacgggaaatt

SEQ ID NO: 116290 - DNA, 80 bp, synthetic construct
  source 1..80: mol_type = other DNA
ttacggagtcgaccgtctccagcgcactggccgaattggcctcaaaggccttcggccagcctgagactggtagtgactcc

SEQ ID NO: 116291 - DNA, 80 bp, synthetic construct
  source 1..80: mol_type = other DNA
gaggagagtgccagagttgtgtgtacaacatgatgggaaaaagagaaaagaaacaaggggaatttggaaaggccaagggc

SEQ ID NO: 116292 - DNA, 80 bp, synthetic construct
  source 1..80: mol_type = other DNA
ttgggcccccaaatcggggggggggccgtgcatgctaatgatattctttggggtcgccgagttggtccccgggaacgggg

SEQ ID NO: 116293 - DNA, 80 bp, synthetic construct
  source 1..80: mol_type = other DNA
aacctgcttcccgccatcctgtcgccaggggctctcgtggtgggcgtagtttgcgctgccatcctgcgccgccacgttgg

SEQ ID NO: 116294 - DNA, 80 bp, synthetic construct
  source 1..80: mol_type = other DNA
ttgttcaaggattttgcagctggcagacggtcgcagataggactggttgaagttatagggagaatgccagaacacttcct

SEQ ID NO: 116295 - DNA, 80 bp, synthetic construct
  source 1..80: mol_type = other DNA
aggagacgtggtagtggtggctaccgacgccctcatgacggggtatactggggacttcgactcagtgatcgactgcaatg

SEQ ID NO: 116296 - DNA, 80 bp, synthetic construct
  source 1..80: mol_type = other DNA
ataactggggggacaatgacacggacgtgctgcttcttaacaacacgcggccgccgcaaggcaactggttcggctgtaca

SEQ ID NO: 116297 - DNA, 80 bp, synthetic construct
  source 1..80: mol_type = other DNA
aggaagtggccctcggccacgagggcgagatccccttttacgggaaggctatccccctgtccaacataaaaggtggaaga

SEQ ID NO: 116298 - DNA, 80 bp, synthetic construct
  source 1..80: mol_type = other DNA
gatctgggcaggtggtgacttacgccttgaacaccatcaccaacctgaaggttcaactgattaggatggcggaggcagag

SEQ ID NO: 116299 - DNA, 80 bp, synthetic construct
  source 1..80: mol_type = other DNA
tttaacaacggtgacatttgtataaaggatagtattaacaccttatggactggaataaagcctccacctaactgtcaaat

SEQ ID NO: 116300 - DNA, 80 bp, synthetic construct
  source 1..80: mol_type = other DNA
aacaaaaaacaaaacaaattggaagtagacctggaccttcaagaggcgttcaaggatttgtttttttctttttgttcaac

SEQ ID NO: 116301 - DNA, 80 bp, synthetic construct
  source 1..80: mol_type = other DNA
gcgcatcggcttgttcatatggtggctccaatattttctgaccaggacagaggcattggtgcaagtgtgggtccctcccc

SEQ ID NO: 116302 - DNA, 80 bp, synthetic construct
  source 1..80: mol_type = other DNA
agctaaggagactccggtccccccccctaggaggaagcggctggtacgccttgacgaatccaccgtgtcacaggcgttgg

SEQ ID NO: 116303 - DNA, 80 bp, synthetic construct
  source 1..80: mol_type = other DNA
aacgggccgggacggggcggggcgcttgtgagacccgaagacgcaataaacggcaacaacctgattaagttttgcagtag

SEQ ID NO: 116304 - DNA, 80 bp, synthetic construct
  source 1..80: mol_type = other DNA
tatattgcccaagaataaaggataaataaacgtgtttttcatttaaaaatttcatgtatctttattgatttttacaccag

SEQ ID NO: 116305 - DNA, 80 bp, synthetic construct
  source 1..80: mol_type = other DNA
ccggctttgtcaacgggcctcctacacctccaccagaacatcgtggacgtgcagtacttatatggcctgtcgccagccct

SEQ ID NO: 116306 - DNA, 80 bp, synthetic construct
  source 1..80: mol_type = other DNA
agcggccacgctaggcttcggctctttcatgtcgcgtgcctatgggatcgatcccaacatccgcactgggacccgcaccg

SEQ ID NO: 116307 - DNA, 80 bp, synthetic construct
  source 1..80: mol_type = other DNA
aaaaatcaggtggagggtgagatccagattgtgtcaaccgctgcccagaccttcttagcaacctgcatcaacggggtgtg

SEQ ID NO: 116308 - DNA, 80 bp, synthetic construct
  source 1..80: mol_type = other DNA
ccctctcgacgggtctaatccacctccaccaaaacatcgtggacgtccagtacttgtacggcgtgggctcagcggtggtc

SEQ ID NO: 116309 - DNA, 80 bp, synthetic construct
  source 1..80: mol_type = other DNA
cgcggccagcgcctcccgcaggcccgccatgacccgctcggtggcctccgcgcgctgctgtttggcgcgcaccactgcgt

SEQ ID NO: 116310 - DNA, 80 bp, synthetic construct
  source 1..80: mol_type = other DNA
acggggaggttgcagggtccatgggttgtggcatcttggtcatactgaccatcctgacgttgtccccgcagtacaagtac

SEQ ID NO: 116311 - DNA, 80 bp, synthetic construct
  source 1..80: mol_type = other DNA
tctcgagcagcttgggaaaccgctcgacacactccagtaaactcctggttgggtaacatcatcatgtatgcgcccacaat

SEQ ID NO: 116312 - DNA, 80 bp, synthetic construct
  source 1..80: mol_type = other DNA
atatggtggttgcaatacttcatagccagggctgaggctttgctccacgtctatataccacctctagaggtcaggtgcgg

SEQ ID NO: 116313 - DNA, 80 bp, synthetic construct
  source 1..80: mol_type = other DNA
cctgaacacaggctgttagcgaacgctatatttaagctcacataccaaaacaaagtggtcaaagttcaacgaccaactcc

SEQ ID NO: 116314 - DNA, 80 bp, synthetic construct
  source 1..80: mol_type = other DNA
atgtccgtggctataaacaccagtatctataaacgaaaagtcccgtaaatacggaccaatatattcaacaaattcccgtt

SEQ ID NO: 116315 - DNA, 80 bp, synthetic construct
  source 1..80: mol_type = other DNA
ctcctcaaacgtctctgtagcccatgacggtgcggggaaaagatattactatcttacccgcgacccggagactcccctag

SEQ ID NO: 116316 - DNA, 80 bp, synthetic construct
  source 1..80: mol_type = other DNA
catcgtcctcgtcctcggaggacgaggacgaggacaacagctccaccttgaccgccgggcgcaagcccacccggcggtct

SEQ ID NO: 116317 - DNA, 80 bp, synthetic construct
  source 1..80: mol_type = other DNA
cggccggcgtcgtcgcggcgcgggcggccgccacgacggcctggacggagacgtccgcggagccgtagaaatcccgcagc

SEQ ID NO: 116318 - DNA, 80 bp, synthetic construct
  source 1..80: mol_type = other DNA
gtggctacgcagcacaaaagttccagggatggcgccaaactcactagaaccgctcccgagtagcaaaactgatgaatggg

SEQ ID NO: 116319 - DNA, 80 bp, synthetic construct
  source 1..80: mol_type = other DNA
ccactcctgcactccaccacggaatgggccgtgctgccttgctctttttctgacttgccagcgctctccacaggtctgtt

SEQ ID NO: 116320 - DNA, 80 bp, synthetic construct
  source 1..80: mol_type = other DNA
tggtgtgcccgaccgactgcttcaggaaacatcccgacgccacgtatgagaagtgcggcagtggtccctggctcaccccc

SEQ ID NO: 116321 - DNA, 80 bp, synthetic construct
  source 1..80: mol_type = other DNA
gcttgtcaattgcccgaagaggcccggaaagccattaaatcactgacagagagactatacgtaggcggcccaatggagaa

SEQ ID NO: 116322 - DNA, 80 bp, synthetic construct
  source 1..80: mol_type = other DNA
gctgggtatttaattccgctgggattgtcaagaggccactcttgagtgccagcgagaagagatttctctgccagctccac

SEQ ID NO: 116323 - DNA, 80 bp, synthetic construct
  source 1..80: mol_type = other DNA
agacaattctacacccatccctacaaccatcatggcaaagaatgaggtattctgcgtggacccccaaaagggcggtcgta

SEQ ID NO: 116324 - DNA, 80 bp, synthetic construct
  source 1..80: mol_type = other DNA
ccggcgggacctgcgaatcatggccaacgcaatatgctcagccgtccctgtgaactgggtccccacggggagaacaacat

SEQ ID NO: 116325 - DNA, 80 bp, synthetic construct
  source 1..80: mol_type = other DNA
aggaaggaggaggccgtcccgccagagacaaagccgtcccgggtgtttcctcatggccccttttataccccagccgagga

SEQ ID NO: 116326 - DNA, 80 bp, synthetic construct
  source 1..80: mol_type = other DNA
ccctgagcgatgatcttggggtgtatcgcaatgacagaatgcatcgcgcggttagcgccagcaggaggcgcgagttaagc

SEQ ID NO: 116327 - DNA, 80 bp, synthetic construct
  source 1..80: mol_type = other DNA
acttagcagaagtccgcagttattgctacttagccactgtcagtgaactctccaccaaggctgcgtgcccaaccatgggg

SEQ ID NO: 116328 - DNA, 80 bp, synthetic construct
  source 1..80: mol_type = other DNA
agctaaccccttctgaaacaactgtcaggttgagggcctatatgaacactcctggccttcccgtatgccaagaccacctg

SEQ ID NO: 116329 - DNA, 80 bp, synthetic construct
  source 1..80: mol_type = other DNA
aacttgtttttggacttcagagctcccctgcgtcttttcaacagcgaccccgtactagggcttaacttttacacccctct

SEQ ID NO: 116330 - DNA, 80 bp, synthetic construct
  source 1..80: mol_type = other DNA
gtgaaatgagactgagggatgaccagaggaaagtcttcagagaactagtgaggaattgtgacctgcccgtttggctttcg

SEQ ID NO: 116331 - DNA, 80 bp, synthetic construct
  source 1..80: mol_type = other DNA
ggtggcggcggcccgctgtcccccggaggaaagtcggcggccaggacggcgtccgggttttttgcgcccgccggccctcg

SEQ ID NO: 116332 - DNA, 80 bp, synthetic construct
  source 1..80: mol_type = other DNA
gacagtcggagtcgtacgtgagatatacgccgggcgtgtaacggtaacgaccttcggaggtcgggcggctgcagtccggg

SEQ ID NO: 116333 - DNA, 80 bp, synthetic construct
  source 1..80: mol_type = other DNA
ccgccgtcaggcccagaactggcagagcacgctgcacagtatcgtgggcctgggagtgaaaagtctgaagcgccgccgat

SEQ ID NO: 116334 - DNA, 80 bp, synthetic construct
  source 1..80: mol_type = other DNA
ggaagacggtctggttcgtgccaagcgtgagaatgagtaatgaaatggcccagtgcctccaacgtgctggcaaacgggtc

SEQ ID NO: 116335 - DNA, 80 bp, synthetic construct
  source 1..80: mol_type = other DNA
tatgagatacgatccgaagttacaatgctattgacctcggctgttacagaatacttcacccgcggagtgttatatagcac

SEQ ID NO: 116336 - DNA, 80 bp, synthetic construct
  source 1..80: mol_type = other DNA
gagacgacccttgaccctgttaaaatgccttttgaatatgtcaggaaaacgttgtatcatcataatgatacccaacctac

SEQ ID NO: 116337 - DNA, 80 bp, synthetic construct
  source 1..80: mol_type = other DNA
cgcgggtattgtcactgtgccccccaggtccaggcgacgagcggccgccgcagcagccgcggccattagtgctatgactc

SEQ ID NO: 116338 - DNA, 80 bp, synthetic construct
  source 1..80: mol_type = other DNA
taagtattcaccacctttaaaaatagaaaacgaaaacttaaccctaagcacaggcggaccttttactgtaagcgggggaa

SEQ ID NO: 116339 - DNA, 80 bp, synthetic construct
  source 1..80: mol_type = other DNA
gagtccgttgattcagagacggactccctgtcatctatgccccccctagagggggagcctggagaccccgacctggagca

SEQ ID NO: 116340 - DNA, 80 bp, synthetic construct
  source 1..80: mol_type = other DNA
gtatacttggggtgaaaatgagtctgatgtcttcctgctcaacagcacaaggccgccgcaaggcagttggtttgggtgct

SEQ ID NO: 116341 - DNA, 80 bp, synthetic construct
  source 1..80: mol_type = other DNA
tgtacggcaacggagtgatcatgccaaatggctcgtacatcagtgccatagttcagggagaaaggatggaggagccagcg

SEQ ID NO: 116342 - DNA, 80 bp, synthetic construct
  source 1..80: mol_type = other DNA
caaatgccagcattgtgtatgaagcagaaaccatcatcatgcatctgccgggatgcgcaccttgcgtgcgtgttgggaat

SEQ ID NO: 116343 - DNA, 80 bp, synthetic construct
  source 1..80: mol_type = other DNA
ggggcgcaagagcgacagcgagcgcgaggtggctggcgccgcgcgggtcgtcaataaggcgctggtggaggatgacgaga

SEQ ID NO: 116344 - DNA, 80 bp, synthetic construct
  source 1..80: mol_type = other DNA
tatacccagacttgggggttcgtgtgtgcgagaaaatggctctttatgatgtggtctccaccctccctcaggccgtgatg

SEQ ID NO: 116345 - DNA, 80 bp, synthetic construct
  source 1..80: mol_type = other DNA
cgcggccgccgcggccgccgaacacagggcccgggtggtcacctcgagtcagcctgacgatctactatttggagagaacg

SEQ ID NO: 116346 - DNA, 80 bp, synthetic construct
  source 1..80: mol_type = other DNA
gtgggagcagctttcgcagaatccaattcgggaggagacgtggtacacttggcgctcatggcgaccttcaagatacaacc

SEQ ID NO: 116347 - DNA, 80 bp, synthetic construct
  source 1..80: mol_type = other DNA
agatgtcgtggtctgcgctactgatgcactaatgactggctttacaggggactttgactcggtaatcgactgtaatgttg

SEQ ID NO: 116348 - DNA, 80 bp, synthetic construct
  source 1..80: mol_type = other DNA
actctgattgacaaatacgatttatctaatttacacgaaattgcttctggtggcgctcccctctctaaggaagtcgggga

SEQ ID NO: 116349 - DNA, 80 bp, synthetic construct
  source 1..80: mol_type = other DNA
aggctgaggcagcacttgagaagcttatcatcttgcactccgcaagcgctgccagtgccaacggaccgctgtggtttttc

SEQ ID NO: 116350 - DNA, 80 bp, synthetic construct
  source 1..80: mol_type = other DNA
gcgtgccgggcacgagaaagaagcggtaaaaggagggcttgctgtggtccttggggtccgccggcccggcgtcgtccacc

SEQ ID NO: 116351 - DNA, 80 bp, synthetic construct
  source 1..80: mol_type = other DNA
gcataggccagacaagcagctcaaaaaagatattgaaaaagatttcgctagcggaaccaatcaaactttagtgggtccac

SEQ ID NO: 116352 - DNA, 80 bp, synthetic construct
  source 1..80: mol_type = other DNA
tgagaccgcggctcgacgcctcgcgcgagggtccccgccgtcgcttgccagttcatctgcaagccagctgtctgctccat

SEQ ID NO: 116353 - DNA, 80 bp, synthetic construct
  source 1..80: mol_type = other DNA
ggtgtacgcgggcccgcggagaggaaatcccccaagatggtcagtgttgtcgcgggagttccagaaccacactcccgcct

SEQ ID NO: 116354 - DNA, 80 bp, synthetic construct
  source 1..80: mol_type = other DNA
caatagaggaagcctgcgcgctgaccccgccccactccgccaagtcacggtacggatttggggcaaaggaggtgcgcagc

SEQ ID NO: 116355 - DNA, 80 bp, synthetic construct
  source 1..80: mol_type = other DNA
gcctgcacacgctgtttaccattgacgccggtacgccatgctcgccgtccgttccctgcagcacctctcaaccgtcgtct

SEQ ID NO: 116356 - DNA, 80 bp, synthetic construct
  source 1..80: mol_type = other DNA
cgcgggctgtgcttggtacgagctcactcccgctgagaccacagtcaggttacgagcatacctaaatacccctggtttgc

SEQ ID NO: 116357 - DNA, 80 bp, synthetic construct
  source 1..80: mol_type = other DNA
caacacgcccggcttacccgtatgccaagaccacctggagttctgggaagcggtctttacaggtctcacacacattgatg

SEQ ID NO: 116358 - DNA, 80 bp, synthetic construct
  source 1..80: mol_type = other DNA
tccgtaagcacttggatctcatggtagggtcagctgcgctctgttcggctatgtacgtgggcgacttttgcggggctatc

SEQ ID NO: 116359 - DNA, 80 bp, synthetic construct
  source 1..80: mol_type = other DNA
gggcttgacgccttttcactgcatacatactctccacaagagctcactagagttgcggctaccctcagaaagcttggggc

SEQ ID NO: 116360 - DNA, 80 bp, synthetic construct
  source 1..80: mol_type = other DNA
tttccagccaaagttagtctgcagaattaaggaggattacaagtgggaatttgaagagcttttgaaatcctgtggtgagc

SEQ ID NO: 116361 - DNA, 80 bp, synthetic construct
  source 1..80: mol_type = other DNA
ggggttctcatatgacacccgctgctttgactctaccgtcacggagagggacataagaacagaagaatccatatatcaag

SEQ ID NO: 116362 - DNA, 80 bp, synthetic construct
  source 1..80: mol_type = other DNA
ggacaagcattcacctttcgccaacgcagacattggacaacgcaggactgcaattgttccatgtaccccggacacgtgac

SEQ ID NO: 116363 - DNA, 80 bp, synthetic construct
  source 1..80: mol_type = other DNA
gcgagttagaaggcaacaaatcgtggtgctggatcccggtcacccttaacatcgctgtaagggagcgcggggcactcact

SEQ ID NO: 116364 - DNA, 80 bp, synthetic construct
  source 1..80: mol_type = other DNA
gttgtcggcgtggtgtgcgcggcaatactacgccggcacgtgggccctggcgagggcgccgtgcagtggatgaaccgact

SEQ ID NO: 116365 - DNA, 80 bp, synthetic construct
  source 1..80: mol_type = other DNA
caggccacagtgtgcgccagggctcaggctccacctccatcgtgggatcagatgtggaagtgtctcatacggctaaagcc

SEQ ID NO: 116366 - DNA, 80 bp, synthetic construct
  source 1..80: mol_type = other DNA
cccaggtccacgttgacgagttttccccgcatccagaatcgcgcctcacctcgcgctaccgctcccgcgcggccgggaac

SEQ ID NO: 116367 - DNA, 80 bp, synthetic construct
  source 1..80: mol_type = other DNA
catccttctcaacatcatgggaggctggttagcgtcccagatcgcaccacccgcgggggccaccggctttgtcgtcagtg

SEQ ID NO: 116368 - DNA, 80 bp, synthetic construct
  source 1..80: mol_type = other DNA
gccaagatagccctgcgcccagattgcaagtacatagtgaccaagaccgtgaatatcagacatgcctgctacatctcggg

SEQ ID NO: 116369 - DNA, 80 bp, synthetic construct
  source 1..80: mol_type = other DNA
gtcgccaactgggctaaagtcatcgtgatcttgctcctgttcgcaggagtggacgccgtgactgatctggggtcttccgc

SEQ ID NO: 116370 - DNA, 80 bp, synthetic construct
  source 1..80: mol_type = other DNA
cagactgttttaggaagcacccagacaccacctatcttaagtgcggagcagggccttggctgacccccagatgcctggtg

SEQ ID NO: 116371 - DNA, 80 bp, synthetic construct
  source 1..80: mol_type = other DNA
tttggtgggtcaagcagaggcggcattggagaatttaatcatactgaatgctgcctctgctgccagcaatcaagggttgt

SEQ ID NO: 116372 - DNA, 80 bp, synthetic construct
  source 1..80: mol_type = other DNA
gagtttgaggcccttggattcctgaatgaagaccactgggcatctagagagtccagtggagcaggggtggagtggataag

SEQ ID NO: 116373 - DNA, 80 bp, synthetic construct
  source 1..80: mol_type = other DNA
gccggtgtcgctactcgagggggcggcgggggcgggaagccgagcgggcgtaggcccgtgcggtcgcgtcagcacgcacc

SEQ ID NO: 116374 - DNA, 80 bp, synthetic construct
  source 1..80: mol_type = other DNA
ctctagtggaaatcctgaagctatgtgtgctttatgttacatgcgtctgaccggtcactgcatttacagtaagtagagat

SEQ ID NO: 116375 - DNA, 80 bp, synthetic construct
  source 1..80: mol_type = other DNA
cggatattaacacgattaacgttgaacaccattttatagacacgctacagaagacatcaccgaacatggactgtcgcggg

SEQ ID NO: 116376 - DNA, 80 bp, synthetic construct
  source 1..80: mol_type = other DNA
gccccgacccccttgtatgtccccaaaataaaagaccaaaatcaaagcgtttgtcccagcgtcttaatggcgtgaagggc

SEQ ID NO: 116377 - DNA, 80 bp, synthetic construct
  source 1..80: mol_type = other DNA
ggcgtgcggttgcacagatatgcacccccctgccgtccacttatcagggatgaagtcacctttactgtggggttgtccag

SEQ ID NO: 116378 - DNA, 80 bp, synthetic construct
  source 1..80: mol_type = other DNA
catggtctacagtcagcactacggaggacagcgtggtctgctgttcgatgtcctactcatggacgggagccctcataaca

SEQ ID NO: 116379 - DNA, 80 bp, synthetic construct
  source 1..80: mol_type = other DNA
ggacctgccatacgggagggacaagcttaccccgccaactatccatacccccttattggtcagacggccgtaccaagcct

SEQ ID NO: 116380 - DNA, 80 bp, synthetic construct
  source 1..80: mol_type = other DNA
gtacttgtggttctagtgacctctatctggtcacgagggaggccgacgttatccccgcaagacgcaggggtgacagccga

SEQ ID NO: 116381 - DNA, 80 bp, synthetic construct
  source 1..80: mol_type = other DNA
attggaggacgaactgcatccaagtccgttcgagctgggacccacacttcaggatctctatgatctggaggtagatgccc

SEQ ID NO: 116382 - DNA, 80 bp, synthetic construct
  source 1..80: mol_type = other DNA
gcctggcccaagcttgaacaattctggcagaaacacctgtggaactttgtgagcggcattcaatatcttgccggcttgtc

SEQ ID NO: 116383 - DNA, 80 bp, synthetic construct
  source 1..80: mol_type = other DNA
gttacatcaaggccaaagcggcttgtaaagccgctggcattgttgacccggtgatgctcgtgtgtggcgacgacctagtg

SEQ ID NO: 116384 - DNA, 80 bp, synthetic construct
  source 1..80: mol_type = other DNA
acccaaactcgcgcgtgagggtggtggcgacgagggcgacgtacagctcggccgccgcgtccatcgaggcgccccacgtc

SEQ ID NO: 116385 - DNA, 80 bp, synthetic construct
  source 1..80: mol_type = other DNA
ggccaggtagtactgcggctggcccaccttgatgtgcgtggcgttgtacttgcgcgcaaacatgcggtcgatggcctcgc

SEQ ID NO: 116386 - DNA, 80 bp, synthetic construct
  source 1..80: mol_type = other DNA
gctcggccggaccccgggttcctcgaccgggagcttggcgtcccaggactctcgggccggcccgaccgacagccaggact

SEQ ID NO: 116387 - DNA, 80 bp, synthetic construct
  source 1..80: mol_type = other DNA
gtggctggcatttggcttgctagcttcggctttccattggtccggaatactgttgacaatgggggcatggacactgtatg

SEQ ID NO: 116388 - DNA, 80 bp, synthetic construct
  source 1..80: mol_type = other DNA
tgcccgggcgggagaggcgcgggccttgcatgcctgtccgatgccgtcgtcgaccacgcgggtcactcccacgaccaagc

SEQ ID NO: 116389 - DNA, 80 bp, synthetic construct
  source 1..80: mol_type = other DNA
tggagttgcaggagggatggaaccattccaacttggtctcctggtagcattcatagccacacaagaagtgctgaaacgca

SEQ ID NO: 116390 - DNA, 80 bp, synthetic construct
  source 1..80: mol_type = other DNA
cccctgcctcccagggattccattcctgtcatgtcagaaggggtataagggtgagtggaggaatgacggcgtcatgaaca

SEQ ID NO: 116391 - DNA, 80 bp, synthetic construct
  source 1..80: mol_type = other DNA
aaggcgacctcggcggcgatgtcaaagggcggcaggacggtgcgcgggtggcgcagtggcacctcgagcgcgggaaagcg

SEQ ID NO: 116392 - DNA, 80 bp, synthetic construct
  source 1..80: mol_type = other DNA
attgttgctacatttctgggaacggggccgaggtggagatagatacggaggatagggtggcctttagatgtagcatgata

SEQ ID NO: 116393 - DNA, 80 bp, synthetic construct
  source 1..80: mol_type = other DNA
tttactgttttaggtcctgtttcagacaatgaggtagatgactctaatagggacaaacgaccgtcgcctccaacactagg

SEQ ID NO: 116394 - DNA, 80 bp, synthetic construct
  source 1..80: mol_type = other DNA
ttccaaacaggcccaggacatacaacccgccgtgcaggcttcatggcccaaggtggaacaattctgggccaaacacatgt

SEQ ID NO: 116395 - DNA, 80 bp, synthetic construct
  source 1..80: mol_type = other DNA
tgtggcttcgccgacctcatggggtacgtccccgtcgtaggaggccccctcggtggtctcgcggcagccttggcacatgg

SEQ ID NO: 116396 - DNA, 80 bp, synthetic construct
  source 1..80: mol_type = other DNA
ttgagacaaccacagttccacaggacgctgtagccaggagccagcggcgtgggcggacagggcgcgggaagccggtggtg

SEQ ID NO: 116397 - DNA, 80 bp, synthetic construct
  source 1..80: mol_type = other DNA
tgtggcgcaggttgaggcttatgacggagaggtagcggggtctctgggaggcggcattgtggtcctcttgaccatattga

SEQ ID NO: 116398 - DNA, 80 bp, synthetic construct
  source 1..80: mol_type = other DNA
ggttgagtatctccgaggaggacgaccgggcgccgtcgcgcggcccaccggcgacgtccggtggctggaggcgagggtct

SEQ ID NO: 116399 - DNA, 80 bp, synthetic construct
  source 1..80: mol_type = other DNA
tggctaagactaggaaggacattggggagtgggagccctcaactggcttctcgagctgggaagaggtccccttttgttca

SEQ ID NO: 116400 - DNA, 80 bp, synthetic construct
  source 1..80: mol_type = other DNA
ggacctggtaggttggccagcgcctgcggggaccaagtcccttgacccctgcacgtgcggttcttccgacctgtacctgg

SEQ ID NO: 116401 - DNA, 80 bp, synthetic construct
  source 1..80: mol_type = other DNA
gcccaggaataaagaatcgtgaacctgttgcatgttatgtttcaacgtgtttatttttcaattgcagaaaatttcaagtc

SEQ ID NO: 116402 - DNA, 80 bp, synthetic construct
  source 1..80: mol_type = other DNA
gtcgaggtcagcagcaagagctcaaagtaaaaaaccggtctctgcgctcgctcacccgcagttgcttgtaccacaaaaac

SEQ ID NO: 116403 - DNA, 80 bp, synthetic construct
  source 1..80: mol_type = other DNA
tgccctccgccgccgcggcgtcttcgcccacccgccgcgcctgcgcgcgccccccgccggccgcaggtggaagagaggcc

SEQ ID NO: 116404 - DNA, 80 bp, synthetic construct
  source 1..80: mol_type = other DNA
cgtgggagtggttgagcataggctggacgcggcgtgcaattggacgaggggcgcgccttgctccctcgaggacagagata

SEQ ID NO: 116405 - DNA, 80 bp, synthetic construct
  source 1..80: mol_type = other DNA
accacgggcccttgcacaccctcccctgcgccaaactattctaaggcgctgtggcgggtggctgctgaggagtacgtgga

SEQ ID NO: 116406 - DNA, 80 bp, synthetic construct
  source 1..80: mol_type = other DNA
acgcgtatgggtcgtggacgcaccaaacgccagcctgtttgtcctggggatggccatagccgccgaagggactctggcgt

SEQ ID NO: 116407 - DNA, 80 bp, synthetic construct
  source 1..80: mol_type = other DNA
gtacccccgaaaccatcgcccgtctggtcgacgacccattgtttcccacggcctggcgccctgcgctaagctttgatccc

SEQ ID NO: 116408 - DNA, 80 bp, synthetic construct
  source 1..80: mol_type = other DNA
ccagttcgtccgctagccagctgtcagcaccctcgctgaaggccacttgtaaatcccataggccacaccctgacgctgaa

SEQ ID NO: 116409 - DNA, 80 bp, synthetic construct
  source 1..80: mol_type = other DNA
cgaacaataacatgtcccttacgtgccctacagactgtttcaggaaacatccagaagctacatacagtcggtgcgggtcc

SEQ ID NO: 116410 - DNA, 80 bp, synthetic construct
  source 1..80: mol_type = other DNA
gcggctggcttcttgccgtggtctcgattctttccgcatagggtggggcagcttagagtatgagaataatgtcaccaatg

SEQ ID NO: 116411 - DNA, 80 bp, synthetic construct
  source 1..80: mol_type = other DNA
tggtattcgcgcgcaaatagcgcggttccggtggtgatgttaacggtcagcgaagcggcggacgcgcactgggtggtgtc

SEQ ID NO: 116412 - DNA, 80 bp, synthetic construct
  source 1..80: mol_type = other DNA
gccaaggttggcatcgtgctgatcatgttctcgggagtggatgcacagactaggctctccggcagcgtcataggtcaggg

SEQ ID NO: 116413 - DNA, 80 bp, synthetic construct
  source 1..80: mol_type = other DNA
ttaaaggacattaagcttgctgcctcaaaggttagcgctagggccctctccgtggaggaagcctgcaagctgaccccccc

SEQ ID NO: 116414 - DNA, 80 bp, synthetic construct
  source 1..80: mol_type = other DNA
ggggccccagcggagggtggatgcggtcgtgaggccccgccggagcagggcccatagctggcagtcggcctggttttgcg

SEQ ID NO: 116415 - DNA, 80 bp, synthetic construct
  source 1..80: mol_type = other DNA
gggtggttgcagcagaaatggcagaagctttgaggggccttccagttaggtatttgactccagctgtacaaagagaacac

SEQ ID NO: 116416 - DNA, 80 bp, synthetic construct
  source 1..80: mol_type = other DNA
gctatggacgtgggatacctttgtgaggatactatcacttatgaatgtccggtcctagctgctggaaatgaccctgaaga

SEQ ID NO: 116417 - DNA, 80 bp, synthetic construct
  source 1..80: mol_type = other DNA
ggctaacggacgaaacgcggaagcgcgaaacacgccgtcggtgacccgcaggagctcgttcatcagtaaccaatccatac

SEQ ID NO: 116418 - DNA, 80 bp, synthetic construct
  source 1..80: mol_type = other DNA
tctggccgccgtgctcctcggggaccacgcggagcaggtcaacacgttcctgcgtctcgtgtttgagatccccctgttta

SEQ ID NO: 116419 - DNA, 80 bp, synthetic construct
  source 1..80: mol_type = other DNA
actgattgctggtatgccatggaaatacggccagtccatgaccagggggggcttgttcgctcaatggtggttgcggacaa

SEQ ID NO: 116420 - DNA, 80 bp, synthetic construct
  source 1..80: mol_type = other DNA
cagcaaaatccgtctgtggaccggtctattgtttcacaccctcaccggtggtggtgggcaccaccgacaagagaggagta

SEQ ID NO: 116421 - DNA, 80 bp, synthetic construct
  source 1..80: mol_type = other DNA
agatgacaatgtaacacctatagacaccacaatcatggcgaaaaatgaagtcttctgcgtcgcccctgaaaaggggggca

SEQ ID NO: 116422 - DNA, 80 bp, synthetic construct
  source 1..80: mol_type = other DNA
tccctcgtacgaggaggccgtcaaggccggcatgcccaccacgcgcatcatcgcgccgctggccacgggagtgatgaaac

SEQ ID NO: 116423 - DNA, 80 bp, synthetic construct
  source 1..80: mol_type = other DNA
cctgccgaccccccgggaggcgcgtccaagccccgcaagctgctggtgtccgagctggccgaggatcccgcatacgccat

SEQ ID NO: 116424 - DNA, 80 bp, synthetic construct
  source 1..80: mol_type = other DNA
ccaaagaggtgggggacatactaagagtgccttgcatgcggacccccgcggacgatgtttcttggcgctacgaggccccg

SEQ ID NO: 116425 - DNA, 80 bp, synthetic construct
  source 1..80: mol_type = other DNA
aagtcaagaagattttgacattgacatggctttctttgattccaacactattaacacaccagatgttgtgctgtatacag

SEQ ID NO: 116426 - DNA, 80 bp, synthetic construct
  source 1..80: mol_type = other DNA
ctgtttcggccaggttgggcaatgagatcttgctcggaccagccgatacagaaacatcaaaggggtggagactccttgcc

SEQ ID NO: 116427 - DNA, 80 bp, synthetic construct
  source 1..80: mol_type = other DNA
tagcctggaataaaaaagatgacaggcgcactttatggacaacgccagatccatcgccaaattgtagaattgaagttgca

SEQ ID NO: 116428 - DNA, 80 bp, synthetic construct
  source 1..80: mol_type = other DNA
cctaacagatgggccagagagggtcatcttagcaggtcccattccagtgactccagcaagcgctgcccaaagaagagggc

SEQ ID NO: 116429 - DNA, 80 bp, synthetic construct
  source 1..80: mol_type = other DNA
accggactgacacacatagacgctcacttcttgtcccagacgaaacaagggggggaaaactttgcgtatctggtagcata

SEQ ID NO: 116430 - DNA, 80 bp, synthetic construct
  source 1..80: mol_type = other DNA
ccacgaagcagtctgtgatagcattgggctcacaagagggagctctgcatcaagctttggctggagccattcctgtggaa

SEQ ID NO: 116431 - DNA, 80 bp, synthetic construct
  source 1..80: mol_type = other DNA
tatacatggacgggggcgctggtcacgccatgcgcggccgaagagaccaaattgccaatcagccccctgagcaactctct

SEQ ID NO: 116432 - DNA, 80 bp, synthetic construct
  source 1..80: mol_type = other DNA
agacccgtcccacattaccgcggagacggcagccaggcgactggccaggggatctcccccctcacaggccagctcctcag

SEQ ID NO: 116433 - DNA, 80 bp, synthetic construct
  source 1..80: mol_type = other DNA
gtactctgggttccctaggttctcgcggtggtcgcggaacccggggctcccggggaacacgcggtgtcctgtggattgtt

SEQ ID NO: 116434 - DNA, 80 bp, synthetic construct
  source 1..80: mol_type = other DNA
cagaatcatgtatgaggatctagaaggtggcaacatccccgccctccttgatgtgcccaagtacttggaaagcaagaaga

SEQ ID NO: 116435 - DNA, 80 bp, synthetic construct
  source 1..80: mol_type = other DNA
atcccggctcggagacgcggggacaagcggggagcattgctctccccgagacccatttcgaccttgaaggtgtcctcgtg

SEQ ID NO: 116436 - DNA, 80 bp, synthetic construct
  source 1..80: mol_type = other DNA
atcccggagcccaactacaagagggctctttggagggtggccgctgaggaatacgttgaagtagtgaggttgggtgacag

SEQ ID NO: 116437 - DNA, 80 bp, synthetic construct
  source 1..80: mol_type = other DNA
ccctcctcccccccgaaggcggcctcgtcgaccagatctcgatccaccagaggaaggtcatcccgcatggtcatggggtg

SEQ ID NO: 116438 - DNA, 80 bp, synthetic construct
  source 1..80: mol_type = other DNA
acaactggggtgacaatgagactgatgttttcttattggagagcttacgaccacccatcggcggctggtacgggtgcaca

SEQ ID NO: 116439 - DNA, 80 bp, synthetic construct
  source 1..80: mol_type = other DNA
cgcacccctgccagtctgggcgcagcctcagtacaatccgccgctcatgccggcatggcaaagcccagactacacaccac

SEQ ID NO: 116440 - DNA, 80 bp, synthetic construct
  source 1..80: mol_type = other DNA
tggttgaaggtcttggtagtgatggttcttttcgccggtgtggatgggactactgacatcatcggcagccgatcaggatc

SEQ ID NO: 116441 - DNA, 80 bp, synthetic construct
  source 1..80: mol_type = other DNA
ctgagagcgatgctgcagcgaaggttacagcactgctaagctctttgaccgttacacagctcctccgccggctccaccag

SEQ ID NO: 116442 - DNA, 80 bp, synthetic construct
  source 1..80: mol_type = other DNA
agcgatgcccatatgggcacgcccggattacaaccccccactgatagagtcctggaaggacccggcctacgtccctccgg

SEQ ID NO: 116443 - DNA, 80 bp, synthetic construct
  source 1..80: mol_type = other DNA
gagggagaagaaacggaacgcggaaacgccgccggcgcggcccgaggccccggggcccccgcgctccgccggtggcccgg

SEQ ID NO: 116444 - DNA, 80 bp, synthetic construct
  source 1..80: mol_type = other DNA
gtatatgggagggcagcgcgttggggatcaccgacgccgaccacatagagtcaaggtccggagagtcgggatcggcgtcc

SEQ ID NO: 116445 - DNA, 80 bp, synthetic construct
  source 1..80: mol_type = other DNA
actccgaagagcagagcgtggtttgctgttctatgtcatactcctggactggtgctataataacaccgtgtagtgccgag

SEQ ID NO: 116446 - DNA, 80 bp, synthetic construct
  source 1..80: mol_type = other DNA
ttgggatcggaacggtcctggaccaggcggagacagccggcgtacgcctcacagtgttagccactgcaaccccccccggg

SEQ ID NO: 116447 - DNA, 80 bp, synthetic construct
  source 1..80: mol_type = other DNA
tggtccacgcatataagcgcggactaaaaacagggatgtactactgcaaggttcgcaaggcgaccaacagcggggtcttt

SEQ ID NO: 116448 - DNA, 80 bp, synthetic construct
  source 1..80: mol_type = other DNA
catgcctccgcttgaaggggagcccggtgatccagacctcacatcggactcttggtccactgttagcggatcggaggatg

SEQ ID NO: 116449 - DNA, 80 bp, synthetic construct
  source 1..80: mol_type = other DNA
cgttgagcacaggttcaaagctgcctgcaactggactcggggcgaccgatgtgagttggaggaccgcgataggatcgaaa

SEQ ID NO: 116450 - DNA, 80 bp, synthetic construct
  source 1..80: mol_type = other DNA
caagcgatttctgtaggtacggaattgctgaccgaccttcattttttctggggtaatacaatagaaagtagaggagtctt

SEQ ID NO: 116451 - DNA, 80 bp, synthetic construct
  source 1..80: mol_type = other DNA
gacagctacggtctgctcggccttgtacgtgggagacgtgtgcggagccgtgatgatcgcgtcgcaggctcttatagcat

SEQ ID NO: 116452 - DNA, 80 bp, synthetic construct
  source 1..80: mol_type = other DNA
agcggccccgctccgacgcctcgccctctccggaggaggttggcggaattggcacggacaacaggggcccagcagagtac

SEQ ID NO: 116453 - DNA, 80 bp, synthetic construct
  source 1..80: mol_type = other DNA
gcatctgcgtcagccgcccccatggcgcccccgctgacggcctggtgaaccagggcgccctggcgtagccccgatgcaac

SEQ ID NO: 116454 - DNA, 80 bp, synthetic construct
  source 1..80: mol_type = other DNA
actcgctcagctcatgagcagcactccgacgttgagctgatagaagccaacctcatgtgggaacacaaggttggcgccat

SEQ ID NO: 116455 - DNA, 80 bp, synthetic construct
  source 1..80: mol_type = other DNA
tgacctcaataaacgttcaggcaagtgcactattcacactcgcgcgaggcttccccttcgtcgatgttggagtgtcggct

SEQ ID NO: 116456 - DNA, 80 bp, synthetic construct
  source 1..80: mol_type = other DNA
ccttgcagacgggggctgctctggcggcgcctatgatatcatcatctgcgatgaatgccattcaacggatcccaccacta

SEQ ID NO: 116457 - DNA, 80 bp, synthetic construct
  source 1..80: mol_type = other DNA
cctccacgggaacaacggttgtgtgggggggcatcgtcgtactcgctctgcttgtcaccgggatggtcaggatagagagt

SEQ ID NO: 116458 - DNA, 80 bp, synthetic construct
  source 1..80: mol_type = other DNA
cggtgaaggagtgggccccgggctgggcgcttgcaagggtgcgcttgagactcatcctgctggtgctgaaacgggcacgg

SEQ ID NO: 116459 - DNA, 80 bp, synthetic construct
  source 1..80: mol_type = other DNA
tgagctcattgggagagcaagaatatcacaaggagctggatggagcctaagagaaacagcatgtctaggcaagtcatatg

SEQ ID NO: 116460 - DNA, 80 bp, synthetic construct
  source 1..80: mol_type = other DNA
tcaatactccaaagccaggaagcccttgagagggccatcgacttcgacatgtacggagtcacatattcaatcactccgct

SEQ ID NO: 116461 - DNA, 80 bp, synthetic construct
  source 1..80: mol_type = other DNA
gcaaaagcggagtgacttcgttcatcatgcttctgacatgctggttttctttaaccaagtcttgcaagagacgctcaccg

SEQ ID NO: 116462 - DNA, 80 bp, synthetic construct
  source 1..80: mol_type = other DNA
ttagccggcctctccacactgccaggtaaccctgctgtggcatccctcatggcattcactgcctcggtcactagccccct

SEQ ID NO: 116463 - DNA, 80 bp, synthetic construct
  source 1..80: mol_type = other DNA
tcgggtggcggttcctagcgcccttgatacctacgtaaacatcggggcacggtggtctccagatcccatggacaatgtta

SEQ ID NO: 116464 - DNA, 80 bp, synthetic construct
  source 1..80: mol_type = other DNA
agagatcgatccatcgcactggtgatgttagccacgggaggggtgctcctctttctcgccacaaacgtccatgcagactc

SEQ ID NO: 116465 - DNA, 80 bp, synthetic construct
  source 1..80: mol_type = other DNA
ccccaccactccactcgccagggctgcctgggagacagcaagacactcccctgtcaattcatggctgggtaacatcatcc

SEQ ID NO: 116466 - DNA, 80 bp, synthetic construct
  source 1..80: mol_type = other DNA
ggcatatcaatagaacctctctcaattgcaatgacagcctgcacacgggattcatagctggcctcctctattacaacaaa

SEQ ID NO: 116467 - DNA, 80 bp, synthetic construct
  source 1..80: mol_type = other DNA
ttttgctgttgcgcccactgatgcaactgcggattgttttgtaaaaaagtattccagaggttagcggctaaagacgtttg

SEQ ID NO: 116468 - DNA, 80 bp, synthetic construct
  source 1..80: mol_type = other DNA
taccatcaccctgttctgcatctgccccacgcccggattacatgaagatctgtgttgtcatctttgcgctcagtttaata

SEQ ID NO: 116469 - DNA, 80 bp, synthetic construct
  source 1..80: mol_type = other DNA
acgccttgatcaagatctgtggcttggtgcgtaacatggtgcacggcaagtacatgcaacttgccctgctcaaggttgga

SEQ ID NO: 116470 - DNA, 80 bp, synthetic construct
  source 1..80: mol_type = other DNA
aggccccagcgtacctatcccggcgccaaactataagagggcgctgtggagggtgagcgctgaggagtacgtcgaggtcc

SEQ ID NO: 116471 - DNA, 80 bp, synthetic construct
  source 1..80: mol_type = other DNA
cgtgaggaacggcaatgagatcgcagcttgtctgacaaaggctggaaaacgggtcatacagctcagcagaaagacttttg

SEQ ID NO: 116472 - DNA, 80 bp, synthetic construct
  source 1..80: mol_type = other DNA
agatgaaaccatgctatggctcatttgccagacccacaaatgaaaaaggaggacaggcaaaactaagagaccctgaaaaa

SEQ ID NO: 116473 - DNA, 80 bp, synthetic construct
  source 1..80: mol_type = other DNA
actattcccccccccccaagtccgccccgtggctcgccggccatggagctcagctatgccaccaccctgcaccaccggga

SEQ ID NO: 116474 - DNA, 80 bp, synthetic construct
  source 1..80: mol_type = other DNA
cccaaatgtgggctctaatgtatttccacagaagggacttgcgtttggcttctatggcaatatgctcagcagtgccatct

SEQ ID NO: 116475 - DNA, 80 bp, synthetic construct
  source 1..80: mol_type = other DNA
ggtgtcgttcagagtaggactgtacgactacccggtggggtcgcaattaccttgcgagcctgaaccggatgtggccgtgg

SEQ ID NO: 116476 - DNA, 80 bp, synthetic construct
  source 1..80: mol_type = other DNA
cggtcgccgttacgccggaggaaacggcagtcgcctccccgcccgcgactgcatccgtggagtcgtcgccaccccccgcc

SEQ ID NO: 116477 - DNA, 80 bp, synthetic construct
  source 1..80: mol_type = other DNA
cctgttgaatctctcgacattgccacacggacgcccagtttttctgacaacagtacgccgccggccgtgccccagcacta

SEQ ID NO: 116478 - DNA, 80 bp, synthetic construct
  source 1..80: mol_type = other DNA
tggcaatcatatcgatctttactcttaccccagcatacaagactttcctgtgccgttcagtgtggtggctgtcctacatg

SEQ ID NO: 116479 - DNA, 80 bp, synthetic construct
  source 1..80: mol_type = other DNA
cattgtggacagatggaatagaagaaagtgatctgatcatacccaagtctttagctgggccactcagccatcacaacacc

SEQ ID NO: 116480 - DNA, 80 bp, synthetic construct
  source 1..80: mol_type = other DNA
cggcgacggctcccgccagtcgcgagccgcggcgccgctgggggcgtctggcccctcggggggggttgaggttgaggttg

SEQ ID NO: 116481 - DNA, 80 bp, synthetic construct
  source 1..80: mol_type = other DNA
ccacctatggtaagtttttggcagatgggggctgttcggggggcgcctatgacatcatcatctgcgacgagtgccactct

SEQ ID NO: 116482 - DNA, 80 bp, synthetic construct
  source 1..80: mol_type = other DNA
aactactaattaagcgcgctcagcccattgacaaagatgcaaacttgcaagattcagaggcatcagatgatggaaaacca

SEQ ID NO: 116483 - DNA, 80 bp, synthetic construct
  source 1..80: mol_type = other DNA
gcataccatcaacaaacccgcggcttgctggggacaattgttactagcttgaccggtagggacaaaaatgaggttgaggg

SEQ ID NO: 116484 - DNA, 80 bp, synthetic construct
  source 1..80: mol_type = other DNA
tgtacatgagcaaacagtataagttgtggcccccacaaaattgtgtggaaaacactggcactttctgctgcactgctatg

SEQ ID NO: 116485 - DNA, 80 bp, synthetic construct
  source 1..80: mol_type = other DNA
atttgtgtgctcacactggtcggcgccgtggctgccaatgaaatgggttggctggacaagaccaagaatgacattagcag

SEQ ID NO: 116486 - DNA, 80 bp, synthetic construct
  source 1..80: mol_type = other DNA
cggacgcactgatgacgggttacaccggcgactttgactctgtgatagactgcaacacatccgtcatacagactgttgac

SEQ ID NO: 116487 - DNA, 80 bp, synthetic construct
  source 1..80: mol_type = other DNA
tatggcaatggggtcgtgatcaaaaatgggagttatgttagtgccatcacccaagggaggagagaggaagagactcctgt

SEQ ID NO: 116488 - DNA, 80 bp, synthetic construct
  source 1..80: mol_type = other DNA
ggaaaccatctcgttctcgttcccggacggctcgcgcagcacgatcgtgtttgcctccagccacaacacgaacgtaagta

SEQ ID NO: 116489 - DNA, 80 bp, synthetic construct
  source 1..80: mol_type = other DNA
gctaaggtcttgattgtgatgctactctttgccggcgttgacggccacacccgcgtgacgggggggaaagcaggccgcga

SEQ ID NO: 116490 - DNA, 80 bp, synthetic construct
  source 1..80: mol_type = other DNA
cgctggaagttatcttaatatgacagctagtactcaaaagagtataaaggtatctttgatgtttgactcaaaagggcttc

SEQ ID NO: 116491 - DNA, 80 bp, synthetic construct
  source 1..80: mol_type = other DNA
cttgaaggggaacccggcgaccctgacttgacatctgactcctggtccaccgtcagcggttcggaggacgtcgtgtgttg

SEQ ID NO: 116492 - DNA, 80 bp, synthetic construct
  source 1..80: mol_type = other DNA
aggcaatgagaggagtgtgatatgcacagtagtcatcaaatgcgaacataaatgccctctcaacatcacattcaaaaacc

SEQ ID NO: 116493 - DNA, 80 bp, synthetic construct
  source 1..80: mol_type = other DNA
cagcccaatggagaagaaggtcattgtgtggggggctgagacagtggcgtgtggagacatcctgcatggcctcccggtct

SEQ ID NO: 116494 - DNA, 80 bp, synthetic construct
  source 1..80: mol_type = other DNA
tactcagccctaggccgctgagtacgctaaaagggtcgtcgggaggacccgtcatgtgcccttcggggcatgcagtcgtg

SEQ ID NO: 116495 - DNA, 80 bp, synthetic construct
  source 1..80: mol_type = other DNA
acaattatcaaggaactcaaaggacacagtatgaggttacagtcttagatctttttccaaactctggtcaaatgaaaatt

SEQ ID NO: 116496 - DNA, 80 bp, synthetic construct
  source 1..80: mol_type = other DNA
gcatctttcccacgctgtatgctattttccagcagagtcgcggccagcagttggaactgaaagtaaaaaaccgctccctg

SEQ ID NO: 116497 - DNA, 80 bp, synthetic construct
  source 1..80: mol_type = other DNA
agccacagccacagacagagatggacttggaagagggcgaagggctggcgagactgggggcgccgtccccggagcgacat

SEQ ID NO: 116498 - DNA, 80 bp, synthetic construct
  source 1..80: mol_type = other DNA
ggctgaaagctaagctgctgccccgcatgccaggcatccccttcctctcgtgccagaggaggtacaggggagagtggcga

SEQ ID NO: 116499 - DNA, 80 bp, synthetic construct
  source 1..80: mol_type = other DNA
ataccccagttacgaccgcgaggccattacgctacactgcctctgtcgcttattaaaggtgtttacccaaaagtcccttt

SEQ ID NO: 116500 - DNA, 80 bp, synthetic construct
  source 1..80: mol_type = other DNA
cttgcagcatgtggccgttgttcttcctgcttctcgctttgcctgaaagggcatatgcgtttgacggggaagtggctgcg

SEQ ID NO: 116501 - DNA, 80 bp, synthetic construct
  source 1..80: mol_type = other DNA
catccagatatcctgtctgctctacgacctgtccaccaccgccctggagcacgtcctcctgttttcgctcggttcctgcg

SEQ ID NO: 116502 - DNA, 80 bp, synthetic construct
  source 1..80: mol_type = other DNA
gtccagctccgtcgtcgggtgccgccgggccccaaccggcggtcggggaggcggtgtatcacgcggcccgctcgtgtggc

SEQ ID NO: 116503 - DNA, 80 bp, synthetic construct
  source 1..80: mol_type = other DNA
gcttcctcaggcggtaatgggagcttcctatggcttccagtactcccctgcccaacgggtggagtatctcttgaaagcat

SEQ ID NO: 116504 - DNA, 80 bp, synthetic construct
  source 1..80: mol_type = other DNA
cgcaaggtcatatctgcccttacggagagactctataagggtggtcccatgtacaacagcaagggggacctatgtggcct

SEQ ID NO: 116505 - DNA, 80 bp, synthetic construct
  source 1..80: mol_type = other DNA
tggaaggacctgctggaagacactgagacaccaatcgacactaccatcatggcaaagaatgaggttttctgcgttcaacc

SEQ ID NO: 116506 - DNA, 80 bp, synthetic construct
  source 1..80: mol_type = other DNA
tgcgtccaaacccggccatcccagacggcatggcccgtctattccattcagcaatggaaacacacgacgcctccgccgca

SEQ ID NO: 116507 - DNA, 80 bp, synthetic construct
  source 1..80: mol_type = other DNA
acctcttgtgggggtctaccgctaccagggttgagacggacgagaaggtaataatactagactcttttgagtcatgtgtg

SEQ ID NO: 116508 - DNA, 80 bp, synthetic construct
  source 1..80: mol_type = other DNA
acgtccttcattagccgcgggccatctcagaacatccagctcatcaacaccaacggcagctggcacatcaacaggactgc

SEQ ID NO: 116509 - DNA, 80 bp, synthetic construct
  source 1..80: mol_type = other DNA
agctattaccatatcgccgcaagaatagccacatcaatttttgcgttgtcggaaatgggccgtaccacagaatattttct

SEQ ID NO: 116510 - DNA, 80 bp, synthetic construct
  source 1..80: mol_type = other DNA
ccacaaatgaagttaacaatatacaaccaacagttgtattgtacagcgaagatgtaaacatggaaactccagatactcat

SEQ ID NO: 116511 - DNA, 80 bp, synthetic construct
  source 1..80: mol_type = other DNA
tggaagacgcggaggctctcttcagtaaatactgcgcgctgactcttaaggactagtttcgcgccctttctcaaatttaa

SEQ ID NO: 116512 - DNA, 80 bp, synthetic construct
  source 1..80: mol_type = other DNA
agtctgagggaatcttttcacccagcgaattggaaaccccaaatctagccgaaagagtcctcgactggttgaaaaaacat

SEQ ID NO: 116513 - DNA, 80 bp, synthetic construct
  source 1..80: mol_type = other DNA
tcctcgccgatgggggctgctcggggggggcttatgacatcatcatctgtgacgagtgtcattccaccgacgccactacc

SEQ ID NO: 116514 - DNA, 80 bp, synthetic construct
  source 1..80: mol_type = other DNA
gggaagtggtcgcacccgacgcaccatccatgaagcaacacttcgtgagaccccccctgaccagcaaaaggggcaaaccg

SEQ ID NO: 116515 - DNA, 80 bp, synthetic construct
  source 1..80: mol_type = other DNA
tatatatacagggaccggggtcgccctgttggtggtcgccatgtgaccccctgactttatatatacagacccccaacaca

SEQ ID NO: 116516 - DNA, 80 bp, synthetic construct
  source 1..80: mol_type = other DNA
ctgggtgcggtgctgtttgcgggttggcacaaaaagaccccgatccgcgtctgtggtgtttttggcatcatgtcgcaggg

SEQ ID NO: 116517 - DNA, 80 bp, synthetic construct
  source 1..80: mol_type = other DNA
gggatggaacaccggttctcagccgcttgtaactggacgaggggggagcgctgcgaccttgaagatcgtgaccgcagcga

SEQ ID NO: 116518 - DNA, 80 bp, synthetic construct
  source 1..80: mol_type = other DNA
ctataggcagtgtaggggttaggcaagatgctggtggatatcctggcagggtacggtgcgggcatttcggtgagccctcg

SEQ ID NO: 116519 - DNA, 80 bp, synthetic construct
  source 1..80: mol_type = other DNA
gggtccctcccctcgatgttcgggggggccgcgacgctgtcatcctcctcgcgtgtgtggcccacccggagctgatcttt

SEQ ID NO: 116520 - DNA, 80 bp, synthetic construct
  source 1..80: mol_type = other DNA
ggtggttgacttcagtctagaccccacctttaccatagagaccaccacagtcccacaggacgccgttgcccgaagccaga

SEQ ID NO: 116521 - DNA, 80 bp, synthetic construct
  source 1..80: mol_type = other DNA
atggtcgtgttggttaccaacccacacccaggcatgctcggtggtatgaaggagggggggcggtgcttcttagagaccgc

SEQ ID NO: 116522 - DNA, 80 bp, synthetic construct
  source 1..80: mol_type = other DNA
taggggtaggcatctttttactccccgctcggtagagcggcacaccttagctacactccatagctaactgtttttttttt

SEQ ID NO: 116523 - DNA, 80 bp, synthetic construct
  source 1..80: mol_type = other DNA
gagggtgccaaccaatggatgaaccggttgattgcgtttgcttcgagaggcaatcatgtgtcccccacacattatgtgcc

SEQ ID NO: 116524 - DNA, 80 bp, synthetic construct
  source 1..80: mol_type = other DNA
ttcagtgcgaggatgcgaaccgaccgggaaaaactggatctcctgccaccagttggaagagtgggcgttaatgtggtgga

SEQ ID NO: 116525 - DNA, 80 bp, synthetic construct
  source 1..80: mol_type = other DNA
ggagccagcggaggggccgtactggtagagggaagcccggaacatataggtacgtctcgctaggcgaacggccgtcaggt

SEQ ID NO: 116526 - DNA, 80 bp, synthetic construct
  source 1..80: mol_type = other DNA
atctggaatttgaggcactgggtttcctcaatgaggatcactgggcttccagggatctcagtggagcggtggttgaggtg

SEQ ID NO: 116527 - DNA, 80 bp, synthetic construct
  source 1..80: mol_type = other DNA
ctatgacttccatgccccccttagagggggagcctggagacccggatttggaccctgacccggtagagcagcagatccca

SEQ ID NO: 116528 - DNA, 80 bp, synthetic construct
  source 1..80: mol_type = other DNA
tgtggttggtaccaccgaccgggacgggtttgctacatacaactgggaggaaaatgctaccgacgtgttcttactacagg

SEQ ID NO: 116529 - DNA, 80 bp, synthetic construct
  source 1..80: mol_type = other DNA
ggcacgcggtggggcttttcagagctgccgtgtgcacccgaggagttgcgaaggcggtcgactttgtacccgtcgagtcg

SEQ ID NO: 116530 - DNA, 80 bp, synthetic construct
  source 1..80: mol_type = other DNA
aaactgcgtacgttaatcttggctcccacaagagttgtcgcctctgaaatggcagaggcactcaagggaatgccaataag

SEQ ID NO: 116531 - DNA, 80 bp, synthetic construct
  source 1..80: mol_type = other DNA
tggtgtctcgcttttgtgtgctgcgcttggtacatcaggggtcgtttcgtcccagcagtcacatacgggctcttgcagat

SEQ ID NO: 116532 - DNA, 80 bp, synthetic construct
  source 1..80: mol_type = other DNA
cactcacgttacccttcaatgcaagtttttttctacacaactcacttggacctttaatggaaaaaacgtcgccgaggcaa

SEQ ID NO: 116533 - DNA, 80 bp, synthetic construct
  source 1..80: mol_type = other DNA
ggacgctatgaccaggtattcagcgcctcctggagacgaaccatgcccagagtatgacttggagcgcattacatcctgct

SEQ ID NO: 116534 - DNA, 80 bp, synthetic construct
  source 1..80: mol_type = other DNA
actaggggagttcggcaaggcaaaaggtagcagagccatatggtacatgtggcttggagcacgcttcttagagtttgaag

SEQ ID NO: 116535 - DNA, 80 bp, synthetic construct
  source 1..80: mol_type = other DNA
ggtccttcctccttctagtgctggcattgccccagcaggcctacgcactaacaacagagggacagggtcacattggccta

SEQ ID NO: 116536 - DNA, 80 bp, synthetic construct
  source 1..80: mol_type = other DNA
catatccctccggggattcatgttgtgcagaaccaccagcacagtgtatccggtgcacttgggaaatttgtcatgtagct

SEQ ID NO: 116537 - DNA, 80 bp, synthetic construct
  source 1..80: mol_type = other DNA
gaggcagtcgtatgtcggcctgacgttctggtagtggaaggtgctgagcccgtagttgactggcatgggcgacgacacga

SEQ ID NO: 116538 - DNA, 80 bp, synthetic construct
  source 1..80: mol_type = other DNA
tagggacaggtgtcagcaaagcccactgctgcattccaccactgagtgggcggtgctgccatgctcttattctgacctac

SEQ ID NO: 116539 - DNA, 80 bp, synthetic construct
  source 1..80: mol_type = other DNA
ccttgtgtccttccttgtgtttttctgctttgcatggtatctgaagggtaggtgggtgcccggagtggcttacgccgtct

SEQ ID NO: 116540 - DNA, 80 bp, synthetic construct
  source 1..80: mol_type = other DNA
cgggtcagttggttagaacaatgtcaacacacagttgggttgtgttagagaccagcacccatatgtggttttcccgggcc

SEQ ID NO: 116541 - DNA, 80 bp, synthetic construct
  source 1..80: mol_type = other DNA
tggaatttgaggaaccgcatgccaccaagcaaactgtagtagccctaggatcgcaagaaggtgccctgcacacagcattg

SEQ ID NO: 116542 - DNA, 80 bp, synthetic construct
  source 1..80: mol_type = other DNA
cctgatgtgcttgaaaagttagagttgctccaaaggaggtttggtggaacggtaatcaggaatcccctctctagaaattc

SEQ ID NO: 116543 - DNA, 80 bp, synthetic construct
  source 1..80: mol_type = other DNA
gtcaattgaaggtcgtttaaattaaatgacactgggcctttggataagcacgttgtaagatttatgctggcaagattaca

SEQ ID NO: 116544 - DNA, 80 bp, synthetic construct
  source 1..80: mol_type = other DNA
tataccactatgatgcagattattccaggtgggattccacacagcagagagccgttctggccgcggctatggagattatg

SEQ ID NO: 116545 - DNA, 80 bp, synthetic construct
  source 1..80: mol_type = other DNA
ggaagcatccgcgtgccacgtacgccgcgtgcggctctggcccttggttaacaccaagatgcatggtgcactacccatat

SEQ ID NO: 116546 - DNA, 80 bp, synthetic construct
  source 1..80: mol_type = other DNA
actggactaactcacatagatgctcatttcctgtcacagacaaaacaacagggactcaacttcccatacctcacagcata

SEQ ID NO: 116547 - DNA, 80 bp, synthetic construct
  source 1..80: mol_type = other DNA
gctgctagctgccgaggaggctttaagccctagacacggcagaggtgataaaaagatcccctggcttaaaggggaagaga

SEQ ID NO: 116548 - DNA, 80 bp, synthetic construct
  source 1..80: mol_type = other DNA
gccatcccaccgctaacgggagttcagaccaagctgatgatgaagccgacaccgcttctgatgcagggtcttatagctct

SEQ ID NO: 116549 - DNA, 80 bp, synthetic construct
  source 1..80: mol_type = other DNA
gccgcagcatcaccacttcacacaagactgcaactgctccatctaccaaggacatctcactggccatcgaatggcgtggg

SEQ ID NO: 116550 - DNA, 80 bp, synthetic construct
  source 1..80: mol_type = other DNA
ggcgctcttagcgtacagtcacaagccccactgaccgtgcaagactccaaactaagcattgctactaaagggcccattac

SEQ ID NO: 116551 - DNA, 80 bp, synthetic construct
  source 1..80: mol_type = other DNA
aacgtagctgtagaacagtacgttgatttcagtctggatcctaccttttccatcgagacacgcactgccccccaggacgc

SEQ ID NO: 116552 - DNA, 80 bp, synthetic construct
  source 1..80: mol_type = other DNA
ttcccccccccccctctctccgcaataaacgccttcccggaactgtgtttccccccctacaacagtgttgtccgttggtt

SEQ ID NO: 116553 - DNA, 80 bp, synthetic construct
  source 1..80: mol_type = other DNA
ggcgcttgcgccctgggaccttacggacccgctgctgtttgttcacgccggactgcaggtcatcaacctcgggttggtgt

SEQ ID NO: 116554 - DNA, 80 bp, synthetic construct
  source 1..80: mol_type = other DNA
aagatgagaaaggagtgacccagaatgggagattgataacagccaatcccatagttactgacaaagaaaaaccagtcaac

SEQ ID NO: 116555 - DNA, 80 bp, synthetic construct
  source 1..80: mol_type = other DNA
agctttacaaccgccccctttagcgcgtatgtcgataatgttaatttcaacggaagcgagcttttgatcggcaatgtgcg

SEQ ID NO: 116556 - DNA, 80 bp, synthetic construct
  source 1..80: mol_type = other DNA
catctgtcttacaaacctggaaaaggtgatgaaaattctaaagctatgttgggtcaacaatctatgccaaacagacccaa

SEQ ID NO: 116557 - DNA, 80 bp, synthetic construct
  source 1..80: mol_type = other DNA
tgtttactcctggcgagcggtctgccacacgggcattaaagcgggaatacgatgaggtttatgccgatgaagatattctg

SEQ ID NO: 116558 - DNA, 80 bp, synthetic construct
  source 1..80: mol_type = other DNA
gttatcccctggggcattggtagtgggtgttgtgtgcgcggccatcctaaggcgccacgcgggacccgcagagggagcta

SEQ ID NO: 116559 - DNA, 80 bp, synthetic construct
  source 1..80: mol_type = other DNA
cggatggcacgagttcaacctcgggtgcatatcctgggatccgacccccatggagcacgagcaggcggtcggcggctgta

SEQ ID NO: 116560 - DNA, 80 bp, synthetic construct
  source 1..80: mol_type = other DNA
caggcttcgtgcttatctcaacaccccaggactccctgtatgccaggatcacctcgagttctgggaggcagtcttcactg

SEQ ID NO: 116561 - DNA, 80 bp, synthetic construct
  source 1..80: mol_type = other DNA
acaattacaactagggaggtaactactcacactacacagttagacactacagtgcagaatagtactgtgttaatcaggtt

SEQ ID NO: 116562 - DNA, 80 bp, synthetic construct
  source 1..80: mol_type = other DNA
cgcgcggggcgcggggaaaggaggaggacgcggaggaggagcgatcgacgccgccgcgccccggctcgccggtgttccgc

SEQ ID NO: 116563 - DNA, 80 bp, synthetic construct
  source 1..80: mol_type = other DNA
ctgttatgttccatccgcgcctgatttttgacatcaccaagtggctgttggcaattctcggccctgctatgctcctcaag

SEQ ID NO: 116564 - DNA, 80 bp, synthetic construct
  source 1..80: mol_type = other DNA
gtaacattgtcgcttcagtcaatatggtatctagactgctactgaacaggttcacgatgacacacagaagacccaccatt

SEQ ID NO: 116565 - DNA, 80 bp, synthetic construct
  source 1..80: mol_type = other DNA
ggtgagcagcttgttgacgcccaactcgcggctgctgctgctgctgatcgcacccttcaccgacagcggcagcgtaaacc

SEQ ID NO: 116566 - DNA, 80 bp, synthetic construct
  source 1..80: mol_type = other DNA
atgtattttttatgccacctgagaaatgtgacacccttctgtgtgatattggtgagtcctctccgaatccaactatagaa

SEQ ID NO: 116567 - DNA, 80 bp, synthetic construct
  source 1..80: mol_type = other DNA
ggctcctctcaccccgcggctcccggccgtcttggggccccaatgatccccggcggaggtcgcgcaatttgggtaaggtc

SEQ ID NO: 116568 - DNA, 80 bp, synthetic construct
  source 1..80: mol_type = other DNA
gatcacaggctcatggcggctgcagtcaaagatcagctggctgtacatgcggacatgggttactggatagaaagtgccaa

SEQ ID NO: 116569 - DNA, 80 bp, synthetic construct
  source 1..80: mol_type = other DNA
aagcaaatcaaacccaccttaaatgccctaccgattgtttcaggaagcaccatgatgccacgtttacccgctgcgggtcc

SEQ ID NO: 116570 - DNA, 80 bp, synthetic construct
  source 1..80: mol_type = other DNA
gggggtgttgagcacaggttcgatgctgcctgcaattggacccgtggagaacggtgtgatttggaagacagggacagagt

SEQ ID NO: 116571 - DNA, 80 bp, synthetic construct
  source 1..80: mol_type = other DNA
accatggccgcggcataccggtatcccggagggtcgcggttgggagcggccatggggtcgcgtggagatcggctgtctct

SEQ ID NO: 116572 - DNA, 80 bp, synthetic construct
  source 1..80: mol_type = other DNA
gtggccgagcgggtgttcgacacgtggcgatgcacgctcaggacgacgctgctggactttgcccacggggtggtagactg

SEQ ID NO: 116573 - DNA, 80 bp, synthetic construct
  source 1..80: mol_type = other DNA
gccagggcatacgcggtgtgaaaaaaggcgtcgggtgcggtcccctcgacggcgcgcatcaggttctcgaggagaatggg

SEQ ID NO: 116574 - DNA, 80 bp, synthetic construct
  source 1..80: mol_type = other DNA
gtaatcgtatccagataggccatccaaaaacgttgagtggtttacaaacgttacatatataagagagttgttataagacc

SEQ ID NO: 116575 - DNA, 80 bp, synthetic construct
  source 1..80: mol_type = other DNA
ctgcgccactgacgccctcatgaccgggtacactggcgacttcgactctgtaattgactgcaatgttgcggtcactcaga

SEQ ID NO: 116576 - DNA, 80 bp, synthetic construct
  source 1..80: mol_type = other DNA
tctctttaactgggcagtacgcaccaagaccaaactcactccactgccagccgctagccagttggacttatccaattggt

SEQ ID NO: 116577 - DNA, 80 bp, synthetic construct
  source 1..80: mol_type = other DNA
ccatcatgtttgactcctcagtcaggtggcccgtcaatgacaggccgatgagcccaaatgagtatgaaatcaagcgcact

SEQ ID NO: 116578 - DNA, 80 bp, synthetic construct
  source 1..80: mol_type = other DNA
attttcccagaaaggttaatgataaccttgcaaaacggcttgcctgactttatgagtcaaagtatgctgcacaattatcg

SEQ ID NO: 116579 - DNA, 80 bp, synthetic construct
  source 1..80: mol_type = other DNA
agagaagaaactgggagagttcggagtggcgaaaggaagccgggccatttggtacatgtggctggggagtcgctttctgg

SEQ ID NO: 116580 - DNA, 80 bp, synthetic construct
  source 1..80: mol_type = other DNA
ggtggcccgtgcggtcgcggcggcacgccccgcggagcggccccgggcggccgcggtcgcgtcgacgtcctgcgccgcgt

SEQ ID NO: 116581 - DNA, 80 bp, synthetic construct
  source 1..80: mol_type = other DNA
ctatccctcctatcccctgccctagccacttctgctgattactctaagtgcaaattcgcagacatatggaatttcttaga

SEQ ID NO: 116582 - DNA, 80 bp, synthetic construct
  source 1..80: mol_type = other DNA
cgggggtgcttgcagtcattaccatctttaccttgaccccgcattataagcaactgcttgtccaattgatctggtggacc

SEQ ID NO: 116583 - DNA, 80 bp, synthetic construct
  source 1..80: mol_type = other DNA
gcccaccatgcgccggggccagccctaccccgccaactacccctacccgctcattggcaaaagcgccgtcaccagcgtca

SEQ ID NO: 116584 - DNA, 80 bp, synthetic construct
  source 1..80: mol_type = other DNA
cctgggccatcaagtgggagtacgtcatcctcttgtttctcctacttgcagacgcacgcatctgctcctgtttgtggatg

SEQ ID NO: 116585 - DNA, 80 bp, synthetic construct
  source 1..80: mol_type = other DNA
cggccggccggtgcggccggtcgtcggcggcgtcggccgcgcgtgcctgggtgttgtgcagcagccggccgtcgttgcgg

SEQ ID NO: 116586 - DNA, 80 bp, synthetic construct
  source 1..80: mol_type = other DNA
tgggggttggagtgtatgtaggatgcgagccaatccttgaaggaccgttggcgtgcaccttggtggctgaggttagctgc

SEQ ID NO: 116587 - DNA, 80 bp, synthetic construct
  source 1..80: mol_type = other DNA
cggaggacaatcaaaaaataacgaaggggtggaaatgcaattttttgcatccgctgctgacaatcaaaatgatcccagtg

SEQ ID NO: 116588 - DNA, 80 bp, synthetic construct
  source 1..80: mol_type = other DNA
gcactacaagtgtgggtccctcctcttcgggtcaggggtgatcgcgatgctgtcatcctcatcgcgtgtgcattccaccc

SEQ ID NO: 116589 - DNA, 80 bp, synthetic construct
  source 1..80: mol_type = other DNA
agggcaatgtttttattggtcaaactcaggcaaacagaaacgacatcttgtcgtcaaagggatacacaaacttccccccc

SEQ ID NO: 116590 - DNA, 80 bp, synthetic construct
  source 1..80: mol_type = other DNA
tgtgatggatgaagcacatttcactgacccggctagtatagctgcgagagggtacatctcaaccaaagtcagtctgggtg

SEQ ID NO: 116591 - DNA, 80 bp, synthetic construct
  source 1..80: mol_type = other DNA
ggcgtggacaaagggggcggggctagggggcttgcggaaacagaagacgcgtgagataaaagaatcgcactaccctaacg

SEQ ID NO: 116592 - DNA, 80 bp, synthetic construct
  source 1..80: mol_type = other DNA
aacccgctatgcaggcttcatggcccaaagtggaacaattttgggccagacacatgtggaacttcattagcggcatccaa

SEQ ID NO: 116593 - DNA, 80 bp, synthetic construct
  source 1..80: mol_type = other DNA
ttgcgctgatggaaattgtcatgccttaaaaactattcatgttgtgagccatgttaaacatcgctggcctgtgtgtgatc

SEQ ID NO: 116594 - DNA, 80 bp, synthetic construct
  source 1..80: mol_type = other DNA
gcctggctcaggcgccccgttgcgtacagggggggggccgccggcgtgtttttgggaaccccggccgggcgcggggacgg

SEQ ID NO: 116595 - DNA, 80 bp, synthetic construct
  source 1..80: mol_type = other DNA
gggacccaccagggtgcctgagctggaccttggagttgggactcggtgtgttgtcttggctgaggacaaggtgaaagaaa

SEQ ID NO: 116596 - DNA, 80 bp, synthetic construct
  source 1..80: mol_type = other DNA
tatagacatgcaatggaggaattgccagacaccatagaaacgctgatgctcctagctttgatagctgtgttaactggtgg

SEQ ID NO: 116597 - DNA, 80 bp, synthetic construct
  source 1..80: mol_type = other DNA
tcttgatgagaacaacatgggccttctgtgaagttttgactttggccacaggaccaatcttgaccttgtgggaaggtaac

SEQ ID NO: 116598 - DNA, 80 bp, synthetic construct
  source 1..80: mol_type = other DNA
ttggatagcggcctccatcatactagagttctttttgatggtgctgctcattccagagccagacagacagcgcactccac

SEQ ID NO: 116599 - DNA, 80 bp, synthetic construct
  source 1..80: mol_type = other DNA
gcgtccaggatgaacccgccctcggcgagatcgaagcgcagggaagctgcgcatggggaaaagtggtccgggagccagaa

SEQ ID NO: 116600 - DNA, 80 bp, synthetic construct
  source 1..80: mol_type = other DNA
cccaggcgcctcctccctcgtgggatgtgatgtggaaatgcatgatccgccttaagcccacactacacgggcccacccct

SEQ ID NO: 116601 - DNA, 80 bp, synthetic construct
  source 1..80: mol_type = other DNA
tcccgcgtttcctgccgacacccaggaaacagaaacgcgcttggccctttataaagagatacgccaggcgctggacagtc

SEQ ID NO: 116602 - DNA, 80 bp, synthetic construct
  source 1..80: mol_type = other DNA
tgtgcgtgagtattgctacgaagcatccctagacacgctgtcaacagtggcaagatgccccacaactggagaagctcaca

SEQ ID NO: 116603 - DNA, 80 bp, synthetic construct
  source 1..80: mol_type = other DNA
agctcgctggagcaaagtacatccaagcctgcctcttgagagtgggggcgtggaccgggacctatgtctatgaccatcta

SEQ ID NO: 116604 - DNA, 80 bp, synthetic construct
  source 1..80: mol_type = other DNA
atgaaataagagttggaaataattttgccatggaaatcaatctaaatgccaacctgtggagaaatttcctgtactccaac

SEQ ID NO: 116605 - DNA, 80 bp, synthetic construct
  source 1..80: mol_type = other DNA
ctcacttggaatgctacagggacgaggaccactgaaactgttcatggccctggtggcattccttcgtttcctaacaatcc

SEQ ID NO: 116606 - DNA, 80 bp, synthetic construct
  source 1..80: mol_type = other DNA
gtcatgttgattctggtctcattggccgcggtggtagtaaatccgtcagtaaggaccgtcagagaagctggcattctgat

SEQ ID NO: 116607 - DNA, 80 bp, synthetic construct
  source 1..80: mol_type = other DNA
gggcccccgggccgccgaacggcgtcgcgttgtcgtcctcgcagccaaaatccccaaagttaaacacctccccggcgttg

SEQ ID NO: 116608 - DNA, 80 bp, synthetic construct
  source 1..80: mol_type = other DNA
ctgggtgccgaagcgaccggcggtctgcaccatgaccaagtggcaggaggtggacgagatgctccgcgccgagtacggcg

SEQ ID NO: 116609 - DNA, 80 bp, synthetic construct
  source 1..80: mol_type = other DNA
tcggtcaggtggagggccgagttggtgctgaacaccatggcgcccacgaggcccgcggcgcgcgccaggtacgccccgac

SEQ ID NO: 116610 - DNA, 80 bp, synthetic construct
  source 1..80: mol_type = other DNA
ggatccgtggctcgacgttggcagactgccccccgcaccgatgtgaggcctcagggacgaaggcgcggatcagggcgttg

SEQ ID NO: 116611 - DNA, 80 bp, synthetic construct
  source 1..80: mol_type = other DNA
acaaacctaccaagtggggtacctccacgcacccactgggagtgggaagagtaccaaagtgcccgcggcatacgcggccc

SEQ ID NO: 116612 - DNA, 80 bp, synthetic construct
  source 1..80: mol_type = other DNA
tggatgaactcgacagggtttacgaaaacgtgcggagcacctccctgcaacatcagtccccccggtaatgattcattaat

SEQ ID NO: 116613 - DNA, 80 bp, synthetic construct
  source 1..80: mol_type = other DNA
atattaatgcccaaagcacctgggaaaacctgttctaaaaccaaacaggtataagtattacaaatgcctccctttgtacc

SEQ ID NO: 116614 - DNA, 80 bp, synthetic construct
  source 1..80: mol_type = other DNA
atccacgtactcggcgtagcccttttgaaaaaacggcacgtactggcgcagggccggcacgccccccaagtcttccgaca

SEQ ID NO: 116615 - DNA, 80 bp, synthetic construct
  source 1..80: mol_type = other DNA
tcctaaacctcaaagacaaaccataagaaatactctccgccgcccacagaacgttaagttcccgggcggcggccagatcg

SEQ ID NO: 116616 - DNA, 80 bp, synthetic construct
  source 1..80: mol_type = other DNA
gtgaaagaacaagacgtacaagagaggatcagagcgttgcgggagcagtacagcgaaacctggcacatggacgaggaaca

SEQ ID NO: 116617 - DNA, 80 bp, synthetic construct
  source 1..80: mol_type = other DNA
agctccaacctccccctcaggaggtggaggcagctcccggctcggacgcggggtcttggtctacttgctccgaggaggat

SEQ ID NO: 116618 - DNA, 80 bp, synthetic construct
  source 1..80: mol_type = other DNA
acgccctcatgacggggtacactggagacttcgacaccgtgattgactgcaacgtggcggtcactcaaaccgtggacttc

SEQ ID NO: 116619 - DNA, 80 bp, synthetic construct
  source 1..80: mol_type = other DNA
gggagtaacggctaagctcctctcagttgaggaagcttgtgacctcactcccccacactcggctcgctcaaagtttgggt

SEQ ID NO: 116620 - DNA, 80 bp, synthetic construct
  source 1..80: mol_type = other DNA
ctcttgtggggtacaactgctaccaggatcgagactgagaacaaggtggtggtactggactcttttgagccattggtggc

SEQ ID NO: 116621 - DNA, 80 bp, synthetic construct
  source 1..80: mol_type = other DNA
ccaacagggctggggccctatcacatatgctaacatgagcggcagctccgaggataaaccatactgttggcactacgccc

SEQ ID NO: 116622 - DNA, 80 bp, synthetic construct
  source 1..80: mol_type = other DNA
atagtaccgccctgaactgcaacgaatccataaacaccggattcttagctgggttgttttactacaataagtttaactcc

SEQ ID NO: 116623 - DNA, 80 bp, synthetic construct
  source 1..80: mol_type = other DNA
ggaagagaagtgctgctgggcccggccgactccctaaccaacggagggtggaggcttttagcacccattacggcgtacgc

SEQ ID NO: 116624 - DNA, 80 bp, synthetic construct
  source 1..80: mol_type = other DNA
gcttgtggatgatgctaatgatggcacaagtcgaggctgccctcgaaaaccttgttgttctgaacgcaacgtctctagca

SEQ ID NO: 116625 - DNA, 80 bp, synthetic construct
  source 1..80: mol_type = other DNA
aactcacatcgcttggcctaaacgccgttgccttctacaggggtgtggatgtctccgtcatcccaacatctggtgacgta

SEQ ID NO: 116626 - DNA, 80 bp, synthetic construct
  source 1..80: mol_type = other DNA
tgatgatgacccacttcttttccatactccaagcccaggagcagcttgaaaaagccctagactttgaaatgtacggggct

SEQ ID NO: 116627 - DNA, 80 bp, synthetic construct
  source 1..80: mol_type = other DNA
ttcttcacccccagtaccctcctccctcccttcctcccccgttatcccactcgtcaagggcgccccggtgtggttcaaca

SEQ ID NO: 116628 - DNA, 80 bp, synthetic construct
  source 1..80: mol_type = other DNA
tgtaagtcacatgacctgaggtttctggtggggggctataaaagggtgcgggtccttgatcttcatcgctttcttctgca

SEQ ID NO: 116629 - DNA, 80 bp, synthetic construct
  source 1..80: mol_type = other DNA
cgcgtagccaacggcgaggccgaactggaagagggaaaccaggggtgtatcggtacgtttctcaaggagaaaggccctca

SEQ ID NO: 116630 - DNA, 80 bp, synthetic construct
  source 1..80: mol_type = other DNA
tcacgtaggcgaacatgctgtcaaagtgcggcggatcgaagctaaggcccaccgtcacgaccgttgtgtagatgaccacc

SEQ ID NO: 116631 - DNA, 80 bp, synthetic construct
  source 1..80: mol_type = other DNA
ggcaaggtacgttcaggcagcagtgcttaccctcggaaggtggactggcacttacatctatgaccacctctcccccatga

SEQ ID NO: 116632 - DNA, 80 bp, synthetic construct
  source 1..80: mol_type = other DNA
ggtgggagggggacttactttgcaagaaggaagtctgactgtaaaccctaaggctcccttgcaacttgcaaatgataaaa

SEQ ID NO: 116633 - DNA, 80 bp, synthetic construct
  source 1..80: mol_type = other DNA
gaggacctcctggaagacaaccaaacaccaattgacaccaccatcatggcaaagaacgaggtcttctgcgtcgcgccaga

SEQ ID NO: 116634 - DNA, 80 bp, synthetic construct
  source 1..80: mol_type = other DNA
gcgtgcagcacagcggaggacagcggcaggcatcatgaaaaatgcggttatcgacggcatggtggccaccgacgtccccg

SEQ ID NO: 116635 - DNA, 80 bp, synthetic construct
  source 1..80: mol_type = other DNA
accacttcactaatctagcatttcaactgggcagaaggagggagggggaaggggtcattggaccctatgatgttgaaaaa

SEQ ID NO: 116636 - DNA, 80 bp, synthetic construct
  source 1..80: mol_type = other DNA
cgggttttttggaggacttgagtcatcccgcgtttcctgccgacacccaggaaacagaaacgcgcttggccctttataaa

SEQ ID NO: 116637 - DNA, 80 bp, synthetic construct
  source 1..80: mol_type = other DNA
gctgggtctgtacggcaatggtctgaaatcaaatgatgtttacatcagcagcatcgctcagggcaatgtcgaaaagagtc

SEQ ID NO: 116638 - DNA, 80 bp, synthetic construct
  source 1..80: mol_type = other DNA
ggttgtggggggggcgcttatgacatcatcatctgtgacgaatgccattccaccgatgctacgacaatccttggcatagg

SEQ ID NO: 116639 - DNA, 80 bp, synthetic construct
  source 1..80: mol_type = other DNA
tgaataaataaacaagcttgttgttgatttaaaatcaagtgtttttatttcatttttcgcgcacggtatgccctagacca

SEQ ID NO: 116640 - DNA, 80 bp, synthetic construct
  source 1..80: mol_type = other DNA
aatgctgaacgcctggttgagtttggagttcctcatgccgtgaagatggatgtttacaaccttggggaccagactggggt

SEQ ID NO: 116641 - DNA, 80 bp, synthetic construct
  source 1..80: mol_type = other DNA
caagtgctggaccccagtgacacccacagtggcagtcaagtacgtcggagcaaccaccgcttcggtacgcagtcatgtgg

SEQ ID NO: 116642 - DNA, 80 bp, synthetic construct
  source 1..80: mol_type = other DNA
gcaggcagagctccagcctgcgcgcgtgcgacggcaggctcttgcgggaggcccggcgctccacgccggggttcccggcg

SEQ ID NO: 116643 - DNA, 80 bp, synthetic construct
  source 1..80: mol_type = other DNA
gtacagcaatctgtaagtttgtatcttatgcgtgagggtgccacccccagtgccgccttagacatgacagcgcgcaatat

SEQ ID NO: 116644 - DNA, 80 bp, synthetic construct
  source 1..80: mol_type = other DNA
aaactccttccgcaactccctggagttcctttcttgtcttgccagaagggatatagggtggtgtggcgtggagatgggat

SEQ ID NO: 116645 - DNA, 80 bp, synthetic construct
  source 1..80: mol_type = other DNA
tgggggcggcttttttccaactagcttcagtggacttacagattggagtccacggaatcttgaatgccgcagccatagca

SEQ ID NO: 116646 - DNA, 80 bp, synthetic construct
  source 1..80: mol_type = other DNA
ccccccatgtaacatctacccgggctctgagcccagtggggggggaaacgacactaaattggtgtgccacaccgattgct

SEQ ID NO: 116647 - DNA, 80 bp, synthetic construct
  source 1..80: mol_type = other DNA
gacgttcgtgttattgagaatcacggggtagaggatgaactaccaaattattgctttcctcttagcgcagtaggtgaaat

SEQ ID NO: 116648 - DNA, 80 bp, synthetic construct
  source 1..80: mol_type = other DNA
ggggctactgctcatggcgggctcataaaagtaatatcatagcctgcttgcaacactgcggtggaaacatctcatttgca

SEQ ID NO: 116649 - DNA, 80 bp, synthetic construct
  source 1..80: mol_type = other DNA
cgtggcgtcccacccccagctccaggccccgggcgtcccggaacgccgccggacatagcgccaggggcaagttgccgttc

SEQ ID NO: 116650 - DNA, 80 bp, synthetic construct
  source 1..80: mol_type = other DNA
cccgccggcccctttggggccggcgaggtcgccccgttggtccgcggtcggctccgccccaaagggtgcgaggccgcagg

SEQ ID NO: 116651 - DNA, 80 bp, synthetic construct
  source 1..80: mol_type = other DNA
atatgaaaacatctcagggtcccaagaggacaagccatattgctggcattaccccccccgcccctgcggaattgttccag

SEQ ID NO: 116652 - DNA, 80 bp, synthetic construct
  source 1..80: mol_type = other DNA
gggcgtatgctgataacgtggaggcggcggcttcactgggactgttgacaatcgctgtcattaccatattcactcttact

SEQ ID NO: 116653 - DNA, 80 bp, synthetic construct
  source 1..80: mol_type = other DNA
accaatgttgtgacttggcccccgaggcacgtgttgccataaagtctctcaccgagaggctttacgtagggggccccctg

SEQ ID NO: 116654 - DNA, 80 bp, synthetic construct
  source 1..80: mol_type = other DNA
atgtgccctccctcctcagactgtgaccccaacgcctccgcccaggaggcgacgggccatagtcttgaaccagaacaatg

SEQ ID NO: 116655 - DNA, 80 bp, synthetic construct
  source 1..80: mol_type = other DNA
ctcgcccctgggcagggaggccgtggaacaatttttttgtcacgtgcgcgcccaactgaatatcggggagtacgtcaaac

SEQ ID NO: 116656 - DNA, 80 bp, synthetic construct
  source 1..80: mol_type = other DNA
cgggataaaaactacggatggagaaccggactccacacattgagacagaagaagttgtcagcccagaaccccacacgagt

SEQ ID NO: 116657 - DNA, 80 bp, synthetic construct
  source 1..80: mol_type = other DNA
agcacctgcgctccatcagctccagcggcatggccgcccgcgcggcagagcatcgacgcgtcaagattaaaattaaggcg

SEQ ID NO: 116658 - DNA, 80 bp, synthetic construct
  source 1..80: mol_type = other DNA
ggccctatgttcaactcaaagggccagtcatgtggctatcgcaggtgtcgtgccagtggtgtccttactaccagtctggg

SEQ ID NO: 116659 - DNA, 80 bp, synthetic construct
  source 1..80: mol_type = other DNA
atcgggaaacgccagctcattagatcctcctgatttacattcaatatcgaaacataacaacttgtagtcaggccatgagt

SEQ ID NO: 116660 - DNA, 80 bp, synthetic construct
  source 1..80: mol_type = other DNA
ttacatcctgcagtacagcctgcttaagacaccatatttcgtgcgagctcacatccttttgcgtgcttgcatgtttctcc

SEQ ID NO: 116661 - DNA, 80 bp, synthetic construct
  source 1..80: mol_type = other DNA
tgccgacatatcaggccccagtgatgacaagccatattgctggcactatcctccgcggccgtgcggagtggtgccagccc

SEQ ID NO: 116662 - DNA, 80 bp, synthetic construct
  source 1..80: mol_type = other DNA
agtgcagttcgtccccatagaacaactcgaggttacgaggcggtctccgtcgtttaccgacaattcgacgcctcctgtgg

SEQ ID NO: 116663 - DNA, 80 bp, synthetic construct
  source 1..80: mol_type = other DNA
gtggaggctcgattcgacgccaccacggaacccgtgtgtaagcttccttgtttggaggccagacggtacggcccggagtg

SEQ ID NO: 116664 - DNA, 80 bp, synthetic construct
  source 1..80: mol_type = other DNA
ggtagcggccgaggtgggcgcgacggcgtgatcgggctttcgggaagcggccgaggtgtgcgcgacggcgcgatcgggct

SEQ ID NO: 116665 - DNA, 80 bp, synthetic construct
  source 1..80: mol_type = other DNA
ggcagtaagacgctggcgggcccaaaaggcccgttcctgcagacttacacgtcagtcgatgaggacttggtgtggtggcc

SEQ ID NO: 116666 - DNA, 80 bp, synthetic construct
  source 1..80: mol_type = other DNA
aaacccaaattcatgaaagatggtgttgatgggtcggctgagaaaggcgcccgagagtttggcgtacatgttttgggccg

SEQ ID NO: 116667 - DNA, 80 bp, synthetic construct
  source 1..80: mol_type = other DNA
atttactgacatacatatataaaataacggttagtaaacctcccaacccagttcccaacatcataacataaaaataaata

SEQ ID NO: 116668 - DNA, 80 bp, synthetic construct
  source 1..80: mol_type = other DNA
ttgcaaaattgatcaggacaaagactccaaacttacttttgtattaactaaatgtgggagtcagattttggctaatatgt

SEQ ID NO: 116669 - DNA, 80 bp, synthetic construct
  source 1..80: mol_type = other DNA
accttgacccccagaccggcgaggaactgaaccttccatcacctctgtgtgctactgcatcctctccccattcgcagcat

SEQ ID NO: 116670 - DNA, 80 bp, synthetic construct
  source 1..80: mol_type = other DNA
acctgcggttgtcgctggccaagtttagcattgcgtgcaccaagacctcctcgttttcgggaaacgccccgcgccaccac

SEQ ID NO: 116671 - DNA, 80 bp, synthetic construct
  source 1..80: mol_type = other DNA
cagcttgaacaggcccttgattgcgaaatctacggagcctgctactccatagaaccactggacctacctccaatcattca

SEQ ID NO: 116672 - DNA, 80 bp, synthetic construct
  source 1..80: mol_type = other DNA
ttctggctgacggtggctgctctgggggggcgtatgacatcatcatatgcgatgagtgccactccaccgaccctaccacc

SEQ ID NO: 116673 - DNA, 80 bp, synthetic construct
  source 1..80: mol_type = other DNA
ccccatgcggaggaatgtgaaaagattcggggcaaaagaaggtatatctattactagccccttcctggacgggtgcgatc

SEQ ID NO: 116674 - DNA, 80 bp, synthetic construct
  source 1..80: mol_type = other DNA
atcgtgctgatcatgttctcgggagtggacgcgcgcacatacaccaccggtggcgctgtggctcgctctgcttccgggtt

SEQ ID NO: 116675 - DNA, 80 bp, synthetic construct
  source 1..80: mol_type = other DNA
gaaagacggtctggtttgtgccaagcgtgaagatgggaaatgaaatagctttgtgtttacagcgtgctgggaaaaaggtg

SEQ ID NO: 116676 - DNA, 80 bp, synthetic construct
  source 1..80: mol_type = other DNA
caggatgtctatctttcctgtaagctggacccggaggccgaaattgctatacgctccctcactgagcggctttacctagg

SEQ ID NO: 116677 - DNA, 80 bp, synthetic construct
  source 1..80: mol_type = other DNA
agatcgtgtccacagcttctcagacattcttggctacatgtgccaacggagccctttggactgtctatcacggggcggga

SEQ ID NO: 116678 - DNA, 80 bp, synthetic construct
  source 1..80: mol_type = other DNA
cgggggggacatttatcacagcgtgtcccgcgcccgaccccgctatttgctcctgtgcctactcctactctctgtaggtg

SEQ ID NO: 116679 - DNA, 80 bp, synthetic construct
  source 1..80: mol_type = other DNA
aattttgaaagtttataacccattaataccatatatggacatccatagggggggttacataaatactaagcctctgtaca

SEQ ID NO: 116680 - DNA, 80 bp, synthetic construct
  source 1..80: mol_type = other DNA
cggaggacgcgcactggaggctgtcgcgaatggcggccaggcgcgcccacgccaaccgcgcgccggggtgctcggcgacg

SEQ ID NO: 116681 - DNA, 80 bp, synthetic construct
  source 1..80: mol_type = other DNA
ccgtgtttggagagattaaatcgtgcacctggccagaaacacacacgctttggggagatggtgttgaggaaagtgagtta

SEQ ID NO: 116682 - DNA, 80 bp, synthetic construct
  source 1..80: mol_type = other DNA
gggcggtggtgctgcagcagcgcgcgaataaactgctgccgccgccgctccgtcctgcaggaatacaacatggcagtggt

SEQ ID NO: 116683 - DNA, 80 bp, synthetic construct
  source 1..80: mol_type = other DNA
agcttgaaggcgcagtgctccatacccctggatgtgtcccctgtgagcggaccggtaacaggtctcggtgttggctaccg

SEQ ID NO: 116684 - DNA, 80 bp, synthetic construct
  source 1..80: mol_type = other DNA
ggtgggatctgcaatcatgcccacatccagatcttcagcattggcaatgctgaacggggtcatcttgcaggtctgcctac

SEQ ID NO: 116685 - DNA, 80 bp, synthetic construct
  source 1..80: mol_type = other DNA
ttccagccgcgtcgtcattggactgtccaagactgcaactgttccatctatgttggccatatcaccggccacaggatggc

SEQ ID NO: 116686 - DNA, 80 bp, synthetic construct
  source 1..80: mol_type = other DNA
acgcagacaaggccgccgccccggggcgatccaaggggctgtcgggcgtctgcgggcgctgctgttccatcatcctctcg

SEQ ID NO: 116687 - DNA, 80 bp, synthetic construct
  source 1..80: mol_type = other DNA
caggacgcacgcgtacagcgcccgccacagagtcgggttctccaggggctccagcggtgaggcggccggcgtcgtcgcgg

SEQ ID NO: 116688 - DNA, 80 bp, synthetic construct
  source 1..80: mol_type = other DNA
gcgcgtgctgcccagaagagaacggcagctggcatcatgaagaaccctgttgtggatggaatagtggtgactgacattga

SEQ ID NO: 116689 - DNA, 80 bp, synthetic construct
  source 1..80: mol_type = other DNA
caacaaagaggcattggtggagttcaaggacgcccacgccaagaggcaaactgttgtggttctggggagccaagagggag

SEQ ID NO: 116690 - DNA, 80 bp, synthetic construct
  source 1..80: mol_type = other DNA
ttttcccgaagatgcccggcattcccttcatttcctgccaaaaggggtataggggcgtctgggcaggcactggcatcatg

SEQ ID NO: 116691 - DNA, 80 bp, synthetic construct
  source 1..80: mol_type = other DNA
atacatcatggcctgcatgtcggctgacctagaggtgattaccagcacttgggtggttgctggtggaatacttgccgcac

SEQ ID NO: 116692 - DNA, 80 bp, synthetic construct
  source 1..80: mol_type = other DNA
tggggaaagtaagaccgatgtattcctccttaacagcaccagacccccttcggggttttggtatggttgcacttggatga

SEQ ID NO: 116693 - DNA, 80 bp, synthetic construct
  source 1..80: mol_type = other DNA
agtgccatgcagagaccaagatgagctggttggcagggcaagggtgtcaccagggtgtggatggagtgtgcgagagacgg

SEQ ID NO: 116694 - DNA, 80 bp, synthetic construct
  source 1..80: mol_type = other DNA
ttttcccacccaaacatcgaccggtccgcgctagttccgcgtcgacggcgagggtcgtcggggtccgtgggtctcgcccc

SEQ ID NO: 116695 - DNA, 80 bp, synthetic construct
  source 1..80: mol_type = other DNA
gaggcgcctgtttgatgtatgacgtcacatccaggccggcggaaaccgtaacggcatatgcaaattggaaactgtcctgt

SEQ ID NO: 116696 - DNA, 80 bp, synthetic construct
  source 1..80: mol_type = other DNA
cgcctcgagggcctgtgaggacgccggaaccgtgggcccgtcgtcctcgcccgcctcggcgaccggcggcccggccgggt

SEQ ID NO: 116697 - DNA, 80 bp, synthetic construct
  source 1..80: mol_type = other DNA
ttatagtcagtaccaatgctaacggattgaaaacctataaactccgttcggaacttccacgtcctactttaggaggactg

SEQ ID NO: 116698 - DNA, 80 bp, synthetic construct
  source 1..80: mol_type = other DNA
tctgtgagtgctacgacgcaggggctgcctggtacgaactcacgcccgcggagactaccgttaggcttagggcgtatttc

SEQ ID NO: 116699 - DNA, 80 bp, synthetic construct
  source 1..80: mol_type = other DNA
taccaagtcagagtattatgcaaggtagacacttgcatattaatttcctctcaaagcagcgggtatcatacgagaaagcc

SEQ ID NO: 116700 - DNA, 80 bp, synthetic construct
  source 1..80: mol_type = other DNA
ccctcattgcaatggatttgggagagttgtgtgaggatacaatgacctacaaatgcccccggatcactgaagcggaacct

SEQ ID NO: 116701 - DNA, 80 bp, synthetic construct
  source 1..80: mol_type = other DNA
caccgctaacatcagcggcccgtcggacgacaagccttactgctggcactatccaccccgaccatgcggggtggtgcctg

SEQ ID NO: 116702 - DNA, 80 bp, synthetic construct
  source 1..80: mol_type = other DNA
aggcaacctcatcttccttggccctgctgatgatattcggggcggaggctggcgcctccttgccccgatcacggcatatg

SEQ ID NO: 116703 - DNA, 80 bp, synthetic construct
  source 1..80: mol_type = other DNA
tcccgcctactgaggagggttcgcaggacgagtctggaaaggggacttccattccaacttttagtggaacaccaccatct

SEQ ID NO: 116704 - DNA, 80 bp, synthetic construct
  source 1..80: mol_type = other DNA
atcaaaaaccaagttgcctccattttttttgatgcgtttcttaccttgcgtctccatgagtctgtgtccagcttccgtga

SEQ ID NO: 116705 - DNA, 80 bp, synthetic construct
  source 1..80: mol_type = other DNA
gtgcgcgtgcccgtgcgcacccgtcctcctcgtccctgatctaatgcttgtgtcctcccccgcaagcgacgatgtcaaag

SEQ ID NO: 116706 - DNA, 80 bp, synthetic construct
  source 1..80: mol_type = other DNA
tagcagagcagttcaagcaaaaagtcctcggtttgatacagactacaactaagcaagctgaggagctcaagccggcggtt

SEQ ID NO: 116707 - DNA, 80 bp, synthetic construct
  source 1..80: mol_type = other DNA
gggttggacatgaaggaggacacgcccgacacggccgataccacgccgcccacgatgcccatcaccaccttgccgaccgc

SEQ ID NO: 116708 - DNA, 80 bp, synthetic construct
  source 1..80: mol_type = other DNA
caactacacagcacaaatcggggcgtctcaggcagcgaaattcaccatcacgcccaacgccccttcaataaccctgaagc

SEQ ID NO: 116709 - DNA, 80 bp, synthetic construct
  source 1..80: mol_type = other DNA
gacagtgcaatgtaataaaaatatgttaactgttcactggtttttattgctttttgggcggggactcaggtatataagta

SEQ ID NO: 116710 - DNA, 80 bp, synthetic construct
  source 1..80: mol_type = other DNA
gtacatcgccacatgcatgcaagctgaccttgaggtcatgaccagcacctgggtgttgcttggaggggttctcgcggccg

SEQ ID NO: 116711 - DNA, 80 bp, synthetic construct
  source 1..80: mol_type = other DNA
ggtcgaaatgagcccactcttgttttctaccactgagctctcaatattgccttgcagcttcaccacgatgcctgcactat

SEQ ID NO: 116712 - DNA, 80 bp, synthetic construct
  source 1..80: mol_type = other DNA
gccacttggccgaagctcgaacagttctggcacaaacacctgtggaactttgtcagtggcatccaatacttagctggcct

SEQ ID NO: 116713 - DNA, 80 bp, synthetic construct
  source 1..80: mol_type = other DNA
gcgcttgtcattaccaccgccgcgtccccggccgatatctcaccctggtcgaggcggtgttgtgtggtgtagatgttcgc

SEQ ID NO: 116714 - DNA, 80 bp, synthetic construct
  source 1..80: mol_type = other DNA
gcgagccagctctcggcgccatcgctgcgggctacctgtaccacccatggcaagggctacgacattgacatggtagatgc

SEQ ID NO: 116715 - DNA, 80 bp, synthetic construct
  source 1..80: mol_type = other DNA
cgtcaccgcagccaatctagtaacagcgtatgaacaaactgttacagaggaacgtaattttcaaaagagttttaataatc

SEQ ID NO: 116716 - DNA, 80 bp, synthetic construct
  source 1..80: mol_type = other DNA
cgacgcccgaaaggccatcaagtccctcacagagaggctttacatcggtggccctcttaccaattcaaaaggggagaact

SEQ ID NO: 116717 - DNA, 80 bp, synthetic construct
  source 1..80: mol_type = other DNA
ttccgatctgggcaaggcctgactacaacccacctctgattgagacatggaaaaaacctgaatatgtcccacccacggtc

SEQ ID NO: 116718 - DNA, 80 bp, synthetic construct
  source 1..80: mol_type = other DNA
gggcggtggtcagatcgttggtggagtttacttgttgccgcgcaggggccctaggttgggtgtgcgcgcaactcggaaga

SEQ ID NO: 116719 - DNA, 80 bp, synthetic construct
  source 1..80: mol_type = other DNA
caccctgccgggcaacccggcagtagcatcgctgatgtcattcccagcgtctttgacctgcccgttgaacaccacaacaa

SEQ ID NO: 116720 - DNA, 80 bp, synthetic construct
  source 1..80: mol_type = other DNA
aaccctagtattcaacctgccacctccctcccaacacacagagtacacagtcctttctccccggctggccttaaaaagca

SEQ ID NO: 116721 - DNA, 80 bp, synthetic construct
  source 1..80: mol_type = other DNA
atcttatcctacacggtgtaagcttctatgggtttaacaatacctgtgtggaagcctggaccgatgtaagggttcggggc

SEQ ID NO: 116722 - DNA, 80 bp, synthetic construct
  source 1..80: mol_type = other DNA
taacaggttcagaccccgttgagatacaaacacaaggaggggggtcaccattatttcatcagatcccgtgggtgtggttt

SEQ ID NO: 116723 - DNA, 80 bp, synthetic construct
  source 1..80: mol_type = other DNA
actacagagtcaaggttttcaaagaaagaaaagatcaggcactattattcagaccgcttactaccaaaggaagcatgatc

SEQ ID NO: 116724 - DNA, 80 bp, synthetic construct
  source 1..80: mol_type = other DNA
ggcatcagctctcagaaagcttggagcgccgcccctcagagcgtggaagagccgagctcgaacggtgagggcgtccctca

SEQ ID NO: 116725 - DNA, 80 bp, synthetic construct
  source 1..80: mol_type = other DNA
gacccgcgccttggcggcctcggacgcgttggcgctcgcgcccgcgaacaacacgcggctcttgacgcgcagctccttgg

SEQ ID NO: 116726 - DNA, 80 bp, synthetic construct
  source 1..80: mol_type = other DNA
aagacctccgaacgatcacagcctcgggggaggcgccagcgcatccctaaggctcgtccctctcaagggaagagctggtg

SEQ ID NO: 116727 - DNA, 80 bp, synthetic construct
  source 1..80: mol_type = other DNA
ttccggggcgggggtgattagctgcgaggagagcaggtttctcaacagctgggacttgccgcagccggtcgtgccgtaga

SEQ ID NO: 116728 - DNA, 80 bp, synthetic construct
  source 1..80: mol_type = other DNA
cgaagttgaaccaccctttggcgattcttacatcgtcgtcggaagaggcaccacccagattaactaccactggcacaaag

SEQ ID NO: 116729 - DNA, 80 bp, synthetic construct
  source 1..80: mol_type = other DNA
gcccattgtacttaatacaggccgccatcaccaacaccccctattttgtgcgtgcacatgtactggtccgcctttgcatg

SEQ ID NO: 116730 - DNA, 80 bp, synthetic construct
  source 1..80: mol_type = other DNA
ccattctgaccaaacaggaacgcggcaaaagcctgctgtttaaaaccagcgcgggcgtgaacatggaaacctgcaccctg

SEQ ID NO: 116731 - DNA, 80 bp, synthetic construct
  source 1..80: mol_type = other DNA
gcagaccgccggtcgcttcggcacccagtcccaggccacggtaaacttgggggtcgtcagcaagttgcgggtcgtcggcg

SEQ ID NO: 116732 - DNA, 80 bp, synthetic construct
  source 1..80: mol_type = other DNA
aaaaaagtgctgctaaaagatacattgtgagcaatgtctatattggaggcttgccagataaaactgttgttataactatt

SEQ ID NO: 116733 - DNA, 80 bp, synthetic construct
  source 1..80: mol_type = other DNA
ataacgggatagaaagtctggtggacaaactaaaccgctggaagacctacgctcaggatcatagggacgcgcccgcaccg

SEQ ID NO: 116734 - DNA, 80 bp, synthetic construct
  source 1..80: mol_type = other DNA
atgcaggataaatatggcctggagcaaataaaaacccattggttgaacccagacgaggattgggaggaggccattaagaa

SEQ ID NO: 116735 - DNA, 80 bp, synthetic construct
  source 1..80: mol_type = other DNA
cggccgcaacagctattgcaaacctagctgctccgcgacgaggaaacgtatactgggtgcgcgactcagtgaccgggacg

SEQ ID NO: 116736 - DNA, 80 bp, synthetic construct
  source 1..80: mol_type = other DNA
aagggaggtctgaaactcaccccggggctgtggacctcggcctacttgcgcaagttcgtgcccgaggactaccatccctt

SEQ ID NO: 116737 - DNA, 80 bp, synthetic construct
  source 1..80: mol_type = other DNA
gcatcccctactttgtgagagcgcatgccctcattaaggtttgtgggttgctacgagggatgacccacggcaggtatttc

SEQ ID NO: 116738 - DNA, 80 bp, synthetic construct
  source 1..80: mol_type = other DNA
aaggtcacctttgacagactgcaagtcctggacgaccattaccgggacgtgctcaaggagataaaggcgaaggcgtccac

SEQ ID NO: 116739 - DNA, 80 bp, synthetic construct
  source 1..80: mol_type = other DNA
ccaagcgccaactgtgtaattaaagagggagaagattccccagactgtaagctcactttagttctagtgaagaatggagg

SEQ ID NO: 116740 - DNA, 80 bp, synthetic construct
  source 1..80: mol_type = other DNA
taggttcttcctatttaacatcctcttctgtctattcaacatctgtgctgccttcgcggccgtctctcacgcctcgccag

SEQ ID NO: 116741 - DNA, 80 bp, synthetic construct
  source 1..80: mol_type = other DNA
ggggccccaacgacccccggcgaaggtcccgcaatttgggtaaggtcatcgataccctcacgtgtggcttagccgacctc

SEQ ID NO: 116742 - DNA, 80 bp, synthetic construct
  source 1..80: mol_type = other DNA
gtgattggtccactccatgtgctggttcatggttacgtgacgtctgggactgggtctgcacggtgttgtcagacttcaaa

SEQ ID NO: 116743 - DNA, 80 bp, synthetic construct
  source 1..80: mol_type = other DNA
acctgggtgccgacaagcagaacaacatggtcaatccatgcacaccaccaatggatgactaatgaggacatgctcagtgt

SEQ ID NO: 116744 - DNA, 80 bp, synthetic construct
  source 1..80: mol_type = other DNA
ctcttcactgtctgtgcctttctgaagtgacaggactgtgccctgacatcatacaagctaattccatgtactctttctat

SEQ ID NO: 116745 - DNA, 80 bp, synthetic construct
  source 1..80: mol_type = other DNA
cggagatgatttggtggtcatcactgagagtgctggagtccccgaggatacggctaagctgcgagctttcacggaagcta

SEQ ID NO: 116746 - DNA, 80 bp, synthetic construct
  source 1..80: mol_type = other DNA
ctcagtcacacaatctttcttggggacgtctatttcgggggtcctctggacagtatatcacggagctggtaataagacct

SEQ ID NO: 116747 - DNA, 80 bp, synthetic construct
  source 1..80: mol_type = other DNA
ctgctgctattcgccggcgtcgacgcgacgacctacaccaccgggggaaccgtcggccgcgccgcggctggccttaccag

SEQ ID NO: 116748 - DNA, 80 bp, synthetic construct
  source 1..80: mol_type = other DNA
aggtggaggcgtcgggcatggccccggggcgcgtgggccttgccgtggtcctgtggagcctgttgtggctcggtgcggtg

SEQ ID NO: 116749 - DNA, 80 bp, synthetic construct
  source 1..80: mol_type = other DNA
attctgctcggccccgccgatggctacacctcgaaggggtggaagctcctggctcccatcacagcatatgcccagcagac

SEQ ID NO: 116750 - DNA, 80 bp, synthetic construct
  source 1..80: mol_type = other DNA
gacggcatgaccagcaagggatggaggctgcttgcgcccattacagcctacgcccagccgacgcgaggccttcttgggtg

SEQ ID NO: 116751 - DNA, 80 bp, synthetic construct
  source 1..80: mol_type = other DNA
acgcggaaacctacgtcaccgggggaagtgttggccgggccactgccggattcaccgactttttcagtcccggcgccaag

SEQ ID NO: 116752 - DNA, 80 bp, synthetic construct
  source 1..80: mol_type = other DNA
ctcatgcagagttacggttggaacctggtctcgctaaaaagtggggtggacgtattctacaaaccctcggagcctagtga

SEQ ID NO: 116753 - DNA, 80 bp, synthetic construct
  source 1..80: mol_type = other DNA
gagtgcgcctccagggcagccctcgtcgaggaagggcagcggattgctgagatgttgaaatccaagatacaaggcctact

SEQ ID NO: 116754 - DNA, 80 bp, synthetic construct
  source 1..80: mol_type = other DNA
gtgtacctggatgaacggcaccgggtttaccaaaacttgtggcgcaccaccttgccgcataaggccagacttcaaccgca

SEQ ID NO: 116755 - DNA, 80 bp, synthetic construct
  source 1..80: mol_type = other DNA
gtgtggtgtgctgctctatgtcatattcttggactggggccctcgtgacgccctgcgccgcagaggaggagaagttgccc

SEQ ID NO: 116756 - DNA, 80 bp, synthetic construct
  source 1..80: mol_type = other DNA
ctggggtagtgtgaaagaagaccgcatagcttacggaggcccatggaggtttgaccgaaaatggaatggaacagatgacg

SEQ ID NO: 116757 - DNA, 80 bp, synthetic construct
  source 1..80: mol_type = other DNA
tctctcaaggcaacttgcaccaccaaccatgactcccccgacgccgagctcatagaggccaacctcctgtggaggcagga

SEQ ID NO: 116758 - DNA, 80 bp, synthetic construct
  source 1..80: mol_type = other DNA
agaaaagaaaaaattaagacctaggtggcttgatgcccgcacttattcagatcccttagcactcaaggaattcaaagact

SEQ ID NO: 116759 - DNA, 80 bp, synthetic construct
  source 1..80: mol_type = other DNA
atccatcacactggctactggacccctgaccactctctgggagggatctccaggaaaattctggaataccacaatagcag

SEQ ID NO: 116760 - DNA, 80 bp, synthetic construct
  source 1..80: mol_type = other DNA
gggaggcaacatcacgagagtggaagccgaaaacaaagttgtggtccttgactcattcgaacccctgcggcccgaggagg

SEQ ID NO: 116761 - DNA, 80 bp, synthetic construct
  source 1..80: mol_type = other DNA
cctagtgctcaacccctcagtggcagccactttggggtttggtgcgtacatgtctaaggctcacggcattgagcctaaca

SEQ ID NO: 116762 - DNA, 80 bp, synthetic construct
  source 1..80: mol_type = other DNA
tgcagtggatgaaccgcctcattgctttcgcatcgcgaggcaatcatgtgtcccccacgcactacgtcccagaaaccgac

SEQ ID NO: 116763 - DNA, 80 bp, synthetic construct
  source 1..80: mol_type = other DNA
tggaacagggtgtggatagaggaaaatccatggatggaagacaaaactccagttacaacttgggaaaatgttccatatct

SEQ ID NO: 116764 - DNA, 80 bp, synthetic construct
  source 1..80: mol_type = other DNA
ctccccctgctgctactgctgtacccgcttctaagcctgtcgctaccccgaaaccagtcgccgtagccaggtcacgtccc

SEQ ID NO: 116765 - DNA, 80 bp, synthetic construct
  source 1..80: mol_type = other DNA
ggggttgaactcctacgtaataggatcgcagctcccctgtgagcctgagccggacgtcgcggtggtgacctcaatgctgc

SEQ ID NO: 116766 - DNA, 80 bp, synthetic construct
  source 1..80: mol_type = other DNA
cttcgggttgtcctgagcgtatgagtagctgtcggccgctacgagattttgaccagggttggggccctctgtcctatgct

SEQ ID NO: 116767 - DNA, 80 bp, synthetic construct
  source 1..80: mol_type = other DNA
gcaaacccgtgaccttagaactacctccacccgtgcccaccgttccgcccatgccggctccgacgcttggcaccgccgtt

SEQ ID NO: 116768 - DNA, 80 bp, synthetic construct
  source 1..80: mol_type = other DNA
cacaccacctccgggttcacgtcccttttctcatctggggcgtctcagaaaatccagcttgtgaataccaacggcagctg

SEQ ID NO: 116769 - DNA, 80 bp, synthetic construct
  source 1..80: mol_type = other DNA
tcggacgtacacagggccgaggctatcagaaggctccggcgggcgcgttcccgctgcaccgccgaggggacgccagccaa

SEQ ID NO: 116770 - DNA, 80 bp, synthetic construct
  source 1..80: mol_type = other DNA
ataattcgccattttctatgtaaaaatcgatgtcagaatggctggttatatccaataaattatcatcatccaacacctca

SEQ ID NO: 116771 - DNA, 80 bp, synthetic construct
  source 1..80: mol_type = other DNA
cgtcgcccgccccacgccaccgaattctcgtaggagacgacgacgaagcgctgcttggtcccgtagtgatggcgcaggac

SEQ ID NO: 116772 - DNA, 80 bp, synthetic construct
  source 1..80: mol_type = other DNA
tactgggatgctggtcctttgtcttactgctcatggcgctgccccaccaggcttacgcccttgacgcggcagagcaaggc

SEQ ID NO: 116773 - DNA, 80 bp, synthetic construct
  source 1..80: mol_type = other DNA
acagacgtggagtgcccacctacacatggggagagaatgagacagatgtcttcctactgaacagcacccgaccgccgcag

SEQ ID NO: 116774 - DNA, 80 bp, synthetic construct
  source 1..80: mol_type = other DNA
agatcggcgcaccacaggcaagtcctggggacgtccaggatatccctggcccctgtatgggaatgagggcctcgggtgcg

SEQ ID NO: 116775 - DNA, 80 bp, synthetic construct
  source 1..80: mol_type = other DNA
gtcactttacgcaatttcaaccgcgttcatgacaccattgctgaaacatttgataacatcggactatatcaacacgtctt

SEQ ID NO: 116776 - DNA, 80 bp, synthetic construct
  source 1..80: mol_type = other DNA
aaatcttgggtcctaagatgtgcagcaatacctggcatggcacttttcccattaatgccagcactaccggacctagcgtc

SEQ ID NO: 116777 - DNA, 80 bp, synthetic construct
  source 1..80: mol_type = other DNA
actggtggtccccaagatgaacttaaagctgacattgttatgtacactgaaaatataaatcttgaaactccagataccca

SEQ ID NO: 116778 - DNA, 80 bp, synthetic construct
  source 1..80: mol_type = other DNA
caatgttcccaaatatccaggaggaatatcaactgctatgtgcaaatataaaagcacaactccatgtggaggtataacaa

SEQ ID NO: 116779 - DNA, 80 bp, synthetic construct
  source 1..80: mol_type = other DNA
cacagcctcgcatacagcgagaggcatcacttcgctcttcgacgtgggcgcccagcagagacttcagctaataaacacca

SEQ ID NO: 116780 - DNA, 80 bp, synthetic construct
  source 1..80: mol_type = other DNA
gggctaaagtcatcgctgtcctactcctttttgctggagtagaggggaccaccaccattggccattcggtcggcaggtcg

SEQ ID NO: 116781 - DNA, 80 bp, synthetic construct
  source 1..80: mol_type = other DNA
ctggaataatgaaaaatccaacggtggatgggataataacaatagacctagaccctgtaatatatgattcaaaatttgaa

SEQ ID NO: 116782 - DNA, 80 bp, synthetic construct
  source 1..80: mol_type = other DNA
cctttccacattgcctgggaatccagcagttgcctcgctgatgtccttttctgcagcgttgaccagtcctctctcaactt

SEQ ID NO: 116783 - DNA, 80 bp, synthetic construct
  source 1..80: mol_type = other DNA
gtctactgtttcacgccgagtcctgtagtggtgggtaccactgacaagctcggcgtccctacgtacaactggtgggaaaa

SEQ ID NO: 116784 - DNA, 80 bp, synthetic construct
  source 1..80: mol_type = other DNA
gacacctacaccatcacgaccttcttctaacatggcccgtctcagaaactccagctcataaacaccaatggcaggtggca

SEQ ID NO: 116785 - DNA, 80 bp, synthetic construct
  source 1..80: mol_type = other DNA
attacatcacgggcatgacctctgataacatcaagtgcccatgtcaagtcccatcgcccgagttcttcacagagctcgac

SEQ ID NO: 116786 - DNA, 80 bp, synthetic construct
  source 1..80: mol_type = other DNA
atcccccgcatataaaatacgccctggtagcacgctcgttaaaataaaacgttacgccgttataagatacggttgaatga

SEQ ID NO: 116787 - DNA, 80 bp, synthetic construct
  source 1..80: mol_type = other DNA
cccgctaatgcttcttaaataaataaaagacacaactgtttgaaaagtcaagagtgtttatttgtttcttttgcggtagg

SEQ ID NO: 116788 - DNA, 80 bp, synthetic construct
  source 1..80: mol_type = other DNA
gtctactatctgacccgtgaccccacaaccccccttgcgcgagccgcatgggagacagcaagacacactccagtcaactc

SEQ ID NO: 116789 - DNA, 80 bp, synthetic construct
  source 1..80: mol_type = other DNA
gtgtcgtcgaacgccaggcggctgcttcgctggatggccttatagatctccggatcgatgcggacgggggtaatgatcag

SEQ ID NO: 116790 - DNA, 80 bp, synthetic construct
  source 1..80: mol_type = other DNA
atgcttaaagaagacccttccttagatattgcggactagaggggcgcaacacccagggaagctgtgccttgaagcctatg

SEQ ID NO: 116791 - DNA, 80 bp, synthetic construct
  source 1..80: mol_type = other DNA
tatcaattaacagtaattgacattcttccacccaaatgcatcattacttcaaagtacctcacaaataattattgtcacat

SEQ ID NO: 116792 - DNA, 80 bp, synthetic construct
  source 1..80: mol_type = other DNA
atgcacaccatatgcccttgtggcgcgaacttggctggccacataaagaacggctcgatgagaatcgtcgggccgaagac

SEQ ID NO: 116793 - DNA, 80 bp, synthetic construct
  source 1..80: mol_type = other DNA
gtggtctgcgcgaccgacgcactcatgactggctacactggggactttgactcggtcattgactgtaacgttgccgttac

SEQ ID NO: 116794 - DNA, 80 bp, synthetic construct
  source 1..80: mol_type = other DNA
gataccatgacctgtggatttgccgatctcatggggtacatccccgttcttggcgcccccctgggtggtgtcgccagggc

SEQ ID NO: 116795 - DNA, 80 bp, synthetic construct
  source 1..80: mol_type = other DNA
tttcgatggcccaactccacgcggattggtgcagcaccctgcatgcgccggtgcgggccaaccttccccccgctcattgc

SEQ ID NO: 116796 - DNA, 80 bp, synthetic construct
  source 1..80: mol_type = other DNA
cctcccgagcggtaatggctatactcagctccctgaccatcaccagtctactacgtagacttcatgagtggattaatggt

SEQ ID NO: 116797 - DNA, 80 bp, synthetic construct
  source 1..80: mol_type = other DNA
acatgcccgagggagatgacggcttcttgtgggacgacgtgtccgacagcatttttgtccctgcgcgttaccgcaagaag

SEQ ID NO: 116798 - DNA, 80 bp, synthetic construct
  source 1..80: mol_type = other DNA
gcctggttcgggagaatggacgccttgctgggtcctgcggccccgagagccccggcgccgtcctccaggcggaacgttac

SEQ ID NO: 116799 - DNA, 80 bp, synthetic construct
  source 1..80: mol_type = other DNA
accaagcagagacggcgggggcgagactggttgtgctcgccactgccactcctccgggctctgtcactgtgccccaccct

SEQ ID NO: 116800 - DNA, 80 bp, synthetic construct
  source 1..80: mol_type = other DNA
tgatttgtcctactggatagagagtggattaaatgacacctggaagcttgagcgtgcggttcttggcgatgtcaagtcct

SEQ ID NO: 116801 - DNA, 80 bp, synthetic construct
  source 1..80: mol_type = other DNA
gtcacgctaaccccggcgtataagatcctcatttgccggtgcttgtggtggctgagctatatgctagtcttggcagaagc

SEQ ID NO: 116802 - DNA, 80 bp, synthetic construct
  source 1..80: mol_type = other DNA
gatgatgaacaggaaatcttgaactacatgagcccacaccataggaagttggcgctggctgtaatggaaatgacatacaa

SEQ ID NO: 116803 - DNA, 80 bp, synthetic construct
  source 1..80: mol_type = other DNA
gaacgtcgttcaggatgtcctcgcccccgggcccgtggggcacggaggccacaaagcggcccccgcctggtggctccaga

SEQ ID NO: 116804 - DNA, 80 bp, synthetic construct
  source 1..80: mol_type = other DNA
ccccccaccccaacatagaggagtccgctctcggtcacgagggcgagatccctttctatgggaaggccatccccctagca

SEQ ID NO: 116805 - DNA, 80 bp, synthetic construct
  source 1..80: mol_type = other DNA
cgctgtcgttgtcatgctgaccatcctgacattgtctccacactacaagtcatggctggctcggggattgtggtggattc

SEQ ID NO: 116806 - DNA, 80 bp, synthetic construct
  source 1..80: mol_type = other DNA
acggcccaatgccggacggacgaggaggccagtgacgtggacgcctctccaccgccttcccccatcaccgactccagacc

SEQ ID NO: 116807 - DNA, 80 bp, synthetic construct
  source 1..80: mol_type = other DNA
ggctcaaggccaagctcatcccccgcttgcctggtatccccttcttgtcctgccaacggggctttagggtggaatggcga

SEQ ID NO: 116808 - DNA, 80 bp, synthetic construct
  source 1..80: mol_type = other DNA
tgagcgacgacctgggcgtttatcgcaacgagcgcatccacaaggccgtgagcgtgagccggcggcgcgagctcagcgac

SEQ ID NO: 116809 - DNA, 80 bp, synthetic construct
  source 1..80: mol_type = other DNA
caggaacagcttgaaaaggctctagattgcgagatctacggagcccactactccataaagcccctagacctacctctgat

SEQ ID NO: 116810 - DNA, 80 bp, synthetic construct
  source 1..80: mol_type = other DNA
gtatctacttcagtacagcctgctaaagacaccatacttcgtgcgggcgcacattctgttgcgggcctgcatgttcttcc

SEQ ID NO: 116811 - DNA, 80 bp, synthetic construct
  source 1..80: mol_type = other DNA
tcaatcctctaagcaattccctcattcgacaccacaatttggtgtactccactacaactcggagtgctgcgatgcggcaa

SEQ ID NO: 116812 - DNA, 80 bp, synthetic construct
  source 1..80: mol_type = other DNA
cctccgccctgcgcgcgcgagttgcgatacacagggttgcagcactggaacactatcagcgccgggtggtgcacgctggc

SEQ ID NO: 116813 - DNA, 80 bp, synthetic construct
  source 1..80: mol_type = other DNA
caaggctgggaatggtgctttgctttcatctgctgcgcttggtatgtgcggggacggctagtccccggtgtcacctacgg

SEQ ID NO: 116814 - DNA, 80 bp, synthetic construct
  source 1..80: mol_type = other DNA
ccggaataacctacacagatagaagatggtgctttgatggcacgaccaacaacaccatactggaagacagtgtgccggca

SEQ ID NO: 116815 - DNA, 80 bp, synthetic construct
  source 1..80: mol_type = other DNA
gggtccgcatggtactgatgacacacttcttttcaatactccaatcccaagagacactccacaaagcactcgacttcgac

SEQ ID NO: 116816 - DNA, 80 bp, synthetic construct
  source 1..80: mol_type = other DNA
tcctggaagcagagacccatttcctcagagcaacgcaccaatcatggatgaagaaagggaaattcctgagcgttcgtgga

SEQ ID NO: 116817 - DNA, 80 bp, synthetic construct
  source 1..80: mol_type = other DNA
ccgcaagcgtcccaggacttacaatcatatggtagacccactactcagcttctcttactgagactcagtcactttcattt

SEQ ID NO: 116818 - DNA, 80 bp, synthetic construct
  source 1..80: mol_type = other DNA
cgggtgaacgctgattctcacgacagcgcgtgccgcgcgcacgggttggtgtgatacaggcgggacaccagcaccaggag

SEQ ID NO: 116819 - DNA, 80 bp, synthetic construct
  source 1..80: mol_type = other DNA
cgaccgcttacagatggtagacgaccactacaatgcagtacttaaggagattaaggcacgagcatctagtgtgaaggcgc

SEQ ID NO: 116820 - DNA, 80 bp, synthetic construct
  source 1..80: mol_type = other DNA
cgaccttgccaggtaatccagctgttgcttctctcatgtctttctctgcttcccttactagcccgctatccacctccaca

SEQ ID NO: 116821 - DNA, 80 bp, synthetic construct
  source 1..80: mol_type = other DNA
tcgagggagacatggcatatacaggtatgtttcctccggtgaacgaccttccggaatgtttgactctgtggtgctctgcg

SEQ ID NO: 116822 - DNA, 80 bp, synthetic construct
  source 1..80: mol_type = other DNA
ctgatgctcagccgctgcctctggtggttgtgctacctgctggtcctggcagaggcccagatccaagtttgggtcccacc

SEQ ID NO: 116823 - DNA, 80 bp, synthetic construct
  source 1..80: mol_type = other DNA
ctatggcgcttgtgggacatggccatttctgcttgtggtactggcactccctcaacgggcttacgcactgactaccgagg

SEQ ID NO: 116824 - DNA, 80 bp, synthetic construct
  source 1..80: mol_type = other DNA
tttatgccgcagaccgggcgctggaggagccccgcgccgactctggcctcacccgcgaggaggtacgtgccgtacgtggg

SEQ ID NO: 116825 - DNA, 80 bp, synthetic construct
  source 1..80: mol_type = other DNA
atatgaatctcctgtggcatttgatagctcctcatttaccttctcatatattgcccaagaaaacaaagacacggacgaat

SEQ ID NO: 116826 - DNA, 80 bp, synthetic construct
  source 1..80: mol_type = other DNA
ccttgagatcatgaccagcacttgggttctcgcgggtggcgtgttggccgctgtggcggcttactgcctcgcgaccgggt

SEQ ID NO: 116827 - DNA, 80 bp, synthetic construct
  source 1..80: mol_type = other DNA
acatgcacgtttttttcgccccggagaccgcacaggaagtccaccaactgcgcgttggcggttgcgtccatggcgatgat

SEQ ID NO: 116828 - DNA, 80 bp, synthetic construct
  source 1..80: mol_type = other DNA
ggatgtcgtagcaataatttattttacacacattccccgccccgccctaggttcccccaccccccaacccctcacagcat

SEQ ID NO: 116829 - DNA, 80 bp, synthetic construct
  source 1..80: mol_type = other DNA
ctcctatttaatatcttgggagtgtgggtggccagtcagcttgctgccccgggcgccgccacgaccttcgtgggcgcgtg

SEQ ID NO: 116830 - DNA, 80 bp, synthetic construct
  source 1..80: mol_type = other DNA
ggttgaagccagcactcgcttgactgggagtacggctagtcagaccgcctccaccgttgcaaacctgttttcctctggat

SEQ ID NO: 116831 - DNA, 80 bp, synthetic construct
  source 1..80: mol_type = other DNA
acaattccgaaatggaacacgggacaatggcgacggatgcgcgtgtgttagcaccagatgacatcttgaattcggttggg

SEQ ID NO: 116832 - DNA, 80 bp, synthetic construct
  source 1..80: mol_type = other DNA
caatgttagcagaaaagatgagggtagctattatggatctaacgatcagtcaaaacactacagagttactgtttatacta

SEQ ID NO: 116833 - DNA, 80 bp, synthetic construct
  source 1..80: mol_type = other DNA
cgccgggtcatggctctgggacgtgtgggattggatctgctccatcctaacggacttcaaaaattggttgtcctccaagc

SEQ ID NO: 116834 - DNA, 80 bp, synthetic construct
  source 1..80: mol_type = other DNA
actcctatactccactggaagtttccagggtggcatcgaccctcagaaaacttggggtgccacctatcagggtgtggaag

SEQ ID NO: 116835 - DNA, 80 bp, synthetic construct
  source 1..80: mol_type = other DNA
cgcgcctttgggcggcgtcgcggctgcgctcgcacacggtgtgagggcactcgaggacgggatcaattacgcaacaggaa

SEQ ID NO: 116836 - DNA, 80 bp, synthetic construct
  source 1..80: mol_type = other DNA
cccaggcaaacacgttatacaggtcgccgttgggggccagcaactcggtggcccaaaacagggtaaataacgtgtccccg

SEQ ID NO: 116837 - DNA, 80 bp, synthetic construct
  source 1..80: mol_type = other DNA
cagtggatgaacaggctcatagcctttgcctctagaggcaatcatgtgtctccaacacattacgtccctgagacagacac

SEQ ID NO: 116838 - DNA, 80 bp, synthetic construct
  source 1..80: mol_type = other DNA
tggccaaagccagatttccagaggaacctgctcagtctagcagttcgggtgttgacaccggggaggcacaaaccaatttt

SEQ ID NO: 116839 - DNA, 80 bp, synthetic construct
  source 1..80: mol_type = other DNA
gtccaccgaccaggaccagaggccctattgctggcactacgcaccccaaccgtgcggcattgtgcctgcgtcgaaggtgt

SEQ ID NO: 116840 - DNA, 80 bp, synthetic construct
  source 1..80: mol_type = other DNA
gtgtgaaagttggccgtggtcagggcggcgggcatcccaaacccccggtgggactcgaggtccggctcctggaggcaaaa

SEQ ID NO: 116841 - DNA, 80 bp, synthetic construct
  source 1..80: mol_type = other DNA
aacaaaccgaggatcttgggtgctgacgccctcccggtgcagctgcagggtctggtccttgtaaatctcggctcggaggt

SEQ ID NO: 116842 - DNA, 80 bp, synthetic construct
  source 1..80: mol_type = other DNA
gggcaaagagtagcccagggcgctcaaaagcttgcgcgcttcttcgaccctggaccgcagcagaagatccaactcataaa

SEQ ID NO: 116843 - DNA, 80 bp, synthetic construct
  source 1..80: mol_type = other DNA
ctggcctctcgacgctgcccggtaaccccgccgtagcgtcccttatggcattcactgcctcggtcaccagccccctgaca

SEQ ID NO: 116844 - DNA, 80 bp, synthetic construct
  source 1..80: mol_type = other DNA
ctaggctgggcaatgagatcctgcttggccctgccgacgcggaggtgagcaaggggtggagactcctcgcccccatcacc

SEQ ID NO: 116845 - DNA, 80 bp, synthetic construct
  source 1..80: mol_type = other DNA
cgttgcgcaacacgtgtcccctgtgcaacaccccggtggcgtacctgatagtgggcgtgaccgccagcgggtcgttcagc

SEQ ID NO: 116846 - DNA, 80 bp, synthetic construct
  source 1..80: mol_type = other DNA
gcctcgattggcactccccggacggtgagcgctccgttgacgaacatgaagggctggaacagacccgccaactgacgcca

SEQ ID NO: 116847 - DNA, 80 bp, synthetic construct
  source 1..80: mol_type = other DNA
aatcccgcagtggcctctatgatggcgttcagcgccgcattaaccagccccctacccactagcaccaccatcctcctaaa

SEQ ID NO: 116848 - DNA, 80 bp, synthetic construct
  source 1..80: mol_type = other DNA
atcccgctattgcatcattgatggcttttacagctgccgtcactagcccactaaccaccagccaaactctcctcttcaat

SEQ ID NO: 116849 - DNA, 80 bp, synthetic construct
  source 1..80: mol_type = other DNA
ggacaacaatacacccattcccaccaccataatggccaagaacgaagtgttttgcgtggacgcttcgaagggtggccgta

SEQ ID NO: 116850 - DNA, 80 bp, synthetic construct
  source 1..80: mol_type = other DNA
ttggcttggctcatggttgatagttggatggccagagtgatagtcatcctcttggcgttgagtctgggacctgtatacgc

SEQ ID NO: 116851 - DNA, 80 bp, synthetic construct
  source 1..80: mol_type = other DNA
agaccggctggatccgccactcccgacgcgccggccccgtgtccacgacggaaaccccgccgagacctagccgcggtccc

SEQ ID NO: 116852 - DNA, 80 bp, synthetic construct
  source 1..80: mol_type = other DNA
gtgcaaagttatggatggaacattgtcaccatgaagagcggagtggatgtgttctacagaccttctgagtgctgcgatac

SEQ ID NO: 116853 - DNA, 80 bp, synthetic construct
  source 1..80: mol_type = other DNA
ccaaaacctgtggcgcgcctccttgtcgcattcgaaaggacttcaacgccagcgaagatcttttatgtcctaccgactgt

SEQ ID NO: 116854 - DNA, 80 bp, synthetic construct
  source 1..80: mol_type = other DNA
ttctaaatgtaaccaagtacttggaaagcaagaagacgctacagaaggcagtggaaaatgctgctaaagttaatgctcct

SEQ ID NO: 116855 - DNA, 80 bp, synthetic construct
  source 1..80: mol_type = other DNA
cggttgcacacgatgcaacaggcaaaagggtctactacatgacccgcgaccctgaaactcccctcgccagagctgcgtgg

SEQ ID NO: 116856 - DNA, 80 bp, synthetic construct
  source 1..80: mol_type = other DNA
cggcctcaagttcgtcggcgcggcgtcgcgtggcgccgatgacctttcccagctcctgcagggcgcgcccgctggtggag

SEQ ID NO: 116857 - DNA, 80 bp, synthetic construct
  source 1..80: mol_type = other DNA
tagtgcttgttgccatcactgtgcttacgctgaccccagcatacaagcaactgcttgtccagctgctatggtggtcccag

SEQ ID NO: 116858 - DNA, 80 bp, synthetic construct
  source 1..80: mol_type = other DNA
aacaacatcaaattaacggtagttgtgggcgacataattggggtcttagagcaagggaaaagaacactaacaccacagcc

SEQ ID NO: 116859 - DNA, 80 bp, synthetic construct
  source 1..80: mol_type = other DNA
tccgtctccgccttgggtagctagccctaaaattttatatcaacagttaatacgggatcttgatttttcagaagggccgc

SEQ ID NO: 116860 - DNA, 80 bp, synthetic construct
  source 1..80: mol_type = other DNA
tctgcgtcacggggctcctcgtcctggcctctgtgttccgggcacggtttccctgcttttacgccacggcgagctcttat

SEQ ID NO: 116861 - DNA, 80 bp, synthetic construct
  source 1..80: mol_type = other DNA
tcgtttatgaagcggatggcctgatcttgcatgccccgggttgcgtgccttgcgtgagagaaggcaatgaaagcagatgc

SEQ ID NO: 116862 - DNA, 80 bp, synthetic construct
  source 1..80: mol_type = other DNA
tatgtgacaggtctaaccactgacgacctcaagtgtccctgccaggttccatcgcccgagttcttctcgtgggtggacgg

SEQ ID NO: 116863 - DNA, 80 bp, synthetic construct
  source 1..80: mol_type = other DNA
atcatcttgctcacctgcttgttacatcctcagcttgggttcgaggtgacaaagattttgcttgccttacttggctccat

SEQ ID NO: 116864 - DNA, 80 bp, synthetic construct
  source 1..80: mol_type = other DNA
aagactcacaaacaccaattcctacaaccatcatggccaaaaatgaggtgttctgcgtggaccccaccaaggggggtaag

SEQ ID NO: 116865 - DNA, 80 bp, synthetic construct
  source 1..80: mol_type = other DNA
actccggggccgtgcccggccgccggttgtcttcttttccaccccttccgtcccccgtacccaccacaccccacgccacc

SEQ ID NO: 116866 - DNA, 80 bp, synthetic construct
  source 1..80: mol_type = other DNA
cccacaaaccgcacgtcaggggggccggggggctccggggcttcccacaagaccgcgaccgtggtcatggagttgtccac

SEQ ID NO: 116867 - DNA, 80 bp, synthetic construct
  source 1..80: mol_type = other DNA
cctgctggaataggttattggctcactgtcaagtacgcaaaaagaggaggcgtcttttgggacaccccggctccaaggac

SEQ ID NO: 116868 - DNA, 80 bp, synthetic construct
  source 1..80: mol_type = other DNA
gtggcgccccggcgagtggcgggcatgcgcgtgagcgtagcaaacgccccgcccacacaacgctccgcccccaacccctt

SEQ ID NO: 116869 - DNA, 80 bp, synthetic construct
  source 1..80: mol_type = other DNA
gggtgtatcgtcaccagccttaccggacgagacaagaaccaagccgagggagaggtgcagatcatgtccaccgcggccca

SEQ ID NO: 116870 - DNA, 80 bp, synthetic construct
  source 1..80: mol_type = other DNA
gcgaggtctgcggtcctgtttattgtttcacaccttcccccgtagtcgtgggcaccacagacagaacggggctccccact

SEQ ID NO: 116871 - DNA, 80 bp, synthetic construct
  source 1..80: mol_type = other DNA
gggcccgtcctgtgctcagcagggcatgccgtcggactcttccgcgcggcagtttgcaccaggggcgttgccaaggcaat

SEQ ID NO: 116872 - DNA, 80 bp, synthetic construct
  source 1..80: mol_type = other DNA
aaagtcatagatgaaaacatctcaactttgcaaggactactaggaaacttagtagttctaactggtatgggaattggaac

SEQ ID NO: 116873 - DNA, 80 bp, synthetic construct
  source 1..80: mol_type = other DNA
atcgcagggctcatgttcgcggcttttgtcatctcgggaaagtccacagatatgtggattgaaagaactgctgacatcac

SEQ ID NO: 116874 - DNA, 80 bp, synthetic construct
  source 1..80: mol_type = other DNA
gttcttcgaggggctttaaacgacgatctatttccgttggtaacgtaatcgtttccccgcgaaggttgtctaatgcggca

SEQ ID NO: 116875 - DNA, 80 bp, synthetic construct
  source 1..80: mol_type = other DNA
agtagacacctatgtgaacattggcgccaggtggtctctggatgctatggacaatgtcaacccattcaaccaccaccgta

SEQ ID NO: 116876 - DNA, 80 bp, synthetic construct
  source 1..80: mol_type = other DNA
ctgatagcaatctcaccacaaacctgaggctgacacctggcctttggacttccgcttacctgcgcaaatttgaaccccta

SEQ ID NO: 116877 - DNA, 80 bp, synthetic construct
  source 1..80: mol_type = other DNA
cggcgctccgcccaagcgccgcggagttgctgcgcctgccgctatttcaccctaagtgaccccgctccccccgggtggcg

SEQ ID NO: 116878 - DNA, 80 bp, synthetic construct
  source 1..80: mol_type = other DNA
ggctacatgctccctgggtggcaagccgaagctttgagggcagctcaaagaagaacagccgcgggcatcatgaagaacgc

SEQ ID NO: 116879 - DNA, 80 bp, synthetic construct
  source 1..80: mol_type = other DNA
tgtactgcggcggccccatgtacaactccaaaggagaatcttgtggttaccgcagatgccgcgccagcggagtgctccct

SEQ ID NO: 116880 - DNA, 80 bp, synthetic construct
  source 1..80: mol_type = other DNA
cctgtagctccgtcgtggggacgtaaaacctgggaggctgcaaactgtggaagctgtacgcacagtgtagcagactagcg

SEQ ID NO: 116881 - DNA, 80 bp, synthetic construct
  source 1..80: mol_type = other DNA
aaaggaaggcgtcccgcaacgcgctggaacactttgggcgacgcgagaccctgacggaggtcctgggtcggtacaacgta

SEQ ID NO: 116882 - DNA, 80 bp, synthetic construct
  source 1..80: mol_type = other DNA
tcacagcaatcctcaattccctgaccataaccagccttctccgtaagctccacgagtggataaacggagattggtcatca

SEQ ID NO: 116883 - DNA, 80 bp, synthetic construct
  source 1..80: mol_type = other DNA
cagctggatggctccaatgtgtccgcggcgctagctgcgctggcggaaaaatcattcccgccctcgaaatcgcaggaaga

SEQ ID NO: 116884 - DNA, 80 bp, synthetic construct
  source 1..80: mol_type = other DNA
aacgttctctattattaccgtcatctctacagcccctacgaaacgctcggagaaaaaagctaaggcctcctctgccgcga

SEQ ID NO: 116885 - DNA, 80 bp, synthetic construct
  source 1..80: mol_type = other DNA
cgctctcgatcgcccggcgggcctggatccgcacgtcctccagccgcgcctggatggcctcggggcccagggcgtgcgtg

SEQ ID NO: 116886 - DNA, 80 bp, synthetic construct
  source 1..80: mol_type = other DNA
acatgctgttcgaccagggcaccctagtgggcgccctggacttccgcagcctgcggtctcggcacccgtggtccgtggag

SEQ ID NO: 116887 - DNA, 80 bp, synthetic construct
  source 1..80: mol_type = other DNA
cttttgtgtggtgcgttccggtatggggggggctgccgccaggttggtggccgtgattttgtttgtcgtcatagtgtgcc

SEQ ID NO: 116888 - DNA, 80 bp, synthetic construct
  source 1..80: mol_type = other DNA
cacccaacaaaccggacctgttgagggagctatcctgtgtcactgtcacgcgcctgattgtatgcccaagctaatcaaaa

SEQ ID NO: 116889 - DNA, 80 bp, synthetic construct
  source 1..80: mol_type = other DNA
ggtcggcggcagccgaccctaaggtcgtgagctgggcgatggccccccgcgcgtccagggccaaccgagtcgccttgacg

SEQ ID NO: 116890 - DNA, 80 bp, synthetic construct
  source 1..80: mol_type = other DNA
gccaaggggaaaaatggggtggggaggaaacggaaaacccagtaggccgtgtcgggaacacgcccggtgttgtcctcaaa

SEQ ID NO: 116891 - DNA, 80 bp, synthetic construct
  source 1..80: mol_type = other DNA
gagattccctgatcatcctcgcggccttgctccaccctgggcttgtttttgagatcacgaaacatctgctggccatcttg

SEQ ID NO: 116892 - DNA, 80 bp, synthetic construct
  source 1..80: mol_type = other DNA
aaacatgcagaacaaaaaggatattgataaagattttccaagaggatctaatcaaactcttgtgggacctcctggttcaa

SEQ ID NO: 116893 - DNA, 80 bp, synthetic construct
  source 1..80: mol_type = other DNA
agaggcggtggccttgcatgcctgtccgatgccgtcgtcgaccacgcgggtcactcccacgaccaagcggtggcgctcgg

SEQ ID NO: 116894 - DNA, 80 bp, synthetic construct
  source 1..80: mol_type = other DNA
ggaggcgtaggtgttattgggatggaggtcggtgtggcagcggacaaagagggccaggaactggtggtagctcatcttaa

SEQ ID NO: 116895 - DNA, 80 bp, synthetic construct
  source 1..80: mol_type = other DNA
ggtggaaagactgtaatggatgtgatctccagagaagaccaaagagggagtggacaagtggttacatatgctcttaacac

SEQ ID NO: 116896 - DNA, 80 bp, synthetic construct
  source 1..80: mol_type = other DNA
aattactccatgttaagtttgggaaagttttatgctcgtaaaatctacaaaagtccgtatgttcccattgacaaggaagt

SEQ ID NO: 116897 - DNA, 80 bp, synthetic construct
  source 1..80: mol_type = other DNA
cagcgaatccaggcgcacgtccgtcgcttggccctcgaacacgggcgggacgaggctgatggggtccccgttacagagat

SEQ ID NO: 116898 - DNA, 80 bp, synthetic construct
  source 1..80: mol_type = other DNA
ctggcttctcaagctgggaggaggttcccttctgctcgcaccatttccatgagttggtgatgaaggacggacgcgccctg

SEQ ID NO: 116899 - DNA, 80 bp, synthetic construct
  source 1..80: mol_type = other DNA
ggggggtgggtggcttcccagcttgctgccccagctgccgctactgctttcgtcggcgcgggtattaccggctccgttgt

SEQ ID NO: 116900 - DNA, 80 bp, synthetic construct
  source 1..80: mol_type = other DNA
ccgccgccggccaggtcctcgcccggcagcggcgagtacagcaccaccacgcgcacgtcctcggggtcgtggatctggcg

SEQ ID NO: 116901 - DNA, 80 bp, synthetic construct
  source 1..80: mol_type = other DNA
ggtgtggaacagagtatggataaccaacaacccacacatgcaggacaagacaatggtgaaaaagtggagagatgtccctt

SEQ ID NO: 116902 - DNA, 80 bp, synthetic construct
  source 1..80: mol_type = other DNA
gcggtacgcaagacttccgagcggtcacagccccgtggtaggcgccaacccatccctaaggcgcgcccacgcgagggccg

SEQ ID NO: 116903 - DNA, 80 bp, synthetic construct
  source 1..80: mol_type = other DNA
ccgatggggttctcgtatgatacccgctgttttgactccacagtcactgagagcgacatccgtacggaggaggcaattta

SEQ ID NO: 116904 - DNA, 80 bp, synthetic construct
  source 1..80: mol_type = other DNA
ttaaagaatgacattcccatgacaggaccactagtggctggagggcttctcactgtgtgttacgtgctcactggaagatc

SEQ ID NO: 116905 - DNA, 80 bp, synthetic construct
  source 1..80: mol_type = other DNA
ctgccccactgattgcttccgcaaacatccggaagccacatactctcggtgcggctccggtccctggattacacccaggt

SEQ ID NO: 116906 - DNA, 80 bp, synthetic construct
  source 1..80: mol_type = other DNA
atcacggcggaaactgcaggccgaaggttggccagggggtctccaccctcgctggctagctcttcggccagccaattatc

SEQ ID NO: 116907 - DNA, 80 bp, synthetic construct
  source 1..80: mol_type = other DNA
cgtgtgtacacggcgagctgctcgcccgcaagcgggaaagattcgcggcggtcattaaccggttcctggacctgcaccag

SEQ ID NO: 116908 - DNA, 80 bp, synthetic construct
  source 1..80: mol_type = other DNA
ccatgaaccccaccccatcgcccgctggctcgtccgccacgggcgaggcgcgggtgcgggtggatgcgcgcctcctgcgc

SEQ ID NO: 116909 - DNA, 80 bp, synthetic construct
  source 1..80: mol_type = other DNA
agggttggggtcccttgaaatatgtatccaacaggagttcaactagagatttgccctactgttggcaccatgtgcccaag

SEQ ID NO: 116910 - DNA, 80 bp, synthetic construct
  source 1..80: mol_type = other DNA
tattgcatgtaataaaagtgttgatctttgaactgtgtttatgtgttgggtgtgtctgtgggtatataagcaggtgaatg

SEQ ID NO: 116911 - DNA, 80 bp, synthetic construct
  source 1..80: mol_type = other DNA
cccatttcacagtgtaaacaattctttcagcacgggtagccttaaataggggaatgttctgattagtgcgggaactggac

SEQ ID NO: 116912 - DNA, 80 bp, synthetic construct
  source 1..80: mol_type = other DNA
ggcccctctatggcaacgagggctgcgggtgcgcgggatggctcctgtccccccgcggctcccggcctagttggtgcccc

SEQ ID NO: 116913 - DNA, 80 bp, synthetic construct
  source 1..80: mol_type = other DNA
acctggtgcccggacgtcccgcgagccctccccgccggacgccgccatggccgcacagcgcgcgcgggcgccggcgatgc

SEQ ID NO: 116914 - DNA, 80 bp, synthetic construct
  source 1..80: mol_type = other DNA
atcatcactgggtaacgcgttaacataactacgcgttaaatcttcaataacggcataacaattaaacgcttcccaccgag

SEQ ID NO: 116915 - DNA, 80 bp, synthetic construct
  source 1..80: mol_type = other DNA
caaggctataatgttctcgtgttgaacccatcagtggcggccacattgggctttggctcttacatgtcgcgtgcccatgg

SEQ ID NO: 116916 - DNA, 80 bp, synthetic construct
  source 1..80: mol_type = other DNA
tagtcagcggcttagtgggggcggctgtagggagtatcggccttggcaaaatactggtggatgtgctggcagggtacggt

SEQ ID NO: 116917 - DNA, 80 bp, synthetic construct
  source 1..80: mol_type = other DNA
atgacaatgtccatgagcatgatcttggtaggagtgatcatgatgtttttgtctctaggagttggggcggatcaaggatg

SEQ ID NO: 116918 - DNA, 80 bp, synthetic construct
  source 1..80: mol_type = other DNA
gcagcgcatggtaatccacggacagaacttacattatgataatctgcatgatcacaatcgggcaacagggggtgttgttc

SEQ ID NO: 116919 - DNA, 80 bp, synthetic construct
  source 1..80: mol_type = other DNA
ctgctactattcgccggcgtcgatgcggaaacccacgtcactgggggggccgccgcccgcggcgcgtctggtcttgttgg

SEQ ID NO: 116920 - DNA, 80 bp, synthetic construct
  source 1..80: mol_type = other DNA
acactgtgggttcgtatggtactgatgacccactttttctccattctccaggctcaagaacaactggagaaagccctaga

SEQ ID NO: 116921 - DNA, 80 bp, synthetic construct
  source 1..80: mol_type = other DNA
aaggcgaggccgtactggaagaggcaaaccggggatatacaggtattgctcgcagggtgagagaccatccggaatgtttg

SEQ ID NO: 116922 - DNA, 80 bp, synthetic construct
  source 1..80: mol_type = other DNA
gcatgccaaggcctcctccaaacttcaagagtgccatctggagggtggccgcgacggagtacgtcgaaataacgcagcac

SEQ ID NO: 116923 - DNA, 80 bp, synthetic construct
  source 1..80: mol_type = other DNA
gggggaggtgcaagtggtctcaacagctacccagactttcctggcgaccaccatcaacggcgtcctgtggacagtgtacc

SEQ ID NO: 116924 - DNA, 80 bp, synthetic construct
  source 1..80: mol_type = other DNA
cggcgggaccgccgtcgtggcattcggaggaaccccacgtcgctcggcggtgacgtctaccggtacccagacggccgacg

SEQ ID NO: 116925 - DNA, 80 bp, synthetic construct
  source 1..80: mol_type = other DNA
ccaatgccagtattgtatacgaggcagataccatgattctacatcttccggggtgcgtcccgtgtgtcaaaacgggtaac

SEQ ID NO: 116926 - DNA, 80 bp, synthetic construct
  source 1..80: mol_type = other DNA
ggctgtaccacaatcctaccaggtggggtacctccatgctccgacgggtagcggcaagagtacgaaggtaccggccgctt

SEQ ID NO: 116927 - DNA, 80 bp, synthetic construct
  source 1..80: mol_type = other DNA
gtatgctcctacaatctgggcccgtatggtcctgatgactcacttttttgccatactgcaagcgcaggacactttaggcc

SEQ ID NO: 116928 - DNA, 80 bp, synthetic construct
  source 1..80: mol_type = other DNA
acacagtccaagactgcaactgctccgtgtatatgggccacataacaggacacaggatggcatgggatatgatgatgaac

SEQ ID NO: 116929 - DNA, 80 bp, synthetic construct
  source 1..80: mol_type = other DNA
tgccatctcacaaactgaattgaaggaagaatccaaagaagaactgcaagaaataccaactatgctgaaaaaaggaatga

SEQ ID NO: 116930 - DNA, 80 bp, synthetic construct
  source 1..80: mol_type = other DNA
gtccccgtataaccaaagcatgtattacgctggccttccagtggacgatttcgaggactcggaatctacggatacggaag

SEQ ID NO: 116931 - DNA, 80 bp, synthetic construct
  source 1..80: mol_type = other DNA
tgtctggcgagaagccctctatggaagatgtcatcaatctactgcctgggatcctgtctccgggagccctggtggtgtgg

SEQ ID NO: 116932 - DNA, 80 bp, synthetic construct
  source 1..80: mol_type = other DNA
acccaactcccttggcgcgagccgcatgggagacagtccgacacactccagtttcctggttgggaaacatcatagtctac

SEQ ID NO: 116933 - DNA, 80 bp, synthetic construct
  source 1..80: mol_type = other DNA
gtggtggtgcgtgggagtgggggtgcgtgggagtggaggtgccatgttgggcaggctctggtgttaaccacagagccgcg

SEQ ID NO: 116934 - DNA, 80 bp, synthetic construct
  source 1..80: mol_type = other DNA
cgggggggcgcaggggggactctcgtgcaagccttctcagtccgaggcgcctaagaacactcaaggggtcatcgggaggg

SEQ ID NO: 116935 - DNA, 80 bp, synthetic construct
  source 1..80: mol_type = other DNA
agatccagcacacatcaccgcagagaccgctggtcggcgactcaagagggggtccccgccctctctagcgagttcatcag

SEQ ID NO: 116936 - DNA, 80 bp, synthetic construct
  source 1..80: mol_type = other DNA
tcactccactggatcttccagacatcatacaacgactccatggcttgagcgcgttcacactccatgggtactctccaggc

SEQ ID NO: 116937 - DNA, 80 bp, synthetic construct
  source 1..80: mol_type = other DNA
aagtacccaccggcccttcctatctgggccagaccggactacaaccctcctttgctcccttcatggaaggacccaaccta

SEQ ID NO: 116938 - DNA, 80 bp, synthetic construct
  source 1..80: mol_type = other DNA
aggcctatcacatcttttgaccaggggtggggccagatctcgtacgccaacgtgagtggcccctcggaggacagaccata

SEQ ID NO: 116939 - DNA, 80 bp, synthetic construct
  source 1..80: mol_type = other DNA
gtgcgtgtgcgcgtcctcggggcccgcgggcgcacgtgcgcttatacgctgtgtgtttcgtctgtccccagggaatccgg

SEQ ID NO: 116940 - DNA, 80 bp, synthetic construct
  source 1..80: mol_type = other DNA
aggcgccttagtcacaccatgcgctgcggaagaaaccaagctgccggtgaatgcgcttagcaactcgctactgcgccacc

SEQ ID NO: 116941 - DNA, 80 bp, synthetic construct
  source 1..80: mol_type = other DNA
ggcccgcgttccccggtcccccggggcgaaggcgtgcccgcggcggcgcatgttggaaaaggcgaaactgggcctggagt

SEQ ID NO: 116942 - DNA, 80 bp, synthetic construct
  source 1..80: mol_type = other DNA
tcaatccctctgtggctgccactctggggttcggcgcgtacatgtccaaggcctacggggtcgatccgaacatcaggacc

SEQ ID NO: 116943 - DNA, 80 bp, synthetic construct
  source 1..80: mol_type = other DNA
taaagccgcggatgtcgtgggtgcggccgccgcgaagagcgcactcccccacgagcagggtcgcgacgagctccacggca

SEQ ID NO: 116944 - DNA, 80 bp, synthetic construct
  source 1..80: mol_type = other DNA
gcaggagcgctgggcgtggtgcctaaaaatgtccttcagaagcaagctgattgccaggggcaggcccttggtgtaagtgt

SEQ ID NO: 116945 - DNA, 80 bp, synthetic construct
  source 1..80: mol_type = other DNA
gagcggcctgtttgacggcatccccgccccacgccagccacttgacgcccacaacccgcgcacggatgtggttatcacgg

SEQ ID NO: 116946 - DNA, 80 bp, synthetic construct
  source 1..80: mol_type = other DNA
agagggtgtgacagatgagaatgataggagcaaggatattttagagtatcagtggtttgagtttaccctgcccgagggca

SEQ ID NO: 116947 - DNA, 80 bp, synthetic construct
  source 1..80: mol_type = other DNA
cctacttatacgaccacctagcgccattgcaacactgggccgcagccggtctcaaagacctagcagtggccactgagcct

SEQ ID NO: 116948 - DNA, 80 bp, synthetic construct
  source 1..80: mol_type = other DNA
cccatcaacgcaaaaaatggcctgtttttgatcacaatgtgatgacgaagtgtaccatgcatgcaggtgggcgtagagga

SEQ ID NO: 116949 - DNA, 80 bp, synthetic construct
  source 1..80: mol_type = other DNA
ggacgggccggggcaaacaggggacgtacaggtatgtttcgcagggcgagagaccgtctggaatgtttgactccgtcgtc

SEQ ID NO: 116950 - DNA, 80 bp, synthetic construct
  source 1..80: mol_type = other DNA
gcctatgtggctcaaggatataatgtcctcgtgcttaatccatcagtggcggctaccctagggttcggcatgtatatgtc

SEQ ID NO: 116951 - DNA, 80 bp, synthetic construct
  source 1..80: mol_type = other DNA
ctggtcatttgcggaattgtgtactggatgcgccgccgcactcaaaaagccccaaagcgcatacgcctcccccacatccg

SEQ ID NO: 116952 - DNA, 80 bp, synthetic construct
  source 1..80: mol_type = other DNA
ggatagagagtctggtggacaaactgaaccgctggaagacctacgctcaggaccatagggacgcgcccgcgccgcggcga

SEQ ID NO: 116953 - DNA, 80 bp, synthetic construct
  source 1..80: mol_type = other DNA
gccgcgccgccccttttagccgttaaccacacagccaatcaccacacaccccgcaatttttaaaatcacctcatttacat

SEQ ID NO: 116954 - DNA, 80 bp, synthetic construct
  source 1..80: mol_type = other DNA
gacttgtatgtcagcagacttggaagtcataaccagcacctgggtcatagtgggaggcgtcctcgcggcgctagctgcct

SEQ ID NO: 116955 - DNA, 80 bp, synthetic construct
  source 1..80: mol_type = other DNA
atgccccccaaacggacctattgacaaactataaaacaagacagccgtcgccaaactttccgcgggacgtacacacatgg

SEQ ID NO: 116956 - DNA, 80 bp, synthetic construct
  source 1..80: mol_type = other DNA
ttgatacatcttcaccagaacgtggtggacgtacaatacttgtatggtgtgtcgacgtctgtcgtcaactgggtcatcaa

SEQ ID NO: 116957 - DNA, 80 bp, synthetic construct
  source 1..80: mol_type = other DNA
tggtcctcatgacacacttctttggaatactccaatcccaggaggtgctccaccaagcactcgacttcgacatgtacgga

SEQ ID NO: 116958 - DNA, 80 bp, synthetic construct
  source 1..80: mol_type = other DNA
tctttgacagcagccatccagattacccccaacgggtaatcgtgaaggcggggtggtacacgagcacgagccacgaggcg

SEQ ID NO: 116959 - DNA, 80 bp, synthetic construct
  source 1..80: mol_type = other DNA
tggagtcagggtgtgcgagaagatggccttatatgacattgcccagaagcttcccctggcagtgatggggccttcctatg

SEQ ID NO: 116960 - DNA, 80 bp, synthetic construct
  source 1..80: mol_type = other DNA
gttttccaccagggggtcaaccttttctagggtgtgaaggcaaaggtcatcttcctctgcatccataaatgtgattggtt

SEQ ID NO: 116961 - DNA, 80 bp, synthetic construct
  source 1..80: mol_type = other DNA
tgactcaagtattgatgatgaggactacatgggctctgtgtgaggccttaaccttagctacagggcccatctccacactg

SEQ ID NO: 116962 - DNA, 80 bp, synthetic construct
  source 1..80: mol_type = other DNA
ggagcaacatgggtggatttggttctcgaaggcgacagctgcgtgactatcatgtccaaggacaagcccaccattgatgt

SEQ ID NO: 116963 - DNA, 80 bp, synthetic construct
  source 1..80: mol_type = other DNA
gcaacacctgggcacttgggcacagaccttcagggagttcctgatggatgtgtggactatccttgcagactttagcaaga

SEQ ID NO: 116964 - DNA, 80 bp, synthetic construct
  source 1..80: mol_type = other DNA
acgtggtgggatcgcagctcccttgcgagcctgagcccgacgttgcagtgctaacctccatgctcacagatccatcccac

SEQ ID NO: 116965 - DNA, 80 bp, synthetic construct
  source 1..80: mol_type = other DNA
ccacagttagactacgagcatacatgaacaccccggggctccctgtgtgccaagaccatcttgaattttgggagtgcgtt

SEQ ID NO: 116966 - DNA, 80 bp, synthetic construct
  source 1..80: mol_type = other DNA
gcgagctgcttgggagacagctcgccatactcctgttaattcgtggttgggcaacataattatgtatgcccctgcgattt

SEQ ID NO: 116967 - DNA, 80 bp, synthetic construct
  source 1..80: mol_type = other DNA
tgaacaggaagtcctatgatacggaatacccgaaatgcaaaaatggtgattgggactttgtgataacaactgacatctcg

SEQ ID NO: 116968 - DNA, 80 bp, synthetic construct
  source 1..80: mol_type = other DNA
ctgctcagccatgtacgtgggagacttgtgtggaggagccttccttgtggggcaactcttcacgtttagaccccgcgtgc

SEQ ID NO: 116969 - DNA, 80 bp, synthetic construct
  source 1..80: mol_type = other DNA
gttactcacaagtcaatcccataactctcacagcagctctcctcttattggtagcgcattatgccatcatagggccagga

SEQ ID NO: 116970 - DNA, 80 bp, synthetic construct
  source 1..80: mol_type = other DNA
tataaaggataaatggagcgaagaaacccatctgagcggggggtacctgctggattttctggccatgcatctgtggagag

SEQ ID NO: 116971 - DNA, 80 bp, synthetic construct
  source 1..80: mol_type = other DNA
cccgatttgggcaagacctgactacaatccgcccctccttgagacttggaagaaaccagactataccccaccgctggttc

SEQ ID NO: 116972 - DNA, 80 bp, synthetic construct
  source 1..80: mol_type = other DNA
gccgggtagagattgacttcgattactgcccaggaactacggtcaccctgagtgagagctgcggacaccgtggacctgcc

SEQ ID NO: 116973 - DNA, 80 bp, synthetic construct
  source 1..80: mol_type = other DNA
attgtcaccatgaagagtggagtggatgtgttctacagaccttctgagtgttgtgacactctcctttgtgacatcggaga

SEQ ID NO: 116974 - DNA, 80 bp, synthetic construct
  source 1..80: mol_type = other DNA
aacatcaccgccgaagactgtacatccggccgcaggctggcgttgtgcttcagccactggggcgagaaacacggaccctg

SEQ ID NO: 116975 - DNA, 80 bp, synthetic construct
  source 1..80: mol_type = other DNA
tatggagagaaagatcatcacatggggtgcagacaccgctgcttgcggggacattttggcagggttgcctgtgtcggcta

SEQ ID NO: 116976 - DNA, 80 bp, synthetic construct
  source 1..80: mol_type = other DNA
aacccgctgctgcatagcaccaccgaactggcgattctgccgtgcagctttaccccgatgccggcgctgagcaccggcct

SEQ ID NO: 116977 - DNA, 80 bp, synthetic construct
  source 1..80: mol_type = other DNA
tccccgaaagcatcctgccactggcatggagccagaaacacagtgggttgggtgtgggtgttaagtttccgcgagcgcct

SEQ ID NO: 116978 - DNA, 80 bp, synthetic construct
  source 1..80: mol_type = other DNA
acaaagaaggaacattccatacaatgtggcatgtcacacgtggcgctgttctaatgcataaaggaaagaggattgaacct

SEQ ID NO: 116979 - DNA, 80 bp, synthetic construct
  source 1..80: mol_type = other DNA
catcatttattccgggaataagagttgcgattttaggcaggtttacgatttctgttgtcacggtggccgccagtcttaaa

SEQ ID NO: 116980 - DNA, 80 bp, synthetic construct
  source 1..80: mol_type = other DNA
gtgcttggtggactatccatacaggctatggcactatccctgcactgtcaactacaccatacacaaggtgcggttgttca

SEQ ID NO: 116981 - DNA, 80 bp, synthetic construct
  source 1..80: mol_type = other DNA
ccccgtgcatagacgtaaaatttaaaaaggcctcggccctccctggaacggctggtcggtccccgggttgctgaaggtgc

SEQ ID NO: 116982 - DNA, 80 bp, synthetic construct
  source 1..80: mol_type = other DNA
gctactaataatgtaattgaagtaagctgttttaagcccacgaatggttttaagaagcaccacatctttgggtccggctt

SEQ ID NO: 116983 - DNA, 80 bp, synthetic construct
  source 1..80: mol_type = other DNA
cgtatggcaagttcctcgccgacgggggctgttctggaggcgcctatgacgtgatcatctgtgatgaatgtcatgcgcaa

SEQ ID NO: 116984 - DNA, 80 bp, synthetic construct
  source 1..80: mol_type = other DNA
gaatcccgccgtggcatcccttatggcattctctgctgctgtcaccagccccctcagtacagcccatacgctcctcctta

SEQ ID NO: 116985 - DNA, 80 bp, synthetic construct
  source 1..80: mol_type = other DNA
agattgcgtcatcaccatgagtaaggaaattcccacgccttacatgtggagctatcagccacagatgggcttggcagctg

SEQ ID NO: 116986 - DNA, 80 bp, synthetic construct
  source 1..80: mol_type = other DNA
ggaggaccccaaggcatggggtgtgtgagggccgatgcatacatgccgcaaatatcatatacatatatgggctcttttag

SEQ ID NO: 116987 - DNA, 80 bp, synthetic construct
  source 1..80: mol_type = other DNA
tctgggaggctggctggcgtcccaaattgcaccacccgcggcggccactggatttgtcgtcagtggcctggtggaggctg

SEQ ID NO: 116988 - DNA, 80 bp, synthetic construct
  source 1..80: mol_type = other DNA
ttcccccccgccctgccagtctgggcttcgccttcatacaatcctcctttgctggaggcgtggaagagaccaggctatga

SEQ ID NO: 116989 - DNA, 80 bp, synthetic construct
  source 1..80: mol_type = other DNA
ctttgtgggcgccggcttagctggcgctgccatcggcagtgttggactggggaaggttctcgtggacatccttgcagggt

SEQ ID NO: 116990 - DNA, 80 bp, synthetic construct
  source 1..80: mol_type = other DNA
gataacgcccaattcaccaagagctgaagccaccctggggggttttggaagcctaggacttgattgtgaaccgaggacag

SEQ ID NO: 116991 - DNA, 80 bp, synthetic construct
  source 1..80: mol_type = other DNA
gtcttcacaaccaacatatggctgaaactccgagaggtgtacacccaatcatgtgaccataggctaatgtcggcagccat

SEQ ID NO: 116992 - DNA, 80 bp, synthetic construct
  source 1..80: mol_type = other DNA
acgggcgacaatacaacaacgtcctctgagcccgccccctctgtctgccccccagactccgacgccgagtcctgttcttc

SEQ ID NO: 116993 - DNA, 80 bp, synthetic construct
  source 1..80: mol_type = other DNA
caaatgctccgggataagctaaaggaccaaaactttcaacaaaaagttgtggacgggctggcttccggcattaacggcgt

SEQ ID NO: 116994 - DNA, 80 bp, synthetic construct
  source 1..80: mol_type = other DNA
cgacgtgcatttgattaactagatgccggatgggtggaaacaacccgtgttatataagatgttttgcatgtgagacaacc

SEQ ID NO: 116995 - DNA, 80 bp, synthetic construct
  source 1..80: mol_type = other DNA
cacggctagctgtgaaaggtccgtgagccgcatgactgcagagagtgctgatactggcctctctgcagatcatgtctaga

SEQ ID NO: 116996 - DNA, 80 bp, synthetic construct
  source 1..80: mol_type = other DNA
tggcactacgcaccgaggccgtgtaagaccgaaccggcctctaaggtgtgtggtccagtgtactgctttaccccaagccc

SEQ ID NO: 116997 - DNA, 80 bp, synthetic construct
  source 1..80: mol_type = other DNA
aagggggccgcaaagccgctcgcctcattgtgtaccctgacctggtggtgcgtgtctgtgagaaacgcgccctatatgac

SEQ ID NO: 116998 - DNA, 80 bp, synthetic construct
  source 1..80: mol_type = other DNA
ttggaggaatcctgatgatgctggtcagtgtggctgggagggtagatggacttgaactcaggaagcttggggaagtttct

SEQ ID NO: 116999 - DNA, 80 bp, synthetic construct
  source 1..80: mol_type = other DNA
caaagggggtcatcttacatgtctgcctgcccatcacgggagcgcagcctggcttgtggttgcaatcacaatgaatggtg

SEQ ID NO: 117000 - DNA, 80 bp, synthetic construct
  source 1..80: mol_type = other DNA
ccacgcgagcgacccgcgactcgcgatacgcgctaacggtgacccagataatccagatagccatccccgcgtccatcata

SEQ ID NO: 117001 - DNA, 80 bp, synthetic construct
  source 1..80: mol_type = other DNA
tatggatcccgacgcggggcagaacgtacgtgcgttggcgcggcgatgaggagtccgggctgccgagtgaggcgtaggtg

SEQ ID NO: 117002 - DNA, 80 bp, synthetic construct
  source 1..80: mol_type = other DNA
tcccccgccgcgctctcgcgggcgtgctgcaccacgggctggcggatggaggagaagtagttggcccccagggccggtgg

SEQ ID NO: 117003 - DNA, 80 bp, synthetic construct
  source 1..80: mol_type = other DNA
gcccgcgttccaaaaagcgcacggacttactgctcttcgggtttttcaggacgaatgtcacttcgccgaagactgccaaa

SEQ ID NO: 117004 - DNA, 80 bp, synthetic construct
  source 1..80: mol_type = other DNA
catctcctgattctactacctcacctcctgagattcaagcacctgttcctgtggacgtgcgcaagcccattcctgtgaag

SEQ ID NO: 117005 - DNA, 80 bp, synthetic construct
  source 1..80: mol_type = other DNA
accaccttggctcgactcgggtgctcctttaacgcccgctgagcgttctcgctcgctacatccatttccaccaactgctc

SEQ ID NO: 117006 - DNA, 80 bp, synthetic construct
  source 1..80: mol_type = other DNA
acggccccgagttcgtgaccgggtacaacatcatcaacttcgactggcccttcttgctggccaagctgacggacatttac

SEQ ID NO: 117007 - DNA, 80 bp, synthetic construct
  source 1..80: mol_type = other DNA
ggcgacgtagagctcggccgccgcatccatcgaggccccccatctcgcctggcggtggcgcacaaagcgtccgaagagct

SEQ ID NO: 117008 - DNA, 80 bp, synthetic construct
  source 1..80: mol_type = other DNA
gttgctagagtcaatccattgggaggtttgaagaggctgccagccggacttctgctgggccatggacccatcagaatggt

SEQ ID NO: 117009 - DNA, 80 bp, synthetic construct
  source 1..80: mol_type = other DNA
cgcgtacctcaacacccctggacttccagtgtgtcaggaccatctagagttctgggaaggggtcttcacaggcctcactc

SEQ ID NO: 117010 - DNA, 80 bp, synthetic construct
  source 1..80: mol_type = other DNA
aagtttttacaataggtacagcccaacaccaccatattattcataattccataactaaaaaaactccacccaaacgacat

SEQ ID NO: 117011 - DNA, 80 bp, synthetic construct
  source 1..80: mol_type = other DNA
gatgagaagtatgtggattacatgagttcactaaagagatatgaagacacaactttggttgaggacacagtactgtagat

SEQ ID NO: 117012 - DNA, 80 bp, synthetic construct
  source 1..80: mol_type = other DNA
ttcggtggctagtggtgctcaggctatgagagatcttgggggtgggactcccttcttcggtgtggccggtcatgtaattg

SEQ ID NO: 117013 - DNA, 80 bp, synthetic construct
  source 1..80: mol_type = other DNA
aaagaaagacctgggaattggctatgtagccgccgaaaaccaccaacatgctacgatgctggacgtagacctacacccag

SEQ ID NO: 117014 - DNA, 80 bp, synthetic construct
  source 1..80: mol_type = other DNA
ccgccccgaaagaagcggacggtggttctcaccgagtcatccgtgtctactgccttggccgagcttgccaccaagagctt

SEQ ID NO: 117015 - DNA, 80 bp, synthetic construct
  source 1..80: mol_type = other DNA
cgacagttcacgtgtgcgtttcatcctgtattatgcaaccacggcattgtgttattagaagggaaaccactaacagcgtc

SEQ ID NO: 117016 - DNA, 80 bp, synthetic construct
  source 1..80: mol_type = other DNA
agggtgggtcgcctcccaacttgccacgcctacggcagccactggcttcgtagtgagcggtcttgctggagccgcggtgg

SEQ ID NO: 117017 - DNA, 80 bp, synthetic construct
  source 1..80: mol_type = other DNA
accgtcagcgagttcgtgcaagtcaaacacattgaccgcgtgggccccgctggcgtttcgccggcgcctccgccaaacaa

SEQ ID NO: 117018 - DNA, 80 bp, synthetic construct
  source 1..80: mol_type = other DNA
gtgggcaccagtagccaacccgactcagggcctgaggagaagcgtgatgatgactcggacgcggcttcatattcttccat

SEQ ID NO: 117019 - DNA, 80 bp, synthetic construct
  source 1..80: mol_type = other DNA
tggtgcctttacaatcacatcacttttcagtacgggcgcaaagcaacccctacacttggtcaataccaacggctcgtggc

SEQ ID NO: 117020 - DNA, 80 bp, synthetic construct
  source 1..80: mol_type = other DNA
attccccatggaggaccccgtccctaacccacggggcccgtggctatggcagggcttgccgccccgacgttggctgcgag

SEQ ID NO: 117021 - DNA, 80 bp, synthetic construct
  source 1..80: mol_type = other DNA
tccacttacgtgacgggggggtcgcagggccgtactatccacagccttacgagcttcttcaggtcagggccgtcccagaa

SEQ ID NO: 117022 - DNA, 80 bp, synthetic construct
  source 1..80: mol_type = other DNA
tgtcttgtgcctcaggaatgggttcagcatttctatcatgagaccgctccatcacaatctgcggtggctcttattagata

SEQ ID NO: 117023 - DNA, 80 bp, synthetic construct
  source 1..80: mol_type = other DNA
agatgactgtgtggtaaagcccctggacgatcgctttgccacctcgctccacttcctcaatgctatgtcaaaggttcgca

SEQ ID NO: 117024 - DNA, 80 bp, synthetic construct
  source 1..80: mol_type = other DNA
gataccacaacaaagtgtactgcactacatcacggagtgcgtcgcagagggcaaagaaggtgactttcgacagggtgcag

SEQ ID NO: 117025 - DNA, 80 bp, synthetic construct
  source 1..80: mol_type = other DNA
atgtccagatcgaaatcgtctagcgcgtcggcatgcgccatcgccacatcctcgccgtctaagtggagctcgtcccccag

SEQ ID NO: 117026 - DNA, 80 bp, synthetic construct
  source 1..80: mol_type = other DNA
tggcggccaccagcgccgacgatctggactctgatgcagggtcgtattcctccatgccccctctagaggtggagccggtg

SEQ ID NO: 117027 - DNA, 80 bp, synthetic construct
  source 1..80: mol_type = other DNA
cggggtcgagggtctgggcctccagaaattaggctacatcctgcgtgaagttggcacccgacccggaggcagaatctacg

SEQ ID NO: 117028 - DNA, 80 bp, synthetic construct
  source 1..80: mol_type = other DNA
gccagcacctgcagcgtgagcatggcgggcccgtccactaccacgcgcccgttgtgaaacatggcgttgaccgtgttggc

SEQ ID NO: 117029 - DNA, 80 bp, synthetic construct
  source 1..80: mol_type = other DNA
tggaaattggctggaaggcctggggaaagagtattttatttgcaccagaactcgccaacaacacctttgtggttgatggt

SEQ ID NO: 117030 - DNA, 80 bp, synthetic construct
  source 1..80: mol_type = other DNA
ctggtaatggctcagctgctcagggtcccgcaagccatcttggacatgatcgctggtgcccactggggagtcctagcggg

SEQ ID NO: 117031 - DNA, 80 bp, synthetic construct
  source 1..80: mol_type = other DNA
ctaaacccaaggaaattacccccgtaaaccccggaacgtcaccacttctacgatatgccgcatggaccggagggcttgca

SEQ ID NO: 117032 - DNA, 80 bp, synthetic construct
  source 1..80: mol_type = other DNA
tggtggcgcgcgaggaggtggccattgggctgatgcatttgtgggactttatggaggcgtacgtgcaaaatccttcgagc

SEQ ID NO: 117033 - DNA, 80 bp, synthetic construct
  source 1..80: mol_type = other DNA
agctcacgacgctcggcgtcaatgccgtcgcattctataggggtgtggacgttgccgttataccaactgatggcgacgtg

SEQ ID NO: 117034 - DNA, 80 bp, synthetic construct
  source 1..80: mol_type = other DNA
cagtggtcatgacacagtggttatggaggtgtcatacacaggaagtgacaagccatgtcggatcccggtgcgggctgtgg

SEQ ID NO: 117035 - DNA, 80 bp, synthetic construct
  source 1..80: mol_type = other DNA
gccagccaactgtcggctccgtcccttaaggccacgtgcaccacgcacagggaccacccggatgcggagctcttggaagc

SEQ ID NO: 117036 - DNA, 80 bp, synthetic construct
  source 1..80: mol_type = other DNA
gttgatcctagggacccgtagactccagctaacggcggaatgggccggagtggtggagtgggaccctgagctggttaatg

SEQ ID NO: 117037 - DNA, 80 bp, synthetic construct
  source 1..80: mol_type = other DNA
agtggacacgagaacccaagaaccgaaagaaggcacgaagaaactaatgaaaatcacagcagagtggctgtggaaagaat

SEQ ID NO: 117038 - DNA, 80 bp, synthetic construct
  source 1..80: mol_type = other DNA
tcgaagcgccgccgcacgtcagaagaaggttaccttcgacagactgcaagtgctcgatgaccattacaaaaatgtactca

SEQ ID NO: 117039 - DNA, 80 bp, synthetic construct
  source 1..80: mol_type = other DNA
tcaaggaaaccgtgttgctgcaaatggaaaataagggttgtcttgtgcacaggcaaatgtttttagcaataaagttatca

SEQ ID NO: 117040 - DNA, 80 bp, synthetic construct
  source 1..80: mol_type = other DNA
attccctatttgggaaaaagggaagacttgtggtgtgggtctctcatagggcacagaccgcgcaccacctgggctgaaaa

SEQ ID NO: 117041 - DNA, 80 bp, synthetic construct
  source 1..80: mol_type = other DNA
aaagaaggtttcaggttccggtggttgggtctgcgtcgtccagggtggggctgatctgaatttcccgcagaacctcgacc

SEQ ID NO: 117042 - DNA, 80 bp, synthetic construct
  source 1..80: mol_type = other DNA
acccctatggggttctcctacgacaccaggtgctttgattctacggtcaccgagcgcgacatccggactgaggaggacat

SEQ ID NO: 117043 - DNA, 80 bp, synthetic construct
  source 1..80: mol_type = other DNA
cgtattaagctttacagtcccccgttatctgatataatcacttttcttaacacgtcatcgggaaaacagatgtttatatt

SEQ ID NO: 117044 - DNA, 80 bp, synthetic construct
  source 1..80: mol_type = other DNA
cccggcgatgacggccgtgagggtgtttatgaagtacgtcgagtggtcgcagtacctcaagatctggttggccatgtagt

SEQ ID NO: 117045 - DNA, 80 bp, synthetic construct
  source 1..80: mol_type = other DNA
tgattcaacaactcccattccgaccaccatcatggctaagaatgaagtcttctgcatcgacccttccaagggagggcgta

SEQ ID NO: 117046 - DNA, 80 bp, synthetic construct
  source 1..80: mol_type = other DNA
cactgcaatagcaattaacgctggaaaagggttggaatttgaaacagactcctcaaacggaaatcccataaaaacaaaaa

SEQ ID NO: 117047 - DNA, 80 bp, synthetic construct
  source 1..80: mol_type = other DNA
ccttgcgagcccgaaccggacgtggccgtgttgacgtccatgctcactgacccctcccatataacagcggaggcggccgg

SEQ ID NO: 117048 - DNA, 80 bp, synthetic construct
  source 1..80: mol_type = other DNA
actgggctaaggtcttgattgtgatgctactctttgccggcgttgacgggaacactcgcgtgacggtggggacgcaagcc

SEQ ID NO: 117049 - DNA, 80 bp, synthetic construct
  source 1..80: mol_type = other DNA
tggagaagacattacggaaaagggtctgaagattggaactgatacaacagaaaatgaaccaatatttgcagacaaaaatt

SEQ ID NO: 117050 - DNA, 80 bp, synthetic construct
  source 1..80: mol_type = other DNA
actccgacgctgagtcttattcctccatgccccccttggaggtggaacctggggatccggatcttagcgacgggtcatgg

SEQ ID NO: 117051 - DNA, 80 bp, synthetic construct
  source 1..80: mol_type = other DNA
atacaggctctggcattacccttgcaccgtcaattataccatcttcaagatcaggatgtatgtgggaggggtcgagcaca

SEQ ID NO: 117052 - DNA, 80 bp, synthetic construct
  source 1..80: mol_type = other DNA
cgtcgcccgcgatgcttcaggtaacagagtttactacctcacgcgtgacccccaagtgccacttgcgagggctgcgtggg

SEQ ID NO: 117053 - DNA, 80 bp, synthetic construct
  source 1..80: mol_type = other DNA
gctttggtaaaccgaaaatcaagattgatccatacaccacaaagggaacaaccactgaaaatcatcatgagtttgaatta

SEQ ID NO: 117054 - DNA, 80 bp, synthetic construct
  source 1..80: mol_type = other DNA
ttccaacagacagtggacatgacacagtggtcatggaagttgcgttctctgggaccaaaccctgcaggatcccggtaagg

SEQ ID NO: 117055 - DNA, 80 bp, synthetic construct
  source 1..80: mol_type = other DNA
cacatcaataggactgccctgaattgtaatgattccctgcacacgggcttcattgcttctctcttctatgtccaaagatt

SEQ ID NO: 117056 - DNA, 80 bp, synthetic construct
  source 1..80: mol_type = other DNA
attctgtagaactatccattggaaatggattagaaacacaaaacaataaactatgtgccaaattgggaaatgggttaaaa

SEQ ID NO: 117057 - DNA, 80 bp, synthetic construct
  source 1..80: mol_type = other DNA
cttccaccgtgacggccaagctcctcgccgttgaggaagcatgcgacctcacgcccccgcactctgctcgttcgaagttt

SEQ ID NO: 117058 - DNA, 80 bp, synthetic construct
  source 1..80: mol_type = other DNA
ggctctggcattttccctgcaccctcaactacactctgttcaaggtcaggatgtttgtgggtggcatcgagcacaggctg

SEQ ID NO: 117059 - DNA, 80 bp, synthetic construct
  source 1..80: mol_type = other DNA
cggccaaatccaaatttggctatggggcaaaggacgtccggaacctatccagcagggccgtagaccacatccactccgtg

SEQ ID NO: 117060 - DNA, 80 bp, synthetic construct
  source 1..80: mol_type = other DNA
tcactggcttgtggcccttttgcctgttgctcctagcactgccccaacaggcttatgcatatgatgcatccgtgcacgga

SEQ ID NO: 117061 - DNA, 80 bp, synthetic construct
  source 1..80: mol_type = other DNA
aagaagcctgcaagctgacgcccccgcattcggctaaatctaaatttggctatggggcgaaggacgtccggaacctatcc

SEQ ID NO: 117062 - DNA, 80 bp, synthetic construct
  source 1..80: mol_type = other DNA
gttcctcttctacttccattgtttcttcttgaaccgcgggcggagagggtagccttcttcgtcgccggcgaacgggcagc

SEQ ID NO: 117063 - DNA, 80 bp, synthetic construct
  source 1..80: mol_type = other DNA
ggtatctaccacccccacgctggccgtaccgaacgcttcgacaccagtccacgggtttcgcaagcacgtggacctcatgg

SEQ ID NO: 117064 - DNA, 80 bp, synthetic construct
  source 1..80: mol_type = other DNA
aggtctgcacacctacgtcatcggagcgcaactaccttgtgaacctgaacctgacgtgaccgtcctgacatccatgctca

SEQ ID NO: 117065 - DNA, 80 bp, synthetic construct
  source 1..80: mol_type = other DNA
ggctgctgtttaatagcctggtgccggcgcaactaaaggggcgtgatttcggtggcgaccacacggccaagctggaattc

SEQ ID NO: 117066 - DNA, 80 bp, synthetic construct
  source 1..80: mol_type = other DNA
actttatacctgttgagtctctcgagaccagcatgaggtccccggtctttactgacaattcaacaccccccgctgtgccc

SEQ ID NO: 117067 - DNA, 80 bp, synthetic construct
  source 1..80: mol_type = other DNA
gactggcgtgaggaccatcaccacaggttcccccatcacctactccacctacggcaaattcttggctgacggtgggtgtt

SEQ ID NO: 117068 - DNA, 80 bp, synthetic construct
  source 1..80: mol_type = other DNA
gtagcggaccacggaggcccggagtctgcgcagggccagccagtaagcacgcaccagtaacaggttacacagcaggcatt

SEQ ID NO: 117069 - DNA, 80 bp, synthetic construct
  source 1..80: mol_type = other DNA
tccagaaccagaaaaacagagaacaccccaagacaaccaattgacctacgttgtcatagccatcctcacagtggtggccg

SEQ ID NO: 117070 - DNA, 80 bp, synthetic construct
  source 1..80: mol_type = other DNA
attacgctcctaggccatgtgacgtggtgccggccagcacggtgtgcggccctgtttactgcttcacgcccagccctgtt

SEQ ID NO: 117071 - DNA, 80 bp, synthetic construct
  source 1..80: mol_type = other DNA
agtctggaccccactttcactatatccacacagactgtccctcaagacgcagtttcgcgtagccagcgtcgagggcgtac

SEQ ID NO: 117072 - DNA, 80 bp, synthetic construct
  source 1..80: mol_type = other DNA
gtcctatgcccggccccgttggatcttctggtgcctactcctgctttctgcaggggtaggcatctttttgctccccaacc

SEQ ID NO: 117073 - DNA, 80 bp, synthetic construct
  source 1..80: mol_type = other DNA
atgggaggcaactgtgctatccccatcacggtcatggagtacaccgaatgctcctacaacaagtctctggtggcctgtcc

SEQ ID NO: 117074 - DNA, 80 bp, synthetic construct
  source 1..80: mol_type = other DNA
ccatcatgtgcccttcgggacacgtggtggggatcttcagggcggctgtgtgcaccagaggcgtagcaaaagccctgcag

SEQ ID NO: 117075 - DNA, 80 bp, synthetic construct
  source 1..80: mol_type = other DNA
gccctttggctgatgctgatgataacgcaagcggaagcagccctggagaaccttgtcacgctgaatgctgtcgctgctgc

SEQ ID NO: 117076 - DNA, 80 bp, synthetic construct
  source 1..80: mol_type = other DNA
tattcccgaagtgtggcaccccccggacgacgtggccgcgcggctccggaccgcagggttcggtgcggtgggtgccggcg

SEQ ID NO: 117077 - DNA, 80 bp, synthetic construct
  source 1..80: mol_type = other DNA
tatctgcgtggtctggcacgtcaagggtaggttaccagctgctaccgcctacgcagcttgtgggatgtggcccctgctcc

SEQ ID NO: 117078 - DNA, 80 bp, synthetic construct
  source 1..80: mol_type = other DNA
cgaggccggcgccaaggtcgcccagctcctggttgcgggagcggacgctcttccttggatccccccggacaactttcacg

SEQ ID NO: 117079 - DNA, 80 bp, synthetic construct
  source 1..80: mol_type = other DNA
cttgggagacggcccgacacactcctgtcaattcatggctcgggaacatcatactgtacgcacccacaatatgggtgcgt

SEQ ID NO: 117080 - DNA, 80 bp, synthetic construct
  source 1..80: mol_type = other DNA
gacacagcctgggactttggttcagtgggtggtgttctaaattcattagggaaaatggtgcaccaaatattcggaagcgc

SEQ ID NO: 117081 - DNA, 80 bp, synthetic construct
  source 1..80: mol_type = other DNA
ccccaggcgtgcggggcggcgggctgctcgacaaagaaacggggggggagatttagagggagcggggcttgagtcgcgac

SEQ ID NO: 117082 - DNA, 80 bp, synthetic construct
  source 1..80: mol_type = other DNA
gagggtagtcggccaacataaaggcttcgatctgtttaaaagccatttgggcctttgacccctcagagaaaaacaagcca

SEQ ID NO: 117083 - DNA, 80 bp, synthetic construct
  source 1..80: mol_type = other DNA
agaatacaatcacacatgtgacaaacaaaaccttatactgctgtttgtaaattttacacatgatggagcttatcttggtt

SEQ ID NO: 117084 - DNA, 80 bp, synthetic construct
  source 1..80: mol_type = other DNA
tgactgaatttcagccacaccagttatggaccaccctactgtctttgacatttgtcaaaacaactctctcattggattat

SEQ ID NO: 117085 - DNA, 80 bp, synthetic construct
  source 1..80: mol_type = other DNA
atgcttaactcgagaggagagcggtgtggctaccgcaggtgtcgagcgagcggggtgttcactaccagcatgggcaacac

SEQ ID NO: 117086 - DNA, 80 bp, synthetic construct
  source 1..80: mol_type = other DNA
gtcggtaaatagcgggtttgatcccgataaatttcgagaagcccaggaaatgattaaatatatgacgttagtatctgcgg

SEQ ID NO: 117087 - DNA, 80 bp, synthetic construct
  source 1..80: mol_type = other DNA
gaaaagaacctgcctccggcgtttcccaacaacgggatagagagcctagtggacaagatgagtagatggaagacgtatgc

SEQ ID NO: 117088 - DNA, 80 bp, synthetic construct
  source 1..80: mol_type = other DNA
tggccggcggggccgcgcgaagctgcagctccaggtccgcgagttccccgtaaaaggcgtccgtctcccgaatgacatcc

SEQ ID NO: 117089 - DNA, 80 bp, synthetic construct
  source 1..80: mol_type = other DNA
cagtacttcatagccagaattgaggctgccgtgcacgtctacattccatccttggaggtgcgcggctctagagattctct

SEQ ID NO: 117090 - DNA, 80 bp, synthetic construct
  source 1..80: mol_type = other DNA
actttccccgcgcccgctataattcagatgcagccaattgttgccggcggcattgtcccagccaatcagcatcgccctcc

SEQ ID NO: 117091 - DNA, 80 bp, synthetic construct
  source 1..80: mol_type = other DNA
tagctgcttattgcctagctactgggtgtgtaagcatcatcggccgcatccatgtcaaccagaagacgatcatcgctcct

SEQ ID NO: 117092 - DNA, 80 bp, synthetic construct
  source 1..80: mol_type = other DNA
cacgtttcgccctcgcgtgtatcaaaccgtgcaggagtgcaactgctccatctatgccggccacgtcaccggccacagaa

SEQ ID NO: 117093 - DNA, 80 bp, synthetic construct
  source 1..80: mol_type = other DNA
tcatgttccgggttagtgttgtagataatccagtcatagcaacaacgctgggcatggtgattaaatatatcttttaacaa

SEQ ID NO: 117094 - DNA, 80 bp, synthetic construct
  source 1..80: mol_type = other DNA
attcaacatcttgggaggctgggtagcctcacagattgcgacccccacggcctctacggcttttgtcgtaagcggcattg

SEQ ID NO: 117095 - DNA, 80 bp, synthetic construct
  source 1..80: mol_type = other DNA
gcagtttaagcagaaggtactaggattgctccaggccagcgctcgacaggccgaagaaatcaagcctgccgtaacatctg

SEQ ID NO: 117096 - DNA, 80 bp, synthetic construct
  source 1..80: mol_type = other DNA
actgaggtggagatagtcacccgaatgggcgagagaaagattctcaagccgagatggctcgatgcgagggtttatgcaga

SEQ ID NO: 117097 - DNA, 80 bp, synthetic construct
  source 1..80: mol_type = other DNA
tcttattaaacatcttggggggatgggtggcgtcacaactcgcaaatcctacagcttccacagcttttgtagtcagcggt

SEQ ID NO: 117098 - DNA, 80 bp, synthetic construct
  source 1..80: mol_type = other DNA
ctattctctttccttgtttatcatttttttgattttggatggaatgcccccaatgcactcacttacccacaagaaccaga

SEQ ID NO: 117099 - DNA, 80 bp, synthetic construct
  source 1..80: mol_type = other DNA
accagcacgtgggtcttggtgggaggcatcgtggccgccctagctgcctactgtttgtctgtgggcagtgttgtcatcac

SEQ ID NO: 117100 - DNA, 80 bp, synthetic construct
  source 1..80: mol_type = other DNA
tttttgtttctaggtccggtgtcagaggatgagtcatcaccctcagaagaagaccacccgtgtccccctgagctgtcagg

SEQ ID NO: 117101 - DNA, 80 bp, synthetic construct
  source 1..80: mol_type = other DNA
agctggagcggacgacacccgtgatgcagaagaaggtcgggcaaatcatgctgatcctagtgtcaaccgcagcggtagtc

SEQ ID NO: 117102 - DNA, 80 bp, synthetic construct
  source 1..80: mol_type = other DNA
ttgagtcgaagcatcggtatcatttcaactgggcgacgaaagccatgggggctctttcttcttcgccggaggcatgcctc

SEQ ID NO: 117103 - DNA, 80 bp, synthetic construct
  source 1..80: mol_type = other DNA
aacaggcgaaaatcacctacgagctcctgtccggcggcaagcagcatcgccttgcctatgagctgccccagcagaagcag

SEQ ID NO: 117104 - DNA, 80 bp, synthetic construct
  source 1..80: mol_type = other DNA
ggccattctgtttgcccccggggagacgtttgggacgaacgtctccatccacgccattgcccacgacgacggtccgtacg

SEQ ID NO: 117105 - DNA, 80 bp, synthetic construct
  source 1..80: mol_type = other DNA
ttgaatacacagtggttgtgacagtccacaatggagacacccatgtagtaggaaatgacacatccaatcatggggttaca

SEQ ID NO: 117106 - DNA, 80 bp, synthetic construct
  source 1..80: mol_type = other DNA
gggaccttccccatcaacgcctacaccacgggcccctgtaccccccttcctgcgccgaactatacgttcgcgttatggag

SEQ ID NO: 117107 - DNA, 80 bp, synthetic construct
  source 1..80: mol_type = other DNA
cccaaacacctattcctacaacaatcatggcaaagaatgaggttttttgcgttgacgcgtccaaaggcggccgcaagccc

SEQ ID NO: 117108 - DNA, 80 bp, synthetic construct
  source 1..80: mol_type = other DNA
gagcaactccttgttgcgccaccacaacatggtgtactccacgacttcccggtccgcagcaacgcgccagaagaaggtca

SEQ ID NO: 117109 - DNA, 80 bp, synthetic construct
  source 1..80: mol_type = other DNA
ggattaagccatagtacggaaaaaactatgctacctgtgagccccgtccaaggacgttaaaagaagtcaggccatcacaa

SEQ ID NO: 117110 - DNA, 80 bp, synthetic construct
  source 1..80: mol_type = other DNA
gaggtaaaagaccgagcgtctagggtaaaagcgcgcatgctcaccatcgaggaagcgtgtgcgctcgtccctccacactc

SEQ ID NO: 117111 - DNA, 80 bp, synthetic construct
  source 1..80: mol_type = other DNA
aaggttgctatcatcatagttatgttttcaggggtcgatgccggtacacatctcaccggtagcaatgttggccaaggtgc

SEQ ID NO: 117112 - DNA, 80 bp, synthetic construct
  source 1..80: mol_type = other DNA
gggccaggccccgtttcgcacgctggttcagcgcatatggacgacgacgtccgacggcgaggccgttgagctagccagcg

SEQ ID NO: 117113 - DNA, 80 bp, synthetic construct
  source 1..80: mol_type = other DNA
gaaccgctggctggagaccgagctcgtgttcgtggaggacgaggaggacgtctccaagctctccgagggcgagctcggct

SEQ ID NO: 117114 - DNA, 80 bp, synthetic construct
  source 1..80: mol_type = other DNA
gttttggttacaccagggctcgagtctcgggtcggtggttgtatagaatcctgttgagagtcacttggtgactctgctgt

SEQ ID NO: 117115 - DNA, 80 bp, synthetic construct
  source 1..80: mol_type = other DNA
gggagtggggtttctaccaaagcttttattaggagtggcattggcttggttgggcctgaacatgagaaaccctacaatgt

SEQ ID NO: 117116 - DNA, 80 bp, synthetic construct
  source 1..80: mol_type = other DNA
catgatcctagttggagtcatcatgatgttcctgtccctaggagttggggcggaccaaggatgtgcaataaactttggca

SEQ ID NO: 117117 - DNA, 80 bp, synthetic construct
  source 1..80: mol_type = other DNA
gccaacacccgagcctccgggaccggcgtcgctgtcgtcgggcggtaccgcgacgattatatcatctttgccctggagca

SEQ ID NO: 117118 - DNA, 80 bp, synthetic construct
  source 1..80: mol_type = other DNA
gcgcaggtgatcgggtaggcttcctgaaacaggccgcacgggtcttccacgagctcgcggcaccccggcgggcgcttaaa

SEQ ID NO: 117119 - DNA, 80 bp, synthetic construct
  source 1..80: mol_type = other DNA
cgctggtttcagcggtggcagccaacgagctaggcatgctggagaaaaccaaagaggacctctttgggaagaagaactta

SEQ ID NO: 117120 - DNA, 80 bp, synthetic construct
  source 1..80: mol_type = other DNA
tgcggttagaaagtcacgacgcgccgcttgctcctccacgcgaattttaacacaggtcgcgcgctgtcgcatcatctcta

SEQ ID NO: 117121 - DNA, 80 bp, synthetic construct
  source 1..80: mol_type = other DNA
ttgaaaaaggaattgatacacacctcattaaattttttaccaaacgcccgctattggttgaaaaggatcaagggaatact

SEQ ID NO: 117122 - DNA, 80 bp, synthetic construct
  source 1..80: mol_type = other DNA
ctgcagttgtggccctttctgctgctcgtcttgtctttgcccagacgagcgtttgctcaagaccaggagcaggcggcctc

SEQ ID NO: 117123 - DNA, 80 bp, synthetic construct
  source 1..80: mol_type = other DNA
tgttgatcttcttatccacagccgtctctgctgatgtggggtgctcggtggacttctcaaagaaggaaacgagatgcggt

SEQ ID NO: 117124 - DNA, 80 bp, synthetic construct
  source 1..80: mol_type = other DNA
acttcttctccatccttctagcccaggagcaacttgaaaaggccctagactgtcagatctacggggcctgctactccatt

SEQ ID NO: 117125 - DNA, 80 bp, synthetic construct
  source 1..80: mol_type = other DNA
ggacaggttagtgtgcgggggtgtagtttctatgcgtgttggattgccacagcaggcagaaccaagagtcaattgtctct

SEQ ID NO: 117126 - DNA, 80 bp, synthetic construct
  source 1..80: mol_type = other DNA
ggtgcggatgtacgtggtggggttagagcatcgtctgactgcagcatgtaacttcacgcgcggtgacccctgcgggttgg

SEQ ID NO: 117127 - DNA, 80 bp, synthetic construct
  source 1..80: mol_type = other DNA
cgtgtgggactgggtttgcaccatcttgacagacttcaaaaattggctgacctctaaattgttccccaagctgcccggcc

SEQ ID NO: 117128 - DNA, 80 bp, synthetic construct
  source 1..80: mol_type = other DNA
aaggctacaaggtgctggtgctcaatccatcagtggccgctaccctagggttcggcagctacatgagcacagcccacggg

SEQ ID NO: 117129 - DNA, 80 bp, synthetic construct
  source 1..80: mol_type = other DNA
ggcatagaaccaaacatcaggaccggtgttaggacaattactacgggcggccccgttacttattccacatacggcaaatt

SEQ ID NO: 117130 - DNA, 80 bp, synthetic construct
  source 1..80: mol_type = other DNA
cccaaaccccgtatggttttggattcccctgacggggcgtggccttggcggccgcccaactctcgcaccatcccgggtta

SEQ ID NO: 117131 - DNA, 80 bp, synthetic construct
  source 1..80: mol_type = other DNA
cgcaacagtttgcggtccggtgtattgcttcactcccagtcctatcgtggtgggaactactgatcggagaggctttccaa

SEQ ID NO: 117132 - DNA, 80 bp, synthetic construct
  source 1..80: mol_type = other DNA
aagcctcaggaaacttggggtcccgcccttgcgagtctggagacaccgggcccggaacgttcgcgctaagctgatagccc

SEQ ID NO: 117133 - DNA, 80 bp, synthetic construct
  source 1..80: mol_type = other DNA
gggcaacaccatgacatgctacctgaaggctcaggcggcttgtagggcagcaaagctcaaaaactttgacatgttggtct

SEQ ID NO: 117134 - DNA, 80 bp, synthetic construct
  source 1..80: mol_type = other DNA
ggacggagaacaccgacgcctagcgcggtccatcattgagctcacataccgacacaaagtcgtgaaagtgatgaggccag

SEQ ID NO: 117135 - DNA, 80 bp, synthetic construct
  source 1..80: mol_type = other DNA
tgacataatgactgaagagtccatttaccaatcatgtgacttgcagcctgaggcgcgcgtggcaatacggtcactcaccc

SEQ ID NO: 117136 - DNA, 80 bp, synthetic construct
  source 1..80: mol_type = other DNA
atgaattgaactatgtgttatgggaaggaggccacgacatcacagtagttgtaggagacgtgaagggtgttttagaaaga

SEQ ID NO: 117137 - DNA, 80 bp, synthetic construct
  source 1..80: mol_type = other DNA
tggcctcacacatatagatgcccatttcctctcccagacgaagcaggcaggggagggtttcccgtacctggtggcctacc

SEQ ID NO: 117138 - DNA, 80 bp, synthetic construct
  source 1..80: mol_type = other DNA
gcccgcctgggccatttccaggagcccctccgcgatgcgcagcagccgcgccaggggctcggcgtcgacccgaaacatgt

SEQ ID NO: 117139 - DNA, 80 bp, synthetic construct
  source 1..80: mol_type = other DNA
gctgggagctcttactggcacatacatctataaccatctcacccccctgagagactgggcccatggcagcttgcgagacc

SEQ ID NO: 117140 - DNA, 80 bp, synthetic construct
  source 1..80: mol_type = other DNA
taatcgtgtacccagacttgggtgtacgagtttgcgagaaaaaggcgctctacaatgtcatccaggaactgccgaaggca

SEQ ID NO: 117141 - DNA, 80 bp, synthetic construct
  source 1..80: mol_type = other DNA
cgcgggcggcacgcctaccacgtgacaggccgccaggagctcggcgcagagggcctcgttaagagccagaaggtcgggat

SEQ ID NO: 117142 - DNA, 80 bp, synthetic construct
  source 1..80: mol_type = other DNA
caaatgtgtctgtggcgctgggcccacgaggcaaccgcagatactacctgaccagagaccctaccactccacttgcccgg

SEQ ID NO: 117143 - DNA, 80 bp, synthetic construct
  source 1..80: mol_type = other DNA
cgcacctgcacatacgccgccttcgcagagctgggtgtcatgccagacgacagcccccgctgtctgcaccgcaccgagcg

SEQ ID NO: 117144 - DNA, 80 bp, synthetic construct
  source 1..80: mol_type = other DNA
tcatggcccgccgcgcgcaggtcccgtccatcaaggaccggatcccgtacgtgatcgtggcccagacccgcgaggtagag

SEQ ID NO: 117145 - DNA, 80 bp, synthetic construct
  source 1..80: mol_type = other DNA
gaccgggtttttcgcggctctcttctacgtcaataggttcaactcatcagggtgtggagaacgcatgaactcgtgcagcc

SEQ ID NO: 117146 - DNA, 80 bp, synthetic construct
  source 1..80: mol_type = other DNA
ggtcgctgaaaccgacgatagggagatttcagtatctgctgagtgtcacaggccttctaggcctaagtttccaccagcgc

SEQ ID NO: 117147 - DNA, 80 bp, synthetic construct
  source 1..80: mol_type = other DNA
aagcgggaagagcggccggggccgcccattaatgagtttctaattaccataccgggaagcggaacaaggcctcttgcaag

SEQ ID NO: 117148 - DNA, 80 bp, synthetic construct
  source 1..80: mol_type = other DNA
ttggaggttgcgtgaccatctcagctgagggcaagccatccattgacgtatggcttgaggacatctttcaggaaagcccg

SEQ ID NO: 117149 - DNA, 80 bp, synthetic construct
  source 1..80: mol_type = other DNA
ccaactctagcatcatctatgaggcggacaacatcatcatgcatacccccggatgcgtgccgtgtgtcaagactggcaat

SEQ ID NO: 117150 - DNA, 80 bp, synthetic construct
  source 1..80: mol_type = other DNA
cgcctactatagcgttctgaacacgtttcaggccctccaccgctccgaagcctttcgccagctggtgcactttgtgcggg

SEQ ID NO: 117151 - DNA, 80 bp, synthetic construct
  source 1..80: mol_type = other DNA
ccccgacaccgtgttggtggtgtcctgcagggcgcgcagctgctcgtgcatggcgcggaacccctcggtggacttccagg

SEQ ID NO: 117152 - DNA, 80 bp, synthetic construct
  source 1..80: mol_type = other DNA
gtctaaaatttatgcaaggaacactatatatggaaatatctacttagataatcagccatataatccagttgtaattaaaa

SEQ ID NO: 117153 - DNA, 80 bp, synthetic construct
  source 1..80: mol_type = other DNA
gtgctttttgatttgcagttaggacctcatttaaaccctttcctctcccatctctctcagatgtacaatggctgggttgg

SEQ ID NO: 117154 - DNA, 80 bp, synthetic construct
  source 1..80: mol_type = other DNA
aggggggggcgtaaggcgccgctgcggcccgcctacagaaaccctggggggggttggcgcaggacccgaggttagcgggg

SEQ ID NO: 117155 - DNA, 80 bp, synthetic construct
  source 1..80: mol_type = other DNA
cgggcgtgagcggcgaacactgcctcggagtggatgatggggacgacgggcgcccccgcctcgcctgcgtgggtgccatc

SEQ ID NO: 117156 - DNA, 80 bp, synthetic construct
  source 1..80: mol_type = other DNA
cccgcacggagagatcggagctgtcagcttagattatcctagtgggacatcaggctcacccatcctggacgtcaacggtg

SEQ ID NO: 117157 - DNA, 80 bp, synthetic construct
  source 1..80: mol_type = other DNA
tgagaagcttgagcagttctgggcgaaacacatgtggaactttgtcagtggtattcaataccttgcgggactgtctaccc

SEQ ID NO: 117158 - DNA, 80 bp, synthetic construct
  source 1..80: mol_type = other DNA
gcccacgcccttattgtataggctaggagccgtgaataatgagatcactaccacacatccaattaccaaatacatcatga

SEQ ID NO: 117159 - DNA, 80 bp, synthetic construct
  source 1..80: mol_type = other DNA
ctggccgtcggggcgctcgcgttggtgaaggtgacgggtccgtgctgctgccgctcgatcgttgttttcgggtgaacccg

SEQ ID NO: 117160 - DNA, 80 bp, synthetic construct
  source 1..80: mol_type = other DNA
catcggttcgcccccacaccgaaggcgtttatgagggatgaggtatcgttcagcgtgggtctcaactcctatgtggtcgg

SEQ ID NO: 117161 - DNA, 80 bp, synthetic construct
  source 1..80: mol_type = other DNA
gacacgtcctccgcggtggccgtgtcgcctccccgggccgtgagctgcccctccggagagatggtggggtctggagtgcc

SEQ ID NO: 117162 - DNA, 80 bp, synthetic construct
  source 1..80: mol_type = other DNA
ggtggcatccgtggagctaccaaattctttggaggagctaggggatggactcgcaatgggtatcatgatgctaaaattgc

SEQ ID NO: 117163 - DNA, 80 bp, synthetic construct
  source 1..80: mol_type = other DNA
ttgtacaccaatccctactaccataatggccaagaatgaagtcttctgtgtagaccctcagaaggggggccggaagccag

SEQ ID NO: 117164 - DNA, 80 bp, synthetic construct
  source 1..80: mol_type = other DNA
ggcggcggttttcgcccccgggcaaaaccgtgccggttgcgaccgggtgcggaacgggatcgatagggagagcgggagaa

SEQ ID NO: 117165 - DNA, 80 bp, synthetic construct
  source 1..80: mol_type = other DNA
caactgttcactttctcccccaggcgccactggacaacgcaagattgcaactgctctatctaccccggccatataacggg

SEQ ID NO: 117166 - DNA, 80 bp, synthetic construct
  source 1..80: mol_type = other DNA
gcgccggcgcgctggttgggtgcgggtagaggggagtccccggtcgacgagatcgtatcaaggagccagcacgcgatcct

SEQ ID NO: 117167 - DNA, 80 bp, synthetic construct
  source 1..80: mol_type = other DNA
ttgtagctgtcctcttgggctggatgctgggaagcaacaatggacaaagggtcgttttcgtcgttctcttacttcttgtg

SEQ ID NO: 117168 - DNA, 80 bp, synthetic construct
  source 1..80: mol_type = other DNA
cgaattccagcatcgtttacgaagcggatactgtcattttacacctccctggatgcatcccgtgcatcaaaacaggagat

SEQ ID NO: 117169 - DNA, 80 bp, synthetic construct
  source 1..80: mol_type = other DNA
tacaaaaaagcagttggattcatgcctagtaagactgcttatcctaaacaaaccaaaccaaccaacaaagaaataagtca

SEQ ID NO: 117170 - DNA, 80 bp, synthetic construct
  source 1..80: mol_type = other DNA
ctcaagtgcaggctgagaatggacaagctacagcttaaaggaatgtcatactccatgtgcacaggaaagtttaaagttgt

SEQ ID NO: 117171 - DNA, 80 bp, synthetic construct
  source 1..80: mol_type = other DNA
tggcccctcaatgaaggaattatggctattggaatagtcagcattctactaagctcactcctcaaaaatgatgtgccgtt

SEQ ID NO: 117172 - DNA, 80 bp, synthetic construct
  source 1..80: mol_type = other DNA
tctcgctgatggcgggtgctcaggcggggcttatgatgtcatcatctgtgatgagtgtcattcaactgaccctactacaa

SEQ ID NO: 117173 - DNA, 80 bp, synthetic construct
  source 1..80: mol_type = other DNA
gagcgatagttgaagcattgtttatagatccggctgatatccgtactcctgatcatttaacgccagaagctacaactaag

SEQ ID NO: 117174 - DNA, 80 bp, synthetic construct
  source 1..80: mol_type = other DNA
tcttgctcctcgaacgtgtccgtcgcccgcgatgcttcaggcaacagaatttactatctcacgcgtgacccgcaggtacc

SEQ ID NO: 117175 - DNA, 80 bp, synthetic construct
  source 1..80: mol_type = other DNA
gacaggcacctacaatgccgcgccccacgagatctctgcgagcgcatggccgcggccctgcgcgagtccccgggcgcgtc

SEQ ID NO: 117176 - DNA, 80 bp, synthetic construct
  source 1..80: mol_type = other DNA
gaaccatcttgaaagagaatatcgagtatgaagtggccatctttgtccatggaccaaccactgtggagtcgcatggaaac

SEQ ID NO: 117177 - DNA, 80 bp, synthetic construct
  source 1..80: mol_type = other DNA
aggtgtcaggttgcccgctaccacctgcgggtctcccacctgtcccgcctccacgtaggaagaggaaaccggtggtgcta

SEQ ID NO: 117178 - DNA, 80 bp, synthetic construct
  source 1..80: mol_type = other DNA
accgggcgctggaggagccccgcgccgactctggcctcacccgcgaggaggtacgtgccgtacgtgggttccgggagcag

SEQ ID NO: 117179 - DNA, 80 bp, synthetic construct
  source 1..80: mol_type = other DNA
aaggagaaaggaagaaattaaaacccagatggttagatgctagggtctactctgacccactggcacttaaagaattcaag

SEQ ID NO: 117180 - DNA, 80 bp, synthetic construct
  source 1..80: mol_type = other DNA
gctccgacaagagcgttgttggacagatggagaggtgtgagaaaacaaacagcgatgaaacatctcttgagcttcaagaa

SEQ ID NO: 117181 - DNA, 80 bp, synthetic construct
  source 1..80: mol_type = other DNA
tattatcttcgattatttccgttctgaacgtagggatattttgttacagcgtcgtactgttccacaattgggcgggcttc

SEQ ID NO: 117182 - DNA, 80 bp, synthetic construct
  source 1..80: mol_type = other DNA
agtgtgacgagctcgccgcaaagctgtcaggcctcggactcaacgctgtagcgtattaccggggtcttgatgtgtccgtc

SEQ ID NO: 117183 - DNA, 80 bp, synthetic construct
  source 1..80: mol_type = other DNA
atcttgggaggttgggtagcctcccagatagccccccctacagctgctaccgcctttgtcgtcagcggcatagccggagc

SEQ ID NO: 117184 - DNA, 80 bp, synthetic construct
  source 1..80: mol_type = other DNA
atcatggtcgaggaagaggtctatcactgttgtgacctggagcccgaagcccgcaaggttatcactgcccttacggagag

SEQ ID NO: 117185 - DNA, 80 bp, synthetic construct
  source 1..80: mol_type = other DNA
ctgcccatcagcccactcagcaactccttgttgagacatcataacctagtctattcaacgtcgtctagaagcgcttctca

SEQ ID NO: 117186 - DNA, 80 bp, synthetic construct
  source 1..80: mol_type = other DNA
ggggcttctgaggctacagaggaggctaggaatctaacttttagcttaatgaccagacaccgtcctgagtgtgttacttt

SEQ ID NO: 117187 - DNA, 80 bp, synthetic construct
  source 1..80: mol_type = other DNA
ggggcttccactctatcctccaatgaccaaccaccttctgacgacgacgggaacgcatcagatgctggctcatacagctc

SEQ ID NO: 117188 - DNA, 80 bp, synthetic construct
  source 1..80: mol_type = other DNA
ttctggtggcattttcctgctgcctgcccgggcagctcctcgaaaccctgggagaaaagaaaagagaaaaggtggagtga

SEQ ID NO: 117189 - DNA, 80 bp, synthetic construct
  source 1..80: mol_type = other DNA
ttcaagcagaaagcgctcggtctactccaaactacagcgaagcacgcggaggagatcaaaccggccgttgagtcatcttg

SEQ ID NO: 117190 - DNA, 80 bp, synthetic construct
  source 1..80: mol_type = other DNA
tatccgatcccaggcgccgacggacagccatatcctgagcccggcggcgctggcggccatcgaaaactacgtgcgattca

SEQ ID NO: 117191 - DNA, 80 bp, synthetic construct
  source 1..80: mol_type = other DNA
gtgcctcagcgtaacgcctactatagcgttctgaacacgtttcaggccctccaccgctccgaagcctttcgccagctggt

SEQ ID NO: 117192 - DNA, 80 bp, synthetic construct
  source 1..80: mol_type = other DNA
ggatcggggccctagcttcaaaccctactccggcactgcctacaacagcctggctcccaagggagcgcccaacacctgcc

SEQ ID NO: 117193 - DNA, 80 bp, synthetic construct
  source 1..80: mol_type = other DNA
ccacagctgcctggactcccatttatatcctgccaacgcgggtatcgggtggtctggcggtgggacggcatcatgaacac

SEQ ID NO: 117194 - DNA, 80 bp, synthetic construct
  source 1..80: mol_type = other DNA
ttgttgccgcgcaggggccctagattgggtgtgcgcgcgacgaggaagacttccgagcggtcgcaacctcgaggtagacg

SEQ ID NO: 117195 - DNA, 80 bp, synthetic construct
  source 1..80: mol_type = other DNA
ggggcctgcctacctccttaaagcgtctctgctacggataccgtactttgtgagggcccacgctttgctacgagtgtgta

SEQ ID NO: 117196 - DNA, 80 bp, synthetic construct
  source 1..80: mol_type = other DNA
agtccgaaaagccaaaatggcggcgtgcccgctcgcaaagtcgcgtcaggttcggagcctgggtgctggggtccaggtgc

SEQ ID NO: 117197 - DNA, 80 bp, synthetic construct
  source 1..80: mol_type = other DNA
agaaggtcaccttcgaccgcgtgcaggtgttagaccaacactacaaagatgtagtgaaggaggttaaggcccgggcctca

SEQ ID NO: 117198 - DNA, 80 bp, synthetic construct
  source 1..80: mol_type = other DNA
gcgctactcttggcgctgggatcttggtcctctttggcttctttaccttgtcaccctggtataagcattggatcggccgc

SEQ ID NO: 117199 - DNA, 80 bp, synthetic construct
  source 1..80: mol_type = other DNA
gccatcttagaggacagcactgaagtggagataatcaccagaatgggagagagaaaaactctaaaaccaagatggctgga

SEQ ID NO: 117200 - DNA, 80 bp, synthetic construct
  source 1..80: mol_type = other DNA
aaccgatcaaactctaacaagcgacgttaacttacagttctttgccttggcaaacactcctaatgtgccaaaagccgttc

SEQ ID NO: 117201 - DNA, 80 bp, synthetic construct
  source 1..80: mol_type = other DNA
tacagctcaatgcccccgcttgaggtggagccgggagaccccgaccttagttcggggtcctggtccacggttagcgagga

SEQ ID NO: 117202 - DNA, 80 bp, synthetic construct
  source 1..80: mol_type = other DNA
tcacgctcaccccagcttataagatcctccttacccgcagcctgtggtggctgacctatatgctggtcttggcggaagcc

SEQ ID NO: 117203 - DNA, 80 bp, synthetic construct
  source 1..80: mol_type = other DNA
ccgggcccaaggcgcagcacgcgcccggctccgggaaggtcttcgcggggaccagatacgcgccatccagctcgccgacc

SEQ ID NO: 117204 - DNA, 80 bp, synthetic construct
  source 1..80: mol_type = other DNA
gatcaagcagcaaggaattcttgggaaaacccaagtaggggttggagtacaaaaagaaggagtcttccacaccatgtggc

SEQ ID NO: 117205 - DNA, 80 bp, synthetic construct
  source 1..80: mol_type = other DNA
agtacgggtacagggcaaaggaagttaggagccatgctagcaaggccgttaagcatatcaactccgtatgggaggacttg

SEQ ID NO: 117206 - DNA, 80 bp, synthetic construct
  source 1..80: mol_type = other DNA
ccctggatagaatattttgtacagcccctggcggagagttacagatccctagaacgttcaggtaaatcttggagcggcct

SEQ ID NO: 117207 - DNA, 80 bp, synthetic construct
  source 1..80: mol_type = other DNA
ctgcgtttgccaacctgtacccgggcgaacaacccctgtgtttgtgccgcggtgggaacgtcgcatacaccgtgtgtacc

SEQ ID NO: 117208 - DNA, 80 bp, synthetic construct
  source 1..80: mol_type = other DNA
ctaggctcttcttcctcgttgttttcctctgacgggggaggcacacctttggggataacggttttctccaagcgtcttac

SEQ ID NO: 117209 - DNA, 80 bp, synthetic construct
  source 1..80: mol_type = other DNA
ctcagactcaggccgtggcactaacggtgccacgtctgtgccatcactcgctgaggatgacgattcagacaccgcctcgt

SEQ ID NO: 117210 - DNA, 80 bp, synthetic construct
  source 1..80: mol_type = other DNA
aaggcgagaaatacgcctttcaatatgctgaaacgcgagagaaaccgcgtgtcaactgtgcagcagctgacaaagagatt

SEQ ID NO: 117211 - DNA, 80 bp, synthetic construct
  source 1..80: mol_type = other DNA
gccgcgccccaaccccagccgcattccgcgtttggtttcccggctgcggcggggtccgtggcctatgggcctcacggtgc

SEQ ID NO: 117212 - DNA, 80 bp, synthetic construct
  source 1..80: mol_type = other DNA
ttggcccattgtacctaattcaagctgccctctcgcgtaccccgtatttcgtgcgagcacacgcactgatccgcatgtgt

SEQ ID NO: 117213 - DNA, 80 bp, synthetic construct
  source 1..80: mol_type = other DNA
gtaccagagtaacttttgccacactaaagttttaatggaaactgatgctttttctcgggtatggtggaacggggtatttg

SEQ ID NO: 117214 - DNA, 80 bp, synthetic construct
  source 1..80: mol_type = other DNA
atgtaacagactgaagaggatggcggtgagtggagacgactgtgtggtccggcccatcgatgacaggttcggcctggccc

SEQ ID NO: 117215 - DNA, 80 bp, synthetic construct
  source 1..80: mol_type = other DNA
ggccatatcttttcagagcatttataatcatgcaatagaaggctactcattaaaattcacctggcgcgttcgaaataatg

SEQ ID NO: 117216 - DNA, 80 bp, synthetic construct
  source 1..80: mol_type = other DNA
gaattgttatttgcctcccacttaataaatgttccccgtgcaatagaaaacaacgtcacttatgaggcctcttcggcggt

SEQ ID NO: 117217 - DNA, 80 bp, synthetic construct
  source 1..80: mol_type = other DNA
aggcacatggcatcaatcccaacattaggactggagtcaggaccgtgatgaccggggaggccatcacgtactccacatat

SEQ ID NO: 117218 - DNA, 80 bp, synthetic construct
  source 1..80: mol_type = other DNA
tttaacagctcaggatgtccggagaggcttgcctcgtgtaagcgcatggaggatttcctgcagggttggggccggcttgg

SEQ ID NO: 117219 - DNA, 80 bp, synthetic construct
  source 1..80: mol_type = other DNA
aatggtttcctacacacacccaaataactaacaaactgtgctgtgcatttaggcaacgatgtgcaaatgcatttacacgc

SEQ ID NO: 117220 - DNA, 80 bp, synthetic construct
  source 1..80: mol_type = other DNA
agctcttcagcgagccagctctccgccccgtccttgaaggctacctgcaccacccataagatggcatatgactgtgacat

SEQ ID NO: 117221 - DNA, 80 bp, synthetic construct
  source 1..80: mol_type = other DNA
caatccacagcaggcatacaaccgcacaccgaggttactccgttctacaggttacgacgacatgtcaatacttgcccttg

SEQ ID NO: 117222 - DNA, 80 bp, synthetic construct
  source 1..80: mol_type = other DNA
catctatgcggcggcacgtggacctaatggtaggagcggctactttatgctcggccctttacatcggagacctctgcgga

SEQ ID NO: 117223 - DNA, 80 bp, synthetic construct
  source 1..80: mol_type = other DNA
ggacacagcctcgcatacagcgagaggcttcgctttgatcttcaaccagggcgcccagcagagtctccagcttataaaca

SEQ ID NO: 117224 - DNA, 80 bp, synthetic construct
  source 1..80: mol_type = other DNA
gtgaagacaaagctgaagctcactccactgcgtggcgcggccggcctagacttgtctggctggttcgtggcaggcggtcg

SEQ ID NO: 117225 - DNA, 80 bp, synthetic construct
  source 1..80: mol_type = other DNA
tcctgtttaacatcttggggggttggctggccgcccagctcgcccctcccagcgctgcttcggctttcgtaggcgctggc

SEQ ID NO: 117226 - DNA, 80 bp, synthetic construct
  source 1..80: mol_type = other DNA
gatcatgagtggagaggctccttcaaccgaggatttggtgaatctgctgcccgccatcctgtcacccggagcgcttgttg

SEQ ID NO: 117227 - DNA, 80 bp, synthetic construct
  source 1..80: mol_type = other DNA
tcctgtcacctggagccctcgtagttggagtggtttgcgccgcaatattgcggcgccatgcagggcccgctgagggagca

SEQ ID NO: 117228 - DNA, 80 bp, synthetic construct
  source 1..80: mol_type = other DNA
gcctgcctttcaaaagcctacgggcagatgtggctgctgagctacttccatcggcgagacctgaggacgctcgggcttgc

SEQ ID NO: 117229 - DNA, 80 bp, synthetic construct
  source 1..80: mol_type = other DNA
ctcaccacgaactgacgcgggtggcttcagccctcagaaaacttggggtgccacccctcagggtgtggaagagtcgggct

SEQ ID NO: 117230 - DNA, 80 bp, synthetic construct
  source 1..80: mol_type = other DNA
ggacagcacgaaagctactcgctacctggtgaaaactgaatcatggatcctcaggaatccaggctatgccctcgtggcgg

SEQ ID NO: 117231 - DNA, 80 bp, synthetic construct
  source 1..80: mol_type = other DNA
tgcccgtctgatcgtgtacccggaccttggagtccgggtgtgcgagaagagggccctattcgacatcacccgcaaactgc

SEQ ID NO: 117232 - DNA, 80 bp, synthetic construct
  source 1..80: mol_type = other DNA
caagtattggctaaaagaacgaggggcgtcgctgcagcatacagcaccatttggctgtcaaatagcaacaaacccgcgac

SEQ ID NO: 117233 - DNA, 80 bp, synthetic construct
  source 1..80: mol_type = other DNA
aacatcagtggtcccgctatggacaagccctactgctggcattactcgcccaggccatgcgaggttgtgccggcttccac

SEQ ID NO: 117234 - DNA, 80 bp, synthetic construct
  source 1..80: mol_type = other DNA
tcgcggtggcggtcctgacggccaacgaggaccacgtgcacagcctggccgtgccccccctcgttctgctgcaccggttc

SEQ ID NO: 117235 - DNA, 80 bp, synthetic construct
  source 1..80: mol_type = other DNA
ctaccccaagggtgacacttcaccaggagtataccgtatcatgagccgttacattttggggacctaccaggctggagtgg

SEQ ID NO: 117236 - DNA, 80 bp, synthetic construct
  source 1..80: mol_type = other DNA
cccttatcatgcattaaggggggcaggcatcttatcttctgccattccaaaaagaaatgtgatgagttggccaaacagtt

SEQ ID NO: 117237 - DNA, 80 bp, synthetic construct
  source 1..80: mol_type = other DNA
agggacaggagtcagctgtctcctctgttgcactctaccacggaatgggccatcctgccctgcacctactcagacttacc

SEQ ID NO: 117238 - DNA, 80 bp, synthetic construct
  source 1..80: mol_type = other DNA
tctctaataagctgcgctgccgtttttgcagatggctcttacttgccgaatgcgcatacccataccaggatacagaggaa

SEQ ID NO: 117239 - DNA, 80 bp, synthetic construct
  source 1..80: mol_type = other DNA
tgccgtgcggcgggcctgcaggattgcaccatgctggtgtgcggcgatgatctggtggtgatttgcgaaagcgcgggcgt

SEQ ID NO: 117240 - DNA, 80 bp, synthetic construct
  source 1..80: mol_type = other DNA
gccggcgtggcgtgggtcacggcagatggcgggagtgggcccggcgtacggcctgtgtgggctgagggaactaacccaac

SEQ ID NO: 117241 - DNA, 80 bp, synthetic construct
  source 1..80: mol_type = other DNA
gatgggatcaattaccgcttcgttcatattaataacgatgcaaattttatttttttgtgaagacagcagtggggagccaa

SEQ ID NO: 117242 - DNA, 80 bp, synthetic construct
  source 1..80: mol_type = other DNA
cagagaaacgcgtaatcggccacccactgaggcgagaggcggtaggtttgcttgtacagctcgatggtgcggcagaccag

SEQ ID NO: 117243 - DNA, 80 bp, synthetic construct
  source 1..80: mol_type = other DNA
gataactgaggactgccccatcccatgctccggttcctggctaagggacatctgggactggatatgcgaggtgttgagcg

SEQ ID NO: 117244 - DNA, 80 bp, synthetic construct
  source 1..80: mol_type = other DNA
tgtggacctcatggtgggcgctgccgctttttgctcagccatgtatgtgggcgatctgtgcggtggcttatttttggttg

SEQ ID NO: 117245 - DNA, 80 bp, synthetic construct
  source 1..80: mol_type = other DNA
gaggtgccgctaccgcccgctaatatggtatccatggtaacaactggctgtattctaatgtccgggcatccaaacacgta

SEQ ID NO: 117246 - DNA, 80 bp, synthetic construct
  source 1..80: mol_type = other DNA
tgttgggagttgggttggccatggcaacaacgttacaactgccagaggacattgaacaaatggcgaatggaattgctctg

SEQ ID NO: 117247 - DNA, 80 bp, synthetic construct
  source 1..80: mol_type = other DNA
tggtttccaccgccacccagtctttcctggcatccaccataaatggggtcctgtggacggtctatcacggcgcggggtcc

SEQ ID NO: 117248 - DNA, 80 bp, synthetic construct
  source 1..80: mol_type = other DNA
ttactgcgtcaccacaatcttgtgtattctaccacctcacgcagtgcttgccagaggcagaagaaagtcacatttgacag

SEQ ID NO: 117249 - DNA, 80 bp, synthetic construct
  source 1..80: mol_type = other DNA
aggaggcccttgaaaaagcactcgacttcgatatgtacggagtcacatactcaatcactccgctggatctgccagccata

SEQ ID NO: 117250 - DNA, 80 bp, synthetic construct
  source 1..80: mol_type = other DNA
accgccgaaacataactaaataatccattggcatattcttgtattgcatcggttataaaattttttccgatgttaccaaa

SEQ ID NO: 117251 - DNA, 80 bp, synthetic construct
  source 1..80: mol_type = other DNA
caggtagtttccacagctacgcagaccttccttgccacgaacctcaatggagtcctatggacggtataccacggtgccgg

SEQ ID NO: 117252 - DNA, 80 bp, synthetic construct
  source 1..80: mol_type = other DNA
atggaggtccaactaataagacaaatggaatctgaaggaatctttttacccagcgaattggaaacccccaacctagctga

SEQ ID NO: 117253 - DNA, 80 bp, synthetic construct
  source 1..80: mol_type = other DNA
gatcctggacaaccctttcatgcagaacaaagagaggatcatggagtggagggacgtaccatatctccccaagacccagg

SEQ ID NO: 117254 - DNA, 80 bp, synthetic construct
  source 1..80: mol_type = other DNA
gggcggcgtccgggttttttgcgcccgccggccctcgcggagccagccggggacccccgccttgtttgaggcaaaacttt

SEQ ID NO: 117255 - DNA, 80 bp, synthetic construct
  source 1..80: mol_type = other DNA
ctggagtgaaggccaagcttctcaccacggaggaagcatgcgcccttacccctccgcattcggctcgctctagattcgga

SEQ ID NO: 117256 - DNA, 80 bp, synthetic construct
  source 1..80: mol_type = other DNA
tttccacagcatcatgaatacagtgatccgtatcgtgctgctctctcttcttgtagcttttagtcaggcagaatttcata

SEQ ID NO: 117257 - DNA, 80 bp, synthetic construct
  source 1..80: mol_type = other DNA
ccacaatagcagtgtccatggcaaacatcttcaggggaagttatttagcaggagcaggtctggctttctcattaatgaaa

SEQ ID NO: 117258 - DNA, 80 bp, synthetic construct
  source 1..80: mol_type = other DNA
cggggccaaccgcgtcagggcgccctcggccaaccccagggtccgttccagtgcggccagggcgcgaaactcgttccgcg

SEQ ID NO: 117259 - DNA, 80 bp, synthetic construct
  source 1..80: mol_type = other DNA
caggtcgctgacaccctgcacatgcggggccagtgatctttacctggtgacgcgaaacgcagatgtcattccagcgaggc

SEQ ID NO: 117260 - DNA, 80 bp, synthetic construct
  source 1..80: mol_type = other DNA
acagattcaagcggcgaaggcctaatggagtgtcactgccgctgcaatctttgcaccccccaccgttctttggtttgcaa

SEQ ID NO: 117261 - DNA, 80 bp, synthetic construct
  source 1..80: mol_type = other DNA
aacctgcacatggccaaaatcacacactctttggagcaacggtgtgctagagagtgacatgatcattccaaagagtctag

SEQ ID NO: 117262 - DNA, 80 bp, synthetic construct
  source 1..80: mol_type = other DNA
ccccttgtcaacatgggccagtgagggcctgcgtgaccttgcggtggcagttgagccggtcgtcttctcccccatggaga

SEQ ID NO: 117263 - DNA, 80 bp, synthetic construct
  source 1..80: mol_type = other DNA
agttgaagatccaaaattctgggagatggttgatgaggagcgtgaggctcacttgcgcggcgaatgctacacctgcatct

SEQ ID NO: 117264 - DNA, 80 bp, synthetic construct
  source 1..80: mol_type = other DNA
tcgagcggtgatgcaggctcgtccacgggtgcgggcgccgccgaatccggcggtccgacgtcccctggtgagccggcccc

SEQ ID NO: 117265 - DNA, 80 bp, synthetic construct
  source 1..80: mol_type = other DNA
tgctggtggtgctcatacccgagccagagaagcaaagatctccccaggataatcaaatggcaatcatcatcatggtggca

SEQ ID NO: 117266 - DNA, 80 bp, synthetic construct
  source 1..80: mol_type = other DNA
atatccgatgcacccctcgtcttgcatcgtctataaaaatatacgcagagcatatggtggcagccatgggtgaatcacac

SEQ ID NO: 117267 - DNA, 80 bp, synthetic construct
  source 1..80: mol_type = other DNA
cctcgtacgggtttcagtactctccagcgcagcgggttgaatttttattgaagacgtggaggtctaaaaagactcccatg

SEQ ID NO: 117268 - DNA, 80 bp, synthetic construct
  source 1..80: mol_type = other DNA
ttttttttatttacagtatggtgaacaccaatcatggtacctagaaatttcttcttcaccatactcatctgtgcttttaa

SEQ ID NO: 117269 - DNA, 80 bp, synthetic construct
  source 1..80: mol_type = other DNA
tctagcagccctcgcagcctactgtttatcagtaggttgtgtcgtcatcgtggggcatatcgagctaggaggcaaacctg

SEQ ID NO: 117270 - DNA, 80 bp, synthetic construct
  source 1..80: mol_type = other DNA
ccctgtcgaacactggagagatccccttctacggcaaagccatccccatcgaagccatcaaggggggaaggcacctcatt

SEQ ID NO: 117271 - DNA, 80 bp, synthetic construct
  source 1..80: mol_type = other DNA
tggctgccgacctggaggtcgccaccagcagctgggtgctggtgggcggcgtcctagccgctctggccgcatactgccta

SEQ ID NO: 117272 - DNA, 80 bp, synthetic construct
  source 1..80: mol_type = other DNA
cgcctccatgcaacatacagcccaacccagacagaaggaataccactctgacctgccccaccgattgcttccggaagaat

SEQ ID NO: 117273 - DNA, 80 bp, synthetic construct
  source 1..80: mol_type = other DNA
ccatcgcgggcgccatggcgggactgggcaagccctacaccggccacccaggtgacgccttcgagggtctcgttcagcga

SEQ ID NO: 117274 - DNA, 80 bp, synthetic construct
  source 1..80: mol_type = other DNA
tggctgtgctatctcctgaccctggtggaagccctggtccaggagtgggctccatccatgccggcgcgtggcggccgcga

SEQ ID NO: 117275 - DNA, 80 bp, synthetic construct
  source 1..80: mol_type = other DNA
aaaaatggagttcttatggagcaatcatcgcttgataaagaatattggaactatagaaatgacaataatgtcgttggaac

SEQ ID NO: 117276 - DNA, 80 bp, synthetic construct
  source 1..80: mol_type = other DNA
aacctggccgacaagactttcggtcaagcagggcggggcagcgactccggggcagacctcatttcgccaaccgagtcttc

SEQ ID NO: 117277 - DNA, 80 bp, synthetic construct
  source 1..80: mol_type = other DNA
gtgatagactgagtcgtatggccatcagtggagatgattgtgtggtcaaaccagttgatgacaggttcgcccatgccctc

SEQ ID NO: 117278 - DNA, 80 bp, synthetic construct
  source 1..80: mol_type = other DNA
gttatgaccaccaggtgcccttgtggggcgaccctctcaggtcatgtccgcatgggcaccatgagaataacaggcccaaa

SEQ ID NO: 117279 - DNA, 80 bp, synthetic construct
  source 1..80: mol_type = other DNA
ggaacgtctggctctcccatcataaacaagaaagggaaagttattggactctatggaaatggagtggttaccaaatcagg

SEQ ID NO: 117280 - DNA, 80 bp, synthetic construct
  source 1..80: mol_type = other DNA
caggaggcccgggccgtcgccgctggccgcgcttagcgggtgcgtctcaaaggtacgctgggcatgttccaaccaggcga

SEQ ID NO: 117281 - DNA, 80 bp, synthetic construct
  source 1..80: mol_type = other DNA
ctggctgaaggccaagctggtgccgtcgctaccgggcattcctttcctctcgtgccagcggaggtttaggggtgcctggc

SEQ ID NO: 117282 - DNA, 80 bp, synthetic construct
  source 1..80: mol_type = other DNA
ggacctgggctcagcctgggtatccttggcctctttacggcaatgagggctgtgggtgtgcgggatggctcctgtcaccc

SEQ ID NO: 117283 - DNA, 80 bp, synthetic construct
  source 1..80: mol_type = other DNA
cctggatgctactactatccttggtattggaacagtcctcgatcaggctgagaccgcaggtgctaggttggtggttctgg

SEQ ID NO: 117284 - DNA, 80 bp, synthetic construct
  source 1..80: mol_type = other DNA
tagcccgttccatcatagagctgacgtacaggcacaaggttgtgaaagtcatgcgcccagctgctggaggcaagactgta

SEQ ID NO: 117285 - DNA, 80 bp, synthetic construct
  source 1..80: mol_type = other DNA
ggggctcggtgtccacccgaaacatgtcggcgtacgtgtcggccgcggccccgaaggccgcgctccagtcgatgcggtga

SEQ ID NO: 117286 - DNA, 80 bp, synthetic construct
  source 1..80: mol_type = other DNA
tttcagccacaccagttatggaccaccttattgtctctgacatttgtcaaaacaactctctcactggattatgcatggaa

SEQ ID NO: 117287 - DNA, 80 bp, synthetic construct
  source 1..80: mol_type = other DNA
tcttactggcgcaatgagggttacaaaggacacaaatgacaacaacctttacaaactacatggtggacatgtttcttgca

SEQ ID NO: 117288 - DNA, 80 bp, synthetic construct
  source 1..80: mol_type = other DNA
cctggctcaggatggaacgtcagggacacggcatgcttagcaaaagcatatgcacagatgtggcttgtgttgtacttcca

SEQ ID NO: 117289 - DNA, 80 bp, synthetic construct
  source 1..80: mol_type = other DNA
cgcagtgcggtgtcggtgctggggcggcttgggtccgccgggcgcataaagaacatgtactgctgaatccgatggagtgc

SEQ ID NO: 117290 - DNA, 80 bp, synthetic construct
  source 1..80: mol_type = other DNA
aggggggacgcaagccagcacgcctaatagtgtatcctgacctggtggtgcgtgtctgcgagaagcgcgccctgtatgac

SEQ ID NO: 117291 - DNA, 80 bp, synthetic construct
  source 1..80: mol_type = other DNA
tggggatggcgtgatgcacaccaaatgcccctgcggagcagagttggcaggccacatcaagaacggctcgatgagaatca

SEQ ID NO: 117292 - DNA, 80 bp, synthetic construct
  source 1..80: mol_type = other DNA
catcccagcgcccgactacacaagggctctctggagggtgtccgctgaggagtatgttgaggttgtgcggaaaggggata

SEQ ID NO: 117293 - DNA, 80 bp, synthetic construct
  source 1..80: mol_type = other DNA
gccccaggggccacgccgtcggaatcttccgggcggccgtatgctccagggtggtggccaagtctatcgacttcatcgcc

SEQ ID NO: 117294 - DNA, 80 bp, synthetic construct
  source 1..80: mol_type = other DNA
acatctggaggatgggatttatggcatattccagtcaaccttcttggtggcctcccagcgaggagtgggagtggcacagg

SEQ ID NO: 117295 - DNA, 80 bp, synthetic construct
  source 1..80: mol_type = other DNA
gcttatccaagagggccgttgaccacatccggtccgtgtggaaggacctcttggaagactcacagacaccaattgataca

SEQ ID NO: 117296 - DNA, 80 bp, synthetic construct
  source 1..80: mol_type = other DNA
cagaaaatggctgctggtacggaatggaaatcagacctgttatgcatgatgaaacaacactcgtcagatcacaggttcat

SEQ ID NO: 117297 - DNA, 80 bp, synthetic construct
  source 1..80: mol_type = other DNA
gctgaaacacattaaaatgtgccgcgtcaagacccactgcgtcagtaacaaactgggcgtatgagctacgcagtttttct

SEQ ID NO: 117298 - DNA, 80 bp, synthetic construct
  source 1..80: mol_type = other DNA
agaccctcttgcttaacatcttgggtggatgggtggcctcccaggtggcacccccctcggcctctaccgcattcgtggta

SEQ ID NO: 117299 - DNA, 80 bp, synthetic construct
  source 1..80: mol_type = other DNA
tacccggtgagggtcgcgttgatgatatactgggcgtggtgatggacgatcgacagaacctccaccgtggatacgacggt

SEQ ID NO: 117300 - DNA, 80 bp, synthetic construct
  source 1..80: mol_type = other DNA
ggctacagtgtgcgctcgcgctcacgcacccccgccatcgtgggacgagatgtggaaatgccttgtcagactaaagccta

SEQ ID NO: 117301 - DNA, 80 bp, synthetic construct
  source 1..80: mol_type = other DNA
gcggcgaaccagctccccggagctccaggccacgggagagatggtgcgacgctcgaggtcggggacgccaaacagaagca

SEQ ID NO: 117302 - DNA, 80 bp, synthetic construct
  source 1..80: mol_type = other DNA
cataattaaaccctttagcagttgctgacgataacgttcatgccgactatgttttagagggcgaacagtgttttcagcaa

SEQ ID NO: 117303 - DNA, 80 bp, synthetic construct
  source 1..80: mol_type = other DNA
tatcccctactcctgttaccaacgctctgaaatttatgcctaactccagtgcataccccagagctaacggaagtgaacca

SEQ ID NO: 117304 - DNA, 80 bp, synthetic construct
  source 1..80: mol_type = other DNA
ccggcgctaccagtctgggccagacctgactacaacccccccctgcttgagccgtggaaggcaccggggtatgaagcacc

SEQ ID NO: 117305 - DNA, 80 bp, synthetic construct
  source 1..80: mol_type = other DNA
cagcagaaactacaaaagcagtgggacgaggaggagacgtgggacgacagccaggcagaggaagtttcagacgaggaggc

SEQ ID NO: 117306 - DNA, 80 bp, synthetic construct
  source 1..80: mol_type = other DNA
caaaggctcttctggaggccccataatgtgccctgcgggacatgttgcggggatctttagagcagctgtctgcactagag

SEQ ID NO: 117307 - DNA, 80 bp, synthetic construct
  source 1..80: mol_type = other DNA
ctaacgccactaggattgagacagataacaaggtggtgatactggattcattcgaaccactcgtggctgagacggatgac

SEQ ID NO: 117308 - DNA, 80 bp, synthetic construct
  source 1..80: mol_type = other DNA
ctgttctcctgcttagttcatcctgcagctagtcttgagtggcggaatacgtctggcctctatgtccttaccaacgactg

SEQ ID NO: 117309 - DNA, 80 bp, synthetic construct
  source 1..80: mol_type = other DNA
gccgcgcaagcggggtgtacaccacgagcttcgggaacacagtaacgtgctacctcaaggccacggcagccgcccgggct

SEQ ID NO: 117310 - DNA, 80 bp, synthetic construct
  source 1..80: mol_type = other DNA
ttgcgacccccagggaccctccgtccgcgaccctccagccgcatacgacccccatggagccccgccccggagcgagtacc

SEQ ID NO: 117311 - DNA, 80 bp, synthetic construct
  source 1..80: mol_type = other DNA
gctgcggtgggcagcattgggctgggtaaggtcatcattgacattttagcgggttatgtggcagtggtttcgggagccct

SEQ ID NO: 117312 - DNA, 80 bp, synthetic construct
  source 1..80: mol_type = other DNA
ggagcctggcagtagagcaatgaagatggcagagagggatgctccagaagccttcttaacgatggttgaaatggtggtgc

SEQ ID NO: 117313 - DNA, 80 bp, synthetic construct
  source 1..80: mol_type = other DNA
gtgtggcgacgacctggtcgtcatctcagagagccaggggactgagaaggacgagaacaacctgagagccttcacggagg

SEQ ID NO: 117314 - DNA, 80 bp, synthetic construct
  source 1..80: mol_type = other DNA
acatgcctgctacatccctctctgggttttgacatcaccaagatgcttttggcgctgttgggtccactttacctcctgca

SEQ ID NO: 117315 - DNA, 80 bp, synthetic construct
  source 1..80: mol_type = other DNA
gaggaagcatgtgccctgacgccctcacattcggccagatcgaagtttggctacggggcgaaggacgtccgaagcctttc

SEQ ID NO: 117316 - DNA, 80 bp, synthetic construct
  source 1..80: mol_type = other DNA
cagacgacttctcctactaaaggtatagaggaaattgtgtacttttcaaactttacaaaccacttacttttaaactgttc

SEQ ID NO: 117317 - DNA, 80 bp, synthetic construct
  source 1..80: mol_type = other DNA
gtgcggattcgccgacctcatggggtacatcccgctcgtaggcggccccgttggtggcgtcgcaagggctctcgcacacg

SEQ ID NO: 117318 - DNA, 80 bp, synthetic construct
  source 1..80: mol_type = other DNA
aagggtggtcgtgacgctgtcatcatgctcacatgcctcttccaccctgccttggggtttgagatcacaaaaatcctctt

SEQ ID NO: 117319 - DNA, 80 bp, synthetic construct
  source 1..80: mol_type = other DNA
aaggactagaggttagaggagaccccgtggtaataacacacaacggcccaaacacgcggaagctgtaacgcgtgtggaag

SEQ ID NO: 117320 - DNA, 80 bp, synthetic construct
  source 1..80: mol_type = other DNA
ctgattttctcgtctgcggggacgacttggtagtggtggccgagagcggcggcgtcgaggaggataaagcagccctgcga

SEQ ID NO: 117321 - DNA, 80 bp, synthetic construct
  source 1..80: mol_type = other DNA
ttgatggaatttgaagaaccacatgccacgaagcaatcggtggtcgccttaggttctcaggaaggagcacttcatcaggc

SEQ ID NO: 117322 - DNA, 80 bp, synthetic construct
  source 1..80: mol_type = other DNA
caagcgccggatcgaggtaccgtcggtgtgcggttagaaagtcacgacgcgccgcttgctcctccacgcgaattttaaca

SEQ ID NO: 117323 - DNA, 80 bp, synthetic construct
  source 1..80: mol_type = other DNA
cgccttttcactccatggttattctcccggtgaactcaatcgggtggcatccagcctcagattgcttggggcgccaccgt

SEQ ID NO: 117324 - DNA, 80 bp, synthetic construct
  source 1..80: mol_type = other DNA
cgatgaatttcgattcatcgccccgcgggtgctggacgaggatgcccccccggagaagcgcgccggggtgcacgacggtc

SEQ ID NO: 117325 - DNA, 80 bp, synthetic construct
  source 1..80: mol_type = other DNA
caagcgggcccgggtaaacctgcggctcacgagctctcccgatcggcgggatgtggttatttttcctaagatggtgcgtg

SEQ ID NO: 117326 - DNA, 80 bp, synthetic construct
  source 1..80: mol_type = other DNA
ggagacaggccgacgcgggggctgctctaaaaatttaagggccctacggtccacagacccgccttcccggtggtgccctt

SEQ ID NO: 117327 - DNA, 80 bp, synthetic construct
  source 1..80: mol_type = other DNA
gcatacaatgttcatagagatcgtccccatatggctctgaatgaaatctaagatcttttttttttctcttacagtatggt

SEQ ID NO: 117328 - DNA, 80 bp, synthetic construct
  source 1..80: mol_type = other DNA
atatcaggtgcctgccccttataaacacactgcccatatacataatctctttggacatgtttctatttacaatctgccgg

SEQ ID NO: 117329 - DNA, 80 bp, synthetic construct
  source 1..80: mol_type = other DNA
tagagacagaatcgagatgagccctcttctgttctctacgactcagcttgccattttgccctgctcatttaccaccatgc

SEQ ID NO: 117330 - DNA, 80 bp, synthetic construct
  source 1..80: mol_type = other DNA
ttgcctatcaacgcactgagcaactcgttgctacgtcaccacaaccttgtgtattccaccacctcacgcagtgcttgcca

SEQ ID NO: 117331 - DNA, 80 bp, synthetic construct
  source 1..80: mol_type = other DNA
agtgaacccaacaaccctgacagcatccttagtcatgcttttagtccattatgcaataataggcccaggattgcaggcaa

SEQ ID NO: 117332 - DNA, 80 bp, synthetic construct
  source 1..80: mol_type = other DNA
attctagtgggtgccccgaacgcctcagtgcttgcaaaccaatcacctactttgaccagggttggggaccactctcatat

SEQ ID NO: 117333 - DNA, 80 bp, synthetic construct
  source 1..80: mol_type = other DNA
ttttttatagaatcatgaaaaaactaagtatcctagctttcattttgtttcaaacatttaccaatgtgcagactacttta

SEQ ID NO: 117334 - DNA, 80 bp, synthetic construct
  source 1..80: mol_type = other DNA
cgcgcctggtccagcgtcttggccacggtcgccgggacggcgaccaccttcagcagggtcttcagattggccagaccctc

SEQ ID NO: 117335 - DNA, 80 bp, synthetic construct
  source 1..80: mol_type = other DNA
ggcatcaagacagcaaccatccctataggacttggaactatcatgggagctatgaggtgaagcccactggctcagccagc

SEQ ID NO: 117336 - DNA, 80 bp, synthetic construct
  source 1..80: mol_type = other DNA
agtgtaaatagttaagaaaaattttaaggaggaagtcaggccggaaaatttccgccaccggaagttgagtagacggtgct

SEQ ID NO: 117337 - DNA, 80 bp, synthetic construct
  source 1..80: mol_type = other DNA
agcggcctactgcttgtcggtcggctgtgttgtgatcgtgggtcatattgagctagggggcaagccggcactcgttccag

SEQ ID NO: 117338 - DNA, 80 bp, synthetic construct
  source 1..80: mol_type = other DNA
acaggatcacttgcaggtatctttaacccggggcccaaacagaacatccagttgattaataccaatggcagttggcatgt

SEQ ID NO: 117339 - DNA, 80 bp, synthetic construct
  source 1..80: mol_type = other DNA
ctctgtattaaatcgactcctcagccatgcggacggatgtgatgaatgtaatcatagagttcacgtgggggcactgtatg

SEQ ID NO: 117340 - DNA, 80 bp, synthetic construct
  source 1..80: mol_type = other DNA
ctctttacggcgtcatgtggacatgatggtaggtgctgctactatgtgctccgccttctatgtcggagacttgtgtgggg

SEQ ID NO: 117341 - DNA, 80 bp, synthetic construct
  source 1..80: mol_type = other DNA
gagggcgagggcttgggttgcttctgggcatgccgcccgggcaccccgccgtcggtacggaagcagcagtggagaaaaaa

SEQ ID NO: 117342 - DNA, 80 bp, synthetic construct
  source 1..80: mol_type = other DNA
gctacgactgatgacagatggtgcggccgtgagagctcggctgcgacatctgcatcactgccgtcagcctcgctgctacg

SEQ ID NO: 117343 - DNA, 80 bp, synthetic construct
  source 1..80: mol_type = other DNA
cccataatttagggtgctccagccaaagcttatgttggaaatgatggaacccacgtgaccatcgtaccaaatgcggcagt

SEQ ID NO: 117344 - DNA, 80 bp, synthetic construct
  source 1..80: mol_type = other DNA
aaatcagacctgttatgcatgatgaaacaacactcgtcagatcacaggttcatgctttcaaaggtgaaatggttgaccct

SEQ ID NO: 117345 - DNA, 80 bp, synthetic construct
  source 1..80: mol_type = other DNA
actcactccattgcccgaggcgagccgcctggatttatccgggtggttcaccgtgggcgccggcgagggcgacgtttttc

SEQ ID NO: 117346 - DNA, 80 bp, synthetic construct
  source 1..80: mol_type = other DNA
aatggtatctcaggtggaagccgctttggagaatctgatagtcctcaatgccgcatctgcagctggtgctcaagggtggc

SEQ ID NO: 117347 - DNA, 80 bp, synthetic construct
  source 1..80: mol_type = other DNA
caccagaattactagaaccgacttggaaaatgaagccaaagtgctggagcttttggatggtgaacaccgcatgctcgccc

SEQ ID NO: 117348 - DNA, 80 bp, synthetic construct
  source 1..80: mol_type = other DNA
actctggaaaggatgtattttttatgccacctgagaaatgtgacacccttctgtgtgatattggtgagtcctctccgaat

SEQ ID NO: 117349 - DNA, 80 bp, synthetic construct
  source 1..80: mol_type = other DNA
cgggtgccctcgtggctttcaagatcatgagcggcgagaccccctccatggaggatctagtcaatcttttgccagctctc

SEQ ID NO: 117350 - DNA, 80 bp, synthetic construct
  source 1..80: mol_type = other DNA
cacatcctccacggaggcgtaggtgttattgggatggaggtcggtgtggcagcggacaaagagggccaggaactggtggt

SEQ ID NO: 117351 - DNA, 80 bp, synthetic construct
  source 1..80: mol_type = other DNA
accaattccaaaggggaaaactgcggctatcgcaggtgccgcgcaagcggtgtcctgacgaccagctgcggtaataccct

SEQ ID NO: 117352 - DNA, 80 bp, synthetic construct
  source 1..80: mol_type = other DNA
cgagaccaaggccgggtcggccgcctcgcgcctcgtgcggcttatcatcaacatgaagggcatgcgccacgtaggcgaca

SEQ ID NO: 117353 - DNA, 80 bp, synthetic construct
  source 1..80: mol_type = other DNA
tcgtaatcggaaaaggtgaccaacaagtcactcaccattggcacaagtctgggagtagcatagggaaggcttttgccacc

SEQ ID NO: 117354 - DNA, 80 bp, synthetic construct
  source 1..80: mol_type = other DNA
cgccaggaaccatgacaaaagaacccacactgattatgacacgcatactcggagctatgctaaccagcgtagccccgatg

SEQ ID NO: 117355 - DNA, 80 bp, synthetic construct
  source 1..80: mol_type = other DNA
aaatttggcttcgggcagacccacggcatcacagatgaattgggcgtaggactctcgcagcttctgtaccaaggcggcgg

SEQ ID NO: 117356 - DNA, 80 bp, synthetic construct
  source 1..80: mol_type = other DNA
acaccggtcatggcacggtagtactagaactgcagtacaccgggagtgatggaccatgcaaaattccaatatcctctgta

SEQ ID NO: 117357 - DNA, 80 bp, synthetic construct
  source 1..80: mol_type = other DNA
accagtagttcagtcaaatctacaaaagcttgagcagttttgggcaaagcacatgtggaacttcattagcggtatccaat

SEQ ID NO: 117358 - DNA, 80 bp, synthetic construct
  source 1..80: mol_type = other DNA
cacgggacaccgtatggcgtgggatatgatgatgaactggtccccaacgaccaccatggttttggcgtacctcatgcgcg

SEQ ID NO: 117359 - DNA, 80 bp, synthetic construct
  source 1..80: mol_type = other DNA
ctcaactccacaggatgcagtgaacgcatcagtgcatgccggggtctcgagtccttccgggtgcgatggggtcctctcac

SEQ ID NO: 117360 - DNA, 80 bp, synthetic construct
  source 1..80: mol_type = other DNA
tgaacccctctgtcgcagccactcttggctttggcagttacatgtccaaggctcatgggatagatcctaacatcaggact

SEQ ID NO: 117361 - DNA, 80 bp, synthetic construct
  source 1..80: mol_type = other DNA
gggcgtttcgcggcgtccgggtggcggtcgagggaaatagcagccaggactcggccgtcgccatcgccacgcacgtgcac

SEQ ID NO: 117362 - DNA, 80 bp, synthetic construct
  source 1..80: mol_type = other DNA
gggacttacacgacggggggggcgcaggcccgtgctacccacgggtttacgtccctcttttcggttgtgccgtcccaaaa

SEQ ID NO: 117363 - DNA, 80 bp, synthetic construct
  source 1..80: mol_type = other DNA
gctttatgtcggtggtcctcttaccaattcaagaggggaaaactgcggctatcgcaggtgtcgcgcgagcggcgtgctga

SEQ ID NO: 117364 - DNA, 80 bp, synthetic construct
  source 1..80: mol_type = other DNA
cggagcatcgcagtttttggtgttcgaaggtggactccagcgaggccgtctgggtcggcgaccccacgcacaccagcacc

SEQ ID NO: 117365 - DNA, 80 bp, synthetic construct
  source 1..80: mol_type = other DNA
caggtcgcgcgctgtcgcatcatctctaagcgcgcgcgggactttagccgcgcctccaattccaagtgggccgcctttgc

SEQ ID NO: 117366 - DNA, 80 bp, synthetic construct
  source 1..80: mol_type = other DNA
cctgccatagcatctctcatggcattttccgcatctctgacctctccactctccacaagtactactctgctccttaacat

SEQ ID NO: 117367 - DNA, 80 bp, synthetic construct
  source 1..80: mol_type = other DNA
aggggggcggcgggaaaccgggcctcggggcgtaacaccggcctccagcgtcaagtatggggggggcgggcccgacgtcg

SEQ ID NO: 117368 - DNA, 80 bp, synthetic construct
  source 1..80: mol_type = other DNA
tgaccaggtattcggctccccctggcgacgacccacatccggaatacgaccttgagctgataacatcttgctcatcaaat

SEQ ID NO: 117369 - DNA, 80 bp, synthetic construct
  source 1..80: mol_type = other DNA
gatagggctctatggcaatggagtggtcacaaaaacaggtgattatgttagtgctataacacaagctgacaagacaggag

SEQ ID NO: 117370 - DNA, 80 bp, synthetic construct
  source 1..80: mol_type = other DNA
ttactacctgtgccgttataacgttactttggttgggtcctttgccaggcgcacgctttccctgttagatatacaaagac

SEQ ID NO: 117371 - DNA, 80 bp, synthetic construct
  source 1..80: mol_type = other DNA
gcgtcacccaaaggtcctgttatccagatgtacaccaatgtagatcaagacctcgtaggctggcccgctccccacggtgc

SEQ ID NO: 117372 - DNA, 80 bp, synthetic construct
  source 1..80: mol_type = other DNA
atgcggcgttggatgagctcccgcgcgccccggaactcctccatcgcccatggggccaggtccccggccaccgcgtcgaa

SEQ ID NO: 117373 - DNA, 80 bp, synthetic construct
  source 1..80: mol_type = other DNA
gtctcacctcctcttactactacaaatggtagtctggctgttaccatggaaaacccactttacaacaacaatggaaaact

SEQ ID NO: 117374 - DNA, 80 bp, synthetic construct
  source 1..80: mol_type = other DNA
tcattctcgcgattctcgtccaccctcacctgatctttgagattaccaagctcctcctggccattcttggtcctgcctac

SEQ ID NO: 117375 - DNA, 80 bp, synthetic construct
  source 1..80: mol_type = other DNA
aataaagatgggatattaacacagttgactcttcgtgatgcaatgggtaccatctgccacagttcattgcttgatgttga

SEQ ID NO: 117376 - DNA, 80 bp, synthetic construct
  source 1..80: mol_type = other DNA
gaaccctgctgcggaggaagagggtcttaggttgctcgccggcgcagcctccgcacggtctggatccagtgcgggaggag

SEQ ID NO: 117377 - DNA, 80 bp, synthetic construct
  source 1..80: mol_type = other DNA
tccctgctcggcgcaggggggactctacagcgagcttgctcagtcctaggcctctcgcctgtctcaaaggctcctctgga

SEQ ID NO: 117378 - DNA, 80 bp, synthetic construct
  source 1..80: mol_type = other DNA
aacctcattttcctaggtcccgcagatgatatcaagggtaaggggtggtcgcttctcgctcccatcacagcctatgtcca

SEQ ID NO: 117379 - DNA, 80 bp, synthetic construct
  source 1..80: mol_type = other DNA
tgtccagacaaaacaaaattgacatgaccaataatggaaagaggctgagcacaaggtcccgatgtaccggaacgcttaca

SEQ ID NO: 117380 - DNA, 80 bp, synthetic construct
  source 1..80: mol_type = other DNA
ggatccctggggtcacgcggtaccctggggtctctgggagctcgcggtactctgggttccctaggttctcggtgtggtcg

SEQ ID NO: 117381 - DNA, 80 bp, synthetic construct
  source 1..80: mol_type = other DNA
acgtcacaagaggggcagtgttgacacataatgggaaaagactggaaccaaactgggctagcgtgaaaaaagatctgatt

SEQ ID NO: 117382 - DNA, 80 bp, synthetic construct
  source 1..80: mol_type = other DNA
ccgggaaccgcggtaaaattcatccgaatgattaaaaagaacaacagaaacttcccaccatgtactcggttggatctcct

SEQ ID NO: 117383 - DNA, 80 bp, synthetic construct
  source 1..80: mol_type = other DNA
ctcgtacgctttttgggagagaacgctactttcaatgtctggaaacgctgtaataaaacgttcaaatgcggcccagttat

SEQ ID NO: 117384 - DNA, 80 bp, synthetic construct
  source 1..80: mol_type = other DNA
ggagggagattcttctgggaccggccgatagttatgaagagcaggggtggagactcctcgcgcccatcacggcctactcc

SEQ ID NO: 117385 - DNA, 80 bp, synthetic construct
  source 1..80: mol_type = other DNA
cacaatcttcacgttgactgttgcctggagaacagccaccttgattctggccggagtttcgcttttgccactgtgccagt

SEQ ID NO: 117386 - DNA, 80 bp, synthetic construct
  source 1..80: mol_type = other DNA
cccaacagcagcatcgtgtacgaggcagaagatgtcatcctgcaccttcccggatgcgtcccctgtgtcgccgcaaacaa

SEQ ID NO: 117387 - DNA, 80 bp, synthetic construct
  source 1..80: mol_type = other DNA
ggttctggaaagcgacatcggggtaaagtttgacacccgcaacttcagactggggtttgacccagtcactggtcttgtca

SEQ ID NO: 117388 - DNA, 80 bp, synthetic construct
  source 1..80: mol_type = other DNA
tcaatccgctgagcaattcgctcctgcgacatcacaatctggtttactccacaaccacccggagcgcgtcgttgcgccag

SEQ ID NO: 117389 - DNA, 80 bp, synthetic construct
  source 1..80: mol_type = other DNA
taccgccaatgaactcggatggttggagagaacaaagagtgacctaagccatctaatgggaaggagagaggagggggcaa

SEQ ID NO: 117390 - DNA, 80 bp, synthetic construct
  source 1..80: mol_type = other DNA
gagtgcgagcctcggggatctctggaaatggagtgatgcgctggccatggaggcattgatattcagagcttgcaccgcgg

SEQ ID NO: 117391 - DNA, 80 bp, synthetic construct
  source 1..80: mol_type = other DNA
gcgacccccgccccagcgacgtgtcgcatgccgacgcgtcacagcgccccttgaaccggcgacacagcaggtttgtgacc

SEQ ID NO: 117392 - DNA, 80 bp, synthetic construct
  source 1..80: mol_type = other DNA
gcgcgtctagcccagtaacatgcgcacgtgatgtaggctggtcagcacggcgtcgctgtgatgaagcagcgcccggcggg

SEQ ID NO: 117393 - DNA, 80 bp, synthetic construct
  source 1..80: mol_type = other DNA
ggtggccagcccctccaggggctaagtcccttgaaccatgcacctgcgggtctgcagacttatacttggttacccgcgat

SEQ ID NO: 117394 - DNA, 80 bp, synthetic construct
  source 1..80: mol_type = other DNA
cgggaatacagtcacgtgctacctaaaggctacagcagccaccagggctgcgggcctgaaggactgcactatgctggttt

SEQ ID NO: 117395 - DNA, 80 bp, synthetic construct
  source 1..80: mol_type = other DNA
tgtgggcgacgacacaacgacgccccccgagcctgcagctcctgaccgtggcccggaatccgacacagagtcttattctt

SEQ ID NO: 117396 - DNA, 80 bp, synthetic construct
  source 1..80: mol_type = other DNA
gagcctcccaggtgcagaaaggtgttgttgatgcacacggcctccttgaagccctcggtaacgaccagatacaggagggc

SEQ ID NO: 117397 - DNA, 80 bp, synthetic construct
  source 1..80: mol_type = other DNA
actgctcacctagaacagggctggactttaatgagatggtgctattgacaatgaaagaaaaatcatggcttgtccacaaa

SEQ ID NO: 117398 - DNA, 80 bp, synthetic construct
  source 1..80: mol_type = other DNA
cttgattacccaagtggcacttctggttctcccatcgtcaacaggaatggtgaggtaatagggctgtatggcaatggaat

SEQ ID NO: 117399 - DNA, 80 bp, synthetic construct
  source 1..80: mol_type = other DNA
taatacacccgaaggaatcattcccagtatgttcgaaccagagcgtgaaaaagtggatgccattgatggtgaataccgtt

SEQ ID NO: 117400 - DNA, 80 bp, synthetic construct
  source 1..80: mol_type = other DNA
ctcagaggcatggggctcaacgctgtagcgtactacaggggtctcgatgtgtccgtcataccaacagcaggagacgtcgt

SEQ ID NO: 117401 - DNA, 80 bp, synthetic construct
  source 1..80: mol_type = other DNA
cgtgacgtttgataccctgtttatggtgtcgtcgatcgacgaattagggcgtcgccagctcacggacaccatccgcaagg

SEQ ID NO: 117402 - DNA, 80 bp, synthetic construct
  source 1..80: mol_type = other DNA
gcaatgttgcggtgactcaggttgtcgacttcagcctcgaccccaccttttctatcgagactacaactgtgccccaggac

SEQ ID NO: 117403 - DNA, 80 bp, synthetic construct
  source 1..80: mol_type = other DNA
atagaaaagtcctctaaataagtcactaggaccccagggaccacaatgtggtagcttacaccgcgtcgctgaagcatggt

SEQ ID NO: 117404 - DNA, 80 bp, synthetic construct
  source 1..80: mol_type = other DNA
ttgaattcctcgtgcaagcgtggaagtccaagaaggtcccaatggggttttcatatgatacccgctgctttgactccaca

SEQ ID NO: 117405 - DNA, 80 bp, synthetic construct
  source 1..80: mol_type = other DNA
gagatcccagatcgggcctggaactctgggtacgaatggattacagaatacattgggaaaacggtttggtttgtgcccag

SEQ ID NO: 117406 - DNA, 80 bp, synthetic construct
  source 1..80: mol_type = other DNA
gaagaaatgcatattccaaagatgtaacctgggcattctgaatgaaggcgaagcaagggtccgccactgcgcttctacag

SEQ ID NO: 117407 - DNA, 80 bp, synthetic construct
  source 1..80: mol_type = other DNA
attcctggatacacggctctcatgaaagcatcatattgcttgaaagcctgctgggctttactaccctcggtataaaacat

SEQ ID NO: 117408 - DNA, 80 bp, synthetic construct
  source 1..80: mol_type = other DNA
ttaagtgggagtatgtcgtcctgctattcctggtgttggcggatgctcgcatctgcatggccctttggttgatgctactc

SEQ ID NO: 117409 - DNA, 80 bp, synthetic construct
  source 1..80: mol_type = other DNA
atccccctggagcacatcaaagggggtagacacctaattttctgccattcaaagaagaaatgcgacgagcttgcaggcca

SEQ ID NO: 117410 - DNA, 80 bp, synthetic construct
  source 1..80: mol_type = other DNA
ctcaggggttaccgccaagctgctgtcaacagaagaagcctgtgcgttgaccccgccacactctgctcgatctaagttcg

SEQ ID NO: 117411 - DNA, 80 bp, synthetic construct
  source 1..80: mol_type = other DNA
cttaggcttatttaaaaccatgcaggctatgctaccagtcattttaattctgctactaccctgcattgccctagctccac

SEQ ID NO: 117412 - DNA, 80 bp, synthetic construct
  source 1..80: mol_type = other DNA
caaccgcactgctcttaactgcaatgactctcttcagacaggcttcattgctggcttgttctactaccatagattcaact

SEQ ID NO: 117413 - DNA, 80 bp, synthetic construct
  source 1..80: mol_type = other DNA
gccgtggcggcgatgatggcattcagcgccgctctcaccagtccgttggctaccagcaccaccatcctcctcaacatcat

SEQ ID NO: 117414 - DNA, 80 bp, synthetic construct
  source 1..80: mol_type = other DNA
gcaccagcgcggcatcgcacccgagcaccagctcccccgtcgtccagatgcccacgggccacgtcgaggccgacggggag

SEQ ID NO: 117415 - DNA, 80 bp, synthetic construct
  source 1..80: mol_type = other DNA
tacctcccccttctttttttcttatatcagagaagatgactgacaacaaaaaaaaaataaagatcaacttttttattgaa

SEQ ID NO: 117416 - DNA, 80 bp, synthetic construct
  source 1..80: mol_type = other DNA
ccagtatggctagcttataaggtggcagcagctggggtgccatatcatgaccggaggtggtgttttgatggccctaggac

SEQ ID NO: 117417 - DNA, 80 bp, synthetic construct
  source 1..80: mol_type = other DNA
ggatgtagatgcctatgagaacagtaagaaagaacaaaaagccaaaatagaagctgctgcggaagctaaggcaaacatag

SEQ ID NO: 117418 - DNA, 80 bp, synthetic construct
  source 1..80: mol_type = other DNA
agcgctgcagcgccgccgcatcggggcgcgagatgcccgagggtatcgcgatgtcagtttcaaagccgtccgccagcatg

SEQ ID NO: 117419 - DNA, 80 bp, synthetic construct
  source 1..80: mol_type = other DNA
ggaaccaatatttcatcgcccgagccgaagccttgatacaacagtgggtgccctccctgcatgttcggtgagggcgtgac

SEQ ID NO: 117420 - DNA, 80 bp, synthetic construct
  source 1..80: mol_type = other DNA
cagactcgtggcttgctcggcacgatcgtcaccagcttgaccggccgagacaagaacgaagctgagggtgaggtccaggt

SEQ ID NO: 117421 - DNA, 80 bp, synthetic construct
  source 1..80: mol_type = other DNA
acctccaaggaggaggagagttgtgcaccttgacgactcgacagtctcaacagctctcgcagaattggccctcaagtctt

SEQ ID NO: 117422 - DNA, 80 bp, synthetic construct
  source 1..80: mol_type = other DNA
gtgtctggtgcattacccttaccggttgtggcattacccgtgcaccctaaattacaccatcttcaaggtgcgcatgtaca

SEQ ID NO: 117423 - DNA, 80 bp, synthetic construct
  source 1..80: mol_type = other DNA
ggtaaaggtccttagaccagctgaaaaagggaaaacagttatggacatcatttcgagacaagaccaaagggggagcggac

SEQ ID NO: 117424 - DNA, 80 bp, synthetic construct
  source 1..80: mol_type = other DNA
ggagcacagggatcgggtagagctatcacccctgctccttaccactacagcgtggcagatcctcccctgctctttcacca

SEQ ID NO: 117425 - DNA, 80 bp, synthetic construct
  source 1..80: mol_type = other DNA
gccgccgcgccccacgacccatcgccgggtcgggtgcgaggtcgggtggcgcgggcgccaagcgggccaccgtcagcgag

SEQ ID NO: 117426 - DNA, 80 bp, synthetic construct
  source 1..80: mol_type = other DNA
ccacagagttccatcacagaagcagaactgacaggctatggcactgttacgatggagtgctctccgagaacgggcctcga

SEQ ID NO: 117427 - DNA, 80 bp, synthetic construct
  source 1..80: mol_type = other DNA
tgaccctcgaatgtataactccaaaacagtattccaccctgtaaataaccaattaccttcttgggttgacacggcagccg

SEQ ID NO: 117428 - DNA, 80 bp, synthetic construct
  source 1..80: mol_type = other DNA
tgactcagtcgtgggacacgtactggctcagctagctgaaaagagttttccagccacaccggaccaaccccacaccaatt

SEQ ID NO: 117429 - DNA, 80 bp, synthetic construct
  source 1..80: mol_type = other DNA
tgaaggcagaggcgcaggagctcccatgtcttcctcgctttcggaatccaaaaagtaacggcccatttttggaggcggcg

SEQ ID NO: 117430 - DNA, 80 bp, synthetic construct
  source 1..80: mol_type = other DNA
tcaaaggggcgcagagattagccgctctaggagacacagcttgggactttggatcagttggagtggtgttcacctcagta

SEQ ID NO: 117431 - DNA, 80 bp, synthetic construct
  source 1..80: mol_type = other DNA
gatccgtcttccttgtcggccagctattcaccttttcaccccgcttgtaccatacaacacaggagtgcaactgctcaatc

SEQ ID NO: 117432 - DNA, 80 bp, synthetic construct
  source 1..80: mol_type = other DNA
acggtggccatcagcggccccaggtccaggtcgggctgggcctggggctcggcgaactgcgcaaagcgcgaggccgcgtc

SEQ ID NO: 117433 - DNA, 80 bp, synthetic construct
  source 1..80: mol_type = other DNA
tgatgtgggggatattaactcacaggatgatcggaatggcccaaacatacgacgtattcgtcgaaattgtaaatacatac

SEQ ID NO: 117434 - DNA, 80 bp, synthetic construct
  source 1..80: mol_type = other DNA
gtgccctgccccccggcaagccgacccccgttccccctcctaggaggaagcgcacggtcgtgctttccgagtctagcgtc

SEQ ID NO: 117435 - DNA, 80 bp, synthetic construct
  source 1..80: mol_type = other DNA
cagtgcgactcagagcatatttatcaacacctggactacccgtctgccaagaccatctggagttctgggaaggtgtgttt

SEQ ID NO: 117436 - DNA, 80 bp, synthetic construct
  source 1..80: mol_type = other DNA
ttgaccccaaaactatactatattaagactacatggttaggacaactagagcgtggaaaacttaaatggacctccttctt

SEQ ID NO: 117437 - DNA, 80 bp, synthetic construct
  source 1..80: mol_type = other DNA
gcctgaagaagccaggactgccatacattcactgactgaaagactctatgtgggaggtcctatgctgaacagcaagggac

SEQ ID NO: 117438 - DNA, 80 bp, synthetic construct
  source 1..80: mol_type = other DNA
tgaggaggtggccttgtctaacacaggagagatccccttttacggcaaggcaatacctctggctaatatcaagggtggaa

SEQ ID NO: 117439 - DNA, 80 bp, synthetic construct
  source 1..80: mol_type = other DNA
tgctgtgaggtatctcctcgggggcaagtacatccaaatggcactcattacctgtggcaggtggactggcacttacatat

SEQ ID NO: 117440 - DNA, 80 bp, synthetic construct
  source 1..80: mol_type = other DNA
tgaggtaaaacttaactgcagaccggggggcaaatacatcctctggctctttgaaaacacttccttcgcagtctccaacg

SEQ ID NO: 117441 - DNA, 80 bp, synthetic construct
  source 1..80: mol_type = other DNA
gccagagcggtcagggctaaactcatcgcccaagggggaaaagccgctgaatgcggcaagtacctctttaattgtgcggt

SEQ ID NO: 117442 - DNA, 80 bp, synthetic construct
  source 1..80: mol_type = other DNA
agcgccgatgcagcattgggccgcagctggcctcaaagacctggcaatagccactgaacctgtaatatttagtcccatgg

SEQ ID NO: 117443 - DNA, 80 bp, synthetic construct
  source 1..80: mol_type = other DNA
gtcgatccgtgatggacacaaatccctggggcaggttctccaacgtttcggtgaaaaactgcatgccgtcctacaaaaca

SEQ ID NO: 117444 - DNA, 80 bp, synthetic construct
  source 1..80: mol_type = other DNA
ccaccgccgccaccataaactcccggacgcgctccagcgcggccgtggcgccgctcggggtggtgatgaggtggcagtag

SEQ ID NO: 117445 - DNA, 80 bp, synthetic construct
  source 1..80: mol_type = other DNA
gtaggcctcaactcctttgtggtcggctctcagctcccttgcgaccctgagccagacaccgaggtattggcctctatgct

SEQ ID NO: 117446 - DNA, 80 bp, synthetic construct
  source 1..80: mol_type = other DNA
gtatccaaacgcttaacgaagctatcgattgcattattaccggatccaccagggttgctgcccaaaatgttcatgctaag

SEQ ID NO: 117447 - DNA, 80 bp, synthetic construct
  source 1..80: mol_type = other DNA
ttgtcagttgtagtgcaagaagatcccaaatactacaaaagggctccccgacgcctgaagaagctggaggatgaattgga

SEQ ID NO: 117448 - DNA, 80 bp, synthetic construct
  source 1..80: mol_type = other DNA
agaaaatgagtccgatgtcttcctgatggagagcttgcgccctcctgcgggcggctggttcggctgcacgtggatgaacg

SEQ ID NO: 117449 - DNA, 80 bp, synthetic construct
  source 1..80: mol_type = other DNA
tccgcctccaccctaatctcttcgccacgggcaaatttggccagagcctggactctatacagaagcggttctgggtgcgt

SEQ ID NO: 117450 - DNA, 80 bp, synthetic construct
  source 1..80: mol_type = other DNA
gaggcggagaccgaagtgggagtgcggagggacgccgaccaccatgacgacgactccgcctccgaggcggacagcacgga

SEQ ID NO: 117451 - DNA, 80 bp, synthetic construct
  source 1..80: mol_type = other DNA
gcccgggcaaccctggtcgccaggcgcccgttgtcgagatatcgttgcatgggcaacagcagggccaggtgaggcgcctt

SEQ ID NO: 117452 - DNA, 80 bp, synthetic construct
  source 1..80: mol_type = other DNA
atctgaatggcagccatcaaaaggatgggatgactgggagagtgtgcccttttgctctcaccactttcatgaactgcaat

SEQ ID NO: 117453 - DNA, 80 bp, synthetic construct
  source 1..80: mol_type = other DNA
catcgccccgattgtgtgtcgggtgcccggggtacagcagctatggagcggtcggtaatataactttggttgtcgccaca

SEQ ID NO: 117454 - DNA, 80 bp, synthetic construct
  source 1..80: mol_type = other DNA
agggagaggcggaggaggacgcgatcgacgacgagggagaggcggaggaggattatttttctgtaagtcaagtttgcagt

SEQ ID NO: 117455 - DNA, 80 bp, synthetic construct
  source 1..80: mol_type = other DNA
cgggtcacgctgttgggtttccgtgtcccccaccttggctgttccaaacgcctccgtgccagcgagggggttccgcactc

SEQ ID NO: 117456 - DNA, 80 bp, synthetic construct
  source 1..80: mol_type = other DNA
gtgagaaccaagctcaaactcactccactgcacggcacagaccaccttgatctatctgggtggttcgtggccggcggacg

SEQ ID NO: 117457 - DNA, 80 bp, synthetic construct
  source 1..80: mol_type = other DNA
cgtcagggcagcaaagacaaataacagctttgtcgtggatggtgacacactgaaggaatgcccactcaaacatagagcat

SEQ ID NO: 117458 - DNA, 80 bp, synthetic construct
  source 1..80: mol_type = other DNA
caggtaggaaagatggtggtgcgttcgtcaggaaggaggcgcactcgccatccacggttgtgcagtgtgattatgtctac

SEQ ID NO: 117459 - DNA, 80 bp, synthetic construct
  source 1..80: mol_type = other DNA
gagacatacggcaagccacatggttgtgatccatgtaagccctcagaaccggtctcggaaggaggaccccacatggttgt

SEQ ID NO: 117460 - DNA, 80 bp, synthetic construct
  source 1..80: mol_type = other DNA
cggaacacacggcccctcgcgcattggcccgcgggtcgctcaatgaacccgcattggtcccctggggttccgggtatggt

SEQ ID NO: 117461 - DNA, 80 bp, synthetic construct
  source 1..80: mol_type = other DNA
gcccaagctggagcagttctggcataagcacatgtggaacttcatcagtgggatacaatacttggccgggctgtcaacac

SEQ ID NO: 117462 - DNA, 80 bp, synthetic construct
  source 1..80: mol_type = other DNA
caccagtgccccctccgcggaggcggcgcgctgtggtcttggatcagagcaccgtggtggaggttttacgggagttggcc

SEQ ID NO: 117463 - DNA, 80 bp, synthetic construct
  source 1..80: mol_type = other DNA
ccccgaccttggagtccgcgtctgcgagaagcgggcattgtatgacatagctcaaaaactgccaacagcccttatggggc

SEQ ID NO: 117464 - DNA, 80 bp, synthetic construct
  source 1..80: mol_type = other DNA
tcttaatccatatatgccttcagttatagaaaaaatggaagcgctacaaaggaaatacggaggagctttggtgaggaatc

SEQ ID NO: 117465 - DNA, 80 bp, synthetic construct
  source 1..80: mol_type = other DNA
tcatagctgcctggtgtattaaaggtcgtgtggtcccgatggcaacatactccttgctaggatgctggtcttttgtcttg

SEQ ID NO: 117466 - DNA, 80 bp, synthetic construct
  source 1..80: mol_type = other DNA
tgccaggcgtgtacaccaacgaggcttttcaccccgacatcgtgctgctgccggggtgcggtgtggacttcactcagagc

SEQ ID NO: 117467 - DNA, 80 bp, synthetic construct
  source 1..80: mol_type = other DNA
ccaggggagcgtccgtctggcatgtttgactcctcagtgctttgcgagtgctatgactcagctctcgcttggtacgagct

SEQ ID NO: 117468 - DNA, 80 bp, synthetic construct
  source 1..80: mol_type = other DNA
gtcacactcattgcagctgcaggatatactcaaattagcatacctagaggtggtagcattacattaaatggtacttttaa

SEQ ID NO: 117469 - DNA, 80 bp, synthetic construct
  source 1..80: mol_type = other DNA
gtactataaacggtggttggcacggggagtgtggtggttgcaatacttcattgccagggctgaagccctcttgcacgttt

SEQ ID NO: 117470 - DNA, 80 bp, synthetic construct
  source 1..80: mol_type = other DNA
tttgtggaattgatgaggagaggagaccttccggtgtggctgagctacaaggtagcttctgccggtatatcttataaaga

SEQ ID NO: 117471 - DNA, 80 bp, synthetic construct
  source 1..80: mol_type = other DNA
ttggggacagtcactacgtggtgggcgtcaccgctgacaacgtgaaatgcccctgccaagtccccgctccggagttcttc

SEQ ID NO: 117472 - DNA, 80 bp, synthetic construct
  source 1..80: mol_type = other DNA
ccttccttggcactgggataaacggcgtcatgtggaccgtataccatggagctggcagcaaaaccctctgtggcagaaag

SEQ ID NO: 117473 - DNA, 80 bp, synthetic construct
  source 1..80: mol_type = other DNA
tctaagaatgaccactttggagtcagaattcttattcgagtaacctccgcccctcatgaacaggttgcgtcaacatgtca

SEQ ID NO: 117474 - DNA, 80 bp, synthetic construct
  source 1..80: mol_type = other DNA
gctggtgatccggggcagaggcacacagctcaacgacgaggtggtgagctcttcactgggtttgcgacctgacggagtct

SEQ ID NO: 117475 - DNA, 80 bp, synthetic construct
  source 1..80: mol_type = other DNA
ctcgaccgtggtgggtgcgggcaggctcgcgttcgggagccggccgagcaggtaggtcttcgggatgtaaagcagctggc

SEQ ID NO: 117476 - DNA, 80 bp, synthetic construct
  source 1..80: mol_type = other DNA
tgatgacggtaaacgccactgacgtcacagatgtcattacgattccaacagctgctggaaagaacctatgcattgtcaga

SEQ ID NO: 117477 - DNA, 80 bp, synthetic construct
  source 1..80: mol_type = other DNA
tggtggtcgtagcacgcgcggatgagcgcctcgatctgatcgtcgggtgacgtggcctgaccgccgattattagggcgtc

SEQ ID NO: 117478 - DNA, 80 bp, synthetic construct
  source 1..80: mol_type = other DNA
tgcgagcgcgttaacgacaacttgtctacgtgctggataccggtcgcgcccaatgtggccgtgaaggaatatggcgccat

SEQ ID NO: 117479 - DNA, 80 bp, synthetic construct
  source 1..80: mol_type = other DNA
agaacattgtggacgtgcaatacttgtacggggtgtggtcaagcatcgcatcctgggccatcaagtgggagtacgtcgtt

SEQ ID NO: 117480 - DNA, 80 bp, synthetic construct
  source 1..80: mol_type = other DNA
atcaatgttgcgggatccttcccatataacggcccaaacagcagctagacgccttgcacgtggctcccccccatcggaag

SEQ ID NO: 117481 - DNA, 80 bp, synthetic construct
  source 1..80: mol_type = other DNA
gcgcaggcgtagccggggctttggtcgcttttaagatcatgagcggggaggcccccactacagaagatctagtgaaccta

SEQ ID NO: 117482 - DNA, 80 bp, synthetic construct
  source 1..80: mol_type = other DNA
ttgaaagaaagagttgagaaatggctgaaagagtgtggcgtcgacaggttgaagaggatggcaatcagtggagatgattg

SEQ ID NO: 117483 - DNA, 80 bp, synthetic construct
  source 1..80: mol_type = other DNA
tggatgaatagtactgggttcactaagacgtgcggaggtcccccgtgtaacatcgggggggtcggtaaccgcaccttgat

SEQ ID NO: 117484 - DNA, 80 bp, synthetic construct
  source 1..80: mol_type = other DNA
ggtggaacaggagcaggcaacagagcagcccgtcgccgcaccatccgcgccggcagcccctccggtcaagcctcctcgta

SEQ ID NO: 117485 - DNA, 80 bp, synthetic construct
  source 1..80: mol_type = other DNA
acaaacctatcaggtggggtacctccacgctcctacagggagcgggaagagcaccaaggtccccgctgcttacgcagctc

SEQ ID NO: 117486 - DNA, 80 bp, synthetic construct
  source 1..80: mol_type = other DNA
tgggacgagtagccggaacggaggaaacgcgcgcccccatcccctcccgatgcccgacctgttaataataagagtaataa

SEQ ID NO: 117487 - DNA, 80 bp, synthetic construct
  source 1..80: mol_type = other DNA
tggactttgcagccatgcacctgtggagggcctggatgaggcagcggggacagagaatcttgaactactggcttctacag

SEQ ID NO: 117488 - DNA, 80 bp, synthetic construct
  source 1..80: mol_type = other DNA
caagctgtcgacttcagcctggaccccaccttcactataaccacacagactgtcccacaagacgctgtctcacgcagtca

SEQ ID NO: 117489 - DNA, 80 bp, synthetic construct
  source 1..80: mol_type = other DNA
tccaacaaaggaacatcatcccgcattgtcatggtcggtgcggggagccggcgaggcagcgaaaccgaaagtagtgctgg

SEQ ID NO: 117490 - DNA, 80 bp, synthetic construct
  source 1..80: mol_type = other DNA
atggtagaagaaggagttcgctccttgtcaaacatggtcttcacactcgaagatttcgttggggactggcgacagacagc

SEQ ID NO: 117491 - DNA, 80 bp, synthetic construct
  source 1..80: mol_type = other DNA
gtcttgggctttgtctccatgtccttctgtcaatcggtccgcgaacggaggtaatcccggcacgacgacggacgcccgac

SEQ ID NO: 117492 - DNA, 80 bp, synthetic construct
  source 1..80: mol_type = other DNA
gtggggggagttttcacctctgttggaaaggctgtgcaccaactgttcggaggagccttcaggtcattgtttggaggaat

SEQ ID NO: 117493 - DNA, 80 bp, synthetic construct
  source 1..80: mol_type = other DNA
gcgacgctccgccccaatacggaggggagtcttttggtgttttttcgtagatgcatccggtgctgcggcagatgcgaccc

SEQ ID NO: 117494 - DNA, 80 bp, synthetic construct
  source 1..80: mol_type = other DNA
aactcagactctggtcatggtaccacagatgcagcgtcgcgtcctcttcctgatgctgacacagcctccgacgctgaatc

SEQ ID NO: 117495 - DNA, 80 bp, synthetic construct
  source 1..80: mol_type = other DNA
ccggagaccccggcggcgcggacgccggcgggacatggcgtgcggctgggctcggcgtaggcccggagccggagcgcgtc

SEQ ID NO: 117496 - DNA, 80 bp, synthetic construct
  source 1..80: mol_type = other DNA
atggtcagctaactaaaaatcatgatatcacaatgaatttctttgacactcctggaggaacagttggtcaggatactgaa

SEQ ID NO: 117497 - DNA, 80 bp, synthetic construct
  source 1..80: mol_type = other DNA
aatgggcggcaacatcaccagggtcgagtcagagaacaaagtggtggttctggactccttcgatccgcttgtggcgaagg

SEQ ID NO: 117498 - DNA, 80 bp, synthetic construct
  source 1..80: mol_type = other DNA
cctcgcagacggtggttgctcaggtggggcctatgacgtcatcatctgtgatgagtgccattcaactgatcctactacta

SEQ ID NO: 117499 - DNA, 80 bp, synthetic construct
  source 1..80: mol_type = other DNA
caaaagctgttgccaccgggacgggcgggtaccgccgttacggggagcgtagcgtctcccgttccgcatgtaggcgaagc

SEQ ID NO: 117500 - DNA, 80 bp, synthetic construct
  source 1..80: mol_type = other DNA
tattacttgggtggcggatacagctgcttgtggtgacatattagcaggcctccccgtgtcggccaggaggaggaatctca

SEQ ID NO: 117501 - DNA, 80 bp, synthetic construct
  source 1..80: mol_type = other DNA
atagccagtgaagccatagttactccacttcataccccaactctgccgcccatacctgaattggaagaggaggatgagat

SEQ ID NO: 117502 - DNA, 80 bp, synthetic construct
  source 1..80: mol_type = other DNA
agttaagaatcctcaaataagacatgagtgtaatgagcaaaaccttacactaattcatgtgaacaaaacccatgaaagga

SEQ ID NO: 117503 - DNA, 80 bp, synthetic construct
  source 1..80: mol_type = other DNA
ctcctcctgctgtcccacagagctatcaagtagggtatcttcatgctccaactggcagcggtaagagcacaaaggtcccg

SEQ ID NO: 117504 - DNA, 80 bp, synthetic construct
  source 1..80: mol_type = other DNA
gctcgctctgtctgtggtcctgtctattgcttcactccctccccagtggtggtgggcacgaccgacaagttcggggcgcc

SEQ ID NO: 117505 - DNA, 80 bp, synthetic construct
  source 1..80: mol_type = other DNA
tctcattcatttattcactcagaagtcgaaggggttttggcgggaatcagagtgacccgcgggcagggatacgttgcgga

SEQ ID NO: 117506 - DNA, 80 bp, synthetic construct
  source 1..80: mol_type = other DNA
ccggcggcgtatgctgcccagggctacaaggtgctagtgctcaatccctcggttgcggccacactggggtttggtgccta

SEQ ID NO: 117507 - DNA, 80 bp, synthetic construct
  source 1..80: mol_type = other DNA
agttcggaaaggcaaaaggaagtcgcgcaatatggtacatgtggttgggagcgcgctttttagagtttgaagcccttggt

SEQ ID NO: 117508 - DNA, 80 bp, synthetic construct
  source 1..80: mol_type = other DNA
cgcgggcagggaggcccgcagggtcgccagcacggccggacacgcctttagccccacaaagtccgggagtggccgcagga

SEQ ID NO: 117509 - DNA, 80 bp, synthetic construct
  source 1..80: mol_type = other DNA
gccaatttgggccagaccagactacaaccccccgctgctccaagcgtggcagtctcctgactacaagccgcccacagtgt

SEQ ID NO: 117510 - DNA, 80 bp, synthetic construct
  source 1..80: mol_type = other DNA
gcctctaccagagattgaggacgaggtgtttaggaaaagaaacttaacaataatggacctacatccaggatcgggaaaaa

SEQ ID NO: 117511 - DNA, 80 bp, synthetic construct
  source 1..80: mol_type = other DNA
gcttattgctatcctgggacctggttatctcctcagagatgttctggcgcgcgtgccatactttgttagggcacaagccc

SEQ ID NO: 117512 - DNA, 80 bp, synthetic construct
  source 1..80: mol_type = other DNA
caacctatggcaagttccttgcggatggcggttgttcaggaggtgcttatgatattatcatatgtgacgagtgtcacgcc

SEQ ID NO: 117513 - DNA, 80 bp, synthetic construct
  source 1..80: mol_type = other DNA
tagaaaacgaaaacttaaccctaagcacaggcggaccttttactgtaagcgggggaaatttaaacctggcaacatcggca

SEQ ID NO: 117514 - DNA, 80 bp, synthetic construct
  source 1..80: mol_type = other DNA
tatctttacttgctgtctctggaaagtatctaaacatgacaaaggacgaaacaggagttaagataattttactatttgac

SEQ ID NO: 117515 - DNA, 80 bp, synthetic construct
  source 1..80: mol_type = other DNA
tggagcatagggaccgcacagaactgtcgcccttgctcttgtccaccacccaatggcaggtccttccctgttcttttaca

SEQ ID NO: 117516 - DNA, 80 bp, synthetic construct
  source 1..80: mol_type = other DNA
tccaatgtgcaaaccacatcaccccttgatgccgaagaggaggtataaaagggggtgcgggcgcgttcgtcctcactctc

SEQ ID NO: 117517 - DNA, 80 bp, synthetic construct
  source 1..80: mol_type = other DNA
tgacttcaagacatggctttccgccaagataatgcctaagttaccaggcatccccttcctctcttgtcaaaaggggtaca

SEQ ID NO: 117518 - DNA, 80 bp, synthetic construct
  source 1..80: mol_type = other DNA
gcagtagcatactacaggggtctggacgtctccgtgattccggcgtcgggtgatgtggtcgtagtggccacagacgctct

SEQ ID NO: 117519 - DNA, 80 bp, synthetic construct
  source 1..80: mol_type = other DNA
agatctacgtcctgcatcagcttggactctatatgctgtggcaacaactttcatcacaccaatgttgagacatagcattg

SEQ ID NO: 117520 - DNA, 80 bp, synthetic construct
  source 1..80: mol_type = other DNA
atcccgacaacaatcatggctaaaaacgaagttttctccgttaaaccggagaagggcggccgaaagcctgcgcgcctaat

SEQ ID NO: 117521 - DNA, 80 bp, synthetic construct
  source 1..80: mol_type = other DNA
tggatgaacggcactgggttcaccaagacgtgtggaggccccccgtgcaatatcggtggggtcggtaacaacaccctgac

SEQ ID NO: 117522 - DNA, 80 bp, synthetic construct
  source 1..80: mol_type = other DNA
atgagacacctgcgcctcctgccttcaactgtgcccggtgagctggctgtgcttatgctggaggactttgtggatacagt

SEQ ID NO: 117523 - DNA, 80 bp, synthetic construct
  source 1..80: mol_type = other DNA
tatgctatagggtcgcaattgccttgtgaaccagagcctgatgtcgtggcggtcacctccatgctcgttgacccagccca

SEQ ID NO: 117524 - DNA, 80 bp, synthetic construct
  source 1..80: mol_type = other DNA
aaatttatacgcagcgcggatattgttgatattggaatttgttctaagtatttacccggtcaatgttacgcgtacatttg

SEQ ID NO: 117525 - DNA, 80 bp, synthetic construct
  source 1..80: mol_type = other DNA
gaacaacagcaccacccagcggcccagtcttgcgggtttccccgtcatcgcggcgatgagtcagtggaggcccagggcga

SEQ ID NO: 117526 - DNA, 80 bp, synthetic construct
  source 1..80: mol_type = other DNA
gcggcttactgcctcaccgtaggtagtgtcgtcatctgtggcagggtcgtgacatcgggaaggcctgcggtgatgcctga

SEQ ID NO: 117527 - DNA, 80 bp, synthetic construct
  source 1..80: mol_type = other DNA
cgtacgcggaggccgtggggtcgctggggtccatggggtcgaaagcgtacttggcccggcatttgacctcgtaaaaggcc

SEQ ID NO: 117528 - DNA, 80 bp, synthetic construct
  source 1..80: mol_type = other DNA
ggggactatggttccctcggggcccggggcgaagttcccctcgcagatctgcatctcccaggctttcatctcggatggtg

SEQ ID NO: 117529 - DNA, 80 bp, synthetic construct
  source 1..80: mol_type = other DNA
tgactacgtaccaccagtagtccatggctgccctcttccgcccggcggcagccctccagtgccacccccgcggaggaaga

SEQ ID NO: 117530 - DNA, 80 bp, synthetic construct
  source 1..80: mol_type = other DNA
ctctcctatggagaggaagattattacgtggggggcagacacagctgcgtgtggagacatcctggcaggtctgcccgtat

SEQ ID NO: 117531 - DNA, 80 bp, synthetic construct
  source 1..80: mol_type = other DNA
gctagtctcataacgaacggaaccgatcaaactctaacaagcgacgttaacttacagttctttgccttgccaagcactcc

SEQ ID NO: 117532 - DNA, 80 bp, synthetic construct
  source 1..80: mol_type = other DNA
tacgtaccatcatgggacgtgcgtggcccgcgagactctgtaatcattcttgcggttctatttcatcctcatttggtctt

SEQ ID NO: 117533 - DNA, 80 bp, synthetic construct
  source 1..80: mol_type = other DNA
ctacggaaaggccataccgtttgccctggtcaagggaggaagacaccttatcttttgccactctaagaagaaatgtgatg

SEQ ID NO: 117534 - DNA, 80 bp, synthetic construct
  source 1..80: mol_type = other DNA
acatctacaaccctcctcctgaatgttctgggtggctgggtggcttcacaactgggacccgccccagccgccacagcttt

SEQ ID NO: 117535 - DNA, 80 bp, synthetic construct
  source 1..80: mol_type = other DNA
tggcacgtcacaaaaggatccgcgctgagaagcggtgaagggagacttgatccatactggggagatgtcaagcaggatct

SEQ ID NO: 117536 - DNA, 80 bp, synthetic construct
  source 1..80: mol_type = other DNA
accgatgccctaatgactggatacaccggtgactttgactctgtcattgactgcaacgttgcagtcactcaagttgttga

SEQ ID NO: 117537 - DNA, 80 bp, synthetic construct
  source 1..80: mol_type = other DNA
gaggccccaggtggactgggtaatcaaagccgccaggcccccacggcccgggccatgagtgatgatgttaactcatggcg

SEQ ID NO: 117538 - DNA, 80 bp, synthetic construct
  source 1..80: mol_type = other DNA
atgcacctggccaaaatctcacactctatggagcaatggagttttggaaagtgaaatgataatcccaaagatatatggag

SEQ ID NO: 117539 - DNA, 80 bp, synthetic construct
  source 1..80: mol_type = other DNA
tggcgggcccgacagctcggacacgcagtccacgtcctccatgcctcctcttgaggtggagcctggggaccccgatctcg

SEQ ID NO: 117540 - DNA, 80 bp, synthetic construct
  source 1..80: mol_type = other DNA
gtcgtttttatccaacgccagatcttcaggctgttggtatctgtaacccaaaggttgaacgcgatgaacaatttggggta

SEQ ID NO: 117541 - DNA, 80 bp, synthetic construct
  source 1..80: mol_type = other DNA
caatggactgctaaagaaaagcaaaacggagtagctggagtagaaaaagatgttacaaaaacatttggagtagcgtccat

SEQ ID NO: 117542 - DNA, 80 bp, synthetic construct
  source 1..80: mol_type = other DNA
aagccacaagagaggcccagaaaaggacagctgctggaatcatgaaaaatcccacagtggacgggataacagtgatagat

SEQ ID NO: 117543 - DNA, 80 bp, synthetic construct
  source 1..80: mol_type = other DNA
gagttgggtgaagcggcagcaatattcatgactgcgactccccctggcactcacgatccgttcccagacaccaatgcacc

SEQ ID NO: 117544 - DNA, 80 bp, synthetic construct
  source 1..80: mol_type = other DNA
tcgctgttgttggtggtcgaggtggtgttgtgtcactacatgcgcgtgttggtgggcccccacctggaggccgtggccgc

SEQ ID NO: 117545 - DNA, 80 bp, synthetic construct
  source 1..80: mol_type = other DNA
gacgccggcggcgcacgggcagacggtcgatgaatctttcaatgacctctccgcggcggcggcgcatggtttcagtgacg

SEQ ID NO: 117546 - DNA, 80 bp, synthetic construct
  source 1..80: mol_type = other DNA
ccaccagaacatcgtcgacgtccagtacctgtatggcctgacacctgccatcacaaagtacgtcgtcaagtgggagtggg

SEQ ID NO: 117547 - DNA, 80 bp, synthetic construct
  source 1..80: mol_type = other DNA
aacataaaacatgaacataagtcaacatggcattatgatgaggacaatccatataaaacatgggcctaccatggatcata

SEQ ID NO: 117548 - DNA, 80 bp, synthetic construct
  source 1..80: mol_type = other DNA
attgcgtaaaattgaggaatgccttcactataccttccgccatggctacgtgcgccaagcttgtaaagtgtccaatgtgg

SEQ ID NO: 117549 - DNA, 80 bp, synthetic construct
  source 1..80: mol_type = other DNA
gaagacacagcgcagtccgccgcgcgcccctgggtactcgaggaagttggggagctcgacgatcgaacacatgcgcggcg

SEQ ID NO: 117550 - DNA, 80 bp, synthetic construct
  source 1..80: mol_type = other DNA
cgcaaggcgaccgagccggtgtttgaggagatcgacgcctgcctgcggggctggttcggttcggcccgagtggaccacgt

SEQ ID NO: 117551 - DNA, 80 bp, synthetic construct
  source 1..80: mol_type = other DNA
ccatgctggtttgcggtgacgacttggtcgtcatcgctgagagcgacggcgtagaggaggataaccgagccctccgagcc

SEQ ID NO: 117552 - DNA, 80 bp, synthetic construct
  source 1..80: mol_type = other DNA
agtatcaatccccgcagaaattctgcggaagaccaagaagtttcctccggccatgccaatatgggcacggcctgcataca

SEQ ID NO: 117553 - DNA, 80 bp, synthetic construct
  source 1..80: mol_type = other DNA
accagtcccgtgcgtgggtccgagccgatacgcagcggggcgaacagggccaccggcccggtctggcgctccagggccgc

SEQ ID NO: 117554 - DNA, 80 bp, synthetic construct
  source 1..80: mol_type = other DNA
agcccaatgaggcaagtggggatttttttgtaaaaaatgtgaccaaatatcattggctaaggatgtttgcaagcggtttc

SEQ ID NO: 117555 - DNA, 80 bp, synthetic construct
  source 1..80: mol_type = other DNA
cgtcatttgcgagagccagggggtctccgaggacgaggcttgcctgagagccttcacggaggctatgaccaggtactccg

SEQ ID NO: 117556 - DNA, 80 bp, synthetic construct
  source 1..80: mol_type = other DNA
aaatgccaggcagcagggtgcgattgaaataatcaatgggggtaccaacttgcaaaagagcgtgttcccaatctcggacc

SEQ ID NO: 117557 - DNA, 80 bp, synthetic construct
  source 1..80: mol_type = other DNA
cccagcggcccagtcttgcgggtttccccgtcatcgcggcgatgagtcagtggaggcccagggcgatccttgtccagacg

SEQ ID NO: 117558 - DNA, 80 bp, synthetic construct
  source 1..80: mol_type = other DNA
tactcagccccccccggagacgccccgcaaccaacatacgatctggaactgataacatcttgctcctccaacgtctcagt

SEQ ID NO: 117559 - DNA, 80 bp, synthetic construct
  source 1..80: mol_type = other DNA
agctgccggacgctggcgcgcaggtaccggtacagggccgagcagaagttggccaacacggttcgatagctctcctcccg

SEQ ID NO: 117560 - DNA, 80 bp, synthetic construct
  source 1..80: mol_type = other DNA
ctgggcagcgttgataggaatttacactcccggtacaggtcggcgttggtcggtaacgccgaaaacagatcctcgttcca

SEQ ID NO: 117561 - DNA, 80 bp, synthetic construct
  source 1..80: mol_type = other DNA
tagagcagttctgggccaagcacatgtggaacttcattagtggcatccagtacctagcaggactctcaactttgccggga

SEQ ID NO: 117562 - DNA, 80 bp, synthetic construct
  source 1..80: mol_type = other DNA
cgtccgaattggggcccaaatgacccccggcgcaggtctcgcaatttgggtaaagtcatcgatacccttacctgcggcct

SEQ ID NO: 117563 - DNA, 80 bp, synthetic construct
  source 1..80: mol_type = other DNA
gcgtcctcaatgagaccaccaactggctgtgggcctttctttcccgggacaaacggccacgtttgtgttctagagaagaa

SEQ ID NO: 117564 - DNA, 80 bp, synthetic construct
  source 1..80: mol_type = other DNA
gtttgctcccccaccaggcccctttttccgggatgaggttacgttttcagtgggcctcaactcatacgtcgtggggtccc

SEQ ID NO: 117565 - DNA, 80 bp, synthetic construct
  source 1..80: mol_type = other DNA
agatttagaacagccagtggctgctggtatggaatggaaatccggcccatgaagcatgacgaatccacgcttgtgaagtc

SEQ ID NO: 117566 - DNA, 80 bp, synthetic construct
  source 1..80: mol_type = other DNA
tgacggtggcagcgcgcggccgtgccgcctcctcgctcacgtctttcttcacacctggggcgcgtcaggacatccagctt

SEQ ID NO: 117567 - DNA, 80 bp, synthetic construct
  source 1..80: mol_type = other DNA
ggtctgggtttcgacccggaagttcgcggccgccccgacggcggagcggccgcgcacgagggcggacagcgggacccccg

SEQ ID NO: 117568 - DNA, 80 bp, synthetic construct
  source 1..80: mol_type = other DNA
aaaaacaaccagttttgcattaaagttttgaacccttacatgccaactgtgattgagcacctagaaagactacaaaggaa

SEQ ID NO: 117569 - DNA, 80 bp, synthetic construct
  source 1..80: mol_type = other DNA
aacattgtctgcacgagctgcgcgctgtgaccgacaaaccccctccgcgccaggcccgccaccactgtcgtcgccgtccc

SEQ ID NO: 117570 - DNA, 80 bp, synthetic construct
  source 1..80: mol_type = other DNA
tccatactcttggcccaggacactctgaaccaaaatctcaattttgagatgtacggggcagtgtattcggtcaatccatt

SEQ ID NO: 117571 - DNA, 80 bp, synthetic construct
  source 1..80: mol_type = other DNA
ttagctttatcagcgcattgcgcctcctggtggcagaagtacctcaaagcgaggtttaccagtccggtcccgattactta

SEQ ID NO: 117572 - DNA, 80 bp, synthetic construct
  source 1..80: mol_type = other DNA
gaggtggcctccgatcagggctccggctcgtggatctcgtgttctgatgagggtgattcagtcgtatgctgttccatgtc

SEQ ID NO: 117573 - DNA, 80 bp, synthetic construct
  source 1..80: mol_type = other DNA
cagcaccggcttcgccaaggcttgtggggcccctccttgccaaatacgacctcgggtggagcagccctccaaccggtctt

SEQ ID NO: 117574 - DNA, 80 bp, synthetic construct
  source 1..80: mol_type = other DNA
ggggcgcgatcaggttacgcccctccccggcccgccctttcctcgcccgcccgcccattcctccctcctgctcctcgccc

SEQ ID NO: 117575 - DNA, 80 bp, synthetic construct
  source 1..80: mol_type = other DNA
ttggatgtgcgtgggggccgtgatgccataatcctcctaatgtgtgtagtccaccccaggctgatcttccatatcaccaa

SEQ ID NO: 117576 - DNA, 80 bp, synthetic construct
  source 1..80: mol_type = other DNA
tccccactccaagactgggctcatggcagcttgcgtgatctagcggtggccaccgagcccgtcatcttctcccggatgga

SEQ ID NO: 117577 - DNA, 80 bp, synthetic construct
  source 1..80: mol_type = other DNA
ccgcagaagaccgcaagtgtctggacggctgccggaaaatgcgcttctccaccgcctgcccctatccgtgcagcgacacg

SEQ ID NO: 117578 - DNA, 80 bp, synthetic construct
  source 1..80: mol_type = other DNA
acagccacagaagaaattgcagtgaaaaactggttagtaagagtggggcgtgagaggttatcaagaatggccatcagcgg

SEQ ID NO: 117579 - DNA, 80 bp, synthetic construct
  source 1..80: mol_type = other DNA
gctacatggtgggataatataactttagtgggaccctcagatactccagttacctggtatgatggcaatggattgcaatt

SEQ ID NO: 117580 - DNA, 80 bp, synthetic construct
  source 1..80: mol_type = other DNA
gaggcgagcacgtttatcacaggcgggaccgcggcccgcaccacccagtcgttcgcctcgatcttcactcctgggcccca

SEQ ID NO: 117581 - DNA, 80 bp, synthetic construct
  source 1..80: mol_type = other DNA
aattgcgcgtgaagaagtggctattggtttaatgcatctttgggactttgtggaagcgtatgtacataatccagcaagca

SEQ ID NO: 117582 - DNA, 80 bp, synthetic construct
  source 1..80: mol_type = other DNA
ctagtggaggaggagatggaagaagaatgggacagccaggcagaggaggaggacgaatgtgaggaggagacagaggagga

SEQ ID NO: 117583 - DNA, 80 bp, synthetic construct
  source 1..80: mol_type = other DNA
tgctacggcgctcggtgcgccaggcccagaggcggagcagcgcacgatggacccccgacctgggctacatgcgccagtgt

SEQ ID NO: 117584 - DNA, 80 bp, synthetic construct
  source 1..80: mol_type = other DNA
caggcaactgcacaaccaacattctggaggccaaatactggtgtccagattccatggaatacaactgccccaatctcagt

SEQ ID NO: 117585 - DNA, 80 bp, synthetic construct
  source 1..80: mol_type = other DNA
ccaagcaattgcggacgctcggcctcaacgccgttgcgttctatagaggcgtcgatgtggcagtaatccccgcccaaggg

SEQ ID NO: 117586 - DNA, 80 bp, synthetic construct
  source 1..80: mol_type = other DNA
gcttatctgagacattacaacatggaaaaccgggataaaaactacgggtggagaaccggactccccacttgaaacatgat

SEQ ID NO: 117587 - DNA, 80 bp, synthetic construct
  source 1..80: mol_type = other DNA
tcttttaccttctcctatatcgcccaacaatgaaagaccaataaacgtgtttttcatttgaaaattttcatgtatcttta

SEQ ID NO: 117588 - DNA, 80 bp, synthetic construct
  source 1..80: mol_type = other DNA
ctttttggcaaagggagcctggtgacatgcgctaagtttgcttgctctaagaaaatgaccgggaagagcatccagccaga

SEQ ID NO: 117589 - DNA, 80 bp, synthetic construct
  source 1..80: mol_type = other DNA
cgccatgcgtgccgttgttcccattatcccattccttttggttcttgtcggtgtatcgggggttcccaccaacgtctcct

SEQ ID NO: 117590 - DNA, 80 bp, synthetic construct
  source 1..80: mol_type = other DNA
atatacctcccaaacggactggtggcacagatgtaccagcccgagcgagacaaggtttttaccatggatggggagtttcg

SEQ ID NO: 117591 - DNA, 80 bp, synthetic construct
  source 1..80: mol_type = other DNA
gtggacaaccagtctcggtgttggataccggtcgcgcccaatatagctgtgaaccagcatggtgccctaaccgcgggctt

SEQ ID NO: 117592 - DNA, 80 bp, synthetic construct
  source 1..80: mol_type = other DNA
gcttgctccgggaatgagaatgcttcaccttgacacatataggatagtgctcttgctgattggcatttgcagcttgctga

SEQ ID NO: 117593 - DNA, 80 bp, synthetic construct
  source 1..80: mol_type = other DNA
acgtggatgtcatggcaggcgccgcaactatctgttctgctctgtacgtgggggacttgtgcggcggcgctttcttggtg

SEQ ID NO: 117594 - DNA, 80 bp, synthetic construct
  source 1..80: mol_type = other DNA
tatttgacactcaacgcgtctaagatatacagacaattgtacaaacagcgatggagatgccccggagggcccaatgcctt

SEQ ID NO: 117595 - DNA, 80 bp, synthetic construct
  source 1..80: mol_type = other DNA
caaagggggcggggctaggggcttgcggaaacagaagacgcgtgggataaaagaatcgcactaccgcaaggaaggtcgtg

SEQ ID NO: 117596 - DNA, 80 bp, synthetic construct
  source 1..80: mol_type = other DNA
gaggctatgaccaggtattcggccccccccggggaccccccacgaccagagtacgacctggagcccataacatcttgctc

SEQ ID NO: 117597 - DNA, 80 bp, synthetic construct
  source 1..80: mol_type = other DNA
ccctcacggggcgagaccggaacgaagcgagtggtgaggtccaggtgctttccaccgccacacaaacctttctgggcact

SEQ ID NO: 117598 - DNA, 80 bp, synthetic construct
  source 1..80: mol_type = other DNA
cctcggggcccggcgaccgtcttgctcccccgagcagcacggaggcaaggtggcccgcctccaacccccaccgaccaaag

SEQ ID NO: 117599 - DNA, 80 bp, synthetic construct
  source 1..80: mol_type = other DNA
tgtgaagacaaagctcaaactcactccactccgcgatgcagctaacctggacttgtctgggtggttcgtcgtgggcggac

SEQ ID NO: 117600 - DNA, 80 bp, synthetic construct
  source 1..80: mol_type = other DNA
gttagacgcattgcagggggtaagtatgtgcaactggtcctcttgaagctgggagcctggacgggtacctacatctatga

SEQ ID NO: 117601 - DNA, 80 bp, synthetic construct
  source 1..80: mol_type = other DNA
atcacacctattaccggctgcaactggtagttaagagagctgcagctgccgtcatccctaagcaagggggccacttcgtt

SEQ ID NO: 117602 - DNA, 80 bp, synthetic construct
  source 1..80: mol_type = other DNA
gcccctctgttccaagttccgacgcggcgtcaagccaagtcgaggatgacacagggtcggacgccggttcgtacagttca

SEQ ID NO: 117603 - DNA, 80 bp, synthetic construct
  source 1..80: mol_type = other DNA
tcctaaagcgtagtgcgttggcctcaaccccggaccattgtatcaccctaattaagtccacccaaactgttcaaggaccg

SEQ ID NO: 117604 - DNA, 80 bp, synthetic construct
  source 1..80: mol_type = other DNA
ggggcaaacttcaaggccgaaagagtcatagacccaagaaggtgcatgaagcccgtaattctcactgatggagaggaaag

SEQ ID NO: 117605 - DNA, 80 bp, synthetic construct
  source 1..80: mol_type = other DNA
ctcaaagaaggtccccatggggttctcttatgacacccgctgctttgactccacagtaactgaacgggacatcagggtcg

SEQ ID NO: 117606 - DNA, 80 bp, synthetic construct
  source 1..80: mol_type = other DNA
ttccggagtccccacagagcatacaacttgcacaaatgggcccatattagtaagcgtggcgccaacgtagacatcgcgca

SEQ ID NO: 117607 - DNA, 80 bp, synthetic construct
  source 1..80: mol_type = other DNA
actggcaatgatcaaaggaggaagacatcttgtgttttgccattcaaagaaaaagtgtgacgagctggccagcaagctca

SEQ ID NO: 117608 - DNA, 80 bp, synthetic construct
  source 1..80: mol_type = other DNA
gggtggatgcgcgcctcctgcgccccgcgggttcgcgagccgacatggtggcgatagacgcgggttatcggatgtccgct

SEQ ID NO: 117609 - DNA, 80 bp, synthetic construct
  source 1..80: mol_type = other DNA
acaagtccgggctagactcctcaccactgaggaggcctgtgacctgacccctccacactccgtccgttccaaatttggat

SEQ ID NO: 117610 - DNA, 80 bp, synthetic construct
  source 1..80: mol_type = other DNA
ggcatacagcattaggtgcataggagttagcaatagagacttcgtggagggcatgtcaggtgggacctgggttgatgttg

SEQ ID NO: 117611 - DNA, 80 bp, synthetic construct
  source 1..80: mol_type = other DNA
tgaggacagtgccactctcggtgccgggatactgctaatatttgggttctttaccttgtcaccatggtataaacattgga

SEQ ID NO: 117612 - DNA, 80 bp, synthetic construct
  source 1..80: mol_type = other DNA
tactacaagcggtggttagcgtggggggtgtggtgggtgcaatattttgttgccagaactgaagccatcctacatgtgta

SEQ ID NO: 117613 - DNA, 80 bp, synthetic construct
  source 1..80: mol_type = other DNA
tcttgattgtgatgctactctttgccggcgttgatgggcaaacccgcgtgacaggggggagtgatggccgtgcgcctacg

SEQ ID NO: 117614 - DNA, 80 bp, synthetic construct
  source 1..80: mol_type = other DNA
actcctgtgcctactcctacttagcgtaggggtaggcatctttttactccccgctcggtgagctgggagctaaacactcc

SEQ ID NO: 117615 - DNA, 80 bp, synthetic construct
  source 1..80: mol_type = other DNA
gttcacggttgcagagtttggggtcggtctgagaacaaaagtctttctggattttagacaggaaccaacacacgagtgtg

SEQ ID NO: 117616 - DNA, 80 bp, synthetic construct
  source 1..80: mol_type = other DNA
atgaggaccacatgggctttgtgtgaggctttaaccttagccaccgggcccatctccacactgtgggaaggaaatccggg

SEQ ID NO: 117617 - DNA, 80 bp, synthetic construct
  source 1..80: mol_type = other DNA
ggtctcccacttttagtgacaacagcacaccaccggctgtgccccagacctatcaggtcgggtatttgcatgccccgacc

SEQ ID NO: 117618 - DNA, 80 bp, synthetic construct
  source 1..80: mol_type = other DNA
agcccacctaaagaggttgtggaaaatgctggacccaagacaaggcttggctgttctaaggaaagtcaagagagtggtgg

SEQ ID NO: 117619 - DNA, 80 bp, synthetic construct
  source 1..80: mol_type = other DNA
ccagggccggtgcttcggggtgaatgagctgggcggcctcccgcgtgacactctgcatctgcaggagagcgttcacgtac

SEQ ID NO: 117620 - DNA, 80 bp, synthetic construct
  source 1..80: mol_type = other DNA
ggctgtggtgagatgatgagttcatgcaaacccctatccgacttcgatcaaggttggggccccctgtggtataatgagtc

SEQ ID NO: 117621 - DNA, 80 bp, synthetic construct
  source 1..80: mol_type = other DNA
ggctggggcccactcggggtcgctaacatcagcggctcgtctgatgacaggccttattgctggcactacgcgcctcggcc

SEQ ID NO: 117622 - DNA, 80 bp, synthetic construct
  source 1..80: mol_type = other DNA
ctggtaagcctgctgttgtccctgatcgcgagatcttataccagcaatttgacgagatggaggagtgctctaggcacatc

SEQ ID NO: 117623 - DNA, 80 bp, synthetic construct
  source 1..80: mol_type = other DNA
tacacctagctggttgtgtgccttgtgtgagagccgacaacatttcacgttgctggcaccctgtttcacccactctggcc

SEQ ID NO: 117624 - DNA, 80 bp, synthetic construct
  source 1..80: mol_type = other DNA
tccacatgccgcaactatcaaagtgttagcccttggaaaccaagaaggatccttgaagactgctctcactggtgcaatgc

SEQ ID NO: 117625 - DNA, 80 bp, synthetic construct
  source 1..80: mol_type = other DNA
ataaaaagggagacttagttgcttggaacaaagagaatgacaggcgcaccctttggacaactccagacccatctccaaat

SEQ ID NO: 117626 - DNA, 80 bp, synthetic construct
  source 1..80: mol_type = other DNA
gaattgcaatgattccctcaacaccggatttattgcgggacttatctatgtgcataagttcaactcctcagggtgtgcgg

SEQ ID NO: 117627 - DNA, 80 bp, synthetic construct
  source 1..80: mol_type = other DNA
tgctgacggtggttgctctggaggcgcctacgacatcataatatgcgatgagtgccactcaactgactcgactaccatct

SEQ ID NO: 117628 - DNA, 80 bp, synthetic construct
  source 1..80: mol_type = other DNA
cactggtgaagcccacttggaagaagaaaatgaaggagacaatgcttgcaagcgaacttactccgatagaggttggggaa

SEQ ID NO: 117629 - DNA, 80 bp, synthetic construct
  source 1..80: mol_type = other DNA
cccgtcaattcatggttgggaaatatcatccagtacgccccaacgatatgggcgcgcatggtcctgatgacacacttttt

SEQ ID NO: 117630 - DNA, 80 bp, synthetic construct
  source 1..80: mol_type = other DNA
gacgcccactttctgtctcagacgaagcaggggggagaaaactttgcgtacctcgtggcttaccaagctacagtgtgcgc

SEQ ID NO: 117631 - DNA, 80 bp, synthetic construct
  source 1..80: mol_type = other DNA
agctcatcctcaggggtcgacacgcagtccagcactgcttccaaggtgctcccttcaccgggagaagagtccgactcaga

SEQ ID NO: 117632 - DNA, 80 bp, synthetic construct
  source 1..80: mol_type = other DNA
gatcgttggtggagtatacttgctgccgcgcaggggcccgagattgggtgtgcgcgcgacgaggaaaacttccgaacggt

SEQ ID NO: 117633 - DNA, 80 bp, synthetic construct
  source 1..80: mol_type = other DNA
tggatgaacggtaccggctatgtcaagacatgtggggctcccccttgtttgactcaacccacaaagggtaacaacaccct

SEQ ID NO: 117634 - DNA, 80 bp, synthetic construct
  source 1..80: mol_type = other DNA
ctggatctaccggcaatcattcaaagactccatggcttgagcgcatttacactgcacggatactctccacacgaactcaa

SEQ ID NO: 117635 - DNA, 80 bp, synthetic construct
  source 1..80: mol_type = other DNA
taggacctttgctcctcggcgacaggtgcagtggcgtggacgcaaagtgaagcgcgtgctccgacctggcaccactgtgg

SEQ ID NO: 117636 - DNA, 80 bp, synthetic construct
  source 1..80: mol_type = other DNA
cggtgatggtcatgggatcgtggagccagtccagggactctggggcgtcgtggatgacgtggcgtcgccggttggccaca

SEQ ID NO: 117637 - DNA, 80 bp, synthetic construct
  source 1..80: mol_type = other DNA
atctcccagggagggagagcggccacttgtggcttctatctcttcaactgggcggtgaggacaaagcgcaaactcactcc

SEQ ID NO: 117638 - DNA, 80 bp, synthetic construct
  source 1..80: mol_type = other DNA
ttttgggtatagggaccgttctcgaccaggcagagactagcggagtgagacttacggttctcgcgaccgccaccccccct

SEQ ID NO: 117639 - DNA, 80 bp, synthetic construct
  source 1..80: mol_type = other DNA
cattttattatcccagcgcggggcgtgtatacaaacaaagcctgccgcctgcaagcggtttagcattttaacgttaacaa

SEQ ID NO: 117640 - DNA, 80 bp, synthetic construct
  source 1..80: mol_type = other DNA
cggacgctcgatgtgatacaatgagcggtggtatgatcgtccttcaacacacccatacagtgaccctgctaaccatagac

SEQ ID NO: 117641 - DNA, 80 bp, synthetic construct
  source 1..80: mol_type = other DNA
atgggcaacgcttcccggtgttggataccagttgcgcccaacgtagctgtgagccaacctggtgctctaaccgcgggctt

SEQ ID NO: 117642 - DNA, 80 bp, synthetic construct
  source 1..80: mol_type = other DNA
cacgccctacatgtggagttaccagccacaaatgggacttgcggctggagctgcccaagactactcaacccgaataaact

SEQ ID NO: 117643 - DNA, 80 bp, synthetic construct
  source 1..80: mol_type = other DNA
acatgagcgcgggaccccacatgatatcccgggtcaacggaatacgcgcccaccgaaaccgaattctcctggaacaggcg

SEQ ID NO: 117644 - DNA, 80 bp, synthetic construct
  source 1..80: mol_type = other DNA
catcttgctcacatgcctctttcatcctgccctggggtttgagatcacaaaaatcctcctcgggatactgggccctctgt

SEQ ID NO: 117645 - DNA, 80 bp, synthetic construct
  source 1..80: mol_type = other DNA
ggccatcactcctgctgtccagaccaattggcaaaaactcgagaccttctgggcgaagcatatgtggaacttcatcagtg

SEQ ID NO: 117646 - DNA, 80 bp, synthetic construct
  source 1..80: mol_type = other DNA
ggcggcatagagcataggttcgatgccgcttgcaactggacccgaggtgaacgttgcgagctagaggacagagatcgggt

SEQ ID NO: 117647 - DNA, 80 bp, synthetic construct
  source 1..80: mol_type = other DNA
ggacttaccctggggctcctcgaggacggagaggctgacaagcccgcgcgggagccaggtccagatctcggcgcggcgtg

SEQ ID NO: 117648 - DNA, 80 bp, synthetic construct
  source 1..80: mol_type = other DNA
caaatgtcaataacaaaccagacattgtactttatgctgagaatatgaatttggaaactccagacacacatgtggtgtac

SEQ ID NO: 117649 - DNA, 80 bp, synthetic construct
  source 1..80: mol_type = other DNA
cttgaaattatgtagtaataaaattattgacgtttaccctgtgttttatttcttgggtgtgtccgcgggtatataagcag

SEQ ID NO: 117650 - DNA, 80 bp, synthetic construct
  source 1..80: mol_type = other DNA
cattcctgtcgagggcatggaaacgaccatgcgatcaccatcctttactgacaactccacaccgccggctgtgccccaga

SEQ ID NO: 117651 - DNA, 80 bp, synthetic construct
  source 1..80: mol_type = other DNA
cttcgtatctccgcatcctctgctgctcaaaggagggggcgcattgggagaaatcccaacagagatggagactcatacta

SEQ ID NO: 117652 - DNA, 80 bp, synthetic construct
  source 1..80: mol_type = other DNA
gacagactgcaagtcctggacgatcactaccaggacgtgctcaaggagatgaaggcgaaggcgtccacagttaaggctaa

SEQ ID NO: 117653 - DNA, 80 bp, synthetic construct
  source 1..80: mol_type = other DNA
tagaaagagtgtgagcaaattacatgtacttgtgcataaattcagcagtaatgtataatgatctaaattaaataaaaaat

SEQ ID NO: 117654 - DNA, 80 bp, synthetic construct
  source 1..80: mol_type = other DNA
cccatgcgtgtgaccccgaagcccctcatcggctgaagcagggctaggtcggcgacaacgcgctcggctaatatggcctg

SEQ ID NO: 117655 - DNA, 80 bp, synthetic construct
  source 1..80: mol_type = other DNA
ctcctcaacttccggtgttacgggtgataatacaacaacatcctctgaacccgtcccctctgtctgtcctccagactccg

SEQ ID NO: 117656 - DNA, 80 bp, synthetic construct
  source 1..80: mol_type = other DNA
cccctcctcgtgttcttctgcgtagcgtggtacgtgaaaggcagatgggcccctggagccgcctataccatctacgggat

SEQ ID NO: 117657 - DNA, 80 bp, synthetic construct
  source 1..80: mol_type = other DNA
tgggcgaggtggccgggggaaggcgcccgctagcgagaccggccgttcccggacgacaccttgcgacaaaacctaaggac

SEQ ID NO: 117658 - DNA, 80 bp, synthetic construct
  source 1..80: mol_type = other DNA
ggcgtgtgggtttgggtaagtccatcagcggctcggccaaccgtcgaaggttggccggacgaacgacgaccggggtaccc

SEQ ID NO: 117659 - DNA, 80 bp, synthetic construct
  source 1..80: mol_type = other DNA
cgggcagaagccttgatccatgagtgggtaccgcctttgcaggcacgaggcggccgtgacggcatcatatgggccgccgc

SEQ ID NO: 117660 - DNA, 80 bp, synthetic construct
  source 1..80: mol_type = other DNA
tcatgtggatgtccttgctggtgccgcggttgtctgctctgccatgtatatcggagacttgtgcggtggccttttcttgg

SEQ ID NO: 117661 - DNA, 80 bp, synthetic construct
  source 1..80: mol_type = other DNA
tcaattcatggctgggaaacatcattcaatacgcccccaccatatgggtgcgcatggtcctcatgacacactttttctcc

SEQ ID NO: 117662 - DNA, 80 bp, synthetic construct
  source 1..80: mol_type = other DNA
ctccggctcttcgagggcgtagtggcagtagaacacgtccagctgctgttcgtccagcccggcgaagataacgtcaaggt

SEQ ID NO: 117663 - DNA, 80 bp, synthetic construct
  source 1..80: mol_type = other DNA
ttaccgagctccgcaactttgcggacctggttaaccacccgccggtcctacgcgaactggaggataagcgcggggtgcgg

SEQ ID NO: 117664 - DNA, 80 bp, synthetic construct
  source 1..80: mol_type = other DNA
gcgggtgtctgcgggggcggggcggcgtgcggtggacccgaggcctcagagtccggggccgagggctttgtgggcggtgt

SEQ ID NO: 117665 - DNA, 80 bp, synthetic construct
  source 1..80: mol_type = other DNA
ccaggccgttaaaatacaatcccaatacacgggccactcctgcagtacaataaagctaatacaagatggtatactcctca

SEQ ID NO: 117666 - DNA, 80 bp, synthetic construct
  source 1..80: mol_type = other DNA
ctagcaatgctcgtgggccaagctgaggcggccttgcagaacctcatagtcctcaacgctgcgtcggctgcggcctggca

SEQ ID NO: 117667 - DNA, 80 bp, synthetic construct
  source 1..80: mol_type = other DNA
actgatgtcgtgagcttaaactagttcttgatgcagatgacgttttaagcacagaagttaaaagagtgataacttcttca

SEQ ID NO: 117668 - DNA, 80 bp, synthetic construct
  source 1..80: mol_type = other DNA
ctggcgctccagggccgccaggacgcacgcgtacagcgcccgccacagagtcgggttctccaggggctccagcggtgagg

SEQ ID NO: 117669 - DNA, 80 bp, synthetic construct
  source 1..80: mol_type = other DNA
catgagcacaaatcctaaacctcaaagaaaaaccaaaagaaacacaaaccgccgcccacaggacgtcaagttcccgggtg

SEQ ID NO: 117670 - DNA, 80 bp, synthetic construct
  source 1..80: mol_type = other DNA
ggtagcgtatcaggccactgtctgtgcccgtgcgcaggcaagtccgccaagctgggatgaaatgtggaagtgcttaatac

SEQ ID NO: 117671 - DNA, 80 bp, synthetic construct
  source 1..80: mol_type = other DNA
tttaactgcgcaatgcagagcttgggccctgggcttattggcatgagtggggtaacttttatgaatgtgagatttgtagt

SEQ ID NO: 117672 - DNA, 80 bp, synthetic construct
  source 1..80: mol_type = other DNA
attaccgcgtaccaccagcagacccgaggcttgcttgggacaatcgtcaccagcttaaccggcagggataaaaatgaggt

SEQ ID NO: 117673 - DNA, 80 bp, synthetic construct
  source 1..80: mol_type = other DNA
accccttgccattaccaatactggaaagctggctctacagctctccccaccgctacaaacagcagacacaggcttgactt

SEQ ID NO: 117674 - DNA, 80 bp, synthetic construct
  source 1..80: mol_type = other DNA
tgttgggtttatgccaaacctaaaagcttacccaaaaactcaaagtaaaactgcaaaaagtaatattgttagccaggtgt

SEQ ID NO: 117675 - DNA, 80 bp, synthetic construct
  source 1..80: mol_type = other DNA
tggtggtggacgcggtgttggcgcccgcgtcgggcgccgccgagcagagcagcgccgttgtgcgttcggccatgttgtgg

SEQ ID NO: 117676 - DNA, 80 bp, synthetic construct
  source 1..80: mol_type = other DNA
agagagctcaataatctaagtctagtttgtgacagagcaaaacttgaagagctcgcaaggagaccatggaatggtgcggc

SEQ ID NO: 117677 - DNA, 80 bp, synthetic construct
  source 1..80: mol_type = other DNA
tgctgttgttgacgggatagttgctaccgatgtgcctgagctggaacggactactcccatgatgcagaagcgcttggggc

SEQ ID NO: 117678 - DNA, 80 bp, synthetic construct
  source 1..80: mol_type = other DNA
cgtctgctgctcgatgtcctacacatggacaggcgccctgatcacgccatgcgccgcggaggaaagcaaactgcccatca

SEQ ID NO: 117679 - DNA, 80 bp, synthetic construct
  source 1..80: mol_type = other DNA
ctcgccgccgcggtgataaccgggccagtctcctcagccctcggccgatcagcaccctgaaaggctcttctggaggcccg

SEQ ID NO: 117680 - DNA, 80 bp, synthetic construct
  source 1..80: mol_type = other DNA
gagacccttcccacatcaccgccgcagcggcagcacgtcgcttggcacgtgggtctcctccgtcagaagctagttcatca

SEQ ID NO: 117681 - DNA, 80 bp, synthetic construct
  source 1..80: mol_type = other DNA
agtgtctctgctacgggtgccatacttcgtgagagctcacgctctgttacgcgtatgcaccctggtgagacatctcgcag

SEQ ID NO: 117682 - DNA, 80 bp, synthetic construct
  source 1..80: mol_type = other DNA
acaccaccgtcaggatgccggccgtcgcactccggacgctttcgccgtgcgatgagctgacccaggagtcaaaggggtac

SEQ ID NO: 117683 - DNA, 80 bp, synthetic construct
  source 1..80: mol_type = other DNA
gtgacctgacgcccccccactcagccagatccaaatatggcttcggggcgaaagatgtccgggaccacacccccaaggcc

SEQ ID NO: 117684 - DNA, 80 bp, synthetic construct
  source 1..80: mol_type = other DNA
gccttccagtttactggcttgttcactcacgggccccagcaaaagatccagctcatcaacaccaatggcagctggcacat

SEQ ID NO: 117685 - DNA, 80 bp, synthetic construct
  source 1..80: mol_type = other DNA
aagacgcggtatcgcgctcgcaacggcgaggtaggactggcaggggtaggaggggcatctacaggtttgtgactccagga

SEQ ID NO: 117686 - DNA, 80 bp, synthetic construct
  source 1..80: mol_type = other DNA
tgtacgccacgacctccaagtcagccaccacccggcaaaagaaggtcaccttcgaccgcatacaggtgctggacaaccac

SEQ ID NO: 117687 - DNA, 80 bp, synthetic construct
  source 1..80: mol_type = other DNA
ggtggaaataggctcgggaaacatgttcgccatggagatcaatttgcaagccaacctgtggcgcagttttttgtattcta

SEQ ID NO: 117688 - DNA, 80 bp, synthetic construct
  source 1..80: mol_type = other DNA
ctgccctctacgtgggggacctctgcggtggggtgatgctcgcagcccaaatgttcattgtctcgccgcagcaccactgg

SEQ ID NO: 117689 - DNA, 80 bp, synthetic construct
  source 1..80: mol_type = other DNA
cactggcagggacacgttgcgatactggtgtttagtgctccacttaaactcaggcacaaccatccgcggcagctcggtga

SEQ ID NO: 117690 - DNA, 80 bp, synthetic construct
  source 1..80: mol_type = other DNA
ggatttacaatgacagtgatacccaatagccgccagatgtacacccagctgtccggactccagcatcatctgctgagttg

SEQ ID NO: 117691 - DNA, 80 bp, synthetic construct
  source 1..80: mol_type = other DNA
ttaacttcgcttgcttggactaatgaaaccggagtatcattgatgaatcgtcagcctttctcaggtttggatattcaaat

SEQ ID NO: 117692 - DNA, 80 bp, synthetic construct
  source 1..80: mol_type = other DNA
cttgctggccaattgaggcagttagggctgaacgctgtagccttctacagaggtatcgacgtttcagtcatccctacctc

SEQ ID NO: 117693 - DNA, 80 bp, synthetic construct
  source 1..80: mol_type = other DNA
ctggcatggcatgttgcggctaatgtgtccaacgtgacaagtcgaagctggacatgggaaggcccagaggaaaatgctgt

SEQ ID NO: 117694 - DNA, 80 bp, synthetic construct
  source 1..80: mol_type = other DNA
tcggccgagttgacaaacagggctgggtgcagcacgcagcgataggcgagcagggccagggcgaagtccggcgacagctg

SEQ ID NO: 117695 - DNA, 80 bp, synthetic construct
  source 1..80: mol_type = other DNA
gcgactaggaagacttcagaacggtcacagcccagaggcagacgccaacctataccgaaagcgcgtcgccagacgggccg

SEQ ID NO: 117696 - DNA, 80 bp, synthetic construct
  source 1..80: mol_type = other DNA
atcaccagggaactaaaagaacttggtatgaggttgtagtgacagatggttttccaaaatcaggggagatgaaaatcgaa

SEQ ID NO: 117697 - DNA, 80 bp, synthetic construct
  source 1..80: mol_type = other DNA
gttcaccacgagtacctgcgtcacctttgctgcccgcgaggagggcgtgtcgtccagcaccagcacccaggtccagatcc

SEQ ID NO: 117698 - DNA, 80 bp, synthetic construct
  source 1..80: mol_type = other DNA
cggctcgtcctcaggagtcagcacacaatctgccggcggatccactgacctgccaaaagcagagagggagtctgacacag

SEQ ID NO: 117699 - DNA, 80 bp, synthetic construct
  source 1..80: mol_type = other DNA
gacaccgccgaacccgtctccacgatcaggcgctccaggcagcgatgtttggcggcgatgtcggccgacgtaaagaactt

SEQ ID NO: 117700 - DNA, 80 bp, synthetic construct
  source 1..80: mol_type = other DNA
gctttttgggtttttctcttcccccctccccacatcccccctctttaggggttcgggtggtaacaaccgcgatgttttcc

SEQ ID NO: 117701 - DNA, 80 bp, synthetic construct
  source 1..80: mol_type = other DNA
acctttcttattgatggccccgaaacagcagaatgccccaacacaaatagagcttggaactcgttggaagttgaagacta

SEQ ID NO: 117702 - DNA, 80 bp, synthetic construct
  source 1..80: mol_type = other DNA
ggaaatgaaaccttcagaaacatcgtccaacagcacggtggagtccaaagcagagctctgcaaaaacaaatacagtcaag

SEQ ID NO: 117703 - DNA, 80 bp, synthetic construct
  source 1..80: mol_type = other DNA
ccccccccggggacccgcctcaaccagaatacgacttggagttgataacatcatgctcctccaatgtgtcggtcgcgcac

SEQ ID NO: 117704 - DNA, 80 bp, synthetic construct
  source 1..80: mol_type = other DNA
cacgtgactagaggagcggcgttgtccattgatgatgcattggccggcccctactgggctgatgtgaaggaagacgtcgt

SEQ ID NO: 117705 - DNA, 80 bp, synthetic construct
  source 1..80: mol_type = other DNA
gagcacgaatcctaaacctcaaagaaaaaccaaacgcaacaccaaccgccgcccacaggacgttaaattcccgggtgggg

SEQ ID NO: 117706 - DNA, 80 bp, synthetic construct
  source 1..80: mol_type = other DNA
cagcggctggagtgtcataccacgatcggagatggtgttttgatggccctaggacaaacacaattctagaagacaacaac

SEQ ID NO: 117707 - DNA, 80 bp, synthetic construct
  source 1..80: mol_type = other DNA
ttggtagaatttgaagaaccacatgccacaaaacaatcagtggtagcccttggctcacaagagggggccctgcaccaagc

SEQ ID NO: 117708 - DNA, 80 bp, synthetic construct
  source 1..80: mol_type = other DNA
cctgtccccccgcggctctcggccttcttggggccccaatgatccccggcggaggtcccgcaatttgggtaaggtcatcg

SEQ ID NO: 117709 - DNA, 80 bp, synthetic construct
  source 1..80: mol_type = other DNA
aaagctgaccgtgtcatagattccaggagatgcctaaagccggtcatacttgatggcgagagagtcattctggctggacc

SEQ ID NO: 117710 - DNA, 80 bp, synthetic construct
  source 1..80: mol_type = other DNA
tcgcaccagcatacagctttaactgtctggggatgagcagtagagactttctagaaggtgtatcaggggccacatgggtg

SEQ ID NO: 117711 - DNA, 80 bp, synthetic construct
  source 1..80: mol_type = other DNA
gcacagatactcttggacaacattaccacactgaggggtccagttgctactttttatggacccgagcagatgaagatgcc

SEQ ID NO: 117712 - DNA, 80 bp, synthetic construct
  source 1..80: mol_type = other DNA
ttccaaaatacttgttatcgccataccatttcaaagcagaacatcgagcaccgtttcctgctggacgttttggatttctt

SEQ ID NO: 117713 - DNA, 80 bp, synthetic construct
  source 1..80: mol_type = other DNA
ggtatgcagggccccccggggaatacgccgaaatcccccgtttggggccggtccgtcaagtggcatcgttattacggctg

SEQ ID NO: 117714 - DNA, 80 bp, synthetic construct
  source 1..80: mol_type = other DNA
gtttagtagactacccttaccggctgtggcactatccttgcaccgtgaactacaccatccataaggtccgggtttttatc

SEQ ID NO: 117715 - DNA, 80 bp, synthetic construct
  source 1..80: mol_type = other DNA
atccagatgttagaattgtggaaaatcacggagtagaggacgaactaccaaactattgtttcccattgggaggaatggcg

SEQ ID NO: 117716 - DNA, 80 bp, synthetic construct
  source 1..80: mol_type = other DNA
ctggcatggtgggatgggcgttgaagtgggagttcgtagtcctcattttcctcctcctagcagacgcacgcgtgtgcgtt

SEQ ID NO: 117717 - DNA, 80 bp, synthetic construct
  source 1..80: mol_type = other DNA
tgagactagcggctaacgctatctgttcagccgtcccagttgattgggtcccaaccagccgcacaacctggtcaatccat

SEQ ID NO: 117718 - DNA, 80 bp, synthetic construct
  source 1..80: mol_type = other DNA
gggtgacagtaggggatgattatgatggtagtcaggatgagctgaaatacgagtgggtggagtttgagctgcccgaaggc

SEQ ID NO: 117719 - DNA, 80 bp, synthetic construct
  source 1..80: mol_type = other DNA
cacgagacatgctgatgtcattccggtgcgccggcggggtgacagcaggtggagcctgctctcccccaggcctgtctcct

SEQ ID NO: 117720 - DNA, 80 bp, synthetic construct
  source 1..80: mol_type = other DNA
ccagatgctttgactccacggttacggagcaggacatacgcactgagcaagacatatatttgtcttgccaactggtcact

SEQ ID NO: 117721 - DNA, 80 bp, synthetic construct
  source 1..80: mol_type = other DNA
cgcgcggccagggccagcgggtcgacgtcgaccttggcctccacgtccaggagagcggcgcgaggagcggccggcgtgcc

SEQ ID NO: 117722 - DNA, 80 bp, synthetic construct
  source 1..80: mol_type = other DNA
gcctcacacaacatattagtggaggtccaagatgatggaaccatgaagataaaggatgaagagagagatgacacgctaac

SEQ ID NO: 117723 - DNA, 80 bp, synthetic construct
  source 1..80: mol_type = other DNA
ctgagacagatgcttctcgcgcggtcactaacatactcaactccctcaccatcacgagcctcctccgcagactccacacg

SEQ ID NO: 117724 - DNA, 80 bp, synthetic construct
  source 1..80: mol_type = other DNA
tccaaccgtacaaaccaactggcaaagacttgaggtgttttgggctaagcacatgtggaactttgttagcggaatccaat

SEQ ID NO: 117725 - DNA, 80 bp, synthetic construct
  source 1..80: mol_type = other DNA
agaagatcattacgtggggcgccgacactgccgcatgcggtgacattatcaggggcctcccagtttctgctaggaggtgc

SEQ ID NO: 117726 - DNA, 80 bp, synthetic construct
  source 1..80: mol_type = other DNA
ttgagaggataaaatctgagtacatgacctcttggttttatgacaatgacaacccctacaggacctggcactactgtggc

SEQ ID NO: 117727 - DNA, 80 bp, synthetic construct
  source 1..80: mol_type = other DNA
acactggcccccgcggcttggaccagaggccttattgctggcactacgcgccccaaccgtgcggtaccatacccgcgttg

SEQ ID NO: 117728 - DNA, 80 bp, synthetic construct
  source 1..80: mol_type = other DNA
aggaaagagagaagaccaatggtgtggatcacttattggtctcacttccagagcaacctgggcccagaacatacccacag

SEQ ID NO: 117729 - DNA, 80 bp, synthetic construct
  source 1..80: mol_type = other DNA
catcgacacgttcgatcaggggtggggccccatcacctacgccgaaccccaagactcggaccagagaccttactgctggc

SEQ ID NO: 117730 - DNA, 80 bp, synthetic construct
  source 1..80: mol_type = other DNA
gccagcccccctcgagcggtgatgcaggctcgtccacgggtgcgggcgccgccgaatccggcggtccgacgtcccctggt

SEQ ID NO: 117731 - DNA, 80 bp, synthetic construct
  source 1..80: mol_type = other DNA
gcgccgccgcagcaccggttggaattgattgcgaaagttgcgcccctcgaccgactgcccggcgaacaccccgtggcact

SEQ ID NO: 117732 - DNA, 80 bp, synthetic construct
  source 1..80: mol_type = other DNA
ctttcttccattttttgaaaagactgagaaccgtctgcatgatgcataatgcgaacaggaggcatgctgaaacccatgac

SEQ ID NO: 117733 - DNA, 80 bp, synthetic construct
  source 1..80: mol_type = other DNA
tgtgcggcatcagaagcaccaccagaatggagaacctgctgtggaagcagatcgccaacgagctgaactacatcctgtgg

SEQ ID NO: 117734 - DNA, 80 bp, synthetic construct
  source 1..80: mol_type = other DNA
tccctgccatcctctctcctggtgccctggttgtcggggtcgtgtgcgcagcaatactgcgccgacatgtgggcccagcg

SEQ ID NO: 117735 - DNA, 80 bp, synthetic construct
  source 1..80: mol_type = other DNA
gtgttcaaagagaaggtggataccagaacaccgcaaccaaaaccaggcacacgaatggttatgaccacgacagccaattg

SEQ ID NO: 117736 - DNA, 80 bp, synthetic construct
  source 1..80: mol_type = other DNA
gacgcccaacgtgctggatatcagtaacaccaacggtagctatcaggtatcctggtgcagccactgcgtcgatccgcaga

SEQ ID NO: 117737 - DNA, 80 bp, synthetic construct
  source 1..80: mol_type = other DNA
ctccggatgggccgtcgggcgcgtctctctggacctgcgaatggctatgccggctgacttttgcgcgattattcacgccc

SEQ ID NO: 117738 - DNA, 80 bp, synthetic construct
  source 1..80: mol_type = other DNA
tggatgaattctagtggcttcaccaagacgtgcggggctccggcctgcaacatcggcgggagcgggaacaataccctgct

SEQ ID NO: 117739 - DNA, 80 bp, synthetic construct
  source 1..80: mol_type = other DNA
gcgtatgggtcggcagcgcgacgaacgccagcctgtttgttttgggggtggcgctctctgccaacgggacgtttgtgtat

SEQ ID NO: 117740 - DNA, 80 bp, synthetic construct
  source 1..80: mol_type = other DNA
tgcacggtccacggacgtgcagcaacatctggcacggtacgttccccatcaatgcttcaactaccggccctagtgtcccg

SEQ ID NO: 117741 - DNA, 80 bp, synthetic construct
  source 1..80: mol_type = other DNA
ggccacacctcgcgtgcgtggaggccctggcgcgggggttcatgcatatctggcttcaggccgccacgctgggttttgcg

SEQ ID NO: 117742 - DNA, 80 bp, synthetic construct
  source 1..80: mol_type = other DNA
ctggtagagttcaaggacgcacatgccaaaaggcaaactgtcgtggttctagggagtcaagaaggagcagttcacacggc

SEQ ID NO: 117743 - DNA, 80 bp, synthetic construct
  source 1..80: mol_type = other DNA
aattgagccagccagaattgcatgtgtcctcattgttgtgttcctattgctggtggtgctcatacctgagccagaaaagc

SEQ ID NO: 117744 - DNA, 80 bp, synthetic construct
  source 1..80: mol_type = other DNA
ggacacccgcatcacaaaagaagacttaaaaaatgaagcaaaaataacaaagagaatggatgaaaggcacagaaagcttg

SEQ ID NO: 117745 - DNA, 80 bp, synthetic construct
  source 1..80: mol_type = other DNA
ctcccagccataattgagagacttcacggtcttgacgccttctccatgcacggatactctccccacgaactcacacgggt

SEQ ID NO: 117746 - DNA, 80 bp, synthetic construct
  source 1..80: mol_type = other DNA
cgctctcagagacgtgggaggacaggtaggggcaggcttggcatctacagatacgtgtccagtggcgagcggccatccgg

SEQ ID NO: 117747 - DNA, 80 bp, synthetic construct
  source 1..80: mol_type = other DNA
gtgggtggatggggttcaaatccatcgattcgccccccccccaaagcctttcttcagggatgaggtatctttttccgtgg

SEQ ID NO: 117748 - DNA, 80 bp, synthetic construct
  source 1..80: mol_type = other DNA
aactcaggcaaacagaaacgacatcttgtcgtcaaagggatacacaaacttccccccctctccccagactcccgccagca

SEQ ID NO: 117749 - DNA, 80 bp, synthetic construct
  source 1..80: mol_type = other DNA
tgccaccctggggtttggggcgtacctatccaaggcacatggcatcaatcccaacattaggactggagtcaggaccgtga

SEQ ID NO: 117750 - DNA, 80 bp, synthetic construct
  source 1..80: mol_type = other DNA
ccatatttaagctcacataccaaaacaaagtggtcaaagtccaacgaccgactccaacgggcacggtaatggacatcata

SEQ ID NO: 117751 - DNA, 80 bp, synthetic construct
  source 1..80: mol_type = other DNA
ggaggggggcgggtttgacgaggccaagttggccgaggcccgagaaatgatccgatatatggctttggtgtctgccatgg

SEQ ID NO: 117752 - DNA, 80 bp, synthetic construct
  source 1..80: mol_type = other DNA
cgtgtcctcgtgctgggttggggtcactcccaccttgtcggtacaagaccccggtacacctagagcgggcttccgccgtc

SEQ ID NO: 117753 - DNA, 80 bp, synthetic construct
  source 1..80: mol_type = other DNA
cgggggcgacggggacggggacgacacgtcctcaatggttgggggtcgtcgcgccccaccgcgtcctcgctcgggggtgg

SEQ ID NO: 117754 - DNA, 80 bp, synthetic construct
  source 1..80: mol_type = other DNA
tcacccccagccctgtggtggtcgggacaactgaccagcgcggggtgccaacctacaactggggcgagaatgagaccgat

SEQ ID NO: 117755 - DNA, 80 bp, synthetic construct
  source 1..80: mol_type = other DNA
tggttattggagcagcttttctccaaatggcggccaatgacttgaagcttgaggtccttccgatactcaacgccatgtcc

SEQ ID NO: 117756 - DNA, 80 bp, synthetic construct
  source 1..80: mol_type = other DNA
gcttcgacgtcacatcgatctgctcgtcgggagcgccgccttctgctcggccctctacgtggaggacctgtgcggggccg

SEQ ID NO: 117757 - DNA, 80 bp, synthetic construct
  source 1..80: mol_type = other DNA
tcttatcatctgttgcataggtagagactgccaagcctcattgagcgagtccagttggacgggatcagagaatttttcga

SEQ ID NO: 117758 - DNA, 80 bp, synthetic construct
  source 1..80: mol_type = other DNA
gggagggctggaggagcggggggtgcgcggtgacgtgtggatgaggaacaggagttgttgtgcggcaggagtgtgtggtg

SEQ ID NO: 117759 - DNA, 80 bp, synthetic construct
  source 1..80: mol_type = other DNA
ctttggctcatccccacctgatctttgacataacaaaatatcttcttgctatggttggccccctttacctgctccagagc

SEQ ID NO: 117760 - DNA, 80 bp, synthetic construct
  source 1..80: mol_type = other DNA
cagtggatgaaccgtctaattgcgttcgcatcgcgaggcaatcacgtgtctcccacgcactacgtccctgagtctgacgc

SEQ ID NO: 117761 - DNA, 80 bp, synthetic construct
  source 1..80: mol_type = other DNA
ggtgtgcttgcgggcctgctgtactacagcatggtgggaaactgggtgaaggtcctcgctgtcatcctcctatttgcggg

SEQ ID NO: 117762 - DNA, 80 bp, synthetic construct
  source 1..80: mol_type = other DNA
gcagggcaattcctctggcacacatcaaaggcggcagacatctcatcttctgtcattcaagaaagaagtgtgatgaactg

SEQ ID NO: 117763 - DNA, 80 bp, synthetic construct
  source 1..80: mol_type = other DNA
gaagcctgataggcacgcgaacacgggcaacgtgggctgaaaacatctacgcagccattaaccaggtgagagccattatt

SEQ ID NO: 117764 - DNA, 80 bp, synthetic construct
  source 1..80: mol_type = other DNA
tgcacacccctgggtgtgtaccctgtgttaagactgacaataggtcgcaatgttggataccagtggcccccactctcgct

SEQ ID NO: 117765 - DNA, 80 bp, synthetic construct
  source 1..80: mol_type = other DNA
ggaccaaagaggcagcgggcaagttgtgacctacgccctcaacacgttcacaaatttggctgtacagctcgtgaggatga

SEQ ID NO: 117766 - DNA, 80 bp, synthetic construct
  source 1..80: mol_type = other DNA
ggggacttccactacgtgacgggtatgactactgacaatctcaaatgcccgtgccaggtcccatcgcccgaatttttcac

SEQ ID NO: 117767 - DNA, 80 bp, synthetic construct
  source 1..80: mol_type = other DNA
cggcttgatccacctccatcaaaacattgttgacgtacaatacctctatggtgttgggtccgcagtggtgtcgtgggcac

SEQ ID NO: 117768 - DNA, 80 bp, synthetic construct
  source 1..80: mol_type = other DNA
gtgccgcttcttcttccgcgccgtcgcgctccggggggggcgacgggatcgtgcgaacggcctcgtccaccatcgaggcc

SEQ ID NO: 117769 - DNA, 80 bp, synthetic construct
  source 1..80: mol_type = other DNA
cgggacaactgaagctcagctggtttaagaaaggaagctcaatcggccaaatgttcgagacaacaatgagaggagcgaag

SEQ ID NO: 117770 - DNA, 80 bp, synthetic construct
  source 1..80: mol_type = other DNA
ccagtttgaccggcagggataagaatgtggtgaccggtgaagtccaggtgctttctacggctacccaaaccttcctaggt

SEQ ID NO: 117771 - DNA, 80 bp, synthetic construct
  source 1..80: mol_type = other DNA
cgttctcgctccacagttactctccaacagaactcaatagggtcgcaggagcactcaggaaacttgggtgtcctccccta

SEQ ID NO: 117772 - DNA, 80 bp, synthetic construct
  source 1..80: mol_type = other DNA
aaccttaacatatgcaactgtgggaccttcgcctttggacactgctaccgccgctgcggcctctgcagccgcttccaccg

SEQ ID NO: 117773 - DNA, 80 bp, synthetic construct
  source 1..80: mol_type = other DNA
gtttatgtctaccaacaagtttcgggcgcgggtgatggtagaaaaagtgaaccggaaaaccaacgctcctcgttacgagt

SEQ ID NO: 117774 - DNA, 80 bp, synthetic construct
  source 1..80: mol_type = other DNA
agggaaaccttgtgctattgggcccggctgacgatatgcggacaggcggttggaggctgctgtcgcctataacagcttat

SEQ ID NO: 117775 - DNA, 80 bp, synthetic construct
  source 1..80: mol_type = other DNA
cttagaccaggcggagacggctggagctcgacttgtcgtgctcgccaccgccacaccaccaggatcagtcaccgtgcccc

SEQ ID NO: 117776 - DNA, 80 bp, synthetic construct
  source 1..80: mol_type = other DNA
ccgtgtcgtgcgctttgcgccctgtgcgggcaacaaagtattgacccggataaatatttttcagccctggtggaagttac

SEQ ID NO: 117777 - DNA, 80 bp, synthetic construct
  source 1..80: mol_type = other DNA
cgagtccatggaaaccactatgcggtccccggtctttacggacaactcgtcccctccggccgtaccgcagacattccaag

SEQ ID NO: 117778 - DNA, 80 bp, synthetic construct
  source 1..80: mol_type = other DNA
tgcccctggaacactcgcaattcagtcggtatcgctggcgcggacccacagcggcgttcctgtctctcgtggaccagaag

SEQ ID NO: 117779 - DNA, 80 bp, synthetic construct
  source 1..80: mol_type = other DNA
ctacttttcgtaggggtaggcctcttcctactccccgctcggtagagcggcacacactaggtacactccatagctaactg

SEQ ID NO: 117780 - DNA, 80 bp, synthetic construct
  source 1..80: mol_type = other DNA
taagtgaagtgcagcttttggccgtaccccccggagagagggctagaaacattcagactctgcctggaatattcaagaca

SEQ ID NO: 117781 - DNA, 80 bp, synthetic construct
  source 1..80: mol_type = other DNA
agccatcctcacagtggtggccgcaaccatggcaaatgagatgggtttcctggaaaaaaccaagaaagacctcggattgg

SEQ ID NO: 117782 - DNA, 80 bp, synthetic construct
  source 1..80: mol_type = other DNA
ccgtggtcgttggcaccaccgacaaaaagggcaaccccacatatacctggggcgagaatgagaccgacgtttttatcctc

SEQ ID NO: 117783 - DNA, 80 bp, synthetic construct
  source 1..80: mol_type = other DNA
ctattacctcacacgtgaccccgtcacaccattgacacgagcagcttgggaaacagcccggcacactccagtgaactcat

SEQ ID NO: 117784 - DNA, 80 bp, synthetic construct
  source 1..80: mol_type = other DNA
acctccggtggcgccccccgaacggcctcggggaggtccgaccagcccgccggcagggaggcccgcagggtcgccaggac

SEQ ID NO: 117785 - DNA, 80 bp, synthetic construct
  source 1..80: mol_type = other DNA
ttgtcatctcacctcgcttgcaccatacggtacaggactgcaactgctcaatctatcccggccgcgtaacaggtcatcgc

SEQ ID NO: 117786 - DNA, 80 bp, synthetic construct
  source 1..80: mol_type = other DNA
gcgcaaatgtggcagctcctttatttccacagaagggacctccgactgatggccaatgccatttgttcatctgtgccagt

SEQ ID NO: 117787 - DNA, 80 bp, synthetic construct
  source 1..80: mol_type = other DNA
tgtccggagcttgtcccgcaaggccgttaaccacatcaactccgtgtgggaggacttgctggaagactctgttaccccta

SEQ ID NO: 117788 - DNA, 80 bp, synthetic construct
  source 1..80: mol_type = other DNA
ggctgaccagggcctccgcctcgtgggccacctccagggccgcgtcggtcgaccactcgccgtgcccgcgctccagggcg

SEQ ID NO: 117789 - DNA, 80 bp, synthetic construct
  source 1..80: mol_type = other DNA
cacggcgtcgcctggttcgtcatcttcttcatagctgcttggtacatcaaaggcagggcggttcccatggccacctattc

SEQ ID NO: 117790 - DNA, 80 bp, synthetic construct
  source 1..80: mol_type = other DNA
ctgtacggcaatggcatccttgtcggtgacaactccttcgtgtccgccatatcccagactgaggtgaaggaagaaggaaa

SEQ ID NO: 117791 - DNA, 80 bp, synthetic construct
  source 1..80: mol_type = other DNA
gaaagttggcggcctgggcgtcgctgagggccagctgaagccggttgatgacggtgaggacgtacatggccgtgacggtc

SEQ ID NO: 117792 - DNA, 80 bp, synthetic construct
  source 1..80: mol_type = other DNA
ggcggcactgacggaccttggtctggcccacgcaaacaacacgtttaccccgcagcctatgttcgcgggcgacgcaccgg

SEQ ID NO: 117793 - DNA, 80 bp, synthetic construct
  source 1..80: mol_type = other DNA
actgggactcaggcccgacggagtgtttcagctggcaggctccggccgctcgtccttcactactcgtcaagcctacctaa

SEQ ID NO: 117794 - DNA, 80 bp, synthetic construct
  source 1..80: mol_type = other DNA
agtacttcatagccagggcggaggccgcactgcaggtgtgggcccctagtcttcgggtccgaggtggtcgtgatgcagtc

SEQ ID NO: 117795 - DNA, 80 bp, synthetic construct
  source 1..80: mol_type = other DNA
ctcctacgtagttggatcccaactcccttgtgaaccggagccggacgtcatggttgtgacatcaatgctgacagatccat

SEQ ID NO: 117796 - DNA, 80 bp, synthetic construct
  source 1..80: mol_type = other DNA
cagggaatcatgggttcttctggggcctgctcgttgtgtgcttggcttggcatgtcaagggcaggttggtccctgtggcc

SEQ ID NO: 117797 - DNA, 80 bp, synthetic construct
  source 1..80: mol_type = other DNA
cactggattggccgcctcatgtggtggaaccagtacgccatatgcagatgcgaggcctccatccaagtgtgggtcccccc

SEQ ID NO: 117798 - DNA, 80 bp, synthetic construct
  source 1..80: mol_type = other DNA
ccgcgggtcgctcaatgaacccgcattggtcccctggggttccgggtatggtaatgagtttcttcgggaaggcgtgaagc

SEQ ID NO: 117799 - DNA, 80 bp, synthetic construct
  source 1..80: mol_type = other DNA
acggagtcgtgaggctcctttcaaaaccatgggatatgatcacaaacgtgaccactatggccatgactgacaccacgccc

SEQ ID NO: 117800 - DNA, 80 bp, synthetic construct
  source 1..80: mol_type = other DNA
ggcggctatgggtagggatgtaacattttgtcggcggtgttctaattccaatgcaattaagcttatgagccgatcttggt

SEQ ID NO: 117801 - DNA, 80 bp, synthetic construct
  source 1..80: mol_type = other DNA
tagcacaggcggaggctgccctggagaacctgatcgtgctcaacgctgcatctgcagccgctgggcagggatggatctgt

SEQ ID NO: 117802 - DNA, 80 bp, synthetic construct
  source 1..80: mol_type = other DNA
ctgcctgggagacggcccgccacactccagttaattcttggttggggaacatcatcatgtatgcccccacgatttgggtc

SEQ ID NO: 117803 - DNA, 80 bp, synthetic construct
  source 1..80: mol_type = other DNA
cccacggccggacgtacggcacgctggagctgttccaaaaaatgatccttatgcacgccacctactttctggccgccgtg

SEQ ID NO: 117804 - DNA, 80 bp, synthetic construct
  source 1..80: mol_type = other DNA
gggtctgtgcctctccatcagcgccctcaacagtctctgccgccggggctcggtgcggctgctgcagatgggatcgggat

SEQ ID NO: 117805 - DNA, 80 bp, synthetic construct
  source 1..80: mol_type = other DNA
actgtcgtcctttgtgaggcctatgatacaggatgcgcgtggtatgagctaacaccctcagagaccaccgtcaggttacg

SEQ ID NO: 117806 - DNA, 80 bp, synthetic construct
  source 1..80: mol_type = other DNA
ctacgctaccacttgctctcgcgcagcttgctgagaagtcatttccaacacctccatcgtcgtccacagacccagactcg

SEQ ID NO: 117807 - DNA, 80 bp, synthetic construct
  source 1..80: mol_type = other DNA
gtcacccgaccaccagcaagagctcagaccaagcagatgagggggaagacaccccttctgaagcagggtcttacagctct

SEQ ID NO: 117808 - DNA, 80 bp, synthetic construct
  source 1..80: mol_type = other DNA
ggattggttcgtagctgcgtatagtgggggggacatttatcacagcgtgtcccaggctcgaccccacattttactcctgt

SEQ ID NO: 117809 - DNA, 80 bp, synthetic construct
  source 1..80: mol_type = other DNA
aggccaaactcctcaccgtcgaggaggcatgtagcctgaccccaagccactctgcccggtccaagtacgggtacggggca

SEQ ID NO: 117810 - DNA, 80 bp, synthetic construct
  source 1..80: mol_type = other DNA
catggaggttgtgttaccgtaatggcacaggacaaaccgactgtcgacatagagctggttacaacaacagtcagcaacat

SEQ ID NO: 117811 - DNA, 80 bp, synthetic construct
  source 1..80: mol_type = other DNA
attcaagcagaaagccctcggcatcctcagcatcgccggcaaacaagcccaagaggcagcaccggtcgtgaaaacaaact

SEQ ID NO: 117812 - DNA, 80 bp, synthetic construct
  source 1..80: mol_type = other DNA
gaaaactgttaatatacgtaaatgtgcctatgtaattggaaatggagccgtggttagattccaaacctttgaccgggtgg

SEQ ID NO: 117813 - DNA, 80 bp, synthetic construct
  source 1..80: mol_type = other DNA
ttctagcctttttgagattcacggcaatcaagccatcactgggtctcatcaatagatggggttcagtggggaaaaaagag

SEQ ID NO: 117814 - DNA, 80 bp, synthetic construct
  source 1..80: mol_type = other DNA
aacgcaaggattgctgggggctctgctgttgtggatgggcatcaatgctcgtgacaggtccatagctctcacgtttctcg

SEQ ID NO: 117815 - DNA, 80 bp, synthetic construct
  source 1..80: mol_type = other DNA
cgcagggccggggggaaattgggcgcgttcgccacgtggtcggccccggcgaacagcgcgtggacgtggacggtgtaaaa

SEQ ID NO: 117816 - DNA, 80 bp, synthetic construct
  source 1..80: mol_type = other DNA
gagtagggacggtgttatcctgctaacaagtctgctttatccatctttaatttttgacatcaccaagctactgatagcag

SEQ ID NO: 117817 - DNA, 80 bp, synthetic construct
  source 1..80: mol_type = other DNA
caaccgtcaccgagcgggatatccggactgagaacgacatctatcagtcttgccagctggatcccgtggcaaggagggtg

SEQ ID NO: 117818 - DNA, 80 bp, synthetic construct
  source 1..80: mol_type = other DNA
gaaggtctctgactgtccagacacatggagaaagtacactggccaacaagaaaggagcttggttggacagcacaaaagcc

SEQ ID NO: 117819 - DNA, 80 bp, synthetic construct
  source 1..80: mol_type = other DNA
actgcagcatgcgggcggtcctccggcggctccaggtcggcgggtggaccctcaagttcttcctcacggccgacgtcccc

SEQ ID NO: 117820 - DNA, 80 bp, synthetic construct
  source 1..80: mol_type = other DNA
attcctccgggtgtgttgagcggatgagcgcttgcagaaagctcgcaagcttttctcaagggtcgggcccgatcacgtat

SEQ ID NO: 117821 - DNA, 80 bp, synthetic construct
  source 1..80: mol_type = other DNA
ccggttactttccagcgctaaaactacggcccttccttgtcacctttataggacgtgtgcgccgaccacacgaggtggga

SEQ ID NO: 117822 - DNA, 80 bp, synthetic construct
  source 1..80: mol_type = other DNA
gtgtgtgtggaatacgatcagcaactcgtctcgagaacatcatgtggaagcaaatatcaaatgaactgaaccacatctta

SEQ ID NO: 117823 - DNA, 80 bp, synthetic construct
  source 1..80: mol_type = other DNA
aggaggcagtggagaacgctgctaaagctaatggtcctgcaagaggagacagtagtgtcccaagagatgtggaaaaggca

SEQ ID NO: 117824 - DNA, 80 bp, synthetic construct
  source 1..80: mol_type = other DNA
cagctgaaatggctgaggccttgcggggtttgccaatcagataccagacctctgctgtcacgagggagcacagtggcaac

SEQ ID NO: 117825 - DNA, 80 bp, synthetic construct
  source 1..80: mol_type = other DNA
ttcacagaactggacggggtgcgcctacataggtttgcgcccccttgcaagcccttgctacgagaagaggtgtcgttcag

SEQ ID NO: 117826 - DNA, 80 bp, synthetic construct
  source 1..80: mol_type = other DNA
ggtgttggccggaatactatactacagcatggtagccaactgggccaaggtcatcggcatccttctcttgtttgcaggtg

SEQ ID NO: 117827 - DNA, 80 bp, synthetic construct
  source 1..80: mol_type = other DNA
gacaagctcgtgggttctcgcggggggagtcctggctgctgtagctgcctactgtcttgcaactggctgcgtatccatca

SEQ ID NO: 117828 - DNA, 80 bp, synthetic construct
  source 1..80: mol_type = other DNA
cccatggatggaggacaaaactcatgtatccagttgggaagaagttccatacctaggaaaaagggaagaccaatggtgtg

SEQ ID NO: 117829 - DNA, 80 bp, synthetic construct
  source 1..80: mol_type = other DNA
gattccccagaccctccttgacatcttcatgggggcccactggggtatcctggcagctctactgtactacagcatggttg

SEQ ID NO: 117830 - DNA, 80 bp, synthetic construct
  source 1..80: mol_type = other DNA
cagagacactgattaaaaacaagttgcatgtggaaaatcaaaataaaaagtctggactctcacgctcgcttggtcctgta

SEQ ID NO: 117831 - DNA, 80 bp, synthetic construct
  source 1..80: mol_type = other DNA
atagtatgtgctcgctaatgacgtcatcgcgttcgtggcgctcccggagcgggtttagattcatgtgcaggaactcggat

SEQ ID NO: 117832 - DNA, 80 bp, synthetic construct
  source 1..80: mol_type = other DNA
tcatttgtgcaacagacgccctcatgaccggctacactggagactttgactccgtcattgactgcaatgtagccgtgaca

SEQ ID NO: 117833 - DNA, 80 bp, synthetic construct
  source 1..80: mol_type = other DNA
ccaaccccgggtttcgtggcctgcgtttccgggagcgctgtctgcccccacagacgcccgccgcccccagcgacctacca

SEQ ID NO: 117834 - DNA, 80 bp, synthetic construct
  source 1..80: mol_type = other DNA
ttactagatacccccccttaatgggtgcgggggggtcaggtctgcgaggttgagatgggaccttaactccatataaagcg

SEQ ID NO: 117835 - DNA, 80 bp, synthetic construct
  source 1..80: mol_type = other DNA
gatcccgaccaccccgaggcggaaaactcagaggacggaaagcccgtcgtcagcgacgaggagctcgagcggtggctgga

SEQ ID NO: 117836 - DNA, 80 bp, synthetic construct
  source 1..80: mol_type = other DNA
cgctcgtggagatgcagcgcctgtgtctggacgttcctccggtcccgccgaacgcatacatgccctattatctcagggag

SEQ ID NO: 117837 - DNA, 80 bp, synthetic construct
  source 1..80: mol_type = other DNA
gccgtgccgcgctcaaacgccccgaggacggcctggacgttgcgagcgagctgttggatggcgcgcaactggcgatgcgc

SEQ ID NO: 117838 - DNA, 80 bp, synthetic construct
  source 1..80: mol_type = other DNA
gcccatgcctgcgttgtcaacaggtctgatacacctccaccaaaacatcgtggatgtccaatacctttatggcgttggat

SEQ ID NO: 117839 - DNA, 80 bp, synthetic construct
  source 1..80: mol_type = other DNA
tcttacactagccattgaacgcccgctagctctatccagtaacagagcagtggcccttaagtattcaccacctttaaaaa

SEQ ID NO: 117840 - DNA, 80 bp, synthetic construct
  source 1..80: mol_type = other DNA
atgaccacctcacacctatgtcggactgggccgctagcggcctgcgcgacttagcggtcgccgtggaacccatcatcttc

SEQ ID NO: 117841 - DNA, 80 bp, synthetic construct
  source 1..80: mol_type = other DNA
cttcggctcttttatgtcgcgtgcctatgggattgaccccaacatccgcactgggaatcgcactgtcacaactggtgcta

SEQ ID NO: 117842 - DNA, 80 bp, synthetic construct
  source 1..80: mol_type = other DNA
tttaattgcaacattcaaaatccagccattcttggctttgggattcttcctgaggaaattgacatctagagaaaatttgc

SEQ ID NO: 117843 - DNA, 80 bp, synthetic construct
  source 1..80: mol_type = other DNA
ttctcttcatctttttatgcctaccaattatttttgcctcttcaacttttgcatccgtcagtcacatcaatcctgactgt

SEQ ID NO: 117844 - DNA, 80 bp, synthetic construct
  source 1..80: mol_type = other DNA
gcagggagtgcagtggtggttcgggtggcgtgaggagcgcggtgagggtcagcgacgtagcaaagacgggcgaccaacct

SEQ ID NO: 117845 - DNA, 80 bp, synthetic construct
  source 1..80: mol_type = other DNA
tccactctcaggttcacgtccctctttacacctggggcgtctcagaacatccagcttataaacaccaatggcaggtggca

SEQ ID NO: 117846 - DNA, 80 bp, synthetic construct
  source 1..80: mol_type = other DNA
agtaagaccctttgcgggccaaagggacctgtctgtcaaatgtacaccaacgtggaccaggacctcgtggggtggccatc

SEQ ID NO: 117847 - DNA, 80 bp, synthetic construct
  source 1..80: mol_type = other DNA
actccacggttactctccaggtgaactcaaccgggtggcatcaagcctcaggaagcttggggcgcccccattgagagctt

SEQ ID NO: 117848 - DNA, 80 bp, synthetic construct
  source 1..80: mol_type = other DNA
tgccgcctctcgagggcgagcctggggaccctgacctttccgaaggggaagatgcgtggtcttggtctacaatcagcagt

SEQ ID NO: 117849 - DNA, 80 bp, synthetic construct
  source 1..80: mol_type = other DNA
gatttttagggctgctgtatgcaccagaggtgtagcaaaagccttacagttcataccagtggaaactctcagtacacagg

SEQ ID NO: 117850 - DNA, 80 bp, synthetic construct
  source 1..80: mol_type = other DNA
tatcaacaggactgcattgaactgcaatgagagcctcaacaccggcttcttcacagcgctgttctataaacatcacttca

SEQ ID NO: 117851 - DNA, 80 bp, synthetic construct
  source 1..80: mol_type = other DNA
aataggctgatagcttttgcttcacgagggaaccatgtttcacctacccattacgtgccggagacggacgcgtcccgcca

SEQ ID NO: 117852 - DNA, 80 bp, synthetic construct
  source 1..80: mol_type = other DNA
ccacacggcttcgagcatacttcaacacccctggcctcccagtgtgtcaagaccacctagagttctgggagggcgtgttc

SEQ ID NO: 117853 - DNA, 80 bp, synthetic construct
  source 1..80: mol_type = other DNA
acctaattcaggcctcgcttctgcgcgtcccttactatgtgagggctcacgcgctaatcagagcctgcacacttgtgcgc

SEQ ID NO: 117854 - DNA, 80 bp, synthetic construct
  source 1..80: mol_type = other DNA
acagtcctaggtataggtactgttctagaccaagcagagacagccggcgcgcgcttgacagttctggcgactgccacgcc

SEQ ID NO: 117855 - DNA, 80 bp, synthetic construct
  source 1..80: mol_type = other DNA
gtgtttctccttaacaacacgcgccccccgacaggcaattggttcggttgcacctggatgaacggcacaggtttcaccaa

SEQ ID NO: 117856 - DNA, 80 bp, synthetic construct
  source 1..80: mol_type = other DNA
tccacctccgcggtctcctcctgtgcctccgccccggaagaagcggacggtggtccttaccgactcatccatatccactg

SEQ ID NO: 117857 - DNA, 80 bp, synthetic construct
  source 1..80: mol_type = other DNA
ctgcccgctaccacctgcgggcctcccgcctgtcccgcctccgcggaggaagaggaagccagtggaattatctgactcta

SEQ ID NO: 117858 - DNA, 80 bp, synthetic construct
  source 1..80: mol_type = other DNA
ctctatcactccactggatctcccagacatcattcaacgactccacggcttgagcgcgtttacactccatggatattctc

SEQ ID NO: 117859 - DNA, 80 bp, synthetic construct
  source 1..80: mol_type = other DNA
ttggcccgttgtacttgctccaagaaggtctgctgcgggtgccgtactacgtgcgggcacatgcgcttttgcgcgtgtgc

SEQ ID NO: 117860 - DNA, 80 bp, synthetic construct
  source 1..80: mol_type = other DNA
cgccctgaagcgcggcccggatggcctggcccagggcccggaggcacgccagatgtatgcgcgcggtaaaggcgacctcg

SEQ ID NO: 117861 - DNA, 80 bp, synthetic construct
  source 1..80: mol_type = other DNA
ggaggagcgaagggccgcacgttgggtgaagtttggaaggaaaagctcaatcagatgtcaaaagaggagttttccagata

SEQ ID NO: 117862 - DNA, 80 bp, synthetic construct
  source 1..80: mol_type = other DNA
ggggaacccactcggccaaatcccccccgtaaagcatccgcgccagcgatacactcgacgtgtactgctcgcactcgtca

SEQ ID NO: 117863 - DNA, 80 bp, synthetic construct
  source 1..80: mol_type = other DNA
cagtctgaccgggcgggataagaacgaggtcgagggtgaggtccaagtggtttccacagccactcaaaccttcctggcca

SEQ ID NO: 117864 - DNA, 80 bp, synthetic construct
  source 1..80: mol_type = other DNA
gtactacaactccacaggcaatatgggcgtattggctgggcaggcttcacagctaaatgctgtagtggacttgcaagaca

SEQ ID NO: 117865 - DNA, 80 bp, synthetic construct
  source 1..80: mol_type = other DNA
attgtattgctgatccctgaaccggaaaaacaaagaactccacaagataaccagctcacatacgtggtcatagcaatact

SEQ ID NO: 117866 - DNA, 80 bp, synthetic construct
  source 1..80: mol_type = other DNA
gggcagggtgcggggcccgggccccgacttcccggttcggcggtaatgagatacgagccccgcgcgcccgttggccgtcc

SEQ ID NO: 117867 - DNA, 80 bp, synthetic construct
  source 1..80: mol_type = other DNA
tctggaggcaaatctcctgtggagacaggagatgggtggcaacattacaagagtggagtccgagaacaagatcgtcgtcc

SEQ ID NO: 117868 - DNA, 80 bp, synthetic construct
  source 1..80: mol_type = other DNA
ggcgcggtcgcacgggcagaggaaaacccggggtatacaggtacgtctcgcagggcgagcggccgtctggcatgttcgac

SEQ ID NO: 117869 - DNA, 80 bp, synthetic construct
  source 1..80: mol_type = other DNA
gcagtgaagactaagtccagactcactccactgcgcggcgcgtcccaactcgacttgtcgggatggttcgtagccggcgg

SEQ ID NO: 117870 - DNA, 80 bp, synthetic construct
  source 1..80: mol_type = other DNA
cgcatgttggaaaaggcagagctgggtctggagtcggtgatgggggaaggcggtggagaggcgtccacgtcactggcctc

SEQ ID NO: 117871 - DNA, 80 bp, synthetic construct
  source 1..80: mol_type = other DNA
gtccgcctcaagcccacccttcatgggccaacacctctgctgtacagactgggcgctgttcagaatgaggtcaccttgac

SEQ ID NO: 117872 - DNA, 80 bp, synthetic construct
  source 1..80: mol_type = other DNA
ccgcaccgtccgtgtcttggagatggtggaagactggctgcacagaggacctaaggaattctgcatcaaagtgctatgcc

SEQ ID NO: 117873 - DNA, 80 bp, synthetic construct
  source 1..80: mol_type = other DNA
aacgaccactatcggccgcgatgctggccggcaggtctcgggagttacaggtttcttttctcccggtccccgccagaagc

SEQ ID NO: 117874 - DNA, 80 bp, synthetic construct
  source 1..80: mol_type = other DNA
catacccatcccagcgccaaactacgagttcgcgctgtggagggtgtctgctgaggagtatgtggaggttcgcagggtgg

SEQ ID NO: 117875 - DNA, 80 bp, synthetic construct
  source 1..80: mol_type = other DNA
cagtttaggcagaagatcataggcctactgcaaagcacggccaagcaggctgaggacatcaagcctgccgtccaatcagc

SEQ ID NO: 117876 - DNA, 80 bp, synthetic construct
  source 1..80: mol_type = other DNA
agtgcgcgagatggccggaggccattacgtgcagatggtcatgatcaagatgggggcacttactggtacttatgtctaca

SEQ ID NO: 117877 - DNA, 80 bp, synthetic construct
  source 1..80: mol_type = other DNA
aattgtggtaagggtactcttaccgtgttattttgactgtttaacaacggattccaccgttacatcttccctttcaatat

SEQ ID NO: 117878 - DNA, 80 bp, synthetic construct
  source 1..80: mol_type = other DNA
aatggaggatgctgctaaggaagccgccaaagctaatgcgcccataagaggagacagtgatgtttcaagagcggctgaaa

SEQ ID NO: 117879 - DNA, 80 bp, synthetic construct
  source 1..80: mol_type = other DNA
cctacaagcctgtcctggttgatgaagggaagaaggtggctatcaaagggccgctacgaatctcagcgtcatcggccgct

SEQ ID NO: 117880 - DNA, 80 bp, synthetic construct
  source 1..80: mol_type = other DNA
attggctttagggataacttcattggcctgatgtactacaactccacaggcaatatgggcgtattggctgggcaggcttc

SEQ ID NO: 117881 - DNA, 80 bp, synthetic construct
  source 1..80: mol_type = other DNA
gtgggcgccccgctcggcggcgtcgccagagctctcgcgcatggcgtgagagtcctggaggacggggttaattttgcaac

SEQ ID NO: 117882 - DNA, 80 bp, synthetic construct
  source 1..80: mol_type = other DNA
acgtagaggcgtgcggggtgggaaagggtggaggcggatgacgtgtgtggtcggaggacggtcgcggtgcgacggaagtg

SEQ ID NO: 117883 - DNA, 80 bp, synthetic construct
  source 1..80: mol_type = other DNA
ggagtgatgaaacccgccaccctagacttgcctccaccacccgcgcccgctccaccaaaggcagctcccgcggtcgtgca

SEQ ID NO: 117884 - DNA, 80 bp, synthetic construct
  source 1..80: mol_type = other DNA
acggagaggacggaccggagccgatactcgacgccgctcgcccggcggtccgcccgtctcgtccagaagaccccggcgta

SEQ ID NO: 117885 - DNA, 80 bp, synthetic construct
  source 1..80: mol_type = other DNA
tggaggggtcctcgcggccttagcggcctactgcttgtcagtcggttgcgttgtgattgtgggtcacatcgagctgggtg

SEQ ID NO: 117886 - DNA, 80 bp, synthetic construct
  source 1..80: mol_type = other DNA
aaagtagcatcagaaggaatcaaatacacagatagaaaatggtgctttgatgggcaacgcaataatcaaattttagagga

SEQ ID NO: 117887 - DNA, 80 bp, synthetic construct
  source 1..80: mol_type = other DNA
gctgctctggagaggcatatgacatcattatctgtgatgagtgccattcaacagaccccacgacggtcctggggattggg

SEQ ID NO: 117888 - DNA, 80 bp, synthetic construct
  source 1..80: mol_type = other DNA
cccggatccaaactacaaaagagcattgtggagggtctctgcggaggactacgttgaggtcgtaaggatacatgactgcc

SEQ ID NO: 117889 - DNA, 80 bp, synthetic construct
  source 1..80: mol_type = other DNA
gcagccaatgaactaggcatgctggaaaagactaaggaagacctctttggaaaaaagaatttgattccatctagtgccgc

SEQ ID NO: 117890 - DNA, 80 bp, synthetic construct
  source 1..80: mol_type = other DNA
acacagtcgtcctgtgcgaggcgtatgatgtcggggccgcgtggtacgagctaacacccgccgaaaccacggtcaggctc

SEQ ID NO: 117891 - DNA, 80 bp, synthetic construct
  source 1..80: mol_type = other DNA
cgtctacgtccgaagcgggcgcgtgctgtcgtacctgtgcgacaacttctgcccggccatcaagaagtacgagggtggtg

SEQ ID NO: 117892 - DNA, 80 bp, synthetic construct
  source 1..80: mol_type = other DNA
ctggtcctaaaacatgcagtaatgtctggcatggcaggttccctattaacgccacgaccaccggccccagtgtgcctatc

SEQ ID NO: 117893 - DNA, 80 bp, synthetic construct
  source 1..80: mol_type = other DNA
gtgagggctctagatgtgggggtcatgtgcaaagatgatattacatacctttgcccagttctttcagcgggaaatgatcc

SEQ ID NO: 117894 - DNA, 80 bp, synthetic construct
  source 1..80: mol_type = other DNA
agtacaaatacagttttgaacaattaaagacccactggttagagccatgggaggatatggagtgtgctattaaagctttt

SEQ ID NO: 117895 - DNA, 80 bp, synthetic construct
  source 1..80: mol_type = other DNA
cgggacaacttttcacctggcgaccccgtcatcacctagtagtgcaagagtgtaactgttcaatctacacgggccacatt

SEQ ID NO: 117896 - DNA, 80 bp, synthetic construct
  source 1..80: mol_type = other DNA
tctcgggccggccggactgcggcgaacgggggtttgcctccccgtcatgcaagaccccgcttgcaaattcctccggaaac

SEQ ID NO: 117897 - DNA, 80 bp, synthetic construct
  source 1..80: mol_type = other DNA
ccctgctcattttccaccatgccggccttatcaactggcctcatccacctgcatcagaacatagtggacgtgcagtacct

SEQ ID NO: 117898 - DNA, 80 bp, synthetic construct
  source 1..80: mol_type = other DNA
ccgttctagagcaccacggcagtcaccagcccccacccagggaccccaccgagcggcaggtgatcgaggcgatcgagtgg

SEQ ID NO: 117899 - DNA, 80 bp, synthetic construct
  source 1..80: mol_type = other DNA
tctggagaatgaagctctaatcaccaaccaaatggagaaagggcacagggccttggcattggccataatcaagtacacat

SEQ ID NO: 117900 - DNA, 80 bp, synthetic construct
  source 1..80: mol_type = other DNA
cgcgaccccaggcgtgccgggggaactcggagccgccgacgccaccaggacccccagcgtcaaccccaagagcgcccata

SEQ ID NO: 117901 - DNA, 80 bp, synthetic construct
  source 1..80: mol_type = other DNA
gtttggaccccacctttaccattgagacgacgaccgtgccccaagacgcggtgtcacgctcgcagcggcgaggtaggact

SEQ ID NO: 117902 - DNA, 80 bp, synthetic construct
  source 1..80: mol_type = other DNA
cgacctacgggttaggcgtggtagggactccatcatcttacttacctgcttgttacatccacagctggggtttgaggtca

SEQ ID NO: 117903 - DNA, 80 bp, synthetic construct
  source 1..80: mol_type = other DNA
gtcttctgccctggcggagctcgccactaagaccttcggcagctctgaatcgtccgcccttgacagcggtacggcgaccg

SEQ ID NO: 117904 - DNA, 80 bp, synthetic construct
  source 1..80: mol_type = other DNA
gacgcggaaatttcaggaagcagcccgataataaatgtggctgtatcagaagatggtagtatgtcaataaaagatgagga

SEQ ID NO: 117905 - DNA, 80 bp, synthetic construct
  source 1..80: mol_type = other DNA
ggcagccccatcacgtactccacctacggcaaattccttgccgacggcgggtgctcagggggcgcttatgacataataat

SEQ ID NO: 117906 - DNA, 80 bp, synthetic construct
  source 1..80: mol_type = other DNA
ctttgttgtggggtcccagctcccttgtgagcctgagcccgatgtagcggttctgacatcaatgcttaccgacccatctc

SEQ ID NO: 117907 - DNA, 80 bp, synthetic construct
  source 1..80: mol_type = other DNA
cgtccctgcaagacgcaggggtgacagtcgtgcggccctcctcagtccgaggcctatcagcacactgaaggggtcgtcag

SEQ ID NO: 117908 - DNA, 80 bp, synthetic construct
  source 1..80: mol_type = other DNA
aatctcggcatacgcccagcagacccgaggactgttcggaaccattgttaccagcttgacaggtagggataaaaatgtgg

SEQ ID NO: 117909 - DNA, 80 bp, synthetic construct
  source 1..80: mol_type = other DNA
aatttcgccgcggcgacggcgcatggtttcggttacagcttgaccgttttcgcggggacgtaactcaaatgctccacctc

SEQ ID NO: 117910 - DNA, 80 bp, synthetic construct
  source 1..80: mol_type = other DNA
acatgccaaaaggcaaactgtcgtggttctagggagccaagaaggagcagttcacacggcccttgctggagctctggagg

SEQ ID NO: 117911 - DNA, 80 bp, synthetic construct
  source 1..80: mol_type = other DNA
atgccacccctagagggtgagcctggcgatcctgatctcgactcagcgtcttggtccacggtcagcgaggaccacgacag

SEQ ID NO: 117912 - DNA, 80 bp, synthetic construct
  source 1..80: mol_type = other DNA
gctactagcgttccaatttctattccttcgcggaactgggccgcttttcggggctggagttttactcgactgaaaaccaa

SEQ ID NO: 117913 - DNA, 80 bp, synthetic construct
  source 1..80: mol_type = other DNA
acgccagcaccaccggaccctgcgtcccggtgcctgcgcccaactacaagagggctttatggcgtgttgcagccgacgac

SEQ ID NO: 117914 - DNA, 80 bp, synthetic construct
  source 1..80: mol_type = other DNA
ctggcagacggagggtgttcagggggtgcctatgacatcatcatctgtgacgagtgccactccacggaccccacaacagt

SEQ ID NO: 117915 - DNA, 80 bp, synthetic construct
  source 1..80: mol_type = other DNA
cttcgccgtcaggttgacggcctggtcttccttcggcgcacaatttcacacgacgccaaggggttccagggccgtctcga

SEQ ID NO: 117916 - DNA, 80 bp, synthetic construct
  source 1..80: mol_type = other DNA
ccctcagaaagcttggggtgccgcccctcagaacctggagacagcgggctcgcaaggtccgcgcggggttgatagctcaa

SEQ ID NO: 117917 - DNA, 80 bp, synthetic construct
  source 1..80: mol_type = other DNA
ctgggggtgggtggaggctggagccctgatcacagccgcaacttccactttgtgggaaggctctccgaacaagtactgga

SEQ ID NO: 117918 - DNA, 80 bp, synthetic construct
  source 1..80: mol_type = other DNA
tcatatgataattacgattacaggcatctttgaacattaaaaaggggcttcctgttacagcagcactgcgtatgattgtg

SEQ ID NO: 117919 - DNA, 80 bp, synthetic construct
  source 1..80: mol_type = other DNA
gagagtggatgacaacagaggacatgctggaggtctggaaccgtgtttggatagaggagaatgaatggatggaagacaaa

SEQ ID NO: 117920 - DNA, 80 bp, synthetic construct
  source 1..80: mol_type = other DNA
atggaagtcctgcagcgccgtttcggtggcgggctggtgcgcctccctctgtctcgaaactccaaccatgagatgtactg

SEQ ID NO: 117921 - DNA, 80 bp, synthetic construct
  source 1..80: mol_type = other DNA
tgcaatgtagcggtcacccaagctgtcgacttcagcctggaccccaccttcactataaccacacagactgtcccacaaga

SEQ ID NO: 117922 - DNA, 80 bp, synthetic construct
  source 1..80: mol_type = other DNA
ctacggtggaggtgttgcgaaggttaacggtgccggcgtgggtgaggcccacgtccaggtggcaggcgacgattcgcgtg

SEQ ID NO: 117923 - DNA, 80 bp, synthetic construct
  source 1..80: mol_type = other DNA
cgcccactgaccggcaccttcagtcgttggcgccggcgggaagaggacgcttacgactcggccgatgatagtagcgtgtt

SEQ ID NO: 117924 - DNA, 80 bp, synthetic construct
  source 1..80: mol_type = other DNA
taacgtatcaaccgtgcttgctcagctagctgagaaaacatttccgcagcccgcgtctcttacgacagggtgcggatctg

SEQ ID NO: 117925 - DNA, 80 bp, synthetic construct
  source 1..80: mol_type = other DNA
agcacatttcaccgatccatccagcatagcggccagagggtacatctcaacccgagtgggcatgggtgaagcagctgcga

SEQ ID NO: 117926 - DNA, 80 bp, synthetic construct
  source 1..80: mol_type = other DNA
atatcatgacttgcatggccgctgacttagaggtcatcaccagcacgtgggtgcttgcagggggagtcctcgcagcgatc

SEQ ID NO: 117927 - DNA, 80 bp, synthetic construct
  source 1..80: mol_type = other DNA
actaagtggttgggaacagacaattccaacgaactacaacagcggcgtaaactcatgatggccgccgtacttgtaactgt

SEQ ID NO: 117928 - DNA, 80 bp, synthetic construct
  source 1..80: mol_type = other DNA
ctcctagcggctcggaggctgatgaagctgaagaacgagcggaggaggaagagacggctgtgtcgaattatgtgaatatt

SEQ ID NO: 117929 - DNA, 80 bp, synthetic construct
  source 1..80: mol_type = other DNA
ggctggctggcgctgccatagggggtataggcttgggcaaggtcttgcttgacatcctggcagggtacggagctggtgtc

SEQ ID NO: 117930 - DNA, 80 bp, synthetic construct
  source 1..80: mol_type = other DNA
ccgagttggctgactagggcctcggcctcgtgcgccacctccagggccgcgtccgtcgaccactcgccgttgccgcgctc

SEQ ID NO: 117931 - DNA, 80 bp, synthetic construct
  source 1..80: mol_type = other DNA
cagctaacgtcacttggcttaaatgccgtggccttttataggggcgtggacgtgtcagtcattccgaccgcaggtgatgt

SEQ ID NO: 117932 - DNA, 80 bp, synthetic construct
  source 1..80: mol_type = other DNA
ccgccccccccggggaccccccacaaccagaatacgacttggagcttataacatcatgctcctccaacgtgtcagtcgcc

SEQ ID NO: 117933 - DNA, 80 bp, synthetic construct
  source 1..80: mol_type = other DNA
cttcgctgcaggagcgtggtatgtgtatgtaaagactggaaaaaggagtggtgccctctgggacgtgcctgctcccaaag

SEQ ID NO: 117934 - DNA, 80 bp, synthetic construct
  source 1..80: mol_type = other DNA
ggaaggtgacagctgtgtgaccataatgtcgaaagacaagcccaccattgatgtgaagatgacaaacatggaagctacca

SEQ ID NO: 117935 - DNA, 80 bp, synthetic construct
  source 1..80: mol_type = other DNA
ccacacaacgcccccggtggcgcgattacgccagagcggaccaatgtgatcctggggtccaccgagacgacggggttgtc

SEQ ID NO: 117936 - DNA, 80 bp, synthetic construct
  source 1..80: mol_type = other DNA
ttccacctcgggtgtcgtggtgtcgtacggtgagactttttcagaacgcggccccttcttttgagttcccatgtctccca

SEQ ID NO: 117937 - DNA, 80 bp, synthetic construct
  source 1..80: mol_type = other DNA
gcaacgttacggtgtcccactgattgcttcagaaaacatcctgacgctacctactcccgatgtgggtcgggcccatggct

SEQ ID NO: 117938 - DNA, 80 bp, synthetic construct
  source 1..80: mol_type = other DNA
aggtgctcttgggcccggctgactccctggttagcaaggggtggagactcttagcgcccattacggcctacgctcagcag

SEQ ID NO: 117939 - DNA, 80 bp, synthetic construct
  source 1..80: mol_type = other DNA
atcatgtcactaatgattgccccaactcttccatagtctacgaggccgacaacctgatcttacacgcacctggttgtgtg

SEQ ID NO: 117940 - DNA, 80 bp, synthetic construct
  source 1..80: mol_type = other DNA
agctgaggacggaccaccacatgctgtcttgcctgcgtaccgactatgaatccagcgatgaggagtgaggtgaggggcgg

SEQ ID NO: 117941 - DNA, 80 bp, synthetic construct
  source 1..80: mol_type = other DNA
cgagtatatataggactaaaaaatgacgtaacggttaaagtccacaaaaaacacccagaaaaccgcacgcgaacctacgc

SEQ ID NO: 117942 - DNA, 80 bp, synthetic construct
  source 1..80: mol_type = other DNA
ccgaaagcgatgctgcagccaaggtgacggccctgctgaattctctaactgtgacatcactgatgcgcaggttgcatacc

SEQ ID NO: 117943 - DNA, 80 bp, synthetic construct
  source 1..80: mol_type = other DNA
cttggccggcgctgccatagggggtataggcctgggcagggtcttgcttgacatctggcaggatacggacctggcaggcc

SEQ ID NO: 117944 - DNA, 80 bp, synthetic construct
  source 1..80: mol_type = other DNA
gagaggtttggaaagaaagactcaaccagatgacaaaagaagagttcactaggtaccgcaaagaggccatcatcgaagtc

SEQ ID NO: 117945 - DNA, 80 bp, synthetic construct
  source 1..80: mol_type = other DNA
aacgggttgaatttctcctccaggcttggagaaacaaaaaagagcccatggggttctcatatgatacccgttgttttgat

SEQ ID NO: 117946 - DNA, 80 bp, synthetic construct
  source 1..80: mol_type = other DNA
aataccgacggaggagcaacagcaggaggaagccaggcggcggcggcggcaggagcagagcccatggaacccgagagccg

SEQ ID NO: 117947 - DNA, 80 bp, synthetic construct
  source 1..80: mol_type = other DNA
tgggtgaccgtgacgccgacatagaggctataatgtttgatcacacacaatcggatgttgcttatacagatcgagcaact

SEQ ID NO: 117948 - DNA, 80 bp, synthetic construct
  source 1..80: mol_type = other DNA
ggccggcccgggcgccgaccctccgttgtattctgtcaccgggccgctgccgacccagcggctgattatcggcgaggtga

SEQ ID NO: 117949 - DNA, 80 bp, synthetic construct
  source 1..80: mol_type = other DNA
gcctctttagactctgacacacctggtcctgtatatttttagaatggaagacatcaattttgcgtccctggctccgcggc

SEQ ID NO: 117950 - DNA, 80 bp, synthetic construct
  source 1..80: mol_type = other DNA
ccaaaacgacagacgtcgtcgctgttttatcagttttgttgaattttagaaaataaacccggttttgtgtctgtggcctt

SEQ ID NO: 117951 - DNA, 80 bp, synthetic construct
  source 1..80: mol_type = other DNA
aatttcaccgccccagcaccgttaccaccgatagcgtccgggcgcttggcatgcgcgggctcgtcttggccaccaataac

SEQ ID NO: 117952 - DNA, 80 bp, synthetic construct
  source 1..80: mol_type = other DNA
cgcctccccttagagcgtggaagagtcgagctcgtgtagtgagggcttccctcatcagccgaggagggaaggcggccata

SEQ ID NO: 117953 - DNA, 80 bp, synthetic construct
  source 1..80: mol_type = other DNA
tggctggattccacgaaggccacgcgttatctcaccaaaacagagaactggattataagaaatcctggttacgcgctggt

SEQ ID NO: 117954 - DNA, 80 bp, synthetic construct
  source 1..80: mol_type = other DNA
agaacgatgccttctccagggtgaacctgaacggcatctttgacatggatgtctcggtgtacaagatcctgagatacgat

SEQ ID NO: 117955 - DNA, 80 bp, synthetic construct
  source 1..80: mol_type = other DNA
ggggtgcggaccgtcacgacaggctcccccatcacgtactccacctacggcaaattcctggccgacggtggttgctcggg

SEQ ID NO: 117956 - DNA, 80 bp, synthetic construct
  source 1..80: mol_type = other DNA
tacttctggcagcctacgtgatgagcggcagctcagcagacctgtcactagagaaggctgccaatgtgcagtgggatgag

SEQ ID NO: 117957 - DNA, 80 bp, synthetic construct
  source 1..80: mol_type = other DNA
caataggacggccctgaattgcaacgactccctccaaaccgggttcatcgcagggctgatctatatacacaagttcaatt

SEQ ID NO: 117958 - DNA, 80 bp, synthetic construct
  source 1..80: mol_type = other DNA
caggaccgtgatgaccggggaggccatcacgtactccacatatggcaaatttctcgccgatggaggctgcgctagcggcg

SEQ ID NO: 117959 - DNA, 80 bp, synthetic construct
  source 1..80: mol_type = other DNA
agggctacaaggtgctggtgcttaatccatcagttgccgccaccctctcttttggtgcctacatgagcaaggcctacggg

SEQ ID NO: 117960 - DNA, 80 bp, synthetic construct
  source 1..80: mol_type = other DNA
agtagagatgagagtctgaaaaacagaaatcatgcactaaaccagagtggccagtctcactgaaggaaaaatcactctct

SEQ ID NO: 117961 - DNA, 80 bp, synthetic construct
  source 1..80: mol_type = other DNA
gatagcgtttgcttctcggggcaaccacgtttcccccacgcactatgtgccggagagcgacgcgtcagttcgtgtcacac

SEQ ID NO: 117962 - DNA, 80 bp, synthetic construct
  source 1..80: mol_type = other DNA
ccgtgccgccagcggtccgcgatcgttgcggcccgtagccagtggcaactggcaaagcacactgaacagcatcgtgggtc

SEQ ID NO: 117963 - DNA, 80 bp, synthetic construct
  source 1..80: mol_type = other DNA
gggcttagtcttgctggtcctgattaccctcttcacactcaccccggggtataagactcttacttagccggtgtctgtgg

SEQ ID NO: 117964 - DNA, 80 bp, synthetic construct
  source 1..80: mol_type = other DNA
agaagaaaacaccctcaccatactgatccgcacaggccttttagctatctcaggaatgtacccaatggctataccagcaa

SEQ ID NO: 117965 - DNA, 80 bp, synthetic construct
  source 1..80: mol_type = other DNA
ggaaaaaccaagcggctagattcaccataagcccgcaagcaccgtcctttacggccaacatgggcgagtatggaacagtt

SEQ ID NO: 117966 - DNA, 80 bp, synthetic construct
  source 1..80: mol_type = other DNA
agtgggtaggataagtcgcccgagtttaatgggcgaagaggagtacctaaacgattccttgctcagaccggcgagagaaa

SEQ ID NO: 117967 - DNA, 80 bp, synthetic construct
  source 1..80: mol_type = other DNA
ggtccatgggaatcggcatgcagggcctgcacacggcctgcctgaagctggggctggatctggagtcggccgaatttcag

SEQ ID NO: 117968 - DNA, 80 bp, synthetic construct
  source 1..80: mol_type = other DNA
ctataggttgtggcactatccatgtacagtcaacttcacgatcttcaaaataaggatgttcgtggggggggttgagcata

SEQ ID NO: 117969 - DNA, 80 bp, synthetic construct
  source 1..80: mol_type = other DNA
ttcgcccacttgacgtaccagtgggagaaacgctctcgtcttcatccatctcttcctcaacatccccgacatcgggaata

SEQ ID NO: 117970 - DNA, 80 bp, synthetic construct
  source 1..80: mol_type = other DNA
acggccttaaactgtaatgagagcctcaacactggttttgtagcggggcttctctattaccacaaattcaactctacagg

SEQ ID NO: 117971 - DNA, 80 bp, synthetic construct
  source 1..80: mol_type = other DNA
tctttgcctgaggaggccagagcagccatacactcactgaccgagagactctacgtgggagggcctatgtctaacagcaa

SEQ ID NO: 117972 - DNA, 80 bp, synthetic construct
  source 1..80: mol_type = other DNA
ctgggtgtgtacagtgctatctgattttaaagtatggctgcaagccaaacttttcccccgcctgccggggatccccttcc

SEQ ID NO: 117973 - DNA, 80 bp, synthetic construct
  source 1..80: mol_type = other DNA
tggcagctcttcaacttccggtattgcgggcgacaccacgacaacgtcctctgaacccgccccctctacctgcccccctg

SEQ ID NO: 117974 - DNA, 80 bp, synthetic construct
  source 1..80: mol_type = other DNA
cttcatctgcgtggcgtggtacattaagggtagactccctgcagccgtggtgtacacggcctgcggaatgtggcccctgc

SEQ ID NO: 117975 - DNA, 80 bp, synthetic construct
  source 1..80: mol_type = other DNA
cgcacctgcatgcgcccactggaagtggtaagagcacgaaggtgccggccgcttatgcggctcaggggtacaaggtactt

SEQ ID NO: 117976 - DNA, 80 bp, synthetic construct
  source 1..80: mol_type = other DNA
acgaatcttggtattgcttgtattctaagatcttcgatcacgtcgctcacatccaacccctcttcggctcgtgttagtaa

SEQ ID NO: 117977 - DNA, 80 bp, synthetic construct
  source 1..80: mol_type = other DNA
tttggggggtggtctttatctgtgccgcctggtacatccgcggcagagctgcccccataactacctatgccatattgcag

SEQ ID NO: 117978 - DNA, 80 bp, synthetic construct
  source 1..80: mol_type = other DNA
ttatcggggccaacgaccacatccctcccccgtgtggcgcatctccccccggtatacgacgacgcagccgggatgagatt

SEQ ID NO: 117979 - DNA, 80 bp, synthetic construct
  source 1..80: mol_type = other DNA
ggcattgccgggactgcggtgggcagtattggtctcgggaaggtcctcatagacatcttggcaggatatggtgcgggcgt

SEQ ID NO: 117980 - DNA, 80 bp, synthetic construct
  source 1..80: mol_type = other DNA
ggttgagtcgcgggacccccggttcgagtctcgggccggccggactgcggcgaacggaggtttgcctccccgtcatgcaa

SEQ ID NO: 117981 - DNA, 80 bp, synthetic construct
  source 1..80: mol_type = other DNA
agcccttggtaggtggactggcacttacatctatgaccatctcacccctatgtcggattgggctgccaccggcctgcggg

SEQ ID NO: 117982 - DNA, 80 bp, synthetic construct
  source 1..80: mol_type = other DNA
aatggttcgatgaggatagttgggcccaggacttgcagcaacacctggcacgggaccttccccattaacgcgtacaccac

SEQ ID NO: 117983 - DNA, 80 bp, synthetic construct
  source 1..80: mol_type = other DNA
atgccggcgctgggggtcgggtctacacccgcccgttcaccgagcggcccctggtgggagtgggatgtctgggatgggtt

SEQ ID NO: 117984 - DNA, 80 bp, synthetic construct
  source 1..80: mol_type = other DNA
ggtccatgcgactcgtaggaccacgtacatgcgccaacatgtggtacggcaccttccccatcaatgagtataccactgga

SEQ ID NO: 117985 - DNA, 80 bp, synthetic construct
  source 1..80: mol_type = other DNA
gaccctggctcaccccccggtgtttggtgcactacccttaccggttgtggcattacccgtgcaccgtaaattacaccatc

SEQ ID NO: 117986 - DNA, 80 bp, synthetic construct
  source 1..80: mol_type = other DNA
ccaagtggtgattcgggcctttccacgggggcagacgctgctgactccggcagtcgagcgtcccccgacgagttagctcc

SEQ ID NO: 117987 - DNA, 80 bp, synthetic construct
  source 1..80: mol_type = other DNA
ccccctagagtacatcaagggtggacgacatctcattttctgccactccaagaagaagtgcgacgagctggccaagcggc

SEQ ID NO: 117988 - DNA, 80 bp, synthetic construct
  source 1..80: mol_type = other DNA
ggtatcatgggcccttaagtgggagtacgtggtgctcgccttcctgctgctggctgacgccaggatcagtgcctgcttct

SEQ ID NO: 117989 - DNA, 80 bp, synthetic construct
  source 1..80: mol_type = other DNA
cgcctgcccagcgggagacagctggtggtggcgcacgacgcgttctgcggcgcaggcctcggtcagggccgtggccagcg

SEQ ID NO: 117990 - DNA, 80 bp, synthetic construct
  source 1..80: mol_type = other DNA
catactctgtccgggtgtagtgtttgacataaccaagtggctcctggcaatcttgggacctagtcacctccttaggagtg

SEQ ID NO: 117991 - DNA, 80 bp, synthetic construct
  source 1..80: mol_type = other DNA
cgcaatcttaccaggtgggctatcttcacgctccgaccggcagcggtaagagcaccaaggtgcccgcggcatacgcttcc

SEQ ID NO: 117992 - DNA, 80 bp, synthetic construct
  source 1..80: mol_type = other DNA
agacggtggacttcagtctagatcccaccttcaccatcgagactaccacagtgccccaggacgcagtgtcccggagtcag

SEQ ID NO: 117993 - DNA, 80 bp, synthetic construct
  source 1..80: mol_type = other DNA
atactagcaggtgttgggaaccagtggcccccactttggcggtccgctatcgcggagcgcttactgacgatttgcggacg

SEQ ID NO: 117994 - DNA, 80 bp, synthetic construct
  source 1..80: mol_type = other DNA
gtgtgagggtccttgaggacggggtaaactatgcaacagggaatttacccggttgctctttctctatctttatccttgca

SEQ ID NO: 117995 - DNA, 80 bp, synthetic construct
  source 1..80: mol_type = other DNA
ccacccccacctaatttttgacatcaccaaattattgctggccgtgctgggccctatgtggctcttgcaggccagcctgg

SEQ ID NO: 117996 - DNA, 80 bp, synthetic construct
  source 1..80: mol_type = other DNA
atcactccacttgatctcccagcaatcattcaacgactccacggcatggctgctttttcactccatggatactctccggg

SEQ ID NO: 117997 - DNA, 80 bp, synthetic construct
  source 1..80: mol_type = other DNA
cctgaccttgtttgtggaagaatgcttgaggagaagagtcaccaggaaacacatgatattagctgtggtaatcactcttt

SEQ ID NO: 117998 - DNA, 80 bp, synthetic construct
  source 1..80: mol_type = other DNA
cctgttcttgttatatcctcaacaagcccgttttcatcacgatggacggggcggttcgccggaccgccgatttgtttctg

SEQ ID NO: 117999 - DNA, 80 bp, synthetic construct
  source 1..80: mol_type = other DNA
cccaagtcgtcttcgatctattgaccggagcgcactggggtgtgctggcgtggctagcgtacttttccatgcagggcaac

SEQ ID NO: 118000 - DNA, 80 bp, synthetic construct
  source 1..80: mol_type = other DNA
cagatgtacaccaacgtggatcaagatatggtgggctggccagccccaccggggtcaaggtctttgacaccgtgcacttg

SEQ ID NO: 118001 - DNA, 80 bp, synthetic construct
  source 1..80: mol_type = other DNA
tgcctcaagacgcggtatcgcgttctcaacggcggggtagaacgggtaggggcagagcaggcatttacagatttgtgaca

SEQ ID NO: 118002 - DNA, 80 bp, synthetic construct
  source 1..80: mol_type = other DNA
aaaaagcaagcacatcgtagtcatgctcatgcagataaaggcaggtaagttccggaaccaccacagaaaaagacaccatt

SEQ ID NO: 118003 - DNA, 80 bp, synthetic construct
  source 1..80: mol_type = other DNA
cccgctttgtctcagtatcacgtgtacgtccgggccccggcgcgaccggacgcccaggccgtcgtccgatggccagactc

SEQ ID NO: 118004 - DNA, 80 bp, synthetic construct
  source 1..80: mol_type = other DNA
ggaggagaacatggacgtggagatctggacaaaagaaggagaaagaaagaaactacgaccccgctggctggatgccagaa

SEQ ID NO: 118005 - DNA, 80 bp, synthetic construct
  source 1..80: mol_type = other DNA
ggcccgctccccaaggtgcccgctcactgacaccctgcacttgtggttcttcggacctttacctggttacaaggcacgcc

SEQ ID NO: 118006 - DNA, 80 bp, synthetic construct
  source 1..80: mol_type = other DNA
cggcgaacgtcttagccttgcccgtctaatagggcgtgcaatgacgcctggaggtgcaaggacatttattattttggcga

SEQ ID NO: 118007 - DNA, 80 bp, synthetic construct
  source 1..80: mol_type = other DNA
gagtggagggatgttccgtacctccctaaagctcaggacatgctatgttcctcccttgttgggaggaaagaaagagcaga

SEQ ID NO: 118008 - DNA, 80 bp, synthetic construct
  source 1..80: mol_type = other DNA
ggtacacgagtgggtgcccgacctacgggttaggggtggtagggactccatcatcttacttacctgcttgttacatccac

SEQ ID NO: 118009 - DNA, 80 bp, synthetic construct
  source 1..80: mol_type = other DNA
ggggtcgcagctaccttgcgagcccgaaccggacgtggccgtgttgacgtccatgctcactgatccctcccatataacag

SEQ ID NO: 118010 - DNA, 80 bp, synthetic construct
  source 1..80: mol_type = other DNA
ttgagagggggttaggcagagcgaaagtgacgtcattgaagagaatcttgcctgcccgcggcatgaaattgcgggtgatg

SEQ ID NO: 118011 - DNA, 80 bp, synthetic construct
  source 1..80: mol_type = other DNA
agaccggtttcctggcatccttgttttattacaacaagttcaactcttctgggtgccccgaacgccttagcagctgcaag

SEQ ID NO: 118012 - DNA, 80 bp, synthetic construct
  source 1..80: mol_type = other DNA
cccttggtgtaagtgtttacaaagcggttaagctgggatgggtgcatacgtggggatatgagatgcatcttggactgtat

SEQ ID NO: 118013 - DNA, 80 bp, synthetic construct
  source 1..80: mol_type = other DNA
actcacttcaagagagacagcactaatggtaataggaatggccatgacaacaacactttcaattccacatgacctcatgg

SEQ ID NO: 118014 - DNA, 80 bp, synthetic construct
  source 1..80: mol_type = other DNA
gaagatgtccttaaggaggaggctaatggccagaggtagccccttggtgaaggtattaacaaatcgattaagttgggagg

SEQ ID NO: 118015 - DNA, 80 bp, synthetic construct
  source 1..80: mol_type = other DNA
tggacgggccagaatctctccaggggctggatggaatgtgcgcgacaccgcctgcctggcgaagtcatacgcgcagatgt

SEQ ID NO: 118016 - DNA, 80 bp, synthetic construct
  source 1..80: mol_type = other DNA
aaggatgcaaaacttactcttgtcttaacaaagtgcggaagtcagattttagcttctgtttcaattattgtactaaaagg

SEQ ID NO: 118017 - DNA, 80 bp, synthetic construct
  source 1..80: mol_type = other DNA
tgtggtggcgtgatcggaaaagaactgcacgaggaccggcgtctcgggggcgtcggcaaacagggtcttcagcaccacca

SEQ ID NO: 118018 - DNA, 80 bp, synthetic construct
  source 1..80: mol_type = other DNA
agccagaagaagtggggatgtcctttgggacattcccacacctaaaatcattgaggagtgtgaatatctagaggatggaa

SEQ ID NO: 118019 - DNA, 80 bp, synthetic construct
  source 1..80: mol_type = other DNA
ctccgtgggccttaactcgtttgtggtaggatcccagctgccctgtgaaccagaaccggacgtggccgtgttaacatcca

SEQ ID NO: 118020 - DNA, 80 bp, synthetic construct
  source 1..80: mol_type = other DNA
cgcgcgtccggtgctgcatggtgacgcccgttcggtcgggacccgccggtcggagttatgccgcgtccagggccatcggg

SEQ ID NO: 118021 - DNA, 80 bp, synthetic construct
  source 1..80: mol_type = other DNA
tacccaaataaacaatcattggaaaaatcattcaataaagatcacttacttgaaatctgaaagtatgtctctggtgtagt

SEQ ID NO: 118022 - DNA, 80 bp, synthetic construct
  source 1..80: mol_type = other DNA
gcaggctatgaaggacttgggaggaggtaccccatttttcggtgtggctggacacgttgtggcacttggtgtgacttctt

SEQ ID NO: 118023 - DNA, 80 bp, synthetic construct
  source 1..80: mol_type = other DNA
cacacgttcgtgcaggactgcaactgctccatatacccaggccacgttacaggacatcgtatggcatgggacatgatgat

SEQ ID NO: 118024 - DNA, 80 bp, synthetic construct
  source 1..80: mol_type = other DNA
ggcagtgtcctacgtggtgtcaggaaaagcaacagatatgtggcttgaacgggccgccgacatcagctgggatatgggtg

SEQ ID NO: 118025 - DNA, 80 bp, synthetic construct
  source 1..80: mol_type = other DNA
cagcggtgaggacaacgtggtgtgttgctccatgtcatacacctggactggggcgctcatcaccccttgctctgctgaag

SEQ ID NO: 118026 - DNA, 80 bp, synthetic construct
  source 1..80: mol_type = other DNA
gttttcatatgatacccgctgctttgactctacggtcactgagagcgacatccgtacggaggaggcaatctaccaatgtt

SEQ ID NO: 118027 - DNA, 80 bp, synthetic construct
  source 1..80: mol_type = other DNA
ttgtggaatgtggcctctgctcctcctgctccttgcactgcccgaaagggcatatgctatggaccgggaggttgcgggtt

SEQ ID NO: 118028 - DNA, 80 bp, synthetic construct
  source 1..80: mol_type = other DNA
caaacaccaataccaacaacaatcatggcaaaaaacgaggttttctgcgtagacgcatcgaagggcggacgtaagtcggc

SEQ ID NO: 118029 - DNA, 80 bp, synthetic construct
  source 1..80: mol_type = other DNA
cgttcttggttcccagctcccttgcgagccggagccggacgtcttggtgctggcgtccatgctaactgacccaagccata

SEQ ID NO: 118030 - DNA, 80 bp, synthetic construct
  source 1..80: mol_type = other DNA
ggtcagtgacaaccccccatcccgatatagaagaggtaggcctcgggcgtgagggtgagatccccttctatgggagtgcg

SEQ ID NO: 118031 - DNA, 80 bp, synthetic construct
  source 1..80: mol_type = other DNA
cttgtctgtctgccaattatctacgcctccaccaccttcgccgcagtctcccaccttgatacggattgtcttcccgcctt

SEQ ID NO: 118032 - DNA, 80 bp, synthetic construct
  source 1..80: mol_type = other DNA
aatggcacctgtgtgatcctggccactgacatggggtcatggtgtgatgattcactgtcctatgagtgtgtgaccataga

SEQ ID NO: 118033 - DNA, 80 bp, synthetic construct
  source 1..80: mol_type = other DNA
ggactgtctaccatggcgccggctcaaagaccctagccggccccaaaggccccatcacccaaatgtacaccaatgtagac

SEQ ID NO: 118034 - DNA, 80 bp, synthetic construct
  source 1..80: mol_type = other DNA
tacaggctgtggcattatccttgcacaatcaattacacccttcataaagtgcgcctatttttgggcggaattgagcacag

SEQ ID NO: 118035 - DNA, 80 bp, synthetic construct
  source 1..80: mol_type = other DNA
cagacggcaggcaggcaggcacaggaagcagctcctgtagtccaatccaacttcgccaagcttgaacaattctgggcaaa

SEQ ID NO: 118036 - DNA, 80 bp, synthetic construct
  source 1..80: mol_type = other DNA
ccctgaagggatcatcaggcggaccaatgatgtgcccgtcaggtcacatcgtcgggatcttccgcgccgccgtctgcaca

SEQ ID NO: 118037 - DNA, 80 bp, synthetic construct
  source 1..80: mol_type = other DNA
ggggtggcctagtcctcctggtactagatccttggacccgtgcacgtgcggggccgtagatctgtaccttgtcacccgca

SEQ ID NO: 118038 - DNA, 80 bp, synthetic construct
  source 1..80: mol_type = other DNA
tgtctgtggtgctgacccgcctggaggagctgtctcagcaattgcaagatttgtttgccaaagtggccctgcttaaccct

SEQ ID NO: 118039 - DNA, 80 bp, synthetic construct
  source 1..80: mol_type = other DNA
acggaggagatgccatgtacatggcattgattgccagcttttccatccggccaggcctgctcatgggctttgggctgcgc

SEQ ID NO: 118040 - DNA, 80 bp, synthetic construct
  source 1..80: mol_type = other DNA
agtacttcattgcccgaggcgaggcaataatccaacagtgggttcccagcctgcatgtccgtgggggtcgcgacgccgtg

SEQ ID NO: 118041 - DNA, 80 bp, synthetic construct
  source 1..80: mol_type = other DNA
cagcccatcaacaggaggtcagtgtccgtggtgtacacgtacgcgaccgtgttggtgtgatagaggttggcgcaggcatc

SEQ ID NO: 118042 - DNA, 80 bp, synthetic construct
  source 1..80: mol_type = other DNA
ctaacatggaagttcaactcatccgccaaatggaagctgaaggagtcatcacacaagacgacatgcagaacccaaaaggg

SEQ ID NO: 118043 - DNA, 80 bp, synthetic construct
  source 1..80: mol_type = other DNA
aaggaatccataccgtgtttggctcggccttccaggggctgtttggtggcttgagttggatcacgaaagtcatcatggga

SEQ ID NO: 118044 - DNA, 80 bp, synthetic construct
  source 1..80: mol_type = other DNA
tgttgggaacttgggtgtagttggtgttgcggcgcttgcgcatgaccatgtcggtgaccttggcgctgagcagcgcgctc

SEQ ID NO: 118045 - DNA, 80 bp, synthetic construct
  source 1..80: mol_type = other DNA
gtcgcccccccgacgcaccctcgtgttatccccgaggtgtcccacgtgcgcggggtaacggtccatatggagaccccgga

SEQ ID NO: 118046 - DNA, 80 bp, synthetic construct
  source 1..80: mol_type = other DNA
gagtaccggacctgttgcgcttgcgctgcacggcagcatgggatgtcgtctacacattgctcaatgagaccccaggttct

SEQ ID NO: 118047 - DNA, 80 bp, synthetic construct
  source 1..80: mol_type = other DNA
agtcgtaatctcggagagcgttggcgtctcggaagatgcggccgccctgcgagccttcacggaggctatgaccaggtact

SEQ ID NO: 118048 - DNA, 80 bp, synthetic construct
  source 1..80: mol_type = other DNA
ctgggaagttgaccctgacctcactagcagtgtgtttggcactactgatttttggaaatctgacatacatggatctggtg

SEQ ID NO: 118049 - DNA, 80 bp, synthetic construct
  source 1..80: mol_type = other DNA
ggccaagctcgtgccacaactgcctgggatcccctttgtgtcctgccaacgcgggtatagggtggtctggcgaggagatg

SEQ ID NO: 118050 - DNA, 80 bp, synthetic construct
  source 1..80: mol_type = other DNA
taaccgtctggtacccgacccattcaacactcatcacaggtctatcggagagggttttgtatacccaacacccttttata

SEQ ID NO: 118051 - DNA, 80 bp, synthetic construct
  source 1..80: mol_type = other DNA
caaggccagactacaatccaccactgctcccacagtggcagtccccagactacgatccgccaacagtgtctgggtgtgcg

SEQ ID NO: 118052 - DNA, 80 bp, synthetic construct
  source 1..80: mol_type = other DNA
cagcttatgcccagcagacccgtggccttttgggggctatagtggtgagcttgaccggacgtgacaagaccgagcaggcg

SEQ ID NO: 118053 - DNA, 80 bp, synthetic construct
  source 1..80: mol_type = other DNA
gccggacagtgggtctgagcgagagcaccatatcagaagccctccagcaactggccatcaagacctttggccagcccccc

SEQ ID NO: 118054 - DNA, 80 bp, synthetic construct
  source 1..80: mol_type = other DNA
ccgggaggcctgggacaaattatgcggcgctgttttgctccacgaccccttattgaaagtatacaagcgacacgcgtaat

SEQ ID NO: 118055 - DNA, 80 bp, synthetic construct
  source 1..80: mol_type = other DNA
tgagccgataaagtgtgataccctgctgtgcgacattggagagtcgtccccatcatcagtgaccgaaggggaaagaacca

SEQ ID NO: 118056 - DNA, 80 bp, synthetic construct
  source 1..80: mol_type = other DNA
acccccgtaaacaccagttgaatctcgcgcaggatctcgcgcaggtgatgggcgcagtccacggggtggagcaccaagag

SEQ ID NO: 118057 - DNA, 80 bp, synthetic construct
  source 1..80: mol_type = other DNA
aaaccacatgtttgcaggacacttaaagtgtaaagttcgtatggaaaagttaaggatcaagggaatgtcatacacgatgt

SEQ ID NO: 118058 - DNA, 80 bp, synthetic construct
  source 1..80: mol_type = other DNA
cgccgggccggcgtcgtccacctcggtgagatggagggccgagttggtgctaaataccatggcccccacgagtcccgcgg

SEQ ID NO: 118059 - DNA, 80 bp, synthetic construct
  source 1..80: mol_type = other DNA
aaaaaatgcccgtccagcccgtccagcccgcgcagcccgtccagcccgcgcagcccatagaaccgggcacacaaatagtg

SEQ ID NO: 118060 - DNA, 80 bp, synthetic construct
  source 1..80: mol_type = other DNA
caacagaaggaatcaacaaatgcaccctcatcgccatggacctgggtgaaatgtgtgaagacactgtcacgtataaatgt

SEQ ID NO: 118061 - DNA, 80 bp, synthetic construct
  source 1..80: mol_type = other DNA
tcctctaccaacaatacgacgagatggaggagtgttctcgacacatcccctatctcgtcgagggacaacacttagctgaa

SEQ ID NO: 118062 - DNA, 80 bp, synthetic construct
  source 1..80: mol_type = other DNA
agcccccccaggggacgccccgcaaccagcatacgatctggagctgataacatcctgctcctccaatgtctcagtcgcgc

SEQ ID NO: 118063 - DNA, 80 bp, synthetic construct
  source 1..80: mol_type = other DNA
ccaatgattgccctaactcgagcattgtgtacgaggcggacgatgccatcctgcactctccggggtgtgtaccttgcgtt

SEQ ID NO: 118064 - DNA, 80 bp, synthetic construct
  source 1..80: mol_type = other DNA
gaacatcaccatgctggaggaccacgagtttgtgcccctggaggtctacacgcgccacgagatcaaggacagcggcctgc

SEQ ID NO: 118065 - DNA, 80 bp, synthetic construct
  source 1..80: mol_type = other DNA
ctaaaattgaaccggtggaagcagaccccaaaggacgcagttacaacttgcttccagacaaaaaaaatactaaatatcgc

SEQ ID NO: 118066 - DNA, 80 bp, synthetic construct
  source 1..80: mol_type = other DNA
gggcaagtcaatcttgtggagtgtgcctgaaagtcccaggcgcatgatgatggaggttgatggagctggggagtgccccc

SEQ ID NO: 118067 - DNA, 80 bp, synthetic construct
  source 1..80: mol_type = other DNA
attctgattaataaagcttaccttaaatttgatatcagttgtttgtcaagtttttccagcagcaccacctgcccttcctc

SEQ ID NO: 118068 - DNA, 80 bp, synthetic construct
  source 1..80: mol_type = other DNA
gccctgcccggggcccgcgtcatggctccgccccaaagggtgcggggccgcagggtaaaagaagtgagaacgcgaagcgt

SEQ ID NO: 118069 - DNA, 80 bp, synthetic construct
  source 1..80: mol_type = other DNA
atgtggacctccttgttggctcggctgcgctctgctctgccttgtatgtcggggacctctgtggtggcgtttttctggtc

SEQ ID NO: 118070 - DNA, 80 bp, synthetic construct
  source 1..80: mol_type = other DNA
tttcaaggtgctcgaccgtggcttcgagcagtggctctacgcgtacatccagcataagaatcacattaaaggccggccct

SEQ ID NO: 118071 - DNA, 80 bp, synthetic construct
  source 1..80: mol_type = other DNA
ttttccccctgatcagcagggttcccaagacacatctgggaagggtagctccatggccacttccgaagaatcaccactgc

SEQ ID NO: 118072 - DNA, 80 bp, synthetic construct
  source 1..80: mol_type = other DNA
agaggttagaggagaccctccagggaacaaatagtgggatgtcagcccagaaacccgcgtgggttctgtcactgctaagc

SEQ ID NO: 118073 - DNA, 80 bp, synthetic construct
  source 1..80: mol_type = other DNA
ggctagaacggtttgcggaccggtctattgtttcacccctagccctgttgtcgtgggcaccactgacaagcagggcgtac

SEQ ID NO: 118074 - DNA, 80 bp, synthetic construct
  source 1..80: mol_type = other DNA
ggcgatggcgtcggagaacaagcagcgccccggctccccgggccccaccgacgggccgccgcccaccccgagcccagacc

SEQ ID NO: 118075 - DNA, 80 bp, synthetic construct
  source 1..80: mol_type = other DNA
ttcaagatcatgtcgggtgagaagcctagcgtggaggatgttgtcaacctgctgccggcgatcttgtcaccaggcgcctt

SEQ ID NO: 118076 - DNA, 80 bp, synthetic construct
  source 1..80: mol_type = other DNA
gccgccggccagggcttcccatccgcgatccaaccactcgaccagcgaccgcggctttgcggtaccaggggtcagggtta

SEQ ID NO: 118077 - DNA, 80 bp, synthetic construct
  source 1..80: mol_type = other DNA
tccgcgggcacgtgcgcagcaggcgcagcatcaacgcgtcgacgcggcccagctgctgcatcgtcggcgagtacagttgg

SEQ ID NO: 118078 - DNA, 80 bp, synthetic construct
  source 1..80: mol_type = other DNA
aaggaattcttgggaaaacccaagtaggggttggagtacaaaaagacggagtcttccacaccatgtggcacgtcacaaga

SEQ ID NO: 118079 - DNA, 80 bp, synthetic construct
  source 1..80: mol_type = other DNA
atcatgacctgcatgtcagctgacttggaggttataacgagtgcttgggttatcgctggtggcatccttgccgcactggc

SEQ ID NO: 118080 - DNA, 80 bp, synthetic construct
  source 1..80: mol_type = other DNA
ggaacgttgtacagacggcccattatcacgtggagccaaggcaattatgtcacgggccatgaaccacgatgaaaggggaa

SEQ ID NO: 118081 - DNA, 80 bp, synthetic construct
  source 1..80: mol_type = other DNA
cttgaaaacagtgatgggtcaagtagaggagttggtataaacgtaagacttgctaaagatggaggtctgtcttttgataa

SEQ ID NO: 118082 - DNA, 80 bp, synthetic construct
  source 1..80: mol_type = other DNA
ccaggcctccccgtctgccaagatcatcttgaattctgggagagcgtctttacgggtctgaccaatatagacgctcactt

SEQ ID NO: 118083 - DNA, 80 bp, synthetic construct
  source 1..80: mol_type = other DNA
cacatcaacagaactgccctcaattgcaacgacagcctgaacacagggttcttagccagtctgttttacacccacagatt

SEQ ID NO: 118084 - DNA, 80 bp, synthetic construct
  source 1..80: mol_type = other DNA
acatacgttgatatcgcccgatacttgattttagtaggagctgctttcatggagcataacaatggtggagacgtagtgca

SEQ ID NO: 118085 - DNA, 80 bp, synthetic construct
  source 1..80: mol_type = other DNA
gaaaaaggtcatcacctggggagcagacacggcagcgtgtggcgacatactcgctggccttccggtctccgctcgtagag

SEQ ID NO: 118086 - DNA, 80 bp, synthetic construct
  source 1..80: mol_type = other DNA
agtggaccgccaatgaaaaacaaactggcggtcaaccaaaatctgttacccaaacatttggatctgctccaatgggaggc

SEQ ID NO: 118087 - DNA, 80 bp, synthetic construct
  source 1..80: mol_type = other DNA
tctatcttgtctcaccacacctgcctcagcggtccattatgccaacaagagtgggatttaccacgtcaccaatgactgcc

SEQ ID NO: 118088 - DNA, 80 bp, synthetic construct
  source 1..80: mol_type = other DNA
tctctgtgggtgcgcgcatggcagccgatgccccgggagaccggatggaggagcccctgcccgacagggccgtgcccatt

SEQ ID NO: 118089 - DNA, 80 bp, synthetic construct
  source 1..80: mol_type = other DNA
ctgcgagccctcacgtcttcgcccaccgattcctgttgcgttcctgtcggccggtgctgtcctgtcgacagattgttggc

SEQ ID NO: 118090 - DNA, 80 bp, synthetic construct
  source 1..80: mol_type = other DNA
aggaagttcggtggaacactggtgagaaacccactctcacgaaactcaacacatgaaatgtactgggtgtccaatgctag

SEQ ID NO: 118091 - DNA, 80 bp, synthetic construct
  source 1..80: mol_type = other DNA
acccccccaaaccagaatatgacttggagctgataacatcttgctcctccaacgtgtctgtcgctttggactcacgaggt

SEQ ID NO: 118092 - DNA, 80 bp, synthetic construct
  source 1..80: mol_type = other DNA
ggaggacaggaggatgtgctgctaaaacacttgcagcgccagtcctttatcctccgggacgctctggccgaccgaagcaa

SEQ ID NO: 118093 - DNA, 80 bp, synthetic construct
  source 1..80: mol_type = other DNA
tggtcttggccgaggcccagatccaggaatgggtcccccccctggagtctcgagggtggcgtgatgggattatctgggcg

SEQ ID NO: 118094 - DNA, 80 bp, synthetic construct
  source 1..80: mol_type = other DNA
gccacggtcgccggggccgcggagcgcgccggcccggggcttctggagctggccgtcgcgttcgactccacgcgcatggc

SEQ ID NO: 118095 - DNA, 80 bp, synthetic construct
  source 1..80: mol_type = other DNA
cgtatcaggccactgtctgcgcccgtgcgcaagcaagccctccaagttgggacgaaatgtggaaatgcctaatacggctc

SEQ ID NO: 118096 - DNA, 80 bp, synthetic construct
  source 1..80: mol_type = other DNA
cgacaaggaaccgacctgcaacagccaagcggcccactagaatcggcaacagcagcaacaaggaaagtcctgaggcgcgc

SEQ ID NO: 118097 - DNA, 80 bp, synthetic construct
  source 1..80: mol_type = other DNA
gatatgggaaaagttagaaaagatataccacaatgggaaccttcaaaaggatggaatgattggcaacaagtgcctttttg

SEQ ID NO: 118098 - DNA, 80 bp, synthetic construct
  source 1..80: mol_type = other DNA
tagaggttagcggagaccctgcgcatatagaaagagaggcacggcccagcctgacagaagctgtaagtcaggggaaggac

SEQ ID NO: 118099 - DNA, 80 bp, synthetic construct
  source 1..80: mol_type = other DNA
atgcccggggaacgccgggcccgggcctgccgctgtggccccaggtgtttctcggaggccatgtggcggtggccctgacg

SEQ ID NO: 118100 - DNA, 80 bp, synthetic construct
  source 1..80: mol_type = other DNA
tggtgtggaagacgaactgcccaattactgttttccgttaggggctgtaggcgttgtgaattcatacaaaggtgtgaaac

SEQ ID NO: 118101 - DNA, 80 bp, synthetic construct
  source 1..80: mol_type = other DNA
tgctgttcaccatggattaatagtattcctcactgtggctctggcggtggtgggacgaaacatctacaacgggcaaaaag

SEQ ID NO: 118102 - DNA, 80 bp, synthetic construct
  source 1..80: mol_type = other DNA
aactttgacatgttggtctgcggagacgatttggtggtcatctctgagagcctcggagtctcagaggatgtcagtgccct

SEQ ID NO: 118103 - DNA, 80 bp, synthetic construct
  source 1..80: mol_type = other DNA
tttgattaccatcaatgctactgcagccgttggcactcatggcctcttctatgccatccttttcatctgtgtggtatggt

SEQ ID NO: 118104 - DNA, 80 bp, synthetic construct
  source 1..80: mol_type = other DNA
tcaatgctacatggtgggctaatataactttagtgggaccctcagatacgccagtcacatggtatgataaacagggaatg

SEQ ID NO: 118105 - DNA, 80 bp, synthetic construct
  source 1..80: mol_type = other DNA
gacagacgcttcccgagcagtgaccaacatactcagttccctcactataaccagccttctccgtagactccacaactgga

SEQ ID NO: 118106 - DNA, 80 bp, synthetic construct
  source 1..80: mol_type = other DNA
gcgcaggctgggtaggggctcacccccctccttagccagttcctctgcctctcagctctccgccccatcactaaaagcta

SEQ ID NO: 118107 - DNA, 80 bp, synthetic construct
  source 1..80: mol_type = other DNA
gtgaatgacgttggggtcgaaggttggggagtggcgcggcggaagtgacggatccggtagtatgttttgaccggaaattt

SEQ ID NO: 118108 - DNA, 80 bp, synthetic construct
  source 1..80: mol_type = other DNA
cggcacggggcatgaagttgcgagagatcctgaagggtccgggtacgtccgagcggttgttgatgacttgcgccgccagg

SEQ ID NO: 118109 - DNA, 80 bp, synthetic construct
  source 1..80: mol_type = other DNA
ccccggctctggatggaatgttagggacaccgcatgcttggccaaggcctacgctcagatgtggctcctgctgtacttcc

SEQ ID NO: 118110 - DNA, 80 bp, synthetic construct
  source 1..80: mol_type = other DNA
ccatttgctcggcagttcctgtggactgggttcctactggtcggacaacatggagcattcacgccagtggggcctggatg

SEQ ID NO: 118111 - DNA, 80 bp, synthetic construct
  source 1..80: mol_type = other DNA
tccacagctactctccaggtgaaatcaatagggtggcggcgaccctcagaaagcttggggtcccacctttgcgagtctgg

SEQ ID NO: 118112 - DNA, 80 bp, synthetic construct
  source 1..80: mol_type = other DNA
cctcgcctgccgcagcgcgtcttcggccatgcgcgtggcctcgggggacagcccgcccccgtcgacgtacggcgcgtggc

SEQ ID NO: 118113 - DNA, 80 bp, synthetic construct
  source 1..80: mol_type = other DNA
catattgacatcatcgttgcgtccgccacgttttgctctgccttgtatgtgggcgatgcctgcggtgcgctgatgatagt

SEQ ID NO: 118114 - DNA, 80 bp, synthetic construct
  source 1..80: mol_type = other DNA
gggcaaccgggcctccgggcacgacccaaccgcacaaaggctcgctcggggcaaccgggcctggtgccaaaggcagagtg

SEQ ID NO: 118115 - DNA, 80 bp, synthetic construct
  source 1..80: mol_type = other DNA
tcactcgcgatcccaccacccccatcgcacgggctgcgtgggaaacagctagacacactccagttaactcctggctaggc

SEQ ID NO: 118116 - DNA, 80 bp, synthetic construct
  source 1..80: mol_type = other DNA
tctgcacgctcccacgggaagcggcaaaagcaccaaggttccatcagcctatgccgcgcaggggtacaaagtcttggtac

SEQ ID NO: 118117 - DNA, 80 bp, synthetic construct
  source 1..80: mol_type = other DNA
ccaatggccgaggaagagagcgaccttgagccctcaataccatcggagtgcatgctccccaggagcgggtttccacgggc

SEQ ID NO: 118118 - DNA, 80 bp, synthetic construct
  source 1..80: mol_type = other DNA
tggtgcgcgggcgcccccggagggtttggatctctgacctgagattggcggcactgaggtagagatgcccgaaccccccc

SEQ ID NO: 118119 - DNA, 80 bp, synthetic construct
  source 1..80: mol_type = other DNA
tataaatagaactgctctgaactgcaacgagagtctaaatacagggtggctcgcgggcctcctctacgcccacaagttca

SEQ ID NO: 118120 - DNA, 80 bp, synthetic construct
  source 1..80: mol_type = other DNA
gtgggcagtataggcctgggtaaaatactggtggatgtattggccgggtacggcgcgggcatctcgggagctcttgtggc

SEQ ID NO: 118121 - DNA, 80 bp, synthetic construct
  source 1..80: mol_type = other DNA
ctgcaaacccctgacctatttcgaccaaggatggggcaaactgacttatgccaatgtgacgggaagctcgcaagacaggc

SEQ ID NO: 118122 - DNA, 80 bp, synthetic construct
  source 1..80: mol_type = other DNA
catatctcaggtagaggcggcgctggagaacttgatagttctcaacgctgcttccctagtcgggacacatggcatcgtcc

SEQ ID NO: 118123 - DNA, 80 bp, synthetic construct
  source 1..80: mol_type = other DNA
gatctgtcacctttgctgctttccactacacagtggcagattctcccctgctccttcacgaccttacccgctctctcaac

SEQ ID NO: 118124 - DNA, 80 bp, synthetic construct
  source 1..80: mol_type = other DNA
aaacgctagagatcgctcaatcgccatggccttcttggtcacaggtggaacacttttgtttttagcaaccaacgtacacg

SEQ ID NO: 118125 - DNA, 80 bp, synthetic construct
  source 1..80: mol_type = other DNA
tgaagccgagggtgaggtgcagttcttatccacggcaacacaaacgtttcttggcatttgtatcaatggagtgatgtgga

SEQ ID NO: 118126 - DNA, 80 bp, synthetic construct
  source 1..80: mol_type = other DNA
aaatttcatcgaggcgctggcctccgccgacgagacgctggcgtggtgcaagatgtgcatccaccacaacctgccgctgc

SEQ ID NO: 118127 - DNA, 80 bp, synthetic construct
  source 1..80: mol_type = other DNA
caggactggggtcaggaccgtgacgactggagagcccatcacgtactcccacgtatggcaaattcctcgccgatggtggc

SEQ ID NO: 118128 - DNA, 80 bp, synthetic construct
  source 1..80: mol_type = other DNA
tgggaaatggttgatgaagaaagaaaagcccatctcaaaggggaatgtcacacatgcatctacaatatgatgggaaagcg

SEQ ID NO: 118129 - DNA, 80 bp, synthetic construct
  source 1..80: mol_type = other DNA
gggttcactaaaacatgcggagcaccaccttgccgcattaagagggacttcaacagcactctcgatctattgtgccccac

SEQ ID NO: 118130 - DNA, 80 bp, synthetic construct
  source 1..80: mol_type = other DNA
ctcaatgcccccccttgaggtggagccaggagacccggacctcagctcggggtcgtggtctacagttagcgaggagtgcg

SEQ ID NO: 118131 - DNA, 80 bp, synthetic construct
  source 1..80: mol_type = other DNA
gcatacgctgcgcagggctacaaagtgcttgtgctcaacccctccgttgctgcaacgttgggcttcggaagctatatgtc

SEQ ID NO: 118132 - DNA, 80 bp, synthetic construct
  source 1..80: mol_type = other DNA
ccctaggtggccggttacgcagatgtataccagtgctgagggagacctagtgggctggcccagtcctcctgggaccaagt

SEQ ID NO: 118133 - DNA, 80 bp, synthetic construct
  source 1..80: mol_type = other DNA
actgtttgtctgtgggttgcgtagtgatctgcggtaggattaccaccactggcaagccagtaatcatccctgatcgagag

SEQ ID NO: 118134 - DNA, 80 bp, synthetic construct
  source 1..80: mol_type = other DNA
gacctacaccccttctatatcggttggggcctgtccaaaatgaaacttgcttgacacaccccatcacaaaatatgtcatg

SEQ ID NO: 118135 - DNA, 80 bp, synthetic construct
  source 1..80: mol_type = other DNA
aggcatactgcagcgcaaccaggaggagttgtatagatttttaaacaccctatccccttactttcgtcacaaccgcgagc

SEQ ID NO: 118136 - DNA, 80 bp, synthetic construct
  source 1..80: mol_type = other DNA
gcacacctgcggggggaatgtcacacttgcatctacaacatgatgggaaagagagagaaaaaacccggagagttcggaaa

SEQ ID NO: 118137 - DNA, 80 bp, synthetic construct
  source 1..80: mol_type = other DNA
agcttcaatcaactcacaggccggctcactctttgttctaccaagaggcatgcccttcacagatttggatctgacggttg

SEQ ID NO: 118138 - DNA, 80 bp, synthetic construct
  source 1..80: mol_type = other DNA
cgagacagggtggacatgtcccccctgctccattccactacggagctcgcaatacttccgtgttcctttgtgccgcttcc

SEQ ID NO: 118139 - DNA, 80 bp, synthetic construct
  source 1..80: mol_type = other DNA
ctcatatcgacgcccacttcctttcacaaacgaaacaggcaggggaaaatcttgcgtacctcgttgcttaccaggcgacg

SEQ ID NO: 118140 - DNA, 80 bp, synthetic construct
  source 1..80: mol_type = other DNA
gagagagaaaaaacccggagagttcggaaaggccaaggggagcagagccatatggtttatgtggctcggagctcgctttc

SEQ ID NO: 118141 - DNA, 80 bp, synthetic construct
  source 1..80: mol_type = other DNA
tgttagacaacatacacatgcccaatggactggtggcccagctctatggaccagagagggaacaggctttcacaatggat

SEQ ID NO: 118142 - DNA, 80 bp, synthetic construct
  source 1..80: mol_type = other DNA
ccagggagtacaagaagggtgataccaccactggcgtttacagaatcatgactcgaggtctgcttggcagttaccaagct

SEQ ID NO: 118143 - DNA, 80 bp, synthetic construct
  source 1..80: mol_type = other DNA
ttcagccgtagagatcaagaacaccagcgtctcctacatggtgaccaatgattgctccaactccagcatcgtttggcagc

SEQ ID NO: 118144 - DNA, 80 bp, synthetic construct
  source 1..80: mol_type = other DNA
aggaacaccaggccaacatggtgtgcaagagagaccagagtgaccgtggatggggaaaccactgcggattttttgggaaa

SEQ ID NO: 118145 - DNA, 80 bp, synthetic construct
  source 1..80: mol_type = other DNA
atggcagctggcatctcaacaggacggccttgaactgttttgactctcttcagacaggcttccttgcagccctgtttgct

SEQ ID NO: 118146 - DNA, 80 bp, synthetic construct
  source 1..80: mol_type = other DNA
gaattcgcagctggaagaaaatccctgaccctgaatctaatcaccgagatgggtaggctcccaaccttcatgacccagaa

SEQ ID NO: 118147 - DNA, 80 bp, synthetic construct
  source 1..80: mol_type = other DNA
aggtgccggtgggcgcgcgaaatcggtaaccgcggcgaccgtgtcggtgagggcaggcggccgccaaccctaggtggtcg

SEQ ID NO: 118148 - DNA, 80 bp, synthetic construct
  source 1..80: mol_type = other DNA
caaactacagtgaataattaatccttcgtcgctgaatattaaaatagaatcccttagtctattaaccagaggtgatatag

SEQ ID NO: 118149 - DNA, 80 bp, synthetic construct
  source 1..80: mol_type = other DNA
aatctgggaaataagtttagaaatcccaccgtagcgccgacccacgatgtgaccaccgatcgtagccagcggctcatgtt

SEQ ID NO: 118150 - DNA, 80 bp, synthetic construct
  source 1..80: mol_type = other DNA
gcccacccacccggcggcgcgcgaggctctgcgtgttctgccaagaaagtaatcagcataacccggaaccccgagggagt

SEQ ID NO: 118151 - DNA, 80 bp, synthetic construct
  source 1..80: mol_type = other DNA
ttggggaaattttaacaggatttccctccgccgcggaacttatacgcgttacaagtttgatattaacaaacatgccggtg

SEQ ID NO: 118152 - DNA, 80 bp, synthetic construct
  source 1..80: mol_type = other DNA
cctcctacggtatcgggatgtgctctccctcccaagggactgccgcccgtgcctccacctaggcggaagagggtcgtaca

SEQ ID NO: 118153 - DNA, 80 bp, synthetic construct
  source 1..80: mol_type = other DNA
gcagacacgcggcttgttgggcacgattgtgaccagtctgacaggccgggacaggaatgaggtgacgggcgaggtgcagg

SEQ ID NO: 118154 - DNA, 80 bp, synthetic construct
  source 1..80: mol_type = other DNA
aattggactaccgacattaagactctcaagtttgatgccctgtcaggctcccaggaagtcgagttcattgggtatggaaa

SEQ ID NO: 118155 - DNA, 80 bp, synthetic construct
  source 1..80: mol_type = other DNA
ccttcatattagaaacagatcctgctgctccaccacctgcagcgtgttcaaaatagcaagatttaatgaggttctgccct

SEQ ID NO: 118156 - DNA, 80 bp, synthetic construct
  source 1..80: mol_type = other DNA
caagggaattttgtgtgaaggtgctctgcccctacatgccaaaagtcatagagaagatggagctactccagcgccggtat

SEQ ID NO: 118157 - DNA, 80 bp, synthetic construct
  source 1..80: mol_type = other DNA
aacctgggctcagcctgggtacccctggcccctttatggaaacgagggctgcggctgtgcgggatggcttctttcccccc

SEQ ID NO: 118158 - DNA, 80 bp, synthetic construct
  source 1..80: mol_type = other DNA
ctcctccgggtgccaagtccttgacaccatgcacctgcggcgcctcggacctatttctggtgaccaggcgcgccgatgta

SEQ ID NO: 118159 - DNA, 80 bp, synthetic construct
  source 1..80: mol_type = other DNA
agaggcaaaaacgaaagcggttgagcaggctcttcctccgtagcctggcggaacgcaaacgggttaggccgcgcgtgtac

SEQ ID NO: 118160 - DNA, 80 bp, synthetic construct
  source 1..80: mol_type = other DNA
tcggggtaaagctgtccccttgttcacttacatctgtctccagctttggccactcctgctgttggtgttatgcttgcccc

SEQ ID NO: 118161 - DNA, 80 bp, synthetic construct
  source 1..80: mol_type = other DNA
tgacgaagggaaagagaaggaaatcaactgtgacaaactgccctcaaatttggcttccttaaaaattacagttcaaaaag

SEQ ID NO: 118162 - DNA, 80 bp, synthetic construct
  source 1..80: mol_type = other DNA
ctacatggcactgggaatgtggccgttgctcctgacaatcttggccctgcctcgccgagcatacgctatggacaatgagc

SEQ ID NO: 118163 - DNA, 80 bp, synthetic construct
  source 1..80: mol_type = other DNA
cacattcaccaacatcgctgtgcaattggttagactcatggaagccgaagcggtcataggtccagatgacattgaaagca

SEQ ID NO: 118164 - DNA, 80 bp, synthetic construct
  source 1..80: mol_type = other DNA
tggatctttaaattggcgatgttaccgcccagatcccgcctgggattcatgttgtgcagaaccaccagcacggtgtatcc

SEQ ID NO: 118165 - DNA, 80 bp, synthetic construct
  source 1..80: mol_type = other DNA
ttaatgtcgcggatgctgcgcgccagctcgtccagcggcttgcgttctatcagcccttggttggcggcgtccgtcaggac

SEQ ID NO: 118166 - DNA, 80 bp, synthetic construct
  source 1..80: mol_type = other DNA
gcggggccacgtacgacgacgcccttgactccgattcgtcatcggatgactccctgcagatagatggccccgtgtgtcgc

SEQ ID NO: 118167 - DNA, 80 bp, synthetic construct
  source 1..80: mol_type = other DNA
tgtgaggaccgggaaccagtcacgatgctgggcagccttaacccccacggtggccgcgccatacgtcggtgctccacttg

SEQ ID NO: 118168 - DNA, 80 bp, synthetic construct
  source 1..80: mol_type = other DNA
gcccgtgcgtggatttgtggaagacgcggaagccgggacggatgggcggttttgcggtgcccggaaccgaaccgccggat

SEQ ID NO: 118169 - DNA, 80 bp, synthetic construct
  source 1..80: mol_type = other DNA
agaggaaaggattaagctttaccatccctttggcctcgctattgggggggcctggatctggcttgcgtatgctggccttg

SEQ ID NO: 118170 - DNA, 80 bp, synthetic construct
  source 1..80: mol_type = other DNA
caactcctcgggctgccctgagcgtatggcttcctgccgcagccttgaagctttccgtatagggtggggacccctgaggt

SEQ ID NO: 118171 - DNA, 80 bp, synthetic construct
  source 1..80: mol_type = other DNA
tggtcttggccgaggcccaaatacagcaatgggttccccccctggaggtccgaggtggccgcgacgggatcatctgggca

SEQ ID NO: 118172 - DNA, 80 bp, synthetic construct
  source 1..80: mol_type = other DNA
cgacagccgaagccccggcccccgacgcccccggccggctcactcaaagccagccgtaggtgggacgccaccggatctcc

SEQ ID NO: 118173 - DNA, 80 bp, synthetic construct
  source 1..80: mol_type = other DNA
ctgaaaatggatcccttaccctaaagttagggaacggaataaagcttaattcacaaggtcaacttacaaccactaacact

SEQ ID NO: 118174 - DNA, 80 bp, synthetic construct
  source 1..80: mol_type = other DNA
tctcttgctgccccagcgggcgtacgcctatggcggcgaggaagcggcatcgatcggccttctggttattgtggccttga

SEQ ID NO: 118175 - DNA, 80 bp, synthetic construct
  source 1..80: mol_type = other DNA
atccaaactgaaataccggatcgagcctggaacacaggttacgaatggatcacggaatatgtgggcagaacagtgtggtt

SEQ ID NO: 118176 - DNA, 80 bp, synthetic construct
  source 1..80: mol_type = other DNA
atgcccaggatgccacttccatactaggcatagggacggtgttagaccaggccgagaccgctggagtgaggttaacggtc

SEQ ID NO: 118177 - DNA, 80 bp, synthetic construct
  source 1..80: mol_type = other DNA
actgtaacgtggctgtggagcagtacgtcgacttcagtctagaccccactttctccattgagacacgcacggttccccag

SEQ ID NO: 118178 - DNA, 80 bp, synthetic construct
  source 1..80: mol_type = other DNA
gctcaaacagccgaaagaccactaaaagtcgtggtggaagctggccataatgtaacccttccccacctttctggttcaca

SEQ ID NO: 118179 - DNA, 80 bp, synthetic construct
  source 1..80: mol_type = other DNA
aaacattacaaaagatggtcttcaaattggaactgacacaacagcagatgctgataaaccaatatatgcagacaaaacat

SEQ ID NO: 118180 - DNA, 80 bp, synthetic construct
  source 1..80: mol_type = other DNA
gtgttagggccgtggaggacggaatcaactacgcaacagggaatcttcctggttgctccttttctatcttccttctcgca

SEQ ID NO: 118181 - DNA, 80 bp, synthetic construct
  source 1..80: mol_type = other DNA
ctgcatgtcggccgacctggaagtcatcaccagcacatgggtagtggctggtggaattctcgcagcaatagccgcctact

SEQ ID NO: 118182 - DNA, 80 bp, synthetic construct
  source 1..80: mol_type = other DNA
acgcagaaagactggttgaatttggggctccgcacgctgtcaagatggacgtgtacaacctcggagaccagactggagtg

SEQ ID NO: 118183 - DNA, 80 bp, synthetic construct
  source 1..80: mol_type = other DNA
gacaggcttcattgcttccttgttctatttcaacaagttcaacgcctcggggtgtccggaccgcatgagttcctgcaagc

SEQ ID NO: 118184 - DNA, 80 bp, synthetic construct
  source 1..80: mol_type = other DNA
tcactctttggagggatgtcctggattacacagggacttctaggagcccttctgttgtggatgggaatcaatgcccgtga

SEQ ID NO: 118185 - DNA, 80 bp, synthetic construct
  source 1..80: mol_type = other DNA
gggtccggctccacacctgagccggaagtccccgagtctcatgcatctgctgaagattccgatgcggggtcttactcttc

SEQ ID NO: 118186 - DNA, 80 bp, synthetic construct
  source 1..80: mol_type = other DNA
agtgccggcagctacagtgtgtggtcctgtgtactgtttcactcccagccccgtggtagtcggcacaaccgaccgcctag

SEQ ID NO: 118187 - DNA, 80 bp, synthetic construct
  source 1..80: mol_type = other DNA
gcaagtgctccttgagattttcctgggggcacactggggcgttctcggagccgtagtatattactgcatggtggcgaact

SEQ ID NO: 118188 - DNA, 80 bp, synthetic construct
  source 1..80: mol_type = other DNA
aggaatgttcgacagtgtggtcctttgcgagtgctacgacgctggttgctcgtggtacgaactaacaccagcagagacca

SEQ ID NO: 118189 - DNA, 80 bp, synthetic construct
  source 1..80: mol_type = other DNA
gctcgatgttgtcggccatctgcatcgtgggcccgacgccggcccgggtggccggttcgaggagggtgatcagcgcgccc

SEQ ID NO: 118190 - DNA, 80 bp, synthetic construct
  source 1..80: mol_type = other DNA
tattccgctacattctccaaatgcgacgctagcataacaaggtttccatgaatcaccttcgggggtaaccgagttacctg

SEQ ID NO: 118191 - DNA, 80 bp, synthetic construct
  source 1..80: mol_type = other DNA
cccagacgttcttggctacttgtgtcaatggagtctgctggactgtgtatcacggggccggatcaaggaccctcgcttcg

SEQ ID NO: 118192 - DNA, 80 bp, synthetic construct
  source 1..80: mol_type = other DNA
ggggcatgcacctgcgcaacaccatacgggaggtggaggctcgattcgacgccaccgcggaacccgtgtgcaaacttcct

SEQ ID NO: 118193 - DNA, 80 bp, synthetic construct
  source 1..80: mol_type = other DNA
tctctaccaggagttcgatgagatggaagagtgtgcctcacacctcccttacatcgagcagggaatgcagctcgccgaac

SEQ ID NO: 118194 - DNA, 80 bp, synthetic construct
  source 1..80: mol_type = other DNA
gctatagtaaggcagctcgctggtggaaagtacgtccagatggcgctattaacccttggtagatgggctggtgtatacat

SEQ ID NO: 118195 - DNA, 80 bp, synthetic construct
  source 1..80: mol_type = other DNA
ttgtagctttagagggaccctcggtgatggccaaccagcaagtcacagtgaggaggagatcatgcccatggctttcaaca

SEQ ID NO: 118196 - DNA, 80 bp, synthetic construct
  source 1..80: mol_type = other DNA
ctacaatcctgggaataggcaccgtgctagaccaagctgagacggcgggcgtgcgccttaccgtcttagctacggcaaca

SEQ ID NO: 118197 - DNA, 80 bp, synthetic construct
  source 1..80: mol_type = other DNA
tatccgatcccgcggggcaaggtggtgtgggtgacgacgtagctggcgttgtgggtgatgggcacgaggatccggtgctc

SEQ ID NO: 118198 - DNA, 80 bp, synthetic construct
  source 1..80: mol_type = other DNA
gcaactcatcgattgatttacggcgctaaggatgactctggtcagagatacctggcctggtctggacacagtgcccgtgt

SEQ ID NO: 118199 - DNA, 80 bp, synthetic construct
  source 1..80: mol_type = other DNA
agacccgggggatgctgggcaccataatcacgagcctcaccggcagagacaccaacgagaactgcggtgaaatccaggtg

SEQ ID NO: 118200 - DNA, 80 bp, synthetic construct
  source 1..80: mol_type = other DNA
atcgcggccgtgatcagtgtatataccgccatggccattgccgttaaagccgtgtagtaagtaaatgccacaacgctatg

SEQ ID NO: 118201 - DNA, 80 bp, synthetic construct
  source 1..80: mol_type = other DNA
tctctaccaggagttcgatgagatggaagagtgctctcagcacttaccgtacatcgagcaagggatgatgctcgctgagc

SEQ ID NO: 118202 - DNA, 80 bp, synthetic construct
  source 1..80: mol_type = other DNA
gaagctcgagcagttttggcaaaagcacatgtggaactttgtcagtggcatacaatatctagctggcttgtctaccctgc

SEQ ID NO: 118203 - DNA, 80 bp, synthetic construct
  source 1..80: mol_type = other DNA
attaacccatataccagacctactactcctgatcagaaacacagatttgaattgcaaattgaaaataatgcaaatgatga

SEQ ID NO: 118204 - DNA, 80 bp, synthetic construct
  source 1..80: mol_type = other DNA
cagccctatggaaaggtcattgatcttggatgtggcagagggggctggagttactacgccgccaccatccgcaaagttca

SEQ ID NO: 118205 - DNA, 80 bp, synthetic construct
  source 1..80: mol_type = other DNA
actcactccactgcgcgatgcagccagactcgatctctcgggatggtttacgtcgggcggacgcggggtggacatatttc

SEQ ID NO: 118206 - DNA, 80 bp, synthetic construct
  source 1..80: mol_type = other DNA
cgaagaagactcctatggggttctcttatacccgctgcttctccactgccgaaaaggacatcagggtcgaggaaaaggtc

SEQ ID NO: 118207 - DNA, 80 bp, synthetic construct
  source 1..80: mol_type = other DNA
ttttgaccgccggggtggaggcgagcacttacaccaccggaggagctgccggacacaccctaagtggtttttctgggctt

SEQ ID NO: 118208 - DNA, 80 bp, synthetic construct
  source 1..80: mol_type = other DNA
tccgaaagcggtggcgtggaggaagacgcccgagccctcagagccttcacggaggctatgacgaggtactcggctccccc

SEQ ID NO: 118209 - DNA, 80 bp, synthetic construct
  source 1..80: mol_type = other DNA
gaatggagtggtgagattgctcacaaaaccatgggatgttatccccatggtcacacaaatagctatgactgataccacac

SEQ ID NO: 118210 - DNA, 80 bp, synthetic construct
  source 1..80: mol_type = other DNA
ctgccactcagacctttcttgccactgcactcaacggggtactgtggacagtctaccatggtgcagggtccaaaaccctc

SEQ ID NO: 118211 - DNA, 80 bp, synthetic construct
  source 1..80: mol_type = other DNA
tgccatgattgccgctcgagcggtgttaaggcgtgcgcgtcggataggacggcgagccatgcgccgagccgctgccgctg

SEQ ID NO: 118212 - DNA, 80 bp, synthetic construct
  source 1..80: mol_type = other DNA
gcgaagttggagccatagctctagactttaaacccggcacatctggatctcctatcgtgaacagagagggaaaaatagta

SEQ ID NO: 118213 - DNA, 80 bp, synthetic construct
  source 1..80: mol_type = other DNA
cggggccggctctaagacccttgctggccccaaaggcccagtggtgcaaatgtacactaatgtagacaaagatctggtgg

SEQ ID NO: 118214 - DNA, 80 bp, synthetic construct
  source 1..80: mol_type = other DNA
ctggcttcgggttctatgtaaactccttcatgcgccgctgccctgataacatccaccaccgcagaataagccacacccag

SEQ ID NO: 118215 - DNA, 80 bp, synthetic construct
  source 1..80: mol_type = other DNA
caatccctggagagttattgccccttgcccttcccaagtacaccagggtgataaaatccacttgaaagtttgtatcgtac

SEQ ID NO: 118216 - DNA, 80 bp, synthetic construct
  source 1..80: mol_type = other DNA
attacgcaacagggaatctgcccggttgctctttctctatcttcttgcttgctcttttctcctgcatcaccgtgccagct

SEQ ID NO: 118217 - DNA, 80 bp, synthetic construct
  source 1..80: mol_type = other DNA
actgctctcgtgcctgaccacgccagcctcagcccttagctacggcaactccagtgggctgtattacgtcaccaatgact

SEQ ID NO: 118218 - DNA, 80 bp, synthetic construct
  source 1..80: mol_type = other DNA
ttcaggtcttgtccacagctacccaaacgttcctcggcactgtgtgcggggggattatgtggaccgtttaccatggagct

SEQ ID NO: 118219 - DNA, 80 bp, synthetic construct
  source 1..80: mol_type = other DNA
ggtactacgccagccgccggcgcccagccagcaaacgccgccgccgcaccgccacccgccgccgtctggcccccgcccgc

SEQ ID NO: 118220 - DNA, 80 bp, synthetic construct
  source 1..80: mol_type = other DNA
aacaaagagagcgcgcgtccgaccggcgcgtgcgtgtacctggagccgtggcacaccgacgtgcgggccgtgctccggat

SEQ ID NO: 118221 - DNA, 80 bp, synthetic construct
  source 1..80: mol_type = other DNA
tttacgctgagaatgtggctattgaagcgcccgacacccatttggtgtacaagccagatgtagctcagggaaccgtaagt

SEQ ID NO: 118222 - DNA, 80 bp, synthetic construct
  source 1..80: mol_type = other DNA
tactcaaggggtccgggtccagggactccctgcgcatgatgccaatggccctgagcatcagtcgcctggtacggcgtgcg

SEQ ID NO: 118223 - DNA, 80 bp, synthetic construct
  source 1..80: mol_type = other DNA
ggatgtatgtggccggagttgagcacaggttcgacgccgcctgcaactggacgcgaggcgaacggtgcgagttgcacgac

SEQ ID NO: 118224 - DNA, 80 bp, synthetic construct
  source 1..80: mol_type = other DNA
gcggacagaagagctatcggcgggcggcgggccggcccgggccccgccgcccgccgcggtccgcgccagcgcctggtcca

SEQ ID NO: 118225 - DNA, 80 bp, synthetic construct
  source 1..80: mol_type = other DNA
accctttgggggggcgagggaggcagggagccctgagcccgagagcgaaggacaggggcggagacgagggatcggaaccc

SEQ ID NO: 118226 - DNA, 80 bp, synthetic construct
  source 1..80: mol_type = other DNA
gtacaactacacagtcaactgttaagaccactactcacactacacagctagacaccacagtgcagaataatactgtgttg

SEQ ID NO: 118227 - DNA, 80 bp, synthetic construct
  source 1..80: mol_type = other DNA
ccgcatgtctgtggtgtacgccaatcggatacactcttttaatctgcattcgcacttcccgttttttcactgtatgggtt

SEQ ID NO: 118228 - DNA, 80 bp, synthetic construct
  source 1..80: mol_type = other DNA
ttgggtttttatttatttaggtatgctggggtttctccctggatgcccaccccccacccccccccgtgggtctagccgtg

SEQ ID NO: 118229 - DNA, 80 bp, synthetic construct
  source 1..80: mol_type = other DNA
gtctgcttgtgagacgcctagctggcggcagatacatgcaggcttgcctgctgaagattggggcatggacgggcacttac

SEQ ID NO: 118230 - DNA, 80 bp, synthetic construct
  source 1..80: mol_type = other DNA
cgtttgccgatacgggcggggggccgaattgtaagcgcgtcgcctcttgggagtcatcggcggataacgcactgaatggt

SEQ ID NO: 118231 - DNA, 80 bp, synthetic construct
  source 1..80: mol_type = other DNA
gtggtggttgtgctatctcctgaccctgggggaagccatgattcaggagtgggtaccacccatgcaggtgcgcggcggcc

SEQ ID NO: 118232 - DNA, 80 bp, synthetic construct
  source 1..80: mol_type = other DNA
tacgcccccccctgcaaacccctgctacgggatgaggtgacgtttagcgtcgggctcaacgaatactcggtgtggtctca

SEQ ID NO: 118233 - DNA, 80 bp, synthetic construct
  source 1..80: mol_type = other DNA
tccagtcgcgtgtgcgagctgacggccagtcacactatcgcccccttatatgtgcacggcaaatacttctactgcaactc

SEQ ID NO: 118234 - DNA, 80 bp, synthetic construct
  source 1..80: mol_type = other DNA
caaccacaataatgcaaaaagcataccacgccaaagtcgtgaaggtcgcgaggccctcccgtgatggaggctgcatcatg

SEQ ID NO: 118235 - DNA, 80 bp, synthetic construct
  source 1..80: mol_type = other DNA
agtgcgatgagttggcctccaagctccgtggtatgggggtcaacgcggtggccttctacagaggcctggacgtgtccata

SEQ ID NO: 118236 - DNA, 80 bp, synthetic construct
  source 1..80: mol_type = other DNA
agacccaaacatcaggactggtgtcagaaccatcacaacgggtggccccattacatactccacctatggcaagttcctgg

SEQ ID NO: 118237 - DNA, 80 bp, synthetic construct
  source 1..80: mol_type = other DNA
ggaggttgggcgactgccactatgtggtaggggtcactgctgaagggctgaagtgcccttgccaggtgcctgcgcctgaa

SEQ ID NO: 118238 - DNA, 80 bp, synthetic construct
  source 1..80: mol_type = other DNA
agacgccgcgggcaacagagtttactttctcacccgcgaccccgagattccgctcgcgagggctgcgtgggagactgcaa

SEQ ID NO: 118239 - DNA, 80 bp, synthetic construct
  source 1..80: mol_type = other DNA
actttcgaccgcgtgcaggtggtcgaccaacactactatgatgttctcaaggagattaagaccaaggcttccggggttag

SEQ ID NO: 118240 - DNA, 80 bp, synthetic construct
  source 1..80: mol_type = other DNA
ggacggggttaactacgcaacagggaatcttcctggttgctccttttctatcttcctcttggcactgctctcgtgtctta

SEQ ID NO: 118241 - DNA, 80 bp, synthetic construct
  source 1..80: mol_type = other DNA
agtcctggggaaaaccaggatatccctggcccctctatgggaacgagggactcggatgggcagtgtggctcctgtccccc

SEQ ID NO: 118242 - DNA, 80 bp, synthetic construct
  source 1..80: mol_type = other DNA
ggtggccggaacgggtttccgggccaggtgggacggttttggcccgctccccttgttaacccaagggccctcccgcccgt

SEQ ID NO: 118243 - DNA, 80 bp, synthetic construct
  source 1..80: mol_type = other DNA
gacctggagaggcgacgggatttgcaacactacgtgcccctgcggtgctagcattgcgggccatgttaagaacgggacta

SEQ ID NO: 118244 - DNA, 80 bp, synthetic construct
  source 1..80: mol_type = other DNA
ttgtggaggctgtcggggccacgaggggtgtcctcggccagggcccagagacgcttagtcacggtgcgtccctgcggaca

SEQ ID NO: 118245 - DNA, 80 bp, synthetic construct
  source 1..80: mol_type = other DNA
gagcttagcccgctactactgtctacaacagagtggcagataatgccctgctccttcaccaccctgccggctttgtccac

SEQ ID NO: 118246 - DNA, 80 bp, synthetic construct
  source 1..80: mol_type = other DNA
tgtggttccgggttgcgcctccgtcctttccaccccccttccccctccttttttgttttgcgtgcgcttataagagcggg

SEQ ID NO: 118247 - DNA, 80 bp, synthetic construct
  source 1..80: mol_type = other DNA
cctgaaaagcgaagaccagttgcagcgcaccttggaagacgcagaagctctgttcaataaatactgcgctctctcgctta

SEQ ID NO: 118248 - DNA, 80 bp, synthetic construct
  source 1..80: mol_type = other DNA
tggagagagtgttggattgtaggacggctttcaaacctgtgcttgtggatgaagggagaaaggtggcaataaaagggcca

SEQ ID NO: 118249 - DNA, 80 bp, synthetic construct
  source 1..80: mol_type = other DNA
tggaagagctggggcaagtcaatcttgtggagtgttcctgatagccccaggcgcatgatgatggtggttgatggagtcgg

SEQ ID NO: 118250 - DNA, 80 bp, synthetic construct
  source 1..80: mol_type = other DNA
taactcgaacccccgtgactccctccaatcgcgttaccaaactcttcttccgtatccgtagattccgagtcctcgaaatc

SEQ ID NO: 118251 - DNA, 80 bp, synthetic construct
  source 1..80: mol_type = other DNA
cgtcgtgcgagaacccacgaccacggccacgttggcctcaaagccgctctccacggtcaggcccacgaccaggggcgcca

SEQ ID NO: 118252 - DNA, 80 bp, synthetic construct
  source 1..80: mol_type = other DNA
gacattcccccacgacccaagcgggcccgggtaaacctgcggctcacgagctctcccgatcggcgggatgtggttatttt

SEQ ID NO: 118253 - DNA, 80 bp, synthetic construct
  source 1..80: mol_type = other DNA
ctacatcgagggcttgtcgggtcattggataactgcacaagcggcaacgcccttgtgttatatggctggtgggtatttgc

SEQ ID NO: 118254 - DNA, 80 bp, synthetic construct
  source 1..80: mol_type = other DNA
acttgatccaccatttggggactcttacattgtcataggagtcggggagaagaagatcacccaccactggcacaggagtg

SEQ ID NO: 118255 - DNA, 80 bp, synthetic construct
  source 1..80: mol_type = other DNA
gatgaccgcttcgccacctctctccacttcctcaacgccatgtcaaaggttcgcaaagatatccaggagtggaaaccgtc

SEQ ID NO: 118256 - DNA, 80 bp, synthetic construct
  source 1..80: mol_type = other DNA
agctggcggccaggggcctgcccacgcccgtggttctggaattcgacagcgaattcgagatgctgttggccttcatgacc

SEQ ID NO: 118257 - DNA, 80 bp, synthetic construct
  source 1..80: mol_type = other DNA
gcccgaactctagcatcgtgctggaggcggatagcatgatattgcatctgcccgggtgtgtgccgtgcataaaggagggt

SEQ ID NO: 118258 - DNA, 80 bp, synthetic construct
  source 1..80: mol_type = other DNA
tactcgatttaattaacattctgcagagcattgtggttcaggaacgcagtcttagtttggcagacaaggtggccgccatt

SEQ ID NO: 118259 - DNA, 80 bp, synthetic construct
  source 1..80: mol_type = other DNA
gaatccggtggttgatgggaatccaacagtcgacattgaggaagccccggaaatgcctgccctctatgagaagaagttgg

SEQ ID NO: 118260 - DNA, 80 bp, synthetic construct
  source 1..80: mol_type = other DNA
ctcggtgcttggtggactatccctataggctgtggcattacccatgtaccatcaatttcaccaggcacaccgtccgcatg

SEQ ID NO: 118261 - DNA, 80 bp, synthetic construct
  source 1..80: mol_type = other DNA
aatgccacggagacatgggtgacctatggaacatgttctcaaactggtgaacaccgacgagacaaacgttccgtcgcact

SEQ ID NO: 118262 - DNA, 80 bp, synthetic construct
  source 1..80: mol_type = other DNA
ctttggtaggccctaccccgttgctgtataggctgggtgccgtcagcaacgagattacactcacccaccccattaccaag

SEQ ID NO: 118263 - DNA, 80 bp, synthetic construct
  source 1..80: mol_type = other DNA
caaccccccattattacgagtacttcaccaaaatggaaaatactcagaagactgtgacagtgcccacggggcccctgggt

SEQ ID NO: 118264 - DNA, 80 bp, synthetic construct
  source 1..80: mol_type = other DNA
gaatccacaaagcagtaagcgccagtcgccgcagagagctaagcgacaaagagcttatgcatagcttacaaagggcgctg

SEQ ID NO: 118265 - DNA, 80 bp, synthetic construct
  source 1..80: mol_type = other DNA
attgtcacctggagccctcgtagttggcgtcgtttgcgcggcaatcctgcgcaagcacgtaggccatactgagggggtca

SEQ ID NO: 118266 - DNA, 80 bp, synthetic construct
  source 1..80: mol_type = other DNA
taacatcatgttcgtccaatgtctcggtcgcacacgatgcgacgggcaaaaaggtctactacctgacccgagacccagag

SEQ ID NO: 118267 - DNA, 80 bp, synthetic construct
  source 1..80: mol_type = other DNA
ctaccacctgtacttgcggggcccagctgactggccacgtaaaaaatggttccatgaagctggtggtgccccggacgtgc

SEQ ID NO: 118268 - DNA, 80 bp, synthetic construct
  source 1..80: mol_type = other DNA
ataacgggtcccaggacgtgcagcaacacctggcacggcacattccctatcaatgccaccaccaccggccctagcgtgcc

SEQ ID NO: 118269 - DNA, 80 bp, synthetic construct
  source 1..80: mol_type = other DNA
cagggtgtattatcgacaatcgcattcaggaagcggcctttgatgcacatagatttataaggaataccttagttcgacat

SEQ ID NO: 118270 - DNA, 80 bp, synthetic construct
  source 1..80: mol_type = other DNA
tagggcctctttacatcttacaggccagccttgtccgcgtcccctattttgtgcgggcgcatgcggttgtccgcctatgc

SEQ ID NO: 118271 - DNA, 80 bp, synthetic construct
  source 1..80: mol_type = other DNA
ggtgccgaccctaggcgctatggggattttgggttgggtcgggcttattgccgttgtggttttgtgtgtgcggtgaggct

SEQ ID NO: 118272 - DNA, 80 bp, synthetic construct
  source 1..80: mol_type = other DNA
gtgctgatcatgttctcgggagtggatgcgcacacatacgccaccggcggcgccgcgggtcgctctactctcgggtttac

SEQ ID NO: 118273 - DNA, 80 bp, synthetic construct
  source 1..80: mol_type = other DNA
tttgataaaaagggtgatttagtagcatggaataaaaaatatgatactcgcaccctttggacaactccagacccatcgcc

SEQ ID NO: 118274 - DNA, 80 bp, synthetic construct
  source 1..80: mol_type = other DNA
atctggcttacaaacaaaggatgataaactttgtttatcgctgggagatgggttggtaacaaaggatgataaactatgtt

SEQ ID NO: 118275 - DNA, 80 bp, synthetic construct
  source 1..80: mol_type = other DNA
gtagcagcagcccttggcgggggcgtcgtgttagcactgatcgtcctgacactgtccccgcgctacaagtactggctggc

SEQ ID NO: 118276 - DNA, 80 bp, synthetic construct
  source 1..80: mol_type = other DNA
gcatatcaataggactgccctcaattgtaatgacagcctgaacacaggattcttggctagtctgttttacacccacaagt

SEQ ID NO: 118277 - DNA, 80 bp, synthetic construct
  source 1..80: mol_type = other DNA
aaagcaggggctgagcaccggcgaggccccgttgaggtggtaggccccgttatagagcaggtccccgtacgaaaatcgct

SEQ ID NO: 118278 - DNA, 80 bp, synthetic construct
  source 1..80: mol_type = other DNA
aaccaatactttatagcgcggattgaggccgcgctgcaagtgtggatccccagcatgtcagtgcgaggtggtcgcgacgc

SEQ ID NO: 118279 - DNA, 80 bp, synthetic construct
  source 1..80: mol_type = other DNA
actaccaataggtttggaagtcccagctgaaggtgaccctaaacctatctacgctaataagctttaccaaccagaacccc

SEQ ID NO: 118280 - DNA, 80 bp, synthetic construct
  source 1..80: mol_type = other DNA
cgtccctcaaggcaacatgcaccacccaccacgagtctcctgacgtagacctaatagaggccaaccttctgtggaggcag

SEQ ID NO: 118281 - DNA, 80 bp, synthetic construct
  source 1..80: mol_type = other DNA
aacgagagagcgcttcgtagtagagcccgaggccgtcgcgggtggccggaagcgtagggaaggccacgtcgccgtgggcg

SEQ ID NO: 118282 - DNA, 80 bp, synthetic construct
  source 1..80: mol_type = other DNA
gagggcgtccagcgccgagccgttgtcggcgggcgtcggtgcccccaggacaaagacgcgatacctggagccggccggag

SEQ ID NO: 118283 - DNA, 80 bp, synthetic construct
  source 1..80: mol_type = other DNA
aaattgctgaagcgctgaagggactgccaatccgttatctgacaccagccgtgaagaatgaacatcagggcaatgagata

SEQ ID NO: 118284 - DNA, 80 bp, synthetic construct
  source 1..80: mol_type = other DNA
gctggcccgctccaccgggtgccagatcgtacactccctgctcatgtggtgccaacgatttgtacctcgtcacacgaggg

SEQ ID NO: 118285 - DNA, 80 bp, synthetic construct
  source 1..80: mol_type = other DNA
aaactgcccatcagcccactcagcaattctttgttgagacatcacaacctggtttattctacgtcgtctagaagtgcttc

SEQ ID NO: 118286 - DNA, 80 bp, synthetic construct
  source 1..80: mol_type = other DNA
tgacagcggtgaaacagtgaagtgcagggctcctggaggagcaaagaagcctctgcgcccaaggtggtgtgatgaaaggg

SEQ ID NO: 118287 - DNA, 80 bp, synthetic construct
  source 1..80: mol_type = other DNA
agaggatggccagctgccaaccactctccgcctttgaccaggggtgtggccctatcagctacgtcaacggaagtggcccc

SEQ ID NO: 118288 - DNA, 80 bp, synthetic construct
  source 1..80: mol_type = other DNA
aatttctcgataccaaggaaatcttaagttatacagtgaaccataaatcatcattttaaaccaatttgctaacactacac

SEQ ID NO: 118289 - DNA, 80 bp, synthetic construct
  source 1..80: mol_type = other DNA
ctctaccagcagttcgacgaaatggaagagtgttccaaacacttaccaattgttgaacacggattgcagctggcggaaca

SEQ ID NO: 118290 - DNA, 80 bp, synthetic construct
  source 1..80: mol_type = other DNA
gggcgacagctgacaacttgaagtgcccctgccaggtgcccgccccagaattcttcaccgaggtggacggcattcggctg

SEQ ID NO: 118291 - DNA, 80 bp, synthetic construct
  source 1..80: mol_type = other DNA
caatcaggccaactgcaagatcatcttcgtctcgtcgaccaacaccgggaaggccagcacgagctttttgtacaacctcc

SEQ ID NO: 118292 - DNA, 80 bp, synthetic construct
  source 1..80: mol_type = other DNA
cggacgtcttcgtccttaacaacaccaggccaccgctgggcaactggttcggttgcacctggatgaactcatctggatat

SEQ ID NO: 118293 - DNA, 80 bp, synthetic construct
  source 1..80: mol_type = other DNA
gggtgcgcatggttcttatgacccatttcttcagcatacttcaggcacaagaacagctggagaaagcactcgattttgac

SEQ ID NO: 118294 - DNA, 80 bp, synthetic construct
  source 1..80: mol_type = other DNA
cacgtggacctattagtgggcgcggccacgatgtgctctgcgctctacgtaggtgatatgtgtggggccgtcttcctcgt

SEQ ID NO: 118295 - DNA, 80 bp, synthetic construct
  source 1..80: mol_type = other DNA
tgctcgtctgatcgtgtatccggacctatcagtccgggtttgcgaaaagagagcgcttcatgacgccgtcaagaacctat

SEQ ID NO: 118296 - DNA, 80 bp, synthetic construct
  source 1..80: mol_type = other DNA
taaataacacataaatttggctggttgtttgttgtctttaatggaccgcccgcagggggggtggcatttcagtgtcgggt

SEQ ID NO: 118297 - DNA, 80 bp, synthetic construct
  source 1..80: mol_type = other DNA
ccacgccgcctgcagtgccccagacctatcaggtagggtatctgcacgcaccaacaggcagcggaaagagcacccgtgtt

SEQ ID NO: 118298 - DNA, 80 bp, synthetic construct
  source 1..80: mol_type = other DNA
gtaaggcgtcttccgacgacgcggacgtcggcgatgaactgattgccatcgcggacgcacgcggggacccgccagagacc

SEQ ID NO: 118299 - DNA, 80 bp, synthetic construct
  source 1..80: mol_type = other DNA
tgaggaggaccatgaaaaggagcagtccatgcagactgcagcgggtgagggagtgaaggctgccaatgttggttttcagt

SEQ ID NO: 118300 - DNA, 80 bp, synthetic construct
  source 1..80: mol_type = other DNA
aggaccacctggaattttgggagggggtgtttaccggcctcacccacattgacgcccacttcttgtcacaatgcaaacag

SEQ ID NO: 118301 - DNA, 80 bp, synthetic construct
  source 1..80: mol_type = other DNA
atcgccgcctattgcttggcgactggctgtgtggtctgcatcggtcgtgtgaacatcaatcaaaagaccatagtcgcccc

SEQ ID NO: 118302 - DNA, 80 bp, synthetic construct
  source 1..80: mol_type = other DNA
gtatgcggcgacgacctggttgtcatctcagaaagccaggggactgaggaggatgagcggaacctgagagtcttcacgga

SEQ ID NO: 118303 - DNA, 80 bp, synthetic construct
  source 1..80: mol_type = other DNA
aaccagaagtggatgttggtatggcatggagatcaggccacagaagcatgatgaaagaactctcgttcagtcacaggtga

SEQ ID NO: 118304 - DNA, 80 bp, synthetic construct
  source 1..80: mol_type = other DNA
cactacagccggggttgcttttgtggtttttttggttgacaaatggagccaggacacccaactaagcaggggctacattc

SEQ ID NO: 118305 - DNA, 80 bp, synthetic construct
  source 1..80: mol_type = other DNA
ctgcagctcattgactggtgctgcgtgcgctacaattatcttcaccacagtcccgaatatagggacaagaacgtagccaa

SEQ ID NO: 118306 - DNA, 80 bp, synthetic construct
  source 1..80: mol_type = other DNA
gtatgaggggcggacagcatggttcgtcccatccatatcaaaaggtggagccattgcaagaaccctgcgccagagaggca

SEQ ID NO: 118307 - DNA, 80 bp, synthetic construct
  source 1..80: mol_type = other DNA
acacgtggggcgagaatgagtcggatgtgtttttgttggagagcctgcgaccgccggcgggtgcttggtatggatgcaca

SEQ ID NO: 118308 - DNA, 80 bp, synthetic construct
  source 1..80: mol_type = other DNA
acaaattagggatagctttagacgctccatttgatgttatagacaataagcttacactattagcaggccatggcttgtct

SEQ ID NO: 118309 - DNA, 80 bp, synthetic construct
  source 1..80: mol_type = other DNA
aaaagtggacactagggtgccagacccccaagaaggcactcgtcaggttatgagcatggtctcttcctggttgtggaaag

SEQ ID NO: 118310 - DNA, 80 bp, synthetic construct
  source 1..80: mol_type = other DNA
gtctggctcaaatccaaacttgtgccagcactgcctggagtacctttcctctcttgccagcggggcttccgtggcgtatg

SEQ ID NO: 118311 - DNA, 80 bp, synthetic construct
  source 1..80: mol_type = other DNA
agatttggggcgcagagacagaatctccgccgttagttctcccatgcgggcgtaggcgagggtcctctgggtcgcatcca

SEQ ID NO: 118312 - DNA, 80 bp, synthetic construct
  source 1..80: mol_type = other DNA
gtgcaagtgtggagccgtcgacctatatctggtcacgcggaacgctgatgtcatcccggctcggagacgcggggacaagc

SEQ ID NO: 118313 - DNA, 80 bp, synthetic construct
  source 1..80: mol_type = other DNA
ggtgatcgccgttgtgtggctgaccgtggaaagtgtggtgactagggtcgccgtggtggtggtgctcttgtgcctggctc

SEQ ID NO: 118314 - DNA, 80 bp, synthetic construct
  source 1..80: mol_type = other DNA
cgttatctgtgaaagcgcgggaacccaggaggacgcggcaagcctacgagtcttcacggaggctatgactaggtactctg

SEQ ID NO: 118315 - DNA, 80 bp, synthetic construct
  source 1..80: mol_type = other DNA
cgcttcgggggactatcggggtcgcgggcgtggtccgcgaggcgcttggcgccgggtgttgcggcgtccgccatttttac

SEQ ID NO: 118316 - DNA, 80 bp, synthetic construct
  source 1..80: mol_type = other DNA
agatgactgaatctctagatctagaattggatggaattaacaccgaacagcgcctactagaaaggcgcaaggcggcgtcc

SEQ ID NO: 118317 - DNA, 80 bp, synthetic construct
  source 1..80: mol_type = other DNA
actggcactccctcaacgggcttacgcactacaaccccaggaggcatccgcattaggcgctggcctcctcctagtgctac

SEQ ID NO: 118318 - DNA, 80 bp, synthetic construct
  source 1..80: mol_type = other DNA
aaaagccctacagttcataccagtggaaaccctcagcacacaggctaggtctccatctttctctgacaattcaactcctc

SEQ ID NO: 118319 - DNA, 80 bp, synthetic construct
  source 1..80: mol_type = other DNA
agttacaaactggtcaaactgacaaatggcagaaagatgatgatgtttcaacacaaaaccgaattgggaagggtagcgta

SEQ ID NO: 118320 - DNA, 80 bp, synthetic construct
  source 1..80: mol_type = other DNA
cgcgatcacgcccggggaaatgaacagcaatatgctccacaatagattctaatattgtgctgtcgacaaaggcctccagt

SEQ ID NO: 118321 - DNA, 80 bp, synthetic construct
  source 1..80: mol_type = other DNA
aggggcgacggggtgtgtaacaccacatgccgttgcggtgcgcaaattgcgggccacgttaagaacgggtccatgaagat

SEQ ID NO: 118322 - DNA, 80 bp, synthetic construct
  source 1..80: mol_type = other DNA
tcattacatggttactctccgggtgaactcaatagggttggagcatgcctcaggaaacttggggcccctcccttgcgagc

SEQ ID NO: 118323 - DNA, 80 bp, synthetic construct
  source 1..80: mol_type = other DNA
agccccttgaaggactgggctagcgacggcctccgtgatctcgctgttgctgtcgagccagtcatcttctcacccatgga

SEQ ID NO: 118324 - DNA, 80 bp, synthetic construct
  source 1..80: mol_type = other DNA
tgtaaataggtctgacatttaccagctgaccaacgactgccccaacagtagcatcgtgtacgaggcggagagcatgatcc

SEQ ID NO: 118325 - DNA, 80 bp, synthetic construct
  source 1..80: mol_type = other DNA
cgtgcaacttgtgcggatgatggaaggtgagggagttattggacctgaagacgttgaaaagctgggaaagggaaaagacg

SEQ ID NO: 118326 - DNA, 80 bp, synthetic construct
  source 1..80: mol_type = other DNA
tcacactctccccggcttataagaacttgattgctcgcgccttgtggtggctatgctatctattacccttacaggctgcc

SEQ ID NO: 118327 - DNA, 80 bp, synthetic construct
  source 1..80: mol_type = other DNA
gcacataatcaccatgttattcagcagcccataattcagggtgctccagccaaagctcatgttggggatgatggaaccca

SEQ ID NO: 118328 - DNA, 80 bp, synthetic construct
  source 1..80: mol_type = other DNA
caagcaacggtctgcgccagagctaaagctcccccgccgtcttgggacttgatgtggaagtgtctcatcaggcttaagcc

SEQ ID NO: 118329 - DNA, 80 bp, synthetic construct
  source 1..80: mol_type = other DNA
actagtacaaccatcctcttaaacatcatgggaggttggctcgcttcccaaatagcacctcccgcgggagccactggctt

SEQ ID NO: 118330 - DNA, 80 bp, synthetic construct
  source 1..80: mol_type = other DNA
gggaaaggactccagaaacttggatacatcctgcaagaaatctcccaaattccaggaggaaagatgtacgcagatgacac

SEQ ID NO: 118331 - DNA, 80 bp, synthetic construct
  source 1..80: mol_type = other DNA
aacaattcaaagataaggtcctcggtcttatccagactaccacaaaacaggcagaagatctcaagccagccgtccacgct

SEQ ID NO: 118332 - DNA, 80 bp, synthetic construct
  source 1..80: mol_type = other DNA
taacgaggaacgggcagggtgcggggcccgggccccgacttcccggttcggcggtaatgagatacgagccccgcgcgccc

SEQ ID NO: 118333 - DNA, 80 bp, synthetic construct
  source 1..80: mol_type = other DNA
cgggacccaggtatcccccctgccgggcctgcgggaccgcgctgtccaggcgaccgcgcaccgactggctacgggccgca

SEQ ID NO: 118334 - DNA, 80 bp, synthetic construct
  source 1..80: mol_type = other DNA
ttccaccctcgctgtcagcctcactggtcgcgacaagaatgaggccgttggagaggtgcaagtcctgtcaacagcaaccc

SEQ ID NO: 118335 - DNA, 80 bp, synthetic construct
  source 1..80: mol_type = other DNA
gagatcctgctgtctctccagcatcattccaggcacagaacgccagaaaatggaatggtgctgttgaatcaacaggttct

SEQ ID NO: 118336 - DNA, 80 bp, synthetic construct
  source 1..80: mol_type = other DNA
cccagaacgtatgcggtccagtttactgttttacccccagccccgtcgtggtgggaaccaccaatcgaaagggatctgca

SEQ ID NO: 118337 - DNA, 80 bp, synthetic construct
  source 1..80: mol_type = other DNA
gctgtccttatgtaccaagggaagaggctggaaccaagctgggccagtgtcaaaaaggacttgatctcatatggaggagg

SEQ ID NO: 118338 - DNA, 80 bp, synthetic construct
  source 1..80: mol_type = other DNA
gagaaaagtagaccggaacttccgctgagtgtgcaggggacaggctggatgtcaaaaggtcagattacggtgctggacat

SEQ ID NO: 118339 - DNA, 80 bp, synthetic construct
  source 1..80: mol_type = other DNA
cgcgaggaggtccgcgccgtgcatgggttccgggagcaggcgtggaagctgtttgggtcggtggtggctccgcgggcgtt

SEQ ID NO: 118340 - DNA, 80 bp, synthetic construct
  source 1..80: mol_type = other DNA
cgcggtttcccgcagccaacgtcgcggtcgtacgggccgaggtaggctcggcacgtaccgatatgtcacccccggcgaaa

SEQ ID NO: 118341 - DNA, 80 bp, synthetic construct
  source 1..80: mol_type = other DNA
gtatgctgctcaggggtacaaagtactggtattgaacccctcggtggctgccaccctggggtttggtgcctatatgtcaa

SEQ ID NO: 118342 - DNA, 80 bp, synthetic construct
  source 1..80: mol_type = other DNA
atcgctggtgcggctgttggcagcataggccttgggaaggcgcttgtggacattctggcgggctatggtgcaggagtggc

SEQ ID NO: 118343 - DNA, 80 bp, synthetic construct
  source 1..80: mol_type = other DNA
acagcctggccgtgccccccctcgttctgctgcaccggctctccttgtttcgccccacggacctccgggacttcgagctc

SEQ ID NO: 118344 - DNA, 80 bp, synthetic construct
  source 1..80: mol_type = other DNA
gcgctggggatgtggccgctcctactggtggtcctcatgctgcctcaaagggcttatgcgtgggacaatgaacagacagc

SEQ ID NO: 118345 - DNA, 80 bp, synthetic construct
  source 1..80: mol_type = other DNA
atctatgttggggaactgagtcatcaatggttccagacagggagcagtattggaagggtgttccaaacaaccaggaaagg

SEQ ID NO: 118346 - DNA, 80 bp, synthetic construct
  source 1..80: mol_type = other DNA
tttatgcaagtggaatatgacagcttacaagtgttatgataatggaagcattactattactgccactggtaaaattactt

SEQ ID NO: 118347 - DNA, 80 bp, synthetic construct
  source 1..80: mol_type = other DNA
tctcggcgggggccgtctggccggccgtcaggctggaggcgcagatagccgcaccctccgagagcgcgaccgtcagcgtt

SEQ ID NO: 118348 - DNA, 80 bp, synthetic construct
  source 1..80: mol_type = other DNA
cagtggacgccaccaccatcctcggcatcggaacggtcctcgaccaggctgagaccgcaggcgccaggctagtggtttta

SEQ ID NO: 118349 - DNA, 80 bp, synthetic construct
  source 1..80: mol_type = other DNA
acaacgaaaaacgcgccgacagcagctacgtgtgcaaacaaggctttactgatcgcggatgggggaatggatgtggactt

SEQ ID NO: 118350 - DNA, 80 bp, synthetic construct
  source 1..80: mol_type = other DNA
gtatgcgcgaccgacgctctcatgactgggtatactggtgacttcgataccgtcattgattgtaatgtggcagtgactca

SEQ ID NO: 118351 - DNA, 80 bp, synthetic construct
  source 1..80: mol_type = other DNA
tctgtagtatgttacgggtgtttacccaaaagtccctgttccccatcttcgtgaccgatcgcggggtcgagtgtaccgag

SEQ ID NO: 118352 - DNA, 80 bp, synthetic construct
  source 1..80: mol_type = other DNA
gtcccgcccttgcgagcttggagacaccgggcccggaatgtccgcgctaggctactctccagaggaggtagggctgccat

SEQ ID NO: 118353 - DNA, 80 bp, synthetic construct
  source 1..80: mol_type = other DNA
atagctattaatgccggacagggacttacatttaataatcaacaactacaggtaaaattgggagctggacttacttttga

SEQ ID NO: 118354 - DNA, 80 bp, synthetic construct
  source 1..80: mol_type = other DNA
gtgggcgtggtggctggtgctactacgctgctgcacagagagaagtgagtggcgtcaggggattcacccttggaaaggaa

SEQ ID NO: 118355 - DNA, 80 bp, synthetic construct
  source 1..80: mol_type = other DNA
ccacacaatgtggcatgtcaccaggggagctgtactcatgtatcaagggaagagactggaaccgagctgggccagtgtaa

SEQ ID NO: 118356 - DNA, 80 bp, synthetic construct
  source 1..80: mol_type = other DNA
attgtatgtcaacaggatgtgttgtcatctgcggcagaatcatcacctcagggaggcctgctgttgtgccggacagagaa

SEQ ID NO: 118357 - DNA, 80 bp, synthetic construct
  source 1..80: mol_type = other DNA
ccttttgggcgaaacacatgtggaacttcattagtgggatacaatacctagcaggactgtcaacactgcctggtaatcca

SEQ ID NO: 118358 - DNA, 80 bp, synthetic construct
  source 1..80: mol_type = other DNA
tgttgctaataggagtaagcatagctgcttttctcgtcaaccctaatgtcacaacagtacgagaggccggtgtgttggtg

SEQ ID NO: 118359 - DNA, 80 bp, synthetic construct
  source 1..80: mol_type = other DNA
tattataagcggtggttagcgtggggggtgtggtgggtacaatatttcatcgccagaactgaggccatcttacaagtgta

SEQ ID NO: 118360 - DNA, 80 bp, synthetic construct
  source 1..80: mol_type = other DNA
tatgccactgccggaaaagggcgacgagcgccggcgcggagaacttctcgccggcgcttacaaagtagtcgtaatcgcgg

SEQ ID NO: 118361 - DNA, 80 bp, synthetic construct
  source 1..80: mol_type = other DNA
accttgagctgggaccagagactgtggccttgatgctacttcaggccgtgtttgagctaagagttggacttcttagcgcc

SEQ ID NO: 118362 - DNA, 80 bp, synthetic construct
  source 1..80: mol_type = other DNA
gtaatgagattgacgcatttgaatatgatacagaaatttcctggccttgattattgtttacccggtgaagcttaaaacag

SEQ ID NO: 118363 - DNA, 80 bp, synthetic construct
  source 1..80: mol_type = other DNA
cgcgcacgacgcgcaggggaagaggtattactacctcacccgtgaccctgagatccccctggccagagctgcctgggaga

SEQ ID NO: 118364 - DNA, 80 bp, synthetic construct
  source 1..80: mol_type = other DNA
tccggcgctgcgcacgtcgttcggcgcggcgccgggcgcgccgagcggctcgctgggcggcttggcgtgagcggccccgc

SEQ ID NO: 118365 - DNA, 80 bp, synthetic construct
  source 1..80: mol_type = other DNA
acagcaccgcatgtagttgagggcatctaacgatacccaaaaaaaaaggtccgcgtatgtcctcaatgattgcgattact

SEQ ID NO: 118366 - DNA, 80 bp, synthetic construct
  source 1..80: mol_type = other DNA
gaagcacgcatctctttaccagtatgttcagtttagggtcccaacagcgcgtccagctcatccacaccaacggaagctgg

SEQ ID NO: 118367 - DNA, 80 bp, synthetic construct
  source 1..80: mol_type = other DNA
tgcagcccgctgagaccacggtcagactgagagcttacttgtccacaccggggttacctgtctgccaagaccacttagat

SEQ ID NO: 118368 - DNA, 80 bp, synthetic construct
  source 1..80: mol_type = other DNA
agtgtgggcctcgggaagatccttgtggacatcctcgcaggctatggcgcgggtgtagccggcgcccttgtggccttcaa

SEQ ID NO: 118369 - DNA, 80 bp, synthetic construct
  source 1..80: mol_type = other DNA
gggcccacacccctcctctacagactggggtctgtgcagaatgaagtgacactcacccatcctatcaccaaatacatcat

SEQ ID NO: 118370 - DNA, 80 bp, synthetic construct
  source 1..80: mol_type = other DNA
gacgttgttcaccaccgtatgcagggcctcgcggttggtgatgatggtctccagccgccccatggccgtggggaccgcct

SEQ ID NO: 118371 - DNA, 80 bp, synthetic construct
  source 1..80: mol_type = other DNA
ccaacaacgagaagtcctcgccgctgcactcggcatcatgacaaaattcaccgctgagccacaattggcctctgttgtgg

SEQ ID NO: 118372 - DNA, 80 bp, synthetic construct
  source 1..80: mol_type = other DNA
accccagtggagaaatggagtgacgtcccatactcaggaaaacgagaggacatctggtgtggcagcctgattggcacaag

SEQ ID NO: 118373 - DNA, 80 bp, synthetic construct
  source 1..80: mol_type = other DNA
tccgcagtgagcacgcggaaacgtggttctttgacgagaaccacccatataggacatgggcttaccatggaagctatgag

SEQ ID NO: 118374 - DNA, 80 bp, synthetic construct
  source 1..80: mol_type = other DNA
cttttacggcaaggcgatccctctggagctgatcaaggggggcagacatctcatcttctgccattcaaagaaaaagtgcg

SEQ ID NO: 118375 - DNA, 80 bp, synthetic construct
  source 1..80: mol_type = other DNA
cccagcctgcccgcggcggacgccgtgggcgtcgcaggtgtcggggtcgcggtggtcccggggctgccgatggtttgtcg

SEQ ID NO: 118376 - DNA, 80 bp, synthetic construct
  source 1..80: mol_type = other DNA
gtggagcgccgcatcgccgccgacgtacgcgagaccagcgcgctggagaagttcatcgcccacgatcgcagctgcctgcg

SEQ ID NO: 118377 - DNA, 80 bp, synthetic construct
  source 1..80: mol_type = other DNA
ctttgacatgttggtctgcggagacgatctagtagtcatctctgagagtttgggggtctcggaggacgccagtgccctgc

SEQ ID NO: 118378 - DNA, 80 bp, synthetic construct
  source 1..80: mol_type = other DNA
acttggagctaataacatcttgctcctcaaacgtgtcggtggctttggactcacggggtcgccgccggtactacctgacc

SEQ ID NO: 118379 - DNA, 80 bp, synthetic construct
  source 1..80: mol_type = other DNA
gcgtttccatcattggccgcctgtgtatcaaccataggacggtgattgctcccgacaaggaagtcctttatgaggcattt

SEQ ID NO: 118380 - DNA, 80 bp, synthetic construct
  source 1..80: mol_type = other DNA
tgcccacggcgtcgccctgaacacggactattacttctcccacctgttgggggcggcgtgcgtgacattcaaggccctgt

SEQ ID NO: 118381 - DNA, 80 bp, synthetic construct
  source 1..80: mol_type = other DNA
gcagggaaaaattttagcccaattacaagccattaaacaagcgcgcgaagaattcttactcacaaaaggacgcggagtgt

SEQ ID NO: 118382 - DNA, 80 bp, synthetic construct
  source 1..80: mol_type = other DNA
atgatctgcactgggagctcaagctagagagctcaataatctaaactagcacaaccaaataatcagaagaaacccactac

SEQ ID NO: 118383 - DNA, 80 bp, synthetic construct
  source 1..80: mol_type = other DNA
gtaggaagacttttgattctgagtatgtcaagactagaaccaatgattgggatttcgtggtcacgacagacatttcagaa

SEQ ID NO: 118384 - DNA, 80 bp, synthetic construct
  source 1..80: mol_type = other DNA
caagaagcggcccattagctcctggaacgttttttgggatgaaaaagttagctgcaatccgcgcttttcttcgccaatcc

SEQ ID NO: 118385 - DNA, 80 bp, synthetic construct
  source 1..80: mol_type = other DNA
gacgatactaaatacaaagattatcagcaggttggaattatccaccagcataacaactcaggcttcgtaggctacctcgc

SEQ ID NO: 118386 - DNA, 80 bp, synthetic construct
  source 1..80: mol_type = other DNA
gagcccctaactgtggtgggggtcatgttagcaatggctagtgggctgctgcgtcattcttcccaggaggctctactggt

SEQ ID NO: 118387 - DNA, 80 bp, synthetic construct
  source 1..80: mol_type = other DNA
gctactcggaacaagtgaagggaccatggaaacacacgcccctccgagtcatcagagaggagtgtccaggaacgaccgtc

SEQ ID NO: 118388 - DNA, 80 bp, synthetic construct
  source 1..80: mol_type = other DNA
cggagacgacttagtagtcattgctgagagcgccggagttcaggaggatgcgtctaacctgcgagctttcacggaagcta

SEQ ID NO: 118389 - DNA, 80 bp, synthetic construct
  source 1..80: mol_type = other DNA
cggggatcagccccgcgcgcgcgcacgtggcggcggccaacctggtgacggcctacgagcagacggtgaagcaggagcgc

SEQ ID NO: 118390 - DNA, 80 bp, synthetic construct
  source 1..80: mol_type = other DNA
actccactgcgggactgggcccacacgggcctacgggaccttgcagtagcagttgagcctgtcgtcttctctgacatgga

SEQ ID NO: 118391 - DNA, 80 bp, synthetic construct
  source 1..80: mol_type = other DNA
ccggccctgtctactgggcttatacacctccaccaaaatatcgtggatgtccagtacctttacggtatagggtctagcat

SEQ ID NO: 118392 - DNA, 80 bp, synthetic construct
  source 1..80: mol_type = other DNA
ttcaccttcacgtcccggcggcattggacggtgcaggactgtaattgttccatttactctggccacataacgggccaccg

SEQ ID NO: 118393 - DNA, 80 bp, synthetic construct
  source 1..80: mol_type = other DNA
accgtctcattgctttcgcctcgcgaggcaatcacgtgtcccccacgcactacgtccctgagaccgatgctgcggcccgc

SEQ ID NO: 118394 - DNA, 80 bp, synthetic construct
  source 1..80: mol_type = other DNA
caccttcgatagactgcaggttttggacctgtattatgacaaggtgcttcaggatctcaaggcgagggcctccactgttg

SEQ ID NO: 118395 - DNA, 80 bp, synthetic construct
  source 1..80: mol_type = other DNA
gctggagaggacgcaaaagtcagaccagaaatgccacctgaaagcatgctaaaggtgctgtctgtacatgccccaggagg

SEQ ID NO: 118396 - DNA, 80 bp, synthetic construct
  source 1..80: mol_type = other DNA
ctgcaccatccctgaaagctacgtgcacgacgggtggtgtacatcccgacgctgagctgatcgaagcaaacctcttgtgg

SEQ ID NO: 118397 - DNA, 80 bp, synthetic construct
  source 1..80: mol_type = other DNA
aggaagaccagcctgtcgcctatggccaccagatccgcgcgcacgcgcgttgtctggggggcgctttcgagttcatccag

SEQ ID NO: 118398 - DNA, 80 bp, synthetic construct
  source 1..80: mol_type = other DNA
tcggccagccagctgtcggccccatctctcaaggcaacttgcactactaaccatgactcccctgacgccgagctcataga

SEQ ID NO: 118399 - DNA, 80 bp, synthetic construct
  source 1..80: mol_type = other DNA
aacaccagccttgttttgcatggtgtttattttcttaattttagtaatacttgtgtggagtcttggattaaggtttccgc

SEQ ID NO: 118400 - DNA, 80 bp, synthetic construct
  source 1..80: mol_type = other DNA
ggaccattgctctgccctctgggtcatgccgtaggtatattccgcgcagcggtgtgcactcgcggcgtggccaaggcggt

SEQ ID NO: 118401 - DNA, 80 bp, synthetic construct
  source 1..80: mol_type = other DNA
gcattgtcaacaggtctaatacacctccaccaaaatatcgtggatgtccaatacctttatggcgttggatctggcatggt

SEQ ID NO: 118402 - DNA, 80 bp, synthetic construct
  source 1..80: mol_type = other DNA
tgctgtgacacaagtggtggacttcagcttggatcccaccttcacaattgagacaaccacagttccccaggacgcagtgt

SEQ ID NO: 118403 - DNA, 80 bp, synthetic construct
  source 1..80: mol_type = other DNA
tccgcgtccggggtgtacagcagccgcgtgatcagggcgtactgctgcgcggcgtcgcccagctcgggcgcccacacggc

SEQ ID NO: 118404 - DNA, 80 bp, synthetic construct
  source 1..80: mol_type = other DNA
cattagcggggatgattgcgtagtgaaaccaatcgatgacaggttcgctaatgccctgcttgctctgaacgatatgggaa

SEQ ID NO: 118405 - DNA, 80 bp, synthetic construct
  source 1..80: mol_type = other DNA
gcctccaacacagccgccgctcccgccccccactagcgcccctgcagccgttgctctctccggagccggcggtggcaacc

SEQ ID NO: 118406 - DNA, 80 bp, synthetic construct
  source 1..80: mol_type = other DNA
agcagacaaagtggctgcggtcaattattccatgttaagtttgggaaagttctatgctcgtaagatatacaaaagtccat

SEQ ID NO: 118407 - DNA, 80 bp, synthetic construct
  source 1..80: mol_type = other DNA
cgggatccgctcatggaccctgctttgcactcctgacgtaacctgcggctcggagcaggtctactggtcgttgcccgaca

SEQ ID NO: 118408 - DNA, 80 bp, synthetic construct
  source 1..80: mol_type = other DNA
tgcagaccgacccggtcgagtatctgctcgagcagctgaataacctcaccgaaaccgtctcccccaacactgacgtccgt

SEQ ID NO: 118409 - DNA, 80 bp, synthetic construct
  source 1..80: mol_type = other DNA
ggacaactacagaaacaaccacacatccaaccactactcacactacagtgcaaaatactactttattgattgggttttta

SEQ ID NO: 118410 - DNA, 80 bp, synthetic construct
  source 1..80: mol_type = other DNA
caaacctggagatgagtacatgtatggaggtgggtgtgcagagactgatgaagaccatgcacactggcttgaagcaagaa

SEQ ID NO: 118411 - DNA, 80 bp, synthetic construct
  source 1..80: mol_type = other DNA
cgtgacggtcgaggccgactccagggtgtccgtcggaagcggggggcgaatgcatgccgcctcgggacacatcagcagcg

SEQ ID NO: 118412 - DNA, 80 bp, synthetic construct
  source 1..80: mol_type = other DNA
cttgacttcatacccgttgagagcatgcagtctaccgctcgctctccgtccttttcagacaacacatctccccccgctgt

SEQ ID NO: 118413 - DNA, 80 bp, synthetic construct
  source 1..80: mol_type = other DNA
taagccaggttgaggctgcaatggaaaacctagtgcgtcttaacgcggcttctgccgcggcctcccagggctggtggtgg

SEQ ID NO: 118414 - DNA, 80 bp, synthetic construct
  source 1..80: mol_type = other DNA
tatgcggttctttttgtctgcgtggcgtggcacatcaagggaagattgtcagctgccttcacttacgcctcatgtggtat

SEQ ID NO: 118415 - DNA, 80 bp, synthetic construct
  source 1..80: mol_type = other DNA
aatatcgaggaggttgctttgcctaccacaggtgagatccccttctacggtaaggctattcccctcgaaaccatcaaggg

SEQ ID NO: 118416 - DNA, 80 bp, synthetic construct
  source 1..80: mol_type = other DNA
gtgcgaccgtatacagaacattattttggtttttattcgctatcggacatggggggtggaaactgggtggcgtggcaggc

SEQ ID NO: 118417 - DNA, 80 bp, synthetic construct
  source 1..80: mol_type = other DNA
agcattgttttaggatagtagaagttaaggttttatttagttattttatttaattgaatttgatagtcaggccagggcaa

SEQ ID NO: 118418 - DNA, 80 bp, synthetic construct
  source 1..80: mol_type = other DNA
tggatgcgcgcttcctcctcgagcgttaccacctgtaccaccaccgaggcggaagagactcgtgcgtctcgacgagtcat

SEQ ID NO: 118419 - DNA, 80 bp, synthetic construct
  source 1..80: mol_type = other DNA
ttcaagcgcaaggtaaacagcaacgcagccttgggcgcaatgtttgaggagcagaaccagtggaagagcgcaagagaagc

SEQ ID NO: 118420 - DNA, 80 bp, synthetic construct
  source 1..80: mol_type = other DNA
tggccccgcgcacgtggtgccgcttgctgcaggtgtccggcggaacctggggcatgcacctgcgcaacaccatacgggag

SEQ ID NO: 118421 - DNA, 80 bp, synthetic construct
  source 1..80: mol_type = other DNA
ttcgcaggcgctgaaagaggtagttgagggtggtggcggtgtgttctgccacgaagaagtacataacccagcgtcgcaac

SEQ ID NO: 118422 - DNA, 80 bp, synthetic construct
  source 1..80: mol_type = other DNA
cccgatgcatgcgcatgacccgcttgctcatcgcccggctttttacccgagatggactgagtttgtctgtctcgatggac

SEQ ID NO: 118423 - DNA, 80 bp, synthetic construct
  source 1..80: mol_type = other DNA
gctcagcaggaagacttttgagacagagtttcagaagacaaaaaatcaagagtgggactttgtcataacaactgacattt

SEQ ID NO: 118424 - DNA, 80 bp, synthetic construct
  source 1..80: mol_type = other DNA
ttatccccataatcgccgcggccattggcacgatcccgggcatagcttccgttgcgctgcaagcgtcgcagcgccgttaa

SEQ ID NO: 118425 - DNA, 80 bp, synthetic construct
  source 1..80: mol_type = other DNA
ttttggactctttcgatccgcttgtggcggaggaggacgagcgggagatctccgtccccgcagaaatcctgcggaagtct

SEQ ID NO: 118426 - DNA, 80 bp, synthetic construct
  source 1..80: mol_type = other DNA
aactcgctggaagttgaagactatggttttggagttttttccaccaatatatggctaaaactgagagaaaaacaggatgt

SEQ ID NO: 118427 - DNA, 80 bp, synthetic construct
  source 1..80: mol_type = other DNA
aatatttcatcgcacgggttgaagcagttgtccatgtgtgggtaccatccttacaggtccggggtggccgcgatgctgtt

SEQ ID NO: 118428 - DNA, 80 bp, synthetic construct
  source 1..80: mol_type = other DNA
atggtatctagactgctactgaacaggttcacgatgacacacagaagacccaccattgagaaagatgtggatttaggagc

SEQ ID NO: 118429 - DNA, 80 bp, synthetic construct
  source 1..80: mol_type = other DNA
gccgtttatgtcctgcgtcggttctgacccaacatctcagctgtacagtaatgtggggggggtactatccgtaataacgg

SEQ ID NO: 118430 - DNA, 80 bp, synthetic construct
  source 1..80: mol_type = other DNA
ctggactcccagtttgccaggatcacctggagttctgggagggtgtcttcactggattgactcacattgatgcccatttc

SEQ ID NO: 118431 - DNA, 80 bp, synthetic construct
  source 1..80: mol_type = other DNA
tcgccggagcgcattggggtgtgatgtttggcttggcttacttcgccatgcaaggagcgtgggcgaaggtcatcgccatc

SEQ ID NO: 118432 - DNA, 80 bp, synthetic construct
  source 1..80: mol_type = other DNA
caatgggatgctcaagaaaataatgctggagatgctaagactcatacatatggtgtagcttccatgcctggaattgatat

SEQ ID NO: 118433 - DNA, 80 bp, synthetic construct
  source 1..80: mol_type = other DNA
ttgccagaggcgcgccggctggatctatccggctggttcaccgttggcgccggcgggggcgacatatatcacagcgtgtc

SEQ ID NO: 118434 - DNA, 80 bp, synthetic construct
  source 1..80: mol_type = other DNA
agtcacggagagggacatcaggaccgaggagtccatctacttgtcctgctcgctgcccgaggaggctcggactgcgatac

SEQ ID NO: 118435 - DNA, 80 bp, synthetic construct
  source 1..80: mol_type = other DNA
agtttaccctgcccgagggcaatttttccgagaccatgaccatagacctgatgaacaacgccatcttggaaaactacttg

SEQ ID NO: 118436 - DNA, 80 bp, synthetic construct
  source 1..80: mol_type = other DNA
gcgccacctggggcccgttcactcactccatgcacttgtggctcaagtgacctatatcttgtgacaaggaatgctgacgt

SEQ ID NO: 118437 - DNA, 80 bp, synthetic construct
  source 1..80: mol_type = other DNA
gtgtgctgacaaaggcagacctcgagaaccctcatctgctagagaagaaaatcacacaatggttggaaaccaaaggagtg

SEQ ID NO: 118438 - DNA, 80 bp, synthetic construct
  source 1..80: mol_type = other DNA
cggtgccggaaacaaaacgctggctggttcccgtggcccggtcacgcagatgtactccagcgccgagggagacctcgtgg

SEQ ID NO: 118439 - DNA, 80 bp, synthetic construct
  source 1..80: mol_type = other DNA
tggacggcacgtcgctcgaaaacacgctcggggcgccctccgtcggcccggcggcgatttgctgctgtgtgttgtccgta

SEQ ID NO: 118440 - DNA, 80 bp, synthetic construct
  source 1..80: mol_type = other DNA
ggcgaggcaggactggtaggggcaggccaggcatctacaggtttgtgactccagtggagcggccttcgggcatgttcgac

SEQ ID NO: 118441 - DNA, 80 bp, synthetic construct
  source 1..80: mol_type = other DNA
ttcatggaccggcgcccttgtgacgccctgcgttgcagaggagagcaagctgcccatcaacgcgctgagcaactcgttgc

SEQ ID NO: 118442 - DNA, 80 bp, synthetic construct
  source 1..80: mol_type = other DNA
taacggctcttccaacagccaatcagcggcggcaccgccccaaattcaaaagctcatttgcatattaacttttgtttact

SEQ ID NO: 118443 - DNA, 80 bp, synthetic construct
  source 1..80: mol_type = other DNA
ggttattgtggggatagtcatggtctgctcctgcactttctttgccatcatgatctacccctgttttgatctcggctgga

SEQ ID NO: 118444 - DNA, 80 bp, synthetic construct
  source 1..80: mol_type = other DNA
cactagaccgcagacgtcgcccaaccgaggtccccgtgcacagaccgcgccttttatagccccaggggttgctaattaac

SEQ ID NO: 118445 - DNA, 80 bp, synthetic construct
  source 1..80: mol_type = other DNA
gcatagtcgtcccgtgcagagggcaggatgagctgattggcagggcgcgcatctccccaggagctggatggaatgtgaag

SEQ ID NO: 118446 - DNA, 80 bp, synthetic construct
  source 1..80: mol_type = other DNA
tcagtcacaaagcggtcctgtcggacgacggtgaacccaaacccgggatggaggcccgtcttgagctgatgatgcaaggc

SEQ ID NO: 118447 - DNA, 80 bp, synthetic construct
  source 1..80: mol_type = other DNA
caaacagtataagttgtggcccccacaaaagtgtgtggagaacactggcactttttgctttactgctctcctgattacag

SEQ ID NO: 118448 - DNA, 80 bp, synthetic construct
  source 1..80: mol_type = other DNA
gaaatacctgaaatagaagatgatatcttcagaaagagaagactcacaataatggatttacatccaggggccggaaaaac

SEQ ID NO: 118449 - DNA, 80 bp, synthetic construct
  source 1..80: mol_type = other DNA
gcggcgttggagaaattggtggtgttgcactcggctagtgccgcaagtgccaacagtttcttctcctttgtcatcttttt

SEQ ID NO: 118450 - DNA, 80 bp, synthetic construct
  source 1..80: mol_type = other DNA
cccaggccaccttacaggacatcgaatggcttgggatatgatgatgaattggtcccccgctataggtatggtggtagcgc

SEQ ID NO: 118451 - DNA, 80 bp, synthetic construct
  source 1..80: mol_type = other DNA
gattgtgtctaccgcaacccagacgttcttggctacttgtgttaatggagtttgctggactgtgtatcatggggccggat

SEQ ID NO: 118452 - DNA, 80 bp, synthetic construct
  source 1..80: mol_type = other DNA
gatagggaggtactgtatcagcagtacgatgagatggaagagtgctctcggcacctcccctacttggtggaagggcagca

SEQ ID NO: 118453 - DNA, 80 bp, synthetic construct
  source 1..80: mol_type = other DNA
tgcgtagcacgacagaaagcgggaaggccataccagaatggtgctgccgcacatgtgagctgcctccggtcacattccgt

SEQ ID NO: 118454 - DNA, 80 bp, synthetic construct
  source 1..80: mol_type = other DNA
catgtcctacaattggacaggggcactcgtgactccatgtacagctgaggaggacaaactacccataaaccctctgagca

SEQ ID NO: 118455 - DNA, 80 bp, synthetic construct
  source 1..80: mol_type = other DNA
acagccatactggcacaaggtggagacgttctggagtaagcatatgtggaacttcatcagcgggatccaatatctcgcag

SEQ ID NO: 118456 - DNA, 80 bp, synthetic construct
  source 1..80: mol_type = other DNA
aatctaaagttgtaaaaataccatatggcagtacctatgttttagttggaccaagagatccaccagttcaatggtttggg

SEQ ID NO: 118457 - DNA, 80 bp, synthetic construct
  source 1..80: mol_type = other DNA
gctagtgtgaaaaaagatctgatttcatatggaggaggatggagactgagcgcacaatggcaaaagggggaggaggtgca

SEQ ID NO: 118458 - DNA, 80 bp, synthetic construct
  source 1..80: mol_type = other DNA
ctctcgatggtgaactccagggcactacaccactggtcgccaccaacatttgtgcttttcggggtagcattgcaggacat

SEQ ID NO: 118459 - DNA, 80 bp, synthetic construct
  source 1..80: mol_type = other DNA
cgtccaaggctgtgatgaccatactcagctccttgaccataactagcctcctccgcaaaatccacgagtggataaacggg

SEQ ID NO: 118460 - DNA, 80 bp, synthetic construct
  source 1..80: mol_type = other DNA
gatgcaacatccatcttgggtatcggcactgtccttgaccaggcagagactgcgggggcgagaatggttgtgctcgccac

SEQ ID NO: 118461 - DNA, 80 bp, synthetic construct
  source 1..80: mol_type = other DNA
gtggatgacgtgcagatgattgtcgttgaaccagggaaggcagccgtgaacgtccaaacaaaaccaggagtgttccggac

SEQ ID NO: 118462 - DNA, 80 bp, synthetic construct
  source 1..80: mol_type = other DNA
atgttcgtttcgtccaattttccgcgtccacaaaaatacgttgtaaatattacacttgtcgcaaaatgtccaagatataa

SEQ ID NO: 118463 - DNA, 80 bp, synthetic construct
  source 1..80: mol_type = other DNA
cgatccgcgtctgtggtgtttttggcatcatgtcgcagggcgccatgcgtgccgttgttcccattatcccattccttttg

SEQ ID NO: 118464 - DNA, 80 bp, synthetic construct
  source 1..80: mol_type = other DNA
caccatccagggtattgcaaaccttttcacattagggcccagtcagaagcttcggcttgtgaacactaatggtagctggc

SEQ ID NO: 118465 - DNA, 80 bp, synthetic construct
  source 1..80: mol_type = other DNA
tgcaacagggaacttacctggttgctctttctctatctttttgctggcccttctgtcctgcttgacggtaccaacttcag

SEQ ID NO: 118466 - DNA, 80 bp, synthetic construct
  source 1..80: mol_type = other DNA
agcggccggttccgggtgagggccggggaaggtggcgcgcgaggctgccctgccgcccgcccgcggcccgcgagctggtg

SEQ ID NO: 118467 - DNA, 80 bp, synthetic construct
  source 1..80: mol_type = other DNA
cggtgagttgttatgccccaccgactgcttccgcaaacatccggaggctacctacctacggtgcgggtcaggcccctggc

SEQ ID NO: 118468 - DNA, 80 bp, synthetic construct
  source 1..80: mol_type = other DNA
cacatcgtgatcgccacgctgatgcaccacggggtgctcccggcggccccgggagacgtcccccgggacgcgagtaccca

SEQ ID NO: 118469 - DNA, 80 bp, synthetic construct
  source 1..80: mol_type = other DNA
tgcacgtctatgttccatccctagacgttaggggcgggcgggacgccttgatcattcttactgctatcttccatccgaag

SEQ ID NO: 118470 - DNA, 80 bp, synthetic construct
  source 1..80: mol_type = other DNA
agaccaatgttcgctgttgggctattattccgcagattaacatccagagaagttcttctcctcacgattggattgagcct

SEQ ID NO: 118471 - DNA, 80 bp, synthetic construct
  source 1..80: mol_type = other DNA
cctgctcatatggtggttgcagtatttcatcacaatgaccgaggcgtgcttgcaggtgtgggtcccccccctcaatgtcc

SEQ ID NO: 118472 - DNA, 80 bp, synthetic construct
  source 1..80: mol_type = other DNA
gttttgtcacgggaaaggaaagaggaaacaggccgcggacacccgggggagtttatgtgttcccttttctttcttcccac

SEQ ID NO: 118473 - DNA, 80 bp, synthetic construct
  source 1..80: mol_type = other DNA
acataggtacacagggtgtgctccagggacaggagcgagatcgagtggcgtctaagcagcgcgcccgcctcacggacaaa

SEQ ID NO: 118474 - DNA, 80 bp, synthetic construct
  source 1..80: mol_type = other DNA
atgacacagaatatccaaaatgcaaaaatggagattgggactttgtcatcaccactgacatctctgagatgggggccaat

SEQ ID NO: 118475 - DNA, 80 bp, synthetic construct
  source 1..80: mol_type = other DNA
gcataaactgctccggggtcatctggccttccgcgacccatcggacccgcccgtgggccaggcgctgcccccaggcgttc

SEQ ID NO: 118476 - DNA, 80 bp, synthetic construct
  source 1..80: mol_type = other DNA
tggcggaagccctgattcaagactgggtaccgccgatgcaagtgcggggcggtcgcgacggtgtcatatgggctatgacc

SEQ ID NO: 118477 - DNA, 80 bp, synthetic construct
  source 1..80: mol_type = other DNA
ccatatgggcgagacccgactataacccacctttactggagacttggaaagcccctgattacagtcccccgacggtgtcg

SEQ ID NO: 118478 - DNA, 80 bp, synthetic construct
  source 1..80: mol_type = other DNA
acccccctggcccgcgcggcttgggagacagcccgtcacactccagtcaactcctggttgggtaacatcatcatgtacgc

SEQ ID NO: 118479 - DNA, 80 bp, synthetic construct
  source 1..80: mol_type = other DNA
gccagccccttacggggcgacactccgccatgaatcactcccctgcgaggaaccactgtcctcacgcagaaagcgtctag

SEQ ID NO: 118480 - DNA, 80 bp, synthetic construct
  source 1..80: mol_type = other DNA
aacaaagtggtgattctggactccttcgatccgctcgtggcggaggaggatgaacgggaagtctctgtgcccgcggagat

SEQ ID NO: 118481 - DNA, 80 bp, synthetic construct
  source 1..80: mol_type = other DNA
ccatgccccccctcgagggggagcctggagatcccgatctcagcgacggatcctgggagaccacgagttcccttgatgac

SEQ ID NO: 118482 - DNA, 80 bp, synthetic construct
  source 1..80: mol_type = other DNA
accggctgcatttccatcattggccgcatacacctgaatgatcaggtggttgtggctcccgacaaagaaatcctgtatga

SEQ ID NO: 118483 - DNA, 80 bp, synthetic construct
  source 1..80: mol_type = other DNA
agtgaaaacaaagctcaaactcactcctctgcgtggcgcgggtgacctagatttatctgggtggttcgtgctaggcggca

SEQ ID NO: 118484 - DNA, 80 bp, synthetic construct
  source 1..80: mol_type = other DNA
catgccagcgctgcccagaggaggtggcgcataggcaggaatcccaacaaacctggagatgagtatctgtatggaggtgg

SEQ ID NO: 118485 - DNA, 80 bp, synthetic construct
  source 1..80: mol_type = other DNA
tcaagtcatttttcattcagtagtatagccccaccaccacatagcttatacagatcaccgtaccttaatcaaactcacag

SEQ ID NO: 118486 - DNA, 80 bp, synthetic construct
  source 1..80: mol_type = other DNA
gagctaagtacatccaggtgctattgctcactgtgggtcggtggaccggcacttacatctatgaccacctctccccttta

SEQ ID NO: 118487 - DNA, 80 bp, synthetic construct
  source 1..80: mol_type = other DNA
ggccttatctacgggactgatccacctgcaccaaaacatcgttgacgcccagtacctttatggtctttctcccgctataa

SEQ ID NO: 118488 - DNA, 80 bp, synthetic construct
  source 1..80: mol_type = other DNA
ggaggtgatcgacaagattaacgccaagggggtctgccgctccacggccaagtacgtgcggaacaacatggagaccaccg

SEQ ID NO: 118489 - DNA, 80 bp, synthetic construct
  source 1..80: mol_type = other DNA
cggtgtcatgaacggccggtgcccttgtggcgcacaactcaccggacatgtcaagaacgggactatgcggctggtcggtc

SEQ ID NO: 118490 - DNA, 80 bp, synthetic construct
  source 1..80: mol_type = other DNA
agcccctgggccgctcgttcctcacgggggggctggttttgctggcgccgccggtacgcggatttggcgcacccaacgca

SEQ ID NO: 118491 - DNA, 80 bp, synthetic construct
  source 1..80: mol_type = other DNA
cgcggaaacgtgtactgggtgcgcgactccatcacgggcgtgcgcgtgcccgtgcgcacccgtcctcctcgtccctgatc

SEQ ID NO: 118492 - DNA, 80 bp, synthetic construct
  source 1..80: mol_type = other DNA
ccgaggccgtactggcaggggaaagccggaggtgtatagatacgtctcacaaggagagcggccgtccggactattcgaca

SEQ ID NO: 118493 - DNA, 80 bp, synthetic construct
  source 1..80: mol_type = other DNA
gtcttctccctgtgcttcggcaaggtagcattttaacatgagatcataagataaggcatccgtggcgtgacctttagccc

SEQ ID NO: 118494 - DNA, 80 bp, synthetic construct
  source 1..80: mol_type = other DNA
aaccgccacaccaccagggtccgtgacaaccccccatcccaacatagaggaagtcgccctgccgacaacgggagagatcc

SEQ ID NO: 118495 - DNA, 80 bp, synthetic construct
  source 1..80: mol_type = other DNA
caaatcatgagactacccagcgctctagttgacatgctcgtgggcggtcactggggcgtcctggccggcatagccttttt

SEQ ID NO: 118496 - DNA, 80 bp, synthetic construct
  source 1..80: mol_type = other DNA
ctatatgatcaccttgcaccaatgcagcactgggcagcagccggcctcaaagatctagcggtggccactgaacctgtaat

SEQ ID NO: 118497 - DNA, 80 bp, synthetic construct
  source 1..80: mol_type = other DNA
gatgcttctcttgctgggacaagctgaggcagcgctggagaagctagtcatcctgcatgcggccagtgccgcaagctctc

SEQ ID NO: 118498 - DNA, 80 bp, synthetic construct
  source 1..80: mol_type = other DNA
cggcgtggccgcacgggcagagggaagccgggggtgtataggtacgtttcgcagggtgaacgaccgtcaggcacatttga

SEQ ID NO: 118499 - DNA, 80 bp, synthetic construct
  source 1..80: mol_type = other DNA
gtcacagagcgggacattagaactgaggagtccatatatcagtcttgctccctcaccgaggaggttcgtgctgcaataca

SEQ ID NO: 118500 - DNA, 80 bp, synthetic construct
  source 1..80: mol_type = other DNA
ggcccaggcgagggggctgtacagtggatgaataggctgattgcgttcgcttcccggtgcaatcatgggtctccgacaca

SEQ ID NO: 118501 - DNA, 80 bp, synthetic construct
  source 1..80: mol_type = other DNA
aggctgggccagcgacggtttgcgagacctagccgttgctgtggaaccggtcgtgttctcccctatggagagaaaagtta

SEQ ID NO: 118502 - DNA, 80 bp, synthetic construct
  source 1..80: mol_type = other DNA
ggttgctggtatgggatggaaatcagacctgttaggcatgatgaaacaacactcgttagatcacaggttgacgctttcaa

SEQ ID NO: 118503 - DNA, 80 bp, synthetic construct
  source 1..80: mol_type = other DNA
aattcttcaccgaggttgatggcgtacgattacaccggtatgccccaccttgcaagcctcttctgcgggacgaaattaca

SEQ ID NO: 118504 - DNA, 80 bp, synthetic construct
  source 1..80: mol_type = other DNA
cggttcccgcggaaattctgcggaaatcgaaaaagtttcctgtggccttgcccgtatgggcgtcacccgactacaacccc

SEQ ID NO: 118505 - DNA, 80 bp, synthetic construct
  source 1..80: mol_type = other DNA
gaaggaccttagtggtcccatgccgtgggcaggacgaactggtgggccgcgcccgaatctctcctggggcaggatggaac

SEQ ID NO: 118506 - DNA, 80 bp, synthetic construct
  source 1..80: mol_type = other DNA
ggggcccacccccctgttgtataggctggggccagtacagaatgagataatcaccactcacccgatcaccaaatacatca

SEQ ID NO: 118507 - DNA, 80 bp, synthetic construct
  source 1..80: mol_type = other DNA
ctcctccggatgtggcgctccaagaagacccctatggggttttcctatgacaccagctgctttgactccacggtcacgga

SEQ ID NO: 118508 - DNA, 80 bp, synthetic construct
  source 1..80: mol_type = other DNA
cggacgtagcagtgctcacttccatgctcaccgacccctcccacattacagcagaggcggctaagcgtaggttggccagg

SEQ ID NO: 118509 - DNA, 80 bp, synthetic construct
  source 1..80: mol_type = other DNA
ggcgcgacgcctactccggggatcacccccgtctgaggcaagctcctcagcgagccagctatcagcagcgtcgctgcggg

SEQ ID NO: 118510 - DNA, 80 bp, synthetic construct
  source 1..80: mol_type = other DNA
aacccgtcttccctcttgggcaggagtgcgtcagaatgtggtggggtccaacgttgatggtcgtcctgtcgcccctgcca

SEQ ID NO: 118511 - DNA, 80 bp, synthetic construct
  source 1..80: mol_type = other DNA
ggggtttagtgaggactcccttctcaaggaactcaactcacgagatgtactactcgacagctgtcacaggcaatatagtg

SEQ ID NO: 118512 - DNA, 80 bp, synthetic construct
  source 1..80: mol_type = other DNA
cggggctgacgaggcgccgcaagagcggcgtcgtcaggtggtggtcgtagcacgcgcggatgagcgcctcgatctgatcg

SEQ ID NO: 118513 - DNA, 80 bp, synthetic construct
  source 1..80: mol_type = other DNA
tgacatacggacacatgcaagataaggattataaaccaagacagataattatggttcgtaatcccaacccacatggacct

SEQ ID NO: 118514 - DNA, 80 bp, synthetic construct
  source 1..80: mol_type = other DNA
tagcatcagaagggatcaaatatacagatagaaaatggtgctttgatggacaacgtaataatcaaattttagaagagaac

SEQ ID NO: 118515 - DNA, 80 bp, synthetic construct
  source 1..80: mol_type = other DNA
tcataggccaggcggaggctgcattagagaatctcatcatcctcaacgctgcttccgccgctagcatacagggatggtgg

SEQ ID NO: 118516 - DNA, 80 bp, synthetic construct
  source 1..80: mol_type = other DNA
tcattttctctcccatggagaagaaaatcattacctggggtgcggataccgccgcgtgtggtgacatcttgagtggcctc

SEQ ID NO: 118517 - DNA, 80 bp, synthetic construct
  source 1..80: mol_type = other DNA
acatcgatgcccacttcctctcacaaactaagcaggggggggagaattttgcgtacctcgtggcataccaagccacggtg

SEQ ID NO: 118518 - DNA, 80 bp, synthetic construct
  source 1..80: mol_type = other DNA
ggagccgcccgccatatttggaggacgccgtgggacccccgactccggtgcgtctggagtgcgggagaagagggaagaag

SEQ ID NO: 118519 - DNA, 80 bp, synthetic construct
  source 1..80: mol_type = other DNA
aaggaaagaagaggggacaaccatgggattctcaatggatattgatctgcggccagcctccgcctgggctatttatgccg

SEQ ID NO: 118520 - DNA, 80 bp, synthetic construct
  source 1..80: mol_type = other DNA
gtcactttcgatgacgtgcgttgcagttggcatggtcacactgtacctaggagtcatggttcaagcggattcgggatgtg

SEQ ID NO: 118521 - DNA, 80 bp, synthetic construct
  source 1..80: mol_type = other DNA
aatactcaccatcgcagcgggtcgagttcctgctaaaagcatggaaatcaaagaagaaccccatggggttctcgtatgac

SEQ ID NO: 118522 - DNA, 80 bp, synthetic construct
  source 1..80: mol_type = other DNA
cgagttcctgcactgctactcaaccctgccagaaacctcttccttttggctgtactccattatttttctttcggttttct

SEQ ID NO: 118523 - DNA, 80 bp, synthetic construct
  source 1..80: mol_type = other DNA
ccggaaaagatcttgggacagactcagattcaggagttccctccgctagtgtggattcctcgggaccacttagcgacgat

SEQ ID NO: 118524 - DNA, 80 bp, synthetic construct
  source 1..80: mol_type = other DNA
cgtgcagcttgggaaactgctcgccacactccagttaattcctggttgggcaacatcattatgtacgcacccacgatatg

SEQ ID NO: 118525 - DNA, 80 bp, synthetic construct
  source 1..80: mol_type = other DNA
cgggtgctggaggacggcgtgaattacgcaacagggaaccttcccggttgctccttttctatcttcctccttgctctcct

SEQ ID NO: 118526 - DNA, 80 bp, synthetic construct
  source 1..80: mol_type = other DNA
ctaattacaacctatttgtgatggacgaggcccacttcaccgacccagccagcatcgcggctagaggatacatttccacg

SEQ ID NO: 118527 - DNA, 80 bp, synthetic construct
  source 1..80: mol_type = other DNA
tggcgccctcgtggccttcaagatcatgagcggcgagtgcccatctggcgaagacatggtcaacctccttccagctatcc

SEQ ID NO: 118528 - DNA, 80 bp, synthetic construct
  source 1..80: mol_type = other DNA
ccgagaaggtcctggccgaccttgcaaagaaggcatttacacccagctcacaaagttcacaggaagagtcgggcaaggga

SEQ ID NO: 118529 - DNA, 80 bp, synthetic construct
  source 1..80: mol_type = other DNA
ccctcctactgaatatcttaggggggtgggttgcttcgcaactagcaaaccccactgcttctactgcttttgtagtaagc

SEQ ID NO: 118530 - DNA, 80 bp, synthetic construct
  source 1..80: mol_type = other DNA
tccttaactcaaccaggcctccacagggctcgtggtttgggtgtacatggatgaacggcaccgggttcacaaagacttgc

SEQ ID NO: 118531 - DNA, 80 bp, synthetic construct
  source 1..80: mol_type = other DNA
ttctactgaagggaatggctattttaaagcacaatatggtttgcggggtgtctgatcagacaatgcgacggtttgtcacc

SEQ ID NO: 118532 - DNA, 80 bp, synthetic construct
  source 1..80: mol_type = other DNA
tgtatccatatgacacagaaaccgggcctccaactgtgccctttcttacccctccatttgtttcacccaatggtttccaa

SEQ ID NO: 118533 - DNA, 80 bp, synthetic construct
  source 1..80: mol_type = other DNA
gccccccttagcgactgggcttgcgacggcttgcgagatctagctgtcgctgttgagcccgtcgtcttctccccaatgga

SEQ ID NO: 118534 - DNA, 80 bp, synthetic construct
  source 1..80: mol_type = other DNA
cctcaacgctacctcggccgttagccatcatggatgggggtgggccctgtttttcatctgttgggcatggcatgtgcgtg

SEQ ID NO: 118535 - DNA, 80 bp, synthetic construct
  source 1..80: mol_type = other DNA
cagagaccgatgcatcacgggctgtgactaacatactcagttccctcaccattactagtcttctccgcaagcttcatcag

SEQ ID NO: 118536 - DNA, 80 bp, synthetic construct
  source 1..80: mol_type = other DNA
cgtcacaaaatacatcactgcatgcatgtcagctgatctggaggtcaccaccagcacctgggtgttggttggggtggtcc

SEQ ID NO: 118537 - DNA, 80 bp, synthetic construct
  source 1..80: mol_type = other DNA
ggtggatattcagatccccgtacgtaccactccagcagtggcaatggcagaagccatggaaacgcagacagatcagcctg

SEQ ID NO: 118538 - DNA, 80 bp, synthetic construct
  source 1..80: mol_type = other DNA
caaacatagcaaaagcattttcctcaaaatcttcaaacattaagctgcaatcttgaataattcccaaataattttccgct

SEQ ID NO: 118539 - DNA, 80 bp, synthetic construct
  source 1..80: mol_type = other DNA
agccccatggagaaaaaagtcatctgttggggggcggagacggcagcctgtggcgacatcatacacgggcttcccgtctc

SEQ ID NO: 118540 - DNA, 80 bp, synthetic construct
  source 1..80: mol_type = other DNA
ctaagacatgtggcgcgccaccgtgccgtattaggaaagacttcaatgccagtgaagaccttctatgtcccacagattgc

SEQ ID NO: 118541 - DNA, 80 bp, synthetic construct
  source 1..80: mol_type = other DNA
caggccgtgttccgaagtgcccgcgagcaaggtgtgcggtccggtatactgctttacaccgagccctgttgtcataggga

SEQ ID NO: 118542 - DNA, 80 bp, synthetic construct
  source 1..80: mol_type = other DNA
acaatcatggccaaaaatgaggttttcgttgtgaacgcagcgaagggaggtcggaagcctgcccgcctgatcgtgtatcc

SEQ ID NO: 118543 - DNA, 80 bp, synthetic construct
  source 1..80: mol_type = other DNA
tcagaagccctccagcaactggccatcaagacctttggccagacgcgtgtgagcaagggcgaggagctgttcaccggggt

SEQ ID NO: 118544 - DNA, 80 bp, synthetic construct
  source 1..80: mol_type = other DNA
cacaaacccggcccggggacaggccaggacgaacttgcgggtgcggtcaaaaataaggagcgggcacgcgtttttgccgc

SEQ ID NO: 118545 - DNA, 80 bp, synthetic construct
  source 1..80: mol_type = other DNA
gcctccgccccggaaaaagcggatggtggtccttaccgaatcaaccgtatctactgccttggccgagcttgccactaaga

SEQ ID NO: 118546 - DNA, 80 bp, synthetic construct
  source 1..80: mol_type = other DNA
agggagacaaaattgggaagtcgccataatggatgaggcccattggactgatccgcacagtatcgcggcaagagggcatc

SEQ ID NO: 118547 - DNA, 80 bp, synthetic construct
  source 1..80: mol_type = other DNA
acaggcattgatggaatcgtagtctcacgctgatagtctgatcgacaatacaagtgggaccgtggtcccagaccgataat

SEQ ID NO: 118548 - DNA, 80 bp, synthetic construct
  source 1..80: mol_type = other DNA
agactttgtgccagttgagtccctggaaacgtccatgaggtctcctgtgttttctgacaactccacaccccctgctgtgc

SEQ ID NO: 118549 - DNA, 80 bp, synthetic construct
  source 1..80: mol_type = other DNA
agccgagcgccccgcagaggagtggctggcgcgacccctgcccgagggactgcaggcgttcggggccgtcctcgtagacg

SEQ ID NO: 118550 - DNA, 80 bp, synthetic construct
  source 1..80: mol_type = other DNA
aagacgatccctcttgtcctccatggttgatattgccagcaggccacattgcgtttccccttagacttccccgagatgcg

SEQ ID NO: 118551 - DNA, 80 bp, synthetic construct
  source 1..80: mol_type = other DNA
atggatggaagacaaaactccagtagaatcatgggaggaaatcccatatttggggaagagagaagaccagtggtgcggct

SEQ ID NO: 118552 - DNA, 80 bp, synthetic construct
  source 1..80: mol_type = other DNA
cactgcatggccccacgcccctcctatataggattggggccgtccaaaatgagataactttgacacaccccatcactaaa

SEQ ID NO: 118553 - DNA, 80 bp, synthetic construct
  source 1..80: mol_type = other DNA
ctttgacatgttggtctgcggagacgatcttgtcgtcatttcggaaagtgtgggggtctcggaggatgccagtgcgctga

SEQ ID NO: 118554 - DNA, 80 bp, synthetic construct
  source 1..80: mol_type = other DNA
gccggcattattgacccggtgatgctcgtgtgcggcgacgacctagtagtcatctcagagagcaagggtgtggaggagga

SEQ ID NO: 118555 - DNA, 80 bp, synthetic construct
  source 1..80: mol_type = other DNA
ccaggggtacggtcctgtcacctacaattatactgctcccaacaccgatgaagaaccagaccgccggccctattgttggc

SEQ ID NO: 118556 - DNA, 80 bp, synthetic construct
  source 1..80: mol_type = other DNA
cggtctctgccttagaggtcaggaacaccagccagatttacatggtgactaatgattgttcaaacagcagcatcgtctgg

SEQ ID NO: 118557 - DNA, 80 bp, synthetic construct
  source 1..80: mol_type = other DNA
actttgcaaggcgctcaacgcctcgtgtcgctaggtgacaccgcgtgggactttggctctgtcggcggagtcttcaactc

SEQ ID NO: 118558 - DNA, 80 bp, synthetic construct
  source 1..80: mol_type = other DNA
aatggagaaaaaggtcatcacttggggcgctgacactgcagcttgtggagacattcttgagggccttccagtatcagcta

SEQ ID NO: 118559 - DNA, 80 bp, synthetic construct
  source 1..80: mol_type = other DNA
ctcagagacaggttccgcctcctctatgccccccctcgagggggagcctggagatccggacctggagtctgatcaggtag

SEQ ID NO: 118560 - DNA, 80 bp, synthetic construct
  source 1..80: mol_type = other DNA
gggagctgtccagtggatgaaccgcctgatagcttttgcgtcccgtggaaaccatgtttctcctacccactatgtaactg

SEQ ID NO: 118561 - DNA, 80 bp, synthetic construct
  source 1..80: mol_type = other DNA
tggcgccaagggactaactagtctttttagtctgggcgcccaacagaaactgcagttggtcaacaccaatggctcctggc

SEQ ID NO: 118562 - DNA, 80 bp, synthetic construct
  source 1..80: mol_type = other DNA
ttattaaaaagtttaactccgggggcgtcatggcctcccaggagatcgtttccgcgacggtgcgcctgcagaccgacccg

SEQ ID NO: 118563 - DNA, 80 bp, synthetic construct
  source 1..80: mol_type = other DNA
gcccatggagctgaagtacagctggaagacctggggcaaggccaagatcgtgaccgccgagacccagaacagcagcttca

SEQ ID NO: 118564 - DNA, 80 bp, synthetic construct
  source 1..80: mol_type = other DNA
ccccattaccgcctacgcgcagcaaactcgaggcttgtttagcaccatcgtgacgagcctcaccggcagggataccaatg

SEQ ID NO: 118565 - DNA, 80 bp, synthetic construct
  source 1..80: mol_type = other DNA
tgagagctacgtcagcagcatcgctcagggagaggcggagaagagtcgacccaaccttccacaggcagttgtgggcacgg

SEQ ID NO: 118566 - DNA, 80 bp, synthetic construct
  source 1..80: mol_type = other DNA
acaaaataggcagatcatgactgagtcctttgcaatcatgtgccgcctcacggcatcacctgaattggcctctgttgtag

SEQ ID NO: 118567 - DNA, 80 bp, synthetic construct
  source 1..80: mol_type = other DNA
ggggtgtgtctttgacagcagccacccagattacccccaacgggtaatcgtgaaggcgtggtggtacacgagcacgagcc

SEQ ID NO: 118568 - DNA, 80 bp, synthetic construct
  source 1..80: mol_type = other DNA
ggagtctgacgcctcgctgcgcgtgacgcaggtgttaagctcactcacaattaccagcttgcttaggagactacacgcct

SEQ ID NO: 118569 - DNA, 80 bp, synthetic construct
  source 1..80: mol_type = other DNA
gtaaatgcgtccagacaagttaccccgcgctcttttagagcctttgttaaagatatttgcggggagctaaatatttgttt

SEQ ID NO: 118570 - DNA, 80 bp, synthetic construct
  source 1..80: mol_type = other DNA
actggtgactttgactcggtcatagactgcaacacgtctgtcatacagactgttgatttcagtttagaccccaccttctc

SEQ ID NO: 118571 - DNA, 80 bp, synthetic construct
  source 1..80: mol_type = other DNA
tatgtagcacagggatacaacgtccttgtcctcaatccatctgtcgctgctaccctcgggttcggtgcctatatgtccca

SEQ ID NO: 118572 - DNA, 80 bp, synthetic construct
  source 1..80: mol_type = other DNA
atcctcgtcatgagtaaagaaattcccacgccttacatgtggagttaccagccccaaatgggattggcggcaggcgcctc

SEQ ID NO: 118573 - DNA, 80 bp, synthetic construct
  source 1..80: mol_type = other DNA
atggaagcttcatcatagatgggaagtccaggaaagagtgtccgttctcaaacagagtgtggaattccttccagatagaa

SEQ ID NO: 118574 - DNA, 80 bp, synthetic construct
  source 1..80: mol_type = other DNA
aggaaacaaaaatgatgacaaacttaccctgtggacaaccccagacccatctcctaactgcagaattcattcagataatg

SEQ ID NO: 118575 - DNA, 80 bp, synthetic construct
  source 1..80: mol_type = other DNA
ctatctgaaacacataggtctgcacctgcccgagcagggctaacaacttttgacgggccacggtgggctcggacaccggg

SEQ ID NO: 118576 - DNA, 80 bp, synthetic construct
  source 1..80: mol_type = other DNA
ggacgtcccagaattagagcgcaccacacccatcatgcagaagaaagttgggcaaatcatgctgatcttggtgtctctag

SEQ ID NO: 118577 - DNA, 80 bp, synthetic construct
  source 1..80: mol_type = other DNA
atgtcctatgcccgaccccgctatttcctcctgtgcctactcctgcttactgcaggggtaggcatcttcctgctgcctgc

SEQ ID NO: 118578 - DNA, 80 bp, synthetic construct
  source 1..80: mol_type = other DNA
cacagggcagatgttgagggaaaagcttgcagaccaaaacttccagcaaaaggtggtggacggcctggcctcgggcatta

SEQ ID NO: 118579 - DNA, 80 bp, synthetic construct
  source 1..80: mol_type = other DNA
aaaagagtgcccatggctctccaacattttggatgggaagtcatgaagtaaatgggacatggatgatccacaccttggag

SEQ ID NO: 118580 - DNA, 80 bp, synthetic construct
  source 1..80: mol_type = other DNA
tgccagtgtccgcggtggaagtcaggaatattagttctagctactatgccaccaatgattgctcgaacagcagcatcacc

SEQ ID NO: 118581 - DNA, 80 bp, synthetic construct
  source 1..80: mol_type = other DNA
tctggttcctaacggcctcccctgctctagatatcctctttatcatcagcaccaccatccacacggcggcgttcgtttgt

SEQ ID NO: 118582 - DNA, 80 bp, synthetic construct
  source 1..80: mol_type = other DNA
ggtagttgcggcagaactgttaccggttcacgctaaaagtttctacaacgatcaagccgtctactcgcagctcattcgcc

SEQ ID NO: 118583 - DNA, 80 bp, synthetic construct
  source 1..80: mol_type = other DNA
tacatgtgtttgctcagggttggggccctttgacatatgtatccaacaggagtttaactaagggcaggccctactgttgg

SEQ ID NO: 118584 - DNA, 80 bp, synthetic construct
  source 1..80: mol_type = other DNA
gagatggctggtcgagcggaggtttctcgaaccggtcggaaaagtgattgaccttggatgtggaagaggcggttggtgtt

SEQ ID NO: 118585 - DNA, 80 bp, synthetic construct
  source 1..80: mol_type = other DNA
taataagctaattgctagcggaagccctttagtgtaggtatttataaagcgattaagctgggtggggtgcatacgtggag

SEQ ID NO: 118586 - DNA, 80 bp, synthetic construct
  source 1..80: mol_type = other DNA
tagaatgctcaccacggacaggtttggacttcaatgaaatgatcttactaacaatgaagaacaaagcatggatggtacac

SEQ ID NO: 118587 - DNA, 80 bp, synthetic construct
  source 1..80: mol_type = other DNA
tcactggcctatggcccttctgcctactgctcatggcactgccccggcaggcttatgcctatgacgcacctgtgcacgga

SEQ ID NO: 118588 - DNA, 80 bp, synthetic construct
  source 1..80: mol_type = other DNA
acaaaccaacccctgttcctccccccaggaggaagcgggcagttgcgctctcggagtccaatatctcggtggcactggcg

SEQ ID NO: 118589 - DNA, 80 bp, synthetic construct
  source 1..80: mol_type = other DNA
ccggtcggcaccatggccgcggcataccggtatcccggagggtcgcggttgggagcggccatggggtcgcgtggagatcg

SEQ ID NO: 118590 - DNA, 80 bp, synthetic construct
  source 1..80: mol_type = other DNA
cctcccgcccctcccgcccctcgccacaaacgcgtgctgacagcgaagtggttaaatcgaccgtgatgctttattgtctg

SEQ ID NO: 118591 - DNA, 80 bp, synthetic construct
  source 1..80: mol_type = other DNA
gggatcagcagtttcggcagcagggtgtcggggaacgagtcggtccacagcttccgcgtcagttgcagggcgcccagcag

SEQ ID NO: 118592 - DNA, 80 bp, synthetic construct
  source 1..80: mol_type = other DNA
tggccgaagcttgaacagttttggcaaaagcagttgtggaatttcgtcagcggcatccaatacctagcaggcctgtcaac

SEQ ID NO: 118593 - DNA, 80 bp, synthetic construct
  source 1..80: mol_type = other DNA
agcaagacttgatagtcaggccagccggttaggctgccaccgaaggttggtagacggtgctgcctgcgaccaaccccagg

SEQ ID NO: 118594 - DNA, 80 bp, synthetic construct
  source 1..80: mol_type = other DNA
ggagctcgcaaggcgacaccacccgccgctttacgtccctcttttcacctgggccgtctcagaacatccagcttgtaaaa

SEQ ID NO: 118595 - DNA, 80 bp, synthetic construct
  source 1..80: mol_type = other DNA
aggatctcgtcaacctgctgcccgccatcctatcaccaggagccctggtggttggcgtcgtctgcgcagccatactgcgc

SEQ ID NO: 118596 - DNA, 80 bp, synthetic construct
  source 1..80: mol_type = other DNA
cccaactcttccatagtatacgaggcagataacttgattttacacgcgcccggttgcgtgccctgtgtcaagctgggcaa

SEQ ID NO: 118597 - DNA, 80 bp, synthetic construct
  source 1..80: mol_type = other DNA
agctgtttggttccgttttaataaaccgtttgtgtttaacccgaccgtggtgtatgtctggtgtgtggcgtccgatcccg

SEQ ID NO: 118598 - DNA, 80 bp, synthetic construct
  source 1..80: mol_type = other DNA
ccttgcgagcccgaaccggacgtagcagtactaacatccatgcttgccgacccctctcacatcactgctgagcaggcgcg

SEQ ID NO: 118599 - DNA, 80 bp, synthetic construct
  source 1..80: mol_type = other DNA
ttcagaaaccacagtaaggctgagggcctacttatctaccccaggattgcccgtctgccaggaccatctagatttttggg

SEQ ID NO: 118600 - DNA, 80 bp, synthetic construct
  source 1..80: mol_type = other DNA
caactaggttttaaaacgggtttattgctactcttaatgcggtttgcaaaacctctccgagagtggtccacttagccgga

SEQ ID NO: 118601 - DNA, 80 bp, synthetic construct
  source 1..80: mol_type = other DNA
tgggctaaggtcttggcagttttgctcctctttgcgggtgttgacgcgggtaatacttacgtcacgggtgcagcacacgc

SEQ ID NO: 118602 - DNA, 80 bp, synthetic construct
  source 1..80: mol_type = other DNA
gactgtccccgcttcggccgtcaatttccgtaacgcttctggggtttatcacctcactaacgattgtcccaactcatcaa

SEQ ID NO: 118603 - DNA, 80 bp, synthetic construct
  source 1..80: mol_type = other DNA
aaaattcctggctgatggggggtgttcggggggggcttatgacatcatcatatgtgacgagtgccattccacggattcta

SEQ ID NO: 118604 - DNA, 80 bp, synthetic construct
  source 1..80: mol_type = other DNA
actgcgcgttggcggttgcgtccatggcgatgatccgaggacatgtgcgcagcaggcgtagcattaacgcatccacgcgg

SEQ ID NO: 118605 - DNA, 80 bp, synthetic construct
  source 1..80: mol_type = other DNA
gtttcccgcagccaacgtcgtggccgtacgggccggggtagactcggcatataccgatatgtcaccccgggtgaaagacc

SEQ ID NO: 118606 - DNA, 80 bp, synthetic construct
  source 1..80: mol_type = other DNA
ccagaagaacatgagatcttgaatgacagtggtgagacagtaaagtgcagagcccctggaggagccaagaagcctctgcg

SEQ ID NO: 118607 - DNA, 80 bp, synthetic construct
  source 1..80: mol_type = other DNA
ctgagcaacctgggcgttaacgctgtggcttactaccggggtcttgacgtgtccgttatcccaacgtccggagatgtcgt

SEQ ID NO: 118608 - DNA, 80 bp, synthetic construct
  source 1..80: mol_type = other DNA
acggatgtacgtgggaggaattgaacataggtttgaagcagcatgcaatttcacccgtggggatccctgcaacttggaaa

SEQ ID NO: 118609 - DNA, 80 bp, synthetic construct
  source 1..80: mol_type = other DNA
aattttgtgcggtgcccctcgacggtggggagatagcccaggccgaagtcgcgcgcccaggccagcacccgcagggcaaa

SEQ ID NO: 118610 - DNA, 80 bp, synthetic construct
  source 1..80: mol_type = other DNA
atcccaatatacgatcaggggtcagaaccatcaccacaggcgcgcctatcacgtactccacatacgggaaattcctggct

SEQ ID NO: 118611 - DNA, 80 bp, synthetic construct
  source 1..80: mol_type = other DNA
gttcccactgtttctcctccccttacaaacagtaacaactccttgggtttagccacatccgctcctatagctgtgtcagc

SEQ ID NO: 118612 - DNA, 80 bp, synthetic construct
  source 1..80: mol_type = other DNA
tgccccactgactgcttcaggaaacatccagaaaccacctacatcaagtgtggttcagggccttggcttacgccacggtg

SEQ ID NO: 118613 - DNA, 80 bp, synthetic construct
  source 1..80: mol_type = other DNA
cgccgcttgatcattatcaccccgttgtgggggtccggagatcatgcgcgggtgtcctcgaggtgcgtgaacacctctgg

SEQ ID NO: 118614 - DNA, 80 bp, synthetic construct
  source 1..80: mol_type = other DNA
aggagcggtaatggacattatatccaggaaagaccaaagaggtagtggacaggttggaacatatggtttaaacacattca

SEQ ID NO: 118615 - DNA, 80 bp, synthetic construct
  source 1..80: mol_type = other DNA
atgcggtcttagagatcttattccctttaactaataaacaatacaataaatgtaattaataaagaatcacttacttaaaa

SEQ ID NO: 118616 - DNA, 80 bp, synthetic construct
  source 1..80: mol_type = other DNA
cgttacacaatctttccttggaacatcaatctctggggtcatgtggaccgtctttcacggcgccggaaacaaaacactgg

SEQ ID NO: 118617 - DNA, 80 bp, synthetic construct
  source 1..80: mol_type = other DNA
ccacgccgctcgagtgcgagagcagcttcgggtcgttattcagtcccgcaagccgcgcaagtattacacgcgatcttcgg

SEQ ID NO: 118618 - DNA, 80 bp, synthetic construct
  source 1..80: mol_type = other DNA
ttagttccagctgcagtgcgccgcgttgtacgaagggggcgcacactggttcttccgtccgtgcgttaccaccctagcat

SEQ ID NO: 118619 - DNA, 80 bp, synthetic construct
  source 1..80: mol_type = other DNA
gcggtcaaaaataaggagcgggcacgcgtttttgccgcccatcaggctggcccagttcccggcctgaaacacacggtcgt

SEQ ID NO: 118620 - DNA, 80 bp, synthetic construct
  source 1..80: mol_type = other DNA
tgagcggggaaacaccctcagtcgaggacctggtcaacttgctcccatccatcttgtctcccggagcgctagtagttggc

SEQ ID NO: 118621 - DNA, 80 bp, synthetic construct
  source 1..80: mol_type = other DNA
gctgagccaaatgatgacagggaagtctcggttgccgcggaaatcctgcgtccgaccaagaagttccctccagcactacc

SEQ ID NO: 118622 - DNA, 80 bp, synthetic construct
  source 1..80: mol_type = other DNA
ccggcgttctgttagatctggccgcaaagacctttggccagccagaggtgagctccgactccggtgctgggcttgccacc

SEQ ID NO: 118623 - DNA, 80 bp, synthetic construct
  source 1..80: mol_type = other DNA
gagaagacgggtgttggtatggcatggaaatcagaccagtaaaggagaaggaggagaatctagtcaggtcaatggtctct

SEQ ID NO: 118624 - DNA, 80 bp, synthetic construct
  source 1..80: mol_type = other DNA
ctacacacgtacgttccgcccttggaagtgcgtggtgggcgagactctataatcatccttgcagccatagtccacccctc

SEQ ID NO: 118625 - DNA, 80 bp, synthetic construct
  source 1..80: mol_type = other DNA
aaggacacaacacagcctaccactgcacccactacacatccaaccaccacagccagtacaactattgaaaccactactca

SEQ ID NO: 118626 - DNA, 80 bp, synthetic construct
  source 1..80: mol_type = other DNA
ctgcagtgctttgcgagtgctacgatgccgggtgcgcctggtacgagctgacacctgctgaaaccacaacaaggctgaaa

SEQ ID NO: 118627 - DNA, 80 bp, synthetic construct
  source 1..80: mol_type = other DNA
aactggttgctggtcattgctctgctggggatgacacttgcagcaacagtaaggaaagaaagggacggcaccactgtgat

SEQ ID NO: 118628 - DNA, 80 bp, synthetic construct
  source 1..80: mol_type = other DNA
gggccggggaggtggcgtaacctgatcgcgccccccgttgtctcttgcagcagactacgtaccgcccgccgcccgccgga

SEQ ID NO: 118629 - DNA, 80 bp, synthetic construct
  source 1..80: mol_type = other DNA
gacgctgagtcgtgctcatccatgccccccctagagggggagccgggtgatccagacttaagttgcgactcctggtctac

SEQ ID NO: 118630 - DNA, 80 bp, synthetic construct
  source 1..80: mol_type = other DNA
gcaggcggagcctatgacatcataatatgcgacgaatgccactccatagactcaacaaccatccttggcattgggactgt

SEQ ID NO: 118631 - DNA, 80 bp, synthetic construct
  source 1..80: mol_type = other DNA
cgagcctggagacatcgagccagagctgtcagagccaaactcattgcccaaggggggaaagcggccatatgcggtaagta

SEQ ID NO: 118632 - DNA, 80 bp, synthetic construct
  source 1..80: mol_type = other DNA
ttgccgaggaggagaaactgccaattagcccgttgagcaattcgcttatcaggcatcataatctggtttactccaccacc

SEQ ID NO: 118633 - DNA, 80 bp, synthetic construct
  source 1..80: mol_type = other DNA
tgacccatcatccgttttgcattggattcgtaaagatgtcacgtccgccgcggacatagaaacccaagcaaaggcgcttc

SEQ ID NO: 118634 - DNA, 80 bp, synthetic construct
  source 1..80: mol_type = other DNA
agggaatctccccggttgctccttttctatcttccttttggcacttctttcgtgcctcactactcctgcctcggcggcgc

SEQ ID NO: 118635 - DNA, 80 bp, synthetic construct
  source 1..80: mol_type = other DNA
ggggccaactcctctactgtataggatagggccagtacaaaatgaggtaattaccacccatccaatcaccaaatatatca

SEQ ID NO: 118636 - DNA, 80 bp, synthetic construct
  source 1..80: mol_type = other DNA
cctatgtgataaccctgaatgtttgtacactttaataaaaacactgtgcggtttaagaaatcttttaccaatgaattaaa

SEQ ID NO: 118637 - DNA, 80 bp, synthetic construct
  source 1..80: mol_type = other DNA
acctactaccactacccctaccaccctatggaccaccgcggacccgtctcctaacgccactttttatgaatcactagacg

SEQ ID NO: 118638 - DNA, 80 bp, synthetic construct
  source 1..80: mol_type = other DNA
atgatactgagagccataacctttacaacaacatcaaacgtggttgttccgctgctagctctgttaacacccggactgag

SEQ ID NO: 118639 - DNA, 80 bp, synthetic construct
  source 1..80: mol_type = other DNA
gatgacgtccagatgatagtggtggaaccaggaaagccagcaataaacgtgcagaccaagcccgggatttttaagacagc

SEQ ID NO: 118640 - DNA, 80 bp, synthetic construct
  source 1..80: mol_type = other DNA
ccgtgcgtgtccgccagcgcctgcaggcgacggagctcgaccacgtcaaactcggcactgctttccacgcggtccagcac

SEQ ID NO: 118641 - DNA, 80 bp, synthetic construct
  source 1..80: mol_type = other DNA
aggcaacccaggtgcaaattccccccagttttcccagtatgggccaggcctgataacaacccaccttttatacaagcatg

SEQ ID NO: 118642 - DNA, 80 bp, synthetic construct
  source 1..80: mol_type = other DNA
gggttacaaaggacacaaatgacaacaacctttacaaactacatggtggacatgtttcttgcagagtgaaattgtcagct

SEQ ID NO: 118643 - DNA, 80 bp, synthetic construct
  source 1..80: mol_type = other DNA
ttcctagtgagccttggaacacaggtcatgactggattttggcggacaaaaggcccacggcctggtttcttccatccatc

SEQ ID NO: 118644 - DNA, 80 bp, synthetic construct
  source 1..80: mol_type = other DNA
ggagggcccgttatgtgcccgtcagggcacgtcgtcgggctcttccgtgctgctgtgtgcacacggtgtgtggctaaagc

SEQ ID NO: 118645 - DNA, 80 bp, synthetic construct
  source 1..80: mol_type = other DNA
cgtgatggaaacagcggatttgccggcaacgctgcaggcgctccacgtccctccccgttacctggggcctacggaagggc

SEQ ID NO: 118646 - DNA, 80 bp, synthetic construct
  source 1..80: mol_type = other DNA
cacgctaaccagcagctccagcagcgtctgccccagggcgtagagatcgaccgccagcccgacgtcgtgcttcagggggc

SEQ ID NO: 118647 - DNA, 80 bp, synthetic construct
  source 1..80: mol_type = other DNA
ctacgccacgacatcccgcagcgcgggcctgcggcagaagaaggtcacctttgacagactgcaggtcctggatgaccatt

SEQ ID NO: 118648 - DNA, 80 bp, synthetic construct
  source 1..80: mol_type = other DNA
gtcctgaaacaactgaatgccctaatagcaatagggcctggaactctttggaagttgaggattatggttttgggattttt

SEQ ID NO: 118649 - DNA, 80 bp, synthetic construct
  source 1..80: mol_type = other DNA
cccaacaggcctacgcccttgagacagctgaacaagggcaaattggcctggtcctactgatggtcttgtccatcttcaca

SEQ ID NO: 118650 - DNA, 80 bp, synthetic construct
  source 1..80: mol_type = other DNA
gaacaattgcctctgaggcgctattaggacagcaagcagcgccaaacagagcaaattacattgcattcagagataatttt

SEQ ID NO: 118651 - DNA, 80 bp, synthetic construct
  source 1..80: mol_type = other DNA
aaggtggtcctgatgaccatctgtggcatgaacccaatagccataccctttgcagctggagcgtggtacgtatacgtgaa

SEQ ID NO: 118652 - DNA, 80 bp, synthetic construct
  source 1..80: mol_type = other DNA
tggcgcaacaaacacaaacacgcatgtaaagtctacacacatgcttttcccatttagacagtatcatgtcccaccacatt

SEQ ID NO: 118653 - DNA, 80 bp, synthetic construct
  source 1..80: mol_type = other DNA
gctttatggctccgaacaagctggcctgcgctattgtgaacacggccgggcgtgaaacagggggcgttcactggttggcc

SEQ ID NO: 118654 - DNA, 80 bp, synthetic construct
  source 1..80: mol_type = other DNA
gcttgctggcggctaaagggcaagttcgtccccctggtgacttacggagtgtgcggggtgtggcccttcttcctcgtgtt

SEQ ID NO: 118655 - DNA, 80 bp, synthetic construct
  source 1..80: mol_type = other DNA
ttgggccaaggtctttatcaccttgctgctgttttcaggggtggacgcgcacacgcataccatcgctggatcgaccgctc

SEQ ID NO: 118656 - DNA, 80 bp, synthetic construct
  source 1..80: mol_type = other DNA
gtgttcttattaacatctcagagaccccccaaaggtagatggttcgggtgcgtgtggatgaacagcacggggtttgtgaa

SEQ ID NO: 118657 - DNA, 80 bp, synthetic construct
  source 1..80: mol_type = other DNA
tcccttagatttaccggcaatcatccagcggttgcacggtatggctgctttttcactccacggatactctccaggcgaac

SEQ ID NO: 118658 - DNA, 80 bp, synthetic construct
  source 1..80: mol_type = other DNA
ggctagttgccgtccccttaaggactttgctcaaggttcgggaccaatcaccttcaacgcgtctgatcgtggacagaaca

SEQ ID NO: 118659 - DNA, 80 bp, synthetic construct
  source 1..80: mol_type = other DNA
gcgggtggggacttccactatgtgacgggtatgactgctgacaatcttaagtgcccatgccaggtcccgtcgcccgaatt

SEQ ID NO: 118660 - DNA, 80 bp, synthetic construct
  source 1..80: mol_type = other DNA
ggggagcgccgtagggcggccgcaaagaagaaaggtgcggtactgctagggttagcactaacatcaacagggcagttctc

SEQ ID NO: 118661 - DNA, 80 bp, synthetic construct
  source 1..80: mol_type = other DNA
ttgctctttataggacttgtggcatcaaatgaattgggactcttagaaagaacgaaagctgatcttggctttcaccatga

SEQ ID NO: 118662 - DNA, 80 bp, synthetic construct
  source 1..80: mol_type = other DNA
caacagtacggcgctgaactgcaacgactcgttgcagacgggcttcattgcaggattgatttactaccataagttcaatt

SEQ ID NO: 118663 - DNA, 80 bp, synthetic construct
  source 1..80: mol_type = other DNA
gttgcgggcggggaggttggtgctattatacagccaccctgaaaaaagtccaggaagtcaagggttacacaaaaggagtg

SEQ ID NO: 118664 - DNA, 80 bp, synthetic construct
  source 1..80: mol_type = other DNA
tatgggcacgcccggactacaaccctccattgatagagtcctggaaggacccggactacgtccctccagtggtgcacggg

SEQ ID NO: 118665 - DNA, 80 bp, synthetic construct
  source 1..80: mol_type = other DNA
ctggaagaaaatgtggaagttgaaatctggacaaaagaaggggaaaggaagaaattgaaacccagatggttggatgctag

SEQ ID NO: 118666 - DNA, 80 bp, synthetic construct
  source 1..80: mol_type = other DNA
ccgtggagctaccaaattctttggaggagctaggggatggacttgcaatgggtatcatgatgttaaaattgttgactgaa

SEQ ID NO: 118667 - DNA, 80 bp, synthetic construct
  source 1..80: mol_type = other DNA
ggtgacggcgggggagggaagaacaggaagaaccatgattaactttattccaaacggtctcggaacacttcaaaatgcag

SEQ ID NO: 118668 - DNA, 80 bp, synthetic construct
  source 1..80: mol_type = other DNA
gcgtcatagatggaaggacaaacatcaagcctgaggaggttgatgggaaggttgagttcactggcaccagacgagtgacc

SEQ ID NO: 118669 - DNA, 80 bp, synthetic construct
  source 1..80: mol_type = other DNA
ctgaaacagatgacagagagatatccgtggccgctgagtgccatagaccgcccagacccaagtttccaccagctttgccc

SEQ ID NO: 118670 - DNA, 80 bp, synthetic construct
  source 1..80: mol_type = other DNA
tgccccaaacgttctttgacctggtcgtgggggcccactggggcgtgatggcaggcctcgcctacttttccatgcaaggc

SEQ ID NO: 118671 - DNA, 80 bp, synthetic construct
  source 1..80: mol_type = other DNA
gtcgtggtatgcgcgacggacgccctcatgaccggttacactggagactttgactctgtcatcgactgcaatgttgccgt

SEQ ID NO: 118672 - DNA, 80 bp, synthetic construct
  source 1..80: mol_type = other DNA
gggtatgcgagaagcgggcactttacgacgtcacgcgcaagcttcctgtggcagtaatgggaccatcatacggtttccag

SEQ ID NO: 118673 - DNA, 80 bp, synthetic construct
  source 1..80: mol_type = other DNA
cagtgggatcggtgataattcccacatccaggtcttcggcattggccatgctaaagggggtcatcttgcatgtctgtctg

SEQ ID NO: 118674 - DNA, 80 bp, synthetic construct
  source 1..80: mol_type = other DNA
aaagtgtgatctgtctcaatagcaaaacctttgagaaggattacctgcgggtcagagaagagaagccagattttgtggta

SEQ ID NO: 118675 - DNA, 80 bp, synthetic construct
  source 1..80: mol_type = other DNA
caacagactcggggcatagtgggcaccatcgtcactagcctcaccggccgagacaagaatgaagtggaggtggagattca

SEQ ID NO: 118676 - DNA, 80 bp, synthetic construct
  source 1..80: mol_type = other DNA
ttggtggctctgctaccttttggttttggcggaggcacagatacaactatgggttccgccccttgaggccaggggtggac

SEQ ID NO: 118677 - DNA, 80 bp, synthetic construct
  source 1..80: mol_type = other DNA
tctcgccgatggacaccagatccgcgcgcacgcgcgtcgtctggggggcgctctcgagctcgtccagcgtctgccggttc

SEQ ID NO: 118678 - DNA, 80 bp, synthetic construct
  source 1..80: mol_type = other DNA
aggtaggataacacctaccgccgcggatgctggcgcgaacatagtcatataattcatgtgacggcgccaggatgttgggt

SEQ ID NO: 118679 - DNA, 80 bp, synthetic construct
  source 1..80: mol_type = other DNA
tttacggtatcgccgctcccgattcgcagcgcatcgccttctatcgccttcttgacgagttcttctgaggggatcggcaa

SEQ ID NO: 118680 - DNA, 80 bp, synthetic construct
  source 1..80: mol_type = other DNA
gtcttaagagtggggtggacgtctttcatatggcggctgagccgtgtgacacgttgctgtgtgacataggtgagtcatca

SEQ ID NO: 118681 - DNA, 80 bp, synthetic construct
  source 1..80: mol_type = other DNA
cccggttggttcaataaaaaacaccaacatacgatattcgcgtttgatacgtttattgggggggtgtagggcccaacgat

SEQ ID NO: 118682 - DNA, 80 bp, synthetic construct
  source 1..80: mol_type = other DNA
gtgctgggctttatgcgcgcaccccctcccctcgcgcggcccaccgcgcggatatacgcctggctcaaactggcggccgg

SEQ ID NO: 118683 - DNA, 80 bp, synthetic construct
  source 1..80: mol_type = other DNA
ctgatgtcattcacagcgtcgctgaccagtcctctgaggacttctcagaccctgctcctcaacatactcggcggctggat

SEQ ID NO: 118684 - DNA, 80 bp, synthetic construct
  source 1..80: mol_type = other DNA
gggctggggtggctggtgctttggtcgcgtttaagatcatgggaggtgaaatgcccagcacggaggacatggtgaatctt

SEQ ID NO: 118685 - DNA, 80 bp, synthetic construct
  source 1..80: mol_type = other DNA
ggtgccatgtgtgacctgccggcctacaagctcatgtgcttcgatatcgaatgcaaggccggggtggaggacgagctggc

SEQ ID NO: 118686 - DNA, 80 bp, synthetic construct
  source 1..80: mol_type = other DNA
ggtgcgccctgcccccaagtaagccgactcccgtccctccacctaggaggaagcgggtagtcgtgctggatgagtcaaac

SEQ ID NO: 118687 - DNA, 80 bp, synthetic construct
  source 1..80: mol_type = other DNA
cagtgtttggtgagatcaagacttgcacctggcccgaaacacacacgctatggggggacggagtcgaggagacagaactc

SEQ ID NO: 118688 - DNA, 80 bp, synthetic construct
  source 1..80: mol_type = other DNA
ccaatgagatatatcaaccagaacctcaagtgggagaggaaaactggcaggaaacatttgttttttatggcggtagagct

SEQ ID NO: 118689 - DNA, 80 bp, synthetic construct
  source 1..80: mol_type = other DNA
tcgctcgtcagggccggcgggcgctcctcgccgccctagaggctgtcccgctggtgtgacgttttcctcgtccgcgcccc

SEQ ID NO: 118690 - DNA, 80 bp, synthetic construct
  source 1..80: mol_type = other DNA
ctttagcctggacccaacttttaccatcaccacccaaaccgtccctcaggacgctgtctcccgtagtcaacgtagaggga

SEQ ID NO: 118691 - DNA, 80 bp, synthetic construct
  source 1..80: mol_type = other DNA
ttggtaaaaacagaatcatggatcttgaggaaccccggatatgccctggtggcagccgtcattggttggatgcttggaag

SEQ ID NO: 118692 - DNA, 80 bp, synthetic construct
  source 1..80: mol_type = other DNA
agtttggaaaagcgaaaggaagccgagccatatggttcatgtggctaggagcccgctttctggagttcgaggctctgggg

SEQ ID NO: 118693 - DNA, 80 bp, synthetic construct
  source 1..80: mol_type = other DNA
cagctatccaaaaagctcatgaagagggcatttgtggaatccgctcagtaacaagattggagaatctgatgtggaaacaa

SEQ ID NO: 118694 - DNA, 80 bp, synthetic construct
  source 1..80: mol_type = other DNA
cataacctactacgcctgctgctatagaaaagacaaacataaaggtgatccattacttagatttgatatttaatttgttc

SEQ ID NO: 118695 - DNA, 80 bp, synthetic construct
  source 1..80: mol_type = other DNA
tagccaccttctatggccctgagcaggacaagatgccggaggtggccggccactttcggctcactgaggagaagaggaag

SEQ ID NO: 118696 - DNA, 80 bp, synthetic construct
  source 1..80: mol_type = other DNA
cgcattttcactccatagctactctccaggtgaaatcaatagggtggcagcgtgcctcaggaaacttggggtaccgccct

SEQ ID NO: 118697 - DNA, 80 bp, synthetic construct
  source 1..80: mol_type = other DNA
aaaaaggtcagccaaccaaaattcctgatattacaatggatttctttgatagtccacaagatgatacatcaggtgtaact

SEQ ID NO: 118698 - DNA, 80 bp, synthetic construct
  source 1..80: mol_type = other DNA
aaagcagctcgccttatcgtataccctgacctcggcgtcagggtctgcgagaagatggccctttatgatgtcacacaaaa

SEQ ID NO: 118699 - DNA, 80 bp, synthetic construct
  source 1..80: mol_type = other DNA
gagcgatgtgtttctgctggaaagcctgcgtccgccgggcggccgttggtttggctgcgtgtggatgaacagcaccggct

SEQ ID NO: 118700 - DNA, 80 bp, synthetic construct
  source 1..80: mol_type = other DNA
ctgcgcgctgcccccacagggtctgccgcccgtaccgcccccgaggaagaagaagctcatacgcctcaacaactcggtcg

SEQ ID NO: 118701 - DNA, 80 bp, synthetic construct
  source 1..80: mol_type = other DNA
ggagctttttgccgtcattaacctgtacgggagacgcagcgcccgccatccagcatatatgtttaaaacatacaacatgc

SEQ ID NO: 118702 - DNA, 80 bp, synthetic construct
  source 1..80: mol_type = other DNA
ggctgacggtgggtgttcaggaggtgcgtatgacatcataatatgtgacgaatgtcactcagtggacgccacctcgattc

SEQ ID NO: 118703 - DNA, 80 bp, synthetic construct
  source 1..80: mol_type = other DNA
tgatgacccgacgcaccatccatgaagcaatacttcgtgagacccccctggccagcaaagggggcaaactggtcaggtgt

SEQ ID NO: 118704 - DNA, 80 bp, synthetic construct
  source 1..80: mol_type = other DNA
catgtctgccgatcttgaggttgtgaccagcacgtgggtcatggtaggcggtcttctggcggcccttgcttcctactgct

SEQ ID NO: 118705 - DNA, 80 bp, synthetic construct
  source 1..80: mol_type = other DNA
tacctcctcggatgggttacaggaaaaaccacttggagtgttaagtttaaactacagagatcccattactacgcaaaatg

SEQ ID NO: 118706 - DNA, 80 bp, synthetic construct
  source 1..80: mol_type = other DNA
gaactggatctgtagagcaactgcaatgtatttagctgctccttaccattcccgttcggcttacatcgcggtctgtgaat

SEQ ID NO: 118707 - DNA, 80 bp, synthetic construct
  source 1..80: mol_type = other DNA
acatccagaatgttactgaaccgattcacaatggctcacaggaagccaacatatgaaagggacgtggacttaggcgctgg

SEQ ID NO: 118708 - DNA, 80 bp, synthetic construct
  source 1..80: mol_type = other DNA
aaaatagacaaaggacaaagggcagaagagaaaacaaaattcaactcaggtgatttgggtagaaaacaatctagacctaa

SEQ ID NO: 118709 - DNA, 80 bp, synthetic construct
  source 1..80: mol_type = other DNA
cgagcccttgagggcagaagttgacgacagggagatctccgtctccactgaatgtcatcgccctcctcgtccgaaatttc

SEQ ID NO: 118710 - DNA, 80 bp, synthetic construct
  source 1..80: mol_type = other DNA
tcctccccttacggaggaggggcgacaaggttgcctcgttgctatccccacgccccatatcatatctcaagggctcctcg

SEQ ID NO: 118711 - DNA, 80 bp, synthetic construct
  source 1..80: mol_type = other DNA
gtttattgtttcacgcccagccccgtggtggtgtggacaactgacaggctggaggcccccacgtatacctggggagagaa

SEQ ID NO: 118712 - DNA, 80 bp, synthetic construct
  source 1..80: mol_type = other DNA
ggcccgctgcgccgcgcggcggcctggatgcgccaggtgcccgacccggaggacgtgcgcgtggtgatcctctactcgcc

SEQ ID NO: 118713 - DNA, 80 bp, synthetic construct
  source 1..80: mol_type = other DNA
ctcttttatcgcctggcgcattggtcgtcggcgttgtgtgcgctgcaatactcaagcgccatgccgggccaagcgaggga

SEQ ID NO: 118714 - DNA, 80 bp, synthetic construct
  source 1..80: mol_type = other DNA
ggttttactgtccggtacaagatttgacgaaagatggcgtgggagttggaggagatggtgggccgctgaaagacgttaaa

SEQ ID NO: 118715 - DNA, 80 bp, synthetic construct
  source 1..80: mol_type = other DNA
agttttgtcgcgtttacggtggacagggcaggaggaaggaggaggccgtcccgccggagacaaagccgtcccgggtgttt

SEQ ID NO: 118716 - DNA, 80 bp, synthetic construct
  source 1..80: mol_type = other DNA
agatccaagtatggattcggggccaaggaggtccgcagcttgtccgggagggccgttaaccacatcaagtccgtgtggaa

SEQ ID NO: 118717 - DNA, 80 bp, synthetic construct
  source 1..80: mol_type = other DNA
tgaggcgaatctcctgtggagacaggagatgggcagcaacatcactcgggtagagtcggaaaccaaggtggtaatcttgg

SEQ ID NO: 118718 - DNA, 80 bp, synthetic construct
  source 1..80: mol_type = other DNA
aattatgcaacggggaacttgcccggttgctccttttctatctttctcttagccctcttgtcctgcatctccgtgcaagt

SEQ ID NO: 118719 - DNA, 80 bp, synthetic construct
  source 1..80: mol_type = other DNA
cggaagacctcaaatgtccatgccaggtcccatcccccgaattctttagctttgtggacggggtgcgactacacaggtac

SEQ ID NO: 118720 - DNA, 80 bp, synthetic construct
  source 1..80: mol_type = other DNA
tgattgctaccttggggccgcactacaagagctttttggcccgggtcatctggtggttgacatacctcctcacgaggtgt

SEQ ID NO: 118721 - DNA, 80 bp, synthetic construct
  source 1..80: mol_type = other DNA
gcaagccagcgccctttttactctagccagaggatttccattcgtggatgtcggggtttctgcgtttctcttggcagtgg

SEQ ID NO: 118722 - DNA, 80 bp, synthetic construct
  source 1..80: mol_type = other DNA
cagggcgaactcgaccgggcgtggaaggtaggccgcgctacacgtggccctcagcgcgtccccgaccaccagggccagaa

SEQ ID NO: 118723 - DNA, 80 bp, synthetic construct
  source 1..80: mol_type = other DNA
agggataggagtcagctcagtcccctacttcattccaccactgagtgggccatattgccgtgcacttttgctgatatgcc

SEQ ID NO: 118724 - DNA, 80 bp, synthetic construct
  source 1..80: mol_type = other DNA
gtcaggctccccaacaggacctgcaacggtccgtttggtggtggagcggacggtggggtcatgccggcgtgcgccgggac

SEQ ID NO: 118725 - DNA, 80 bp, synthetic construct
  source 1..80: mol_type = other DNA
gtctgcactcatatgtggtggggtctcagctcccttgtgaaccggagccggacgtccaaactgtctcgcagctcctaacc

SEQ ID NO: 118726 - DNA, 80 bp, synthetic construct
  source 1..80: mol_type = other DNA
aaactaacctcagagaactcaacaaactgcttgacagagcgttgaaatcattatggacaggttttgacgagagaacggta

SEQ ID NO: 118727 - DNA, 80 bp, synthetic construct
  source 1..80: mol_type = other DNA
tccgccctgagctcgcgcctcaatgtcagctgcaaaaagtcacttaagtcctgggccactacagctgacaattcagagcc

SEQ ID NO: 118728 - DNA, 80 bp, synthetic construct
  source 1..80: mol_type = other DNA
acccggtggactcctggtgtacgacagcgcccccaacctgacggacccccacgtgctctgggcggagtgtgccggcccgg

SEQ ID NO: 118729 - DNA, 80 bp, synthetic construct
  source 1..80: mol_type = other DNA
aagccgtgatgggctcctcatacggattccagtactctcctgggcagcgggtcgagttcctggtgaatgcctggaaatca

SEQ ID NO: 118730 - DNA, 80 bp, synthetic construct
  source 1..80: mol_type = other DNA
agaaggtgctaggactgctgcaggccagcgctcggcaggcagaagaaatcaagcctgctgtgacatctgcgtggccaaaa

SEQ ID NO: 118731 - DNA, 80 bp, synthetic construct
  source 1..80: mol_type = other DNA
gggtcacgtgtttttgtcgtgacacgcctcgaccagaaaaggctgcggttttcgtacacgcgaccgttatttcacaggcg

SEQ ID NO: 118732 - DNA, 80 bp, synthetic construct
  source 1..80: mol_type = other DNA
tctttgtgtttagagactctgatgactggctcacaaagtactcatactatcctgaagaccctgtcaaattggcatccatc

SEQ ID NO: 118733 - DNA, 80 bp, synthetic construct
  source 1..80: mol_type = other DNA
cgctgatgttgccaatggcctccagcctttccatagcctcgtagaagtccacggcgaagttaaaaaactgggcgttgcgt

SEQ ID NO: 118734 - DNA, 80 bp, synthetic construct
  source 1..80: mol_type = other DNA
aagctgacctggaaaatgaagcaaaagtgttggagtttctcgatggcgagcatcgccgtctagccagatccgtgattgag

SEQ ID NO: 118735 - DNA, 80 bp, synthetic construct
  source 1..80: mol_type = other DNA
ccaaatagacggtcatttcctatcccagaccaaacaatcgggtgaaaacttcccatacctggttgcctaccaagccacgg

SEQ ID NO: 118736 - DNA, 80 bp, synthetic construct
  source 1..80: mol_type = other DNA
acggaagctatgaccaggtattctgccccccccggtgacgagccccagccgacctacgatctggagctaataacatcatg

SEQ ID NO: 118737 - DNA, 80 bp, synthetic construct
  source 1..80: mol_type = other DNA
gccccacccccctcctgtacaggctgggggccgtccagaatgagatcacattgacgcaccccatcaccaagtacattatg

SEQ ID NO: 118738 - DNA, 80 bp, synthetic construct
  source 1..80: mol_type = other DNA
gctttttttggtatcaggtaaagggattggaaagactacaataggactcatttgtgttattgtttccagtggcatgctat

SEQ ID NO: 118739 - DNA, 80 bp, synthetic construct
  source 1..80: mol_type = other DNA
gacgttaagttcccgggtggcggtcagatcgtgggtggagtttacttgttaccgcgcaggggcccgcgtttgggtgtgcg

SEQ ID NO: 118740 - DNA, 80 bp, synthetic construct
  source 1..80: mol_type = other DNA
gatttcgtgacaggaactcaagggaccaccagagtgtccctagtcttggaacttgggggttgcgtgactatcacagctga

SEQ ID NO: 118741 - DNA, 80 bp, synthetic construct
  source 1..80: mol_type = other DNA
ccagtgcgacggagaggcgactcaagaggagccctcctgagccctagaccaatatctaccctcaaggggtcctcaggagg

SEQ ID NO: 118742 - DNA, 80 bp, synthetic construct
  source 1..80: mol_type = other DNA
gttaataatcaatcttggtccaggtttacaaatgtctaatggagctattactttagcactagatgcagcgctgcctttgc

SEQ ID NO: 118743 - DNA, 80 bp, synthetic construct
  source 1..80: mol_type = other DNA
tctcccgcgcgtgcccttcgcaggtggcggtgagataggtgataaacagcgggcggcggacgtcaacgcccgtaagcttg

SEQ ID NO: 118744 - DNA, 80 bp, synthetic construct
  source 1..80: mol_type = other DNA
agaactcagcccgctgctgctgtctacaacagagtggcagatactgccctgtgctttcaccaccctaccggctttatcca

SEQ ID NO: 118745 - DNA, 80 bp, synthetic construct
  source 1..80: mol_type = other DNA
ccagttgtcgtataatttccccccccccccttctccgcgtgggtgatgtcgggtccaaactcccgacaccaccagctggc

SEQ ID NO: 118746 - DNA, 80 bp, synthetic construct
  source 1..80: mol_type = other DNA
cgataggggcggcgcaggcccgtggcgtccgcgggttcacgtccctcttttcacctgggtcgtcccagaatatccagctt

SEQ ID NO: 118747 - DNA, 80 bp, synthetic construct
  source 1..80: mol_type = other DNA
gggtggccagctccaccgggttccaggtcgctcaccccatgcacctgtggtgctagtgacctctacttagtcacacggtg

SEQ ID NO: 118748 - DNA, 80 bp, synthetic construct
  source 1..80: mol_type = other DNA
atgaccaggtattctgcacccccaggtgatgaaccacacccggaatatgatcttgagctaataacatcatgctcatccaa

SEQ ID NO: 118749 - DNA, 80 bp, synthetic construct
  source 1..80: mol_type = other DNA
ctataaactatgctttgatagacggtatatttttgcgttatcactgtcccggattggacacggtcttgtgggataggcat

SEQ ID NO: 118750 - DNA, 80 bp, synthetic construct
  source 1..80: mol_type = other DNA
tggatgaactccaccggcttcactaaaacctgcggcgcaccaccttgccgcactagagccgatttcaaccacagcacgga

SEQ ID NO: 118751 - DNA, 80 bp, synthetic construct
  source 1..80: mol_type = other DNA
cggcgacgcaccccccctccgactcagggccgtggtggcgcggccagggttggcccgggacccccctgacgtcctcggcg

SEQ ID NO: 118752 - DNA, 80 bp, synthetic construct
  source 1..80: mol_type = other DNA
ttaacaccaaggtgtttggttgactacccgtaccgcctctggcactatccctgtaccgtgaattacaccatcttcaaggt

SEQ ID NO: 118753 - DNA, 80 bp, synthetic construct
  source 1..80: mol_type = other DNA
tcgagggccagggcggcatctccggccatgacggaggccaggcgctgttcgaacccgcccgcagggcccttgccgccgcc

SEQ ID NO: 118754 - DNA, 80 bp, synthetic construct
  source 1..80: mol_type = other DNA
catcgccgcttggtatttcaagggtagggtagtccctgcgactacttattccctcctaggcctttggtcctttctcctgc

SEQ ID NO: 118755 - DNA, 80 bp, synthetic construct
  source 1..80: mol_type = other DNA
gtgggcggtactgttggtcaaggtctgaagtcccttaccagtttctttaaccccgggccgcagcggcagttgcagttcgt

SEQ ID NO: 118756 - DNA, 80 bp, synthetic construct
  source 1..80: mol_type = other DNA
agtcacctactccatcactccattggatctaccgcagattattcagcggttacatggcatggccgccttttcactccatg

SEQ ID NO: 118757 - DNA, 80 bp, synthetic construct
  source 1..80: mol_type = other DNA
ttggcgccggcgagaagacgaccaggatgactccgccgatgacaatagcgttctggacttgggtggaactggtgcttctt

SEQ ID NO: 118758 - DNA, 80 bp, synthetic construct
  source 1..80: mol_type = other DNA
gtatcgatttcgtgactcaacttccgggttcccacgttacgtcacttctgcccttacatgtggctccgccgtagggcgcc

SEQ ID NO: 118759 - DNA, 80 bp, synthetic construct
  source 1..80: mol_type = other DNA
accgggatcgcagcgaaatgtatcctctgctacactcaaccacagaacaagcaatactaccttgctcttttgtgccaata

SEQ ID NO: 118760 - DNA, 80 bp, synthetic construct
  source 1..80: mol_type = other DNA
tcccctttatctcttgtcaaaaggggtacaagggcgtgtgggccggctctggcatcatgaccacacggtgtccctgcggc

SEQ ID NO: 118761 - DNA, 80 bp, synthetic construct
  source 1..80: mol_type = other DNA
tgttgctgatgcacacggcctcccggaagccctccgtgatcaccagatacagcaaggcccggtccgggtccagtccgagt

SEQ ID NO: 118762 - DNA, 80 bp, synthetic construct
  source 1..80: mol_type = other DNA
tcgaaggacataccactactggctaccatatggctgcaaccacgcatggggtggtcagcttgttcagtcggtggcccaag

SEQ ID NO: 118763 - DNA, 80 bp, synthetic construct
  source 1..80: mol_type = other DNA
cccccatgccaagtattggactggagaaggaggaagaggaggagtgggccggggacggcgaacatcttgaggtaggagat

SEQ ID NO: 118764 - DNA, 80 bp, synthetic construct
  source 1..80: mol_type = other DNA
gtcaagacccgtggcagaattttggtaaagtacgtaatcaggggatagatatgtcgatgaatctcaatcaacagataggt

SEQ ID NO: 118765 - DNA, 80 bp, synthetic construct
  source 1..80: mol_type = other DNA
ctttgtggacggggtgcggatacacagattcgcccctgaacccaagcccatgatccgggaagaagccgctttcgtggtgg

SEQ ID NO: 118766 - DNA, 80 bp, synthetic construct
  source 1..80: mol_type = other DNA
catgatcttggtaggagtgatcatgatgtttttgtctctaggagttggggcggatcaaggatgcgccatcaactttggca

SEQ ID NO: 118767 - DNA, 80 bp, synthetic construct
  source 1..80: mol_type = other DNA
tgactggccctactcccctgctttataggctaggggctgtccaaaatgagatcacaaccacgcacccggtcaccaaatac

SEQ ID NO: 118768 - DNA, 80 bp, synthetic construct
  source 1..80: mol_type = other DNA
ccaccccgccagcggtgccccagagcttccaggtggcccacctgcacgctcccactggcagcggtaagagcaccaaggtc

SEQ ID NO: 118769 - DNA, 80 bp, synthetic construct
  source 1..80: mol_type = other DNA
caatacttcatcgcaaggatagaggccatgcttcacgtgtgggttcccaatctctctgttagggggggtcgtgatgccat

SEQ ID NO: 118770 - DNA, 80 bp, synthetic construct
  source 1..80: mol_type = other DNA
gtaacacgtctgtcatacagactgttgacttcagtttggaccctactttctcaatagagaccacaactgtcccccaggac

SEQ ID NO: 118771 - DNA, 80 bp, synthetic construct
  source 1..80: mol_type = other DNA
ctctaccgtcacggagagggacataagaacagaagaatccatatatcaggcttgttccctgcctcaagaggccagaattg

SEQ ID NO: 118772 - DNA, 80 bp, synthetic construct
  source 1..80: mol_type = other DNA
ggtgcgggagtttcacgccaccaagatctgcggcacgctgttgacgctgttaagcgggtcgctgcagggtcgctcggtat

SEQ ID NO: 118773 - DNA, 80 bp, synthetic construct
  source 1..80: mol_type = other DNA
cgccgttctctgcgaggcctatgacacaggagccgcgtggtatgagctaacacctgccgagaccacggtcaggcttcgtg

SEQ ID NO: 118774 - DNA, 80 bp, synthetic construct
  source 1..80: mol_type = other DNA
acgggcatacatgaatacgccaggtctccctgtctgccaagaccatctggagttttgggaaggcgtgttcacaggcttga

SEQ ID NO: 118775 - DNA, 80 bp, synthetic construct
  source 1..80: mol_type = other DNA
ctgggcagtgaggacaaagctcaagctcactccaataccgggagccgccagtctggacttgtccaactggttcactgccg

SEQ ID NO: 118776 - DNA, 80 bp, synthetic construct
  source 1..80: mol_type = other DNA
ccaaggttccgatgagggcccgggtggcagactgcgccaggaacgagtagttggagtactgcaccttggcggctcccgtg

SEQ ID NO: 118777 - DNA, 80 bp, synthetic construct
  source 1..80: mol_type = other DNA
tggggctccggcgtcgcctgcacaggaaggaccccggggacgcggcccggttggcggcgacgcttcggtgcctcttcttc

SEQ ID NO: 118778 - DNA, 80 bp, synthetic construct
  source 1..80: mol_type = other DNA
ccgctaacctctcgggatcatctgatgataggccctactgctggcactacgcacctcggccgtgcgtgactgtgccggca

SEQ ID NO: 118779 - DNA, 80 bp, synthetic construct
  source 1..80: mol_type = other DNA
ttggtggggtggccagcaccccccggagtcagatctcttgctccgtgcacctgcggctcggcagacttgtatctagtcac

SEQ ID NO: 118780 - DNA, 80 bp, synthetic construct
  source 1..80: mol_type = other DNA
tcgtgacgtaatcctaaacagccaatcagcgttggccacgccctaaattcaaaagctcatttgcatattaacttttgttt

SEQ ID NO: 118781 - DNA, 80 bp, synthetic construct
  source 1..80: mol_type = other DNA
tcctttttaacatcttagggggatgggtggcctcgcagatcgcgactccgacagcttctaccgcatttgtcgtgagcggt

SEQ ID NO: 118782 - DNA, 80 bp, synthetic construct
  source 1..80: mol_type = other DNA
aaaccccacacccccagaattctgtttacgcccacctacaatttcctgcacgaaggagtcggccataaataaatctgcag

SEQ ID NO: 118783 - DNA, 80 bp, synthetic construct
  source 1..80: mol_type = other DNA
cgacgggtaagaaggtgtactacctcacccgagaccctgaaactcccctggctcgcgccgcgtgggagacagtccgacac

SEQ ID NO: 118784 - DNA, 80 bp, synthetic construct
  source 1..80: mol_type = other DNA
gagcattacttgcgagttggccgtcagaacggtgtgctagaaagtgacattggtgttaagtttgacaccagaaactttcg

SEQ ID NO: 118785 - DNA, 80 bp, synthetic construct
  source 1..80: mol_type = other DNA
gcgtctccgacgctttggccgagctggcggctaagtcctttggccggtccgaaccagacaccgattccggaaccggccta

SEQ ID NO: 118786 - DNA, 80 bp, synthetic construct
  source 1..80: mol_type = other DNA
caacctggtcgatttttctgcaacggcagagacctaaccattgtcaacgtgacagcaagtgacaaaggcttctattatgg

SEQ ID NO: 118787 - DNA, 80 bp, synthetic construct
  source 1..80: mol_type = other DNA
accaaagtgtgcggagcgcccccttgtgtcataggaggtagtggcaacaacaccttacgctgccccacagactgcttccg

SEQ ID NO: 118788 - DNA, 80 bp, synthetic construct
  source 1..80: mol_type = other DNA
ctggggaagtccaggtgctatccacggtgactcaatccttccttgggacctccatttccggcgttctctggacagtcttc

SEQ ID NO: 118789 - DNA, 80 bp, synthetic construct
  source 1..80: mol_type = other DNA
ccggccgctcttcctgtgtgggcccgtccggactacaaccccccactcttggagccatggaaggcacctgactacaagcc

SEQ ID NO: 118790 - DNA, 80 bp, synthetic construct
  source 1..80: mol_type = other DNA
gcatccaaattagccgcacaagggattcacgctgtgtcatattatcgcggcctcgacgtttccgtgataccatccaccgg

SEQ ID NO: 118791 - DNA, 80 bp, synthetic construct
  source 1..80: mol_type = other DNA
acaactggggagagaatgtgactgatgtgttcatgctagccagccagcgcccgcccaagggtgcgtggtttggatgcaca

SEQ ID NO: 118792 - DNA, 80 bp, synthetic construct
  source 1..80: mol_type = other DNA
acggtgtggaagatgaacttcccaactattgcttcccattggatgggtctggcaccaatgctgcttatgaaggtgtaaaa

SEQ ID NO: 118793 - DNA, 80 bp, synthetic construct
  source 1..80: mol_type = other DNA
gggtgcccccccctacgagcttggagacatcgggcacgagcagtgcgcgccaagcttatcgcccagggagtgaaggccaa

SEQ ID NO: 118794 - DNA, 80 bp, synthetic construct
  source 1..80: mol_type = other DNA
ggcgtcgtcggacgccagctcctccaggccgtggatccaggcccacatgcgagggtggacgggctcgccggtggtggcgt

SEQ ID NO: 118795 - DNA, 80 bp, synthetic construct
  source 1..80: mol_type = other DNA
acccagaaagggatcatttttattttgctgatgctggtaactccatccatggccatgcggtgcgtgggaataggcaacag

SEQ ID NO: 118796 - DNA, 80 bp, synthetic construct
  source 1..80: mol_type = other DNA
cacagcgaccgcccctcctgaccaaaccttcgataacggtgacgcggggtccgacgctgagtcgtactcctccatgcccc

SEQ ID NO: 118797 - DNA, 80 bp, synthetic construct
  source 1..80: mol_type = other DNA
aaaatacaatattatacttggtggtcacggcattgtttaaggaagccgtatttatgtgcaacgtgtttctgcattatgga

SEQ ID NO: 118798 - DNA, 80 bp, synthetic construct
  source 1..80: mol_type = other DNA
atgccaccacttgagggagagccgggagacccagacctcagttcggggtcatggtctacggttagtgaggagaatgacag

SEQ ID NO: 118799 - DNA, 80 bp, synthetic construct
  source 1..80: mol_type = other DNA
gtcccgcgacgttacgggccgggaggcgcggaggcacctcccccatgtgcgtgtaatacgtggccggctgtgcggccgca

SEQ ID NO: 118800 - DNA, 80 bp, synthetic construct
  source 1..80: mol_type = other DNA
ccagatgccgctgtggagggtgaaaggactaggaaagtgatattactcatggagcaatggaaaatccgaaacccagcggc

SEQ ID NO: 118801 - DNA, 80 bp, synthetic construct
  source 1..80: mol_type = other DNA
attcatttacggtatcagtttgatacttcccggatgacacccccacagattttgagaactataccagcccttcctaacat

SEQ ID NO: 118802 - DNA, 80 bp, synthetic construct
  source 1..80: mol_type = other DNA
ggccttatacatctacatcaaaatgtggtcgatgtgcaatacctctatggcattagcacgtcgatcgtgtcatgggccat

SEQ ID NO: 118803 - DNA, 80 bp, synthetic construct
  source 1..80: mol_type = other DNA
ggcagtcctacggattccagtactctccagcccagcgggtcgatttcctcctacaagcgtggaaggaaaagaagacccct

SEQ ID NO: 118804 - DNA, 80 bp, synthetic construct
  source 1..80: mol_type = other DNA
gccagctgtccactccgcatggcctaagcttgagcaattttggcataagcacatgtggaacttcatcagcgggatacaat

SEQ ID NO: 118805 - DNA, 80 bp, synthetic construct
  source 1..80: mol_type = other DNA
tgctttattctcctgcttgacctgcccaacagccgcgttcgaagtcaggaactcgtctaacctctacatactcaccaacg

SEQ ID NO: 118806 - DNA, 80 bp, synthetic construct
  source 1..80: mol_type = other DNA
acagcaacatgaatggaactacgcaagacaacgctgcgctttttgatggaggggttttcagtccttatttgacttccagg

SEQ ID NO: 118807 - DNA, 80 bp, synthetic construct
  source 1..80: mol_type = other DNA
taatcacagaaatgggcaggcttccaacttttatgactcagaaggcaagagacgcactggacaacttagctgtgctgcat

SEQ ID NO: 118808 - DNA, 80 bp, synthetic construct
  source 1..80: mol_type = other DNA
cacactgggttccaacaagtcgaacaacctggtccatacacgccaaacatgaatggatgacaacggaagacatgctgaca

SEQ ID NO: 118809 - DNA, 80 bp, synthetic construct
  source 1..80: mol_type = other DNA
gagcgctgcggtctggggtgcgctccctctgtgagtgctgattgctggccattatttaatcctaggcaaagaaacacatg

SEQ ID NO: 118810 - DNA, 80 bp, synthetic construct
  source 1..80: mol_type = other DNA
taatttcagaggctccgacgctgataataggacaaagatggcttcgtccagatgagattttatctaatgtagatttgcgt

SEQ ID NO: 118811 - DNA, 80 bp, synthetic construct
  source 1..80: mol_type = other DNA
ccaaccccgcaccagtatacatcgcaaaggcggcagcctgaaaccaactgtccttcaccacaaccggcctttttcacatc

SEQ ID NO: 118812 - DNA, 80 bp, synthetic construct
  source 1..80: mol_type = other DNA
agcaccgtccgccgttggtagctgtttggttccgttttaataaaccgtttgtgtttaacccgaccgtggtgtatgtctgg

SEQ ID NO: 118813 - DNA, 80 bp, synthetic construct
  source 1..80: mol_type = other DNA
ataaaaactgagttaagactctcctacggactaccaattcttcaactcggactttataacaatcagaccctccgttcaag

SEQ ID NO: 118814 - DNA, 80 bp, synthetic construct
  source 1..80: mol_type = other DNA
cgcttgtgggccataagcagggcgtacagctgcctgtgggtccggcaggcgctgtggtcgatgtggtgggcgtccaacaa

SEQ ID NO: 118815 - DNA, 80 bp, synthetic construct
  source 1..80: mol_type = other DNA
aagtcggtaagcgactcccctctgtggcctggcggaaaagtcacaagggtaccacagcgaggaaccccggttcgaaaccg

SEQ ID NO: 118816 - DNA, 80 bp, synthetic construct
  source 1..80: mol_type = other DNA
agctctatgccgcctcttgagggcgaacccggcgatcccgacctctccgagggtgagggttcagggtcgtggtccacagt

SEQ ID NO: 118817 - DNA, 80 bp, synthetic construct
  source 1..80: mol_type = other DNA
ttggcgtcagggtttgcgagaaaatggccctttatgacatcacacagaagctaccccaggcagtaatgggagcttcatat

SEQ ID NO: 118818 - DNA, 80 bp, synthetic construct
  source 1..80: mol_type = other DNA
aacacaccagaagggattatcccagccctcttcgagccggagagagaaaagagtgcagcaatagacggggaatatagact

SEQ ID NO: 118819 - DNA, 80 bp, synthetic construct
  source 1..80: mol_type = other DNA
aggagccagcctgtaatgttacattcgcagctgaagctaatgcgtgcaccactcttataaaatgcaccacagaacatgaa

SEQ ID NO: 118820 - DNA, 80 bp, synthetic construct
  source 1..80: mol_type = other DNA
ccatacgatagggaggacgcagggccgtaacacctacgggctcacgacccccttttcacctggttcgtcccagaggatcc

SEQ ID NO: 118821 - DNA, 80 bp, synthetic construct
  source 1..80: mol_type = other DNA
ggcctcacagtccaaggtcacagtctggtggaacgagaagaacgcacagattcatactcggaaaacaagatgggtctgtg

SEQ ID NO: 118822 - DNA, 80 bp, synthetic construct
  source 1..80: mol_type = other DNA
aagtacatcgccgcctgcatgcaggcagatcttgagatcatgacgagcacatgggttcttgcggggggagttctcgcggc

SEQ ID NO: 118823 - DNA, 80 bp, synthetic construct
  source 1..80: mol_type = other DNA
tgtttaacccctcccctttttgtcattatctccgccctcttataatcggatcactttataagtgtgtcggtgagtatatt

SEQ ID NO: 118824 - DNA, 80 bp, synthetic construct
  source 1..80: mol_type = other DNA
attggcacaaatctgggagctcaataggcaaggcgtttacaacgacactgaaaggagcacagcgattagccgcgctagga

SEQ ID NO: 118825 - DNA, 80 bp, synthetic construct
  source 1..80: mol_type = other DNA
cattctccagtaactttatgtccatgggtgcactcacagacctgggccaaaaccttctctatgcaaactccgcccacgcg

SEQ ID NO: 118826 - DNA, 80 bp, synthetic construct
  source 1..80: mol_type = other DNA
gtaaccgtcccacaccccaacatcacagagacagctctgcccctaacggaggaggtgcctttctacggcaaggccatccc

SEQ ID NO: 118827 - DNA, 80 bp, synthetic construct
  source 1..80: mol_type = other DNA
aagcagatgggaaaatcaataccacttggcagctgccgttcgtcctcttcctcttctgctgcattgccactaccgtttgg

SEQ ID NO: 118828 - DNA, 80 bp, synthetic construct
  source 1..80: mol_type = other DNA
ggtaaggtcatcgataccctaacctgtgggttcgccgatctcatgtggtacattcccgtcgtgggcgcgcctttgggcgg

SEQ ID NO: 118829 - DNA, 80 bp, synthetic construct
  source 1..80: mol_type = other DNA
ggcggaggcagcacttgccgaaatggcccgcaaggcattcccaccggactcgacaccatcacaggagggttctagcgcgg

SEQ ID NO: 118830 - DNA, 80 bp, synthetic construct
  source 1..80: mol_type = other DNA
accgtcgccgccggccacgccacgctgcgcgcgcacctgcgggaaatcaaggtcgagaacgccgatgcccagttttacgt

SEQ ID NO: 118831 - DNA, 80 bp, synthetic construct
  source 1..80: mol_type = other DNA
tggccaaagcttgaagccttttggcaaaaacacctctggaactttgtcagcgggatacagtacctagctggcctgtcaac

SEQ ID NO: 118832 - DNA, 80 bp, synthetic construct
  source 1..80: mol_type = other DNA
cttgcgggcgctgctgtcggcagcattggcctaggcaaggtcataattgacatcttggcgggatacggcgccggtgtgtc

SEQ ID NO: 118833 - DNA, 80 bp, synthetic construct
  source 1..80: mol_type = other DNA
ggggaagtccaaatcctgtccacagtctctcagtccttcctcggaacaaccatctcgggggttttgtggactgtttacca

SEQ ID NO: 118834 - DNA, 80 bp, synthetic construct
  source 1..80: mol_type = other DNA
ctatatgcgtgaacacaccgcgcttgtttctagtgtaaaggctttagagaatgcattacggtctacccgcaataaaattg

SEQ ID NO: 118835 - DNA, 80 bp, synthetic construct
  source 1..80: mol_type = other DNA
tatacccgccaacgctactagcgtgcccatttctattccttcgcgaaattgggctgcttttcgggggtggagttttacta

SEQ ID NO: 118836 - DNA, 80 bp, synthetic construct
  source 1..80: mol_type = other DNA
tccctagcattaaagccggaaatgacatagcaaactgcttgcgaaaaaacgggaaaaaagtcattcaacttagtaggaag

SEQ ID NO: 118837 - DNA, 80 bp, synthetic construct
  source 1..80: mol_type = other DNA
cgccaacttgttatggcggcaagagatgggcagcaacattacacgggtggagtctgagacaaaggttgtggttcttgatt

SEQ ID NO: 118838 - DNA, 80 bp, synthetic construct
  source 1..80: mol_type = other DNA
ggcagctctttacgttcaggcctcggatgcatcaggttgtccaggattgcaactgttccatctacacagggcatattact

SEQ ID NO: 118839 - DNA, 80 bp, synthetic construct
  source 1..80: mol_type = other DNA
gtgtgagggtgcacagatacgctccaacatgccgtccgctcatcagggatgagataactttcagtgtggggctctgtagc

SEQ ID NO: 118840 - DNA, 80 bp, synthetic construct
  source 1..80: mol_type = other DNA
ctgactgtcccaacctcagcttccaatgttgctaataagagtggcatttaccatcttaccaacgactgccccaatagtag

SEQ ID NO: 118841 - DNA, 80 bp, synthetic construct
  source 1..80: mol_type = other DNA
acactaatcacacccatgctacgacacagtattgaaaactcttcaaccaatgtttcattgacagctatagccaaccaagc

SEQ ID NO: 118842 - DNA, 80 bp, synthetic construct
  source 1..80: mol_type = other DNA
cgaccacggttcgaaagaaggcccggtggtccgcgggcaacatcaccaggtgcgcaagcgcccgggcgtccagagggtag

SEQ ID NO: 118843 - DNA, 80 bp, synthetic construct
  source 1..80: mol_type = other DNA
actatgcaacagggaatttgcctggttgctctttctctatcttcttgcttgctctattatcctgcctgactgtgccagcc

SEQ ID NO: 118844 - DNA, 80 bp, synthetic construct
  source 1..80: mol_type = other DNA
ccatcggttgaagttaaattaccggactatggagaactaacacttgactgtgaacctaggtccggaattgactttaatga

SEQ ID NO: 118845 - DNA, 80 bp, synthetic construct
  source 1..80: mol_type = other DNA
ttgctactattcgccggcgtcgacgcggagacctacgtcactgggggggccaccgcccgcaccacggctggtcttactaa

SEQ ID NO: 118846 - DNA, 80 bp, synthetic construct
  source 1..80: mol_type = other DNA
atgcccgaccccgcgaattccgtgacatatatcacagcctgtctcatgcccgaccccgcgaattccgtgacatatatcac

SEQ ID NO: 118847 - DNA, 80 bp, synthetic construct
  source 1..80: mol_type = other DNA
gtacaaatcagccccaaggcggctggccgctacgaccgagaagttggagataggatggaaagcatggggaaagagcatca

SEQ ID NO: 118848 - DNA, 80 bp, synthetic construct
  source 1..80: mol_type = other DNA
atggccaagaatgaggtgttctgtgtggatcctgccaaaggtgggaagaaagcggctcgcctcatcgtataccctgacct

SEQ ID NO: 118849 - DNA, 80 bp, synthetic construct
  source 1..80: mol_type = other DNA
gtgccgcgccggcgcatgttggaaaaggcagagctgggtctggagtcggtgatgggagaaggcggtggagaggcgtccac

SEQ ID NO: 118850 - DNA, 80 bp, synthetic construct
  source 1..80: mol_type = other DNA
gggtggtcgtaaacctgcccgactgatcgtatacccagacctaggggtgcgggtgtgcgagaagagggctctctacgaca

SEQ ID NO: 118851 - DNA, 80 bp, synthetic construct
  source 1..80: mol_type = other DNA
cgagagtgctggggtcgaggaggacgcggcaagcctgcgagtcttcacggaggctatgaccaggtattctgccccccccg

SEQ ID NO: 118852 - DNA, 80 bp, synthetic construct
  source 1..80: mol_type = other DNA
cggatggaccttgcaaagttcccatctcgtcagtggcttccttgaacgacctaacaccggtgggcagattggtcactgtt

SEQ ID NO: 118853 - DNA, 80 bp, synthetic construct
  source 1..80: mol_type = other DNA
cgtggggcccaagctgtgcagcaacacctggcacggcacattccccattaatgcaagcaccactggacccagtgtcccag

SEQ ID NO: 118854 - DNA, 80 bp, synthetic construct
  source 1..80: mol_type = other DNA
tgggcaagcagcttacaccaccagcggtctcagtagtctcttcactcatggttctaagcagaacctcatgctgatcaaca

SEQ ID NO: 118855 - DNA, 80 bp, synthetic construct
  source 1..80: mol_type = other DNA
aacggagaggcagaacgggtagaggccggcacggggactatagatatgtctcgcagggtgagcggccgtcaggcattttt

SEQ ID NO: 118856 - DNA, 80 bp, synthetic construct
  source 1..80: mol_type = other DNA
acaggaatggtgaggtaatagggctgtatggcaatggaattcttgttggtgacaactcttttgtgtctgccatatcccaa

SEQ ID NO: 118857 - DNA, 80 bp, synthetic construct
  source 1..80: mol_type = other DNA
caaccactacgtggtggccgccactaatgacaacctaaagtgtccatgccaggttccagcgcctgaattcttcaccgaag

SEQ ID NO: 118858 - DNA, 80 bp, synthetic construct
  source 1..80: mol_type = other DNA
gatccagcagattacagaggaggcactccaatggccctgaagaaaactggaaaggagagtaaggtgtcatggaagagttg

SEQ ID NO: 118859 - DNA, 80 bp, synthetic construct
  source 1..80: mol_type = other DNA
tgttcccagtgtgaaaagtgggaacgaaattgccatctgcctacaaaaagcaggaaagcgagtgattcaactaaacagga

SEQ ID NO: 118860 - DNA, 80 bp, synthetic construct
  source 1..80: mol_type = other DNA
ttgaggacgccgaggctctcttcaacaagtactgcgcactcactcttaaagagtagcccgcgcccgcccacacacggaaa

SEQ ID NO: 118861 - DNA, 80 bp, synthetic construct
  source 1..80: mol_type = other DNA
attactccaatctccaccaccattatggcgaagaacgaggtgtttagcgtaaaccctgcaaaggggggacgcaaacccgc

SEQ ID NO: 118862 - DNA, 80 bp, synthetic construct
  source 1..80: mol_type = other DNA
agaaaaacttttgacactgagtaccagaaaacaaaaaataacgactgggactatgttgtcacaacagacatatccgaaat

SEQ ID NO: 118863 - DNA, 80 bp, synthetic construct
  source 1..80: mol_type = other DNA
gtaatgggagacgcctacggattccagtactctccagcgcagcgggtcgactacctcttgaagtcgtggaactcaaagag

SEQ ID NO: 118864 - DNA, 80 bp, synthetic construct
  source 1..80: mol_type = other DNA
atcctctcccacccccgcgtccctgacaagaatcacaatgagacccaaagtttggttcagaggtttattatgggcaaaca

SEQ ID NO: 118865 - DNA, 80 bp, synthetic construct
  source 1..80: mol_type = other DNA
gcgcacaccggccacccgggccggccccgctcggccgtgatcctcccggcgtgtgcgttcgtggacctggacgccgagct

SEQ ID NO: 118866 - DNA, 80 bp, synthetic construct
  source 1..80: mol_type = other DNA
cgctccggaggcatcggaaccctccagttcgtggaggagtttgtgccctcggtctacttcaaccccttctcgggatcgcc

SEQ ID NO: 118867 - DNA, 80 bp, synthetic construct
  source 1..80: mol_type = other DNA
ggctgtcatccaagctcctcccaaagctgccgggcgttcctttcctctcatgccagaaaggatatcgtggcacgtggtca

SEQ ID NO: 118868 - DNA, 80 bp, synthetic construct
  source 1..80: mol_type = other DNA
atgctcctatctcggacatgcaaacagagatcccagacagagcctggaacactggatatgaatggataactgagtatgtt

SEQ ID NO: 118869 - DNA, 80 bp, synthetic construct
  source 1..80: mol_type = other DNA
ggagagaggtgttgctgggaccagccgatgccctgactgacaaaggatggaggcttttagcccccatcacggcttacgcc

SEQ ID NO: 118870 - DNA, 80 bp, synthetic construct
  source 1..80: mol_type = other DNA
ccaacaaccatcatggcaaaaaacgaggtgttcgtagtcgagccaagtaagggagggaagaagccagcccggctgatagt

SEQ ID NO: 118871 - DNA, 80 bp, synthetic construct
  source 1..80: mol_type = other DNA
ttttggtctcaatggatcggtatgccgttcggacctggaggattgtgggaatcctcgggtgtgctgctgttggggccgca

SEQ ID NO: 118872 - DNA, 80 bp, synthetic construct
  source 1..80: mol_type = other DNA
cgcgtcgcttttgctccccagagcctgctggtggggattacgggccgcacgtttattcggatggcacgacccacggaaga

SEQ ID NO: 118873 - DNA, 80 bp, synthetic construct
  source 1..80: mol_type = other DNA
gaactcaatcgggtggccgcaaccctcagaaaacttggggtgcccccattgagagcctggaggcatcgggccagagctgt

SEQ ID NO: 118874 - DNA, 80 bp, synthetic construct
  source 1..80: mol_type = other DNA
tcctacgccagtgccccctcctcggaggaagaggacagtccaactcgatgggtcgaatgtatctgctgcgcttgctgcgc

SEQ ID NO: 118875 - DNA, 80 bp, synthetic construct
  source 1..80: mol_type = other DNA
gcactgcttgtcctgacgttgtcaccacattacaagcggtggctagcctggggaatttggtggatccaatacttcatcgc

SEQ ID NO: 118876 - DNA, 80 bp, synthetic construct
  source 1..80: mol_type = other DNA
gcaaatcaccatactaattgtaattggaattcttatactatctgttattctttattttctattctgccgtcaaataccca

SEQ ID NO: 118877 - DNA, 80 bp, synthetic construct
  source 1..80: mol_type = other DNA
gaccgccgcggtcggaggcccctcgtcccgggccgtacgcggccttcgccccgtgaggggacagacgaacgaaacattcc

SEQ ID NO: 118878 - DNA, 80 bp, synthetic construct
  source 1..80: mol_type = other DNA
cagagtaacgtgggagaggctctcaaggagcttgccatcaagagctttggctgccccccccctagcggcgacccaggcca

SEQ ID NO: 118879 - DNA, 80 bp, synthetic construct
  source 1..80: mol_type = other DNA
ggtagaggaaaaggccctaaagtgaggacttggctttttgaaaatggagaagagagacttggacgcatggctgttagtgg

SEQ ID NO: 118880 - DNA, 80 bp, synthetic construct
  source 1..80: mol_type = other DNA
ggattgtcaacactgccagggaaccccgcggtggcttccatgatggcattcagtgccgccctcaccagtccgttgtcgac

SEQ ID NO: 118881 - DNA, 80 bp, synthetic construct
  source 1..80: mol_type = other DNA
ctgcgcgcagacggggcgacaaccgcgctggacttatcagcccacggccgttggctacgcttaaggagtcctccggagga

SEQ ID NO: 118882 - DNA, 80 bp, synthetic construct
  source 1..80: mol_type = other DNA
tagcgggtcctaagggccccgtatgccaaatgtacaccaacgtggatcaggacctagtggggtggcccgcgccaccagga

SEQ ID NO: 118883 - DNA, 80 bp, synthetic construct
  source 1..80: mol_type = other DNA
accagcccgggtgtgctaatatccgggctgcgcgtgcgggcgcaagacagaatcatcgagttgtttgaacacccaacgat

SEQ ID NO: 118884 - DNA, 80 bp, synthetic construct
  source 1..80: mol_type = other DNA
ttcgcaggagtggatgccacgacctacatagggcacagcgcaggcagaacaacacaggggcttgtcggcctgctctctcc

SEQ ID NO: 118885 - DNA, 80 bp, synthetic construct
  source 1..80: mol_type = other DNA
cgaagagctcttggaggattcggaatctcccgaggaaggcccgcttcagcagcgcaaactgggtgtgaatggcggcggtg

SEQ ID NO: 118886 - DNA, 80 bp, synthetic construct
  source 1..80: mol_type = other DNA
gtggagacgatctagtcgtaatttccgagagtctgggcgtcggggaggatgctgcggctctgcgagctttcacggaagct

SEQ ID NO: 118887 - DNA, 80 bp, synthetic construct
  source 1..80: mol_type = other DNA
atgtatctttattgatttttacaccagcacgggtagtcagtctcccaccaccagcccatttcacagtgtaaacaattctc

SEQ ID NO: 118888 - DNA, 80 bp, synthetic construct
  source 1..80: mol_type = other DNA
gtggaggccccatgttcaactcacggggccagtcatgcggctataggaggtgcagggccagtggtgttttcaccactagc

SEQ ID NO: 118889 - DNA, 80 bp, synthetic construct
  source 1..80: mol_type = other DNA
tggtgtcgccaaggcccttgacttcatacctgtcgagggcatggagacgactatgcggtcaccctccttcactgacaact

SEQ ID NO: 118890 - DNA, 80 bp, synthetic construct
  source 1..80: mol_type = other DNA
ttatggcaagttcctcgcagacggaggctgctcagctggcgcctatgacgtcatcatatgcgacgaatgccacgcagtgg

SEQ ID NO: 118891 - DNA, 80 bp, synthetic construct
  source 1..80: mol_type = other DNA
agggcttacttcaacacaccaggcctccccgtctgccaagaccatctcgagttctgggaaagcgtctttacggggttaac

SEQ ID NO: 118892 - DNA, 80 bp, synthetic construct
  source 1..80: mol_type = other DNA
ccgcaggggccgagaggtactgctcggaccggccgatggagtggtctccaaggagtggaggttgctggcgcccatcacgg

SEQ ID NO: 118893 - DNA, 80 bp, synthetic construct
  source 1..80: mol_type = other DNA
cgcactccccccccccaggcagtaagacccaagcatagagagccaggcacaaaaacacaggcgtggtgggacacatgcct

SEQ ID NO: 118894 - DNA, 80 bp, synthetic construct
  source 1..80: mol_type = other DNA
tcagccaggcgaggaaatctcgttttcctgggcccggctgatgacgtgaaggtgaagggctggtccctcctagctcccat

SEQ ID NO: 118895 - DNA, 80 bp, synthetic construct
  source 1..80: mol_type = other DNA
ctcagcccggtcacccctggcccctctacggtaatgagggttgcgggtgggcaagttggctcttgtccccccgcgcctct

SEQ ID NO: 118896 - DNA, 80 bp, synthetic construct
  source 1..80: mol_type = other DNA
acggggcgacactcgtgcctccctgctcagcccgagacccatcagctatctcaagggttcatcgggcggcccggtcatgt

SEQ ID NO: 118897 - DNA, 80 bp, synthetic construct
  source 1..80: mol_type = other DNA
cccaaaccatcttcgacgtactcgcaggtgcacattggggcgtaatggccggattggcgtactactccatgcagggcaac

SEQ ID NO: 118898 - DNA, 80 bp, synthetic construct
  source 1..80: mol_type = other DNA
ccgtggcggtgcgttatgtgggcgcgaccaccgcgagcattcgtagccatgtggatctgctggtgggcgcggcgaccatg

SEQ ID NO: 118899 - DNA, 80 bp, synthetic construct
  source 1..80: mol_type = other DNA
atgggtcatcagaggacagaccgtattgctggcactacccacctaggccttgtggtgtggtagaggctcgtaccgtttgt

SEQ ID NO: 118900 - DNA, 80 bp, synthetic construct
  source 1..80: mol_type = other DNA
atttggactccgagctagcagagcccccaaccccgtcgcagggggaggaagcggccgctgactcggactccaagtcttgg

SEQ ID NO: 118901 - DNA, 80 bp, synthetic construct
  source 1..80: mol_type = other DNA
tgagggtgagatacaggtgatctctacggctacacaaacattcctagccactaccatcaacggggtgttgtggactgtct

SEQ ID NO: 118902 - DNA, 80 bp, synthetic construct
  source 1..80: mol_type = other DNA
actcgtcggggtgtcctgaacgcatgtcttcctgcaagccgatcacctttttcgaccagggttggtgccccatttcatat

SEQ ID NO: 118903 - DNA, 80 bp, synthetic construct
  source 1..80: mol_type = other DNA
gttagcggcttagccggtgctgccatcggtagcatagggttgggtaaggtcattgtagatatcctggctggatatggcgc

SEQ ID NO: 118904 - DNA, 80 bp, synthetic construct
  source 1..80: mol_type = other DNA
tagtcctagccctaccccagcgagcctacgctctggaactgcaagagcaaggacagttgggcgtgattatgctgattgct

SEQ ID NO: 118905 - DNA, 80 bp, synthetic construct
  source 1..80: mol_type = other DNA
gggagctgtacaatggatgaataggcttatcgccttcgcatcgcgcgggaaccatgtgtcaccgactcattacgtccccg

SEQ ID NO: 118906 - DNA, 80 bp, synthetic construct
  source 1..80: mol_type = other DNA
agagtcaaacccaagttgtgaggtggaggaagcccgaacagcaagagtgttggacatggctgaggaatggctaaagaaag

SEQ ID NO: 118907 - DNA, 80 bp, synthetic construct
  source 1..80: mol_type = other DNA
tggcagggggccaagcaggccgcactgctcacggggttgtcagtctcttttcacctgggccgactcagaatatccagctt

SEQ ID NO: 118908 - DNA, 80 bp, synthetic construct
  source 1..80: mol_type = other DNA
aaagcacccaccatagttagaacaactactagggaaacaacacatccaaccaccacaactcacactacacatctagacac

SEQ ID NO: 118909 - DNA, 80 bp, synthetic construct
  source 1..80: mol_type = other DNA
tgggattaatgattatatttttgtgtataatgtactacgcctgctgctatagaaaacatgaacaaaaaggtgatgcatta

SEQ ID NO: 118910 - DNA, 80 bp, synthetic construct
  source 1..80: mol_type = other DNA
ggcggggcttaaagggtatataatgcgccgtgggctaatcttggttacatttgacctcatggaggcttgggagtgtttgg

SEQ ID NO: 118911 - DNA, 80 bp, synthetic construct
  source 1..80: mol_type = other DNA
ccggacgtagccgtgctaacgtccatgctcactgatccctctcatataacagcagaggcggctgggaggaggttagcaag

SEQ ID NO: 118912 - DNA, 80 bp, synthetic construct
  source 1..80: mol_type = other DNA
ggatctgtcacggtccctcatcccaacattactgagacagctctctcctctgagggtgaaattcccttttacggtaaagc

SEQ ID NO: 118913 - DNA, 80 bp, synthetic construct
  source 1..80: mol_type = other DNA
gggccaaggtcatcggcatccttctcttgtttgcaggcgtggaggcgcacacgcacgtcactggtgctgtggccggccga

SEQ ID NO: 118914 - DNA, 80 bp, synthetic construct
  source 1..80: mol_type = other DNA
ccgacggacatgaaccaaatgcaaccgcagccgatcagcaagaacgagaatccaccaaccccacacacggatgtgtaaat

SEQ ID NO: 118915 - DNA, 80 bp, synthetic construct
  source 1..80: mol_type = other DNA
tccagagctgggaggagggcaaggaggtgtatccatatgacacggaaaccggtcctccaactgtgccttttcttactcct

SEQ ID NO: 118916 - DNA, 80 bp, synthetic construct
  source 1..80: mol_type = other DNA
atatgccttttatccccccgcaagtttgctttaccctcgccttcaccacccccgccaccttccggccattgtaataactt

SEQ ID NO: 118917 - DNA, 80 bp, synthetic construct
  source 1..80: mol_type = other DNA
atcctccgggggtccactcctttgtgcgtcaggccacgtggcgggattgtttcgcgcggctgtttgtactcgtggcgttg

SEQ ID NO: 118918 - DNA, 80 bp, synthetic construct
  source 1..80: mol_type = other DNA
ctccatagctatgttatggggtcccaacttccgtgtgagcccgagcctgatgtaatggtactaacatccatgctatctga

SEQ ID NO: 118919 - DNA, 80 bp, synthetic construct
  source 1..80: mol_type = other DNA
taccggtaccatgggagacttgtcatgttggacaaaagtgccgggttttacgttaaccggcgaacttcagtacttaaaac

SEQ ID NO: 118920 - DNA, 80 bp, synthetic construct
  source 1..80: mol_type = other DNA
tcttgcaggccagcctcctgcgtgtgccgtactatgtacgtgctcatgcgattttgcgtgcgtgcatactggtgcggcgc

SEQ ID NO: 118921 - DNA, 80 bp, synthetic construct
  source 1..80: mol_type = other DNA
gagtcagagccctggaggacgggattaattacgcaacagggaatctccccggttgctctttttctatcttccttttggca

SEQ ID NO: 118922 - DNA, 80 bp, synthetic construct
  source 1..80: mol_type = other DNA
cggaccagcgcggccacttccccgccaggaaccatgacaaaagaacccacactgattatgacacgcatactcggagctat

SEQ ID NO: 118923 - DNA, 80 bp, synthetic construct
  source 1..80: mol_type = other DNA
ggagggccgtccagaaccactgcgggttcggctggttggaccccggaggcttgccgttggggaagatggccgcgtggaac

SEQ ID NO: 118924 - DNA, 80 bp, synthetic construct
  source 1..80: mol_type = other DNA
cgtccatgaaagggtcgtctgaggacaggccctactgctggcactacgcgcccagaccttgtgacattgtccctgcacgg

SEQ ID NO: 118925 - DNA, 80 bp, synthetic construct
  source 1..80: mol_type = other DNA
gttccgtcaccgtcccacatccaaacatacaggagattggcctctccaccaacggggagataccattctatggcaaagcc

SEQ ID NO: 118926 - DNA, 80 bp, synthetic construct
  source 1..80: mol_type = other DNA
gaaaccaagaatttgtacaagagaggagttcacaagaaaagttaggtcaaacgcagccattggagcagtgttcgttgatg

SEQ ID NO: 118927 - DNA, 80 bp, synthetic construct
  source 1..80: mol_type = other DNA
gataatgagctcgcgaatatatcgccaggcggcgcgctgggtgggcgtgattccggaaacaccgtcaaaacagtagaact

SEQ ID NO: 118928 - DNA, 80 bp, synthetic construct
  source 1..80: mol_type = other DNA
cttggtctcctgcctggggattctgcacgagaaccgcctgggacagaccgtgctccactctaccctgaagggcgaggcgc

SEQ ID NO: 118929 - DNA, 80 bp, synthetic construct
  source 1..80: mol_type = other DNA
gtgtggccggggttgttggagaagggtgaccgcgggagatccgcgccgccggactggagcccgttgcctcggggtatgcc

SEQ ID NO: 118930 - DNA, 80 bp, synthetic construct
  source 1..80: mol_type = other DNA
ggacaagttgctttccaaatgcccccatccaggtgtaggtttctacatcataggtaataaaaaggcgctcagtgcgagga

SEQ ID NO: 118931 - DNA, 80 bp, synthetic construct
  source 1..80: mol_type = other DNA
tacactgactggtcctacccccctcctataccgcttgggtgccgtgaccaacgagattaccctgacccatcccgtgacga

SEQ ID NO: 118932 - DNA, 80 bp, synthetic construct
  source 1..80: mol_type = other DNA
cgtcttctacacaacaacgggcatcgtcattcttcagttgaaccacgctgcgaccccaccggttttgtaccaccttggct

SEQ ID NO: 118933 - DNA, 80 bp, synthetic construct
  source 1..80: mol_type = other DNA
atggccaaagctcgagcagttttggcagaaacacctctggaacttcatcagtgggatacagtacctagccgggctgtcca

SEQ ID NO: 118934 - DNA, 80 bp, synthetic construct
  source 1..80: mol_type = other DNA
gtacgggtcatagacgccctgcgcgtcacacaccacgggcagggagacgaacaaccccccggcgctggacgcacgcggaa

SEQ ID NO: 118935 - DNA, 80 bp, synthetic construct
  source 1..80: mol_type = other DNA
tcgcgatccaccagctgcttgatgttgttcaccaccgtgtgcagggcctcgcggttgccgataatcgtctccagcctccc

SEQ ID NO: 118936 - DNA, 80 bp, synthetic construct
  source 1..80: mol_type = other DNA
gatgggcggttttgcggtgcccggaaccgaaccgccggatactccccgggtgctacatgcccgttttggggctgtggttg

SEQ ID NO: 118937 - DNA, 80 bp, synthetic construct
  source 1..80: mol_type = other DNA
aaggtccgcgcggggctgataggccagggaggcagggctcgcatatgcggtctctacctcttcaactgggctgtcaggac

SEQ ID NO: 118938 - DNA, 80 bp, synthetic construct
  source 1..80: mol_type = other DNA
taatctccgagagtgcgggtgttgacgaggacgctgcgaacctgagagcttttgctgaagctatgaccaggtattccact

SEQ ID NO: 118939 - DNA, 80 bp, synthetic construct
  source 1..80: mol_type = other DNA
aagacggaggtcacgaaccctgccgtcttgcgcaaactgtgcattgaagctaaaatatcaaacaccaccaccgattcaag

SEQ ID NO: 118940 - DNA, 80 bp, synthetic construct
  source 1..80: mol_type = other DNA
gtaaaaaccaaacttaaactcactccactcgccgcagcaggccgactcgacttatcgagctggtttgttgtgggcgccgg

SEQ ID NO: 118941 - DNA, 80 bp, synthetic construct
  source 1..80: mol_type = other DNA
cgcagtcagcgcaggtggcgaacaggcagagggaggcatggcatataccggtatgtctcccaaggggaacgaccgtctgg

SEQ ID NO: 118942 - DNA, 80 bp, synthetic construct
  source 1..80: mol_type = other DNA
ggaccatgggcctaaatgccgtcgctttctaccgtggtgtcgatgtggcagttattccaactgcgggcgacgtagtcgtt

SEQ ID NO: 118943 - DNA, 80 bp, synthetic construct
  source 1..80: mol_type = other DNA
ccagggaaaaccaaccttggattttgaactgatcaagacaacagccaaggaagtggctctattaagaacctattgcattg

SEQ ID NO: 118944 - DNA, 80 bp, synthetic construct
  source 1..80: mol_type = other DNA
gatctaaggttgcaaaccaaggcacacgcgtgaagtatttagaccatttatcgtgggatataggaggagtttggagtgat

SEQ ID NO: 118945 - DNA, 80 bp, synthetic construct
  source 1..80: mol_type = other DNA
tccatgcagggtaactgggccaaggtcgctatcatcatgattatgttctcaggggtcgatgccacgacacatactgtcgg

SEQ ID NO: 118946 - DNA, 80 bp, synthetic construct
  source 1..80: mol_type = other DNA
cgcctataggctctggcattatccttgcactgtcaactacacagtattcaaggtcaggatgtacgtgggaggggtcgagc

SEQ ID NO: 118947 - DNA, 80 bp, synthetic construct
  source 1..80: mol_type = other DNA
cagccataggcgcagtcttccaagaggaacaaggatggacatcagccagtgaagctgtgaatgacagccggttttgggaa

SEQ ID NO: 118948 - DNA, 80 bp, synthetic construct
  source 1..80: mol_type = other DNA
ctacgtccccgtctgcgtcgcgcgcgcgcatgaccacctgcgcgaggttgagctccacgtgccgcgtgaagacggcgtag

SEQ ID NO: 118949 - DNA, 80 bp, synthetic construct
  source 1..80: mol_type = other DNA
cccttgaagaggagccgggagaccctgatctcgagccggagtcggcagactcctcccccccccccaccggagagcgggag

SEQ ID NO: 118950 - DNA, 80 bp, synthetic construct
  source 1..80: mol_type = other DNA
ggcggcgtactgtttgtcagtcgggtccgttgtcatcgtggggcgcatagagcttgaaggcagaccagtcctggtgcctg

SEQ ID NO: 118951 - DNA, 80 bp, synthetic construct
  source 1..80: mol_type = other DNA
cgatagtatgtgctcactaatgacgtcatcgcgctcgtggcgctcccggagcggatttaagttcatgcgaaggaattcgg

SEQ ID NO: 118952 - DNA, 80 bp, synthetic construct
  source 1..80: mol_type = other DNA
accctttggagactcatacatagtagtgggcagaggagaacaacaaatcaatcaccattggcacaagtctggaagcagca

SEQ ID NO: 118953 - DNA, 80 bp, synthetic construct
  source 1..80: mol_type = other DNA
ctgcgcccaactacaagctcgcgctgtggagggtgtcggccgaggagtacgtggaggtccgccgggtgtgagattaccac

SEQ ID NO: 118954 - DNA, 80 bp, synthetic construct
  source 1..80: mol_type = other DNA
ggatcgtgtaccactgccactgtcggtatccgttctcaaaaacatgctggatgggggcctccgcggccctacagcacctg

SEQ ID NO: 118955 - DNA, 80 bp, synthetic construct
  source 1..80: mol_type = other DNA
ggccgatgtcatccctgcgaggcgcaagggcgacactcgagcggccctcctatcacctagacctataagcactctgaagg

SEQ ID NO: 118956 - DNA, 80 bp, synthetic construct
  source 1..80: mol_type = other DNA
ggaggtggccggtgacggcgaacatcttgagggaggagatgggacccgtgacaccctaccccagtccccgggcccagcct

SEQ ID NO: 118957 - DNA, 80 bp, synthetic construct
  source 1..80: mol_type = other DNA
cgacatccttgtcggtggtcactggggtgttatcggtgcgctgctgtactacagcatggtggctaattgggctaaggtca

SEQ ID NO: 118958 - DNA, 80 bp, synthetic construct
  source 1..80: mol_type = other DNA
gctggacgtcggcgacgcctaccctcgccattccaaactcaaccgtgcccaccagcgggttccgaaggcatatcgacctt

SEQ ID NO: 118959 - DNA, 80 bp, synthetic construct
  source 1..80: mol_type = other DNA
tgtctgcacaggaggatcttggggacgatacgggcatccacgttatccctacgttaaacggcgatgacagacataaaatt

SEQ ID NO: 118960 - DNA, 80 bp, synthetic construct
  source 1..80: mol_type = other DNA
gatgagacagacagtcataaaacaaaaggaaaaacttcttcaaaacagaaaaaaacacaaaaaaataactctcatagaaa

SEQ ID NO: 118961 - DNA, 80 bp, synthetic construct
  source 1..80: mol_type = other DNA
cgaggatacgggctcgggttcggagacgctgtctcgatcctcttcgatctgggccgcaggggcgactgacgacgatgaca

SEQ ID NO: 118962 - DNA, 80 bp, synthetic construct
  source 1..80: mol_type = other DNA
aaaaagaatcctcccatcaatagttagagaagccttaaaaaggaggctgcgaaccttgattctggctcccacgagagtgg

SEQ ID NO: 118963 - DNA, 80 bp, synthetic construct
  source 1..80: mol_type = other DNA
attgggccaaggttatcctggtcctgtttctttttgctggagttgacgctgtgacctactctactggggcccgtgcggcg

SEQ ID NO: 118964 - DNA, 80 bp, synthetic construct
  source 1..80: mol_type = other DNA
attggcagcgtattgccttacaacaggcagtgttgtcatttgtggccgagttactaccagcggcagacctgctgtcgtgc

SEQ ID NO: 118965 - DNA, 80 bp, synthetic construct
  source 1..80: mol_type = other DNA
ccaaagctcctcctccctcctgggatgtaatgtggaagtgcctgaccagactcaaacccacactgactggccccactcct

SEQ ID NO: 118966 - DNA, 80 bp, synthetic construct
  source 1..80: mol_type = other DNA
cacgcccgcccctcctcaccctggctgggagaaaggaggaggagcaggaagaggagacccgaggcatgcaaccgcactca

SEQ ID NO: 118967 - DNA, 80 bp, synthetic construct
  source 1..80: mol_type = other DNA
gcatgtatgcctcaaaccggccgtttattaatcgcctaatggactacttgcatcgcgcggccgccgtgaaccccgagtat

SEQ ID NO: 118968 - DNA, 80 bp, synthetic construct
  source 1..80: mol_type = other DNA
cggtgtggtaggcgggaagtacgcccaagctgcgcttttgcggctaggcgtgtggacgggcacctacatctatgaccatc

SEQ ID NO: 118969 - DNA, 80 bp, synthetic construct
  source 1..80: mol_type = other DNA
tatggtaagtgtgactcagcaggcaggtctaggaggtcaagaagggccattgacttgcctacgcatgaaaaccatggttt

SEQ ID NO: 118970 - DNA, 80 bp, synthetic construct
  source 1..80: mol_type = other DNA
ccggctcactcggcccgttccaaatttggatacggcgctaaagacgtccgtagccactccagcaaggccgtgaaccacat

SEQ ID NO: 118971 - DNA, 80 bp, synthetic construct
  source 1..80: mol_type = other DNA
cccggtactgccccccatgaaccccgttccgacatcgggcaccccggcccccgcgccgcccggcgacgggagctacctgt

SEQ ID NO: 118972 - DNA, 80 bp, synthetic construct
  source 1..80: mol_type = other DNA
acggggggtgggtcttagggggttgagaggcgacagggaccacagagcatgcgcggggaggtctgtagggcctagaccca

SEQ ID NO: 118973 - DNA, 80 bp, synthetic construct
  source 1..80: mol_type = other DNA
cggcgaagggccccgtgtccaagagtccctctgccgtgtggtctgcgggcgtgccgcgggcggaccccggcccccgcccc

SEQ ID NO: 118974 - DNA, 80 bp, synthetic construct
  source 1..80: mol_type = other DNA
agggggacttacagtggatgacactgatgggaccttacaagaaaacatacgtgctacagcacccattactaaaaataatc

SEQ ID NO: 118975 - DNA, 80 bp, synthetic construct
  source 1..80: mol_type = other DNA
tttttagcggacaaaagctctgtgagtttgccagcaaaaacctaacgtggtcttttccacaattaatttttaaatgtgac

SEQ ID NO: 118976 - DNA, 80 bp, synthetic construct
  source 1..80: mol_type = other DNA
tttaaaccaccatgctaacaaagaaccggctgccttacactgtaatgaacctgggcgattacagtgacaatgaataaacc

SEQ ID NO: 118977 - DNA, 80 bp, synthetic construct
  source 1..80: mol_type = other DNA
cgcggcgccgcggctcgcgactggcgggagccgccgccgccgctgctgttggtggtggtgttggtgttactgctgccgtg

SEQ ID NO: 118978 - DNA, 80 bp, synthetic construct
  source 1..80: mol_type = other DNA
aactgccactccccctgggtctgtcacggttccgcaccccaacatagaggagatagcacttcctacgacaggggaggtgc

SEQ ID NO: 118979 - DNA, 80 bp, synthetic construct
  source 1..80: mol_type = other DNA
acaggagagacctgagactagcggctaacgctatctgctcagccgtcccaattgattgggtcccagccagccgcacaacc

SEQ ID NO: 118980 - DNA, 80 bp, synthetic construct
  source 1..80: mol_type = other DNA
ggatgaagaaaggaagctgcaccaacaaggcaggtgtcggacttgtgtgtacaacatgatggggaaaagagagaagaagc

SEQ ID NO: 118981 - DNA, 80 bp, synthetic construct
  source 1..80: mol_type = other DNA
ggcagtgcccgcagggccacaccctgatgagactgcccactcggacactggatcagtttcatctatgccccctttggaag

SEQ ID NO: 118982 - DNA, 80 bp, synthetic construct
  source 1..80: mol_type = other DNA
acaactgacaacttgaaggtcccctgccaaataccatctcctgaattcttctcctgggtggacggtgtgcaaatccacag

SEQ ID NO: 118983 - DNA, 80 bp, synthetic construct
  source 1..80: mol_type = other DNA
tctagtcgactacccgtaccggttgtggcatttcccatgcactgtcaactacactatctttaagatcaggatgtatgttg

SEQ ID NO: 118984 - DNA, 80 bp, synthetic construct
  source 1..80: mol_type = other DNA
ttttttgttaaataaaaacctacatcccgataaggtatcgttagcatacaaacggttagctgccttaaccctggagttat

SEQ ID NO: 118985 - DNA, 80 bp, synthetic construct
  source 1..80: mol_type = other DNA
agatgaaacatatcagccagaaccacaggtaggagaagaaaactggcaagaaaatgaagccttctatggaggcagggctc

SEQ ID NO: 118986 - DNA, 80 bp, synthetic construct
  source 1..80: mol_type = other DNA
acggcgcgcgccaggtctgtgaagcagtggtggagggccgtcgcgacggaggtggtggtcgcgcgcagggacgccagctg

SEQ ID NO: 118987 - DNA, 80 bp, synthetic construct
  source 1..80: mol_type = other DNA
tctgccagccagctctcagctccgtcgctgaaggccacttgccaaacgcatagaccacatcctgatgctgagctgataga

SEQ ID NO: 118988 - DNA, 80 bp, synthetic construct
  source 1..80: mol_type = other DNA
gatccagccagtgttcatggcagcgtccttcttaagatctagatggaccaaccaagaaaacattcttctgatgttggccg

SEQ ID NO: 118989 - DNA, 80 bp, synthetic construct
  source 1..80: mol_type = other DNA
cacgacggcgctggaaagagggtctactaccttacccgtgaccctacaacccccctcgcgagagccgcgtgggagacagc

SEQ ID NO: 118990 - DNA, 80 bp, synthetic construct
  source 1..80: mol_type = other DNA
ttgcactaaacgccttcctgagtacacagcccgccaacgtgccgcggggacaggaggactacaccaactttgtgagcgca

SEQ ID NO: 118991 - DNA, 80 bp, synthetic construct
  source 1..80: mol_type = other DNA
ccctcggcttgtttttgagatcaccaaacacctcctagctcttatagggccactctacgtgctgcaggcctccctactgc

SEQ ID NO: 118992 - DNA, 80 bp, synthetic construct
  source 1..80: mol_type = other DNA
gtgaccagggttgccgtgctggttatgctcctgtgtttggccccggtctacgcctcgcgctgcacacatttggaaaacag

SEQ ID NO: 118993 - DNA, 80 bp, synthetic construct
  source 1..80: mol_type = other DNA
ttggtgatgcggctggcgttggccgtgagccacttttcaatagtcaggccgggctggtgtgtcagccgtcggtattcgtc

SEQ ID NO: 118994 - DNA, 80 bp, synthetic construct
  source 1..80: mol_type = other DNA
ctactgacagtggaaagctgatcaccgattggtgctgccgcagctgttctctaccgcctttacggttccggacagaaaat

SEQ ID NO: 118995 - DNA, 80 bp, synthetic construct
  source 1..80: mol_type = other DNA
gctaaaatatcaaacaccaccaccgattcgagatgtccaacacaaggagaagccacgctggtggaagaacaggacacgaa

SEQ ID NO: 118996 - DNA, 80 bp, synthetic construct
  source 1..80: mol_type = other DNA
ggccgcttgccgcagcctcgactctttccgcattggatggggcagcatagagcatgagaccaatgtcaccaatgatgagg

SEQ ID NO: 118997 - DNA, 80 bp, synthetic construct
  source 1..80: mol_type = other DNA
ccatagtgatcagcgactcccccccggcctctccccacaggcccccccgggcgcccatgccaggctccgcccgccgcctc

SEQ ID NO: 118998 - DNA, 80 bp, synthetic construct
  source 1..80: mol_type = other DNA
tggagtacatcaaaggtggtaggcacttaatcttttgtcattccaagaagaaatgcgacgagctcgccggccagcttaga

SEQ ID NO: 118999 - DNA, 80 bp, synthetic construct
  source 1..80: mol_type = other DNA
gacgagcgcgatccggccgggatcctaggaccccaaaagtttgtctgcgtattccagggcgtggctcagttgaatctccc

SEQ ID NO: 119000 - DNA, 80 bp, synthetic construct
  source 1..80: mol_type = other DNA
cacatagatgcccatttcctgtcccagaccaaacaggctggagagaacttcccctacctgatagcataccaggccacagt

SEQ ID NO: 119001 - DNA, 80 bp, synthetic construct
  source 1..80: mol_type = other DNA
gcaacacaacatccacctgggttacatatggaacatgcagctcatcaggagaacacagaagggaaaaaagatcagtggcc

SEQ ID NO: 119002 - DNA, 80 bp, synthetic construct
  source 1..80: mol_type = other DNA
gaccatcttgcacccttgtccacgtgggcaagtgacgggttgcaagacctggcagtggcggtggaaccagtcaccttctc

SEQ ID NO: 119003 - DNA, 80 bp, synthetic construct
  source 1..80: mol_type = other DNA
atgttttcaggggtcgatgccagctacacgtaccgtcggtggcagtgcagctcagtctgccagggggtttgctagccttt

SEQ ID NO: 119004 - DNA, 80 bp, synthetic construct
  source 1..80: mol_type = other DNA
acccagtcactaaatacatcatggcctgcatgtctgccgacttagaggtcaccacaagcacctgggtgatactcgggggt

SEQ ID NO: 119005 - DNA, 80 bp, synthetic construct
  source 1..80: mol_type = other DNA
attgatggacctgctgaggcaaggaaggtgtgctacagtgcagtcttgaccaacgtgaagatcaatgacaagtgccccag

SEQ ID NO: 119006 - DNA, 80 bp, synthetic construct
  source 1..80: mol_type = other DNA
ggggtcgccctacaccgctacgcaccaccctgcaagcctttgctgagagaggaagtctcattcagcgtggggcttaacac

SEQ ID NO: 119007 - DNA, 80 bp, synthetic construct
  source 1..80: mol_type = other DNA
ccatgggtccggcgacattgccagaggagcatcaggcgagcacagtctgcagacgagaccagagtgatagaggatggggc

SEQ ID NO: 119008 - DNA, 80 bp, synthetic construct
  source 1..80: mol_type = other DNA
actggtcgtaggcgtggtatgtgctgccgtcctgcgacgccacgtgggcccttccgagggagccgcccagtggatgaaca

SEQ ID NO: 119009 - DNA, 80 bp, synthetic construct
  source 1..80: mol_type = other DNA
tcgacggtcccgaaaccagcgaatgtccgaacagccgccgtgcctggaacagccttgagattgaagacttcggatttgga

SEQ ID NO: 119010 - DNA, 80 bp, synthetic construct
  source 1..80: mol_type = other DNA
tcggagggatgttgtccgcgccgcaccgtcccccgacgacctcttgcagacggtccgtgatgcaaggacggcgggtggcc

SEQ ID NO: 119011 - DNA, 80 bp, synthetic construct
  source 1..80: mol_type = other DNA
gtattcggtccactagcgtaatatcccggaatgtctttgtagggcaaatctctcttggactcatttagagcttcacgtgc

SEQ ID NO: 119012 - DNA, 80 bp, synthetic construct
  source 1..80: mol_type = other DNA
tcctaccagacagacaggtcctttaccaggagtttgatgagatggaagagtgtgcgacgcagttgccctatattgaacat

SEQ ID NO: 119013 - DNA, 80 bp, synthetic construct
  source 1..80: mol_type = other DNA
gggccaaaaatagatacaaatgcaaaaacaaaacacgcgccagacgagcggtctctcggtagtacctgtccgcgatcgtg

SEQ ID NO: 119014 - DNA, 80 bp, synthetic construct
  source 1..80: mol_type = other DNA
ggaggtggatggagtgcggttgcacaggtacgctccggcgtgcaaacctcttctacgggaggacgtcacgttccaggtcg

SEQ ID NO: 119015 - DNA, 80 bp, synthetic construct
  source 1..80: mol_type = other DNA
tgccattgatggtgaataccgtttgagaggagaagcaaggaaaacctttgtggacctaatgagaagaggggacttaccag

SEQ ID NO: 119016 - DNA, 80 bp, synthetic construct
  source 1..80: mol_type = other DNA
ccactactcacactacacagctagacactacagtacataatagtactgtgatgataaggtttttgttaagggaggaaagt

SEQ ID NO: 119017 - DNA, 80 bp, synthetic construct
  source 1..80: mol_type = other DNA
agtgggatgctgaagagaaaaaagatacgcagggaaatgagatggtcaccaagacacatacatatggcgtggcaccaatg

SEQ ID NO: 119018 - DNA, 80 bp, synthetic construct
  source 1..80: mol_type = other DNA
ttttcgtggactcgttattgcacccccgacgaggtgcgcgtggttatcatcggccaggacccatatcaccaccccggcca

SEQ ID NO: 119019 - DNA, 80 bp, synthetic construct
  source 1..80: mol_type = other DNA
cgcgtcaacgttcatcagcgaagggtggcacacggtcccgatcgcgtgttccagagacaggcgcagcacctggcggtcct

SEQ ID NO: 119020 - DNA, 80 bp, synthetic construct
  source 1..80: mol_type = other DNA
tcagggcacacgttctactgcgagcctgcctatttgtgcgccaacttgttggtgcaaaatacatccaggcttgtctgctg

SEQ ID NO: 119021 - DNA, 80 bp, synthetic construct
  source 1..80: mol_type = other DNA
aggggatatataccagtgttgccaactcgaaccagaagccagaaaagtcatatcatcactgactgagaggctgtacgttg

SEQ ID NO: 119022 - DNA, 80 bp, synthetic construct
  source 1..80: mol_type = other DNA
tgtaactgctgaggctgcggcacgacgcttagctcgcgggtcgccgccctctcttgccagctcatcggcaagccagctct

SEQ ID NO: 119023 - DNA, 80 bp, synthetic construct
  source 1..80: mol_type = other DNA
tccgctgtggaagtcagaaacctctcggactcatacatggtgacgaatgattgctcgaacagcagcatcacttggcagct

SEQ ID NO: 119024 - DNA, 80 bp, synthetic construct
  source 1..80: mol_type = other DNA
tgatcagggttggggccctatcacctatgctaacataagtggggcgtcagatgatagaccgtattgctggcattatccgc

SEQ ID NO: 119025 - DNA, 80 bp, synthetic construct
  source 1..80: mol_type = other DNA
tgcagccatctgctcatcatccagctcgccaaccagaacacgataatcactttcggtaagtgcagcagctttacgacggc

SEQ ID NO: 119026 - DNA, 80 bp, synthetic construct
  source 1..80: mol_type = other DNA
cagacttatcaggtcgcgcacctgcacgcaccaacagggagcggcaaaagctccaaggtcccagcggcatacgctgctca

SEQ ID NO: 119027 - DNA, 80 bp, synthetic construct
  source 1..80: mol_type = other DNA
gtagtggtcatagatccgccgaaatatggcgctgctgcgggtggccatgggaacgcggagacaggcctccagcaacgcca

SEQ ID NO: 119028 - DNA, 80 bp, synthetic construct
  source 1..80: mol_type = other DNA
gatttccgaggactgctcgatcccatgcgctggttcgtggctccgcgacatctgggactgggtttgttccgttcttacgg

SEQ ID NO: 119029 - DNA, 80 bp, synthetic construct
  source 1..80: mol_type = other DNA
atggtccaccatttttcagcaagattagcacatgggtgaccgctgagctgaaggaaggtggcatggatttttacgtgccc

SEQ ID NO: 119030 - DNA, 80 bp, synthetic construct
  source 1..80: mol_type = other DNA
tgctgccggtggactcttcgcacaccgcgacgctcgccaggaccccggggagcgaagttgccatggctgagcgagaggtg

SEQ ID NO: 119031 - DNA, 80 bp, synthetic construct
  source 1..80: mol_type = other DNA
ccgtgctgcgcgtagctacatcgcgactatggagccctcgcaggctgcaaactgcggatgctgtacgcgcagctagctgt

SEQ ID NO: 119032 - DNA, 80 bp, synthetic construct
  source 1..80: mol_type = other DNA
cgacgcgccgccagtagtgctctgcgtccagcaaggcgccgccgcggaaggcagtgggaggcaaggggtcgctggcctca

SEQ ID NO: 119033 - DNA, 80 bp, synthetic construct
  source 1..80: mol_type = other DNA
aagtgaaatcttgtacctggccagaaacgcacaccctgtggggtgatggtgttgttgaaagcgaaatgatcatcccggtg

SEQ ID NO: 119034 - DNA, 80 bp, synthetic construct
  source 1..80: mol_type = other DNA
cccccttgaccacctgggccagcaatgggctacgcgacctggctgtcgcagtggagcccgttattttctcacccatggag

SEQ ID NO: 119035 - DNA, 80 bp, synthetic construct
  source 1..80: mol_type = other DNA
cctggggagaaaatgtgtccgacgtgttcctactacacagcgccagacctcctctggtggcctggttcggttgcacgtgg

SEQ ID NO: 119036 - DNA, 80 bp, synthetic construct
  source 1..80: mol_type = other DNA
catgaggatcgtcggcccgaagctgtgcagcaacacctggcacggaaccttccccatcaacgccacaacaacggggccca

SEQ ID NO: 119037 - DNA, 80 bp, synthetic construct
  source 1..80: mol_type = other DNA
tccatagcaatcaggagaaaatcaagaagagaatccagaagcttaaagaagaattcgccacaacgtggcacaaagaccct

SEQ ID NO: 119038 - DNA, 80 bp, synthetic construct
  source 1..80: mol_type = other DNA
ctatctgaggtgacgggcttaggccctgacatcatacaggccaactccatgtattcattttatggcgatgatgatattgt

SEQ ID NO: 119039 - DNA, 80 bp, synthetic construct
  source 1..80: mol_type = other DNA
aaccccttctcgggacctcccggccactatccggatcagtttattcctaactttgacgcggtaaaggactcggcggacgg

SEQ ID NO: 119040 - DNA, 80 bp, synthetic construct
  source 1..80: mol_type = other DNA
ttggcaaagcctttacaaccacccttaaaggagcgcagagactagccgctctaggagatacagcttgggactttggatca

SEQ ID NO: 119041 - DNA, 80 bp, synthetic construct
  source 1..80: mol_type = other DNA
gttggccgtcgcgtgccgcctccgcagctcgtccgcaaaggcaaacacccgtgcgtacgtgtatcccatgagcgtataat

SEQ ID NO: 119042 - DNA, 80 bp, synthetic construct
  source 1..80: mol_type = other DNA
gaactgcaatgagagcctcaacgccggttggctcgccgccctcttctacgcgaacaggttcaattcctccgggtgtccag

SEQ ID NO: 119043 - DNA, 80 bp, synthetic construct
  source 1..80: mol_type = other DNA
ggcataccaggccacagtgtgcgccagggccaaagcccccccgccttcttgggatacgatgtggaagtgtctcatcagac

SEQ ID NO: 119044 - DNA, 80 bp, synthetic construct
  source 1..80: mol_type = other DNA
ggtcgctgagtagtgcgcgagcaaaatttaagctacaacaaggcaaggcttgaccgacaattgcatgaagaatctgctta

SEQ ID NO: 119045 - DNA, 80 bp, synthetic construct
  source 1..80: mol_type = other DNA
cacaggtgggtgtggggtctagccttcatctgccttgcttggcatgtcagaggtagacttggccccgtggtcgcctatgg

SEQ ID NO: 119046 - DNA, 80 bp, synthetic construct
  source 1..80: mol_type = other DNA
gccaggatgtccccgagttggcccgcgtgcgccagccaggcgaccagcgcctcgtaaagcggcagcctgcgctcgccgtc

SEQ ID NO: 119047 - DNA, 80 bp, synthetic construct
  source 1..80: mol_type = other DNA
ggatggaggccggggtaggtgccgccggaccccctcgcgatgggaatggacgggagcgacggagccggcgcaaaaaaacg

SEQ ID NO: 119048 - DNA, 80 bp, synthetic construct
  source 1..80: mol_type = other DNA
gccttcacggaggctatgaccaggtactctgctccacccggagatgctccacagcctacctacgaccttgagctcatcac

SEQ ID NO: 119049 - DNA, 80 bp, synthetic construct
  source 1..80: mol_type = other DNA
cagacgtgcgtgctctgcacgatcgggcccccctccctgtcaacacggacacactctttttttacccgccagcccgccca

SEQ ID NO: 119050 - DNA, 80 bp, synthetic construct
  source 1..80: mol_type = other DNA
gtaagttccttgcagacgggggttgctccgggggggcatatgatgttattatctgtgatgaatgtcatgcccaagacgct

SEQ ID NO: 119051 - DNA, 80 bp, synthetic construct
  source 1..80: mol_type = other DNA
agaaacaaccaaagcctgttccgcctcccaggcaacgctggcagcgccgcaggaaaggagcatatgcttctgaaccagaa

SEQ ID NO: 119052 - DNA, 80 bp, synthetic construct
  source 1..80: mol_type = other DNA
gccatattttttgggcacttatgacaagcgctttccaggctttgtttctccacacaagctcgcctgcgccatagtcaata

SEQ ID NO: 119053 - DNA, 80 bp, synthetic construct
  source 1..80: mol_type = other DNA
tgcaggattccagtaatggtcgccgatgatctcacagcggcagtcaacaagggcatcttggtcacagtcaatccaatagc

SEQ ID NO: 119054 - DNA, 80 bp, synthetic construct
  source 1..80: mol_type = other DNA
cctttccttgaccttcataaaatcaacaatgccattggtcatggcttggaggaccataatggctgtgttgtttgtggtca

SEQ ID NO: 119055 - DNA, 80 bp, synthetic construct
  source 1..80: mol_type = other DNA
ggtgtcacgcaggataacatcaagtgcccctgccaggtcccagcccctgaatttttcactgaggtcgacggagtcaactt

SEQ ID NO: 119056 - DNA, 80 bp, synthetic construct
  source 1..80: mol_type = other DNA
ggcggagagcgaagacaagggcgcgcagttgggagctgtccatggtgtcgcggagatccaggtccggtggcagggttcta

SEQ ID NO: 119057 - DNA, 80 bp, synthetic construct
  source 1..80: mol_type = other DNA
tgtctttttcttgcacgtgtgtgcgggtgctttagtcagtgtccgcagcgttctgttgaacgtgagtgtgttgagaaaaa

SEQ ID NO: 119058 - DNA, 80 bp, synthetic construct
  source 1..80: mol_type = other DNA
accagattatgtaccaccaactgtccacggatgtgccttaccaccacagggcgctccaccggtgcctccccctcggagga

SEQ ID NO: 119059 - DNA, 80 bp, synthetic construct
  source 1..80: mol_type = other DNA
gcgagttgaagttttgtctgtacgtgcagcttcttggggacctttggccacggcggttatattgcataaattatcctgaa

SEQ ID NO: 119060 - DNA, 80 bp, synthetic construct
  source 1..80: mol_type = other DNA
tgggcccggcgtacccatcccagcgccaaactacacgtttgcgctatggagggtgtccgccgaggaatatgtgcaggtcc

SEQ ID NO: 119061 - DNA, 80 bp, synthetic construct
  source 1..80: mol_type = other DNA
gttcgtctcgtccgagccaatgcgcctccaccgagataacgtcatgctggcctcgtgggccgagtaaccgcccccccccc

SEQ ID NO: 119062 - DNA, 80 bp, synthetic construct
  source 1..80: mol_type = other DNA
gtcatagtgggtaggatcattctatctggcaaacccgcagtcatacctgacaggcaagttctttaccaacaatttgatga

SEQ ID NO: 119063 - DNA, 80 bp, synthetic construct
  source 1..80: mol_type = other DNA
ggcgtcgtctgccgtggacccctgtattaaaggggccttggaactagcctccactgcatttacatcttgtccaactgtat

SEQ ID NO: 119064 - DNA, 80 bp, synthetic construct
  source 1..80: mol_type = other DNA
gcgcagcgtggaaactgataaaggcccattggataaggatgctattgaggaaagagttgagagaatcaagaatgaatatg

SEQ ID NO: 119065 - DNA, 80 bp, synthetic construct
  source 1..80: mol_type = other DNA
tctcagcacaactacagaccagggtatttcacacaaacagcagggccatggcacctaggtaagttggaactggattttga

SEQ ID NO: 119066 - DNA, 80 bp, synthetic construct
  source 1..80: mol_type = other DNA
gaggctcggccggaggtcggacgctgggagaacagtggaaagacaggcttaatcagctgagcaaagaggaatttttccag

SEQ ID NO: 119067 - DNA, 80 bp, synthetic construct
  source 1..80: mol_type = other DNA
cactctgcccggctcgccctgtcccgcctcttgctgcttttccgcgcgcctctctttcccgttgctttccctctcccccc

SEQ ID NO: 119068 - DNA, 80 bp, synthetic construct
  source 1..80: mol_type = other DNA
tcctaacataactgaggtcgggttgtccaccactggagagatcccgttctacggcaaggcgattcctctcgaagtcatca

SEQ ID NO: 119069 - DNA, 80 bp, synthetic construct
  source 1..80: mol_type = other DNA
gtgatgtttctgatcagatgatgcaagacgcaacggacccggcggtgcgggcggcgctgcagagccagccgtccggcctt

SEQ ID NO: 119070 - DNA, 80 bp, synthetic construct
  source 1..80: mol_type = other DNA
cttgaaagcatgggcggaaaagaaggaccccatgggtttttcgtatgatacccgatgcttcgactcaaccgtcactgaga

SEQ ID NO: 119071 - DNA, 80 bp, synthetic construct
  source 1..80: mol_type = other DNA
acaaattggagctttcttatgcagacccatttgaggttaaagacactaagctacaattaaaagtaggtcatggtttaaaa

SEQ ID NO: 119072 - DNA, 80 bp, synthetic construct
  source 1..80: mol_type = other DNA
caggttattgccccaatcaatcagcctcgccccccttctcccacccccactgagattagctactttaatttgacaggtgg

SEQ ID NO: 119073 - DNA, 80 bp, synthetic construct
  source 1..80: mol_type = other DNA
gcccaggcggtgcggccggtcgggtcgacgcggcgggtggtggatatgtcatcggaggcccgccaggcggcgctggtgcg

SEQ ID NO: 119074 - DNA, 80 bp, synthetic construct
  source 1..80: mol_type = other DNA
ctcacccttaattgcaggggctcttttaagatcttcgtaggaaagatcttcaagcgcgactagtccgttttcttcttgag

SEQ ID NO: 119075 - DNA, 80 bp, synthetic construct
  source 1..80: mol_type = other DNA
tataattacgcagtaacggtttacccggtattatgtataataaataaacgtataaaagacagtcgtggtttgtgtttatt

SEQ ID NO: 119076 - DNA, 80 bp, synthetic construct
  source 1..80: mol_type = other DNA
ggtcatcgtaggccgtttggtcctagggtcgcacacagtggtggcccctgacagggaagtcctataccagcagttcgacg

SEQ ID NO: 119077 - DNA, 80 bp, synthetic construct
  source 1..80: mol_type = other DNA
ccatggcgaagaagaaaggggccgtgctcttgggcttagcgctcacatccaccggatggttttcgcccaccactatcgca

SEQ ID NO: 119078 - DNA, 80 bp, synthetic construct
  source 1..80: mol_type = other DNA
tggctgccgtgcctgtgcttttcatagaaatgccagcggaaatcctgaaactctatgtgctctgtgttacctgcgtctta

SEQ ID NO: 119079 - DNA, 80 bp, synthetic construct
  source 1..80: mol_type = other DNA
gtcggtcattgtggccataaccatcttcaccctcaccccgcactacaagtggttgctcatgcgactgctgtggtggaacc

SEQ ID NO: 119080 - DNA, 80 bp, synthetic construct
  source 1..80: mol_type = other DNA
gcgtggacgcttcaaaagggggtcgcaagccagctcggctgatcgtattcccggaccttagcgtgcgggtgtgcgagaag

SEQ ID NO: 119081 - DNA, 80 bp, synthetic construct
  source 1..80: mol_type = other DNA
ccgcgctaatcgcacccgcgctgacgccctacttaatctgggacctggttcacgcttacctgatatagcttccttggaag

SEQ ID NO: 119082 - DNA, 80 bp, synthetic construct
  source 1..80: mol_type = other DNA
gcaagcatagcggctagaggatacatctcaactcgagtagagatgggtgaagcagctgggattttcatgacagctacccc

SEQ ID NO: 119083 - DNA, 80 bp, synthetic construct
  source 1..80: mol_type = other DNA
ctacggagcctgttactccatcgaaccactggacctacctccaatcattcaaagactccatggccttagcgcatttacac

SEQ ID NO: 119084 - DNA, 80 bp, synthetic construct
  source 1..80: mol_type = other DNA
gccgcctattactagttggcccagccgatgacgcccgagaccttgggtggaagttgctagcccccatcactgcataccat

SEQ ID NO: 119085 - DNA, 80 bp, synthetic construct
  source 1..80: mol_type = other DNA
tcgagcccgtggtgccgctgggcccgcggtccaggtggcgcgcaaacgtctccgcgggcgcctccagactcccgctgagc

SEQ ID NO: 119086 - DNA, 80 bp, synthetic construct
  source 1..80: mol_type = other DNA
ccaaatgtccatgcggggctctcatcgcgggccatgtcaagaacggctccatgcgcatcgtaggccctaaaacatgccgt

SEQ ID NO: 119087 - DNA, 80 bp, synthetic construct
  source 1..80: mol_type = other DNA
cacggactgggatttcgtggtcaccacagacatatctgaaatgggagccaatttcagagctgggagagtgatagacccta

SEQ ID NO: 119088 - DNA, 80 bp, synthetic construct
  source 1..80: mol_type = other DNA
cccctccggttggaacgcccgacgggggctgtggtgagataccactagcgttacctgctacagaagccatatcgctgtcg

SEQ ID NO: 119089 - DNA, 80 bp, synthetic construct
  source 1..80: mol_type = other DNA
agtatttcattgcactcattgaggcccaactttaccagtgggtgccatccctgcaggttaggggtggacgtgacgctgct

SEQ ID NO: 119090 - DNA, 80 bp, synthetic construct
  source 1..80: mol_type = other DNA
agtgaggaggcggctctcggtacaggtgccagccgacggtggcgagggcgccggtggacaggtcgtccagcatgaggcga

SEQ ID NO: 119091 - DNA, 80 bp, synthetic construct
  source 1..80: mol_type = other DNA
tctgacattactcttcgctgcaattttttctccacccatctcacctggagttttaacggaaaacccatcgccgaggtaaa

SEQ ID NO: 119092 - DNA, 80 bp, synthetic construct
  source 1..80: mol_type = other DNA
gcacttgggaaaactggagctggatttcaactattgtgaaggaacaacagtagtcatcacagaaaactgtgggacaagag

SEQ ID NO: 119093 - DNA, 80 bp, synthetic construct
  source 1..80: mol_type = other DNA
gactacgtaagttagttattggattcagtggtacatttcaatcgtttgcaaaggttttacgtgacgactcctttgtgaag

SEQ ID NO: 119094 - DNA, 80 bp, synthetic construct
  source 1..80: mol_type = other DNA
cgacttcagtcttgaccctacattttctattgagacaaccacgctaccccaggacgctgtgtcgcgctcccaacggaggg

SEQ ID NO: 119095 - DNA, 80 bp, synthetic construct
  source 1..80: mol_type = other DNA
accaattttgcataaaaattctgaatccctacatgccaagtgtggtggaaactctggagcaaatgcaaagaaaacatgga

SEQ ID NO: 119096 - DNA, 80 bp, synthetic construct
  source 1..80: mol_type = other DNA
atgttacatcaaagcggttgcgtcctgtagagccgcagggctccgggactgtactctgttagtgtgcggtgacgacttgg

SEQ ID NO: 119097 - DNA, 80 bp, synthetic construct
  source 1..80: mol_type = other DNA
ccagctgtgccccagacctaccaggtgggatatctccatgctcccaccggtagcgggaagagtaccaaagtccccgcagc

SEQ ID NO: 119098 - DNA, 80 bp, synthetic construct
  source 1..80: mol_type = other DNA
accgtgctcgccaccgccacccctccagggtccatcaccgtgccacaccctaacatcgaagaggtcgctttgtccaccac

SEQ ID NO: 119099 - DNA, 80 bp, synthetic construct
  source 1..80: mol_type = other DNA
tgggcggcatagagcacaggtttgacgctgcctgcaattggactagggtggagcggtgcgagcttgatgatagggacagg

SEQ ID NO: 119100 - DNA, 80 bp, synthetic construct
  source 1..80: mol_type = other DNA
agcgcatgtcttcctgccgcaggctggacgattttcgcatcgggtggggatccttggaatacgagaccgatgttaccaat

SEQ ID NO: 119101 - DNA, 80 bp, synthetic construct
  source 1..80: mol_type = other DNA
caacgtgagtgggcctaccgaggagcgaccgtactgctggcattacccgccacgaccatgtggcactgtgtcggccaagg

SEQ ID NO: 119102 - DNA, 80 bp, synthetic construct
  source 1..80: mol_type = other DNA
ctgacccgtctgagcctggaacaggatattcgtgtggaagaagaaatttatcagtgctgcaccctggatccggaagcgaa

SEQ ID NO: 119103 - DNA, 80 bp, synthetic construct
  source 1..80: mol_type = other DNA
gggtgcgtggagtccggggctcccggggagaccggggctcccgcggagaccggagctccctgggagaccggagttgtcgt

SEQ ID NO: 119104 - DNA, 80 bp, synthetic construct
  source 1..80: mol_type = other DNA
tggacatcgcatggcatgggatatgatgatgaactggtctccgaccacgacgttgatcctgtcctacgtcatgcgcattc

SEQ ID NO: 119105 - DNA, 80 bp, synthetic construct
  source 1..80: mol_type = other DNA
gtcttggcattgccccacagattgcttcaggaagcatccggacgcaacttacgccaagtgtggatcagggccctggctca

SEQ ID NO: 119106 - DNA, 80 bp, synthetic construct
  source 1..80: mol_type = other DNA
tccatgggcttgaagccttttcactgcacacatactctccccacgaactcagtcgggtagcagccgctctcagaaaactt

SEQ ID NO: 119107 - DNA, 80 bp, synthetic construct
  source 1..80: mol_type = other DNA
gccacagttcccactgtttctcctccccttacaaacagtaacaactccctgggtttaactacatccgctcctatagctgt

SEQ ID NO: 119108 - DNA, 80 bp, synthetic construct
  source 1..80: mol_type = other DNA
tgttacccgcccactcgcgttcggacgtcttagaatcatggcggttttctatgccgacatcggtttcctcccccgcaata

SEQ ID NO: 119109 - DNA, 80 bp, synthetic construct
  source 1..80: mol_type = other DNA
cggaacccgaggctcccggggaacacgcggtgtcctggggattgttggcggtcggacggcttcagatggcttcgagatcg

SEQ ID NO: 119110 - DNA, 80 bp, synthetic construct
  source 1..80: mol_type = other DNA
acctgatttcatacggaggaggatggagattgagcacacaatggcaaaagggagaggaggtgcaggttattgccgtagag

SEQ ID NO: 119111 - DNA, 80 bp, synthetic construct
  source 1..80: mol_type = other DNA
cccccacgtcctccttcggttgttagctattttaagttcgccggtgaagatgattgaacccgacctacaaatggatggaa

SEQ ID NO: 119112 - DNA, 80 bp, synthetic construct
  source 1..80: mol_type = other DNA
cccaaacctggatgtcggctgaaggggcttggagacaagtcgagaaggtagagacatgggcccttaggcatccagggttc

SEQ ID NO: 119113 - DNA, 80 bp, synthetic construct
  source 1..80: mol_type = other DNA
gagggcctatcgcaacttgctcggccgagcaagccaatgaagatggcgtcgaatgaacgatcattgtgcccagacaagag

SEQ ID NO: 119114 - DNA, 80 bp, synthetic construct
  source 1..80: mol_type = other DNA
agcgtgtgacctgacgcccccccactcagccagatctaaatttggctatggggcgaaggacgtccgcagccatcccagaa

SEQ ID NO: 119115 - DNA, 80 bp, synthetic construct
  source 1..80: mol_type = other DNA
acagggctggggcagccttgggactgctaacatcaatgggtcatctgacgataggccctactgctggcattacgcaccta

SEQ ID NO: 119116 - DNA, 80 bp, synthetic construct
  source 1..80: mol_type = other DNA
tcgccgcacccaccgcctgattgttaaccagacatttccagcaacagacctcaataattcccattttccataagaggagg

SEQ ID NO: 119117 - DNA, 80 bp, synthetic construct
  source 1..80: mol_type = other DNA
gggtatatgcaaaggtggcacttaggccagattgcaagtacaagatcagcaaacttgtaaatatcaggaattgttgctac

SEQ ID NO: 119118 - DNA, 80 bp, synthetic construct
  source 1..80: mol_type = other DNA
cacgacaggtggaagcgggggggacatatttcacagcgtgtcccgggtccgaccccgcatgctactcctgtgcctactcc

SEQ ID NO: 119119 - DNA, 80 bp, synthetic construct
  source 1..80: mol_type = other DNA
acttaacatacaagaaggcctggcatacttaaatccttcaaaacacatgtttacaataccaaacgtatacagtccttgta

SEQ ID NO: 119120 - DNA, 80 bp, synthetic construct
  source 1..80: mol_type = other DNA
cgtgtatgacgctaacaaaattgtgtacacagtcaaagtagagccgcatacgggggattacgtcgctgccaatgagactc

SEQ ID NO: 119121 - DNA, 80 bp, synthetic construct
  source 1..80: mol_type = other DNA
ggagttggcttctgccagaacttccagctgttggaggtttatttttggttcaaccttaactaatgtaatttatagagcca

SEQ ID NO: 119122 - DNA, 80 bp, synthetic construct
  source 1..80: mol_type = other DNA
gctcgtctcgtcgtatacccggacctatcggtgcgggtgtgcgaaaagagggctttgtttgacgtcacccgcaagttgcc

SEQ ID NO: 119123 - DNA, 80 bp, synthetic construct
  source 1..80: mol_type = other DNA
ggagacatcgggccagggcggtcagggccaagctcattgcccaagggtggaaagccgctatatgtggcagatacctcttc

SEQ ID NO: 119124 - DNA, 80 bp, synthetic construct
  source 1..80: mol_type = other DNA
caaaccgccggctgcaaacgaagaaacctccggcactgcacaatgctcgtgtgcggagacgacctcgtcgttctctgcga

SEQ ID NO: 119125 - DNA, 80 bp, synthetic construct
  source 1..80: mol_type = other DNA
gctaagcaactcacatctctcggggtcaacgctgtggcttactaccgcggccttgacgtctccgttataccccagacagg

SEQ ID NO: 119126 - DNA, 80 bp, synthetic construct
  source 1..80: mol_type = other DNA
caaaagttcgcagtcatgcagccatcggagctttcctggaagagcaagaacagtggaagactgccaatgaagctgtccaa

SEQ ID NO: 119127 - DNA, 80 bp, synthetic construct
  source 1..80: mol_type = other DNA
gaggaagagcaggaggaagaactctcggagagcaatggaaagaaaagctaaatgccatgggtaaagaagaattcttcagc

SEQ ID NO: 119128 - DNA, 80 bp, synthetic construct
  source 1..80: mol_type = other DNA
agccggcgcgctgcggtgtcgcccagcgcctcgtgctcggcccccacgaccgcggggcttcccaggcgcagggcgcgaaa

SEQ ID NO: 119129 - DNA, 80 bp, synthetic construct
  source 1..80: mol_type = other DNA
aacagcatagcctcctgcgcgtgccttattatgtgcgtgcgcatgcgctcttgcgcttgtgcatgctcgtgaggcgccta

SEQ ID NO: 119130 - DNA, 80 bp, synthetic construct
  source 1..80: mol_type = other DNA
taccctgccaggtaatccggctatagcctccctcatgtccttcagcgcgtcattgacgagcccacttacctgtaaccaga

SEQ ID NO: 119131 - DNA, 80 bp, synthetic construct
  source 1..80: mol_type = other DNA
cggtaccggccccatgtggtcacgtcgccgggcgtggtgagcgagtggagcagcagcacgcggtccgtaaactgccggca

SEQ ID NO: 119132 - DNA, 80 bp, synthetic construct
  source 1..80: mol_type = other DNA
gatgagatggaagaatgtgccgcccacttgccttacctggagcacgggatgcagctcgcggagcaattcaaacagaaagc

SEQ ID NO: 119133 - DNA, 80 bp, synthetic construct
  source 1..80: mol_type = other DNA
gcgacgacatcgacaccatcgtgggccgtctgcaacattttgttctgccctctacataggggacgtatgtggcgcgataa

SEQ ID NO: 119134 - DNA, 80 bp, synthetic construct
  source 1..80: mol_type = other DNA
ccgccctgaccgtgtgtggcccagtgtattgcttcacccccagcccagtcgtggtaggtaccaccgacaaacttggggcg

SEQ ID NO: 119135 - DNA, 80 bp, synthetic construct
  source 1..80: mol_type = other DNA
gaccacccaatggataaaaatccaactatggacctacttactggagttcctaactgtatgttacaaagtcctcaggtagt

SEQ ID NO: 119136 - DNA, 80 bp, synthetic construct
  source 1..80: mol_type = other DNA
gccgtccaagggcggccgcaaacccgcacgcttgattgtatacccggacctgtctgtccgggtgtgcgaaaaaatggcgt

SEQ ID NO: 119137 - DNA, 80 bp, synthetic construct
  source 1..80: mol_type = other DNA
cagaggcaatcattgatctgacctatcgccacaaggtggtgaaagtcatgagaccagggcctgatgggaaaacttacatg

SEQ ID NO: 119138 - DNA, 80 bp, synthetic construct
  source 1..80: mol_type = other DNA
ggaaacggatgcgggttgtttgggaaaggcagcattgacacatgcgctaaatttgtctgcagccacaaggccattgggaa

SEQ ID NO: 119139 - DNA, 80 bp, synthetic construct
  source 1..80: mol_type = other DNA
agtttccgtccctgcagaaatactgcgtaaggcgaagaagttcccctcggcgatgcccgtatgggcgtcgccatcttaca

SEQ ID NO: 119140 - DNA, 80 bp, synthetic construct
  source 1..80: mol_type = other DNA
gtagtcctcattctcctcctgatggcgggggttgatggcactacgaggatcggctccagtgtggccgagaacacccggtc

SEQ ID NO: 119141 - DNA, 80 bp, synthetic construct
  source 1..80: mol_type = other DNA
ccgcctggctctgttacggtccctcacccaaacatacaggagacggcacttcccctaacgggagaggtgccgttttatgg

SEQ ID NO: 119142 - DNA, 80 bp, synthetic construct
  source 1..80: mol_type = other DNA
ttacatcagcattgcggtcattgcgatgggacaatcttcatccagcggtcgaggaggaatctgtggattgtgcaaacggt

SEQ ID NO: 119143 - DNA, 80 bp, synthetic construct
  source 1..80: mol_type = other DNA
aggcacgtgccatcgccgggcaatttaaggagaaagtgcttggcctcattggcacggctggccagaaagctgaaactctg

SEQ ID NO: 119144 - DNA, 80 bp, synthetic construct
  source 1..80: mol_type = other DNA
actaatgtaatctacagagctaaggaggagtactcttcgcggtttgctgaccttttgtcgcataaccctggaatttttgc

SEQ ID NO: 119145 - DNA, 80 bp, synthetic construct
  source 1..80: mol_type = other DNA
tatgtgttggggcggtcgtcgctcaatgccaggggcctcctggtcatgcctacgcgctggccctccgggcacgcctgtgc

SEQ ID NO: 119146 - DNA, 80 bp, synthetic construct
  source 1..80: mol_type = other DNA
cgacataatgcgggttccgaaaatgtgtgctttttactgctgaagggaactgccagtgttaagcataatatgatttgtgg

SEQ ID NO: 119147 - DNA, 80 bp, synthetic construct
  source 1..80: mol_type = other DNA
cactactctcgtgcctcacaacgccagcgtcggctcttacctacggtaactccagtgggctataccatcttacaaatgat

SEQ ID NO: 119148 - DNA, 80 bp, synthetic construct
  source 1..80: mol_type = other DNA
acttccgcccccgccgccactggactacccaagagtgcaactgctccatttatccagggcatgtgacagggcacagaatg

SEQ ID NO: 119149 - DNA, 80 bp, synthetic construct
  source 1..80: mol_type = other DNA
tgccctgcctcccagcaagccgacccccgttcccccccccaggaggaagcgggcgatcgcgctcaccgagtccaatgtcg

SEQ ID NO: 119150 - DNA, 80 bp, synthetic construct
  source 1..80: mol_type = other DNA
cgacatcgccctgaaggagcccgtcccctttcgccggctccacgaggccctgggccactttaggcgcggggctctggctg

SEQ ID NO: 119151 - DNA, 80 bp, synthetic construct
  source 1..80: mol_type = other DNA
gccattccagccactgttagcagctccaccttaaccttgcaatcagggcacttgaagtgcagagccaagcttgacaaggt

SEQ ID NO: 119152 - DNA, 80 bp, synthetic construct
  source 1..80: mol_type = other DNA
tcgtgcagaatgtagcagggggaaaatatgttcaagcagcaattttgagagtcggatcttggacgggcacttacatctat

SEQ ID NO: 119153 - DNA, 80 bp, synthetic construct
  source 1..80: mol_type = other DNA
ttaagttgggaaggatgcatgccgggggagattagatgcatttttgcctggatttttagattggcaatgttacccccgag

SEQ ID NO: 119154 - DNA, 80 bp, synthetic construct
  source 1..80: mol_type = other DNA
tcctacgtaacaagaacctcagggagtgcagcaagcatgattaacggggtgattaagatcttgacatacccctgggatag

SEQ ID NO: 119155 - DNA, 80 bp, synthetic construct
  source 1..80: mol_type = other DNA
catctgatcacgtcagattacattaacacttcattaacctcaattaatgttcaagcaagtgcactattcacactcgcgcg

SEQ ID NO: 119156 - DNA, 80 bp, synthetic construct
  source 1..80: mol_type = other DNA
ttgccaagcttgagcagttctgggccaagcacatgtggaatttcatcagtggcattcaatacctagctggcttgtccacc

SEQ ID NO: 119157 - DNA, 80 bp, synthetic construct
  source 1..80: mol_type = other DNA
atgttcggagggaaagcgcctgtgtcaggaatgactggactgcctggtatggcattggacctacgcccagctacagcctg

SEQ ID NO: 119158 - DNA, 80 bp, synthetic construct
  source 1..80: mol_type = other DNA
gcaagccacacaagaagtacatcatctggttttatcagaacactactctagcagtagccaacacctgctcgaacgacggt

SEQ ID NO: 119159 - DNA, 80 bp, synthetic construct
  source 1..80: mol_type = other DNA
agtcgactttagcttggaccctaccttcactattgagaccacgaccgttccacaagatgctgtggccagaagtcaacggc

SEQ ID NO: 119160 - DNA, 80 bp, synthetic construct
  source 1..80: mol_type = other DNA
gcagtcttataactttacttcttacctcgcttcaattttttgattactactacgtgcgatacgtttaccgcagacatcac

SEQ ID NO: 119161 - DNA, 80 bp, synthetic construct
  source 1..80: mol_type = other DNA
cccgcgacaggagacgtagtcgtgtgcagcactgacgcgctcatgacgggttttaccggcgactttgattctgtcataga

SEQ ID NO: 119162 - DNA, 80 bp, synthetic construct
  source 1..80: mol_type = other DNA
cacgcccggatatgaggtaattttgggcggttgcaaataaaattaggacatggtggcgccaaaactgaatgaggaagtga

SEQ ID NO: 119163 - DNA, 80 bp, synthetic construct
  source 1..80: mol_type = other DNA
ccttactcaggtttggatattcaaattacttttctggttgtctgtgggatctttattcttgtggttcttctgtactttgt

SEQ ID NO: 119164 - DNA, 80 bp, synthetic construct
  source 1..80: mol_type = other DNA
ctggggcttttgggaagcctcgtggaggctgttcttgccgccacccatcggggacctgcggccaacacaacggacccctt

SEQ ID NO: 119165 - DNA, 80 bp, synthetic construct
  source 1..80: mol_type = other DNA
atctcgcggtccagtcacgcagatgtataccagcgcagaaggagacctcgtggggtggcccagccccccaggaactaagt

SEQ ID NO: 119166 - DNA, 80 bp, synthetic construct
  source 1..80: mol_type = other DNA
gatacacccgagagtttgtcgggattatacgtttttgtggtgtattttaacgggcatgttgaagccgtagcatacactgt

SEQ ID NO: 119167 - DNA, 80 bp, synthetic construct
  source 1..80: mol_type = other DNA
gttcgcgacactgcttgcctcgcgaagtcttacgcgcagatgtggctcttgatgtatttccatcgtagagatttgaggct

SEQ ID NO: 119168 - DNA, 80 bp, synthetic construct
  source 1..80: mol_type = other DNA
ccttctctatcgacacctctacggtaccacaagacgccgtatcgaggagccaacgaagaggcaggaccggcaggggtaag

SEQ ID NO: 119169 - DNA, 80 bp, synthetic construct
  source 1..80: mol_type = other DNA
ccgtcttggggcccaaacgatccccggcgaaggtcgcgtaacctgggtaaagtcatcgataccctgacttgcggctttgc

SEQ ID NO: 119170 - DNA, 80 bp, synthetic construct
  source 1..80: mol_type = other DNA
ttttcacggcgccattatgagaactgaaatgactcccttggtcctgtcgtatcaggaagctgacgacatattggagcatt

SEQ ID NO: 119171 - DNA, 80 bp, synthetic construct
  source 1..80: mol_type = other DNA
atccgttactcggaattgtcaccgttgtacgataccactcgagtgtacttggtggacaacaagtcttccgacattgcttc

SEQ ID NO: 119172 - DNA, 80 bp, synthetic construct
  source 1..80: mol_type = other DNA
catattgacacctgggatagactaggagatcttctgctctgcacaaccagccacacggcacagtgcgccgacaatggtgg

SEQ ID NO: 119173 - DNA, 80 bp, synthetic construct
  source 1..80: mol_type = other DNA
caaattcaagtattgtctatgaggcggaaaccatcatccttcatcttcccggatgtgtcccgtgtactaagacaggcaat

SEQ ID NO: 119174 - DNA, 80 bp, synthetic construct
  source 1..80: mol_type = other DNA
gcagtcccattgggtagaaataacagcacttatcttaggagcccaggctttgccagtgtacctaatgactcttatgaaag

SEQ ID NO: 119175 - DNA, 80 bp, synthetic construct
  source 1..80: mol_type = other DNA
cacgtggacttgatggtaggtgctgctaccgcatgctccgccttttatgtcggagatctgtgtggggctatatttatggt

SEQ ID NO: 119176 - DNA, 80 bp, synthetic construct
  source 1..80: mol_type = other DNA
tggaggacactacccaaccatgtgcaacatcctggttgtgggacatctggaactgggtatgcaccgtactggccgacttt

SEQ ID NO: 119177 - DNA, 80 bp, synthetic construct
  source 1..80: mol_type = other DNA
tttatgtttcaggttcagggggaggtgtgggaggttttttcggatcctctagagtcgaccggccagcctcgcagagcagg

SEQ ID NO: 119178 - DNA, 80 bp, synthetic construct
  source 1..80: mol_type = other DNA
aactcttctgggtgtccagagaggatggctagctgcaggtccctcgccgtatttgaccagggctggtggactatcagcta

SEQ ID NO: 119179 - DNA, 80 bp, synthetic construct
  source 1..80: mol_type = other DNA
tcctgggccatcaagtgggattatgtcatccttttgttcctcctgcttgcagacgcgcgtatctgctcctgcttgtggat

SEQ ID NO: 119180 - DNA, 80 bp, synthetic construct
  source 1..80: mol_type = other DNA
tctccaagatggagacaaagatcatcacctggggcgctgataccatagcttgtggagatattctctccggactcccagtg

SEQ ID NO: 119181 - DNA, 80 bp, synthetic construct
  source 1..80: mol_type = other DNA
ttcaccgtttgtcgttcgagaaccttcgacgcccgggaccccgtgaggcccggggagttccttctggggtgttttaatca

SEQ ID NO: 119182 - DNA, 80 bp, synthetic construct
  source 1..80: mol_type = other DNA
tatgcgaggcagctacttggctggtggttcaatagcctggaccctcattaaaaatgttgataaaccatctctgaaaagag

SEQ ID NO: 119183 - DNA, 80 bp, synthetic construct
  source 1..80: mol_type = other DNA
cctacaggctctggcactacccatgtactgtcaacttcaccctgcacaaggtccgcatgtatgttggtggcacggaacat

SEQ ID NO: 119184 - DNA, 80 bp, synthetic construct
  source 1..80: mol_type = other DNA
ccgcaccggatcacccccaaaccaatccagactcaggccgtggcacttccaacgccgaggccggaccaccgatcggagat

SEQ ID NO: 119185 - DNA, 80 bp, synthetic construct
  source 1..80: mol_type = other DNA
agcccgcgcagcccgtccagcccgcgcagcccgtccagcccgtccagcccgcgcagcccgtccagcccgcgcagcccgcg

SEQ ID NO: 119186 - DNA, 80 bp, synthetic construct
  source 1..80: mol_type = other DNA
aacaaacaaacagcgatgaaacaccttctgagttttaagaaagaactagggaccttgaccagtgctatcaatcggcggag

SEQ ID NO: 119187 - DNA, 80 bp, synthetic construct
  source 1..80: mol_type = other DNA
ccggcgtccccgccgccggggtccccggcgccggccgcgccccggcgctccagccgtgccgcgccccggcgcgctcccaa

SEQ ID NO: 119188 - DNA, 80 bp, synthetic construct
  source 1..80: mol_type = other DNA
ggggggctgatactgccgcctgtggtgacattctccagggccgccccgtctcggcgaggttaggctccctcgtatgtcta

SEQ ID NO: 119189 - DNA, 80 bp, synthetic construct
  source 1..80: mol_type = other DNA
gcagtgaagagagcaaacggggagaggaactggacttgaaatgctacgaggaatgtctgccttctagcgattctgaaacg

SEQ ID NO: 119190 - DNA, 80 bp, synthetic construct
  source 1..80: mol_type = other DNA
ggtagtttatggcaagtacttccaaatggtcgtgcttaaagcaggggccctgactggtacttacatctatgaccacctta

SEQ ID NO: 119191 - DNA, 80 bp, synthetic construct
  source 1..80: mol_type = other DNA
tgcttgtgtaatgttttacaggtgacgtgtctgacgcggaaggggacggagatagatcagggtctgctaattctccttgc

SEQ ID NO: 119192 - DNA, 80 bp, synthetic construct
  source 1..80: mol_type = other DNA
tacactgatctagtgcggtatctcatattggtgggttcagcatttgcagaatcaaacaacggaggtgatgtcattcattt

SEQ ID NO: 119193 - DNA, 80 bp, synthetic construct
  source 1..80: mol_type = other DNA
gccacgggccgcagcggcaccgtgctggcgacggcgtgggccgtggaggtgctgggtgcggaggctggcttggccacgcc

SEQ ID NO: 119194 - DNA, 80 bp, synthetic construct
  source 1..80: mol_type = other DNA
cgtacgcagttccatgcgcggatcgcgagacggccgccacaggcccgcacccggcagcccgcccgggattcccgaatatg

SEQ ID NO: 119195 - DNA, 80 bp, synthetic construct
  source 1..80: mol_type = other DNA
caagactcctctctttggaggaggcgtgccaactgactccgccccattccgcaaggtccaagtacggatttggggctagg

SEQ ID NO: 119196 - DNA, 80 bp, synthetic construct
  source 1..80: mol_type = other DNA
accccgctcattactcttcggcctactcctacttttcgtaggggtaggcctcttcctactccccgctcggtagagcggca

SEQ ID NO: 119197 - DNA, 80 bp, synthetic construct
  source 1..80: mol_type = other DNA
catgtcgtcgtcatcttcttcggccgcctctgcggcggtgggcttgggcgcggagagaggcggtcgtgggatcgcggaag

SEQ ID NO: 119198 - DNA, 80 bp, synthetic construct
  source 1..80: mol_type = other DNA
ttggagacagactcaccaaagttctgaagggctatgggctcaagcccacccgcccagacaagactgagggccccatcgag

SEQ ID NO: 119199 - DNA, 80 bp, synthetic construct
  source 1..80: mol_type = other DNA
cccgagcggcttatgcaaacattgcaaaatggtttgccagactttgtcagccaaagtatcttgcaaaactttcgctcctt

SEQ ID NO: 119200 - DNA, 80 bp, synthetic construct
  source 1..80: mol_type = other DNA
atgcgacgtagtcggcgtacgccgtgtccttcacggggctctggtccacgcgctccagcgccgccacgcacgccaccagc

SEQ ID NO: 119201 - DNA, 80 bp, synthetic construct
  source 1..80: mol_type = other DNA
cctggtccattattcttacaggctttggcattatccttgcaccatcaactacaccctgttcaaagtcaggatgtacgtgg

SEQ ID NO: 119202 - DNA, 80 bp, synthetic construct
  source 1..80: mol_type = other DNA
ctttcacggaagctatgatcaggtactcagcccctcctggagatgaaccacatccggaatatgacctcgagctaatcaca

SEQ ID NO: 119203 - DNA, 80 bp, synthetic construct
  source 1..80: mol_type = other DNA
actacatgattttgatcaggggtgcggccctttgacatacgcattcaacaggaccacgtccaggggcaggccctactgtt

SEQ ID NO: 119204 - DNA, 80 bp, synthetic construct
  source 1..80: mol_type = other DNA
catcttagggcccctccacatactccaggcctcgctcctacgcatcccttactttgtgagggcacaagcgctggttaaga

SEQ ID NO: 119205 - DNA, 80 bp, synthetic construct
  source 1..80: mol_type = other DNA
aggttatggagatcacagcggagtggctctggagaaccctgggaaggaataaaagacccaggttatgtacaagggaagag

SEQ ID NO: 119206 - DNA, 80 bp, synthetic construct
  source 1..80: mol_type = other DNA
aacatcaccgccgacgactgggcgtccagccgcaggctggcgttgtgggtgagccactgggacgagaagcacggaccctg

SEQ ID NO: 119207 - DNA, 80 bp, synthetic construct
  source 1..80: mol_type = other DNA
tggccaccagcgccaccagcacgtcgttctcgttaaaggaaacgcggtgcctagtggagctctggggtccgagcggcggc

SEQ ID NO: 119208 - DNA, 80 bp, synthetic construct
  source 1..80: mol_type = other DNA
cccatgacacaacgcagcagcggggcccgagcactgagggaagctgtacctccttgcaaaggactagaggttagaggaga

SEQ ID NO: 119209 - DNA, 80 bp, synthetic construct
  source 1..80: mol_type = other DNA
cgagcgtggagacatcgggcacgagcggtgcgcgccaagcttatcgcccaaggaggaaaggccaagatttgtggcctcta

SEQ ID NO: 119210 - DNA, 80 bp, synthetic construct
  source 1..80: mol_type = other DNA
cagctggatattacggcctttttaaagaccgtaaagaaaaataagcacaagttttatccggcctttattcacattcttgc

SEQ ID NO: 119211 - DNA, 80 bp, synthetic construct
  source 1..80: mol_type = other DNA
tggcatcaggagtgaaggccagactcctctccgtagaggaggcttgcgacctcacccccccacgatcagcccggtccaag

SEQ ID NO: 119212 - DNA, 80 bp, synthetic construct
  source 1..80: mol_type = other DNA
gttgacctaggaagtggaacccgcaacattggaattgaaggtgaaataccaaatctagacataattggaaagagaataga

SEQ ID NO: 119213 - DNA, 80 bp, synthetic construct
  source 1..80: mol_type = other DNA
cccgagcagtccgcgctaagcttatcgcccagggaggtagagccaaaatatgtggcatatacctctttaactgggcggta

SEQ ID NO: 119214 - DNA, 80 bp, synthetic construct
  source 1..80: mol_type = other DNA
tggaattcgtgccactcgaaaccaaattctgctagaacaggccgccctaacctctaccccgcgacgtcagctgaacccac

SEQ ID NO: 119215 - DNA, 80 bp, synthetic construct
  source 1..80: mol_type = other DNA
cctcagaggcttagcagctgcaagcccatcaccttcttcaagcaggggtggggctccttgacagacgccaacattaccgg

SEQ ID NO: 119216 - DNA, 80 bp, synthetic construct
  source 1..80: mol_type = other DNA
gccgctcctggaaacctggaagcggccagactataaaccaccagtggttgccggctgtgccctcccccctcctaagcagg

SEQ ID NO: 119217 - DNA, 80 bp, synthetic construct
  source 1..80: mol_type = other DNA
agtcttgtatcaacaattcgacgagatggaagagtgttcacaccatatcccatatctcgccgagggacaacatttggccg

SEQ ID NO: 119218 - DNA, 80 bp, synthetic construct
  source 1..80: mol_type = other DNA
cgtcccgtccagggcctcccccgtgagcagggcgatggcctcggtggccaggctgaaggcggcgttcagggcccggcggt

SEQ ID NO: 119219 - DNA, 80 bp, synthetic construct
  source 1..80: mol_type = other DNA
tgactttgtacccgttgaggccctagagaccaccatgaggtccccggtctttactgacaattccacccctcctgctgtgc

SEQ ID NO: 119220 - DNA, 80 bp, synthetic construct
  source 1..80: mol_type = other DNA
agccaagtcaaaaaagatgcgattttccaaattaccaatcacggcttccactaaggctggcacacgcacttcaagaaaca

SEQ ID NO: 119221 - DNA, 80 bp, synthetic construct
  source 1..80: mol_type = other DNA
gggtcgtactcctatgtaacaggactgaccactgacaatctgaaaattccttgccaactaccttctccagagtttttctc

SEQ ID NO: 119222 - DNA, 80 bp, synthetic construct
  source 1..80: mol_type = other DNA
aacctagtaaaactgcactccgggaaagacgtattctttataccacccgagaaatgtgatacccttttgtgtgatattgg

SEQ ID NO: 119223 - DNA, 80 bp, synthetic construct
  source 1..80: mol_type = other DNA
tgttaccaaaattgccgggcctccccttcgtctcttgccagagagggtacaggggcgtatgggctggaactggcatcatg

SEQ ID NO: 119224 - DNA, 80 bp, synthetic construct
  source 1..80: mol_type = other DNA
cgctcaccgccgccagggcctgggccggactgagcttcccgagcgccggggcgtcccggcgctgggtcccgagctccaag

SEQ ID NO: 119225 - DNA, 80 bp, synthetic construct
  source 1..80: mol_type = other DNA
agactgagaatggctgttggtatggaatggaaattcgacccacgcggcacgacgaaaagaccctcgtgcaatcgagagtg

SEQ ID NO: 119226 - DNA, 80 bp, synthetic construct
  source 1..80: mol_type = other DNA
cgcaaaactggtcgcgttgggcgtcaacgccgtggcttactaccgcggccttgatgtgtccgtcatcccaactagtggcg

SEQ ID NO: 119227 - DNA, 80 bp, synthetic construct
  source 1..80: mol_type = other DNA
ggcaggtttttacccttagacccaagatccataccaccgtccaagattgcaactgctccatctacaccggccacatcacc

SEQ ID NO: 119228 - DNA, 80 bp, synthetic construct
  source 1..80: mol_type = other DNA
cttggagaacttggtggtcctcaatgcggcggctttggccgggacgcatggcatcttctccttcctcgtgttcttctgct

SEQ ID NO: 119229 - DNA, 80 bp, synthetic construct
  source 1..80: mol_type = other DNA
gtggcattccttcgtttcctaacaatcccaccaacagcagggatactgaaaagatggggaacgatcaaaaagtcaaaggc

SEQ ID NO: 119230 - DNA, 80 bp, synthetic construct
  source 1..80: mol_type = other DNA
cggagacctgtgtggaggcatatttctggtgggccagatgatcgacttccgcccccgccgccactggactacccaagagt

SEQ ID NO: 119231 - DNA, 80 bp, synthetic construct
  source 1..80: mol_type = other DNA
ggtgggccgccgcctccgtcgcggcggcgggagccgcggcccccagccgcgcgacgtagcgacaaaagtggcgacagagg

SEQ ID NO: 119232 - DNA, 80 bp, synthetic construct
  source 1..80: mol_type = other DNA
agtgagggctgtcgaggacgggttaaattatgcaaccgggaatctccccggttgctccttttctatcttcctacttgctc

SEQ ID NO: 119233 - DNA, 80 bp, synthetic construct
  source 1..80: mol_type = other DNA
gaacacactgacgtgctttctcaaggccacagcggcagccaaagccgctggcctaaagaattgcaccatgctggtgaacg

SEQ ID NO: 119234 - DNA, 80 bp, synthetic construct
  source 1..80: mol_type = other DNA
cttgttggtaattgccatcatcaccatatttaccctcaccccggcatataaaactcttcttataagcacgttgtggtgga

SEQ ID NO: 119235 - DNA, 80 bp, synthetic construct
  source 1..80: mol_type = other DNA
acggtgaagggatgagccccgggctgggcgcttgcgagggtgcgcttcaggctcatcctgctggtgctgaagcgggcgtc

SEQ ID NO: 119236 - DNA, 80 bp, synthetic construct
  source 1..80: mol_type = other DNA
gccaagatcatgcttgataacatccacttgccaaatggattagtagctcaactttatggacctgaaagggagaaggcctt

SEQ ID NO: 119237 - DNA, 80 bp, synthetic construct
  source 1..80: mol_type = other DNA
ccccgtggtggtgttcgactttgccagcctgtaccccagcatcatccaggcccacaacctgtgcttcagcacgctctccc

SEQ ID NO: 119238 - DNA, 80 bp, synthetic construct
  source 1..80: mol_type = other DNA
gttgaagtgtttcagcggtttcaggccgtctgccatgggcatcttttcaagcgactgacgaagcaagtacagtcggtccc

SEQ ID NO: 119239 - DNA, 80 bp, synthetic construct
  source 1..80: mol_type = other DNA
actcctcgcccccggaggcggccagggcgcgcttcgtgaggtccaaaatcacctcccagtagtacgtcagatctcgtcgc

SEQ ID NO: 119240 - DNA, 80 bp, synthetic construct
  source 1..80: mol_type = other DNA
ctccaccaatgatgatgaagtgttgatcgaggtgaatcctccctttggggatagttacatcatagttgggacaggggatt

SEQ ID NO: 119241 - DNA, 80 bp, synthetic construct
  source 1..80: mol_type = other DNA
cacccatggctggtgttcgacatcaccaagctcctgctggccttgatcgggccggcgtgggtattgcgatccagcctgct

SEQ ID NO: 119242 - DNA, 80 bp, synthetic construct
  source 1..80: mol_type = other DNA
cggaattaccggaaagactgggtcctttcttggataaacccactctatgtccggtcatttgggcgtgcccccgcaagact

SEQ ID NO: 119243 - DNA, 80 bp, synthetic construct
  source 1..80: mol_type = other DNA
ggtgttcgtaacaacactctcaccttatctactatggaacccttaacagtaagcgctaatgggttaggaataaacgttac

SEQ ID NO: 119244 - DNA, 80 bp, synthetic construct
  source 1..80: mol_type = other DNA
gttcgctgttgggctattattccgcagactaacatccagagaagttcttctcctcacgattggattaagcctggtggcat

SEQ ID NO: 119245 - DNA, 80 bp, synthetic construct
  source 1..80: mol_type = other DNA
ttgacggacccgaaaccaaagagtgtccagacgagcgcagagcatggaacagcatgcagattgaagactttgggtttggc

SEQ ID NO: 119246 - DNA, 80 bp, synthetic construct
  source 1..80: mol_type = other DNA
agccggtcgagcaccaaccctctccttcagaggaagaggaagctcccgactccaactccgggtcttggtccacgtgttcc

SEQ ID NO: 119247 - DNA, 80 bp, synthetic construct
  source 1..80: mol_type = other DNA
ctatagtccacccccctgtggcattgtgccagcgcggaatgtctgcggaccggtgttctgcttcacccccagccctgtgg

SEQ ID NO: 119248 - DNA, 80 bp, synthetic construct
  source 1..80: mol_type = other DNA
ggaaagcttccagccaatcgcagtcgcaaggtaagctaaggacggtggcatgagggattctaagggaggcagcagaggag

SEQ ID NO: 119249 - DNA, 80 bp, synthetic construct
  source 1..80: mol_type = other DNA
gcccctccctcccgcgccccgtgccttccctcccgctcctgcggggtggctcgggccacctgaccttcgtaacctgcact

SEQ ID NO: 119250 - DNA, 80 bp, synthetic construct
  source 1..80: mol_type = other DNA
gttttgcgtatttatttggacggggcgtatggaattggaaaaacaaccgccgccgaagaatttttacaccactttgcaat

SEQ ID NO: 119251 - DNA, 80 bp, synthetic construct
  source 1..80: mol_type = other DNA
tttctgagcgtggaactggaagatgtcctttaggagcaggctgatggccaagggcagccccttagtgtaggtgttaacaa

SEQ ID NO: 119252 - DNA, 80 bp, synthetic construct
  source 1..80: mol_type = other DNA
cggggtggtcatcctagcgatgctgctctacttcatcttctgccgccgcatccccaacgcgaaaccggtctacaagccca

SEQ ID NO: 119253 - DNA, 80 bp, synthetic construct
  source 1..80: mol_type = other DNA
tggttcatgctgtgcctactcctactttctgtaggggtaggcatctacttgctccccaatcgatgaacggggagctaaac

SEQ ID NO: 119254 - DNA, 80 bp, synthetic construct
  source 1..80: mol_type = other DNA
accgtgtcgcaggtgtggttcggccaccgctactcccagtttatggggatattcgaggaccgcgcccccgttcccttcga

SEQ ID NO: 119255 - DNA, 80 bp, synthetic construct
  source 1..80: mol_type = other DNA
tctattacaaatagcgtttttttagcaactctctattatgatgaactttacggtcgttggacccgactggataaaacatc

SEQ ID NO: 119256 - DNA, 80 bp, synthetic construct
  source 1..80: mol_type = other DNA
gctaaacttgcttggttagaagaaaggtggtacgcgacactcaagggagaggtggtggaccttggctgtggaagagggtg

SEQ ID NO: 119257 - DNA, 80 bp, synthetic construct
  source 1..80: mol_type = other DNA
tggaaagaaagaagaaataccttgtcagaacttggcttttcgagaatggagaagagagggtaagtagaatggcagtcagt

SEQ ID NO: 119258 - DNA, 80 bp, synthetic construct
  source 1..80: mol_type = other DNA
gatagcccaggctgaggccgccttagagaacttggtggtcctcaatgcggcgtccgtggccggagcgcatggtattctct

SEQ ID NO: 119259 - DNA, 80 bp, synthetic construct
  source 1..80: mol_type = other DNA
cacaagtggatcaatgaagactgtcccactccgtgtgactcatcttggctgtgggagatctgggactgggtctgcaccgt

SEQ ID NO: 119260 - DNA, 80 bp, synthetic construct
  source 1..80: mol_type = other DNA
attttcacagaagagacctcagactagcatccaacgccatatgttcagcagtaccagtccactgggtccccacaagtaga

SEQ ID NO: 119261 - DNA, 80 bp, synthetic construct
  source 1..80: mol_type = other DNA
ctgttggccgtcttcgggcccctttgggtcctccagaccagcctgctcaaagtgccctacttcgtgcgcgttcaaggcct

SEQ ID NO: 119262 - DNA, 80 bp, synthetic construct
  source 1..80: mol_type = other DNA
agtcactggacatcgtgacgcggtcccccagcttcagcgacaacagcacaccgccagctgtgcctcagacctaccaggtg

SEQ ID NO: 119263 - DNA, 80 bp, synthetic construct
  source 1..80: mol_type = other DNA
ggctggtgtgtctggtgccttagtcgcatataagatcatgtgcggcgaatgtccatcaatggaagacatggctaatttgc

SEQ ID NO: 119264 - DNA, 80 bp, synthetic construct
  source 1..80: mol_type = other DNA
ccttgaagtccaccgaacacgtatcgagtgcggtggataatactttgatacgttacagtaggctgcgtatgtctgtccgg

SEQ ID NO: 119265 - DNA, 80 bp, synthetic construct
  source 1..80: mol_type = other DNA
agatcggtggttggcgttgaacggctctgcgatgacacggctaaaatccggcatgaacagctgcaacgggtacacgggta

SEQ ID NO: 119266 - DNA, 80 bp, synthetic construct
  source 1..80: mol_type = other DNA
ggaagagtgccttcacatctagcccacagaacaagaaacgctctggacaatctggtgatgctgcatacgtcagaagatgg

SEQ ID NO: 119267 - DNA, 80 bp, synthetic construct
  source 1..80: mol_type = other DNA
gtgaggagcatggaaaaataccagctagcagtgaccgtcatggctatgctatgtattccaaatgtcatgatactccagca

SEQ ID NO: 119268 - DNA, 80 bp, synthetic construct
  source 1..80: mol_type = other DNA
ccgtggtcgcacgaataccgaatgcatgttatgttgtttattaaccatagggcactattggatcgctttgcggcagttta

SEQ ID NO: 119269 - DNA, 80 bp, synthetic construct
  source 1..80: mol_type = other DNA
ataacattgccttaggcagcagcagcaacactccatacgaccctctgacactgtggacaactcctgacccaccaccaaac

SEQ ID NO: 119270 - DNA, 80 bp, synthetic construct
  source 1..80: mol_type = other DNA
taaaatgaaacagaaaccgggataaaaactacggatggagaaccggactccacacattgagacagaagaagttgtcagcc

SEQ ID NO: 119271 - DNA, 80 bp, synthetic construct
  source 1..80: mol_type = other DNA
gtcctcctccgcttccgcctcctcgggcgtggccgtcggtgccctgggagggagacaagaggaaacctccctcggccacc

SEQ ID NO: 119272 - DNA, 80 bp, synthetic construct
  source 1..80: mol_type = other DNA
tctcaaggccacatgtaccaccaatcacgactcccccgatgctgacctgattgaagctaacctcctgtggaggcaggaga

SEQ ID NO: 119273 - DNA, 80 bp, synthetic construct
  source 1..80: mol_type = other DNA
tgccatatcctgaagaacatccatgtgacctcccaccccagaaagaagtggccagtgtttgagaataacctgctgatcaa

SEQ ID NO: 119274 - DNA, 80 bp, synthetic construct
  source 1..80: mol_type = other DNA
tggctgcttactgtctttcagtgggcagcgtagtgattgttgggagagtcgtcctgtcgggccaacctgctgtcattccc

SEQ ID NO: 119275 - DNA, 80 bp, synthetic construct
  source 1..80: mol_type = other DNA
tgcatggctgctgacttagaagtaatcaccagcacttgggtactcgccggagggatcctagctgccttggcggcttactg

SEQ ID NO: 119276 - DNA, 80 bp, synthetic construct
  source 1..80: mol_type = other DNA
gaaatcatttccaccagatccatcaaaatccggagaatccggcgcggggacttccgccgcctccactgacgagtcaccag

SEQ ID NO: 119277 - DNA, 80 bp, synthetic construct
  source 1..80: mol_type = other DNA
cgttgtgttttacgtcacggcagacagaaaccgcgcctactttgtgtgcgggaggtccgtttattccgtagggcggcctc

SEQ ID NO: 119278 - DNA, 80 bp, synthetic construct
  source 1..80: mol_type = other DNA
tgtagagccccattggatagcggcctctatcatactagagttctttttgatggtgctgctcattccagaaccagacagac

SEQ ID NO: 119279 - DNA, 80 bp, synthetic construct
  source 1..80: mol_type = other DNA
ccaacggcaaatggcacatcaaccgcactgccctgaattgccatgacaaccacaacaccggcttcgtagcgagcctattc

SEQ ID NO: 119280 - DNA, 80 bp, synthetic construct
  source 1..80: mol_type = other DNA
cattacaaaagatggtcttcaaataggcaccgaaaccaccgccgagaatcaaaataaagaaatttttgcagacaaaacat

SEQ ID NO: 119281 - DNA, 80 bp, synthetic construct
  source 1..80: mol_type = other DNA
accaatcaccaattcccacaaccatcatggcaaagaatgaggtgttctgcgtggacgcttctaagggagggcgcaagccg

SEQ ID NO: 119282 - DNA, 80 bp, synthetic construct
  source 1..80: mol_type = other DNA
cctaccactccactcgctagagcagcttgggaaacagcaaaacactcccctgtcaattcatggttgggaaacatcatcca

SEQ ID NO: 119283 - DNA, 80 bp, synthetic construct
  source 1..80: mol_type = other DNA
gggagacatttatcacagcatgtctcatgcccgaccccgctatttactcctgtgcctactcatacttacagtaggggtag

SEQ ID NO: 119284 - DNA, 80 bp, synthetic construct
  source 1..80: mol_type = other DNA
cgcctgagcaacctcctgggaattcgcaagaagcaacctttccaagagggcttcagaatcatgtatgaggatctagaagg

SEQ ID NO: 119285 - DNA, 80 bp, synthetic construct
  source 1..80: mol_type = other DNA
cacatcaatcggacggcccttaattgcaatgacagcttgcaaacggggttccttgctggcctcttctacgcccacaggtt

SEQ ID NO: 119286 - DNA, 80 bp, synthetic construct
  source 1..80: mol_type = other DNA
ctgggagctcgcttcctagagtttgaggctctgggctttcttaatgaggaccactggcttggaagaaagaactcggggtg

SEQ ID NO: 119287 - DNA, 80 bp, synthetic construct
  source 1..80: mol_type = other DNA
catcttattctactttctttcttggtggctccatcttagccctagtcacggctagctgtgaaaggtccgtgagccgcatg

SEQ ID NO: 119288 - DNA, 80 bp, synthetic construct
  source 1..80: mol_type = other DNA
tttaaccaaagaggcgagtgacagcgctacagcatccgaatgtgatctgaacgatgatagtagcataacttttgctgttc

SEQ ID NO: 119289 - DNA, 80 bp, synthetic construct
  source 1..80: mol_type = other DNA
ttgaaaggaaaaagaaatttgcagtccgcacatggctttttgagaacgcagaagaaagagtgcagcgcatggctgttagt

SEQ ID NO: 119290 - DNA, 80 bp, synthetic construct
  source 1..80: mol_type = other DNA
tagatggcgtgcggttacatcggtatgcacccccttgtaaacctctcctcagggacgaggttaccttctctgtgggcctc

SEQ ID NO: 119291 - DNA, 80 bp, synthetic construct
  source 1..80: mol_type = other DNA
tgggggcaacatctccttcgcccgccgctttcttctctaccatcacggcgtggccttcccccgtaacatcctgcattact

SEQ ID NO: 119292 - DNA, 80 bp, synthetic construct
  source 1..80: mol_type = other DNA
gcaccacagagagtggcaaggtgattccagagtggtgctgccgaacgtgcacactacccccagtgacgttccgcacgggg

SEQ ID NO: 119293 - DNA, 80 bp, synthetic construct
  source 1..80: mol_type = other DNA
tacgaccatccttggcatcgggacagtccttgaccaagctgagacggcaggggttaggttgacagtcctggccacagcaa

SEQ ID NO: 119294 - DNA, 80 bp, synthetic construct
  source 1..80: mol_type = other DNA
ggtggataggtataagttcttacctgagactccaaaaaagttagcgaagatcattgagaaggcgcacaaggactcgttgt

SEQ ID NO: 119295 - DNA, 80 bp, synthetic construct
  source 1..80: mol_type = other DNA
ggtgtgtggagcggcactggcatcatgacaacacgatgcccttgcggggccaatatttcgggaaatgtccgtatgggcac

SEQ ID NO: 119296 - DNA, 80 bp, synthetic construct
  source 1..80: mol_type = other DNA
ggcggagagccgccgcgacgacctggaatcggacagcagcggggagtgttcctcgtcggacgaggacatggaagaccccc

SEQ ID NO: 119297 - DNA, 80 bp, synthetic construct
  source 1..80: mol_type = other DNA
agtggaaacgcttcttttaaggggggagtcttcagcccttatctgacagggcgtctcccatcctgggcaggagttcgtca

SEQ ID NO: 119298 - DNA, 80 bp, synthetic construct
  source 1..80: mol_type = other DNA
ccagcggttctggaccaccttggctttcgtaggatgctccttcaacgcccgctgaccgttctcgctggtcacatccattt

SEQ ID NO: 119299 - DNA, 80 bp, synthetic construct
  source 1..80: mol_type = other DNA
ggtgcctgaatatgatgacagagaaccatccgtgcctgcggagtgccataggccaaacaggcctaaatttccaccagcac

SEQ ID NO: 119300 - DNA, 80 bp, synthetic construct
  source 1..80: mol_type = other DNA
ctcgccccctcccgcccctcgcccctcccgcccctcgcccctcccgcccctcgcccctcccgccactccaataaacaacg

SEQ ID NO: 119301 - DNA, 80 bp, synthetic construct
  source 1..80: mol_type = other DNA
ttgaaactggatcaagatcgaggtttggatatgcaaattacttttctaattgtctgtgggatctttattcttgcggttct

SEQ ID NO: 119302 - DNA, 80 bp, synthetic construct
  source 1..80: mol_type = other DNA
accttcacagctaacaaaaagcaagtaagaggagtcgccggaagaggaggcctcaggattgcggcggacgagcccttcac

SEQ ID NO: 119303 - DNA, 80 bp, synthetic construct
  source 1..80: mol_type = other DNA
cgaatgatggagggtgagggagtcattgaggcctcggacgcacataacccaagactacttcgagtggaacggtggctgag

SEQ ID NO: 119304 - DNA, 80 bp, synthetic construct
  source 1..80: mol_type = other DNA
gaccaacaggctggaggggcaattgtcgacgtgatgtgtcacgcaacctatgtcaacagacggctactcccacaggtgag

SEQ ID NO: 119305 - DNA, 80 bp, synthetic construct
  source 1..80: mol_type = other DNA
ccttagtagggcccatggtattgacccaaacatcaggactggcgtgaggaccatcacaactggtgcccctattacctatt

SEQ ID NO: 119306 - DNA, 80 bp, synthetic construct
  source 1..80: mol_type = other DNA
ggaccgcaggtttcatgcgggaaaggaactgcgggccggtttcaacagccaaagggtgctgcgcgccgaagactttgagc

SEQ ID NO: 119307 - DNA, 80 bp, synthetic construct
  source 1..80: mol_type = other DNA
cttgcatgtcttcagaccttgaggtgatcacgagtacctgggtgttggtggggggggtcgtcgccgccctagcagcctat

SEQ ID NO: 119308 - DNA, 80 bp, synthetic construct
  source 1..80: mol_type = other DNA
tttttctcaggtgttttccgcgttccgggtcaaagttggcgttttattattatagtcagctgacgtgtagtgtatttata

SEQ ID NO: 119309 - DNA, 80 bp, synthetic construct
  source 1..80: mol_type = other DNA
caaggcttgtaggccttgcaagtgcgtaccaacgccaagaaaaaagagtggatatgttacacggggccctagggtttttg

SEQ ID NO: 119310 - DNA, 80 bp, synthetic construct
  source 1..80: mol_type = other DNA
cacgggaatttctatatctcctcggtcggccatgcgggtagagccgaacccgcggagaggctccaggagggccaggtcgg

SEQ ID NO: 119311 - DNA, 80 bp, synthetic construct
  source 1..80: mol_type = other DNA
acctccatgtgctggacgcccgccacacccacactggcggttccgaacgcctcgacacctgctcgcgggtttcgtggtca

SEQ ID NO: 119312 - DNA, 80 bp, synthetic construct
  source 1..80: mol_type = other DNA
gcgtcaggcttctggaggacggggtcaactatgcaacagggaatcttcccggttgctctttctctatcttcctcttggca

SEQ ID NO: 119313 - DNA, 80 bp, synthetic construct
  source 1..80: mol_type = other DNA
atgtaacacgggaatctcgcgtttccctctgttcctctatccgtggctcgaaaaggcagtctgtccatggttcgtgggtc

SEQ ID NO: 119314 - DNA, 80 bp, synthetic construct
  source 1..80: mol_type = other DNA
aacgtatccgacagaaactcttcagcccgtgttgaccccaaaacagacgcaagatgtacaacgcacaacccccgcgatca

SEQ ID NO: 119315 - DNA, 80 bp, synthetic construct
  source 1..80: mol_type = other DNA
aaacaatactaaaaaactggaagttagcataaaaaaatccagtggactaaactttgataatactgccatagctataaatg

SEQ ID NO: 119316 - DNA, 80 bp, synthetic construct
  source 1..80: mol_type = other DNA
ttctctgactgagagactctacgtaggaggccctatgctgaatagtaaagggcaatcctgcggatacaggcgatgccgcg

SEQ ID NO: 119317 - DNA, 80 bp, synthetic construct
  source 1..80: mol_type = other DNA
agcgcacggaacacaaggccagaaagaagggcacgagcgccctgctcagctccaaggtcaccaacatggttctgcgcaag

SEQ ID NO: 119318 - DNA, 80 bp, synthetic construct
  source 1..80: mol_type = other DNA
atgcagatcatggtgcccaagcgccggcgcgtggaggacgtgctggacaccgtgaaaatggatgtggagcccgaggtcaa

SEQ ID NO: 119319 - DNA, 80 bp, synthetic construct
  source 1..80: mol_type = other DNA
cgaatataatcgtcggtgccagaccgaagaggtgctgccgccgcgggaggatgtgttttcgtggactcgttattgcaccc

SEQ ID NO: 119320 - DNA, 80 bp, synthetic construct
  source 1..80: mol_type = other DNA
acatcacaggggtgacacaagacaacatcaagtgcccctgccaagtcccttcccctgagttcttcactgaggtggacggc

SEQ ID NO: 119321 - DNA, 80 bp, synthetic construct
  source 1..80: mol_type = other DNA
ctggccccgggatatcgtggagttggagttcagggtcaccaggctaaagtcggccaggacggcccgccggagcgacaccg

SEQ ID NO: 119322 - DNA, 80 bp, synthetic construct
  source 1..80: mol_type = other DNA
gagcggtcgacctgtacctggtcacgcggaacgctgatgtcatcccggttcgaagacgcggggacaaacggtgagcgttg

SEQ ID NO: 119323 - DNA, 80 bp, synthetic construct
  source 1..80: mol_type = other DNA
gcgcccgacgacgccgccgccccgcagaccccggacaccgcgtgtgtgcacggcgagctgctcgcccgcaagcgggaaag

SEQ ID NO: 119324 - DNA, 80 bp, synthetic construct
  source 1..80: mol_type = other DNA
gcgtttacgcaacactccgtgttttatattatatccacggtgttgattcaaccaatatgttgtatcttctttttttttta

SEQ ID NO: 119325 - DNA, 80 bp, synthetic construct
  source 1..80: mol_type = other DNA
ctaccaatgctgccaattggatcctgttgcaaaaaaggccattacatcactcaccgagcggctgtactgtggcgggccta

SEQ ID NO: 119326 - DNA, 80 bp, synthetic construct
  source 1..80: mol_type = other DNA
gcttgaaaccggtaatactaaaagatggtccagagcgtgtcattctagccggaccgatgccagtgactgtggccagtgct

SEQ ID NO: 119327 - DNA, 80 bp, synthetic construct
  source 1..80: mol_type = other DNA
ggatgtaaaaaaatacgaagacagtctgaaggatcaaacgactgtaagaggagacaactttgttgtcttaaataaggctg

SEQ ID NO: 119328 - DNA, 80 bp, synthetic construct
  source 1..80: mol_type = other DNA
ttgcatccttccatcatcccgacgccgggctaccgcggcacccggtattacgccagccgctcgctcgttctgcccaccgt

SEQ ID NO: 119329 - DNA, 80 bp, synthetic construct
  source 1..80: mol_type = other DNA
tgggcgaaggtcatagtcatcttggtcatgtttgcgggggttgacgctcacacgaacgtcatcggcagtaatgcgggaag

SEQ ID NO: 119330 - DNA, 80 bp, synthetic construct
  source 1..80: mol_type = other DNA
gccgccgcgggcccgggccgtcgggcggtctagggttgaaccggcgagtgcggcctcggccggcggagccccggagctcc

SEQ ID NO: 119331 - DNA, 80 bp, synthetic construct
  source 1..80: mol_type = other DNA
agaaggtgacttttgaccgcgtccagttactggatgcccattaccatgacacattaaaggagataaagctcagggcatcg

SEQ ID NO: 119332 - DNA, 80 bp, synthetic construct
  source 1..80: mol_type = other DNA
ttggcatcgggggacacgtacgctacttccgtagatagtataaaggcactccaggcatcggcgtctgtggttgacatgct

SEQ ID NO: 119333 - DNA, 80 bp, synthetic construct
  source 1..80: mol_type = other DNA
gaccccgcttgcaaattcctccggaaacagggacgagccccttttttgcttttcccagatgcatccggtgctgcggcaga

SEQ ID NO: 119334 - DNA, 80 bp, synthetic construct
  source 1..80: mol_type = other DNA
gggcggcatagaacaccggttgaacgcggcgtgcaactggaccaggtgggaagcgtgtgacctagaacatagggatcgcg

SEQ ID NO: 119335 - DNA, 80 bp, synthetic construct
  source 1..80: mol_type = other DNA
ttttgggaattggtggatgaagaacgcgaactcactttgcgtggagagtgccacacctgcatctataacatgatgggaaa

SEQ ID NO: 119336 - DNA, 80 bp, synthetic construct
  source 1..80: mol_type = other DNA
tcagcaggactgccctgaactgcaatgactccctccacactgggttccttgccgcgctgttctataaacacaagttcaac

SEQ ID NO: 119337 - DNA, 80 bp, synthetic construct
  source 1..80: mol_type = other DNA
acaagccccgaaagctaaagcgggtcaaaaagaaaaagaaagatgatgatgatgaacttgacgacgaggtggaactgctg

SEQ ID NO: 119338 - DNA, 80 bp, synthetic construct
  source 1..80: mol_type = other DNA
gagggggaggcggaggagggagaggcggaggaggacacgattaaagaagagggagaggcggaggagggagaggcggagga

SEQ ID NO: 119339 - DNA, 80 bp, synthetic construct
  source 1..80: mol_type = other DNA
ggatgaacagtacagggttcgtcaaaacatgcggtgctccaccatgtaacatcatgccaaaccccaacttgactgaccaa

SEQ ID NO: 119340 - DNA, 80 bp, synthetic construct
  source 1..80: mol_type = other DNA
tatatgacgtgatacagcagttgtcactggcgataatgggacctgcctacgggttccagtattcgcctaagcagcgggtt

SEQ ID NO: 119341 - DNA, 80 bp, synthetic construct
  source 1..80: mol_type = other DNA
gcgggcgagctaacgcaggtgaccaccgagcacggcgactgcgtgcacgaggcgcccgcctttctgccaaagcgcgagga

SEQ ID NO: 119342 - DNA, 80 bp, synthetic construct
  source 1..80: mol_type = other DNA
agtgggtagtcctcctatttctattgctggcggatgctagggtgtgcgcttgcttctggatgctcataattctgggccag

SEQ ID NO: 119343 - DNA, 80 bp, synthetic construct
  source 1..80: mol_type = other DNA
gggaggagttcaggaagccggggagagggcccgcggcgcatttaaggcgttgttgtgttgactttgcctcttctggcgtg

SEQ ID NO: 119344 - DNA, 80 bp, synthetic construct
  source 1..80: mol_type = other DNA
ttggcagagctggccgcaaagacctttggccagtcagagccgagctcagaccgtgatacagaccttaccaccccaactga

SEQ ID NO: 119345 - DNA, 80 bp, synthetic construct
  source 1..80: mol_type = other DNA
gtcctccacgtccccgggtgcgtcccgtgcgagaaagtggggaatgcatctcagtgctggataccggtctcaccgaatgt

SEQ ID NO: 119346 - DNA, 80 bp, synthetic construct
  source 1..80: mol_type = other DNA
acggaagacatgcttgaggtgtggaacagagtatggataaccaacaacccacacatgcaggacaagacaatggtgaaaaa

SEQ ID NO: 119347 - DNA, 80 bp, synthetic construct
  source 1..80: mol_type = other DNA
agtccaaacagtggacatccaaattcccgtacaagctgcgcaaagtaaaactatggaaacccagacttcgccaataaaaa

SEQ ID NO: 119348 - DNA, 80 bp, synthetic construct
  source 1..80: mol_type = other DNA
acactcgaggaggcatgctcgctgaccccgccccattccgccaggtcaaagtacggatatggggccaaggaggtacgcag

SEQ ID NO: 119349 - DNA, 80 bp, synthetic construct
  source 1..80: mol_type = other DNA
ttgggggcctcgagcacaggctcgaggtggcatgcaactggacccgtggtgagcggtgtgatcttgaagacagggatagg

SEQ ID NO: 119350 - DNA, 80 bp, synthetic construct
  source 1..80: mol_type = other DNA
cataaacaatgactctgggcctttctgcctctgccgcttgtgagtgcgcgcgccggctctgcggtgtcggcggcggctgc

SEQ ID NO: 119351 - DNA, 80 bp, synthetic construct
  source 1..80: mol_type = other DNA
cagtgggaacagaaaaagaatggcggtggcgccgatcaaatggaaacacgcacatatggtgttgccgccatgggaggtat

SEQ ID NO: 119352 - DNA, 80 bp, synthetic construct
  source 1..80: mol_type = other DNA
atacccccagtagagtcgtcgatatgcagccaatacttgacgttcgtaatgggcatataatgatgttagctcctgacgac

SEQ ID NO: 119353 - DNA, 80 bp, synthetic construct
  source 1..80: mol_type = other DNA
taggggacttccattacatcacggtggcaacagaagatgggcttaagtgcccgtgtcaagtgccggcacctgaattcttc

SEQ ID NO: 119354 - DNA, 80 bp, synthetic construct
  source 1..80: mol_type = other DNA
ggtcagtgacgacgccccattccaacatagaggaggttgccctgccggcgacgggagaaatacccttttacggcaaagca

SEQ ID NO: 119355 - DNA, 80 bp, synthetic construct
  source 1..80: mol_type = other DNA
catctggtatgttcgacacagtcgtactttgtgagtgctatgacgcgggctgtgcttggtatggcctaacgcccgctgag

SEQ ID NO: 119356 - DNA, 80 bp, synthetic construct
  source 1..80: mol_type = other DNA
cgctgcttcctcgagttgctcctcctggtccgcaagacgatcgtccacggcgtccaggcgctcaccaagcgccggatcga

SEQ ID NO: 119357 - DNA, 80 bp, synthetic construct
  source 1..80: mol_type = other DNA
gggtgcggaaagcaaagctgcccgcgggctgacgtccttatttacagtggggccgactcagaacctccagctcataaata

SEQ ID NO: 119358 - DNA, 80 bp, synthetic construct
  source 1..80: mol_type = other DNA
ttcaaagcccaccgtcagaccacaccgaggtgtgccactcagcggagagtgcggtttgcgcagcccaggaggactgggtt

SEQ ID NO: 119359 - DNA, 80 bp, synthetic construct
  source 1..80: mol_type = other DNA
ggtaggagaggtacgggagctcaaggggaaacactaggagagaaatggaaaagacagttaaaccaactgagcaagtcaga

SEQ ID NO: 119360 - DNA, 80 bp, synthetic construct
  source 1..80: mol_type = other DNA
ccgcgatctcctccgccgagcgcgcctggtccagcgtcttggccacggtcgccgggacggcgaccaccttcagcagggtc

SEQ ID NO: 119361 - DNA, 80 bp, synthetic construct
  source 1..80: mol_type = other DNA
gagcgagaacgcctaaaacaagaagttgaagacatggttaacctacaccagtgtaaaagaggtatcttttgtgtggtcaa

SEQ ID NO: 119362 - DNA, 80 bp, synthetic construct
  source 1..80: mol_type = other DNA
cccctggaagttatcaaggggggtaggcaccttatcttttgtcactcaaagaagaagtgcgacgagctggccaagcagtt

SEQ ID NO: 119363 - DNA, 80 bp, synthetic construct
  source 1..80: mol_type = other DNA
caccatgggaatagtgctctaatagaactggaaggtgacaatgcccgcctggcagttttaaagcgcaatattgaggttac

SEQ ID NO: 119364 - DNA, 80 bp, synthetic construct
  source 1..80: mol_type = other DNA
gccaggctgcttgtagttcggggtcaggagaacaatctgaggatgatggcgcagcctctgaggctggttcctacagttcc

SEQ ID NO: 119365 - DNA, 80 bp, synthetic construct
  source 1..80: mol_type = other DNA
gcgggtttgcgagaagatggccttgtacgacgtagtaaagaaacttcccattgccgtgatgggtgccgcctacgggtttc

SEQ ID NO: 119366 - DNA, 80 bp, synthetic construct
  source 1..80: mol_type = other DNA
gtcaccgatcttgggtgtggacgtggaggctggtgctactatgcagcagctcaaaaagaagttagtggtgtgaaggggta

SEQ ID NO: 119367 - DNA, 80 bp, synthetic construct
  source 1..80: mol_type = other DNA
gagccatacgccacattaaatctgtgtggcaggacctgctagaagacaatgtaacacctatagacactacaatcatggca

SEQ ID NO: 119368 - DNA, 80 bp, synthetic construct
  source 1..80: mol_type = other DNA
cccgtaccggacatggcagtactggggcagctaccgcacgacaccaaccggctcggcggcgtcactgatcaatggggttg

SEQ ID NO: 119369 - DNA, 80 bp, synthetic construct
  source 1..80: mol_type = other DNA
tctatctcctccagggagcccttctgagcgtgccctactacgtgcgtgcacatgcgctgttgcgcttgtgcatgctagta

SEQ ID NO: 119370 - DNA, 80 bp, synthetic construct
  source 1..80: mol_type = other DNA
agcgcgtcttgtgatgagtcttcctcgtcctcggactcgatacgccgcctcatccgcttttttgggggcgcccggagagg

SEQ ID NO: 119371 - DNA, 80 bp, synthetic construct
  source 1..80: mol_type = other DNA
gtggaacagagtctggatccaggagaacccaagcatgccagataagacccccatcacctcgtgggatgaagtgccctact

SEQ ID NO: 119372 - DNA, 80 bp, synthetic construct
  source 1..80: mol_type = other DNA
gtacaggaaagaggccatcactgaagtcgaccggtccgcagcccgaaaagctaggagggacgggaacaaaactggaggac

SEQ ID NO: 119373 - DNA, 80 bp, synthetic construct
  source 1..80: mol_type = other DNA
tttagcagcagtgccagtatttctaaaacagcttctgcaagcttcaaaaaattcgctttacgtaattccacaacctcttc

SEQ ID NO: 119374 - DNA, 80 bp, synthetic construct
  source 1..80: mol_type = other DNA
agcgcgcggattcagcgtatgtttgcaaacagggagtggtggacagaggttggggaaatggatgtggtctttttggaaag

SEQ ID NO: 119375 - DNA, 80 bp, synthetic construct
  source 1..80: mol_type = other DNA
ctggcgctcccggccccgtaccatgatcgcgcgggtgccgtactcaaaaacatgcaccacctgcgcggcgtcgggcagtg

SEQ ID NO: 119376 - DNA, 80 bp, synthetic construct
  source 1..80: mol_type = other DNA
ctggtgtgtcacatatttccttacaaggtgtgaagcagcactccaaacgtgggtccctcctctcaaccctcggggtggca

SEQ ID NO: 119377 - DNA, 80 bp, synthetic construct
  source 1..80: mol_type = other DNA
ataatccacacagtttcctggcgagccaaacgggggtcggtgattgagatgaagccgtcctctgagaagtcatccaagcg

SEQ ID NO: 119378 - DNA, 80 bp, synthetic construct
  source 1..80: mol_type = other DNA
atggtgtcccaggttgaggcggctctgtccaacctagttaacatcaatgctgcttcagccgctagcacccacggcttttg

SEQ ID NO: 119379 - DNA, 80 bp, synthetic construct
  source 1..80: mol_type = other DNA
gtcccatgctatgcccttcgggccacgtcgcggggattttccgcgcggctgtgtgcaccaggggcgtagccaaatcactg

SEQ ID NO: 119380 - DNA, 80 bp, synthetic construct
  source 1..80: mol_type = other DNA
gagggctcatctgattgagatgaaaacatgtgagtggccaaagtctcacacactgtggacagatggagtggaagaaagtg

SEQ ID NO: 119381 - DNA, 80 bp, synthetic construct
  source 1..80: mol_type = other DNA
agctgctgctagcagtattgggcccattatacttaatacaggccgctatcaccaccaccccctactttgtgcgtgcacat

SEQ ID NO: 119382 - DNA, 80 bp, synthetic construct
  source 1..80: mol_type = other DNA
atattttagtcagggaaatgagcaagttgtaacactttctttgggtgataattacacactcgtaggtccacaagacactc

SEQ ID NO: 119383 - DNA, 80 bp, synthetic construct
  source 1..80: mol_type = other DNA
gtctggcagctcgagggagctgttcttcacgtccctgggtgcattccctgtgagcggaagggcaatacttcccgctgctg

SEQ ID NO: 119384 - DNA, 80 bp, synthetic construct
  source 1..80: mol_type = other DNA
gcagaagtcttgagacatggggatttccactatgttgtgggtgtcactgcagagggtcttaagtgcccctgccaagtccc

SEQ ID NO: 119385 - DNA, 80 bp, synthetic construct
  source 1..80: mol_type = other DNA
cccgccggtcggaggtatgccgcgtcccgggatatagggttgctttttatggtgaggcgcctatgggcgtggcgtgccgc

SEQ ID NO: 119386 - DNA, 80 bp, synthetic construct
  source 1..80: mol_type = other DNA
tgcgtctccggtctcgccgcttagatcgctctgtgtagtagttgtagtatatccactctctcaaagcatccaggcgcccc

SEQ ID NO: 119387 - DNA, 80 bp, synthetic construct
  source 1..80: mol_type = other DNA
tcgctgaaatacattaaagtgtgccgcatgaaggcccacagagttagtaataaagtgggcataggagttgtacagttttt

SEQ ID NO: 119388 - DNA, 80 bp, synthetic construct
  source 1..80: mol_type = other DNA
taccaaatgcttctacgcccgcaacgggattccgtaggcacgtggatcttcttgcgggcgccgcagtggtttgttcatcc

SEQ ID NO: 119389 - DNA, 80 bp, synthetic construct
  source 1..80: mol_type = other DNA
ccgcgcgccccggaactcctccaccgcccatggggccaggtccccggccaccgcgtcgaattccgccaacaggcccccca

SEQ ID NO: 119390 - DNA, 80 bp, synthetic construct
  source 1..80: mol_type = other DNA
atccggactgaggagtccatttaccaatgctgccagttagaccccacagcccgtaaggctataacatcactcaccgaacg

SEQ ID NO: 119391 - DNA, 80 bp, synthetic construct
  source 1..80: mol_type = other DNA
ggggcgcttaccgccacaggaataccagaataatgaccaccacaatcgcgaccaccccaaatacagcatggcgccacacc

SEQ ID NO: 119392 - DNA, 80 bp, synthetic construct
  source 1..80: mol_type = other DNA
tttggtgaagcagctcgcggggggtaggtatgttcaggtggcgctattggcccttggcaggtggactggcacctacatct

SEQ ID NO: 119393 - DNA, 80 bp, synthetic construct
  source 1..80: mol_type = other DNA
taccgcgagcgggaacgccggcccattaaaagttgctaattaccatgagcggggatggcggccgggaccgcctattaaaa

SEQ ID NO: 119394 - DNA, 80 bp, synthetic construct
  source 1..80: mol_type = other DNA
agctggaagcacgctgggcaaggccttttcaacaactttgaagggagctcaaagactggcagcgttgggcgacacagcct

SEQ ID NO: 119395 - DNA, 80 bp, synthetic construct
  source 1..80: mol_type = other DNA
aggagcgggaaagacgaaaagataccttccagccatagtcagagaagccataaaacggggcttgagaacattaatcttgg

SEQ ID NO: 119396 - DNA, 80 bp, synthetic construct
  source 1..80: mol_type = other DNA
tatggagtcaattaataccgaagaacaaattaaagtatttaaagcccttgcatgtccaatagaacagcctagactagtca

SEQ ID NO: 119397 - DNA, 80 bp, synthetic construct
  source 1..80: mol_type = other DNA
gagaccccccgcaaataaaaacagcatattgacgctgggagagaccagagatcctgctgtctcctcagcatcattccagg

SEQ ID NO: 119398 - DNA, 80 bp, synthetic construct
  source 1..80: mol_type = other DNA
ggaaggcgccagcccatccctaaagatcggcgctccactggcaaatcctggggaaaaccaggatacccctggcccctata

SEQ ID NO: 119399 - DNA, 80 bp, synthetic construct
  source 1..80: mol_type = other DNA
tacctgcaacccttggcggaggcgttgtgttagcattaatcatcctgacactgtctccgcgttacaagcactggctggcc

SEQ ID NO: 119400 - DNA, 80 bp, synthetic construct
  source 1..80: mol_type = other DNA
atgatatgggaaaagttaggaaggacacacaagagtggaagccctcaactggatgggacaactgggaagaagttccgttt

SEQ ID NO: 119401 - DNA, 80 bp, synthetic construct
  source 1..80: mol_type = other DNA
atcacaagaaaagagatgaggtgtggaagtggcatcttcgtgcataacgacgtagaggcttgggtagataggtacaaata

SEQ ID NO: 119402 - DNA, 80 bp, synthetic construct
  source 1..80: mol_type = other DNA
ggtcctagaccaggcggagaccgctggagcgcgactcgtcgtgctcgcgaccgccacgccaccagggtcgattactacac

SEQ ID NO: 119403 - DNA, 80 bp, synthetic construct
  source 1..80: mol_type = other DNA
actatcaggggaaagcgagtatttaaatgatcccctgttacgtccagcacgcgacaaaaattttccaaataatggcatag

SEQ ID NO: 119404 - DNA, 80 bp, synthetic construct
  source 1..80: mol_type = other DNA
tggtactgcctgatagggtgcttgcgagtgccccgggaggtctcgtagaccgtgcatcatgagcacacttccaaaacccc

SEQ ID NO: 119405 - DNA, 80 bp, synthetic construct
  source 1..80: mol_type = other DNA
gacctcctcccaatgaactgattgattaaagcccataaaccaatcaatccccttccccatcacctcaataaacaatcatt

SEQ ID NO: 119406 - DNA, 80 bp, synthetic construct
  source 1..80: mol_type = other DNA
ataagaaagagacagccgtttcaggaaggatttgtgattatgtatgaacacttggaagggggcaatatcccagccctttt

SEQ ID NO: 119407 - DNA, 80 bp, synthetic construct
  source 1..80: mol_type = other DNA
gctgccccgcgaggcctacgcccttgacgcaacggagcagggacagatcggggtgttcctgctgggcgtcatatccatct

SEQ ID NO: 119408 - DNA, 80 bp, synthetic construct
  source 1..80: mol_type = other DNA
ctatgacttggggctctcgtggtacgagctaacacctgccgaaacctcgacgcgcctcagagcctacttgaattgttccg

SEQ ID NO: 119409 - DNA, 80 bp, synthetic construct
  source 1..80: mol_type = other DNA
ctgccacgcgaatgctcaaagtccttattttattgtgtgttcagcccttttgagggtatttaaacacagccagaacgtca

SEQ ID NO: 119410 - DNA, 80 bp, synthetic construct
  source 1..80: mol_type = other DNA
ggacaacttttcacgatgaggccccgcatgcatcagactacgcaggactgcaactgttccatctatacaggtagtatcac

SEQ ID NO: 119411 - DNA, 80 bp, synthetic construct
  source 1..80: mol_type = other DNA
cttcgcctaccccgccgtcaacctcccgcccaaggtcatgcgtcgcatcatggatcagctcatcatgccccacatcgagg

SEQ ID NO: 119412 - DNA, 80 bp, synthetic construct
  source 1..80: mol_type = other DNA
tgattctcgactcgctcgactctgtaacagacgcgtcgggcgagctcgaaccatcaataccatcagagtacttgcttcca

SEQ ID NO: 119413 - DNA, 80 bp, synthetic construct
  source 1..80: mol_type = other DNA
gggggcagggtggaagttgctagcgcctattacagcttacgcgcagcaaaccagaggcctactctccactatcgtagtct

SEQ ID NO: 119414 - DNA, 80 bp, synthetic construct
  source 1..80: mol_type = other DNA
ctgcagttcatttaaaagatcaacatcaggctcaaaaccccgatcccgaatctccgtgcgtagcattaattgtacaaagt

SEQ ID NO: 119415 - DNA, 80 bp, synthetic construct
  source 1..80: mol_type = other DNA
agagagatttctgttgccgcagagatcttgacaccccagaagaggtttccacctgccctacccatctgggctcgtcccga

SEQ ID NO: 119416 - DNA, 80 bp, synthetic construct
  source 1..80: mol_type = other DNA
ggttccttccatccatcagagctgcaaatgtcatggctgcctctttgcgtaaggctggaaagagtgtggtggtcctgaac

SEQ ID NO: 119417 - DNA, 80 bp, synthetic construct
  source 1..80: mol_type = other DNA
agggaggaggagcgggaggaggagcggccagaccccgaaaacgggccccccccaaaacacatcccccgtgggtcgctcgc

SEQ ID NO: 119418 - DNA, 80 bp, synthetic construct
  source 1..80: mol_type = other DNA
gacccaagtcatatcaccgctgagacggcacggcgccgcctcgcgaggggatctccaccgtcccttgctagctcgtctgc

SEQ ID NO: 119419 - DNA, 80 bp, synthetic construct
  source 1..80: mol_type = other DNA
tgggcaaagttcatcatggttctcctcctcttcgcgggtgtggatgccaccacgtacaccacggtggctgccgccgggcg

SEQ ID NO: 119420 - DNA, 80 bp, synthetic construct
  source 1..80: mol_type = other DNA
ccgttaaccacatcaagtccgtgtggaaggacctcctggaagacccacaaacaccaattcccacaaccatcatggccaaa

SEQ ID NO: 119421 - DNA, 80 bp, synthetic construct
  source 1..80: mol_type = other DNA
acatgttgtaacttcaaagcccaatgtcagaccacgctacggcgtgctactctgcggagagtgcagtctgcgatagtgcc

SEQ ID NO: 119422 - DNA, 80 bp, synthetic construct
  source 1..80: mol_type = other DNA
gacgggcgtgcccgccgcccccacgcgagccgagtcgccccccctctccgcgagatacggacccgaggcggcggatggtg

SEQ ID NO: 119423 - DNA, 80 bp, synthetic construct
  source 1..80: mol_type = other DNA
tttcctatgacacccggtgcttcgactcgactgtcacggagagggacattcgagtcgaggagtccatataccaggcctgt

SEQ ID NO: 119424 - DNA, 80 bp, synthetic construct
  source 1..80: mol_type = other DNA
ggctctcctcaagcgtattcaacaaggggctgaaggatgcccagaaggtaccccattgtatgggatctgatctgtggcct

SEQ ID NO: 119425 - DNA, 80 bp, synthetic construct
  source 1..80: mol_type = other DNA
atccgtcaatgcattgacaggcgcctgaggacgttggtgctggctccaactcgtgtggtactgaaggagatggagcgtgc

SEQ ID NO: 119426 - DNA, 80 bp, synthetic construct
  source 1..80: mol_type = other DNA
ctggtgcacaggcaatggttcttagacctgccattaccatggctgcccggagcagacacacaaggatcaaattggataca

SEQ ID NO: 119427 - DNA, 80 bp, synthetic construct
  source 1..80: mol_type = other DNA
catcccagctcggcgcaggggagacaaccgagcagctctactcagcccacggcccataagcactctgaaaggctcttcgg

SEQ ID NO: 119428 - DNA, 80 bp, synthetic construct
  source 1..80: mol_type = other DNA
tggaagccgtggttccttctcgcaccaaccctacccacgaaaaggtgttggcgattgtaaacgctctggtagaaagcaaa

SEQ ID NO: 119429 - DNA, 80 bp, synthetic construct
  source 1..80: mol_type = other DNA
tcaaagattccagggggaaacatgtatgcagatgacacagccggatgggatacaaggataacagaggatgaccttcagaa

SEQ ID NO: 119430 - DNA, 80 bp, synthetic construct
  source 1..80: mol_type = other DNA
atggttgggttttctttggcttttgtgatcatggcctgtgcaatgtcaggtctgctggtaggggctataatatggttcct

SEQ ID NO: 119431 - DNA, 80 bp, synthetic construct
  source 1..80: mol_type = other DNA
tcttctttaacatcttaggggggtgggtggcggcccagcttgcttccccagctgccgctactgcttttgtcggtgctggt

SEQ ID NO: 119432 - DNA, 80 bp, synthetic construct
  source 1..80: mol_type = other DNA
ccaacagcagcattgtgtacgaggctgagggtgccatcctgcatgctcccggctgcatcccttgcgtgaaaaccgggaac

SEQ ID NO: 119433 - DNA, 80 bp, synthetic construct
  source 1..80: mol_type = other DNA
gccccctcaaagctccccactttaccctgcttaatgtcattcccatggacaatggactctgtggaatatgtgccaggttg

SEQ ID NO: 119434 - DNA, 80 bp, synthetic construct
  source 1..80: mol_type = other DNA
gggggggctgttatctttggcattacaaacagatacgtatacccttttggggtatacttttgcacccgtgccagtctttg

SEQ ID NO: 119435 - DNA, 80 bp, synthetic construct
  source 1..80: mol_type = other DNA
cagcctctggaatcaacatgtgcacactcatagccatggacttgggagaaatgtgtgatgacacggtcacttacaaatgc

SEQ ID NO: 119436 - DNA, 80 bp, synthetic construct
  source 1..80: mol_type = other DNA
gggaggagaaaacattacaaaaaatggtcttcaaattggcactgaaattaccgccgacaatcaaaagaaagaaatttttg

SEQ ID NO: 119437 - DNA, 80 bp, synthetic construct
  source 1..80: mol_type = other DNA
catggctttctcgtatgacacccgctgctttgattcaactgtaaccgaacatgacatacggacggaagagtccatatacc

SEQ ID NO: 119438 - DNA, 80 bp, synthetic construct
  source 1..80: mol_type = other DNA
gagttgagtctgagtccaaggtactcatcctagattcccttgacccggtggtcgagaaggagagtgagctcgagccctct

SEQ ID NO: 119439 - DNA, 80 bp, synthetic construct
  source 1..80: mol_type = other DNA
attggagaggcatcatccaaccccacaatagaagaaggcagaaccttgagggttctgaaaatggcagaacagtggctgac

SEQ ID NO: 119440 - DNA, 80 bp, synthetic construct
  source 1..80: mol_type = other DNA
ccaactgactgcttcagaaaacatccagaagccacctacaccaagtgtggctcagggccttggcttacgccaagatgcct

SEQ ID NO: 119441 - DNA, 80 bp, synthetic construct
  source 1..80: mol_type = other DNA
ccaccagaacattgtggacgtgcaatacctgtatggcttgtcacctgccattaccaagtacatcgtcaaatgggagtggg

SEQ ID NO: 119442 - DNA, 80 bp, synthetic construct
  source 1..80: mol_type = other DNA
agctcctctgccagccagctctcagctccgtcactgaaagccacttgtcaaacgcacaggccgcatcctgacgctgagct

SEQ ID NO: 119443 - DNA, 80 bp, synthetic construct
  source 1..80: mol_type = other DNA
gtactactgcatggctgccaattgggccaaggtgttgatcgtgctcctcctgtttgcgggggttgatgccgaaacacaca

SEQ ID NO: 119444 - DNA, 80 bp, synthetic construct
  source 1..80: mol_type = other DNA
gaagttatcctgctaggacgtcttcccggacaactgcccatttcagtacatcggaccccgcattatcactactacggtca

SEQ ID NO: 119445 - DNA, 80 bp, synthetic construct
  source 1..80: mol_type = other DNA
tctgagtcccggtagagggcatacccagcctcgtcataatggagaaagcgaacctcgcccctcgggcgcgcgcgcatcgg

SEQ ID NO: 119446 - DNA, 80 bp, synthetic construct
  source 1..80: mol_type = other DNA
cagaggagaggacgcattggacgcaatcccaacagagatggtgactcttactactactcagaacctaccagtgaggacaa

SEQ ID NO: 119447 - DNA, 80 bp, synthetic construct
  source 1..80: mol_type = other DNA
gcgctgtggagggtgtctgcggaggaatacgtggaggtgaggcgagtgggagatttccattacatcacaggggtaaccac

SEQ ID NO: 119448 - DNA, 80 bp, synthetic construct
  source 1..80: mol_type = other DNA
gccccgcggacggcggctatggtagccggcgccatggcgtggcggccaacgccgagctccaggccccgggcgtcacgaaa

SEQ ID NO: 119449 - DNA, 80 bp, synthetic construct
  source 1..80: mol_type = other DNA
ggcatagtcttggactttgattattgcccagggacaaaagtcaccattacagaggattgtagcaagagaggcccttcggt

SEQ ID NO: 119450 - DNA, 80 bp, synthetic construct
  source 1..80: mol_type = other DNA
cccgaacgggcctacgcggatgaccagaaaataccagcaactttgggcggaggcgttgtgttaggactgatcatcctcac

SEQ ID NO: 119451 - DNA, 80 bp, synthetic construct
  source 1..80: mol_type = other DNA
cccgcgcagttaccaccatactcagttccctcaccataactagtcttcttcggaaactccacgagtggatcaacacggat

SEQ ID NO: 119452 - DNA, 80 bp, synthetic construct
  source 1..80: mol_type = other DNA
cggcccgcgcccgcccacccgtcgtcaaaggcacgaccgtcagcggggtctggtgtgggaggacgatgactcggcagacg

SEQ ID NO: 119453 - DNA, 80 bp, synthetic construct
  source 1..80: mol_type = other DNA
tcccacctcggccgtcaactatcgcaatgcctcgggcatctatcacatcaccaatgactgcccgaactcgagcatagtgt

SEQ ID NO: 119454 - DNA, 80 bp, synthetic construct
  source 1..80: mol_type = other DNA
gttgcaccaacgatgctggtgtgtggcgacgacctggtcgtcatctcagagagtcaggggactgagagggacgagaacaa

SEQ ID NO: 119455 - DNA, 80 bp, synthetic construct
  source 1..80: mol_type = other DNA
cccgatatcttgagtttgaagccctgggattcctgaatgaggaccactgggcatccagggagaactcagggcgagtggtt

SEQ ID NO: 119456 - DNA, 80 bp, synthetic construct
  source 1..80: mol_type = other DNA
agtgcacggctgtgcactgccttcaggtccggcacctcccattccccctcctcgcaagaagaggacaatcgctctaagtg

SEQ ID NO: 119457 - DNA, 80 bp, synthetic construct
  source 1..80: mol_type = other DNA
acagctacatagtgataggtgttggaaacagcgcactaacactccactggttcaggaaagggagttccattggcaagatg

SEQ ID NO: 119458 - DNA, 80 bp, synthetic construct
  source 1..80: mol_type = other DNA
caactggcaagccagttcaaggagaaggcactgggcattctgcagtccgccggccgccaggctcaggaagcagcaccagt

SEQ ID NO: 119459 - DNA, 80 bp, synthetic construct
  source 1..80: mol_type = other DNA
tggcggagaagtctttcccatcttcaaaaccgcaggaggtatccagctcatcctcgggggtggacatgctgtctgacagt

SEQ ID NO: 119460 - DNA, 80 bp, synthetic construct
  source 1..80: mol_type = other DNA
acgcagcagcggggcccgagcactgagggaagctgtacctccttgcaaaggactagaggttagaggagaccccccgcaaa

SEQ ID NO: 119461 - DNA, 80 bp, synthetic construct
  source 1..80: mol_type = other DNA
gccgggcaaccccgccgttgcctccatgatggcctttacagcggccctaaccagccctctgactacgtccacgactctcc

SEQ ID NO: 119462 - DNA, 80 bp, synthetic construct
  source 1..80: mol_type = other DNA
tgcctgtggctccatcgtggggatgtaaaaacccgggaggctgcaacccatggaagctgtacgcatggggtagcagacta

SEQ ID NO: 119463 - DNA, 80 bp, synthetic construct
  source 1..80: mol_type = other DNA
ccgctgctttgactcaacagttacagaacaagacattcgcactgagaccgaaatctatcagtgctgcaaccttgaccccg

SEQ ID NO: 119464 - DNA, 80 bp, synthetic construct
  source 1..80: mol_type = other DNA
caggaacgaagatcgccggaatgttgctgctttcccttctcttgatgattgtgctaattcctgagccagagaagcaacgc

SEQ ID NO: 119465 - DNA, 80 bp, synthetic construct
  source 1..80: mol_type = other DNA
actgttatcccgaggcacggatgagcggccacggttgcctggaaaagtgggcgcgggacggcgtcctgttactaaacacg

SEQ ID NO: 119466 - DNA, 80 bp, synthetic construct
  source 1..80: mol_type = other DNA
tggatgaactccacggggtttgtcaagacgtgcggcgccccaccctgcgcctggagcagttcaggcaacaattctctcag

SEQ ID NO: 119467 - DNA, 80 bp, synthetic construct
  source 1..80: mol_type = other DNA
cccgtgctgcgtgggaaacagctagacacactccggtcaattcctggcttggcaacatcatcatgtacgctcctacattg

SEQ ID NO: 119468 - DNA, 80 bp, synthetic construct
  source 1..80: mol_type = other DNA
tcacgggccgccgcgccccacgacccatcgccgggtcggagtcgtgggcgaggtcgggtggcgcgggcgccaagcggacc

SEQ ID NO: 119469 - DNA, 80 bp, synthetic construct
  source 1..80: mol_type = other DNA
agagaccctaccactccaattgccagagctgcctgggaaacagcgaaacactcccctgtcaattcctggctgggaaacat

SEQ ID NO: 119470 - DNA, 80 bp, synthetic construct
  source 1..80: mol_type = other DNA
ccgtcagcgaggataacctggggttcctgatgcacgcccccgcgtttgagaccgccggcacgtacctgcggctcgtgaag

SEQ ID NO: 119471 - DNA, 80 bp, synthetic construct
  source 1..80: mol_type = other DNA
ggtcggcctcttggccgggtggcgcggacgcccgggcgcgggcgtctagggcgcgaagatccacgagcagggtcgcgcgc

SEQ ID NO: 119472 - DNA, 80 bp, synthetic construct
  source 1..80: mol_type = other DNA
catcgggcaagggcagtcagagctaagcttatcgcccagggtgggaaagccgctatatgcggccggtacctcttcaactg

SEQ ID NO: 119473 - DNA, 80 bp, synthetic construct
  source 1..80: mol_type = other DNA
gactgcaccatgctcgtgtgtggcgacgacctagtcgttatctgtgaaagtgcgggggtccaggaggatgcggcgagcct

SEQ ID NO: 119474 - DNA, 80 bp, synthetic construct
  source 1..80: mol_type = other DNA
cgctctggggtcatataccgctcgtgtggccggggtcattggtgcgatggttttcagcccaaattctgcgttgtatctaa

SEQ ID NO: 119475 - DNA, 80 bp, synthetic construct
  source 1..80: mol_type = other DNA
tcagacctctacctggtcacaaggcacgccgatgtcattcctgtgcgccggcggggtgatagcaggggcagcctgctttc

SEQ ID NO: 119476 - DNA, 80 bp, synthetic construct
  source 1..80: mol_type = other DNA
gccgaggaggagaaattgcccatcagtccactcagcaattctttgctgagacaccacaatctagtgtactcaacgtcatc

SEQ ID NO: 119477 - DNA, 80 bp, synthetic construct
  source 1..80: mol_type = other DNA
gcagctttggtggtttcggttttttgttcttcttcggtttcgggtcccccgttgggggggcgccagaggcgtgcggcgcc

SEQ ID NO: 119478 - DNA, 80 bp, synthetic construct
  source 1..80: mol_type = other DNA
ggtgacgtgctacagccgccccctggtcagctttcggtacgaagaccagggcccgctgatcgaggggcagctgggcgaga

SEQ ID NO: 119479 - DNA, 80 bp, synthetic construct
  source 1..80: mol_type = other DNA
catcggggtgtgtggaaaggatgtccagttgccggcctcttgttagtttcgaccaaggctctggccccatcacatacgac

SEQ ID NO: 119480 - DNA, 80 bp, synthetic construct
  source 1..80: mol_type = other DNA
gtctcccgcgctcaacgccggggcaggactggcaggtggaagccaggcatctacagatttgtggcgccggtggagcgccc

SEQ ID NO: 119481 - DNA, 80 bp, synthetic construct
  source 1..80: mol_type = other DNA
gaaagacacgacgggcccggacccaaaaaggcgtgggatgctgtgtgagaggccgggtgccggtcggtgtggaaaggcac

SEQ ID NO: 119482 - DNA, 80 bp, synthetic construct
  source 1..80: mol_type = other DNA
tcggcactcggagcgagacgcagcagccaggcagactcgggccgccccctctccgcatcaccacagaagccccgcctacg

SEQ ID NO: 119483 - DNA, 80 bp, synthetic construct
  source 1..80: mol_type = other DNA
caggtaatagcccaccagttcaaggagaaagtccttggattgctgcagcgagccacccaacaacaagctgtcattgagcc

SEQ ID NO: 119484 - DNA, 80 bp, synthetic construct
  source 1..80: mol_type = other DNA
tgaccaggtactcagctcctcctggcgatgaaccgcatccagcatatgacttggagctgataacatcttgttcctccaac

SEQ ID NO: 119485 - DNA, 80 bp, synthetic construct
  source 1..80: mol_type = other DNA
agcgcatttacgctgcacggatactctccacacgagctcaatcgggtggcaggaagcctcaggaaacttggggtaccccc

SEQ ID NO: 119486 - DNA, 80 bp, synthetic construct
  source 1..80: mol_type = other DNA
taggtggaggctaggcacctataggtatgtctcccagggtgagcggccatcggggatgtttgactccgtggtgatctgcg

SEQ ID NO: 119487 - DNA, 80 bp, synthetic construct
  source 1..80: mol_type = other DNA
ctgcatcacttggggtcgttgcccttctggtgttgacaatctttaccctcagccctatgtacaaacagctgctcacacac

SEQ ID NO: 119488 - DNA, 80 bp, synthetic construct
  source 1..80: mol_type = other DNA
ctttcacactatgtggcacgtcacaaaaggatccgcactgagaagcggtgaagggaggcttgatccatactggggagatg

SEQ ID NO: 119489 - DNA, 80 bp, synthetic construct
  source 1..80: mol_type = other DNA
ccttggaaatttgctgacagctgggacagcggaggcattttagggcgtagagtttgggagccaggaagacggactctggt

SEQ ID NO: 119490 - DNA, 80 bp, synthetic construct
  source 1..80: mol_type = other DNA
ggcgaccggcgcggggctttactttctccaagacctctctcctcactgaaagggtcatcaggcgggcctgtactgtgccc

SEQ ID NO: 119491 - DNA, 80 bp, synthetic construct
  source 1..80: mol_type = other DNA
gacgccacctccatactgggcataggtacggtgctggatcaagcagagacagccggggtgaggctgacagtgttggcaac

SEQ ID NO: 119492 - DNA, 80 bp, synthetic construct
  source 1..80: mol_type = other DNA
agttttcaccggcctcacacacatagacgcccacttcctctcccaaacaaagcaagcgggggagaacttcgcgtacctag

SEQ ID NO: 119493 - DNA, 80 bp, synthetic construct
  source 1..80: mol_type = other DNA
tcttgaaggaaagtgtgaaacatgtgtgtacaacatgatgggaaaaagagagaagaaactaggggagttcggcaaggcaa

SEQ ID NO: 119494 - DNA, 80 bp, synthetic construct
  source 1..80: mol_type = other DNA
tacgcagggaccatttgggagtctgcggttgggagcgcgccggggcgcggcacggctggagcgccggtgcgcggccggcg

SEQ ID NO: 119495 - DNA, 80 bp, synthetic construct
  source 1..80: mol_type = other DNA
gcttacgccgctcaagggtataaggtattagtgctaaacccctccgtggctgccaccttaggatttggggcctacatgtc

SEQ ID NO: 119496 - DNA, 80 bp, synthetic construct
  source 1..80: mol_type = other DNA
tgcacaggcggcgcctacgacatcatcatatgcgacgagtgccattccgtgaattctgctacacatctcggcatcgacgc

SEQ ID NO: 119497 - DNA, 80 bp, synthetic construct
  source 1..80: mol_type = other DNA
cggaaaggcttcgcgagcacgaagcccagctggtgatcctggcccaggctctggaccattacgactgtctgatccacagc

SEQ ID NO: 119498 - DNA, 80 bp, synthetic construct
  source 1..80: mol_type = other DNA
tttgttagaggaagtcaggccggagcatttccgccaccggatgttgagtagacggtgctgcctgcgtctcaaccccagga

SEQ ID NO: 119499 - DNA, 80 bp, synthetic construct
  source 1..80: mol_type = other DNA
ccccgtcaaacgcggccagtgtcacgcacgccaccacggtgtcggcaaagcccagcagccgctgcaggacgagcccggcg

SEQ ID NO: 119500 - DNA, 80 bp, synthetic construct
  source 1..80: mol_type = other DNA
aagcggtcctgtcggacgacggtgaacccaaacccgggatggaggcccgtcttgagctgatgatgcaaggccacgggact

SEQ ID NO: 119501 - DNA, 80 bp, synthetic construct
  source 1..80: mol_type = other DNA
aaatttgggcgtgcccccgcaagactgctagccgagtagtgttgggtcgcgaaaggccttgcggtactgcctgatagggt

SEQ ID NO: 119502 - DNA, 80 bp, synthetic construct
  source 1..80: mol_type = other DNA
cactccacagctttctggtcagctgcaaagctcccagcaggtcaggagccgaaatcttgaaatcacaattaggaccagtg

SEQ ID NO: 119503 - DNA, 80 bp, synthetic construct
  source 1..80: mol_type = other DNA
tgacttgctacatcaaggcaactgcggctgctagggctgcaggcctccaagacccatccttccttgtctgcggggacgat

SEQ ID NO: 119504 - DNA, 80 bp, synthetic construct
  source 1..80: mol_type = other DNA
atgacacgcccctgcaagtgatcagacccaccccagtcagactcagtggggagaggcgaatggctgttgacaaaatcgag

SEQ ID NO: 119505 - DNA, 80 bp, synthetic construct
  source 1..80: mol_type = other DNA
gtgccgctttcgggccctggcgaacaggaagagcctcagccttccacgttggagttagaagaaggagaaggcatagcccg

SEQ ID NO: 119506 - DNA, 80 bp, synthetic construct
  source 1..80: mol_type = other DNA
ccacttcctgtctcaggtaaaacaggcgggagagaactacccctacttggttgcttatcaggccacagtctgcgccagag

SEQ ID NO: 119507 - DNA, 80 bp, synthetic construct
  source 1..80: mol_type = other DNA
tggaaaaagcctatcacgcaaaagtggttaaggttgccaggccctcccctcaaggaggatgtgtgatggatgtgatcacg

SEQ ID NO: 119508 - DNA, 80 bp, synthetic construct
  source 1..80: mol_type = other DNA
tctcggtctgatccaacagaacctcgacctggtcggcgatctccgccaccgagcgcgcctggtcgagcgtcttggccacg

SEQ ID NO: 119509 - DNA, 80 bp, synthetic construct
  source 1..80: mol_type = other DNA
tcgcggtagcccggccgtgtgacactatcgtccataccgaccacaccgacgaatcccccaagggggagaggccattttac

SEQ ID NO: 119510 - DNA, 80 bp, synthetic construct
  source 1..80: mol_type = other DNA
acttcaaccccgtttacccttttaacccctctgatacaacaattgtgccatttattacgcccccttttaccacttccaat

SEQ ID NO: 119511 - DNA, 80 bp, synthetic construct
  source 1..80: mol_type = other DNA
catttgaaccgctcgtggcggaggaggacgacagggaaccgtccatcgccgctgagtgtttgactcggaggaaacgattc

SEQ ID NO: 119512 - DNA, 80 bp, synthetic construct
  source 1..80: mol_type = other DNA
gcgtgtctgcttgtgcggcgcctggcgtgagggaagtacatccaggctatgttcttgagggttgggtcctggacgggcac

SEQ ID NO: 119513 - DNA, 80 bp, synthetic construct
  source 1..80: mol_type = other DNA
actgtccttgaccaggctgaaacagcaggagttagattgactgtcctggccacggcgactccgccagggtccgtgacaac

SEQ ID NO: 119514 - DNA, 80 bp, synthetic construct
  source 1..80: mol_type = other DNA
gccccgtctggcgctccagggccgccagaacgcacgcatacagcgcccgccacagggtcgggtcccccaggggctccagc

SEQ ID NO: 119515 - DNA, 80 bp, synthetic construct
  source 1..80: mol_type = other DNA
cctacgcctaactgctccatttttgaaacccaagatgcaaacctatttctctgtttaactaaaaacggagctcacgtgtt

SEQ ID NO: 119516 - DNA, 80 bp, synthetic construct
  source 1..80: mol_type = other DNA
gttttgactctactgtgactgaaaaggacattggggtcgaggaagaggtctaccagtgttgtgatctggaacccgaggca

SEQ ID NO: 119517 - DNA, 80 bp, synthetic construct
  source 1..80: mol_type = other DNA
ctggcccccgtgtcggtgcgccgcgtgacccgccggggaaagacagtcaccattcccaacccgcgctaccaccctagcat

SEQ ID NO: 119518 - DNA, 80 bp, synthetic construct
  source 1..80: mol_type = other DNA
ggtgccctatgtacaactcaaagggccagctctgcggccagcgcagatgccgagcaagcggggtgctgcccacaagcatg

SEQ ID NO: 119519 - DNA, 80 bp, synthetic construct
  source 1..80: mol_type = other DNA
tagtgcggcggttttgtgctggcaagtacgtgcaggccgccctgttacgggttggggcatggacaggtacctacatttat

SEQ ID NO: 119520 - DNA, 80 bp, synthetic construct
  source 1..80: mol_type = other DNA
gtcagggttattgaggacggggtaaattatgcaacagggaatcttcctggttgctccttttctatcttccttttggcact

SEQ ID NO: 119521 - DNA, 80 bp, synthetic construct
  source 1..80: mol_type = other DNA
tccccaaggcgcgtcagcccgagggcaggacctgggctcagcccgggtacccttggcccctctatggcaatgagggctgt

SEQ ID NO: 119522 - DNA, 80 bp, synthetic construct
  source 1..80: mol_type = other DNA
ttcgtaggtggcatagagcataggttcgaagctgcctgcaactggactaggggagagcgctgtgagctcgatgacagaga

SEQ ID NO: 119523 - DNA, 80 bp, synthetic construct
  source 1..80: mol_type = other DNA
cactgaacgttgtggtaaccgaggggcctcactgcgcacaaccactgcaagcggaaaattagtcacagactggtgctgca

SEQ ID NO: 119524 - DNA, 80 bp, synthetic construct
  source 1..80: mol_type = other DNA
agttggacttatccggctggttcgttgctggctacagcgggggagacatatatcacagcctgtctcgtgcccgaccccgc

SEQ ID NO: 119525 - DNA, 80 bp, synthetic construct
  source 1..80: mol_type = other DNA
tcccgcagccagcgccggggccgtacggggcgaggtaggcacggcatctacaggtttgtctctccaggagaacggccatc

SEQ ID NO: 119526 - DNA, 80 bp, synthetic construct
  source 1..80: mol_type = other DNA
ccctgctgtcacctggcgctctcgtggtcggggtggtttgcgcagctatcctgcgtagacatataggcccctcagaggga

SEQ ID NO: 119527 - DNA, 80 bp, synthetic construct
  source 1..80: mol_type = other DNA
aagcgtgagcgcaaagctcctctcaacggaggatgcctgtgatctcacgcctccccactccgcccgttctaagtacgggt

SEQ ID NO: 119528 - DNA, 80 bp, synthetic construct
  source 1..80: mol_type = other DNA
tcggccaatcggagtcgaattccgattccggagcgggcctcaccacctcaactgactctgccacgccggaccccatcatc

SEQ ID NO: 119529 - DNA, 80 bp, synthetic construct
  source 1..80: mol_type = other DNA
cagtatttcattgcacgaatagaggctactctgcaagtgtgggttccaagccttgcagtgaggggggggcgcgatgccat

SEQ ID NO: 119530 - DNA, 80 bp, synthetic construct
  source 1..80: mol_type = other DNA
tacaactatcatggccaaaaatgaggtgttctgtgtcgatcccgctaaaggcgggaaaaaggcagcgcgcctcatcgtat

SEQ ID NO: 119531 - DNA, 80 bp, synthetic construct
  source 1..80: mol_type = other DNA
cctgaacctccgaggggccgcggaggtcgagtggaggcgagcccggtggagcggcgtgggtgcgttatcgcgccgtgtcc

SEQ ID NO: 119532 - DNA, 80 bp, synthetic construct
  source 1..80: mol_type = other DNA
acatcatcaccttcaaggacaagactgatgtccatcgccttgagccgataaagtgtgataccctgctgtgcgacattgga

SEQ ID NO: 119533 - DNA, 80 bp, synthetic construct
  source 1..80: mol_type = other DNA
ctaactgtaccagcttcagcagttaactatgccaataccagcggcatttatcatctcactaacgactgcccgaacagcag

SEQ ID NO: 119534 - DNA, 80 bp, synthetic construct
  source 1..80: mol_type = other DNA
gagcggcagcgcacgagagtgacggggaactggtcgcacccgacgcaccatccatgaagcaccatttcgtgagacccccc

SEQ ID NO: 119535 - DNA, 80 bp, synthetic construct
  source 1..80: mol_type = other DNA
catgtgttccgccctttacgtcggggacttgtgcgaggccgtgtttttggcgggtcagctgttcacctggcagccgcgcc

SEQ ID NO: 119536 - DNA, 80 bp, synthetic construct
  source 1..80: mol_type = other DNA
ccgtgaggcccagggagttccttctggggtgttttaatcaataaaagaccacaccaacgcacgagccttgcgtttaatgt

SEQ ID NO: 119537 - DNA, 80 bp, synthetic construct
  source 1..80: mol_type = other DNA
gcttacaccgcactataagtggatgcttgtccagttgttgtggtggtgtcagtacttcatagctcgagtagaggcagagc

SEQ ID NO: 119538 - DNA, 80 bp, synthetic construct
  source 1..80: mol_type = other DNA
gtccttcggcccgccaaaggccgaaactgactccggggcgtatctcacaacatcaacagacacttctgacccgggcccca

SEQ ID NO: 119539 - DNA, 80 bp, synthetic construct
  source 1..80: mol_type = other DNA
ccaggtcgtgtctactgctacacagtctttcctcgccactgctattaacggagttctctggacggtataccatggtgcag

SEQ ID NO: 119540 - DNA, 80 bp, synthetic construct
  source 1..80: mol_type = other DNA
tgatgtcatcccagcacgtcgtcgcggcgacaatcgagccggtcttatcagcccgcggccgatatccactctcaaggggt

SEQ ID NO: 119541 - DNA, 80 bp, synthetic construct
  source 1..80: mol_type = other DNA
gcggagacgacctggtcgttattgctgagagtggaggagttcttgaggatgccgaagccctgcgagtcttcacggaggct

SEQ ID NO: 119542 - DNA, 80 bp, synthetic construct
  source 1..80: mol_type = other DNA
tcctttactccaatattgcgctgtacctgccagacaagctaaaatacaaccccaccaatgtggaaatatctgacaacccc

SEQ ID NO: 119543 - DNA, 80 bp, synthetic construct
  source 1..80: mol_type = other DNA
cgttaaacattgtccagaaccaaaaaccacagcaaacaattcacagaaacagagctcggactggagagctctttaaacaa

SEQ ID NO: 119544 - DNA, 80 bp, synthetic construct
  source 1..80: mol_type = other DNA
tgcgtagggtggtggatactcattacgtggtggaggccacgaacgacggcctaaaaatcccatgccaggtgccagcgcca

SEQ ID NO: 119545 - DNA, 80 bp, synthetic construct
  source 1..80: mol_type = other DNA
ttgaagtgcccttgccaggtgcctgcgcctgaattcttcactgaggtcgatggcgtgaggatacaccgttacgcgccacc

SEQ ID NO: 119546 - DNA, 80 bp, synthetic construct
  source 1..80: mol_type = other DNA
cagtcagactgcgcgcttacctgaacacccctgggctccctgtatgccaggaccacctggaattctgggaagcagttttt

SEQ ID NO: 119547 - DNA, 80 bp, synthetic construct
  source 1..80: mol_type = other DNA
ccaggacgcagtgctccacgtgcctggctgtgtcccttgtgagagggtcgataaccggtcgcagtgttggattccggtca

SEQ ID NO: 119548 - DNA, 80 bp, synthetic construct
  source 1..80: mol_type = other DNA
tgccaacctgttatggcggcaggagatgggcagcactatcacacgggtagagtctgaaacaaaggttgtgattcttgatt

SEQ ID NO: 119549 - DNA, 80 bp, synthetic construct
  source 1..80: mol_type = other DNA
gtgagaccctcatggctgctaaaggggcatcagccgtgtagtaaggaggccccgacctactgcggcagcacacacagtga

SEQ ID NO: 119550 - DNA, 80 bp, synthetic construct
  source 1..80: mol_type = other DNA
tcctctgtttcaagaatggaaaacatcatgtggagatcagtagaaggggagctcaacgcaatcctggaagagaatggagt

SEQ ID NO: 119551 - DNA, 80 bp, synthetic construct
  source 1..80: mol_type = other DNA
ttgtacatcggtggccccatgctcaatagcaaggtggaaaagtgcggttatcgccgctgccgcgccagtggggtcctgcc

SEQ ID NO: 119552 - DNA, 80 bp, synthetic construct
  source 1..80: mol_type = other DNA
cacgtcgccccgccgtggcattcgccctgtgtcgcgcgaccgacagcactcacagccccgcatatcccaccctggagctc

SEQ ID NO: 119553 - DNA, 80 bp, synthetic construct
  source 1..80: mol_type = other DNA
accacctgtggtccatggctgcccacttccacctccaaaaacccctcctgtgcctccgccccggaggaagcggacggtgg

SEQ ID NO: 119554 - DNA, 80 bp, synthetic construct
  source 1..80: mol_type = other DNA
cccacttcctgtcccaaaccaaacaggggggggagagcttcgcctatctggtggcctatcaggctaccgtctgtgcaagg

SEQ ID NO: 119555 - DNA, 80 bp, synthetic construct
  source 1..80: mol_type = other DNA
gcctttctgttcacaccacttccatgagctaatcatgaaggacggtcgtgtactcgtagttccatgtagaaaccaagatg

SEQ ID NO: 119556 - DNA, 80 bp, synthetic construct
  source 1..80: mol_type = other DNA
atggccctatacgatgtaacgcagaagttaccacaggccgtgatgggtccggcatacggattccagtactcccctaacca

SEQ ID NO: 119557 - DNA, 80 bp, synthetic construct
  source 1..80: mol_type = other DNA
ttacaatctgtttgtcatggatgaggctcacttcactgatcccgctagcatcgccgctcgtggatacatatcaacaaaag

SEQ ID NO: 119558 - DNA, 80 bp, synthetic construct
  source 1..80: mol_type = other DNA
agcggtgggactgatgtttgctatagtgggagggctggccgagcttgatgttgaatccatggccattccgtttaccatag

SEQ ID NO: 119559 - DNA, 80 bp, synthetic construct
  source 1..80: mol_type = other DNA
ggacaggggttctcgtggagataccgccagcattggactgtccaggactgcaactgttcgatataccctggacatctgac

SEQ ID NO: 119560 - DNA, 80 bp, synthetic construct
  source 1..80: mol_type = other DNA
gattgcttcaggaagcacccggacgccacttaccttaagtgtggctcgggcccatggctcacgccgaggtgcatggtcca

SEQ ID NO: 119561 - DNA, 80 bp, synthetic construct
  source 1..80: mol_type = other DNA
gggcgaagacgccgcggcggcggagggcaggacgccccccgcgagacagccccgcgcggcccaggagcccctcatagtca

SEQ ID NO: 119562 - DNA, 80 bp, synthetic construct
  source 1..80: mol_type = other DNA
acttccgccacactactacgtcacccgccccgttcccacgccccgccacacgtcacaaactccaccccctcattatcata

SEQ ID NO: 119563 - DNA, 80 bp, synthetic construct
  source 1..80: mol_type = other DNA
ggtggtccgggttttcccacaacaccgcgaccggggtcatggagatgtccacgagcaccagacacggcgggcccccggcg

SEQ ID NO: 119564 - DNA, 80 bp, synthetic construct
  source 1..80: mol_type = other DNA
catcagaggacaagccttactgctggcactacgcgcctcgccaatgtggagtggtacccgcaaccacagtgtgtggccct

SEQ ID NO: 119565 - DNA, 80 bp, synthetic construct
  source 1..80: mol_type = other DNA
cacctcctatgtcagcgccagaggaccaacgcgcgaatcgcagttaccgccgctttcaagatggccactccgtcgatgat

SEQ ID NO: 119566 - DNA, 80 bp, synthetic construct
  source 1..80: mol_type = other DNA
tgtgaccgaggagctgaggcccgatcacttggtgctggcctgcacccgcgctgagtttggctctagcgatgaagatacag

SEQ ID NO: 119567 - DNA, 80 bp, synthetic construct
  source 1..80: mol_type = other DNA
atactccgtgaatcctttggaccttccagccataattgagaggttacacgggcttgacgccttttctatgcacacatact

SEQ ID NO: 119568 - DNA, 80 bp, synthetic construct
  source 1..80: mol_type = other DNA
ccccatccccaccacgatcatggcgaagaatgaagtcttctgcgtcgaccccttaaaagggggtcgtaaggcagcgaggc

SEQ ID NO: 119569 - DNA, 80 bp, synthetic construct
  source 1..80: mol_type = other DNA
actgctttaggaagcacccgagtgctacctatattaagtgtggagcagggccttggttgacccccaaatgtctggtagac

SEQ ID NO: 119570 - DNA, 80 bp, synthetic construct
  source 1..80: mol_type = other DNA
aggagttcccgagtggtatactgtctctgtccgaggtcctccgttcagcggcatactttctccatactttaaaggggatg

SEQ ID NO: 119571 - DNA, 80 bp, synthetic construct
  source 1..80: mol_type = other DNA
tttgaaatgtatgggtcagtttattctgttactccgctggatcttccagctatcattcaaagactccatggacttagcgc

SEQ ID NO: 119572 - DNA, 80 bp, synthetic construct
  source 1..80: mol_type = other DNA
ccgtctcgtatattgactcgtcgtcctcgtagggtgcgtgccgttcgcgggccgaggcggcgtgggtggctttgcggcgg

SEQ ID NO: 119573 - DNA, 80 bp, synthetic construct
  source 1..80: mol_type = other DNA
taagccccgcgatatcaagcgtgttaaaaagcgggaaaagaaagaggaactcgcggtggtagacgatggcggagtggaat

SEQ ID NO: 119574 - DNA, 80 bp, synthetic construct
  source 1..80: mol_type = other DNA
acgcaaaccccgacgaggcgagcagccccgcgaggcgccagaacagggacggacgcgcgtccgtgccggagcccgggtcc

SEQ ID NO: 119575 - DNA, 80 bp, synthetic construct
  source 1..80: mol_type = other DNA
gaacgcttagaatcctggagatggtaagtgattggcttagcagaggccctagggaattctgcatcaaggttttatgccct

SEQ ID NO: 119576 - DNA, 80 bp, synthetic construct
  source 1..80: mol_type = other DNA
agtcatccttgtggcccttttccaccctcacctggtgtttgacattactaagtacttgctggctttgattggcccactct

SEQ ID NO: 119577 - DNA, 80 bp, synthetic construct
  source 1..80: mol_type = other DNA
gggcaacggctgcggactatttggcaaaggaagcattgacacatgcgccaaatttgcctgctccaccaaggcaacaggaa

SEQ ID NO: 119578 - DNA, 80 bp, synthetic construct
  source 1..80: mol_type = other DNA
acatcctagcaggatacggagccggtgtctcaggtgccttggtggcttttaagatcatgggaggagaactccccacaact

SEQ ID NO: 119579 - DNA, 80 bp, synthetic construct
  source 1..80: mol_type = other DNA
cccccggctaccggggagtgacgtatcgcccgtcgggaacccgccgccgaacccgtcgccgccgccgctcccgtcgcgct

SEQ ID NO: 119580 - DNA, 80 bp, synthetic construct
  source 1..80: mol_type = other DNA
ttgggggggtgggtggctgctcaactcgcccgccccagcgctgcttcagccttcgtgtgcgccggcattgctggtgctgc

SEQ ID NO: 119581 - DNA, 80 bp, synthetic construct
  source 1..80: mol_type = other DNA
tttcggtccacgagacgcgcgtcttggtgccgccggcggccggcggcagaggtggcctggtttccgtggagcgcgagctg

SEQ ID NO: 119582 - DNA, 80 bp, synthetic construct
  source 1..80: mol_type = other DNA
ctatctatataatataccccacaaagtaaacaaaagttaatatgcaaatgagcttttgaatttagggcgtggtcgtcgtt

SEQ ID NO: 119583 - DNA, 80 bp, synthetic construct
  source 1..80: mol_type = other DNA
gcggagacgatctagtagtcgtggctgagagcgttggcgttcccgaggatgcagccaacctgcgagctttcacggaagcc

SEQ ID NO: 119584 - DNA, 80 bp, synthetic construct
  source 1..80: mol_type = other DNA
gcagagacagccggggtcagactaactgtgctggctacggccacaccccccgggtcagtgacaaccccccatcccgatat

SEQ ID NO: 119585 - DNA, 80 bp, synthetic construct
  source 1..80: mol_type = other DNA
tgaccgcgtgcccacgtcgccccgccgtggctttcgccctgtgtcgcgcgaccgacagcactcacagccccgcatatccc

SEQ ID NO: 119586 - DNA, 80 bp, synthetic construct
  source 1..80: mol_type = other DNA
tgtttatgcgctgtaccatacatttaggcttaaggcggggtatgtttagaccttcccaatgtaacttcagccactcaaac

SEQ ID NO: 119587 - DNA, 80 bp, synthetic construct
  source 1..80: mol_type = other DNA
atatgcaacgccaagcgttaaaagcacaatacatccagatgatatatgagcgataacctccaaaagcatcaataacgtaa

SEQ ID NO: 119588 - DNA, 80 bp, synthetic construct
  source 1..80: mol_type = other DNA
gattagaggtaggtcgagtgagtagtgggcgtggctaaggtgactataaaggcgggtgtcttacgagggtctttttgctt

SEQ ID NO: 119589 - DNA, 80 bp, synthetic construct
  source 1..80: mol_type = other DNA
tcctgaaatagtccgtgaagccataaaaacaagactccgtactgtgatcttagctccaaccagggttgtcgctgctgaaa

SEQ ID NO: 119590 - DNA, 80 bp, synthetic construct
  source 1..80: mol_type = other DNA
ccgggcttcagaggtagaagcaaggctactcacagttgaggaagcctgcgacttgacgcctccgcactctgctcgctcca

SEQ ID NO: 119591 - DNA, 80 bp, synthetic construct
  source 1..80: mol_type = other DNA
ctgggtggacggggttcagatccatcgattcgctcccacgccaaaggcgttcatgagggacgaggtatcattcagcgtgg

SEQ ID NO: 119592 - DNA, 80 bp, synthetic construct
  source 1..80: mol_type = other DNA
tacaattgcccaccccaacatagaagagatagctctctccactgagggggaggtgcctttctatgggaaagctattccct

SEQ ID NO: 119593 - DNA, 80 bp, synthetic construct
  source 1..80: mol_type = other DNA
tcaccggtgaagatgattgaacctgatctagaaattgatggaagaatcaccgaacagaggctcctcactgatcgcgctag

SEQ ID NO: 119594 - DNA, 80 bp, synthetic construct
  source 1..80: mol_type = other DNA
gctgggctcgagcatggctacctgggaggagaggaggatgtgctgctgaaacacctgcagcgccagtccctcatcctccg

SEQ ID NO: 119595 - DNA, 80 bp, synthetic construct
  source 1..80: mol_type = other DNA
gcgcgctcatatcttattgcgcgcctgcatggctctccgcactcttgcgggcgggaggtacgtccaagctatgctgctgc

SEQ ID NO: 119596 - DNA, 80 bp, synthetic construct
  source 1..80: mol_type = other DNA
gccgaggccgcacttgagaagcttgtcatcctacattcagctagtgctgccagcgccaacgggctgccatgcttcatcat

SEQ ID NO: 119597 - DNA, 80 bp, synthetic construct
  source 1..80: mol_type = other DNA
ttgagaggcttgagcagttctgggcaaagcatatgtggaatttcatcagcggcatccagtaccttgctggtttgtccacc

SEQ ID NO: 119598 - DNA, 80 bp, synthetic construct
  source 1..80: mol_type = other DNA
ctggtccggaatactggtcacaatgggggcttggacggcttacgaacttttctcgtccacgcggagaactgatctggtct

SEQ ID NO: 119599 - DNA, 80 bp, synthetic construct
  source 1..80: mol_type = other DNA
ttacataggtcctctgtattaaaatacatatatataataaaagcatacttactaaggccatggcgaccagcgttcgtctt

SEQ ID NO: 119600 - DNA, 80 bp, synthetic construct
  source 1..80: mol_type = other DNA
aaggagagttggggttggccgtattggtagtcatatctatctttactctcaccccagcatacaagaccctcctgagtcgg

SEQ ID NO: 119601 - DNA, 80 bp, synthetic construct
  source 1..80: mol_type = other DNA
aggaatgtttgactcagtggtgctctgcgaatgctatgacgccggctgcgcttggtatgagcttgctcccagcgagacaa

SEQ ID NO: 119602 - DNA, 80 bp, synthetic construct
  source 1..80: mol_type = other DNA
tggaggaccgagacaggatagagatgagcccactgttattctcaaccaccgagctcgccatcctgccatgctcattcaca

SEQ ID NO: 119603 - DNA, 80 bp, synthetic construct
  source 1..80: mol_type = other DNA
ggaattaaaagggaagccgcggatgaattgcaacccaccatgcaactgatggtgcctaagaaacaaaaactagaggatgt

SEQ ID NO: 119604 - DNA, 80 bp, synthetic construct
  source 1..80: mol_type = other DNA
cgccttcaaagtgctgcacctcttggactagtggacaaaacactaaaagttttgttttctagccccctctatctagataa

SEQ ID NO: 119605 - DNA, 80 bp, synthetic construct
  source 1..80: mol_type = other DNA
gcctcgggcgtgagggtgagatccccttctatgggagggcgattcccctatcctgcatcaagggaaggagacacctgatt

SEQ ID NO: 119606 - DNA, 80 bp, synthetic construct
  source 1..80: mol_type = other DNA
atttgtggtaagcggcttggccggtgccgccgtgggaggcataggtcttggcagggtgttgcttgacgtgctcgccgggt

SEQ ID NO: 119607 - DNA, 80 bp, synthetic construct
  source 1..80: mol_type = other DNA
gtgtatgcgtattgcgtaccgcgaccctgggatgttttacaggcgcgtttgtttgtctcggttataagtatgcagtcggg

SEQ ID NO: 119608 - DNA, 80 bp, synthetic construct
  source 1..80: mol_type = other DNA
gctcgaagactctcgctggtccaaaaggccccatttgtcagatgtacaccaatgtcgagcaggacttggtgggttggccc

SEQ ID NO: 119609 - DNA, 80 bp, synthetic construct
  source 1..80: mol_type = other DNA
gcggggtcgcttgcgggtttttttggtaaccggatgggccaaaacataaatgtcctttgaatccgatagtttcatttcat

SEQ ID NO: 119610 - DNA, 80 bp, synthetic construct
  source 1..80: mol_type = other DNA
ggcctcggggggccagggccccaggcggtcgggcgtgtccccgaccaccgcatacaggcggcgcccgtcgctctcgaacc

SEQ ID NO: 119611 - DNA, 80 bp, synthetic construct
  source 1..80: mol_type = other DNA
ctggtgctggactgtccagagaaccctgggcgaggttgtcgggcttgtgatttccatcggggcactagtggcaatcctga

SEQ ID NO: 119612 - DNA, 80 bp, synthetic construct
  source 1..80: mol_type = other DNA
atcagtcacactgctgggtggccctcacccccacgctggcggcgtctcaccccggtgctccgtttgaatctctccggaga

SEQ ID NO: 119613 - DNA, 80 bp, synthetic construct
  source 1..80: mol_type = other DNA
agcaccaccgacagttcctcggtcatgtccggagtcataatgtaagactcagtaaacacatcaggttggttaacatcggt

SEQ ID NO: 119614 - DNA, 80 bp, synthetic construct
  source 1..80: mol_type = other DNA
cgaagcagctatcaccaccggctccgtggcaggcagcaccgtttccaccatcaccggacttctcacccctggtgccaaac

SEQ ID NO: 119615 - DNA, 80 bp, synthetic construct
  source 1..80: mol_type = other DNA
gtagcgtgtggcaagtatgttcaggcctgcctattgaagctaggagcttggacgggcacctatatttatgaccatctggc

SEQ ID NO: 119616 - DNA, 80 bp, synthetic construct
  source 1..80: mol_type = other DNA
gcccgcggcggacgccgcgggcgtcgcaggtgtcggggtcgcggtggtcccggagccgccgatggtttgtcggacccccg

SEQ ID NO: 119617 - DNA, 80 bp, synthetic construct
  source 1..80: mol_type = other DNA
ggccacgttcgcgctgcatgcgaacatgatcctggctctcaccgtggccatcaacaacgccagcccccgcaccggacgcg

SEQ ID NO: 119618 - DNA, 80 bp, synthetic construct
  source 1..80: mol_type = other DNA
caccggcgtgtcggtgctgtttcaggggttttttcatcgcccacacaacgcccccggtggcgcgattacgccagagcgga

SEQ ID NO: 119619 - DNA, 80 bp, synthetic construct
  source 1..80: mol_type = other DNA
tggtatctcagccgccttttagctgcaaactttctccaaagtttaaatgggatgtcaaattcctcatgttcttgtccctc

SEQ ID NO: 119620 - DNA, 80 bp, synthetic construct
  source 1..80: mol_type = other DNA
ggggctcggtcactaggatcgaatccaattccaaagtggtggtgctcgactcctttgacccgcctagcggtgaggaggac

SEQ ID NO: 119621 - DNA, 80 bp, synthetic construct
  source 1..80: mol_type = other DNA
gtggttgggacggctttggctgtacggtaccagtcggtgggcgtccagtggagcaagggtgatgtctttccagggtcgca

SEQ ID NO: 119622 - DNA, 80 bp, synthetic construct
  source 1..80: mol_type = other DNA
ggtagtctatggcaagtactgccagatggccctactcaaagtgggggctttcactggtacctatgtctacaaccacctta

SEQ ID NO: 119623 - DNA, 80 bp, synthetic construct
  source 1..80: mol_type = other DNA
acctgacatggttctctcagaggaatggctctcaattaaatttgtggacaatcccttcatatggcccaagctatttcgaa

SEQ ID NO: 119624 - DNA, 80 bp, synthetic construct
  source 1..80: mol_type = other DNA
gctatgaccaggtactcagctccccctggagatgaaccgcatccggagtatgacttggagcgcatcacatcatgctcctc

SEQ ID NO: 119625 - DNA, 80 bp, synthetic construct
  source 1..80: mol_type = other DNA
tagcagaatagcggcgagaggagaccggacggataaataccctgtccaggagttggtgtctattacctttgagagctatc

SEQ ID NO: 119626 - DNA, 80 bp, synthetic construct
  source 1..80: mol_type = other DNA
gcggccttgccgatctcatggggtatatccccgttctgggcgggccactcggtggcgtcgcggctgccctggcacatggt

SEQ ID NO: 119627 - DNA, 80 bp, synthetic construct
  source 1..80: mol_type = other DNA
tcacctacttgcttcctcacattatcagatgctgaagaaacttcataactggtttactgaggactgccccattccatgcg

SEQ ID NO: 119628 - DNA, 80 bp, synthetic construct
  source 1..80: mol_type = other DNA
tggtggcttttgggtatttccgatgaataaagacggttaatggttaaacctctggtctcatacgggtcggtgatgtcggg

SEQ ID NO: 119629 - DNA, 80 bp, synthetic construct
  source 1..80: mol_type = other DNA
cgtcgggcaattggttcggttgcacctggatgaactcatccggatttaccaaagtatgcggagcacctccttgtaacatc

SEQ ID NO: 119630 - DNA, 80 bp, synthetic construct
  source 1..80: mol_type = other DNA
ttcaattcatctggttgccctgcacgcatgtcctcttgtcgccgtctcgaggacttcaggatagggtggggcagcctgga

SEQ ID NO: 119631 - DNA, 80 bp, synthetic construct
  source 1..80: mol_type = other DNA
tatcaagtgggaatatgtcatactcctatttttgctgctggcggacgctcgcgtctgcgcctgcctgtggatgatactac

SEQ ID NO: 119632 - DNA, 80 bp, synthetic construct
  source 1..80: mol_type = other DNA
cgcccaggccgtgtaaggaggtctcctccaaaactgtttgtggtccggtgtattgtttcactccctctccggtcgtggtg

SEQ ID NO: 119633 - DNA, 80 bp, synthetic construct
  source 1..80: mol_type = other DNA
gccattgccagcatggcccagccccggcgagggaatgtctactgggtaagagacgcatcgggtgtgcgggtgccggtgcg

SEQ ID NO: 119634 - DNA, 80 bp, synthetic construct
  source 1..80: mol_type = other DNA
ctcctcggggaccacgcggagcaggtcaacacgttcctgcgtctcgtgtttgagatccccctgtttagcgacgcggccgt

SEQ ID NO: 119635 - DNA, 80 bp, synthetic construct
  source 1..80: mol_type = other DNA
cgggtctttagtgttggccctaataaaaaactcaggggatttttgctgtctattgggaaataaaggtttacttttgtatc

SEQ ID NO: 119636 - DNA, 80 bp, synthetic construct
  source 1..80: mol_type = other DNA
aagcgctgctgcacgtgtgggttccccccctcaacgtccgaggggggcgtgacgctgtcatcttactcgcgtgtgttgta

SEQ ID NO: 119637 - DNA, 80 bp, synthetic construct
  source 1..80: mol_type = other DNA
aagatgtaaacttgggaagtggaaccagggcggtggggaaacccctactcaactcagacaccagtaaaatcaagaacagg

SEQ ID NO: 119638 - DNA, 80 bp, synthetic construct
  source 1..80: mol_type = other DNA
gaccgtcctcgcatacgtagtcgtcttgtgttagctcttcgccaacatcttccgttctgggttctggttgaagtcccgat

SEQ ID NO: 119639 - DNA, 80 bp, synthetic construct
  source 1..80: mol_type = other DNA
tcagacctatcaggtcgcgcacctgcacgcaccaacagggagtggtaagagcaccaaggtcccggcagcgtacgctgccc

SEQ ID NO: 119640 - DNA, 80 bp, synthetic construct
  source 1..80: mol_type = other DNA
atcactccgctggatctgccagctataattcagaaactccatggcttaagcgcattcacactccacggatactctccaca

SEQ ID NO: 119641 - DNA, 80 bp, synthetic construct
  source 1..80: mol_type = other DNA
gatcacagaagattgccctgtcccctgctccggctcatggcttcgagacgtgtgggactgggtctgctcaatcctaatag

SEQ ID NO: 119642 - DNA, 80 bp, synthetic construct
  source 1..80: mol_type = other DNA
gaatgaggtgttctgcgtggacgctcagaagggaggccgtaaacctgctcgactcattgtattccctgaccttggagtga

SEQ ID NO: 119643 - DNA, 80 bp, synthetic construct
  source 1..80: mol_type = other DNA
acctgttcatggggggcgatgtgactcggatagagtctgggtccaaagtggtcgttctggactctctcgacccaatggtc

SEQ ID NO: 119644 - DNA, 80 bp, synthetic construct
  source 1..80: mol_type = other DNA
gtggatggggtccggatacatcgtttcgctcccgcgtgtcggcctctcctcagggatgaggtgacatttagcgtgggatt

SEQ ID NO: 119645 - DNA, 80 bp, synthetic construct
  source 1..80: mol_type = other DNA
cgatctgggcacggcctgactacaacccgcccctgatagaaccttggaaggctcctgactacgagccccccttggtgcgc

SEQ ID NO: 119646 - DNA, 80 bp, synthetic construct
  source 1..80: mol_type = other DNA
catgcagtggaggaactaccagaaacaatggaaacactcctactcttgggactcatgatcttattaacaggtggagcaat

SEQ ID NO: 119647 - DNA, 80 bp, synthetic construct
  source 1..80: mol_type = other DNA
aaccacgactcccctgacgctgagctcatagaggctaacctcctgtggaggcaggagatgggcggcaacatcaccagggt

SEQ ID NO: 119648 - DNA, 80 bp, synthetic construct
  source 1..80: mol_type = other DNA
acattgatgctcatttcctctcacagacgaaacaggcagaggaaaacttcgcatatctcgtagcctatcaagctacggtc

SEQ ID NO: 119649 - DNA, 80 bp, synthetic construct
  source 1..80: mol_type = other DNA
gcctataccacctccaaggcggaagagggtggtggtgttagatgaatccagcgtatccacggcattagccgacctcgcca

SEQ ID NO: 119650 - DNA, 80 bp, synthetic construct
  source 1..80: mol_type = other DNA
tgcctcccagcaagcaaccccctgtccctcctcccaggaggaaacggacggttcagctcactgagtccgttgtttctacc

SEQ ID NO: 119651 - DNA, 80 bp, synthetic construct
  source 1..80: mol_type = other DNA
tcgcctcgcctatgagctgccccagcagaagcagaagttcacctgcatggtgggcatcaaccccatagtcatcacccagc

SEQ ID NO: 119652 - DNA, 80 bp, synthetic construct
  source 1..80: mol_type = other DNA
ctttcccctgactccgactggacttgcgcgtgtgattcaagaggcgtatgccaatggcatctgtggcatccgatcgacgt

SEQ ID NO: 119653 - DNA, 80 bp, synthetic construct
  source 1..80: mol_type = other DNA
gagaccaagtccagggtgcgcgcttgcgagtgcgggggcagacacaccaggatgcagccagtggccctggatgtgaccga

SEQ ID NO: 119654 - DNA, 80 bp, synthetic construct
  source 1..80: mol_type = other DNA
ctgtctttttagtcagccagctgttcgtcctctctcctagacaccattggaccacgcaggactgtaactgctccatctac

SEQ ID NO: 119655 - DNA, 80 bp, synthetic construct
  source 1..80: mol_type = other DNA
cagtggtggtgactgaggactgtggaaatagaggaccctctttaagaacgaccactgcctctggaaaactcataacagaa

SEQ ID NO: 119656 - DNA, 80 bp, synthetic construct
  source 1..80: mol_type = other DNA
ctctccaactgagctcaatagagtggcggtggttctcaggaagcttgggatcccccccctacgagcatggagacatcggg

SEQ ID NO: 119657 - DNA, 80 bp, synthetic construct
  source 1..80: mol_type = other DNA
agtgggggtgctaggaaaaagcaaaaaactgagcctgaacctagaaactttttgaatgagttgactgtaagcctaatgaa

SEQ ID NO: 119658 - DNA, 80 bp, synthetic construct
  source 1..80: mol_type = other DNA
ggcggcgacgacaacattgtctgcatgagctgcgcgctgtgaccgacaaaccccctccgcgccaggcccgccgccactgt

SEQ ID NO: 119659 - DNA, 80 bp, synthetic construct
  source 1..80: mol_type = other DNA
ctcctgctagcagccggatgctggggacaagtcactctcaccgtgacggtgacatcagcaacacttctgttctgccatta

SEQ ID NO: 119660 - DNA, 80 bp, synthetic construct
  source 1..80: mol_type = other DNA
cccagcaaacacgaggcctcctgggcgccatagtggtgagtatgacggggcgtgacaggacagaacaggccggtgaagtc

SEQ ID NO: 119661 - DNA, 80 bp, synthetic construct
  source 1..80: mol_type = other DNA
caccataatatggtatatgccacaacatcccgcagcgccagccaacggcagaaaaaggtcacttttgacagactgcaggt

SEQ ID NO: 119662 - DNA, 80 bp, synthetic construct
  source 1..80: mol_type = other DNA
tagccttcctgctactggcagacgccagggtctgtgcatgtctctggatgatgctgctggtgtcgcaggttgaagcagcc

SEQ ID NO: 119663 - DNA, 80 bp, synthetic construct
  source 1..80: mol_type = other DNA
cggtagggcttacaggcatgcggtggaggaactaccagaaacaatggaaacactcctactcttgggactaatgatcttgt

SEQ ID NO: 119664 - DNA, 80 bp, synthetic construct
  source 1..80: mol_type = other DNA
aagatcttcttggatctacgggagactagttcttcagactgtgacaccggagtcatgggggctgcagtcaagagcggtca

SEQ ID NO: 119665 - DNA, 80 bp, synthetic construct
  source 1..80: mol_type = other DNA
gtttatttatttcttttgcggtaggccctggaccacctgtcgcggtcgtttaaaactttatggatgttttccaagacccg

SEQ ID NO: 119666 - DNA, 80 bp, synthetic construct
  source 1..80: mol_type = other DNA
caccaacgtcctcacgtccctcttttcttctggttcgtctcaaaacatccagctcataaacactaatggcagttggcaca

SEQ ID NO: 119667 - DNA, 80 bp, synthetic construct
  source 1..80: mol_type = other DNA
gcagtggatgaacaggctgatcgcgttcgcctcccgaggcaatcatgtgtctccgacacactacgtgcccgagaccgacg

SEQ ID NO: 119668 - DNA, 80 bp, synthetic construct
  source 1..80: mol_type = other DNA
accaacgaccagtcttttaacgattacttgtgcgctgcaaacatgctgtatcccatcccagctaacgccaccagcgtgcc

SEQ ID NO: 119669 - DNA, 80 bp, synthetic construct
  source 1..80: mol_type = other DNA
gccgaaccgagggcaggtcctgggcgcaacccgggtacccttggcctctttacggtaatgagggctgtgggtgtgcggtg

SEQ ID NO: 119670 - DNA, 80 bp, synthetic construct
  source 1..80: mol_type = other DNA
gtgtcaatatgtgcactctcattgcgatggacttgggagagttatgtgaggacacaatgacctacaaatgcccccgaatc

SEQ ID NO: 119671 - DNA, 80 bp, synthetic construct
  source 1..80: mol_type = other DNA
cgtaggggtcgcacgggaagaggtaggcacggcatatatcgatatgtctcgtctggggagagaccgtctggcattttcga

SEQ ID NO: 119672 - DNA, 80 bp, synthetic construct
  source 1..80: mol_type = other DNA
ccttttccaagccagcctactccgcataccatattacgtgcgagctcacgcccttctgcgagcgtgtttgtttgtccgcc

SEQ ID NO: 119673 - DNA, 80 bp, synthetic construct
  source 1..80: mol_type = other DNA
gatcgccggtgctcactggggagtcctggcgggcatagcgtatttctccatggtgtggaactgggcgaaggtcatggtag

SEQ ID NO: 119674 - DNA, 80 bp, synthetic construct
  source 1..80: mol_type = other DNA
acatccagctcatcaacaccaatggcagttggcacatcaatcgcactgccctgaattgtaatgactccttggagaccggc

SEQ ID NO: 119675 - DNA, 80 bp, synthetic construct
  source 1..80: mol_type = other DNA
tgaccgctacaagtacctgccagagacccccaagcaactggctaaagtggttgaaaacgctcacaagagcggaatatgtg

SEQ ID NO: 119676 - DNA, 80 bp, synthetic construct
  source 1..80: mol_type = other DNA
gtaatagataaaagcatcacagacctaccaggattaatagatacacttgctgttttaactggaaagggaattggaacaga

SEQ ID NO: 119677 - DNA, 80 bp, synthetic construct
  source 1..80: mol_type = other DNA
tgcagaggaaaccctagtaacgcacacagtagagccgccgtcatatgaggaagcagtaaaacagggagcctcagtgttgc

SEQ ID NO: 119678 - DNA, 80 bp, synthetic construct
  source 1..80: mol_type = other DNA
taacttgggttcccaggtggcgctaaatgcttttctgagcacgctcccggctaacgttccgcgcggacaggaggattacg

SEQ ID NO: 119679 - DNA, 80 bp, synthetic construct
  source 1..80: mol_type = other DNA
caccacctccacgccgccgcccgccgcggccagcaccgtccccgcgcggcccgcggccgacgcccagcgtatctgcggtg

SEQ ID NO: 119680 - DNA, 80 bp, synthetic construct
  source 1..80: mol_type = other DNA
aggagaagtcaaatcatgcacctggccagaaacccacactttgtggggtgatggagttctggaaagtgatctcatcatac

SEQ ID NO: 119681 - DNA, 80 bp, synthetic construct
  source 1..80: mol_type = other DNA
ccagaaaccagaattctgcataaaagtgttaaatccatatatgccatctatcatagaggaactagaaagacttcagagaa

SEQ ID NO: 119682 - DNA, 80 bp, synthetic construct
  source 1..80: mol_type = other DNA
ccgatctctatcattgagaactcggtggattttttccaggatcctatagaggtgggattgaatgtttagatacatgggca

SEQ ID NO: 119683 - DNA, 80 bp, synthetic construct
  source 1..80: mol_type = other DNA
ctgctgctattcgccggcgtcgacgcgacgacctacaccactgggggagccgccgccagcgccacggctggctatgccag

SEQ ID NO: 119684 - DNA, 80 bp, synthetic construct
  source 1..80: mol_type = other DNA
ccccagccctccccggccgcgtcccgcgctccctcggggtggttcgggcatctctacctcagtgccgccaatctcaggtc

SEQ ID NO: 119685 - DNA, 80 bp, synthetic construct
  source 1..80: mol_type = other DNA
aggaaagttgttcactcagaccatgaaaggcgtggaacgcctggccgtcatgggagacaccgcctgggatttcagctccg

SEQ ID NO: 119686 - DNA, 80 bp, synthetic construct
  source 1..80: mol_type = other DNA
agtccatgcggcgtcatgtggacatgatggtgggcgctgccacattgtgctccgcactttacgtgggagatctgtgcggg

SEQ ID NO: 119687 - DNA, 80 bp, synthetic construct
  source 1..80: mol_type = other DNA
gcggtgcttatgacataatcatatgtgatgagtgtcatgccatagacgccaccacggtagttggcatcggcaccgtgtta

SEQ ID NO: 119688 - DNA, 80 bp, synthetic construct
  source 1..80: mol_type = other DNA
ttttctggctttaaatataacctcgtccgcaaaaaaaaccgcacatgataacgcgcggatacaatgagtagtggctttat

SEQ ID NO: 119689 - DNA, 80 bp, synthetic construct
  source 1..80: mol_type = other DNA
acaacagcctcgtctgtcctacggactgtttcaggaaacaccccgatgccacttacagtcgttgcggtgccggcccgtgg

SEQ ID NO: 119690 - DNA, 80 bp, synthetic construct
  source 1..80: mol_type = other DNA
gggtgagggttctggaggacgggataaattatgcaacggggaatttgcccggttgctccttttctatctttcttttagcc

SEQ ID NO: 119691 - DNA, 80 bp, synthetic construct
  source 1..80: mol_type = other DNA
cccgggtacccctggcccctgtatgggaatgagggctgcggttgggcaagttggcttgtatccccccgcggctcccgccc

SEQ ID NO: 119692 - DNA, 80 bp, synthetic construct
  source 1..80: mol_type = other DNA
gggggggtgatctcccccgagcacgtcgcgtaccttggtgcgttcctgagcgtgctgtacgctggccgctggcgcatgtc

SEQ ID NO: 119693 - DNA, 80 bp, synthetic construct
  source 1..80: mol_type = other DNA
gtggcatgctgggtaccattgtggtgagtttgacaggccgtgataagaacgaggtatcgggagaagtccaggtcctctcc

SEQ ID NO: 119694 - DNA, 80 bp, synthetic construct
  source 1..80: mol_type = other DNA
attccacacatgagatgtactgggtcagtcatgcgtcgggcaacatagtgcacgccgtaaacatgaccagtcaggtcttg

SEQ ID NO: 119695 - DNA, 80 bp, synthetic construct
  source 1..80: mol_type = other DNA
gcatggcgtgggatatgatggcaaattggtccccctcggtcacatacatcgtgtccagcatcctccgaatgcctcaagtc

SEQ ID NO: 119696 - DNA, 80 bp, synthetic construct
  source 1..80: mol_type = other DNA
gtaacaccatgacctgctacataaaggctttagcggcctgccgagcagcaggcctcaccaaatatgacatgttggtctgc

SEQ ID NO: 119697 - DNA, 80 bp, synthetic construct
  source 1..80: mol_type = other DNA
tcggtgtggtgtgcgcagcaatactgcgccggcacgtgggccctggtgaaggcgcggtgcagtggatgaaccggctgata

SEQ ID NO: 119698 - DNA, 80 bp, synthetic construct
  source 1..80: mol_type = other DNA
cgcaggtggcgctgtctgaacctctcggtgcgactcctgtgaggctggtaagaagttagattgtccagcagcctcacagc

SEQ ID NO: 119699 - DNA, 80 bp, synthetic construct
  source 1..80: mol_type = other DNA
ccatgtgccatgccaccctaacttacaggatgttggaaccaactagggttgttaactgggaagtgatcattatggatgaa

SEQ ID NO: 119700 - DNA, 80 bp, synthetic construct
  source 1..80: mol_type = other DNA
gaggcggcagcgagaagactcgctagggggtcccccccctcagaggctagctcctcagcgagtcagctgtccgccccgtc

SEQ ID NO: 119701 - DNA, 80 bp, synthetic construct
  source 1..80: mol_type = other DNA
actaccaggtgtccctgtggtgccgacatctcgggcaacgtccggatgggcactatgaagatcacaggccccaaaacctg

SEQ ID NO: 119702 - DNA, 80 bp, synthetic construct
  source 1..80: mol_type = other DNA
gcaggtgtgtggtccagtgtattgtttcaccccaagccctgttgtggtggggaccaccgatcgttccggtgtccctacgt

SEQ ID NO: 119703 - DNA, 80 bp, synthetic construct
  source 1..80: mol_type = other DNA
tcacatgaaggcgaaccgagggcggctgtccaacccaccccccgccacccagtcccggtccccgtcggattgggaaacaa

SEQ ID NO: 119704 - DNA, 80 bp, synthetic construct
  source 1..80: mol_type = other DNA
acagagtcaagttagagtacggacgctgtggaagacaggctggattcagggggagaaggtctgtggtcatcccgacacat

SEQ ID NO: 119705 - DNA, 80 bp, synthetic construct
  source 1..80: mol_type = other DNA
ataacagaagactacgccaccccatgcggcaatagttggcttcacgacgtgtgggattgggtgtgtactgtcttgagtga

SEQ ID NO: 119706 - DNA, 80 bp, synthetic construct
  source 1..80: mol_type = other DNA
tctacggcatattccagtcaacattcctaggggcctctcaacggggagtgggagtggcgcagggagtggtcttccatacg

SEQ ID NO: 119707 - DNA, 80 bp, synthetic construct
  source 1..80: mol_type = other DNA
ggccacacttgttgccctccgccaacaacatttagatcgtcagtgttattttggtgtatacgtggccgagggtacagagg

SEQ ID NO: 119708 - DNA, 80 bp, synthetic construct
  source 1..80: mol_type = other DNA
ccccagggggcgctccaaagggtggtcgggcgtctgcgggcgctgctgttccatcatcctctccggtatcgccgtgcgcc

SEQ ID NO: 119709 - DNA, 80 bp, synthetic construct
  source 1..80: mol_type = other DNA
aagccccgtgccctgaagcgtgttaaaaagcgggcaaaaaaagaggaaactgggttgttagatgatggtgtggagttcgt

SEQ ID NO: 119710 - DNA, 80 bp, synthetic construct
  source 1..80: mol_type = other DNA
tctgcggcccggtttactgctttacccccagtcccattgtcatcgggactacaacagttgaaggagtacccacgtacacc

SEQ ID NO: 119711 - DNA, 80 bp, synthetic construct
  source 1..80: mol_type = other DNA
tatctcctccgcggcggcggccaggtccagcgccacgcttccgatcgcgcgccgcgcgtcggcccggagggcgtccaggc

SEQ ID NO: 119712 - DNA, 80 bp, synthetic construct
  source 1..80: mol_type = other DNA
cccatccttgaaagctacatgcactgaccacaaagactcccctggagtagacctcatcgaggctaaccttctctggggcg

SEQ ID NO: 119713 - DNA, 80 bp, synthetic construct
  source 1..80: mol_type = other DNA
cattcaaagactccacggctgcgctttcacactccatggatactctccacacgaactcaatcgggtggcgggaagcctca

SEQ ID NO: 119714 - DNA, 80 bp, synthetic construct
  source 1..80: mol_type = other DNA
aatttttctcttgggtggatggggtgcaaatacaccgattcgcccccactccaggtcccttcttccgggatgaggtaacg

SEQ ID NO: 119715 - DNA, 80 bp, synthetic construct
  source 1..80: mol_type = other DNA
gttgaattttgaccttctcaagctggcgggagacgtcgagtccaaccctgggccaatgagcggaaggaaggcccaaggga

SEQ ID NO: 119716 - DNA, 80 bp, synthetic construct
  source 1..80: mol_type = other DNA
ctcgcgcgacaggagccgggcgggaagctggttgcgttggagggccgtccagaaccactgcgggttcggctggttggacc

SEQ ID NO: 119717 - DNA, 80 bp, synthetic construct
  source 1..80: mol_type = other DNA
gctggtactttcggcgcttggtgggcagaggaggtgacggcgaggggctcctctcctgctccggcggatagcgcgccgac

SEQ ID NO: 119718 - DNA, 80 bp, synthetic construct
  source 1..80: mol_type = other DNA
ccttggcggaggggcccggcgtataggggaaacacctcgacccccaaagaaaaaaaaaggggggggcaaagaggaaaata

SEQ ID NO: 119719 - DNA, 80 bp, synthetic construct
  source 1..80: mol_type = other DNA
tgggctcggcctgagtacaacccacctttggtggagacatggaaacagcaagattacgacccaccggccgttcatggctg

SEQ ID NO: 119720 - DNA, 80 bp, synthetic construct
  source 1..80: mol_type = other DNA
tttcgccgacagtggacaggaggctgcatctctaggtctgctaacaattgttgtcatcaccatatttaccctcactccgg

SEQ ID NO: 119721 - DNA, 80 bp, synthetic construct
  source 1..80: mol_type = other DNA
acgggggctctaataacaccatgcgctgcggaagaggagaaacttccaataaatcctttgagcaactccctcataagaca

SEQ ID NO: 119722 - DNA, 80 bp, synthetic construct
  source 1..80: mol_type = other DNA
gtgggaggcgccaacctatccccaaggcgcgccgacccgagggcaggacctgggcacagcctgggtacccttggcctctt

SEQ ID NO: 119723 - DNA, 80 bp, synthetic construct
  source 1..80: mol_type = other DNA
gtatgctcctacaatttgggtccgcatggtctttttgacccatttcttcgccatactactggcccaagatactttaaatc

SEQ ID NO: 119724 - DNA, 80 bp, synthetic construct
  source 1..80: mol_type = other DNA
gcctccgctggagggcgagcttggggaccctgatctttcgtcgtggtcgtggtcaaccgtcagcagtgatgacggcgtgg

SEQ ID NO: 119725 - DNA, 80 bp, synthetic construct
  source 1..80: mol_type = other DNA
aatatagaaacaaccaacttcaactcagaattggctccacgtctgccttaattatgagcggagtaacacaaacattaaac

SEQ ID NO: 119726 - DNA, 80 bp, synthetic construct
  source 1..80: mol_type = other DNA
ctggtactaatgctacatatcagggtgttaaagttaaaaatggacaggatggtgacaacaacgcagaatgggagaaagac

SEQ ID NO: 119727 - DNA, 80 bp, synthetic construct
  source 1..80: mol_type = other DNA
cggtgtgcagatccataggtttgcacccacaccaaagccgtttttccgggatgaggtctcgttctgcgttgggcttaatt

SEQ ID NO: 119728 - DNA, 80 bp, synthetic construct
  source 1..80: mol_type = other DNA
cagggccaaactcattgcccagggggggaaagccgctatatgcggtaagtacctctttaactggtcggtgaggaccaagt

SEQ ID NO: 119729 - DNA, 80 bp, synthetic construct
  source 1..80: mol_type = other DNA
ccgatttacgacgaggtggcggacgaccaaaccgacgtattgtacgccaagatacaacacccgcggcacctgcccgatga

SEQ ID NO: 119730 - DNA, 80 bp, synthetic construct
  source 1..80: mol_type = other DNA
tccttgatagccattacaaggacgtggtaaaggagataaaggcaaaggcgtccacagtcaaggcaaacttgctatccgtt

SEQ ID NO: 119731 - DNA, 80 bp, synthetic construct
  source 1..80: mol_type = other DNA
accttccagccataattgagaggttacacgggcttgacgccttttctatgcacacatactctcaccacgaactgacgcgg

SEQ ID NO: 119732 - DNA, 80 bp, synthetic construct
  source 1..80: mol_type = other DNA
taacactcgattgtgaacccaggtccggaattgacttcaatgagatgatcctaatgaaaatgaaaaagaaaacgtggctt

SEQ ID NO: 119733 - DNA, 80 bp, synthetic construct
  source 1..80: mol_type = other DNA
ctgccagcagaaagtggccctggaacagcagatacctctcctccgaccgtcctttcgctgttgtcgctcagtcatccaac

SEQ ID NO: 119734 - DNA, 80 bp, synthetic construct
  source 1..80: mol_type = other DNA
gccgctccttaaaaccccggggcccgtcgttcggggtgctcgttggttggcactcacggtgcggcgaatggcctgtcgta

SEQ ID NO: 119735 - DNA, 80 bp, synthetic construct
  source 1..80: mol_type = other DNA
accataattttattggtgggtcgtttgttcggggacaagcgcgctcgtctgacgtttgggctactcgtcccagaatttgg

SEQ ID NO: 119736 - DNA, 80 bp, synthetic construct
  source 1..80: mol_type = other DNA
aaacggagtctcgggggcgttggcgaacaggttcttcagcaccaccacgaagctgggatgcaagccggacagagccgtcg

SEQ ID NO: 119737 - DNA, 80 bp, synthetic construct
  source 1..80: mol_type = other DNA
ggccctgtgtattgttttacacctagccctgttgtcgttgggactactgaccgcctcgggatccccacatacacctgtgg

SEQ ID NO: 119738 - DNA, 80 bp, synthetic construct
  source 1..80: mol_type = other DNA
ctgcggaaccggtgagtacaccggaatcgctggggtgaccgggtcctttcttggagtaacccgctcaatacccagaaatt

SEQ ID NO: 119739 - DNA, 80 bp, synthetic construct
  source 1..80: mol_type = other DNA
tcttgggctattaaatgggagtatgtggttctggcattcctgctgctggcggatgcgcgcatatgcgcgtgcctttggct

SEQ ID NO: 119740 - DNA, 80 bp, synthetic construct
  source 1..80: mol_type = other DNA
ggctcatcggcatctgtccggtatgggttgttccccacccactcgcgttcggacgtcttagaatcatggcggttttctat

SEQ ID NO: 119741 - DNA, 80 bp, synthetic construct
  source 1..80: mol_type = other DNA
acgtaccggcgcaggccgggcacgctcgtcatgtcgtccgccaggcgccccacggcctcgtggtagtcgataaacccgtc

SEQ ID NO: 119742 - DNA, 80 bp, synthetic construct
  source 1..80: mol_type = other DNA
caccagtgcaagaagggcatcttctgcctggtcaaacaggcaaagatcacctacgagctcgtgtccggcggcaaacagca

SEQ ID NO: 119743 - DNA, 80 bp, synthetic construct
  source 1..80: mol_type = other DNA
ttttccctgtctgtgttggatggatctcggtggtgcgtgggagtggtggtgcgtgggagtggtggtgcgtgggagtggag

SEQ ID NO: 119744 - DNA, 80 bp, synthetic construct
  source 1..80: mol_type = other DNA
agacgttccatactcggggaaacgtgaagacatctggtgcggaagtctaatcggaacacgttccagagcgacatgggctg

SEQ ID NO: 119745 - DNA, 80 bp, synthetic construct
  source 1..80: mol_type = other DNA
ccaagaccctagcgggcccaaaaggccctgtgtgccagatgtacaccaatgtggaccaggatatggtagggtggccagca

SEQ ID NO: 119746 - DNA, 80 bp, synthetic construct
  source 1..80: mol_type = other DNA
ggccatcacctcctgaatggctgcggtgcgctgatcggccgagctgacgaagggcgccacgaccagcgcgcgctccgtct

SEQ ID NO: 119747 - DNA, 80 bp, synthetic construct
  source 1..80: mol_type = other DNA
gtggagcagggccgagcagttctgggcaaaacatatgtggaactttgtcagtgggattcaatacctagctggcctttcga

SEQ ID NO: 119748 - DNA, 80 bp, synthetic construct
  source 1..80: mol_type = other DNA
tcgagcgtgatgggtgcgggaagtagcgcgttaacgaccgccagggcctcctgcagccgcggctccgcctccgagagcgg

SEQ ID NO: 119749 - DNA, 80 bp, synthetic construct
  source 1..80: mol_type = other DNA
cacttacaaccaaaaacggggctttaaccttaaaattgggcacgggactaaacattgataaaaatggagatctttcttca

SEQ ID NO: 119750 - DNA, 80 bp, synthetic construct
  source 1..80: mol_type = other DNA
tccctgcaagacgcaggggggacactcgcgctggactcctgagtcccagacccttgagcacgctcaagggatcatcggtg

SEQ ID NO: 119751 - DNA, 80 bp, synthetic construct
  source 1..80: mol_type = other DNA
gaatcgaccctatccactgccttggccgagcttgccgctaaaagtttcggcagttcctcaacttccggcattacgggcga

SEQ ID NO: 119752 - DNA, 80 bp, synthetic construct
  source 1..80: mol_type = other DNA
tcgggaaaaacagtggtgcgctcgtcgggcacaatcctgacgcgccagcctcggttatgcagggtgaccaggtccacgct

SEQ ID NO: 119753 - DNA, 80 bp, synthetic construct
  source 1..80: mol_type = other DNA
tgccgagtaaccctgccattgcttctcttatgtcgttcactgctgcagtgacaagccctctgaccacccagcaaaccctc

SEQ ID NO: 119754 - DNA, 80 bp, synthetic construct
  source 1..80: mol_type = other DNA
tggacttgtccagttggttcacggtgggcgccggcgggggggacatttatcacagcgtgtcccatgcccgacaccgctat

SEQ ID NO: 119755 - DNA, 80 bp, synthetic construct
  source 1..80: mol_type = other DNA
gtggatgctgatacctatgttactggctccatcgccgcttctaggacaagagcctttgccagcttgttcacactagggtc

SEQ ID NO: 119756 - DNA, 80 bp, synthetic construct
  source 1..80: mol_type = other DNA
gcctccgggagtccgccggtgagtgtggcgcgaggggtggtccgacgaacgcaggcgcggtctccccgcggcccgcgtaa

SEQ ID NO: 119757 - DNA, 80 bp, synthetic construct
  source 1..80: mol_type = other DNA
cttgcagatatggccctcacctgccgcctccgtttcccggtgccgggattccgaggaagaatgcaccgtaggagtggcat

SEQ ID NO: 119758 - DNA, 80 bp, synthetic construct
  source 1..80: mol_type = other DNA
cggagttgacgcgcatacccataccacaggtggggcggcaggtaaaacggttaactcgttcaccagcttattcaccttcg

SEQ ID NO: 119759 - DNA, 80 bp, synthetic construct
  source 1..80: mol_type = other DNA
cagcatgtcccgtgcccgaccccgctgcatactcctgtgcctactcctacttaccgtgggggtaggcatctttttactcc

SEQ ID NO: 119760 - DNA, 80 bp, synthetic construct
  source 1..80: mol_type = other DNA
caccagaaggcgcatgccatcagcaggtcgtgcatatggcgatgtgtttggacgcagggcgcagccgcggcgataaaatt

SEQ ID NO: 119761 - DNA, 80 bp, synthetic construct
  source 1..80: mol_type = other DNA
acctggctgcactagagggtggtggattctatgcggatgacacagctggatgggacacacgcataacagaggcggatctg

SEQ ID NO: 119762 - DNA, 80 bp, synthetic construct
  source 1..80: mol_type = other DNA
acgtatcccaggggcccgggggggaccttgatggtggttgccgtcttgggctttgtctccatgtccttttgtcaatcggt

SEQ ID NO: 119763 - DNA, 80 bp, synthetic construct
  source 1..80: mol_type = other DNA
gggcaacatccccgctctgctggatgtggaagcatacctcaacagcaagaatgatatggaggaggctaccaagaatgcaa

SEQ ID NO: 119764 - DNA, 80 bp, synthetic construct
  source 1..80: mol_type = other DNA
aaacttaaaatattcagtgatagtcactgtccacactggggaccagcaccaggtgggaaacgagaccacagaacatggaa

SEQ ID NO: 119765 - DNA, 80 bp, synthetic construct
  source 1..80: mol_type = other DNA
gcctggtcatgaagagccccaattggtccagagttatgggtggaacatcgtcaccatgaagagtaaggtagatgtgttct

SEQ ID NO: 119766 - DNA, 80 bp, synthetic construct
  source 1..80: mol_type = other DNA
ttggtagcgttgggttgggaagggtcctagtcgatatcctcgccggctacggtgccggtgtggcgggcgctgtcgtcacc

SEQ ID NO: 119767 - DNA, 80 bp, synthetic construct
  source 1..80: mol_type = other DNA
gcctcgcggtcgtaactggggtatcggcgctgatatttgaccaccaacgtgtacatgacgttccacaggtccacggcaat

SEQ ID NO: 119768 - DNA, 80 bp, synthetic construct
  source 1..80: mol_type = other DNA
ggcggaagaggctagtgcacttggatgagtccacggtctcgcacgccttggcgcagctcgccgacaaggtatttgtggag

SEQ ID NO: 119769 - DNA, 80 bp, synthetic construct
  source 1..80: mol_type = other DNA
gcggagacgacttggttgtcgttgctgagagcggtggagtctctgaggacgccggggctctgcgagtcttcacggaggct

SEQ ID NO: 119770 - DNA, 80 bp, synthetic construct
  source 1..80: mol_type = other DNA
cggtcatcggttggatgctcggaagcaacacaactcagagggttgtgttcatggtcttactcctgcttgtagctccagcc

SEQ ID NO: 119771 - DNA, 80 bp, synthetic construct
  source 1..80: mol_type = other DNA
atgtgacgggagttactactgacaacatcaagtgcccatgccaggtcccggcgccggaattctttactgagctagacggg

SEQ ID NO: 119772 - DNA, 80 bp, synthetic construct
  source 1..80: mol_type = other DNA
cagcctctttatgggaggggacgtgacccgcatagaatctgggtctaaagtagtcgttctggactccctcgaccctttgg

SEQ ID NO: 119773 - DNA, 80 bp, synthetic construct
  source 1..80: mol_type = other DNA
tcgcagaccctgcgtggggctgtggaggggacggcctccatgaagcgacatttactctgctcgcgtttactgacgtcacc

SEQ ID NO: 119774 - DNA, 80 bp, synthetic construct
  source 1..80: mol_type = other DNA
gatctcttccctcccatttttgacaaagacgtcatctaagtcgggagtccaagtataactcaccacatacagaggttctg

SEQ ID NO: 119775 - DNA, 80 bp, synthetic construct
  source 1..80: mol_type = other DNA
tggtgtattggtggctttcggggagccccaaacgacggacctcgtcgcttttctatcggttttgctaactccggaaaata

SEQ ID NO: 119776 - DNA, 80 bp, synthetic construct
  source 1..80: mol_type = other DNA
ggctacaaggtgctggtgcttaatccatcagtggctgccacattaggttttggggcctatatgagcaaagcctacggcat

SEQ ID NO: 119777 - DNA, 80 bp, synthetic construct
  source 1..80: mol_type = other DNA
cacccaagtacgctacttgggtgaggaagggtccacacctggagtgctgtaagcatcaatttcaatgttgtcaggcctgc

SEQ ID NO: 119778 - DNA, 80 bp, synthetic construct
  source 1..80: mol_type = other DNA
gtcggtgaccgtcccgcatcccaacattacagagacagccttaccccttacaggggaggtacccttctatggcaagggca

SEQ ID NO: 119779 - DNA, 80 bp, synthetic construct
  source 1..80: mol_type = other DNA
ttttttttattccaaaagattatccaaaacctcaaaatgaagatctattaagtgaacgcgctcccctccggtggcgtggt

SEQ ID NO: 119780 - DNA, 80 bp, synthetic construct
  source 1..80: mol_type = other DNA
catagcgtatttctccatggtggggaactgggcgaaggtcgtggtggtgctgttgctgtttgccggcgtcgatgcagaca

SEQ ID NO: 119781 - DNA, 80 bp, synthetic construct
  source 1..80: mol_type = other DNA
taagaaaattaataaaatagcaaagacttgtagtcaggccggcaaacgccgccaccggaagttgggtatacggtgctgcc

SEQ ID NO: 119782 - DNA, 80 bp, synthetic construct
  source 1..80: mol_type = other DNA
gatccagggtagcgggacacaggcacactgacatacatctttttaaaatttttatttcctttcgggtcaggatcatatcc

SEQ ID NO: 119783 - DNA, 80 bp, synthetic construct
  source 1..80: mol_type = other DNA
ctgaccgtgactgtcacggcagcagccctgctattctgtcactatgcttacatggttccaggctggcaggctgaagcgat

SEQ ID NO: 119784 - DNA, 80 bp, synthetic construct
  source 1..80: mol_type = other DNA
gaggcaagagatgggcagcaacatcacgcgggtcgagtctgagacgaaagttgtcattcttgactctttcgaccctctag

SEQ ID NO: 119785 - DNA, 80 bp, synthetic construct
  source 1..80: mol_type = other DNA
ttgaccagccaaggcttgaacgccgtggcgtattatagaggcctagacgtcgccgtcataccctcggcaggagacgtagt

SEQ ID NO: 119786 - DNA, 80 bp, synthetic construct
  source 1..80: mol_type = other DNA
atactacaaactttggcttgccaagattatctggtggctgcagtatttcatcacccggtccgaggcacatctacaggtgt

SEQ ID NO: 119787 - DNA, 80 bp, synthetic construct
  source 1..80: mol_type = other DNA
tttccaaattaccaatcacggcttccactaaggctggcacacgcacttcaagaaacacaaacatagcaaaagcattttcc

SEQ ID NO: 119788 - DNA, 80 bp, synthetic construct
  source 1..80: mol_type = other DNA
ggtttaaagtgcacggcccagcctgactgaagctgtaggtcaggggaaggactagaggttagtggagaccccgtgccaca

SEQ ID NO: 119789 - DNA, 80 bp, synthetic construct
  source 1..80: mol_type = other DNA
atcgttggcggagtttacttgttgccgcgcaggggccccaggttgggtgtgcgcgcgacgagaaagacttccgagcgatc

SEQ ID NO: 119790 - DNA, 80 bp, synthetic construct
  source 1..80: mol_type = other DNA
tttaagatcatgtccggcgagaagccctccatagaagaccttgtcaacttgttgcctggcatcctatcccccggcgcgct

SEQ ID NO: 119791 - DNA, 80 bp, synthetic construct
  source 1..80: mol_type = other DNA
ttacgcctcgcagggttacaaggtgctcgtccttaacccgtcggtggctgccactttgtcctttggtacctacctgagca

SEQ ID NO: 119792 - DNA, 80 bp, synthetic construct
  source 1..80: mol_type = other DNA
tgctcctgcttgtggatgatgttactcatttcccaagcggaggcagctttggagaacctcgtgttactcaatgcggcgtc

SEQ ID NO: 119793 - DNA, 80 bp, synthetic construct
  source 1..80: mol_type = other DNA
acgtctggatccctattggtggagcgtgaaagaagaccggctctgctatggggggccatggaaactccaacataaatgga

SEQ ID NO: 119794 - DNA, 80 bp, synthetic construct
  source 1..80: mol_type = other DNA
gaaagcatttccaccagatccgtcgagatccgaagactccggcgtggggacttccactactcccactgacgtatcaccag

SEQ ID NO: 119795 - DNA, 80 bp, synthetic construct
  source 1..80: mol_type = other DNA
caccatctgggtgcgcatggtgttgatgacccactttttctccatactgcaatcccaggagcagcttgaaaaggccctcg

SEQ ID NO: 119796 - DNA, 80 bp, synthetic construct
  source 1..80: mol_type = other DNA
ggagctcattcaagaagaatggagcgatcaaagtgttacggggtttcaaaaaagagatctcaagcatgctgaacataatg

SEQ ID NO: 119797 - DNA, 80 bp, synthetic construct
  source 1..80: mol_type = other DNA
gcaatcaagcggttgtccaaaccatcgacttcagccttgaccccacctttacagtggaaacccagacaatacctcaggat

SEQ ID NO: 119798 - DNA, 80 bp, synthetic construct
  source 1..80: mol_type = other DNA
gcaggtggctcgtcctcaggagtcagcacacaatccaccggcggatccactgacctaccaaaagcaaacgaggggtctga

SEQ ID NO: 119799 - DNA, 80 bp, synthetic construct
  source 1..80: mol_type = other DNA
ctggaaactaccatgaggtcaccagtctacaccgacaactccacaccacctgccgtgccccaaacattccaagtggctca

SEQ ID NO: 119800 - DNA, 80 bp, synthetic construct
  source 1..80: mol_type = other DNA
tgtcagggtgctggaggacggaataaactacgcaacagggaacattcctggttgctctttctctatcttcctcctcgcca

SEQ ID NO: 119801 - DNA, 80 bp, synthetic construct
  source 1..80: mol_type = other DNA
catcctccgggacgccctggccgaccggagcgaaacccccctcagcgtcgaggagctgtgtcgggcctacgagctcaacc

SEQ ID NO: 119802 - DNA, 80 bp, synthetic construct
  source 1..80: mol_type = other DNA
ggacgttactgacaacgattgtgatgagcaggctgtaagtgcattttttcctgagtcgctacttttagccaccagtgagg

SEQ ID NO: 119803 - DNA, 80 bp, synthetic construct
  source 1..80: mol_type = other DNA
tttctagtcacacgccccccccccccaataaaaaccaaggcaaaacaataccagaagtcatgtgtatttttgaacatcgg

SEQ ID NO: 119804 - DNA, 80 bp, synthetic construct
  source 1..80: mol_type = other DNA
ggccaggtacgtcatgcggccggcatagcgggcggccacgcgacagtcgcggtccagcagcgcgcgcaccccgggccagt

SEQ ID NO: 119805 - DNA, 80 bp, synthetic construct
  source 1..80: mol_type = other DNA
cacgacccccgtccccagtctgtgcgtcaccgccaccggtcccaacgcggtatcggcggtatttctcctgaaaccccaga

SEQ ID NO: 119806 - DNA, 80 bp, synthetic construct
  source 1..80: mol_type = other DNA
cagcgggaagtggaaaggtagacaacttcacaatgggtgtcttgtgtttggcaatcctctttgaagaggtgatgagagga

SEQ ID NO: 119807 - DNA, 80 bp, synthetic construct
  source 1..80: mol_type = other DNA
ctgtattcttggcgggccagttggtcagctggcaaccgcgccgccattggaccacccaggactgcaactgctccatctat

SEQ ID NO: 119808 - DNA, 80 bp, synthetic construct
  source 1..80: mol_type = other DNA
tcgcacccacagctttttttgcgaaccgtcccgttccgggatgccgtgccgcccgttgcagggcctggtgctcgtgggcc

SEQ ID NO: 119809 - DNA, 80 bp, synthetic construct
  source 1..80: mol_type = other DNA
gagacggtcgcgcggctggccgccctccgcgagctagacgccgccgccccaggggacgagcccgccccccccgcggccct

SEQ ID NO: 119810 - DNA, 80 bp, synthetic construct
  source 1..80: mol_type = other DNA
gaacgacacatttccaaagggccctgattttcatcttactgacagccgtcgctccttcaatgacaatgcgttgcatagga

SEQ ID NO: 119811 - DNA, 80 bp, synthetic construct
  source 1..80: mol_type = other DNA
gcagggccggcttcgagggcgcggcggacggcagcgcggctccggacccggccgtcccccgggtccccgaggccagagag

SEQ ID NO: 119812 - DNA, 80 bp, synthetic construct
  source 1..80: mol_type = other DNA
atgtagtacatcgccagctcgctcacgttgttgggggccaggttaataaagttgatcgcgccgtagtccagggaaaactt

SEQ ID NO: 119813 - DNA, 80 bp, synthetic construct
  source 1..80: mol_type = other DNA
cagtctacttgctggttggcagcctcgcctaccttggctgttccgaacgcgacgacgcctctcacggggttccgcaagca

SEQ ID NO: 119814 - DNA, 80 bp, synthetic construct
  source 1..80: mol_type = other DNA
agaagaaggtcatcacatggagggcagacacggctgcttgcggggatatactggcaggactccccgtctctgcacgacgc

SEQ ID NO: 119815 - DNA, 80 bp, synthetic construct
  source 1..80: mol_type = other DNA
tggtaagtttctggccgacggtggctgctcgggcggggcatatgacatcatcatttgtgacgagtgccattccatggatc

SEQ ID NO: 119816 - DNA, 80 bp, synthetic construct
  source 1..80: mol_type = other DNA
ccctgtgaacacagaaaccccaacccaaatcccataaacatacgacacacaggcatattttggaatttattgggttttta

SEQ ID NO: 119817 - DNA, 80 bp, synthetic construct
  source 1..80: mol_type = other DNA
cttactaccaaaggaagcatgatcattactactgaaaatcaaaactttgaattacaaaaaggtgacaatcaagatgatga

SEQ ID NO: 119818 - DNA, 80 bp, synthetic construct
  source 1..80: mol_type = other DNA
cgcgccgccatgacgggccgcagcaggttgcagctggcgaacatggacgtccacgcgcccggatgcgcgtccacggcgtc

SEQ ID NO: 119819 - DNA, 80 bp, synthetic construct
  source 1..80: mol_type = other DNA
aacgtgggcttaccatggcagctatgaaacaaaacaaactggatcagcatcatctatggtgaacggagttgtcaaactgc

SEQ ID NO: 119820 - DNA, 80 bp, synthetic construct
  source 1..80: mol_type = other DNA
tccaacacagatccgatcaataacggttcctttgatggcgtccttgagccgcctggacaagggcgatttacgggaaagaa

SEQ ID NO: 119821 - DNA, 80 bp, synthetic construct
  source 1..80: mol_type = other DNA
tgttattctttattttatattctgccgtcaaatacccaatgttcatagaaattctaaaagacgtcccatctattctccta

SEQ ID NO: 119822 - DNA, 80 bp, synthetic construct
  source 1..80: mol_type = other DNA
agagaagggaggccgcaagccagctcgccttatcgtattcccagacttgggggttcgtgtatgcgagaagatggcccttt

SEQ ID NO: 119823 - DNA, 80 bp, synthetic construct
  source 1..80: mol_type = other DNA
ttggcgttgccccagagggcgtacgctatggaccgggagatggccgcgtcgtgtggcggcgtcgtcctcgtcgggttaat

SEQ ID NO: 119824 - DNA, 80 bp, synthetic construct
  source 1..80: mol_type = other DNA
gacacctgggaattagactaggagatcttctgctctattccaacatcaaccacaaggcacagagcgccgaaaattgtggc

SEQ ID NO: 119825 - DNA, 80 bp, synthetic construct
  source 1..80: mol_type = other DNA
aatggcaccatgaaaatcacagggcccaagacatgcagtaacacttggcacgggacttttccaatcaacgccaccactac

SEQ ID NO: 119826 - DNA, 80 bp, synthetic construct
  source 1..80: mol_type = other DNA
gcacatcaacaggactgccctaaattgcaatgactccctccaaactgggttctttgccgcgctgttttacgcacacaagt

SEQ ID NO: 119827 - DNA, 80 bp, synthetic construct
  source 1..80: mol_type = other DNA
tgctagtttgccctttgtacctggttaggcacagtctccttacagtcccttactttgtgagggctcaagctctcctcaga

SEQ ID NO: 119828 - DNA, 80 bp, synthetic construct
  source 1..80: mol_type = other DNA
tcactgtccatggtagcaatggaaatcacactttcggtttcaaattcatttttgaagtcatgtgtgatattacactgcac

SEQ ID NO: 119829 - DNA, 80 bp, synthetic construct
  source 1..80: mol_type = other DNA
aatgtctaatggagcggctgacagagcgcggctgcgacatttagaccactgtcgccaacctcactgctttgctcgagaca

SEQ ID NO: 119830 - DNA, 80 bp, synthetic construct
  source 1..80: mol_type = other DNA
ggggtgggggggcgggacggggcgcccaaaagggagtcggccacaccaaagacgtgtgtgttggggggtgggtcggaggg

SEQ ID NO: 119831 - DNA, 80 bp, synthetic construct
  source 1..80: mol_type = other DNA
gcggccagagggtacatctcaacccgagtgggtatgggtgaagcagctgcgatctttatgacagccactcccccaggatc

SEQ ID NO: 119832 - DNA, 80 bp, synthetic construct
  source 1..80: mol_type = other DNA
cacagcgggagcctcggggctgaccggcgctgggacgggttgtcgtcgacgacggcgccggacgggcagccggtcaatga

SEQ ID NO: 119833 - DNA, 80 bp, synthetic construct
  source 1..80: mol_type = other DNA
cggacacttgcaaagtgaggttatttttccagatagcgtttcaaaaatacttcctgtgtcgtggggtccaagtccagccg

SEQ ID NO: 119834 - DNA, 80 bp, synthetic construct
  source 1..80: mol_type = other DNA
tacctagaaataaaactgttaaaattaaaccatatactactaagggaactacaaaaacaaccttaggcaatcacagcttt

SEQ ID NO: 119835 - DNA, 80 bp, synthetic construct
  source 1..80: mol_type = other DNA
gtagcaagactctgtccggtccgaaagggccggtgtgccagatgtacaccaatgttgaccaggacttagtggggtggccc

SEQ ID NO: 119836 - DNA, 80 bp, synthetic construct
  source 1..80: mol_type = other DNA
ttattcttatactagcacttctgtgccttagggttgccgcctgctgcacgcacatttgtacctattgtcagctttttaaa

SEQ ID NO: 119837 - DNA, 80 bp, synthetic construct
  source 1..80: mol_type = other DNA
ctgttcgcttcccgaggaggctcgagttgccatacactcactgactgagaggctgtacgtaggaggtcccatgcagaaca

SEQ ID NO: 119838 - DNA, 80 bp, synthetic construct
  source 1..80: mol_type = other DNA
gaaacagcatccgttactctgagttggcacccctattcgacaccacccgtgtgtacctggtggacaacaagtcaacggat

SEQ ID NO: 119839 - DNA, 80 bp, synthetic construct
  source 1..80: mol_type = other DNA
gccatgggggcgctgatattcagggcttgcacggcagagggaaagactggagctgggctcttgctcatggctctcatgac

SEQ ID NO: 119840 - DNA, 80 bp, synthetic construct
  source 1..80: mol_type = other DNA
atgtggaggtggatggttttgaagaggacgccaaccaggaagcggttgatggtatgtttcccgagaggttgctgtccgag

SEQ ID NO: 119841 - DNA, 80 bp, synthetic construct
  source 1..80: mol_type = other DNA
ggctgtggtagaggtggatggtgttactacatggctacccagaagagagtccaagaggtccgagggtacacaaaaagagg

SEQ ID NO: 119842 - DNA, 80 bp, synthetic construct
  source 1..80: mol_type = other DNA
tgttgtaccaacaatttgatgagatggaggagtgttcggcctcgttgccctacatggacgaggcacgtgctattgccgag

SEQ ID NO: 119843 - DNA, 80 bp, synthetic construct
  source 1..80: mol_type = other DNA
agaccaatccgctacccgcaaccccttccgtgtggggcgggagtaccgtggaactcccccccacaacacgcgataccgcg

SEQ ID NO: 119844 - DNA, 80 bp, synthetic construct
  source 1..80: mol_type = other DNA
acaagggtcgagactcttgactcattcaaacctctgaaagccgaaattgatgaggccgagttctcggcggccggagagtg

SEQ ID NO: 119845 - DNA, 80 bp, synthetic construct
  source 1..80: mol_type = other DNA
ctatgtgtcatgccaccctgacatatagaatgttggaaccaaccagagtggtcaattgggaagtgatcatcatggacgaa

SEQ ID NO: 119846 - DNA, 80 bp, synthetic construct
  source 1..80: mol_type = other DNA
cttaacccatgggcatcacaaaaacattcatacggtgacaggctatacaacggaacatacaaccttacaggcgcttctcc

SEQ ID NO: 119847 - DNA, 80 bp, synthetic construct
  source 1..80: mol_type = other DNA
tgcttccggtcttttgagtctgttcaatccgggcccgacccaacacctgaacttagtgaactccaacgggtcatggcata

SEQ ID NO: 119848 - DNA, 80 bp, synthetic construct
  source 1..80: mol_type = other DNA
cgaggacggggtaaactacgcaacagggaatatgcccggttgctccttttctatctttcttttagcacttctctcgtgct

SEQ ID NO: 119849 - DNA, 80 bp, synthetic construct
  source 1..80: mol_type = other DNA
aagctgtacgcatggcgtagtggactagcggttagaggagacccctcccttacaaatcgcagcaacaacgggggcccaag

SEQ ID NO: 119850 - DNA, 80 bp, synthetic construct
  source 1..80: mol_type = other DNA
ggcaatcttggctccctggttgcgctaaatgcctttttaagctctcagccggctaatgttccgcgcggtcaagaagatta

SEQ ID NO: 119851 - DNA, 80 bp, synthetic construct
  source 1..80: mol_type = other DNA
gagtgctctaggcacatcccctacctcgccgagggccagcagatcgccgagcagttcagacaaaaggtgttgggactcct

SEQ ID NO: 119852 - DNA, 80 bp, synthetic construct
  source 1..80: mol_type = other DNA
atggtcctgtgccttatgtctgtggttttgaaccgcacggtgcccgcagttacggaggcatcggctgtaggactggcagc

SEQ ID NO: 119853 - DNA, 80 bp, synthetic construct
  source 1..80: mol_type = other DNA
tcgaagccctaggatttctaaatgaagaccactggctgagccgagagaattcaggaggtggggtggaaggttcaggcgtc

SEQ ID NO: 119854 - DNA, 80 bp, synthetic construct
  source 1..80: mol_type = other DNA
caataccctatgatccaaaatttgaaaagcagttaggacaagtaatgctcctaatcctatgcgtgactcaagtattaatg

SEQ ID NO: 119855 - DNA, 80 bp, synthetic construct
  source 1..80: mol_type = other DNA
gagaccccgctgcaacttggcaaggcccaaacccgctcaaagctgtagagacgggggaaggactagaggttagaggagac

SEQ ID NO: 119856 - DNA, 80 bp, synthetic construct
  source 1..80: mol_type = other DNA
gcctaccaccaaccaacacgtggcttgattggcaccatagtcaccagtctcacaggtcgtgacaagaacgaagttgaggg

SEQ ID NO: 119857 - DNA, 80 bp, synthetic construct
  source 1..80: mol_type = other DNA
ctgctctcgtgcctgactgttcccgcctcggcctacaactatcgcaacagctcgggtgtctaccatgtcaccaacgactg

SEQ ID NO: 119858 - DNA, 80 bp, synthetic construct
  source 1..80: mol_type = other DNA
gatcgttgcggcccgtagccagtggcaactggcaaagcacactgaacagcatcgtgggtctgggggtgcaatccctaaag

SEQ ID NO: 119859 - DNA, 80 bp, synthetic construct
  source 1..80: mol_type = other DNA
tcgcgtgtgcgagaaaatggctttgttcgatgtcatctcgaagctcccctatgccgcaatgggagactcctacggatttc

SEQ ID NO: 119860 - DNA, 80 bp, synthetic construct
  source 1..80: mol_type = other DNA
aggaggttttatgccggaagttgggtaatttgggcgtatacttgtaagttttgtgtaaattggcgcgaaaactgggtaat

SEQ ID NO: 119861 - DNA, 80 bp, synthetic construct
  source 1..80: mol_type = other DNA
ggcatgtggacgtgatggtaggtgctgctactatgtgttccgccctttacatcggcgacttgtgtgggggcttgtttctg

SEQ ID NO: 119862 - DNA, 80 bp, synthetic construct
  source 1..80: mol_type = other DNA
acattgaaagagcaggtgacatcacatgggaaaaagatgcggaagtcactggaaacagtccccggctcgatgtggcacta

SEQ ID NO: 119863 - DNA, 80 bp, synthetic construct
  source 1..80: mol_type = other DNA
acttggatgaactcgacagggtttgtcaagacatgtggcgcaccaccatgcaacatcgtgcctcagcctaatgagtctga

SEQ ID NO: 119864 - DNA, 80 bp, synthetic construct
  source 1..80: mol_type = other DNA
taatttataatcagtctacaaattggaacttaacaactgatattaacactcaaaagggtttaatgttcattggaaatcag

SEQ ID NO: 119865 - DNA, 80 bp, synthetic construct
  source 1..80: mol_type = other DNA
aacaaagtaggaaagagcaagggtgaatgttgctatgagacttcgttttcaaacagacgggtgtcaaccgagagagtccc

SEQ ID NO: 119866 - DNA, 80 bp, synthetic construct
  source 1..80: mol_type = other DNA
aagacacactccagtcaattcctggctaggcaacataatcatgtttgcccccacactgtgggcgaggatgatactgatga

SEQ ID NO: 119867 - DNA, 80 bp, synthetic construct
  source 1..80: mol_type = other DNA
gtcgttagcggcttagtaggggctgccgtgggcagtataggtctgggtaaaatattggtggacgtcttggcaggctatgg

SEQ ID NO: 119868 - DNA, 80 bp, synthetic construct
  source 1..80: mol_type = other DNA
tgtgttcacgcccatggagaagaaagtcatcgtctggggcgctgacaccgctgcgtgcggagacatcataaggggattac

SEQ ID NO: 119869 - DNA, 80 bp, synthetic construct
  source 1..80: mol_type = other DNA
gcgaagtctattgacttcatacccatcgagtcgctcgatgttatcatcagatcccccaacttcactgataacagttcacc

SEQ ID NO: 119870 - DNA, 80 bp, synthetic construct
  source 1..80: mol_type = other DNA
caaggaggcggcggacagtggtcctagaccagagcactgtggtggacgtgctcaaggacctggccgctaaaacctttggc

SEQ ID NO: 119871 - DNA, 80 bp, synthetic construct
  source 1..80: mol_type = other DNA
gtacggcaaggattacaagcccgtcacgctagagctgcccccaccgcccccttcgcgtccgacagtgcctccactgcctg

SEQ ID NO: 119872 - DNA, 80 bp, synthetic construct
  source 1..80: mol_type = other DNA
ctggctaagcaattgtcatcgcttggcctcaatgcagtggcctactacaggggtttagacgtctcggtgattccaacgtc

SEQ ID NO: 119873 - DNA, 80 bp, synthetic construct
  source 1..80: mol_type = other DNA
gccagtcaccgcagcaagcgctgcgcaaaggagagggagagttggcaggaacccacaaaaagaaaatgaccagtacatat

SEQ ID NO: 119874 - DNA, 80 bp, synthetic construct
  source 1..80: mol_type = other DNA
ccgggggcttgccgttggggaagatggccgcgtggaactgcttcagcagaaagcccagcggtccgaggaggatgtccacg

SEQ ID NO: 119875 - DNA, 80 bp, synthetic construct
  source 1..80: mol_type = other DNA
ttgaaccaaatccacgcgttccccgttcgctgggtgtggctattagatctaacgttttagtaaaataccattgtacaccc

SEQ ID NO: 119876 - DNA, 80 bp, synthetic construct
  source 1..80: mol_type = other DNA
gggctcaaccaatacctggttgggtcacagctcccatgtgagcccgaaccagatgtagcagtgctcacttccatgctcac

SEQ ID NO: 119877 - DNA, 80 bp, synthetic construct
  source 1..80: mol_type = other DNA
tctgtgatggggggaaaatactttcagatggtcatactgagcattggcagatggtttaacacctatctatatgaccacct

SEQ ID NO: 119878 - DNA, 80 bp, synthetic construct
  source 1..80: mol_type = other DNA
tgggccaagcacatgtggaacttcatcagcgggatacagtacttggctggcttgtccacactacctggcaacccggccat

SEQ ID NO: 119879 - DNA, 80 bp, synthetic construct
  source 1..80: mol_type = other DNA
tgtcatggaatgggaaggaactaaaatgtggaagcggaatctttgtggttgacaacgtgcatacttggacagaacagtac

SEQ ID NO: 119880 - DNA, 80 bp, synthetic construct
  source 1..80: mol_type = other DNA
gtagaccaccgcgctcggtgcgaggtgggccgggtgctcgccgtggtcaacgaccctcggtggccgttttttgtggtgct

SEQ ID NO: 119881 - DNA, 80 bp, synthetic construct
  source 1..80: mol_type = other DNA
acctgctctctatgagagcaacactccaccatgaaccgctcccctgtgaggaactactgtcttcacgcagaaagcgtcta

SEQ ID NO: 119882 - DNA, 80 bp, synthetic construct
  source 1..80: mol_type = other DNA
tctcggccccgtcgttgaaagcaacgtgtactacacactgtgcacatcctgatgcggacctgattgaagctaacttgcta

SEQ ID NO: 119883 - DNA, 80 bp, synthetic construct
  source 1..80: mol_type = other DNA
acgtgccggtgggaagcgacgtgcaggccgacagcaccgctctgctgcgctttatagaatcgcaacgtctcgccgtcccc

SEQ ID NO: 119884 - DNA, 80 bp, synthetic construct
  source 1..80: mol_type = other DNA
cgcaggtgctcatcgaggtttttaccggtggtcactggggtgtcattggtgctgtggtgtatttctctatggtaggcagt

SEQ ID NO: 119885 - DNA, 80 bp, synthetic construct
  source 1..80: mol_type = other DNA
aggaaacttggactgacacagatggaacaactgagaagtatggtggtagagctctaaagccagaaactaaaatgaaaccc

SEQ ID NO: 119886 - DNA, 80 bp, synthetic construct
  source 1..80: mol_type = other DNA
gccagctctttacattcagaccccgacatcaccagacggttcaggactgtaattgctccatctatgcaggacacgtgtca

SEQ ID NO: 119887 - DNA, 80 bp, synthetic construct
  source 1..80: mol_type = other DNA
ggtagttgcggccgaactaatgccggttcacgccaaaagcttctacaacgaacaagccgtctactcacagcttatccgcc

SEQ ID NO: 119888 - DNA, 80 bp, synthetic construct
  source 1..80: mol_type = other DNA
atgagctaaactacgttctctgggaaggaggacatgatctcactgtagtggctggggatgtgaaaggggtgttgaccaag

SEQ ID NO: 119889 - DNA, 80 bp, synthetic construct
  source 1..80: mol_type = other DNA
gcagttcaaacaaaaggttctcggccttatccaaactactaccaagcaagccgaagagcttaagcctgctgtccattctg

SEQ ID NO: 119890 - DNA, 80 bp, synthetic construct
  source 1..80: mol_type = other DNA
cgtctggccccggcgagcgtataccaacccgcccctaaccaggcctccaccccctcgaccaccacctccaccccctcgac

SEQ ID NO: 119891 - DNA, 80 bp, synthetic construct
  source 1..80: mol_type = other DNA
cctctacctccggctttgtgaagctctttaccccagggccctcgcagaacctccagctcattaagaccaatggtagctgg

SEQ ID NO: 119892 - DNA, 80 bp, synthetic construct
  source 1..80: mol_type = other DNA
tgtggctggcactgcgagaaaccctgttttgaaagcattctggaattccgttccgttgaggcaggccactgcagcactcc

SEQ ID NO: 119893 - DNA, 80 bp, synthetic construct
  source 1..80: mol_type = other DNA
gccggcgacgtacccacctgggcgagggtgttttgccgccacgccctgctggaacccgaccctgccgcagaaccactcgt

SEQ ID NO: 119894 - DNA, 80 bp, synthetic construct
  source 1..80: mol_type = other DNA
gtccaatcctgtcaataacaatatcagaagatggtagcatgtcgataaaaaatgaagaggaagaacaaacactgaccata

SEQ ID NO: 119895 - DNA, 80 bp, synthetic construct
  source 1..80: mol_type = other DNA
tcccagtgcggcggcgaggcgacacccggggcgcccttctgagccccaggccactctccaccctcaaggtgtcctctgga

SEQ ID NO: 119896 - DNA, 80 bp, synthetic construct
  source 1..80: mol_type = other DNA
gaagagatctgcggttgatggccaacgccatctgctctgccgtacctgtaaactgggtccctactggaagaaccacatgg

SEQ ID NO: 119897 - DNA, 80 bp, synthetic construct
  source 1..80: mol_type = other DNA
ttgctgctggcggccggatgttggggccaggtgactctcacggtgacggtgacggcgactgccctcctcttctgccacta

SEQ ID NO: 119898 - DNA, 80 bp, synthetic construct
  source 1..80: mol_type = other DNA
gacgccaggaagtccccgacggccgttttgcggggcagcatgcgcagggtgaagtccagcagggccgcggccggtccggc

SEQ ID NO: 119899 - DNA, 80 bp, synthetic construct
  source 1..80: mol_type = other DNA
ctccggtggcccctttcgcgcctttcgcgaacgcgcggcgccggagggtgcggccgccgaggtgcggaggcccctccggc

SEQ ID NO: 119900 - DNA, 80 bp, synthetic construct
  source 1..80: mol_type = other DNA
tatttttgctttcaacattagttcaggtaaatataaagttcaaagttacactaacagttataatggattagatggttatg

SEQ ID NO: 119901 - DNA, 80 bp, synthetic construct
  source 1..80: mol_type = other DNA
tatctactctaccaggcaatccggccgtagctgccatgatgtccttctcagcgtcccttaccagcccgctcacgacagcg

SEQ ID NO: 119902 - DNA, 80 bp, synthetic construct
  source 1..80: mol_type = other DNA
ttttcgcgggtgtggtggagcggggtgtttgatttgaccatagagctgtataaagtggtgagatatgatgagttaaaggc

SEQ ID NO: 119903 - DNA, 80 bp, synthetic construct
  source 1..80: mol_type = other DNA
gcaagtactgaagcaactgtgcgggaatatgcacagcaaaaaaaatagggcggctcagatacatgttgacctaaaataaa

SEQ ID NO: 119904 - DNA, 80 bp, synthetic construct
  source 1..80: mol_type = other DNA
gcagctccttctggaggttttcctggagggccattggggcgttttgggcgctatcctttatttttccatggtggcaaatt

SEQ ID NO: 119905 - DNA, 80 bp, synthetic construct
  source 1..80: mol_type = other DNA
tcacttgaacgcatggcaatttatttgcacatggaatgtgacagcatatgtatgtcacaaaaatggaagcattaccatca

SEQ ID NO: 119906 - DNA, 80 bp, synthetic construct
  source 1..80: mol_type = other DNA
cggtgcacgagtcacgaatttcctcagctctggcttatcgagacccttatgtttttgagacatccccgggaatgcttgct

SEQ ID NO: 119907 - DNA, 80 bp, synthetic construct
  source 1..80: mol_type = other DNA
caaactcactccattgcctgccgccgccaaactcgatttatcgagttggttcacggtgggctccggcgggggagacatct

SEQ ID NO: 119908 - DNA, 80 bp, synthetic construct
  source 1..80: mol_type = other DNA
agccatgacagcaggcatcttcctattcttcatgcaaggaaaaggaataggaaaattgtcaatgggtttgatagccattg

SEQ ID NO: 119909 - DNA, 80 bp, synthetic construct
  source 1..80: mol_type = other DNA
attctcacagactttaagaactggctgtcttcaaaattgttccccaagatgcccggccttcccttcatctcttgccagaa

SEQ ID NO: 119910 - DNA, 80 bp, synthetic construct
  source 1..80: mol_type = other DNA
gggtggtgggattcctgccgaggattctgttgggaatatcccttgcgtggctgggtttaaacatgagaaaccccaccatg

SEQ ID NO: 119911 - DNA, 80 bp, synthetic construct
  source 1..80: mol_type = other DNA
aggggagttggggttggtcatattagtaatcatgtccatcttcactctcaccccggcgtacaagactctcctgagccgtt

SEQ ID NO: 119912 - DNA, 80 bp, synthetic construct
  source 1..80: mol_type = other DNA
cacaggtgacggcaaagctcctctcgattgaggatgcctgcgacctcacccccccacactcagctcgttcaaagttcggg

SEQ ID NO: 119913 - DNA, 80 bp, synthetic construct
  source 1..80: mol_type = other DNA
caattcaagcaaaaggtcctaggcctcctgcagagtacagccaagcaggcagaggagctgaaaccagcagttcattctgc

SEQ ID NO: 119914 - DNA, 80 bp, synthetic construct
  source 1..80: mol_type = other DNA
tgcgtgagccgtcgatactcgtcaaactctttgaccgacacaaacgtaagcacggggagggtaaacacaacaaactcccc

SEQ ID NO: 119915 - DNA, 80 bp, synthetic construct
  source 1..80: mol_type = other DNA
aaatcctcactagcctcactgttactcagcttctgaaaaggctccacgtgtggataagctcagattccaccaccccgtgt

SEQ ID NO: 119916 - DNA, 80 bp, synthetic construct
  source 1..80: mol_type = other DNA
ccctccgcatgctccacgcggacgccgggcccgcggcctgctatgtgttggggcggtcgtcgctcaacgcccgcggcctc

SEQ ID NO: 119917 - DNA, 80 bp, synthetic construct
  source 1..80: mol_type = other DNA
gctaaaacacgcggcatgtgatcgtcgcatacatatgtaacaacgtttaacaactgatccgacgatccacgtaagttata

SEQ ID NO: 119918 - DNA, 80 bp, synthetic construct
  source 1..80: mol_type = other DNA
ctactctgagcccacaagtgaagacaatgcgcatcatgtctgctggcttgaggcctcaatgctcctagacaacatggagg

SEQ ID NO: 119919 - DNA, 80 bp, synthetic construct
  source 1..80: mol_type = other DNA
caccacggggtacagtcgccggtggcatgagcccgagtctggatttcgacctggaagtttgcggccgtcccgagtccggg

SEQ ID NO: 119920 - DNA, 80 bp, synthetic construct
  source 1..80: mol_type = other DNA
cggcctcggagtacgcggaggtgacgcagcatgggtcgtactcctatgtaacaggactgaccactgacaatctgaaaatt

SEQ ID NO: 119921 - DNA, 80 bp, synthetic construct
  source 1..80: mol_type = other DNA
agtaattgatgaggtagtggcaaacgcccgggcttatgcaaggcgccgcagacggctgcgtcgccggcgtagaccaacta

SEQ ID NO: 119922 - DNA, 80 bp, synthetic construct
  source 1..80: mol_type = other DNA
cggcacaagaactaaaaactctgctaccccagatgaccccggcaaacatgtcctccggtgcatggaatatattgaaagag

SEQ ID NO: 119923 - DNA, 80 bp, synthetic construct
  source 1..80: mol_type = other DNA
aggcctatggtatcgatcctaacattagaactggggttaggaccatcacaacaggaggccctattacctactccacctac

SEQ ID NO: 119924 - DNA, 80 bp, synthetic construct
  source 1..80: mol_type = other DNA
cgccttgacgtatcccgcggcgctgtcggccatggccgctaggaaggccaggggagaggccgggtcgctggcggccgcgc

SEQ ID NO: 119925 - DNA, 80 bp, synthetic construct
  source 1..80: mol_type = other DNA
agcagacccgaggggtgctgggtgctatcgttgtgagcctgacgggacgcgacaagaccgaccatgcaggtgaagtccag

SEQ ID NO: 119926 - DNA, 80 bp, synthetic construct
  source 1..80: mol_type = other DNA
ctttgctgagggttggagcatggacggggacttacatttatgaccaccttgcgcccctccaaacttgggctagtgaaggg

SEQ ID NO: 119927 - DNA, 80 bp, synthetic construct
  source 1..80: mol_type = other DNA
gcgtgctggcggcgtaccgccgggcgtattatgggagcgcccaaagccccttttggtttctgagcaaattcggcccggac

SEQ ID NO: 119928 - DNA, 80 bp, synthetic construct
  source 1..80: mol_type = other DNA
cttaccggcttgggcacggcctgactacaacccgccgctcgtggaatcgtggaggaggccagattaccaaccgcccaccg

SEQ ID NO: 119929 - DNA, 80 bp, synthetic construct
  source 1..80: mol_type = other DNA
cacgtggcggaacacgcttaggacgacgctgctggactttgcccacgggttggtcgcctgctttgcgccgggcggcccga

SEQ ID NO: 119930 - DNA, 80 bp, synthetic construct
  source 1..80: mol_type = other DNA
tacggtcacagcgaagctcctcaccactgaggaagcatgcgacctcacgcccccgcactcggcccgttcgcgattcgggt

SEQ ID NO: 119931 - DNA, 80 bp, synthetic construct
  source 1..80: mol_type = other DNA
aaagctcaagaagagggaatttgtgggatccgctcggtaacaagattggaaaacctaatgtggaaacaaataacaccaga

SEQ ID NO: 119932 - DNA, 80 bp, synthetic construct
  source 1..80: mol_type = other DNA
tccaactttcaccattgagacgacaacactgccccaggacgctgtctcccgcacgcagcggaggggcagaactggtagag

SEQ ID NO: 119933 - DNA, 80 bp, synthetic construct
  source 1..80: mol_type = other DNA
gccaggggccgccggggtcccagctacgccatgccgggggcgggggagagcaaacaccagaggggggggccaacgacgcg

SEQ ID NO: 119934 - DNA, 80 bp, synthetic construct
  source 1..80: mol_type = other DNA
tgccgcgctagcagcatattgcttatctacagggtgtgtagtcatagtgggtcgtgtgactataaatggccgcaaggttc

SEQ ID NO: 119935 - DNA, 80 bp, synthetic construct
  source 1..80: mol_type = other DNA
tgtcacctggtgcacttgttgtaggcgttgtctgtgctgcagtactgcggcgccacattgggccctctgaggaggccaac

SEQ ID NO: 119936 - DNA, 80 bp, synthetic construct
  source 1..80: mol_type = other DNA
cacctgctgctataaaaaagacgaacataaaggtgatccattacttagatttgatatttaatttgttctttttttttttt

SEQ ID NO: 119937 - DNA, 80 bp, synthetic construct
  source 1..80: mol_type = other DNA
ccgggtcgtgcacggcggttctggccgcctcccggtcctcacgcccccttttattgatctcatcgcgtacgtcggcgtac

SEQ ID NO: 119938 - DNA, 80 bp, synthetic construct
  source 1..80: mol_type = other DNA
aggagcggttgtaccgtttcctggcgcaacgttctccctactttcggcgtcattgcgagcgtatcaaaaaagccaccgcg

SEQ ID NO: 119939 - DNA, 80 bp, synthetic construct
  source 1..80: mol_type = other DNA
ggcccttgctcctcctcctccttgcgatgcccgagagggcgttcgcctttgatggcgaggtggctgggtctctgggaggc

SEQ ID NO: 119940 - DNA, 80 bp, synthetic construct
  source 1..80: mol_type = other DNA
tgtgaatacagttctggaggacgaactgcatccagagccatttgagctgggacctacacttcaggacctctatgatttgg

SEQ ID NO: 119941 - DNA, 80 bp, synthetic construct
  source 1..80: mol_type = other DNA
gacgtctgtggcccggtgtactgtttcacccccagccctgtagtagttggtactactgatcgcaaaggccttcccacgta

SEQ ID NO: 119942 - DNA, 80 bp, synthetic construct
  source 1..80: mol_type = other DNA
cctgaacatgctttattggctacgtcaatttttaagctgacttatcaaaacaaggtggtgagggtgcaaagaccagcaaa

SEQ ID NO: 119943 - DNA, 80 bp, synthetic construct
  source 1..80: mol_type = other DNA
gcttgggaaacagctcgtcacactccagttaactcctggttgggcaacatcatcatgtacgcgcctaccatctgggtgcg

SEQ ID NO: 119944 - DNA, 80 bp, synthetic construct
  source 1..80: mol_type = other DNA
gcataaacgtatgccatcacaaaagtataagcccattattgtgcttaacccaaacaatgatggaatacatagattggacg

SEQ ID NO: 119945 - DNA, 80 bp, synthetic construct
  source 1..80: mol_type = other DNA
cttacatgattgggcaaacggggatccagcgaactgtcttctttgtcctaatgatgctggtcgccccatcctacggaatg

SEQ ID NO: 119946 - DNA, 80 bp, synthetic construct
  source 1..80: mol_type = other DNA
aagaagatgaccagtatgtcttctccggagacccactaaggaatgatgaagatcatgcccactggactgaagcaaagatg

SEQ ID NO: 119947 - DNA, 80 bp, synthetic construct
  source 1..80: mol_type = other DNA
ttcaaccaggggtggggtcccatcacttacgatgagtctcgcagctcggatcagaggccctactgctggcattacgcacc

SEQ ID NO: 119948 - DNA, 80 bp, synthetic construct
  source 1..80: mol_type = other DNA
ggtgcttggtagactacccttaccggctgtggcactatccttgcactgtgaatttcaccatacacaaggtcaggatgttc

SEQ ID NO: 119949 - DNA, 80 bp, synthetic construct
  source 1..80: mol_type = other DNA
cgtccatgctcactgatccctctcatataacagcagaagcggccgggagaaggttggcgaggggctcccccccttctgtg

SEQ ID NO: 119950 - DNA, 80 bp, synthetic construct
  source 1..80: mol_type = other DNA
cttggctctgatcgccgtttttaagattcagccggcattcctagtcatgagcatagcaagtaccaattggactaaccagg

SEQ ID NO: 119951 - DNA, 80 bp, synthetic construct
  source 1..80: mol_type = other DNA
gccaacgtagacatcgcgcataggaggagttaaataatgcattaccagcagccaaaactcaggtagcacgtctttaagaa

SEQ ID NO: 119952 - DNA, 80 bp, synthetic construct
  source 1..80: mol_type = other DNA
gttgaaaacctggaaaccacgatgcgctcgcccgtgttcactgacaacagcacaccccccgcggtccctcacgagttcca

SEQ ID NO: 119953 - DNA, 80 bp, synthetic construct
  source 1..80: mol_type = other DNA
agtcctatataagtgctaacacctgggcacttaggcacagaccttcaggagctcctgatggaggtgtggactatccttgc

SEQ ID NO: 119954 - DNA, 80 bp, synthetic construct
  source 1..80: mol_type = other DNA
acagccctgaatgacatggggaaagtaaggaaagacatacaacaatgggaagcatccaagggttggaatgactggacaca

SEQ ID NO: 119955 - DNA, 80 bp, synthetic construct
  source 1..80: mol_type = other DNA
gtcgtgagcggcttagctggcgctgcggtcgcgagcattggccttgggagagtgttggttgatatcattgctgggtacgg

SEQ ID NO: 119956 - DNA, 80 bp, synthetic construct
  source 1..80: mol_type = other DNA
tactctaccagcagtatgatgaaatggaggaatgctcccatcggatcccctatcttgctgaaggccaacagatagctgaa

SEQ ID NO: 119957 - DNA, 80 bp, synthetic construct
  source 1..80: mol_type = other DNA
acgccagagagccgagtgacacgtcaccgccaagagcgccgcttgcaagatggccaccccctcgatgatgccgcaatggt

SEQ ID NO: 119958 - DNA, 80 bp, synthetic construct
  source 1..80: mol_type = other DNA
gttaaaagtaccctattttgtgcgcgcgcatgcgcttttgcgtgtgtgcgcactcttccgcaacatcgttggagggaagt

SEQ ID NO: 119959 - DNA, 80 bp, synthetic construct
  source 1..80: mol_type = other DNA
cttgctgccctcgcggcctactgtttaaccgtgggctgcgtcgtcatctgtggcaggatcgtagtgtcaggaaagcctgc

SEQ ID NO: 119960 - DNA, 80 bp, synthetic construct
  source 1..80: mol_type = other DNA
acctcaaatcatccaaagactccatggtcttagcgcgttctcgctccacagttactctccaggtgaaatcaatagggtgg

SEQ ID NO: 119961 - DNA, 80 bp, synthetic construct
  source 1..80: mol_type = other DNA
tggaggcgcacacgcacgtcactggtgctgtggccggccgaaccgtcggtaatattgccagcctgttcagcccaggctcc

SEQ ID NO: 119962 - DNA, 80 bp, synthetic construct
  source 1..80: mol_type = other DNA
cgcgcgacgaggaagacttccgagcggtcgcaacctcgcgagaggcggcagcctatccccaaggcccgccgatccgaggg

SEQ ID NO: 119963 - DNA, 80 bp, synthetic construct
  source 1..80: mol_type = other DNA
ttgggtcgggggtacgatggcgactggcacacggccgtcgctactcgcgggtgcggagtcgtgcaactgaacctggtcaa

SEQ ID NO: 119964 - DNA, 80 bp, synthetic construct
  source 1..80: mol_type = other DNA
gctgttggtatggtatggaaatcaggcccatcagtgagaaagaagagaacatggtaaagtctctagtctcagcgggaagt

SEQ ID NO: 119965 - DNA, 80 bp, synthetic construct
  source 1..80: mol_type = other DNA
gaggaggagtggtataacaaaggctgtctttaaaaagcaggggttagggagttgttcggtcataagcttcagcgcgaacg

SEQ ID NO: 119966 - DNA, 80 bp, synthetic construct
  source 1..80: mol_type = other DNA
gcgttgggaacgggcatgctcgccatcatcctattagttaccttgggaccgcactacaagagacttctagcccttattct

SEQ ID NO: 119967 - DNA, 80 bp, synthetic construct
  source 1..80: mol_type = other DNA
ggtcaccccatccatgacaatgagatgtgtgggagtgggaaatagagattttgtggaaggtctgtcaggagctacgtggg

SEQ ID NO: 119968 - DNA, 80 bp, synthetic construct
  source 1..80: mol_type = other DNA
aagactatctgcctgaagatggcatgtgagttggatgatatggttggacgctggaagacgttgaagctggcgtctgtgag

SEQ ID NO: 119969 - DNA, 80 bp, synthetic construct
  source 1..80: mol_type = other DNA
acactccatggtagacagaggatggggaaatggatgtggattatttggaaagggaggcattgtgacctgtgctatgttta

SEQ ID NO: 119970 - DNA, 80 bp, synthetic construct
  source 1..80: mol_type = other DNA
gacatcggttttgtctggaaaatttacacacggggtctgcaagtcaataccccgttcggcggccaatgcgttcataaatg

SEQ ID NO: 119971 - DNA, 80 bp, synthetic construct
  source 1..80: mol_type = other DNA
ggtggcgcagtagcggcgctcgcggttaaagaagaaaatggcaaagaacgtgttcgaaggcaggcgcagcgccttgggcc

SEQ ID NO: 119972 - DNA, 80 bp, synthetic construct
  source 1..80: mol_type = other DNA
gattgctttagaaagcatcccgacacaacctaccttaagtgtggtgctggcccctggttgacccccaagtgcctagtgca

SEQ ID NO: 119973 - DNA, 80 bp, synthetic construct
  source 1..80: mol_type = other DNA
tcaggacgcagtgcttcaccttcctggatgcgtcccctgtgaacgggtgaacaacgagtcccggtgttggaccccggtca

SEQ ID NO: 119974 - DNA, 80 bp, synthetic construct
  source 1..80: mol_type = other DNA
aaacagtccgctgttcgtagctttacgaattttacagtagtacatacccgttttaaggccggctttataggcacgtataa

SEQ ID NO: 119975 - DNA, 80 bp, synthetic construct
  source 1..80: mol_type = other DNA
ccaggagaacccggctaagacacgagagtattgtctccatgccaagctggcaagctcaaaggtggtcgcacgctgcccgg

SEQ ID NO: 119976 - DNA, 80 bp, synthetic construct
  source 1..80: mol_type = other DNA
cattccagagcccaattacagtagggctctttggagggtagcagctgaggagtacgtagaggttgtgcgcataaaggact

SEQ ID NO: 119977 - DNA, 80 bp, synthetic construct
  source 1..80: mol_type = other DNA
agaaactcgcgccgtagaagagggatgttggggcgcggaatgcgacgccacaggcggcggcgcgctatcagcaagaggct

SEQ ID NO: 119978 - DNA, 80 bp, synthetic construct
  source 1..80: mol_type = other DNA
tgacttagccggttatgaaggaagcacccccccccctttaaaaaatttgcgaggcaaaaaattggggtggccccctatgg

SEQ ID NO: 119979 - DNA, 80 bp, synthetic construct
  source 1..80: mol_type = other DNA
tgggcccgctgtacatcctgcaagccagccttctcaacgtgccgtactatgtacgtgcgcatgcactcttgcgtgtgtgc

SEQ ID NO: 119980 - DNA, 80 bp, synthetic construct
  source 1..80: mol_type = other DNA
gaagaaggtcatcacttggggtgcggacactgcagcatgtggcgacatcttggctggccttccggtctctgcgcgcaggg

SEQ ID NO: 119981 - DNA, 80 bp, synthetic construct
  source 1..80: mol_type = other DNA
gacgccccgcagccagcatatgacctggagcatataacatcctgctcctccaatgtctcggtcgcgcacgacgcggcggg

SEQ ID NO: 119982 - DNA, 80 bp, synthetic construct
  source 1..80: mol_type = other DNA
ccattactgccacagcttgagcaaactgtgcagcctgtagctccaccagagatggtgtaaaacatcacgggaggccacaa

SEQ ID NO: 119983 - DNA, 80 bp, synthetic construct
  source 1..80: mol_type = other DNA
ttgccgatggtggatgttcggggggcgcgtatgacatcataatatgtgatgagtgtcattcagttgactccacctcaatt

SEQ ID NO: 119984 - DNA, 80 bp, synthetic construct
  source 1..80: mol_type = other DNA
agggtggcagcaaccctcagaaaacttggggcgccttccctcagagcgtggaagagtcgggcacgtgcagtgcgtgcggc

SEQ ID NO: 119985 - DNA, 80 bp, synthetic construct
  source 1..80: mol_type = other DNA
tcttgtgggacgacgtgtccgacagcatttttgtccctgcgcgttaccgcaagaaggaaggcggtgatgagctgcctttg

SEQ ID NO: 119986 - DNA, 80 bp, synthetic construct
  source 1..80: mol_type = other DNA
cctcccggagaccttcccagaccagaatatgacttggagcttataacatcctgctcctcaaacgtatcggtagcgcttga

SEQ ID NO: 119987 - DNA, 80 bp, synthetic construct
  source 1..80: mol_type = other DNA
tcgctaggaagtccttccccccggaggaggaagtccccagcgactccgccattggctcggacccgtcgactacacaaggc

SEQ ID NO: 119988 - DNA, 80 bp, synthetic construct
  source 1..80: mol_type = other DNA
tgcacaagcgggccaataagtaccttacctggtactttaacggctcttcatttgtaatttacaacagtttccagcgagac

SEQ ID NO: 119989 - DNA, 80 bp, synthetic construct
  source 1..80: mol_type = other DNA
cacgcgacgcgaaaaaggccccccggaggcttttccgggttcccggcccggggcctgagataaacaatcggggttaccgc

SEQ ID NO: 119990 - DNA, 80 bp, synthetic construct
  source 1..80: mol_type = other DNA
gaaggtctgcgcgaggccgctctccgaagagacgatgggagccccgcgtatatatccgcgagggcccggcgccgccccgc

SEQ ID NO: 119991 - DNA, 80 bp, synthetic construct
  source 1..80: mol_type = other DNA
gggcgaaggtttttggcatcttgttcctgtttgccggcgtggatgctgacacttacgtgtccggcgcggttgctggcaga

SEQ ID NO: 119992 - DNA, 80 bp, synthetic construct
  source 1..80: mol_type = other DNA
gcatgatcaagggtcaacgggaccagaagggactgtcctgggccacaccacttgtaggcctcttcggaggcgaaggtgtg

SEQ ID NO: 119993 - DNA, 80 bp, synthetic construct
  source 1..80: mol_type = other DNA
cgtcgggcacagcaccgcatcctaatctcgctcatgttttcacagtaagtgcagcacataatgaccatgttatttagcag

SEQ ID NO: 119994 - DNA, 80 bp, synthetic construct
  source 1..80: mol_type = other DNA
taactcctcggggtgcccagctcggctttctcattgtaaggcccttgcgagctttgcccaaggatggggtccgttgaggt

SEQ ID NO: 119995 - DNA, 80 bp, synthetic construct
  source 1..80: mol_type = other DNA
gggcgcgagatgcccgagggtatcgcgatgtcagtttcaaagccgtccgccagcatggcgccgatccacgcggcagggaa

SEQ ID NO: 119996 - DNA, 80 bp, synthetic construct
  source 1..80: mol_type = other DNA
cgttattgcagccgtactgtattacagcatggttgccaattgggctaaagtcattgccgtcctactcctcttttctggag

SEQ ID NO: 119997 - DNA, 80 bp, synthetic construct
  source 1..80: mol_type = other DNA
cattcccctcctatataggctaggagcaattcaaagtgacatctgcacaacacaccctatcaccaagtacatcatggctt

SEQ ID NO: 119998 - DNA, 80 bp, synthetic construct
  source 1..80: mol_type = other DNA
cttttgaaggtaccatacttcgtgcgcgctcaggcacttctgagcgcgtgcgcggtggtccagagggttgcgggcggcca

SEQ ID NO: 119999 - DNA, 80 bp, synthetic construct
  source 1..80: mol_type = other DNA
accggactccccacaacctgaaaccgggatataaaccacggctggagaaccggactccgcacttaaaatgaaacagaaac

SEQ ID NO: 120000 - DNA, 80 bp, synthetic construct
  source 1..80: mol_type = other DNA
cagcggtgcccagcacctatcaagtaggctatttacatgcccccactggcagcggcaagagcactaaggtccctgcggcg

SEQ ID NO: 120001 - DNA, 80 bp, synthetic construct
  source 1..80: mol_type = other DNA
cgacttcccccggtgggaagtcggcggctcggtcggcgtctgggttttttgccccccacaacccccggggagccacccag

SEQ ID NO: 120002 - DNA, 80 bp, synthetic construct
  source 1..80: mol_type = other DNA
gtcgaaggcctatgggattgatcccaacattcgcacggggacacgcactgtcacaactggtgccaaactcacctactcca

SEQ ID NO: 120003 - DNA, 80 bp, synthetic construct
  source 1..80: mol_type = other DNA
gggatcggcaccgtcctagaccaagcagaaacagctgatgtgcgcctcacagtcttagcgaccgccacgccccctgggtc

SEQ ID NO: 120004 - DNA, 80 bp, synthetic construct
  source 1..80: mol_type = other DNA
gaagaaaacatggaggttgaaatttggactagagagggggagaagaaaaaactcaggccaaaatggttagatgcacgtgt

SEQ ID NO: 120005 - DNA, 80 bp, synthetic construct
  source 1..80: mol_type = other DNA
aacaacatgatgctgcgtgaccgctggagcctcgtggccgagcggcggcggcaggccgggatcgccggacacacgtacct

SEQ ID NO: 120006 - DNA, 80 bp, synthetic construct
  source 1..80: mol_type = other DNA
gaggaaaggccctgtcgctcaaatgtacaccaacgtcgaccaagacctcgtagggtggcaagccccagccggggcgcgct

SEQ ID NO: 120007 - DNA, 80 bp, synthetic construct
  source 1..80: mol_type = other DNA
ccgaatcatcggccgtcgacagcggcacggcgaccgcccctcctgaccaagcctccgacgacggcggcaacggatccgac

SEQ ID NO: 120008 - DNA, 80 bp, synthetic construct
  source 1..80: mol_type = other DNA
ggccatcgcatggcgtgggatatgatgatgaactggtctccgctcgtgactctcattgcttcctacgccatgagggtacc

SEQ ID NO: 120009 - DNA, 80 bp, synthetic construct
  source 1..80: mol_type = other DNA
gcgcgcgagcgctccaggagccactctccgaggcgtgcgtacagattggccggcggtgcggcgcgcagctgcagatccag

SEQ ID NO: 120010 - DNA, 80 bp, synthetic construct
  source 1..80: mol_type = other DNA
gctgcaggcggtgtttgacatgaggaccggcctccttgtggctttcgcagttaaaagggcctacacaactagagaggctg

SEQ ID NO: 120011 - DNA, 80 bp, synthetic construct
  source 1..80: mol_type = other DNA
tgcggttcttgtaggtctggtattcttgaccttgtcaccatactacaaagtgtttctcactaggctcatatggtggttac

SEQ ID NO: 120012 - DNA, 80 bp, synthetic construct
  source 1..80: mol_type = other DNA
gcgggaatgatacctggttctgtcccaccgattgcttcaggaaacatccggaggcaacatatgagagatgcgggtctggt

SEQ ID NO: 120013 - DNA, 80 bp, synthetic construct
  source 1..80: mol_type = other DNA
catcaagcaggtggcgccgggccttggcgtgcagaccgtggacattcagatccccaccgacatggatgtcgacaaaaaac

SEQ ID NO: 120014 - DNA, 80 bp, synthetic construct
  source 1..80: mol_type = other DNA
aagttttctccgttaaaccggagaagggaggccgaaagtctgcgcgcctgatcgtatacccagatctaggggtacgggtg

SEQ ID NO: 120015 - DNA, 80 bp, synthetic construct
  source 1..80: mol_type = other DNA
gagatgcaagacttgtggctactgcggaggtcagagaaagtgaccaactggttgcagagcaacggatgggataggctcaa

SEQ ID NO: 120016 - DNA, 80 bp, synthetic construct
  source 1..80: mol_type = other DNA
ttgcccatatgggcgaggcctgactacaacccgcctctgatagagacgtggaaagccccggactacgaccctcccaccgt

SEQ ID NO: 120017 - DNA, 80 bp, synthetic construct
  source 1..80: mol_type = other DNA
agcgatgggcatcaatctcgccgccagctcacaacctttggatccggaaggcccgatcgccgttactcccaggcctccga

SEQ ID NO: 120018 - DNA, 80 bp, synthetic construct
  source 1..80: mol_type = other DNA
ggataactctccaatacacaaagagaggaggtgtgctgtgggacactccctcaccaaaggagtacaaaaaaggggacacg

SEQ ID NO: 120019 - DNA, 80 bp, synthetic construct
  source 1..80: mol_type = other DNA
attctcgtgcctcactacgcctgcctcagcaatccattataagaacacttctggtatttaccatcttaccaatgattgcc

SEQ ID NO: 120020 - DNA, 80 bp, synthetic construct
  source 1..80: mol_type = other DNA
gatggggaaacccccacaaacctagcatttaattttgattcttgtgaaccaagccatgacaccacatctaacgtattaaa

SEQ ID NO: 120021 - DNA, 80 bp, synthetic construct
  source 1..80: mol_type = other DNA
ggaggtggcggctgagtgttgcggtctggggtgcgctccctctgtgagtgctgattgctggccattatttaatcctaggc

SEQ ID NO: 120022 - DNA, 80 bp, synthetic construct
  source 1..80: mol_type = other DNA
tagcccaatggagaagagagtcatcacctgggaggcagagactgcggcgtgtggggacatcatctcgggcctacccgtct

SEQ ID NO: 120023 - DNA, 80 bp, synthetic construct
  source 1..80: mol_type = other DNA
ccaggttgggtgtgcgcacgacaaggaaaacttcggagcggtcccagccacgtgggagacgccagcccatccccaaagat

SEQ ID NO: 120024 - DNA, 80 bp, synthetic construct
  source 1..80: mol_type = other DNA
gaaggaaatagcagaaacacaacatggaacgatagtcatcagagtgcaatatgaaggggacggctctccatgcaaaatcc

SEQ ID NO: 120025 - DNA, 80 bp, synthetic construct
  source 1..80: mol_type = other DNA
agtcagtgaggccctggtctcctcctcacatcgtggtaaacgggccctgcggtagggatgatggcggagcaagctcgact

SEQ ID NO: 120026 - DNA, 80 bp, synthetic construct
  source 1..80: mol_type = other DNA
ttctccctgtgcttcggcaaggtagcattttaacataagatcataagacaaagcctctgtagcgtggcctttagcccgta

SEQ ID NO: 120027 - DNA, 80 bp, synthetic construct
  source 1..80: mol_type = other DNA
gtacaggtgggcttggatgttcaaatacataggcattaggccgtccctgggatgcaggtaggaccactggagggcgtcat

SEQ ID NO: 120028 - DNA, 80 bp, synthetic construct
  source 1..80: mol_type = other DNA
agggctataaggtcttggtgctcaatccatcggtggctgccactttgggtttcggcgcgtacatgcgccaggcccatggt

SEQ ID NO: 120029 - DNA, 80 bp, synthetic construct
  source 1..80: mol_type = other DNA
tccccatggcgtacatcaagggggggaggcatttaatcttttgccattcaaagaagaaatgcgacgagctagcaagccag

SEQ ID NO: 120030 - DNA, 80 bp, synthetic construct
  source 1..80: mol_type = other DNA
gcaccttaggagaattttggaaggaaaagctcaaccagatgactagggaagaattcaacaggtaccgcaaagaggccata

SEQ ID NO: 120031 - DNA, 80 bp, synthetic construct
  source 1..80: mol_type = other DNA
gtgctaaggagggacccggtcggcaccatggccgcggcataccggtatcccggagggtcgcggttgggagcggccatagg

SEQ ID NO: 120032 - DNA, 80 bp, synthetic construct
  source 1..80: mol_type = other DNA
ccacgtccacatgggtaacttatgggacatgcactgccacaggagaacacagaagggaaaaaagatcagtggcactcgtc

SEQ ID NO: 120033 - DNA, 80 bp, synthetic construct
  source 1..80: mol_type = other DNA
gagaggaagcagcatagggaaaatgttcgaagcaaccgcccgaggagcacgaaggatggctatcctgggagacaccgcat

SEQ ID NO: 120034 - DNA, 80 bp, synthetic construct
  source 1..80: mol_type = other DNA
cgtcagagaagcaatcaagagacgcttaagaactctaattttggcaccaacaagagtggttgcagctgagatggaagaag

SEQ ID NO: 120035 - DNA, 80 bp, synthetic construct
  source 1..80: mol_type = other DNA
atggcctcagggcttcgggccgatcacctttgacaggtccgacagtgactgggaggccagggaccagcggccatactgct

SEQ ID NO: 120036 - DNA, 80 bp, synthetic construct
  source 1..80: mol_type = other DNA
cggagctcgccacaaagacctttggcagctccgggtcgtcggccgccgatagcggcacagcgaccgcccctcctgatcag

SEQ ID NO: 120037 - DNA, 80 bp, synthetic construct
  source 1..80: mol_type = other DNA
ctctccccgagacccatttcgaccttgaaggggtcctcgggggggccggtgctctgccctagaggccacgtcgttgtgct

SEQ ID NO: 120038 - DNA, 80 bp, synthetic construct
  source 1..80: mol_type = other DNA
ccccatgtccacctgggctagtgacggcctccgtgatctcgcggtcgcggtggagcctgtcgtcttctcacccatggaga

SEQ ID NO: 120039 - DNA, 80 bp, synthetic construct
  source 1..80: mol_type = other DNA
tcgtgtgctgctcaatgtcctactcatggacggggataccagttacaccttgcgctgccgaagaggaaaagctgcccatt

SEQ ID NO: 120040 - DNA, 80 bp, synthetic construct
  source 1..80: mol_type = other DNA
gctttccaggagatggaaaattttctaggtccagttgcagttggaggaatcctgatgatgctggtcagtgtggctgggag

SEQ ID NO: 120041 - DNA, 80 bp, synthetic construct
  source 1..80: mol_type = other DNA
gggagatgtcgtggtgtgcgccactgatgccctcataactgggttcacgggcgattttgactccgtaatagactgcaacg

SEQ ID NO: 120042 - DNA, 80 bp, synthetic construct
  source 1..80: mol_type = other DNA
tatatgctcaggctcctttggcaggggaaaaaattaccgccaatggcttacaaatagtttctgatacccaaactgaaggc

SEQ ID NO: 120043 - DNA, 80 bp, synthetic construct
  source 1..80: mol_type = other DNA
gttgagatgagccctctgctacactcaacgacagagttggccgtcttgccttgctcttttacaactatgcccgcgctgtc

SEQ ID NO: 120044 - DNA, 80 bp, synthetic construct
  source 1..80: mol_type = other DNA
acagcagcgactgactacccactaacccagctccctatttaaaggcaccttacactgacgtaatgaccaaaggtctaaaa

SEQ ID NO: 120045 - DNA, 80 bp, synthetic construct
  source 1..80: mol_type = other DNA
attggctcactctgaaaacaacgaaaagagggggcgtgttctgggacacgccatctccaaagccttgcttaaaggtggac

SEQ ID NO: 120046 - DNA, 80 bp, synthetic construct
  source 1..80: mol_type = other DNA
gcgggtggcacgggcccggggcgaacgagggatctgtcgccggcgtgggtgactggcaccgacgcaacctccggtgcttg

SEQ ID NO: 120047 - DNA, 80 bp, synthetic construct
  source 1..80: mol_type = other DNA
caggtgaacgccagctttaccaacttcagctgaccaacctcgatggttcacctatcgaccccactgatgacacacctggg

SEQ ID NO: 120048 - DNA, 80 bp, synthetic construct
  source 1..80: mol_type = other DNA
ggaaaggttaggaaggacatacctcaatggcagccatcaaaggggtggcatgattggcaacaagtccctttctgctccca

SEQ ID NO: 120049 - DNA, 80 bp, synthetic construct
  source 1..80: mol_type = other DNA
gacaagtcgtcacgatcaggccccgtatacatcaaaccgtccaggagtgcaattgttccatctacacgggccgcattagt

SEQ ID NO: 120050 - DNA, 80 bp, synthetic construct
  source 1..80: mol_type = other DNA
acatgctggcagtctggaacagggtgtggatccaagaaaacccgtggatggaagacaaaactccagtggaatcatgggaa

SEQ ID NO: 120051 - DNA, 80 bp, synthetic construct
  source 1..80: mol_type = other DNA
ccctggacaatttactctatgtgggatatgcgccaggcgggaaagattatacccacaaccttcaaatcaaactttcctgg

SEQ ID NO: 120052 - DNA, 80 bp, synthetic construct
  source 1..80: mol_type = other DNA
tgatgtgcccaagtacttggaaagcaagaagaaactggaggaaggcgctaaggaagctggcaataccaaagctccaatta

SEQ ID NO: 120053 - DNA, 80 bp, synthetic construct
  source 1..80: mol_type = other DNA
cagaacatggctcttacttacacttttttgcaaggtaaccctaacatggccatatcttttcagagcatttataatcatgc

SEQ ID NO: 120054 - DNA, 80 bp, synthetic construct
  source 1..80: mol_type = other DNA
tctggtgtggcagtttgatcggcacacgaacccgtgccacttgggctgaaaacatccatgtggcaatcaatcaggtccgt

SEQ ID NO: 120055 - DNA, 80 bp, synthetic construct
  source 1..80: mol_type = other DNA
gcgtggccaagaaaaaaggtggctacctgcttgcagcagctctctgccaggctggattgtgcagtcccttgatcatgatg

SEQ ID NO: 120056 - DNA, 80 bp, synthetic construct
  source 1..80: mol_type = other DNA
tttggactgtacaatcaactggccgcgtctcggttaagagaagaagatgccctgtccgtggtgttgacccgcttggagga

SEQ ID NO: 120057 - DNA, 80 bp, synthetic construct
  source 1..80: mol_type = other DNA
gccagccagctgtctgccccgtcgttaaaggccacttgccagtcacacggggttcatccggatactgagctgcaggatgc

SEQ ID NO: 120058 - DNA, 80 bp, synthetic construct
  source 1..80: mol_type = other DNA
cttatcttgccctactagcagctttcaaagttagaccaacttttgcagctggattactcttgagaaaactgacttccaag

SEQ ID NO: 120059 - DNA, 80 bp, synthetic construct
  source 1..80: mol_type = other DNA
ctaggaattggcaccgtcttggatcaggctgagacggctggggttcgcctcaccgtcttagccaccgcgactccccccgg

SEQ ID NO: 120060 - DNA, 80 bp, synthetic construct
  source 1..80: mol_type = other DNA
aggaaggagaaagaaagaaattgcgacctcgctggttggacgccagaacatactctgatccattggccctgcgcgagttt

SEQ ID NO: 120061 - DNA, 80 bp, synthetic construct
  source 1..80: mol_type = other DNA
agagcgggagaagcctggccggcggactggggaccgagcgggagtggcacaccagacaccaaagcgtgtggcgctggctc

SEQ ID NO: 120062 - DNA, 80 bp, synthetic construct
  source 1..80: mol_type = other DNA
gttcatggacttgaaccttccttggagtgtggctgagggtgtagcctggcggaacagagaaactctcatggagtttgaag

SEQ ID NO: 120063 - DNA, 80 bp, synthetic construct
  source 1..80: mol_type = other DNA
attttactgaagataaccccggtcttaacgccgtggtccgttcacacatggaaaactcaaaacggcttgctgatatgtgt

SEQ ID NO: 120064 - DNA, 80 bp, synthetic construct
  source 1..80: mol_type = other DNA
agacagcgggcggtcagtatgtgcagatggctctgttaaagctgggagcatttgccggcacctacatttacaaccacctt

SEQ ID NO: 120065 - DNA, 80 bp, synthetic construct
  source 1..80: mol_type = other DNA
gatgaatagtacggggtttgtgaagacctgcggggcccccccttgcaacatctatggaggtgcggtaggcattgaaacaa

SEQ ID NO: 120066 - DNA, 80 bp, synthetic construct
  source 1..80: mol_type = other DNA
cttgggggttggggtggggaaaaggaagaaacggcaggcgtattggtcccaatgcggtctcggtgaggtatcgacagagt

SEQ ID NO: 120067 - DNA, 80 bp, synthetic construct
  source 1..80: mol_type = other DNA
ccgcattacgagagctgacctggaaaatgaagctaaggttcttgagttgctggatggggaacatcggcgtcttgctaggg

SEQ ID NO: 120068 - DNA, 80 bp, synthetic construct
  source 1..80: mol_type = other DNA
aagaataacagaagatgacctgcacaatgaggaaaagatcacacagcaaatggacccagaacacaggctgttagcgaacg

SEQ ID NO: 120069 - DNA, 80 bp, synthetic construct
  source 1..80: mol_type = other DNA
gctattgatggggccgatggagatctagtgcggttcaaaacacctggcggctcagaacgtgtcttgcagccggtgtggaa

SEQ ID NO: 120070 - DNA, 80 bp, synthetic construct
  source 1..80: mol_type = other DNA
tgcacgtgtgtgcgggcactttagtcagtgtccgcggcgttcttttgaacgtgagtgtgttgagaaaaagacagcttagg

SEQ ID NO: 120071 - DNA, 80 bp, synthetic construct
  source 1..80: mol_type = other DNA
tcaaaagggggccgtaagccggcccgctttattgtatacccggacctcagtgtacgggtgtgcgaaaaaatggccttata

SEQ ID NO: 120072 - DNA, 80 bp, synthetic construct
  source 1..80: mol_type = other DNA
cgtggagacctggaaaagaccagactatcaaccaccaacggtagcgggatgtgcactcccccccccaggacaaaccccgg

SEQ ID NO: 120073 - DNA, 80 bp, synthetic construct
  source 1..80: mol_type = other DNA
cccccaccaccacccgcccacccacctaccccgcgcccgcagcctccggcagcacgccgaccaccgccgccacccgccaa

SEQ ID NO: 120074 - DNA, 80 bp, synthetic construct
  source 1..80: mol_type = other DNA
tgcttcctggctgcggctgcagcctgctcggtctggagactgcttaggggacacagggagcagaagggactgacctggat

SEQ ID NO: 120075 - DNA, 80 bp, synthetic construct
  source 1..80: mol_type = other DNA
acgaggaaaacttccgaacggtcccagccccgcggcaggcgccagcccatcccaaaggcgcgccgccagcagggtcgtac

SEQ ID NO: 120076 - DNA, 80 bp, synthetic construct
  source 1..80: mol_type = other DNA
tcacctacgagctcgtgtccaacggcaaacagcatcgcctcacctatgagatgccccagcagaagcagaagttcacctgc

SEQ ID NO: 120077 - DNA, 80 bp, synthetic construct
  source 1..80: mol_type = other DNA
ggcggtgggatggccgaacagaacccaggggtcaacctccatctccgtgatggcgcacatggtgtcacagaacatgtgct

SEQ ID NO: 120078 - DNA, 80 bp, synthetic construct
  source 1..80: mol_type = other DNA
caagacccttgctggacctaagggccccattttacaaatgtacaccggtgctgagggagatctggtcggctggcccgccc

SEQ ID NO: 120079 - DNA, 80 bp, synthetic construct
  source 1..80: mol_type = other DNA
tcgccatggatcccgccgtctcccccgcgagcaccgaccccctagatacccacgcgtcgggtgccggtgcggccccgatt

SEQ ID NO: 120080 - DNA, 80 bp, synthetic construct
  source 1..80: mol_type = other DNA
gctccgagctggatgtgattaacacgaacgacgtggaagtgctggacgaatgtctggccgagtactgcacctcgctgcga

SEQ ID NO: 120081 - DNA, 80 bp, synthetic construct
  source 1..80: mol_type = other DNA
ctaccacgcccacgagataaagttctttgaggaccaattgtgcccacagcacgcggatcttacggcctgcgtcatcaccc

SEQ ID NO: 120082 - DNA, 80 bp, synthetic construct
  source 1..80: mol_type = other DNA
cgaattgaccctaggaggccgccacgcgcccgagttttgcgttcgtcgctggtcgtcgggcgccaaagccccggacggct

SEQ ID NO: 120083 - DNA, 80 bp, synthetic construct
  source 1..80: mol_type = other DNA
aaatctcgcagaagagggcgcgcccggggtctgggttaggaagggccacctgacacagaggctcggtgaggaccgttaga

SEQ ID NO: 120084 - DNA, 80 bp, synthetic construct
  source 1..80: mol_type = other DNA
cctgaaccaaagcctctcgtgtctgcgcttcaagcacggcagggcaagtcgcgcgacggcccggacctttctcgcgctga

SEQ ID NO: 120085 - DNA, 80 bp, synthetic construct
  source 1..80: mol_type = other DNA
agagtacaggctccggggtgaagaaagaaagaacttcctggagctactcagaacagctgatctgcctgtctggctgtcct

SEQ ID NO: 120086 - DNA, 80 bp, synthetic construct
  source 1..80: mol_type = other DNA
cggggcactagtggcaatcctgaagctatgtgtgctttgtgttatatgcgtttaactggacactgtatctacagtaagta

SEQ ID NO: 120087 - DNA, 80 bp, synthetic construct
  source 1..80: mol_type = other DNA
cgggcccatcatcattgcggatgacaagtcagacgacgggtcctactcgtccatgcctccgcttgaaggggagcccggtg

SEQ ID NO: 120088 - DNA, 80 bp, synthetic construct
  source 1..80: mol_type = other DNA
gtcacatccatctccaccacgtggtccttgtgaatcatcaccgttccatgcagacacttgagctgaccttccacctcggt

SEQ ID NO: 120089 - DNA, 80 bp, synthetic construct
  source 1..80: mol_type = other DNA
gctatctttcagcaaagccgcgggcagcaccctcagcgcgaactgaaaataaaaaaccgctccttccgctcactcacccg

SEQ ID NO: 120090 - DNA, 80 bp, synthetic construct
  source 1..80: mol_type = other DNA
cgtgccgcggccggacttgctggtttcctcacacgaggccccaagcaggacatccagctgattaacaccaacggcagttg

SEQ ID NO: 120091 - DNA, 80 bp, synthetic construct
  source 1..80: mol_type = other DNA
gtctgtgctaccgatgctctcatgactggcttcacaggcgatttcgactctgtcatagactgcaatgttgcggtcactca

SEQ ID NO: 120092 - DNA, 80 bp, synthetic construct
  source 1..80: mol_type = other DNA
tctcttgtggggcaccaaagctaccagggttgagacggaggataaggttctggtgctggactcctttgagcccctcgtgg

SEQ ID NO: 120093 - DNA, 80 bp, synthetic construct
  source 1..80: mol_type = other DNA
gcgaccacccggcagctgcaggcggcgatctttcacgcgctcctcaacgccaccacttaccgggacctcgaggcggactg

SEQ ID NO: 120094 - DNA, 80 bp, synthetic construct
  source 1..80: mol_type = other DNA
cgaagggagggcgcaagcccgcccggctgatcgtgtacccggaccttggtgtgcgggtgtgtgagaaaagggcgctttat

SEQ ID NO: 120095 - DNA, 80 bp, synthetic construct
  source 1..80: mol_type = other DNA
ctatcactccactggatctgccagctataattgagagactccacggcttgagcgcgtttacactccatggatactctcca

SEQ ID NO: 120096 - DNA, 80 bp, synthetic construct
  source 1..80: mol_type = other DNA
ctcgtccgtccggcactgggccgtcgtgcgggccaggatggccttggctccaaacacaaccggctccatacaattgaccc

SEQ ID NO: 120097 - DNA, 80 bp, synthetic construct
  source 1..80: mol_type = other DNA
tgacctccccggccggggtgtagcgcataaacacggcccccacgagccccaggtcgcgctggttttgggtgcgcaccagc

SEQ ID NO: 120098 - DNA, 80 bp, synthetic construct
  source 1..80: mol_type = other DNA
gtgcggctaactgccatggcctcctatattttgccatcttcttcgtggcagcttggcacatcaggggtcgggtggtcccc

SEQ ID NO: 120099 - DNA, 80 bp, synthetic construct
  source 1..80: mol_type = other DNA
gcgttgggcgccgagctatgctgcgggcggcaagacgggctgccacacctactggtcgagcacgcaggcgtgccgcagct

SEQ ID NO: 120100 - DNA, 80 bp, synthetic construct
  source 1..80: mol_type = other DNA
acagagacaaaactcactattaaacctgtagaaaaagacagcaggggtagaagttacaatgtcttggaagataaagtgaa

SEQ ID NO: 120101 - DNA, 80 bp, synthetic construct
  source 1..80: mol_type = other DNA
aaaactggtgacaatatcgatcctaccaaggatttcgacatagatcttgctttcttcgatactcctggcggaaatcctcc

SEQ ID NO: 120102 - DNA, 80 bp, synthetic construct
  source 1..80: mol_type = other DNA
tctgcctggtgaagggcacagcttctatcaagcataatgtgatcaaggggtgtactgatgagcgcatgtacaacatgctg

SEQ ID NO: 120103 - DNA, 80 bp, synthetic construct
  source 1..80: mol_type = other DNA
ggtgtggtggaaggcgcaggcattcaaaaattaggctacatcctgagggaagtggggacgaaggctggaggaaagatcta

SEQ ID NO: 120104 - DNA, 80 bp, synthetic construct
  source 1..80: mol_type = other DNA
gggcagctcttcgccttcaggccccgcatgcaccgaacagtccagagctgcaattgctctatctacactggccgcatcac

SEQ ID NO: 120105 - DNA, 80 bp, synthetic construct
  source 1..80: mol_type = other DNA
tatcccgacacactggaggtggaggaagacacggaagaggcatgttattccaagcgattcaccaacgggtcgaaatgaag

SEQ ID NO: 120106 - DNA, 80 bp, synthetic construct
  source 1..80: mol_type = other DNA
gcctgagccccctccaaaagctggccgtttactactatatcatccaccgagagaggcgcctgtcccccttccccgcgcta

SEQ ID NO: 120107 - DNA, 80 bp, synthetic construct
  source 1..80: mol_type = other DNA
ctgcttgttccacccgtctttgggctttgacatcactaagatattgctggcccttctcgggccgctttacttatttcaag

SEQ ID NO: 120108 - DNA, 80 bp, synthetic construct
  source 1..80: mol_type = other DNA
taaatcatcattttaaaccaatttgctaacactacaccccccgccttacattgaagagacccaggtttaatacagtgaca

SEQ ID NO: 120109 - DNA, 80 bp, synthetic construct
  source 1..80: mol_type = other DNA
ggctacctcgcggaccaccaggctccccgcgcccgccccccccaaagactcccgccgtcacggcgggcttttttcccgcg

SEQ ID NO: 120110 - DNA, 80 bp, synthetic construct
  source 1..80: mol_type = other DNA
tggcttttttctttggaggcaaaggcacagcctccaggtcttcttcgctttctgattccaaaaagtaccgacccattttt

SEQ ID NO: 120111 - DNA, 80 bp, synthetic construct
  source 1..80: mol_type = other DNA
acttgtggctttgccgacctcatggggtacatacccgttgtaggcgcccctgtcggtggcgtcgccagggctctcgccca

SEQ ID NO: 120112 - DNA, 80 bp, synthetic construct
  source 1..80: mol_type = other DNA
acgcggatacagaacaggtgagccaggcgcagggccggcttcgagggcgcgcccgaggaggccgccgggcctgggccggc

SEQ ID NO: 120113 - DNA, 80 bp, synthetic construct
  source 1..80: mol_type = other DNA
accaccaggctgctttctagaactagtgagtgggtgagagggcaaaatgaaagacttagtcctttcatgagtggcgcact

SEQ ID NO: 120114 - DNA, 80 bp, synthetic construct
  source 1..80: mol_type = other DNA
accaacagtttaagtcgagattcatacctgggtcacttagttactttgtaccgcgaagccattggtcaagcgcaggtaga

SEQ ID NO: 120115 - DNA, 80 bp, synthetic construct
  source 1..80: mol_type = other DNA
cggccgcgcctccgggcccggtgacacgacgcgcctcgtctctgcggattgtcccgggagcgtcgcggcatggctcatct

SEQ ID NO: 120116 - DNA, 80 bp, synthetic construct
  source 1..80: mol_type = other DNA
gcagttgtaaccaaagaaaatacaagcttgcctagcttagttggctcacttgttgttttaactggaaagggcattggaac

SEQ ID NO: 120117 - DNA, 80 bp, synthetic construct
  source 1..80: mol_type = other DNA
tgggtctgcgccaccggcctggtcgtccgcggccccacggtcagtctggtctcagactcactcgtggatgccggggccgt

SEQ ID NO: 120118 - DNA, 80 bp, synthetic construct
  source 1..80: mol_type = other DNA
gaccattctgagacaaaagcccgggtccaggctaaaacaaaggaggcgatttgggagggataacggttgttttccaccag

SEQ ID NO: 120119 - DNA, 80 bp, synthetic construct
  source 1..80: mol_type = other DNA
cattgccggaggcgcgcctactggacttatccagttggttcaccgtcggcgccggcggtggcgacatttttcacagcgtg

SEQ ID NO: 120120 - DNA, 80 bp, synthetic construct
  source 1..80: mol_type = other DNA
actcatgtcagcagccataaaagacaacagagccgtccatgccgatatgggttattggatagaaagcgcgcttaatgaca

SEQ ID NO: 120121 - DNA, 80 bp, synthetic construct
  source 1..80: mol_type = other DNA
gatcctatgaagtcaaagccacaggctcagcctcctccatgataaatggagtcgtgaaactcctcaccaaaccatgggat

SEQ ID NO: 120122 - DNA, 80 bp, synthetic construct
  source 1..80: mol_type = other DNA
gatttggccgtcaagaccttcggccagtccgggcttggttcagattccggcgcagaccttacaaccccaactgaaaccac

SEQ ID NO: 120123 - DNA, 80 bp, synthetic construct
  source 1..80: mol_type = other DNA
acggacgctatgaccaggtactctgctcctcctggagacgcaccgcaccctgagtatgatctggaattaatcacatcctg

SEQ ID NO: 120124 - DNA, 80 bp, synthetic construct
  source 1..80: mol_type = other DNA
ggttctcttcaggctcatcctgctggtgtgaaagcgcgcgtcttcgccctgagagtcagccaagtagcattttagcatca

SEQ ID NO: 120125 - DNA, 80 bp, synthetic construct
  source 1..80: mol_type = other DNA
cgttgtcgtcctcgcagccaaaatccccaaagttaaacacctccccggcgttgccgagttggctgactagggcctcggcc

SEQ ID NO: 120126 - DNA, 80 bp, synthetic construct
  source 1..80: mol_type = other DNA
ttatttttgtattttcaactttattgatacttttacagaattctaaccgttaatctccctccccccttccactttacctt

SEQ ID NO: 120127 - DNA, 80 bp, synthetic construct
  source 1..80: mol_type = other DNA
ctatgtggtgggggcgacagctgacaacttaaagtgcccctgccaagtgccagccccagagtttttcactgaggtggatg

SEQ ID NO: 120128 - DNA, 80 bp, synthetic construct
  source 1..80: mol_type = other DNA
tccagcgaggcgcaggggtgacactcgtgccagtctcctaagccctaggcccctgagtgttctcaaggtgtcgtcgggcg

SEQ ID NO: 120129 - DNA, 80 bp, synthetic construct
  source 1..80: mol_type = other DNA
ctatgcctctcagggttacaaggtccttgtgctcaacccgtcagttgccgcgacattgtcattcggctcatacctcagca

SEQ ID NO: 120130 - DNA, 80 bp, synthetic construct
  source 1..80: mol_type = other DNA
gatgccattatcctgcttacatgtttgctccatccatccttggggtttgacattaccaaggtgctgctggccatattggg

SEQ ID NO: 120131 - DNA, 80 bp, synthetic construct
  source 1..80: mol_type = other DNA
tccgcactggagtcaggaccatcaccacgggcggggctattacctattccacctatggtaagttcctcgccgatggtgga

SEQ ID NO: 120132 - DNA, 80 bp, synthetic construct
  source 1..80: mol_type = other DNA
gtcgccgtggccgcgtcgacgtcctgcaccacgtctggattcaccaactcgttggcgcgctgaagcaggtttttgccctc

SEQ ID NO: 120133 - DNA, 80 bp, synthetic construct
  source 1..80: mol_type = other DNA
ggcgacagcaggggagctctgttgagccctcggtctgtgtcctacttcaaaggttcgtccggcggcccactgctctgctc

SEQ ID NO: 120134 - DNA, 80 bp, synthetic construct
  source 1..80: mol_type = other DNA
atgcagtcatcatggcccaagatcgaacaattttgggccagacacatgtggaacttcatcagtggcatacagtacctggc

SEQ ID NO: 120135 - DNA, 80 bp, synthetic construct
  source 1..80: mol_type = other DNA
gatgaacgctacaggctacacaaagacctgcggtgcaccgccctgtatcatcggacctgagtccaacaagtcgctaatct

SEQ ID NO: 120136 - DNA, 80 bp, synthetic construct
  source 1..80: mol_type = other DNA
gcaggaagaagaagtgtctcaggtgacctaatattggaaatagggaaacttccacaacatttgacgctaagagcccagaa

SEQ ID NO: 120137 - DNA, 80 bp, synthetic construct
  source 1..80: mol_type = other DNA
gtatggtttgtggtaagtatgtgcaggcctgtctcctacggttgggagcttggactggcacctatgtctatgaccactta

SEQ ID NO: 120138 - DNA, 80 bp, synthetic construct
  source 1..80: mol_type = other DNA
ggatgatttaagtaacttgaaagtacaagaagcggacaacgaaagaccatggtcaccagagaaaacagaaatcgccagag

SEQ ID NO: 120139 - DNA, 80 bp, synthetic construct
  source 1..80: mol_type = other DNA
ggactatgccggggtgtacgtgttacgcgtatgggtcggtgacgcgccaaacgccagcctgtttgtcctggggatgacca

SEQ ID NO: 120140 - DNA, 80 bp, synthetic construct
  source 1..80: mol_type = other DNA
catatcgcttcccgacctccggtcccgatggccgtcccgcaatttcaccgccccagcaccgttaccaccgatagcgtccg

SEQ ID NO: 120141 - DNA, 80 bp, synthetic construct
  source 1..80: mol_type = other DNA
tcgtaagcctgccaggctgatagtctatccagacttgagcgtgcgggtttgcgagaagagagccctctatgatatcacgc

SEQ ID NO: 120142 - DNA, 80 bp, synthetic construct
  source 1..80: mol_type = other DNA
gggcgataatgccagactcgcagtactcaagcgaagcgtcgaggtcacacactttgcataccccgctgtcaacctgcccc

SEQ ID NO: 120143 - DNA, 80 bp, synthetic construct
  source 1..80: mol_type = other DNA
gctgccgctcgatcgttgttttcgggtgaacccggggcacccattcggccaaatcccccccgtataacatccgcgctagc

SEQ ID NO: 120144 - DNA, 80 bp, synthetic construct
  source 1..80: mol_type = other DNA
ctcggtagaatggaaaagaaaacgtggaaaggcccacattatgaggaagacgtaaatttgggaagtggcacacgagcagt

SEQ ID NO: 120145 - DNA, 80 bp, synthetic construct
  source 1..80: mol_type = other DNA
aggcaaaggctgtggcgtcgcaaagctccaccgacactgaatatcaatttaaacgccctcccggttctaccgaaatgaca

SEQ ID NO: 120146 - DNA, 80 bp, synthetic construct
  source 1..80: mol_type = other DNA
tcgcggttcaggaggtactcctcgcggtccttccagtaatcttcggccggaaagccacgttcgtctgcacggtaggaacc

SEQ ID NO: 120147 - DNA, 80 bp, synthetic construct
  source 1..80: mol_type = other DNA
tgtggacctacttgtcggcgccgcggccttctgctctgccatgtacatcggagatctttgtggcggtgttttccttgtgg

SEQ ID NO: 120148 - DNA, 80 bp, synthetic construct
  source 1..80: mol_type = other DNA
ctggctgaaggaacacggagttgaaaggctagggaggatgcttgtgagtggagatgattgcgtcgtcaaacccattgatg

SEQ ID NO: 120149 - DNA, 80 bp, synthetic construct
  source 1..80: mol_type = other DNA
aggggaaatacaagtgctttcaacagctacccaaaccttccttgccactaccatcaatggagttctatggacggtgtatc

SEQ ID NO: 120150 - DNA, 80 bp, synthetic construct
  source 1..80: mol_type = other DNA
cccgggtagaggcctttatccatgtgtgggtgcccccgttgcaggttaggggtggtcgtgatgctattatcatgctcaca

SEQ ID NO: 120151 - DNA, 80 bp, synthetic construct
  source 1..80: mol_type = other DNA
accgtctcgggatgcgccctccccccaaaaaacctgccgccagttccaccacccaggcggaagagggttgtacaactcga

SEQ ID NO: 120152 - DNA, 80 bp, synthetic construct
  source 1..80: mol_type = other DNA
tgaaattgcgtgactcctacacccaaatgtgtgaccaccggctaatgtcggctgccatcaaggacagcaaggcagttcat

SEQ ID NO: 120153 - DNA, 80 bp, synthetic construct
  source 1..80: mol_type = other DNA
gtcgaccctaatatcaggactggcgtcagaaccatcacaacgggaggccctattacgtattccacctatggcaaatttct

SEQ ID NO: 120154 - DNA, 80 bp, synthetic construct
  source 1..80: mol_type = other DNA
ctagagacaaccatgaggtccccggtgtttacggacaactcctccccaccagcagtgcctcagagcttccaggtggccca

SEQ ID NO: 120155 - DNA, 80 bp, synthetic construct
  source 1..80: mol_type = other DNA
ggctttggcattacccctgtactgtgaattacactatcttcaaagtcagaatgtacgtggggggggttgaacacagactc

SEQ ID NO: 120156 - DNA, 80 bp, synthetic construct
  source 1..80: mol_type = other DNA
ttccactgcactaagttctgatgaaaccatgaatatgattgacccctgggtattcaatatttccgtcccactcccccagg

SEQ ID NO: 120157 - DNA, 80 bp, synthetic construct
  source 1..80: mol_type = other DNA
gagtcagatgtcttcctgttgaacagcacccggccgccgaaaggcgcctggtttggatgcgcatggatgaactcaactgg

SEQ ID NO: 120158 - DNA, 80 bp, synthetic construct
  source 1..80: mol_type = other DNA
gacctgcatgtctgcggacttggaggtcataactagcacttgggtacttttgggcggggttttagccgctgtggcagcat

SEQ ID NO: 120159 - DNA, 80 bp, synthetic construct
  source 1..80: mol_type = other DNA
tgacggtggccagccgcccgtcgcccgcgctgcacgcggggcagcagcccccgatccccaggtagtagcccatgcccgag

SEQ ID NO: 120160 - DNA, 80 bp, synthetic construct
  source 1..80: mol_type = other DNA
agcgatggatcttggtcgaccgtaagcagtggtggtggcgaggaggacgtcgtgtgctgctcaatgtcatacacgtggac

SEQ ID NO: 120161 - DNA, 80 bp, synthetic construct
  source 1..80: mol_type = other DNA
gagaaaatgcatgcatatggagtcaggccagcaaaagctgccaccggatactgggtagacggtgctgcctgcgtctcagt

SEQ ID NO: 120162 - DNA, 80 bp, synthetic construct
  source 1..80: mol_type = other DNA
ccaacctcccccaagcggtgactcaggtcattccacaggagtggacaccgccgatgctgccggacagacacagtcgagtg

SEQ ID NO: 120163 - DNA, 80 bp, synthetic construct
  source 1..80: mol_type = other DNA
gattccttctaatgctactagcgttccaatttctattccttcacggaactgggccgcttttcggggctggagttttactc

SEQ ID NO: 120164 - DNA, 80 bp, synthetic construct
  source 1..80: mol_type = other DNA
gtcagtggcttcattgaacgacctaacaccagtgggcagattggtcaccgtcaacccttttgtttcagtgtccacggcca

SEQ ID NO: 120165 - DNA, 80 bp, synthetic construct
  source 1..80: mol_type = other DNA
tcgagagtgaaggagttctgtaatcaccaacaaaaaacaccaaagaggctattgaagtcaggccacttgtgccacggctt

SEQ ID NO: 120166 - DNA, 80 bp, synthetic construct
  source 1..80: mol_type = other DNA
gcataaattcgcgggctcggttccaaatattgcgcaggggtaaaaagcgttcaatagttgccacgctttgaccggtcagg

SEQ ID NO: 120167 - DNA, 80 bp, synthetic construct
  source 1..80: mol_type = other DNA
ggtaacaccatgacctgctttataaaagctgaggcagcctgccgagcggcaggccttaccaactatgacatgttggtctg

SEQ ID NO: 120168 - DNA, 80 bp, synthetic construct
  source 1..80: mol_type = other DNA
ggggacctttgcggcaaccgcaggtgccgcgcgagcggggtttttaccaccagcttcggaaacacactgacgtgcttcct

SEQ ID NO: 120169 - DNA, 80 bp, synthetic construct
  source 1..80: mol_type = other DNA
tcccggcggtgcggccgccgcccccctttcggaggacgcgatcccgtcgccgcgcgagcggacggaagactggccgccct

SEQ ID NO: 120170 - DNA, 80 bp, synthetic construct
  source 1..80: mol_type = other DNA
acaccggtttcgcccaatatagctgtgagccaacaaggtgcgcttaccaagggcctgcggacgcatattgataccatcat

SEQ ID NO: 120171 - DNA, 80 bp, synthetic construct
  source 1..80: mol_type = other DNA
acaccgtgcacttgcggcgcatcagacctctacctcgttacgagacatgccgatgtcatccctgttcgccggagaggcga

SEQ ID NO: 120172 - DNA, 80 bp, synthetic construct
  source 1..80: mol_type = other DNA
agtcgggtggcctcacgcagttgcgcgcgtgctcggagagcagggtgcggcggctccacgcggtggccgcggcccgcagc

SEQ ID NO: 120173 - DNA, 80 bp, synthetic construct
  source 1..80: mol_type = other DNA
ccccctagagtgcatcaaggggggcaggcatctgatcttctgccattccaagaagaagtgcgatgagctggccaaacaac

SEQ ID NO: 120174 - DNA, 80 bp, synthetic construct
  source 1..80: mol_type = other DNA
ccgatcggccctctccttggcggcgatgttcagttgcacgtactcgcgggccacgcaccgccactcggggaacacggcgg

SEQ ID NO: 120175 - DNA, 80 bp, synthetic construct
  source 1..80: mol_type = other DNA
ttctttcgtgcctcaccacccccgcctcggcagtccattacaaaaataccagcgggatgtaccatctcaccaacgactgc

SEQ ID NO: 120176 - DNA, 80 bp, synthetic construct
  source 1..80: mol_type = other DNA
cattctactgacagctgtcgctccttcaatgacaatgcgttgcataggaatatcaaatagagactttgtagaaggggttt

SEQ ID NO: 120177 - DNA, 80 bp, synthetic construct
  source 1..80: mol_type = other DNA
tgtcagagtttgggaaagcaaagggaagccgtgccatatggtatatgtggctgggagcgcggtatcttgagtttgaggcc

SEQ ID NO: 120178 - DNA, 80 bp, synthetic construct
  source 1..80: mol_type = other DNA
gagttgtcacccttgcttctcaccacaacgcagtggcagatcctcccttgttcctttaccaccctgcctgctctctccac

SEQ ID NO: 120179 - DNA, 80 bp, synthetic construct
  source 1..80: mol_type = other DNA
gggtcttccggcggccccctgctgtgccccaagggccacgccgtgggcatcttccgcgctgcagtgtgcacgcggtgcgt

SEQ ID NO: 120180 - DNA, 80 bp, synthetic construct
  source 1..80: mol_type = other DNA
gggaaaaaccaggagaatacttccgcaaatcatcaaggacgccatcgcgaagcgcttgcgaaccgcagtcctggctccta

SEQ ID NO: 120181 - DNA, 80 bp, synthetic construct
  source 1..80: mol_type = other DNA
ctggccaaacagttgacatctctgggcgtcaacgctgtagctttctacaggggtcttgatgtgtccgtgataccaactca

SEQ ID NO: 120182 - DNA, 80 bp, synthetic construct
  source 1..80: mol_type = other DNA
tctgacgccttggctgagctggcggctaagtcttttggccggtctgaaccagacaccgattccgggaccggcctgactta

SEQ ID NO: 120183 - DNA, 80 bp, synthetic construct
  source 1..80: mol_type = other DNA
gtggactccatttccgagacgacgtggggggagcggtggttgagcgcgccgccgggtgaacgctgattctcacgacagcg

SEQ ID NO: 120184 - DNA, 80 bp, synthetic construct
  source 1..80: mol_type = other DNA
gcatggtgatgatgacccatttctttggaatactccagtcccaagaaacgctccacaaggttcttgacttcgacatgtac

SEQ ID NO: 120185 - DNA, 80 bp, synthetic construct
  source 1..80: mol_type = other DNA
tccggggccaaaaagctggtggcgaacggcagatccagagcgctgacggcctcacgcagcaccaggtgccccgggtctcc

SEQ ID NO: 120186 - DNA, 80 bp, synthetic construct
  source 1..80: mol_type = other DNA
accaaccgaatacgttgtaaaagattatctccgcaacccctcctgcgttcactccgtacatacgttctccgtgacatatt

SEQ ID NO: 120187 - DNA, 80 bp, synthetic construct
  source 1..80: mol_type = other DNA
aagttcaacatcaaccagtgcatatttgtttagaaaaataaaatttttttcttttcagtatggtaactcctcttctcctg

SEQ ID NO: 120188 - DNA, 80 bp, synthetic construct
  source 1..80: mol_type = other DNA
tgtggccgcagcgggaggctcggcgaccgggtcgttcgcatccggaagcggaggccccgcgccgtccgcgcggcgcctcc

SEQ ID NO: 120189 - DNA, 80 bp, synthetic construct
  source 1..80: mol_type = other DNA
tacgagtcacttctgcgccgtagcgccattgcctcttcccccgaccgctgtataacgctggaaaagtccactcaaagcgt

SEQ ID NO: 120190 - DNA, 80 bp, synthetic construct
  source 1..80: mol_type = other DNA
agaacattgtggatgtccaatacctgtacggcgtgggctcatcgatcgtgacttgggcggtcaagtgggagtacgttgtg

SEQ ID NO: 120191 - DNA, 80 bp, synthetic construct
  source 1..80: mol_type = other DNA
gcgcgcgacgaggtcggcttcgggccccgggtcggtggcgcgcgcgtcggtgagggcgccccggtgacccggcggagccg

SEQ ID NO: 120192 - DNA, 80 bp, synthetic construct
  source 1..80: mol_type = other DNA
gggtcctcggggggaccggtgctctgccctagaggccatgctgtggagattttcctgggggctatctgcaccagaagggg

SEQ ID NO: 120193 - DNA, 80 bp, synthetic construct
  source 1..80: mol_type = other DNA
ggttcaattacagtccctcatccaaacatcactgagacagccttgccaaccaccggcgaagtgcccttctatgggaaggc

SEQ ID NO: 120194 - DNA, 80 bp, synthetic construct
  source 1..80: mol_type = other DNA
gccacgtgggtcccgggcacgaggaagaagcggtaaaaggagggtttgctgtggtcctttgggtccgccgggccggcgtc

SEQ ID NO: 120195 - DNA, 80 bp, synthetic construct
  source 1..80: mol_type = other DNA
gccgtacccggcgggcaccgcgcgctcgcccggtgcggcggcggcgacggcggcgaccccctcgtcatctgcgcctgcgc

SEQ ID NO: 120196 - DNA, 80 bp, synthetic construct
  source 1..80: mol_type = other DNA
gttttatagagatgcagctccccccaggagacaacatcatctatgttggggaactaaaacatcagtggtttcagaaaggg

SEQ ID NO: 120197 - DNA, 80 bp, synthetic construct
  source 1..80: mol_type = other DNA
aaaaaaacgcagtatctcccgcgaaggctacccgccgccccagcccccggccaaatgcggaaacggtcccgcgctctcgc

SEQ ID NO: 120198 - DNA, 80 bp, synthetic construct
  source 1..80: mol_type = other DNA
gctggacatggacagattgacaacttttcactaggagtcttgggaatggcattgttcctggaagagatgcttagaacccg

SEQ ID NO: 120199 - DNA, 80 bp, synthetic construct
  source 1..80: mol_type = other DNA
ggacgtgctggacaccgtgaaaatggatgtggagccccaggtcaaggtgcgccccatcaagcaggtggcgccgggcctgg

SEQ ID NO: 120200 - DNA, 80 bp, synthetic construct
  source 1..80: mol_type = other DNA
tgggcgggatactgtcttctgtggggaaggcaatccacacagtgctgggaggagcttttaacacccttttcggagtggtt

SEQ ID NO: 120201 - DNA, 80 bp, synthetic construct
  source 1..80: mol_type = other DNA
ttccaagagaaaatcatcaaaaacttaacttttacgtctcctggtcgcacggttgcttccgctgcctttattacctatat

SEQ ID NO: 120202 - DNA, 80 bp, synthetic construct
  source 1..80: mol_type = other DNA
caattagtagcaagaataggtgatggtttaaggtttgataatggaattataaaggtatatgccgccgggggaatgagaac

SEQ ID NO: 120203 - DNA, 80 bp, synthetic construct
  source 1..80: mol_type = other DNA
ctcctggtcgtgggcgaccgaggcatccttgtacataacgcgattttcggcgagcaggtgtttctgcccctcgaccattc

SEQ ID NO: 120204 - DNA, 80 bp, synthetic construct
  source 1..80: mol_type = other DNA
tgggggttttgaccctgatgatgacaatgggagtcggagcagactatggatgtgcagttgatccagagaggatggaaatc

SEQ ID NO: 120205 - DNA, 80 bp, synthetic construct
  source 1..80: mol_type = other DNA
caagagatgggtagcaatatcactcgggtagagtctgagacaaaggtggtgatccttgactcgtttgagcccctgagggc

SEQ ID NO: 120206 - DNA, 80 bp, synthetic construct
  source 1..80: mol_type = other DNA
ggcgattggcttcacaaccacttcaaacgtggcaacaccattgctagcccttctcactccaggactgaagtgtttacatt

SEQ ID NO: 120207 - DNA, 80 bp, synthetic construct
  source 1..80: mol_type = other DNA
gtagcatggatgattctccgagctatcagcttcacaactacctcgaatgtggttgttcccatgttggcgatgctgactcc

SEQ ID NO: 120208 - DNA, 80 bp, synthetic construct
  source 1..80: mol_type = other DNA
ccccccggggggcctcggggggccggtcggcccgaggggtcttgacttgtgtgggcgcggggagagcggggacgaccgag

SEQ ID NO: 120209 - DNA, 80 bp, synthetic construct
  source 1..80: mol_type = other DNA
agggcataggatggcatgggatatgatgatgaactggtctcccacggctggtttgttggtgtcgtacgccctccgcatcc

SEQ ID NO: 120210 - DNA, 80 bp, synthetic construct
  source 1..80: mol_type = other DNA
attcttgggacagtcaggcacaggaggaccaggacttggaagaatgggaggaggaaagcctagacgaggatccagaggag

SEQ ID NO: 120211 - DNA, 80 bp, synthetic construct
  source 1..80: mol_type = other DNA
atagatcccaacatccgtaccggggtaaggactatcaccaccggtggggcaatcacctactctacctatggtaagttcct

SEQ ID NO: 120212 - DNA, 80 bp, synthetic construct
  source 1..80: mol_type = other DNA
gcggaggggcctacgacatcataatatgtgatgagtgccattccaccgatccaactacaattttgggcattggcaccgta

SEQ ID NO: 120213 - DNA, 80 bp, synthetic construct
  source 1..80: mol_type = other DNA
gttcgggtgtgcgagaagagagcgctccatgacgccgtaaagaaactctctgaggccgtgatgggacccgcttatgggtt

SEQ ID NO: 120214 - DNA, 80 bp, synthetic construct
  source 1..80: mol_type = other DNA
cgattggacacaagtgcctttctgttcacaccatttccatgagctagtcatgaaagatggtcgcgtgctcgtggtcccat

SEQ ID NO: 120215 - DNA, 80 bp, synthetic construct
  source 1..80: mol_type = other DNA
gcagacattccaagtggcccatctacacgctcccactggcagcggcaagagcaccaaggtgccggctgcgtatgcagccc

SEQ ID NO: 120216 - DNA, 80 bp, synthetic construct
  source 1..80: mol_type = other DNA
cggtcccgctggcgatggcgtacgcccccccggccccatctgcgaccgggggtctacgaacggacttcgtgtggcaggag

SEQ ID NO: 120217 - DNA, 80 bp, synthetic construct
  source 1..80: mol_type = other DNA
ccgaaaggaggccatcaccgaggtggatcgagcaccagccaagtatgccagaaaggaaggtaatgtcacaggtggccact

SEQ ID NO: 120218 - DNA, 80 bp, synthetic construct
  source 1..80: mol_type = other DNA
agcgccggtcctcatatgatttccaaagtaaacggaattcgcgcccagcgtaaccaaattctgctggagcaggcggctct

SEQ ID NO: 120219 - DNA, 80 bp, synthetic construct
  source 1..80: mol_type = other DNA
ctcagattgtgcatctgcttcttccgcctcggcagcagccgtctccagggaatccaaaaccttggccatgcgcgttagtt

SEQ ID NO: 120220 - DNA, 80 bp, synthetic construct
  source 1..80: mol_type = other DNA
tgtcccatctcaatgccatgtcaaaggtgcgaaaagacatatctgaatggcagccatcaaaaggatgggatgactgggag

SEQ ID NO: 120221 - DNA, 80 bp, synthetic construct
  source 1..80: mol_type = other DNA
ggcggcctactgtctctcagttgggtgcgttgtagtgatcggtagaatctcgctgtccggcaagccagccgttattccgg

SEQ ID NO: 120222 - DNA, 80 bp, synthetic construct
  source 1..80: mol_type = other DNA
acctgggaggcaaatgagtctgatgtcttcctgatgagcagcttgcgaccaccggctggcgggtggtacgggtgcacgtg

SEQ ID NO: 120223 - DNA, 80 bp, synthetic construct
  source 1..80: mol_type = other DNA
gggctgggcgttgaaatgggagttcgtcatcctcattttcctcctcctagcggacgcacgtgtatgcgttgccctttggc

SEQ ID NO: 120224 - DNA, 80 bp, synthetic construct
  source 1..80: mol_type = other DNA
accctggagtgccgtggaagatatgggtcatccgtatgacggcattgggattcgcagcctggacaccatgggcaataata

SEQ ID NO: 120225 - DNA, 80 bp, synthetic construct
  source 1..80: mol_type = other DNA
gaccggcactatgcagtcgaagaggctggtgttgttctccgagtagcggacgacggacgccctcaggcgtcgcatggcca

SEQ ID NO: 120226 - DNA, 80 bp, synthetic construct
  source 1..80: mol_type = other DNA
cgggaaatccccccccattcttacccgccccccttttttccccttagcccgccccggatgtctgggtgtttccctgcgac

SEQ ID NO: 120227 - DNA, 80 bp, synthetic construct
  source 1..80: mol_type = other DNA
aggctaagctcacaaataccactactgaatcaagatgcccaacacagggagaacccagcctaccagaagaacaagacaaa

SEQ ID NO: 120228 - DNA, 80 bp, synthetic construct
  source 1..80: mol_type = other DNA
gtccgcgacactgcttgtctggctaagtcttacgcccagatgtggctgcttctgtacttccacagaagagacctgcggct

SEQ ID NO: 120229 - DNA, 80 bp, synthetic construct
  source 1..80: mol_type = other DNA
aaggtccgccgggccggtggtcgggttcgggaccgagaggctctggtcgtcgagggcgcgctggtacaccggatgccccg

SEQ ID NO: 120230 - DNA, 80 bp, synthetic construct
  source 1..80: mol_type = other DNA
ctaaatgaagatcactggttctccagagagaactccctgagtggagtggaaggagaaggactgcacaagctaggttacat

SEQ ID NO: 120231 - DNA, 80 bp, synthetic construct
  source 1..80: mol_type = other DNA
taggtatttctagcatagtttgccttttaggtttttcgttacaaaccaaacagctactgtttccggcatacgacatggat

SEQ ID NO: 120232 - DNA, 80 bp, synthetic construct
  source 1..80: mol_type = other DNA
gctccggtgggacgataaggcccgaccccaccgcccccaccataaactcccgaacgcgctccagcgcggcggtggcgccg

SEQ ID NO: 120233 - DNA, 80 bp, synthetic construct
  source 1..80: mol_type = other DNA
ggaaacagtccccggctcgatgtggcgctagatgagagtggtgatttctccctggtggaggatgacggtccccccatgag

SEQ ID NO: 120234 - DNA, 80 bp, synthetic construct
  source 1..80: mol_type = other DNA
caccgtagcgacagcgctggccgaattggccgagaagtccttcccgacgcagccggcctccacacctgactcggactcag

SEQ ID NO: 120235 - DNA, 80 bp, synthetic construct
  source 1..80: mol_type = other DNA
gggtacggggcaaaggaggtccggagctatgccagcaaggccattaaccacatcaactccgtgtgggaggacttgctgga

SEQ ID NO: 120236 - DNA, 80 bp, synthetic construct
  source 1..80: mol_type = other DNA
gtcatcgtcatcgtcgtcgtcgtcgttctcctcgccataatcggcgcgcatggagggggtccgcggcggagaaggcgagc

SEQ ID NO: 120237 - DNA, 80 bp, synthetic construct
  source 1..80: mol_type = other DNA
ggttcgtctgaactgtacaaccagcaggaagtaccttctctggactttccaaaacacctcactcgctgttgtcaacgccc

SEQ ID NO: 120238 - DNA, 80 bp, synthetic construct
  source 1..80: mol_type = other DNA
gctgcgacgcttgcgttcggccagtacatgagcaaagcctatgggattgatccgaacatccggacaggcgtcaggaccat

SEQ ID NO: 120239 - DNA, 80 bp, synthetic construct
  source 1..80: mol_type = other DNA
aggcagctaagcgcaggttagatcgagggtctccgccctccttggccagctcatcagcgagccagctttcggctccctct

SEQ ID NO: 120240 - DNA, 80 bp, synthetic construct
  source 1..80: mol_type = other DNA
tgctgctgctatttgccggcgtcgacgcggaaacccacgtcaccgggggaagtgccggccacaccacggctggctttgct

SEQ ID NO: 120241 - DNA, 80 bp, synthetic construct
  source 1..80: mol_type = other DNA
gcgcatcgccttctatcgccttcttgacgagttcttctgagtttaaacagaccacaacggtttccctctagcgggatcaa

SEQ ID NO: 120242 - DNA, 80 bp, synthetic construct
  source 1..80: mol_type = other DNA
gggagggttatttacgggggggtaggtcagggagtgggtcgtcaaactgccgctccttaaaacctcggagcccgtcgttc

SEQ ID NO: 120243 - DNA, 80 bp, synthetic construct
  source 1..80: mol_type = other DNA
ggaatttaacaagacacgccggcttgtggaggatagttcagacgggtgctccgggttttggagacactggtttggaactc

SEQ ID NO: 120244 - DNA, 80 bp, synthetic construct
  source 1..80: mol_type = other DNA
gtggatgaactccacaggcttcaccaagacatgcgggggccctccgtgcaacatcggcgggagcggcaaccgttccctaa

SEQ ID NO: 120245 - DNA, 80 bp, synthetic construct
  source 1..80: mol_type = other DNA
gaccgagaaaaatgagacacctgcgcctcctgccttcaactgtgcccggtgagctggctgtgcttatgctggaggacttt

SEQ ID NO: 120246 - DNA, 80 bp, synthetic construct
  source 1..80: mol_type = other DNA
actggttcagcagagagaattcactcagcggagtggaaggagaaggactccacaaacttggatatatactcagagacata

SEQ ID NO: 120247 - DNA, 80 bp, synthetic construct
  source 1..80: mol_type = other DNA
gtagtacaataggccgtgttctggaaaagaccaggaggggcatagagagactcacagtggtgggagagcacgcttgggac

SEQ ID NO: 120248 - DNA, 80 bp, synthetic construct
  source 1..80: mol_type = other DNA
acggaccgatcctccagatgtacaccaacgtggatcaggatctcgtaggttggtcggcccctcccgggacacgttccttg

SEQ ID NO: 120249 - DNA, 80 bp, synthetic construct
  source 1..80: mol_type = other DNA
gcatgaaggggacgagctgcttgccgaaggaccccatccaggtgtaggtttccacatcgtaggtgaggaagagcctttcg

SEQ ID NO: 120250 - DNA, 80 bp, synthetic construct
  source 1..80: mol_type = other DNA
gagaccttccggtgtggctgagttataaggtagcttctgctggcatctcttacaaagatcgggaatggtgcttcactggg

SEQ ID NO: 120251 - DNA, 80 bp, synthetic construct
  source 1..80: mol_type = other DNA
ccttcgtagtggggtctcaactcccctgcgagcctgaaccagacgtgcaagttttgacatccatgctgacggatccgtcc

SEQ ID NO: 120252 - DNA, 80 bp, synthetic construct
  source 1..80: mol_type = other DNA
aggatacacaggtacgccccagagtgcaagcccctcctcagggatgaagtaacattcagtgttggactatccacctatgt

SEQ ID NO: 120253 - DNA, 80 bp, synthetic construct
  source 1..80: mol_type = other DNA
aagtactcttggaaagcatggggcaaagcgaaaatgctctccacagagcttcataaccacacctttctcattgatggccc

SEQ ID NO: 120254 - DNA, 80 bp, synthetic construct
  source 1..80: mol_type = other DNA
tgctaacctcgatgttgagagacccttcccacatcaccgccgagacggcagcgcgccgcctcgcgcgcgggtcccctcca

SEQ ID NO: 120255 - DNA, 80 bp, synthetic construct
  source 1..80: mol_type = other DNA
aaggtggagttgggggaagctgccgcgatctttatgaccgctacgcctccaggtacccatgatccatttcccgaatcaaa

SEQ ID NO: 120256 - DNA, 80 bp, synthetic construct
  source 1..80: mol_type = other DNA
atttaacacctataaaaggagtggaattatggaggtggatagatccgaagccaaagagggactgaaaagaggagaaacaa

SEQ ID NO: 120257 - DNA, 80 bp, synthetic construct
  source 1..80: mol_type = other DNA
cagctgatcatgaaggatgggagggaaatagtggtgccatgccgcaaccaagatgaacttgtggtcagggctagagtatc

SEQ ID NO: 120258 - DNA, 80 bp, synthetic construct
  source 1..80: mol_type = other DNA
tcgcacagtgtggagagggccaaagtatgaggaagatgtcaacctagggagcggaacaagagccgtgggaaagggagaag

SEQ ID NO: 120259 - DNA, 80 bp, synthetic construct
  source 1..80: mol_type = other DNA
acacgacgcaaccggcaagagggtctactatctgacccgtgaccctgagactcccctcgcgcgagccgcgtgggagacag

SEQ ID NO: 120260 - DNA, 80 bp, synthetic construct
  source 1..80: mol_type = other DNA
cctctttaactgggcagtgcgtaccaaaaccagactcactccattgccggctgcgggcctactggatctttccagttggt

SEQ ID NO: 120261 - DNA, 80 bp, synthetic construct
  source 1..80: mol_type = other DNA
ggtggcaggctgccctttgcctccttccaagacaccgcccatacctcctcccaggaggaggcgtgttgtgcatctggacc

SEQ ID NO: 120262 - DNA, 80 bp, synthetic construct
  source 1..80: mol_type = other DNA
acacacattgatgcccacttcctctcacagactaaacagggaggggagaacttcgcgtacttggtggcctaccaggctac

SEQ ID NO: 120263 - DNA, 80 bp, synthetic construct
  source 1..80: mol_type = other DNA
gatggtgttccgacgcattttccgattcgtacatcgcttataatccagcccttctgctaaaaaacgatttgttattttca

SEQ ID NO: 120264 - DNA, 80 bp, synthetic construct
  source 1..80: mol_type = other DNA
ttacgtgacggagtctgacgcttcgcagcgcgtaacgcagatgctgagttcactcacaattaccagcttacttaggagac

SEQ ID NO: 120265 - DNA, 80 bp, synthetic construct
  source 1..80: mol_type = other DNA
ttgcaaggctgggcccacaatgctctgcgcgacctaacagtggcgcttgagccagtctccttttccccgatggagataaa

SEQ ID NO: 120266 - DNA, 80 bp, synthetic construct
  source 1..80: mol_type = other DNA
agccctcgcagcctactgtttatcagtcggttgtgttgtcatcgtagggcacatcgagctagggggcagaccagcgctcg

SEQ ID NO: 120267 - DNA, 80 bp, synthetic construct
  source 1..80: mol_type = other DNA
gtgtttaaagagaaggtggacacgaaagctcctgaaccgccagaaggagtgaagtatgtgctcaatgaaaccaccaactg

SEQ ID NO: 120268 - DNA, 80 bp, synthetic construct
  source 1..80: mol_type = other DNA
ggtgccaagaaagcggggccgagattggtgcgctggggctgctcggcgcggaagacgatctggcgaaagatggcatgcga

SEQ ID NO: 120269 - DNA, 80 bp, synthetic construct
  source 1..80: mol_type = other DNA
aaccccgcctggtagcatcactgtcccacactctaacatcgaggaggtagcccttaccggtgaaggggaaatcccctttt

SEQ ID NO: 120270 - DNA, 80 bp, synthetic construct
  source 1..80: mol_type = other DNA
gtaataggcccattatacttaatacaggctgccatcactaccaccccctactttgtgcgcgcacatgtactggtccgcct

SEQ ID NO: 120271 - DNA, 80 bp, synthetic construct
  source 1..80: mol_type = other DNA
aggccctggggaaggagcagtgcagtggatgaacagactcatagcgttcgcatctcgggggaaccatgtatcaccaacac

SEQ ID NO: 120272 - DNA, 80 bp, synthetic construct
  source 1..80: mol_type = other DNA
atctcttggcctcaatgctgtagcctattatagagggctcgacgtctcagtaataccattatctggtgatgtcgtggttt

SEQ ID NO: 120273 - DNA, 80 bp, synthetic construct
  source 1..80: mol_type = other DNA
tctgaccgatgatccgcgctggctaccggcgatgagcgaacgcgtaacgcgaatggtgcagcgcgatcgtaatcacccga

SEQ ID NO: 120274 - DNA, 80 bp, synthetic construct
  source 1..80: mol_type = other DNA
ttagcagggaattacccaatgtctaaaaaaccaggaaaacccggtagaaaccgggttgtcaatatgctaaaacgcggcgt

SEQ ID NO: 120275 - DNA, 80 bp, synthetic construct
  source 1..80: mol_type = other DNA
cacctcccaattgaactccatccaccactggcttctcactctctctgctctctcttcggttacaaactcgtcccctgaca

SEQ ID NO: 120276 - DNA, 80 bp, synthetic construct
  source 1..80: mol_type = other DNA
acacttcctcaggattacaagctcctcccgcgtcagaaccatatcccagggaacaacccattcctgaatcagcgtaaatc

SEQ ID NO: 120277 - DNA, 80 bp, synthetic construct
  source 1..80: mol_type = other DNA
tcccgcaccgcgggcaggaggcatccggctgccgccgaggccacgccgggccaggctcgcgggtggaggacgaccctggc

SEQ ID NO: 120278 - DNA, 80 bp, synthetic construct
  source 1..80: mol_type = other DNA
tccctatttgggctcggccagactataacccacccttggtcgaaacgtggaaggccccagactacgaccctcccgtggtg

SEQ ID NO: 120279 - DNA, 80 bp, synthetic construct
  source 1..80: mol_type = other DNA
cttacgctagtcaagggtacaaagtgctggtcctgaacccctccgttgcagcaactctgagtttcggggtatacatgagc

SEQ ID NO: 120280 - DNA, 80 bp, synthetic construct
  source 1..80: mol_type = other DNA
ccccgtcggcgggtcccgtgtctgcaccatccgctgtgcctctgccagccgcccgtcccgtggccgtggccactgccagg

SEQ ID NO: 120281 - DNA, 80 bp, synthetic construct
  source 1..80: mol_type = other DNA
aaaagaagcacaggagatccgtggagccgacttcaagcccaatcctcaagacttggaaatcgtgcccgtggaaaaagaca

SEQ ID NO: 120282 - DNA, 80 bp, synthetic construct
  source 1..80: mol_type = other DNA
ataaccagcttgcttagaagactccataattggatcactgaggactgtcccatcccatgcagcggctcgtggctccgcga

SEQ ID NO: 120283 - DNA, 80 bp, synthetic construct
  source 1..80: mol_type = other DNA
tacatcgttcgatgggagtgggtattgctcttgttcctgctcttagcggacgccaaagtttgcgcctgcttatggatgct

SEQ ID NO: 120284 - DNA, 80 bp, synthetic construct
  source 1..80: mol_type = other DNA
gctagcagactcaaccacaccaataccgacaacggtcatggcaaaaaacgaggttttcgccgttaacccgagtaagggtg

SEQ ID NO: 120285 - DNA, 80 bp, synthetic construct
  source 1..80: mol_type = other DNA
cccagttgctgcatcgttggcgaatagagctggcccagcgtcgacataacctcgtccagaacgaggacgtcgtagttgtt

SEQ ID NO: 120286 - DNA, 80 bp, synthetic construct
  source 1..80: mol_type = other DNA
ccctgttcaaagtcaggatgtacttgggaggagttgagcacaggctggaagttgcttgcaactggacgcggggcgagcgt

SEQ ID NO: 120287 - DNA, 80 bp, synthetic construct
  source 1..80: mol_type = other DNA
gagctgcaatcactggtcatgtcaagaatgggtcgatgaggattgtgggttcaaagtggtgcagcaatgtctggcatggc

SEQ ID NO: 120288 - DNA, 80 bp, synthetic construct
  source 1..80: mol_type = other DNA
gccggctcagcgccatacgtactacagcgagtgcgacgaatttcgatttatcgccccgcgttcgctggacgaggacgccc

SEQ ID NO: 120289 - DNA, 80 bp, synthetic construct
  source 1..80: mol_type = other DNA
ctgctcggcaccactggtggcgtcctcgatgtttgtggcggcgtcataagacaccatcatttattacttcggccagaaga

SEQ ID NO: 120290 - DNA, 80 bp, synthetic construct
  source 1..80: mol_type = other DNA
ccccgtgggcgggcccgggcggcgtggtgcgggtctctccggcgcacataaaggcccggcgcgaccgacgcccgcagacg

SEQ ID NO: 120291 - DNA, 80 bp, synthetic construct
  source 1..80: mol_type = other DNA
cctgtctgctgatgtacctggagaactgcccccgaagccacgccaccccgtcgacctttgccaaggttctggcgtggctc

SEQ ID NO: 120292 - DNA, 80 bp, synthetic construct
  source 1..80: mol_type = other DNA
catcgcaccttctctgtggtcgtcgacgattgcagcatgcgggcggtgctccggcgactgcaggtcggcggtggcaccct

SEQ ID NO: 120293 - DNA, 80 bp, synthetic construct
  source 1..80: mol_type = other DNA
agtcctatataagtggtaacacctgggcacttaggcacaaacgttaggaaattcctaatggatgtgtggagtattcttgg

SEQ ID NO: 120294 - DNA, 80 bp, synthetic construct
  source 1..80: mol_type = other DNA
ttttccatagagactaccaccgtccctcaggatgcggtatcacggagccaacgacgaggccgcacggggcggggtaaacc

SEQ ID NO: 120295 - DNA, 80 bp, synthetic construct
  source 1..80: mol_type = other DNA
gtgcgctcgggcgaaggctccccctccctcatgggacactatgtggaaatgtctccaacggctgaagcccatgctaacag

SEQ ID NO: 120296 - DNA, 80 bp, synthetic construct
  source 1..80: mol_type = other DNA
gctaaggttctgattgtgatgctactctttgccggcgttgacggggttacccgtacgacgggggaggtagcagcccgcac

SEQ ID NO: 120297 - DNA, 80 bp, synthetic construct
  source 1..80: mol_type = other DNA
tcgcgacgagggcgacgtagagctcggccgccgcatccatcgaggccccccatctcgcctggcggtggcgcacaaagcgt

SEQ ID NO: 120298 - DNA, 80 bp, synthetic construct
  source 1..80: mol_type = other DNA
gttggtgtgcggagacgacttggtggtcatctgcgaaagcgccggcgtacaggaggatgctgcagcgctgcgagctttca

SEQ ID NO: 120299 - DNA, 80 bp, synthetic construct
  source 1..80: mol_type = other DNA
tggacaaaacagatccggcagactatagaggaggcacccccatggttctgaagaaaactggaaaagagagcaaggtgtct

SEQ ID NO: 120300 - DNA, 80 bp, synthetic construct
  source 1..80: mol_type = other DNA
tcccggagtcaacgccgtggccgcacgggtaggggtaggctcggtacataccgctatgtcacccctggtgaacgcccgtc

SEQ ID NO: 120301 - DNA, 80 bp, synthetic construct
  source 1..80: mol_type = other DNA
gattccccagagcagccccgaggaggccgtgctcctggacaagcagcaggccgccatcaaggtcgtgtgtaactcggtgt

SEQ ID NO: 120302 - DNA, 80 bp, synthetic construct
  source 1..80: mol_type = other DNA
ctcctccaacgtctccgtggcccatgacgctgcagggaagcggtactactacctcacacgtgatccagaaataccgcttg

SEQ ID NO: 120303 - DNA, 80 bp, synthetic construct
  source 1..80: mol_type = other DNA
agcctagcttctgttgccatgtgcagaacgcccttttcattggctgaaggcattgtcctagcatcagctgccctagggcc

SEQ ID NO: 120304 - DNA, 80 bp, synthetic construct
  source 1..80: mol_type = other DNA
gttagcagcctactgtttgtcagtgggtagcgtcgtcatcgtgggccacgtggtgctaggggggaagcctgctcttgtcc

SEQ ID NO: 120305 - DNA, 80 bp, synthetic construct
  source 1..80: mol_type = other DNA
aattggggcagtcactcttgattttccgactggaacgtcggtctcaccgatagttgacaaaaacggagatgtcataggac

SEQ ID NO: 120306 - DNA, 80 bp, synthetic construct
  source 1..80: mol_type = other DNA
gcagcattgtctgtctggtcgtcaccttcctgcagctcatcgactggtgctgcgcgcgctacaattatctccaccacagt

SEQ ID NO: 120307 - DNA, 80 bp, synthetic construct
  source 1..80: mol_type = other DNA
aacgaaggggaagaacaggcagagggaaacatggggtatacaggtacgtctcgctggaggaacggccgtcggtgttgttc

SEQ ID NO: 120308 - DNA, 80 bp, synthetic construct
  source 1..80: mol_type = other DNA
agaactaaaaaatgaaaatggaactaataaaggtgttggtttgcgcgttagactcgctgatgacggtggattaacatttg

SEQ ID NO: 120309 - DNA, 80 bp, synthetic construct
  source 1..80: mol_type = other DNA
tttcttcacatgaatacatatctcttagttcgtccataaggtctaagttgggtctaagtaactcacccgaggtggtgacc

SEQ ID NO: 120310 - DNA, 80 bp, synthetic construct
  source 1..80: mol_type = other DNA
tttggagttcctcatgccgtgaagatggatgtttacaaccttggggaccagactggggtgctattaaaatcactcgccgg

SEQ ID NO: 120311 - DNA, 80 bp, synthetic construct
  source 1..80: mol_type = other DNA
ggggtcagtgtgcataatcggcagggtggtactctccggtaaaccagccgttataccggatagagaggcaatgtaccaac

SEQ ID NO: 120312 - DNA, 80 bp, synthetic construct
  source 1..80: mol_type = other DNA
acgaacgcgggtctggcgacccagctgcaggcgcgcgaccgcgagctgcggcgcgcccaggcggtggcgctggagcggga

SEQ ID NO: 120313 - DNA, 80 bp, synthetic construct
  source 1..80: mol_type = other DNA
gcgcctacaaatctgatatgattgatccttttcagctgggccttctggtagtgttcttggccacccaggaggtcctccgc

SEQ ID NO: 120314 - DNA, 80 bp, synthetic construct
  source 1..80: mol_type = other DNA
tgcaccttcctggatgtgttccttgtgttagggtcggtaatcagtccagatgctggttgtcggcttcgcccacgctggcc

SEQ ID NO: 120315 - DNA, 80 bp, synthetic construct
  source 1..80: mol_type = other DNA
ccagcatcatccaggcccacaacctgtgcttcagtacgctctccctgcggcccgaggccgtcgcgcacctggaggcggac

SEQ ID NO: 120316 - DNA, 80 bp, synthetic construct
  source 1..80: mol_type = other DNA
ttgttccaccccctgcgattcgtcgtggctgagggaggtctgggagtgggtctgcactgtactgactgacttcaaaacgt

SEQ ID NO: 120317 - DNA, 80 bp, synthetic construct
  source 1..80: mol_type = other DNA
tacgggatgtggcctctccttctgctcctgttggcgttgccccaacgggcgtacgcactggacacggagatggccgcgtc

SEQ ID NO: 120318 - DNA, 80 bp, synthetic construct
  source 1..80: mol_type = other DNA
ttgggcatcaacgccgtggcttactaccgcggccttgacgtgtccgtcatcccgaccagcggcgatgttgtcgttgtggc

SEQ ID NO: 120319 - DNA, 80 bp, synthetic construct
  source 1..80: mol_type = other DNA
ggtatagaccctaacatccgtactggggttaggactatcaccacgggcggtgcaattacctactctacatatggcaagtt

SEQ ID NO: 120320 - DNA, 80 bp, synthetic construct
  source 1..80: mol_type = other DNA
tcatacggaggaggatggagattgagccaaaagggagaggaggtgcaggttattgccgtagagcctgggaagaacccaaa

SEQ ID NO: 120321 - DNA, 80 bp, synthetic construct
  source 1..80: mol_type = other DNA
acacgtggagcgggaccttccccattaacgcctacaccacggggccctgcacaccttctccagcgccgaactacaaggtc

SEQ ID NO: 120322 - DNA, 80 bp, synthetic construct
  source 1..80: mol_type = other DNA
gtccgtcataccaacaacaggggacgtcgtggtttgcgctactgacgccctcatgactggattcaccggagacttcgatt

SEQ ID NO: 120323 - DNA, 80 bp, synthetic construct
  source 1..80: mol_type = other DNA
cgcagcacgcggatctcacggcctgcgtcatcacccagggcgcgatcctcgcccaattgcacgccatccaaaaatcccgc

SEQ ID NO: 120324 - DNA, 80 bp, synthetic construct
  source 1..80: mol_type = other DNA
gacgaggccaatggagatctggtcaccttcaggagcccgaatggggctgaaagaacactgaggccagtgtggagggatgc

SEQ ID NO: 120325 - DNA, 80 bp, synthetic construct
  source 1..80: mol_type = other DNA
ttcaccaagacctgcggtgcgccgccttgccgcatcagggacgatttcaacgccagtgaggacctattgtgccccacaga

SEQ ID NO: 120326 - DNA, 80 bp, synthetic construct
  source 1..80: mol_type = other DNA
gccccatccctaaagggtacatgcacaacagctggggtacaccccgacgcagagttgattgaggctaacctattgtggag

SEQ ID NO: 120327 - DNA, 80 bp, synthetic construct
  source 1..80: mol_type = other DNA
cgtgtcaaactagttgaggcgcataaccgcgcggggttatttaaagaacggaccctcgatctaatccgtggtggtgcgag

SEQ ID NO: 120328 - DNA, 80 bp, synthetic construct
  source 1..80: mol_type = other DNA
ctgggaggacttgttggaggacaatagtaccccaattcccaccaccattatggcgaagaacgaggtgtttagcgtgaacc

SEQ ID NO: 120329 - DNA, 80 bp, synthetic construct
  source 1..80: mol_type = other DNA
gggtcctttatgtcgcccacagacagggtatacaggccgctgtccgtctctcggaccccgtaaataaccagactccggtt

SEQ ID NO: 120330 - DNA, 80 bp, synthetic construct
  source 1..80: mol_type = other DNA
caaggttgaattgggcgaagccgccgcgattttcatgacggcaacgccacccgggacttctgacccctttccagagtcca

SEQ ID NO: 120331 - DNA, 80 bp, synthetic construct
  source 1..80: mol_type = other DNA
tgtagcagcttggtacatcaagggtcgggcagttccactggccacctattctcttcttggccaatggcccttcttcttgc

SEQ ID NO: 120332 - DNA, 80 bp, synthetic construct
  source 1..80: mol_type = other DNA
acggacagaacttacattatgataatctgcatgatcacaatcgggcaacaggggatgttgttcagtcagtgaagccctgg

SEQ ID NO: 120333 - DNA, 80 bp, synthetic construct
  source 1..80: mol_type = other DNA
gaaacccccaacctagctgagagggctcttgactggttagaaaaatatggcgccgaaaggctgaaacgaatggcaatcag

SEQ ID NO: 120334 - DNA, 80 bp, synthetic construct
  source 1..80: mol_type = other DNA
tgagggcacacatactcctcaagctctgcagcgcggtgcggggggttgtgcacggcaagtactgccaaatggctctactt

SEQ ID NO: 120335 - DNA, 80 bp, synthetic construct
  source 1..80: mol_type = other DNA
cgtggcccggcacggacgacgaggacgatgacctggccgacggtgagggcgcgcggtggtcgggcactgggcgcgtgtcg

SEQ ID NO: 120336 - DNA, 80 bp, synthetic construct
  source 1..80: mol_type = other DNA
tgttcatccatgtatgtgggtgatttgtgcgggggtttgtttatgatagggcagcttttcacctttgcacctcaacacca

SEQ ID NO: 120337 - DNA, 80 bp, synthetic construct
  source 1..80: mol_type = other DNA
ccccaacagcagcattgtgtacgaggcagagacacttattttacacttgcccgggtgcataccgtgtgttaggactgaga

SEQ ID NO: 120338 - DNA, 80 bp, synthetic construct
  source 1..80: mol_type = other DNA
acctaaacacccctggtctccctgtatgtcaagatcatctggagttctgggaagcagtcttcactggacttacacacata

SEQ ID NO: 120339 - DNA, 80 bp, synthetic construct
  source 1..80: mol_type = other DNA
aaatcggggctgtcgctcttgactatccgagtggcacttcaggatctcctattgttaacaggaacggagaggtgattggg

SEQ ID NO: 120340 - DNA, 80 bp, synthetic construct
  source 1..80: mol_type = other DNA
tggcacatcaacaggaccgccctcaactgcaatgacagcctgaacacagggttcatagccggcctcttttatgcccacaa

SEQ ID NO: 120341 - DNA, 80 bp, synthetic construct
  source 1..80: mol_type = other DNA
gtaacgtcaccttcccgcgccgccccgtgaccgttgaaccccaagccaatccccttccgctctccattttcaaaccacct

SEQ ID NO: 120342 - DNA, 80 bp, synthetic construct
  source 1..80: mol_type = other DNA
gcgcgggaggaggcggtggtgcggggagcggtagcatcggggggcgcccgggaactttgggggggcggcaagcgccggac

SEQ ID NO: 120343 - DNA, 80 bp, synthetic construct
  source 1..80: mol_type = other DNA
gcctggcttgaggaacgaggttatgcaactctcaagggtgaggtcgtggaccttggatgtggaagaggcggctggtcata

SEQ ID NO: 120344 - DNA, 80 bp, synthetic construct
  source 1..80: mol_type = other DNA
gctccgagatgtatgggactggatttgcaccatcttggctgacttcaagaactggctatctgccaagctgttcccaaaga

SEQ ID NO: 120345 - DNA, 80 bp, synthetic construct
  source 1..80: mol_type = other DNA
tgtgccagagctaaggccccccccccctcctgggacacgatgtggaagtgcctaatcaggctcaagcctatgctcacggg

SEQ ID NO: 120346 - DNA, 80 bp, synthetic construct
  source 1..80: mol_type = other DNA
acgggtaagagggtatactacctgacccgagaccctgagacacccttggcgcgagccgcatgggagacagtccgacacac

SEQ ID NO: 120347 - DNA, 80 bp, synthetic construct
  source 1..80: mol_type = other DNA
ggatgaccacagaggacatgctggaagtgtggaatcgagtctggattcttgacaatccttttatgagtgacaaagggaaa

SEQ ID NO: 120348 - DNA, 80 bp, synthetic construct
  source 1..80: mol_type = other DNA
ctgtttggaaaagggagcattgacacatgcgctaagttcacatgcaaaaacaaggcaacagggaagacgatcttgagaga

SEQ ID NO: 120349 - DNA, 80 bp, synthetic construct
  source 1..80: mol_type = other DNA
tttcctctcccagactaagcaggcgggggagaactttccctacctcgtagcctaccaggctaccgtgtgtgcaagggcga

SEQ ID NO: 120350 - DNA, 80 bp, synthetic construct
  source 1..80: mol_type = other DNA
ttgatggcgagacagcagggtccctaggttggggcgccctgcttctggtaaccatcttgacattgtctccctggtacaaa

SEQ ID NO: 120351 - DNA, 80 bp, synthetic construct
  source 1..80: mol_type = other DNA
tacggggccggagtttctggtgctctggtcgccttcaaaatcatgggcggagaggccccctctacagaggacatggtaaa

SEQ ID NO: 120352 - DNA, 80 bp, synthetic construct
  source 1..80: mol_type = other DNA
tggcccgagcaatcattgaactcacataccgccacaaggtggtgaaagtcatgaggcctgcagctaatggcaagactgtg

SEQ ID NO: 120353 - DNA, 80 bp, synthetic construct
  source 1..80: mol_type = other DNA
catcaggatacaccgccatgctccagcttgcaaacccctgctgcgagaggaggtgacgttctcagtaggactcaactcat

SEQ ID NO: 120354 - DNA, 80 bp, synthetic construct
  source 1..80: mol_type = other DNA
ggcggggtaggactggtagaggtaggagaggcatctacaggtttgtgactccaggagaacggccctcgggcatgttcgat

SEQ ID NO: 120355 - DNA, 80 bp, synthetic construct
  source 1..80: mol_type = other DNA
gccactagcatactgggcataggtactgtattggaccaggcagagaccgctggagctcggctggttgttttagcaactgc

SEQ ID NO: 120356 - DNA, 80 bp, synthetic construct
  source 1..80: mol_type = other DNA
acatgggcccttaggcacccagggttcaccatactagccctatttcttgcccattacataggcatgctggtcaccccatc

SEQ ID NO: 120357 - DNA, 80 bp, synthetic construct
  source 1..80: mol_type = other DNA
cccgagacgtgtgtgattttgtttactttgagctccccgaggaacatccccagggacccgctcacggtgtaagggtaaca

SEQ ID NO: 120358 - DNA, 80 bp, synthetic construct
  source 1..80: mol_type = other DNA
tttcacagatccagccagtatagcggctagagggtacatatcaactcgtgtaggaatgggagaggcagctgcaattttca

SEQ ID NO: 120359 - DNA, 80 bp, synthetic construct
  source 1..80: mol_type = other DNA
gtgtataactcaaataaacagcacttttattttacatgcactggagtatatgcaagttatttaaaagtcaaaggggttct

SEQ ID NO: 120360 - DNA, 80 bp, synthetic construct
  source 1..80: mol_type = other DNA
ttcgaccaggggtggggtcccatcacctacactgagcctaccgcctcagaccagaagccctattgctggcactacgcacc

SEQ ID NO: 120361 - DNA, 80 bp, synthetic construct
  source 1..80: mol_type = other DNA
cagtacatctgccggagagacatggttgatagagggtggggcaacggctgtggcttgttcgggaaaggaggagttgtgac

SEQ ID NO: 120362 - DNA, 80 bp, synthetic construct
  source 1..80: mol_type = other DNA
acctccatgcagaagactatacctctggtggccctcacactcacatcttacctgggcttgacacaaccttttttgggcct

SEQ ID NO: 120363 - DNA, 80 bp, synthetic construct
  source 1..80: mol_type = other DNA
tatcaacaggacagccctcaattgcaatgacagcttgaacaccggctttattgccgctctgttctataccaacaggttca

SEQ ID NO: 120364 - DNA, 80 bp, synthetic construct
  source 1..80: mol_type = other DNA
aagtgaagaacatcagtaccggctacatggtgactaacgactgcaccaatgacagcattacctggcagctccaggctgct

SEQ ID NO: 120365 - DNA, 80 bp, synthetic construct
  source 1..80: mol_type = other DNA
aggcagggtccatactacggaagccgtcgttgtattcgagacctgcctgtgcaacgcacgtcggggttgcctgtgtccgg

SEQ ID NO: 120366 - DNA, 80 bp, synthetic construct
  source 1..80: mol_type = other DNA
cagttcaaggaaaaagtccttgggctgctgcaacgagccacccaacagcaagctgtcattgagcctatagtaacttccaa

SEQ ID NO: 120367 - DNA, 80 bp, synthetic construct
  source 1..80: mol_type = other DNA
taagggtgtggtgtttagcccatatttgacaacccgtcttcccgcttgggcaggagtacgtcagaatgtgatgggctcca

SEQ ID NO: 120368 - DNA, 80 bp, synthetic construct
  source 1..80: mol_type = other DNA
attaagaccaaactcaaactcactccattgcgtggcgcgtcccaactcgacttgtcggggtggttcacgtcaggctactg

SEQ ID NO: 120369 - DNA, 80 bp, synthetic construct
  source 1..80: mol_type = other DNA
gcgacgtgtgcggcccagtgtattgtttcaccccgagcccagtggtggtgggtacaacagatcgccagggcgtgcccaca

SEQ ID NO: 120370 - DNA, 80 bp, synthetic construct
  source 1..80: mol_type = other DNA
ctgggctaaggtcatcttggtcctcttcttgtttgcgggggttgatgcacacaccaccattggccacgggataactcact

SEQ ID NO: 120371 - DNA, 80 bp, synthetic construct
  source 1..80: mol_type = other DNA
cggcaccatctggttcatccttttcttcatagcggcttggtatttcaagggtagggtggtccccttgacaacttactccc

SEQ ID NO: 120372 - DNA, 80 bp, synthetic construct
  source 1..80: mol_type = other DNA
gatcccaacattcgcacagggacacgcaccatcacaactggtgctaaactcacctactccacatatggcaagttcctcgc

SEQ ID NO: 120373 - DNA, 80 bp, synthetic construct
  source 1..80: mol_type = other DNA
gttgaggacgtacgtgatgtcgttccgggccacgactagctgttgcttgctgtgcacctcacagcgcacgtgccccgcgt

SEQ ID NO: 120374 - DNA, 80 bp, synthetic construct
  source 1..80: mol_type = other DNA
gggtgggacatttatcacagcgtgtcccgggctcgaccccgcatgttcctctggtgcctactcctactttccgtgggagt

SEQ ID NO: 120375 - DNA, 80 bp, synthetic construct
  source 1..80: mol_type = other DNA
cgctaagaactgcgagttgtataacccataagcgcaaatatcatctcgcagggtacaccatggtaaatctaaataactta

SEQ ID NO: 120376 - DNA, 80 bp, synthetic construct
  source 1..80: mol_type = other DNA
ccgcatatgccagtcaggggtataaagtacttgtactaaatccctctgtcgcggccacactcggttttggggcctacatg

SEQ ID NO: 120377 - DNA, 80 bp, synthetic construct
  source 1..80: mol_type = other DNA
tcgacttcgatatatacggagtcacatacagcatcactccacttgatctacctgcaatcatacaacgcctacacggcatg

SEQ ID NO: 120378 - DNA, 80 bp, synthetic construct
  source 1..80: mol_type = other DNA
ccagtgccgccccctaggaggcggcgagctgtggtgttgagccaggataacgtgggagaggccctcaaagagctcgccat

SEQ ID NO: 120379 - DNA, 80 bp, synthetic construct
  source 1..80: mol_type = other DNA
gcccttgctcctgctggtcttgatgctacccgagagggcatacgcatttgaccaggaagttgcagcgtcgcttggtggcg

SEQ ID NO: 120380 - DNA, 80 bp, synthetic construct
  source 1..80: mol_type = other DNA
ctcgctactatcgcagccgaaacagtacctcccgccgtcgccgcaagacacctgcaaatcgcagtcgtcgccgcagacgc

SEQ ID NO: 120381 - DNA, 80 bp, synthetic construct
  source 1..80: mol_type = other DNA
tgataacatcaaatgtccatgccaagtcccgtcaccagaattctttaccgaggttgacggggtgcgcctgcataggtatg

SEQ ID NO: 120382 - DNA, 80 bp, synthetic construct
  source 1..80: mol_type = other DNA
ttggctaaaatccaagatcatgcctgccctgcctggaatcccactgctctcgtgtcagcgaggctacagggggacttggc

SEQ ID NO: 120383 - DNA, 80 bp, synthetic construct
  source 1..80: mol_type = other DNA
aacatcaggaccggcgtcaggactattacaacagggggtcccataacatattccacctatgggaagttcctcgctgatgg

SEQ ID NO: 120384 - DNA, 80 bp, synthetic construct
  source 1..80: mol_type = other DNA
attgctcatgagaacgacctgggcgctttgcgaagtagtgactttggtgactggtcccataataaccctctgggaaggaa

SEQ ID NO: 120385 - DNA, 80 bp, synthetic construct
  source 1..80: mol_type = other DNA
ccagctttggtacctcagccgtcttttggtcgcaaactttctccacagtctaaatggaatgtcagattcctcctgttcct

SEQ ID NO: 120386 - DNA, 80 bp, synthetic construct
  source 1..80: mol_type = other DNA
cactacccacctagaccttgcacctatgtctcagcgcagactgtctgcggtcctgtgtattgtttcacgcccagcccggt

SEQ ID NO: 120387 - DNA, 80 bp, synthetic construct
  source 1..80: mol_type = other DNA
cgctgggactccctcaacaaagagcagtcttggccgcagctttagagatcatggtcaaattttcaccagaaccaaacctg

SEQ ID NO: 120388 - DNA, 80 bp, synthetic construct
  source 1..80: mol_type = other DNA
gtcaagaatggccatcagtggagatgattgtgttgtgaaacctttagatgacaggttcgcaaacgctttgacagccctaa

SEQ ID NO: 120389 - DNA, 80 bp, synthetic construct
  source 1..80: mol_type = other DNA
ggctgtgctttgcccccatctggtcctcctcctattcccccaccaaggaggaagaaagtggtacagctcgattcttccaa

SEQ ID NO: 120390 - DNA, 80 bp, synthetic construct
  source 1..80: mol_type = other DNA
ggacccgcctacctcctgcgagaggccttgctgcatataccatactttgttagggctcacgccttactcagagtatgtgc

SEQ ID NO: 120391 - DNA, 80 bp, synthetic construct
  source 1..80: mol_type = other DNA
tccacggagacggcggcctgtagtcctcgatcagagcactgtgggggaggctcttaaggaattggccataaaaagctttg

SEQ ID NO: 120392 - DNA, 80 bp, synthetic construct
  source 1..80: mol_type = other DNA
agacacactcaaaaggagaagctggccactgaatgaaggggtgatggctgttgggcttgtgagcattctggccagttctc

SEQ ID NO: 120393 - DNA, 80 bp, synthetic construct
  source 1..80: mol_type = other DNA
gctcgctgttctcggtcccctctggctactgcagtgcagcttgaccagggtgccgtactttgtgcgcgcgcagggcctta

SEQ ID NO: 120394 - DNA, 80 bp, synthetic construct
  source 1..80: mol_type = other DNA
ccggcgcctgcaggctcccgatccttgacgccgtgcgaatgcggttcaagcgacctttacttggtcacgaggaacgctga

SEQ ID NO: 120395 - DNA, 80 bp, synthetic construct
  source 1..80: mol_type = other DNA
atggccgccgacctggaggtaatcgctagcacctgggtgatcgccggtggtgttcttgctgcgcttgccgcctactgctt

SEQ ID NO: 120396 - DNA, 80 bp, synthetic construct
  source 1..80: mol_type = other DNA
cctcccttacaaatcgcagcaacaatgggggcccaaggtgagatgaagctgtagtctcactggaaggactagaggttaga

SEQ ID NO: 120397 - DNA, 80 bp, synthetic construct
  source 1..80: mol_type = other DNA
tcatggcaaagaatgaggtgttctgtgtagaccccatgaaaggtgggaagaaaccagctcgcctcattgtgtaccctgac

SEQ ID NO: 120398 - DNA, 80 bp, synthetic construct
  source 1..80: mol_type = other DNA
cttcggcagaagaaagtgacattcgatcgagttcaagtacttgatcagcactaccacgatgttcttaaggagatcaaggc

SEQ ID NO: 120399 - DNA, 80 bp, synthetic construct
  source 1..80: mol_type = other DNA
tcactgtcccggattggacacggtcttgtgggataggcacgcccagagggcgtattgggttaacccctttttgtttggtg

SEQ ID NO: 120400 - DNA, 80 bp, synthetic construct
  source 1..80: mol_type = other DNA
tccttcttaggtggctccatcttagccctagtcacggctagctgtgaaaggtccgtgagccgcttgactgcagagagtgc

SEQ ID NO: 120401 - DNA, 80 bp, synthetic construct
  source 1..80: mol_type = other DNA
gaaggtcgtcgtcagagattcccacctcggtctcctcctccgagtcgctgctggcgagccactgcatgtcgttgagcatc

SEQ ID NO: 120402 - DNA, 80 bp, synthetic construct
  source 1..80: mol_type = other DNA
aaagaggtggtagagcatatcaacatgcgctcaacgagctcccagattcattggagactctgatgctcatagcgctgttg

SEQ ID NO: 120403 - DNA, 80 bp, synthetic construct
  source 1..80: mol_type = other DNA
ccatataactgcagaggccgctgctcgtcgtcttggacgcggctcccccccctctcttgccagttcatcggcgagtcagc

SEQ ID NO: 120404 - DNA, 80 bp, synthetic construct
  source 1..80: mol_type = other DNA
gcatgggacaatactcattaaggtcgagtacaaaggggaagacgcaccttgcaagattcctttctccacagaggatggac

SEQ ID NO: 120405 - DNA, 80 bp, synthetic construct
  source 1..80: mol_type = other DNA
accagagcctcaagtaggagaagaaaactggcaggaaacagaagccttctatggaggaagggctcttaaaaaggaaacca

SEQ ID NO: 120406 - DNA, 80 bp, synthetic construct
  source 1..80: mol_type = other DNA
atcaattgctttggccttcttagccacaggaggtgtgctcgtgttcttagcgaccaatgtgcatgctgacactggatgtg

SEQ ID NO: 120407 - DNA, 80 bp, synthetic construct
  source 1..80: mol_type = other DNA
ggtaacaccctgacatgtttcctaaaagcatcagccgcatgccgcgcggcaggcctcactgactatgacatgttggtctg

SEQ ID NO: 120408 - DNA, 80 bp, synthetic construct
  source 1..80: mol_type = other DNA
tcggcgccggcgggggcgacatttatcacagcatgtcgcaagcccgaccccgctatttactcctgtgcctactcctactc

SEQ ID NO: 120409 - DNA, 80 bp, synthetic construct
  source 1..80: mol_type = other DNA
tttactcgcttgccaaagaaaacaggtgcgctttggtgctcatgacagcaaccccacccggccggggagatcctttcccg

SEQ ID NO: 120410 - DNA, 80 bp, synthetic construct
  source 1..80: mol_type = other DNA
atgtcttattcttggaccggggcgctgataacaccatgcagccccgaaggggaaaaactgcctattaaccctcttagcaa

SEQ ID NO: 120411 - DNA, 80 bp, synthetic construct
  source 1..80: mol_type = other DNA
tggatacgctcggccgacttggtctgtttcacgcttccttaaacaacatggctatgccatttgagatagaggtattgtta

SEQ ID NO: 120412 - DNA, 80 bp, synthetic construct
  source 1..80: mol_type = other DNA
gtgctctggtcgtgggcgttgtctgtgctgccgttctacggcgacacgtcggcccatctgaaggggctacccagtggatg

SEQ ID NO: 120413 - DNA, 80 bp, synthetic construct
  source 1..80: mol_type = other DNA
agtggatgaaccgcttgatagccttcgcctcaaggggcaaccatgtgtcgcctacacactatgtgcccgagacagatgca

SEQ ID NO: 120414 - DNA, 80 bp, synthetic construct
  source 1..80: mol_type = other DNA
accgagaggcgctctatcaacagttcgacgagatggaagagtgttctaagcacctcccactagttgaacatggtctgcag

SEQ ID NO: 120415 - DNA, 80 bp, synthetic construct
  source 1..80: mol_type = other DNA
cccccgtcacaggtcgtcctcgtcggcgtcaccgtctttgttgggaacttgggtgtagttggtgttgcggcgcttgcgca

SEQ ID NO: 120416 - DNA, 80 bp, synthetic construct
  source 1..80: mol_type = other DNA
taaagacgccgccgtgcatttccaggtggcctgggaggtccccgttgggcagggagagggcgctgacgatgcatcttatc

SEQ ID NO: 120417 - DNA, 80 bp, synthetic construct
  source 1..80: mol_type = other DNA
ggccgaccggagcgaaacccccctcagcgtcgaggagctgtgtcgggcctacgagctcaacctcttctcgccgcgcgtgc

SEQ ID NO: 120418 - DNA, 80 bp, synthetic construct
  source 1..80: mol_type = other DNA
ggttcttcactggactttaccggatcatgaacaaaccctctacgcatttacgggtgggtcaagatcaatggcggtgaaga

SEQ ID NO: 120419 - DNA, 80 bp, synthetic construct
  source 1..80: mol_type = other DNA
ccctcgagtgggagcctggggatcctgacctagagacggagacggtcgagccccaacccactctgagtggggaagaggct

SEQ ID NO: 120420 - DNA, 80 bp, synthetic construct
  source 1..80: mol_type = other DNA
tcattcatccatgccccctcttgaaggagagccgggcgatccagacttaagttcgggttcttggtccacggtctgcgagg

SEQ ID NO: 120421 - DNA, 80 bp, synthetic construct
  source 1..80: mol_type = other DNA
ccactccggcctctgccgtccaagtgaagaataccagtcgcggttacatggtgactaacgactgctccaacgacagcatc

SEQ ID NO: 120422 - DNA, 80 bp, synthetic construct
  source 1..80: mol_type = other DNA
ccctgctgctcatgattgttttgattccggagccggaaaagcagcgctcacagactgacaaccagcttgccgtgttcttg

SEQ ID NO: 120423 - DNA, 80 bp, synthetic construct
  source 1..80: mol_type = other DNA
caaagcgcctcccccatcatgggacaacatgtggaaatgtctacttcggctgaaacccatgctcgtggggcccacccctt

SEQ ID NO: 120424 - DNA, 80 bp, synthetic construct
  source 1..80: mol_type = other DNA
acctcatggggtacatcccgctcgtaggcggccccgttggtggcgtcgcaagggctctcgcacacggtgtgagggtcctt

SEQ ID NO: 120425 - DNA, 80 bp, synthetic construct
  source 1..80: mol_type = other DNA
accttgctgaggtgcgcagttactgctacgcagcgactgttagtgacctttccacgaaggcggcctgccccacgatgggg

SEQ ID NO: 120426 - DNA, 80 bp, synthetic construct
  source 1..80: mol_type = other DNA
cgccggatcctggcttcgggaggtgtgggactgggtttgccacatcctaacggacttcaagaactggctttcctccaagc

SEQ ID NO: 120427 - DNA, 80 bp, synthetic construct
  source 1..80: mol_type = other DNA
ggttatacataggtggtgtagaacataggctcgatgcagcgtgcaattggacgcggggtgagcgatgcgacctggaggac

SEQ ID NO: 120428 - DNA, 80 bp, synthetic construct
  source 1..80: mol_type = other DNA
cgagactagcgtctgcaatattaaatgcccacaaagatggggtctgtggaattagatcaaccacgaggctggaaaatgtt

SEQ ID NO: 120429 - DNA, 80 bp, synthetic construct
  source 1..80: mol_type = other DNA
gccgcccctcgaaggcgagccgggggatcctgacttggagcctgcgtcggctgaccaccacaccccctcgcaagaggagg

SEQ ID NO: 120430 - DNA, 80 bp, synthetic construct
  source 1..80: mol_type = other DNA
gtggagttttgctcttcctagctaccaatgttcatgctgactccggatgtgcaatcgatgttggaaggagagaactgcgg

SEQ ID NO: 120431 - DNA, 80 bp, synthetic construct
  source 1..80: mol_type = other DNA
ctacatcaaagagtgctgtccagcgaatgaaaaaggtgacttttgacagagtgcagcagctcgacacctactatgactca

SEQ ID NO: 120432 - DNA, 80 bp, synthetic construct
  source 1..80: mol_type = other DNA
agtagggtcgcagttgccttgtgagcctgagccggacgaactggtggtaacttcgcttttgcgggaccctggtcacatca

SEQ ID NO: 120433 - DNA, 80 bp, synthetic construct
  source 1..80: mol_type = other DNA
gctgcttggtggactacccgtatcggttgtggcattacccctgcaccgtcaactacactatccataaggtgcggttgtac

SEQ ID NO: 120434 - DNA, 80 bp, synthetic construct
  source 1..80: mol_type = other DNA
tcccccaggcagcatcactgtaccacattctaacatcgaagaagtggccctaggctctgaaggtgagatccctttctatg

SEQ ID NO: 120435 - DNA, 80 bp, synthetic construct
  source 1..80: mol_type = other DNA
gcggtggccaggtagccgtgagggtccctggggcacacgaggatgtccagggacgcccccaccatgcccgtgtggccgtc

SEQ ID NO: 120436 - DNA, 80 bp, synthetic construct
  source 1..80: mol_type = other DNA
aaggtttgtctccagagcgtcaaaatccgtggggggggggaggcgacgacggtcaaggggagggttggagaccggggttg

SEQ ID NO: 120437 - DNA, 80 bp, synthetic construct
  source 1..80: mol_type = other DNA
ctaatcccgggtagctgtgaaaggtccgtgagccgcttgactgcagagagtgctgatactggcctctctgcagatcaagt

SEQ ID NO: 120438 - DNA, 80 bp, synthetic construct
  source 1..80: mol_type = other DNA
agtcgactatccttaccggctgtggcactatccgtgcacagtcaactataccatctttaaggtcaggatgtatgtcggcg

SEQ ID NO: 120439 - DNA, 80 bp, synthetic construct
  source 1..80: mol_type = other DNA
ggcagttggcacatcaaccgcactgccttgaactgcaatgaaagcctcgatactggctgggtagcggggctcctctacta

SEQ ID NO: 120440 - DNA, 80 bp, synthetic construct
  source 1..80: mol_type = other DNA
ccagtagcctctggcagatctgacagacgtgtgcgataatacacacgcccatcgaggccatgcctacataaaagggcacc

SEQ ID NO: 120441 - DNA, 80 bp, synthetic construct
  source 1..80: mol_type = other DNA
attccacacatgaaatgtattgggtgagtcgagcctcaggcaatgtggtgcactcagtgaacatgaccagccaggtactc

SEQ ID NO: 120442 - DNA, 80 bp, synthetic construct
  source 1..80: mol_type = other DNA
cccgccggcccagccgccgcggagacgtcgtcacggccggcggcggccatcggcgtcatcgacctcgtcggactccgggt

SEQ ID NO: 120443 - DNA, 80 bp, synthetic construct
  source 1..80: mol_type = other DNA
cggtccaaatatgggtatggtgcacaggacgttagaagccatgctagcaaggccgtcaaccacatccgctccgtgtggga

SEQ ID NO: 120444 - DNA, 80 bp, synthetic construct
  source 1..80: mol_type = other DNA
gaggccagcgtagtttgctgctcgatgtcatactcatggacgggagccctcatcactccatgcgctgcagaggaggagaa

SEQ ID NO: 120445 - DNA, 80 bp, synthetic construct
  source 1..80: mol_type = other DNA
agcaggaggatcaagaagagaatccgagagccggcctggaccctccggcggaggagtagctgacctgtttcctgaactgc

SEQ ID NO: 120446 - DNA, 80 bp, synthetic construct
  source 1..80: mol_type = other DNA
gggaacataggatgttggcccgtgccataatagaattgacctacaaacacaaagttgtcaaagtgatgaggccagcagcc

SEQ ID NO: 120447 - DNA, 80 bp, synthetic construct
  source 1..80: mol_type = other DNA
ggaaatctgggaggaagaatcttgggagagtcaggcagaggaggacgaggacttggaagaatgggaggagaaggaggaat

SEQ ID NO: 120448 - DNA, 80 bp, synthetic construct
  source 1..80: mol_type = other DNA
cacggagtgcgaattggtattctggatcaacgtccacgtctgctgcagcagagccagcagccgctgctgggcgccggcgg

SEQ ID NO: 120449 - DNA, 80 bp, synthetic construct
  source 1..80: mol_type = other DNA
cacactgtgtctggatctgttagcttcctcgcaccaggcgccaagcagaatgtccagctgatcaacaccaacggcagttg

SEQ ID NO: 120450 - DNA, 80 bp, synthetic construct
  source 1..80: mol_type = other DNA
gggtgacacagcctctcagtcagcgaggggcgttgtttcgctctttgacttgggcgcccggcagaagctccagcttataa

SEQ ID NO: 120451 - DNA, 80 bp, synthetic construct
  source 1..80: mol_type = other DNA
tgttttgtaaatgatagtattatagttagtttagtgtaaataggattttattgagaatggaagtcaggccagattaatgc

SEQ ID NO: 120452 - DNA, 80 bp, synthetic construct
  source 1..80: mol_type = other DNA
ggagctgctcgcacagcgaatgctcgtgggccccgcccccgagactcgacgccgcgcacacaaacccggccctggggcag

SEQ ID NO: 120453 - DNA, 80 bp, synthetic construct
  source 1..80: mol_type = other DNA
agttcgggtgttgacaccggggaggcacaaaccaattttgaggcgtctctggagagtgaccgtcaaagcgaggactcatg

SEQ ID NO: 120454 - DNA, 80 bp, synthetic construct
  source 1..80: mol_type = other DNA
tcttagccacgtgtataaacggggcttgttggaccgtctatcacggcgctggtagcaagaccctggctgggccaaaggtg

SEQ ID NO: 120455 - DNA, 80 bp, synthetic construct
  source 1..80: mol_type = other DNA
cctgactccggagcgggactaaccatctcaaccagttcttctgaccagggccccatcgttgtggacgacatgtcggatga

SEQ ID NO: 120456 - DNA, 80 bp, synthetic construct
  source 1..80: mol_type = other DNA
atcagcagcgcgccgactaacaattatacttgttttttcatcgtcgttacttccgttaagcgcgtctcgtatctcgggcg

SEQ ID NO: 120457 - DNA, 80 bp, synthetic construct
  source 1..80: mol_type = other DNA
ctcctcctgggtccatcacgacccctcaccccaatatagaggaggtggcactccccctcacaggggaggtgccattctat

SEQ ID NO: 120458 - DNA, 80 bp, synthetic construct
  source 1..80: mol_type = other DNA
cacgttagcgtgctgggaggaattgttacagcttcaacccacccagacgcagtgcttacgcgctactttaatggaagtgt

SEQ ID NO: 120459 - DNA, 80 bp, synthetic construct
  source 1..80: mol_type = other DNA
ccgggccctggctcacgccacgatgtctggtcgactacccgtatcggctgtggcattacccctgtactgtgaatttcacc

SEQ ID NO: 120460 - DNA, 80 bp, synthetic construct
  source 1..80: mol_type = other DNA
tcctatcgagaccatcaagggggggaggcacctcattttctgccattccaagaagaaatgtgacgaactcgccgcaaagc

SEQ ID NO: 120461 - DNA, 80 bp, synthetic construct
  source 1..80: mol_type = other DNA
ctttttgcaatcagcaaaatctaactttaattaatgtaaccagcacttatgatggcatttattatggtactgatgaaaaa

SEQ ID NO: 120462 - DNA, 80 bp, synthetic construct
  source 1..80: mol_type = other DNA
atgctactcatatcccaagcggaggcagctttggaaaaccttgtattacttaatgcagcgtccttggccgggacgcacgg

SEQ ID NO: 120463 - DNA, 80 bp, synthetic construct
  source 1..80: mol_type = other DNA
cgtggcgttgggcccgcagggccgccgcagatactacctgaccagagacccaaccactccactcgcccgggctgcctggg

SEQ ID NO: 120464 - DNA, 80 bp, synthetic construct
  source 1..80: mol_type = other DNA
tcctccatctgtggtcttttgtcctgctgctcctagtgttgccccaccaggcatacgctttggatgcggccgagcagggc

SEQ ID NO: 120465 - DNA, 80 bp, synthetic construct
  source 1..80: mol_type = other DNA
cattcgaacctctgagagccgaaactgatgacgccgagctctcggtggctgcagagtgtttcaagaagcctcccaagtat

SEQ ID NO: 120466 - DNA, 80 bp, synthetic construct
  source 1..80: mol_type = other DNA
tctcctgcttgacttgccccgcgtctggtctagagtacaggaacacgtctggcctatacatacttaccaacgactgctct

SEQ ID NO: 120467 - DNA, 80 bp, synthetic construct
  source 1..80: mol_type = other DNA
ttgggagccaggtaccttgagttcgaagcccttggattcttaaatgaagatcactggttctcgcgtgaaaactcttacag

SEQ ID NO: 120468 - DNA, 80 bp, synthetic construct
  source 1..80: mol_type = other DNA
ttcaacctcgggtgcatatcctgggatccgacccccatggagcacgagcaggcggtcggcggctgtagcgccccggcgac

SEQ ID NO: 120469 - DNA, 80 bp, synthetic construct
  source 1..80: mol_type = other DNA
tgctaacatcaccgggtcttctgaggacaaaccgtactgctggcactacgcacccagaccttgcacaactgttcaagcat

SEQ ID NO: 120470 - DNA, 80 bp, synthetic construct
  source 1..80: mol_type = other DNA
gcacgttggtaaatggagtggtgcggcttttgagcaaaccatgggacgctatcactggagtcaccaccatggccatgact

SEQ ID NO: 120471 - DNA, 80 bp, synthetic construct
  source 1..80: mol_type = other DNA
aagggtggtaggcatttgatcttttgccattccaagaagaaatgcgacgagctcgcagccgccctccgaaatatgggcct

SEQ ID NO: 120472 - DNA, 80 bp, synthetic construct
  source 1..80: mol_type = other DNA
ggggctttgacgtggcggtttccctacgtggcactgccacgcgaatgctcaaagtccttattttattgtgtgttcagccc

SEQ ID NO: 120473 - DNA, 80 bp, synthetic construct
  source 1..80: mol_type = other DNA
tggggtgcatgtatcttctccaggctgccttgacacgcacgccctattttgtgcgcgcccacgcgcttgtgcgtttgtgc

SEQ ID NO: 120474 - DNA, 80 bp, synthetic construct
  source 1..80: mol_type = other DNA
tgctgtcccagggggggagggctgccatctgtggcaaatacctcttcaattgggcagtaaagaccaaactcaaactcact

SEQ ID NO: 120475 - DNA, 80 bp, synthetic construct
  source 1..80: mol_type = other DNA
gattgttccaccccgtgtgatacatcttggctacgggagatctgggattgggtttgcaccgtactgagtgacttcaagac

SEQ ID NO: 120476 - DNA, 80 bp, synthetic construct
  source 1..80: mol_type = other DNA
gaagcgcttctcagcgtcagaagaaggtcacctttgacaggctgcaagtgctcgacgaccattacaaggctgcattgaag

SEQ ID NO: 120477 - DNA, 80 bp, synthetic construct
  source 1..80: mol_type = other DNA
caatgaggtcctgccctctgctctcagctcacgtctcagcgtcagctgcaaaaagtcactcaagtcctcagccactacag

SEQ ID NO: 120478 - DNA, 80 bp, synthetic construct
  source 1..80: mol_type = other DNA
agggggtaatatcacgcgggtcgagtctgagaacaaggccatcgtcctcgactccttcgaccctctagtcgccgaaaccg

SEQ ID NO: 120479 - DNA, 80 bp, synthetic construct
  source 1..80: mol_type = other DNA
gtcttctgccttggcggagcttgctacaaagaccttcggtagctctgaatcgtcggctgtcgacagcggcacggcgaccg

SEQ ID NO: 120480 - DNA, 80 bp, synthetic construct
  source 1..80: mol_type = other DNA
atccatcgccacggcgattggacgattgttaagccgcagcgtgtctccgcttgtgctgtagtagtcaaaaacgtaatggc

SEQ ID NO: 120481 - DNA, 80 bp, synthetic construct
  source 1..80: mol_type = other DNA
gtaggcatgtggaccttcttgcgggcgccgcagtggtttgctcatccctgtacatcggggatctgtgcggctccctcttt

SEQ ID NO: 120482 - DNA, 80 bp, synthetic construct
  source 1..80: mol_type = other DNA
ggaacagtagtgctggtcagatgctccgagataagctgaaggacaccaactttcaagaaaaagtggtcaacggggtggtg

SEQ ID NO: 120483 - DNA, 80 bp, synthetic construct
  source 1..80: mol_type = other DNA
tcggcgccttccttgaaggcgacgtgcacaacagccggcagacatcctgacgctgagctacttgaagctaatcttctctg

SEQ ID NO: 120484 - DNA, 80 bp, synthetic construct
  source 1..80: mol_type = other DNA
ccaacgctagcattgtgtacgaggcggatactatgatcttacaccttccggggtgtgtgccttgtgtcagagcggataac

SEQ ID NO: 120485 - DNA, 80 bp, synthetic construct
  source 1..80: mol_type = other DNA
atggaggcaagaggtgggtggcaacatcacgcgagtcgagtctgagaacaaggtcatcgttctcgactcttttgacccac

SEQ ID NO: 120486 - DNA, 80 bp, synthetic construct
  source 1..80: mol_type = other DNA
tgtcaagatggatgtgtacaaccttggagatcagactggagtgctgctgaaggcgctagcaggggttcctgtggcacaca

SEQ ID NO: 120487 - DNA, 80 bp, synthetic construct
  source 1..80: mol_type = other DNA
ttgttgatgttggctgctgctttctttcagatggcgtattatgatgcacggctcatgctcggttgggaaatccctgatgt

SEQ ID NO: 120488 - DNA, 80 bp, synthetic construct
  source 1..80: mol_type = other DNA
gggtccatgaggatagcagggtcaggcctctgcgccaacatgtggtatggcacctttcccatcaatgagtataccaccgg

SEQ ID NO: 120489 - DNA, 80 bp, synthetic construct
  source 1..80: mol_type = other DNA
cacaagtggtagaggcgaggggggctgggttggtctcggtgcagcagtcggaagcacgccacggcgtccacgacctcggt

SEQ ID NO: 120490 - DNA, 80 bp, synthetic construct
  source 1..80: mol_type = other DNA
tacttaactagagaccctaccactccacttgccagggctgcctgggaaacagctagacactcccccgtcaattcatggtt

SEQ ID NO: 120491 - DNA, 80 bp, synthetic construct
  source 1..80: mol_type = other DNA
gcgccacgcggagacttccggggccgtccccgcgggcggcctcacgcgctacctgcccatctcggtggtctctagcgtgg

SEQ ID NO: 120492 - DNA, 80 bp, synthetic construct
  source 1..80: mol_type = other DNA
tcgtccaaccggccttttattaaccgcctgatggactatctgcaccgcgcggcggccatgaacagcgagtacttcaccaa

SEQ ID NO: 120493 - DNA, 80 bp, synthetic construct
  source 1..80: mol_type = other DNA
acactcgctgctttgactccacagtgactgaaagagacatcagggtcgaggaagaggtctatcagtgttgcgacctggag

SEQ ID NO: 120494 - DNA, 80 bp, synthetic construct
  source 1..80: mol_type = other DNA
ccaccggcgcttcccatctgggccagaccggactacaaccctccattgctccctccatggaaggacccagcctacgagcc

SEQ ID NO: 120495 - DNA, 80 bp, synthetic construct
  source 1..80: mol_type = other DNA
cccctgccttgcccaactctccaggcatccgtgagtgggcggagtcatatttgggtatgattccatgagggccgcaaaaa

SEQ ID NO: 120496 - DNA, 80 bp, synthetic construct
  source 1..80: mol_type = other DNA
agcttacagctatgggcctcaacgctgtggctttctataggggcattgacgtggcggtcataccaacctcaggcgacgtt

SEQ ID NO: 120497 - DNA, 80 bp, synthetic construct
  source 1..80: mol_type = other DNA
gttgatcgcggctgttccaggaaagaacgtggtcaacgtccagacaaaaccgagcttgttcaaagtgaggaatgggggag

SEQ ID NO: 120498 - DNA, 80 bp, synthetic construct
  source 1..80: mol_type = other DNA
tgaaccgggctctaggcagaacatccagctgatcaactctaatggtagttggcacatcaacagcacggccctgaactgta

SEQ ID NO: 120499 - DNA, 80 bp, synthetic construct
  source 1..80: mol_type = other DNA
ttgctcgtgcgtcggatagcagcgggtaagtacatgcagatgctccttcttaaagtcggcgcggcgactggcacctacat

SEQ ID NO: 120500 - DNA, 80 bp, synthetic construct
  source 1..80: mol_type = other DNA
gatgagatggaggaatgtgcttctaaggctgtccttattgaggagggggctcgcatagcagagatgttgaaatctaaaat

SEQ ID NO: 120501 - DNA, 80 bp, synthetic construct
  source 1..80: mol_type = other DNA
gcctacgccccttctctatagattggggtctgtgcagaatgaggtgacactcacccatcccatcactaaatacatcatgg

SEQ ID NO: 120502 - DNA, 80 bp, synthetic construct
  source 1..80: mol_type = other DNA
ggaatgtcctactgattgcttccgaaaacacccggaagccacttttgggaggtgcggctctggcccgtggttgaccccgc

SEQ ID NO: 120503 - DNA, 80 bp, synthetic construct
  source 1..80: mol_type = other DNA
cgtggatgaacaccactggatacaccaaagcctgcggggcccccccctgtttggtgcaagcctccaatgattcctggccg

SEQ ID NO: 120504 - DNA, 80 bp, synthetic construct
  source 1..80: mol_type = other DNA
gcaaccccggtattccccgcctcccgcgccgcgcgtaaccactcccctggggttccgggttatgctaattgcttttttgg

SEQ ID NO: 120505 - DNA, 80 bp, synthetic construct
  source 1..80: mol_type = other DNA
aggccgcctgtagggcggccaacatcaaggactatgacatgttggtgtgcggagatgacttagtggtcatttgtgagagt

SEQ ID NO: 120506 - DNA, 80 bp, synthetic construct
  source 1..80: mol_type = other DNA
aaagaggagggagggcttatcaacacgccctgaacgaacttccggagtcactggaaacactcatgcttgtagccttacta

SEQ ID NO: 120507 - DNA, 80 bp, synthetic construct
  source 1..80: mol_type = other DNA
gtggctctcgaccacactggggccccaatgacccccggcggagatcccgcaatttgggtaagatcatcgataccctcacg

SEQ ID NO: 120508 - DNA, 80 bp, synthetic construct
  source 1..80: mol_type = other DNA
gaacgaccctcgggcatgttcgattcttcggtcctgtgtgagtgctatgacgcgggctgtgcttggtacgagctcacgcc

SEQ ID NO: 120509 - DNA, 80 bp, synthetic construct
  source 1..80: mol_type = other DNA
cttttaaggtcatgagtggtgacatgccatccactgaggacctggtcaacttactccctgccatcctctctcctggtgcc

SEQ ID NO: 120510 - DNA, 80 bp, synthetic construct
  source 1..80: mol_type = other DNA
catgcacctacctggttgtgtcccttgtgttcaggtggccaacgtatcatcatgctggctaccggctacgcctacgctgg

SEQ ID NO: 120511 - DNA, 80 bp, synthetic construct
  source 1..80: mol_type = other DNA
ccacattcaaatggggaaatagaggatgtccaaacggacatccctagtgagccctggaacacaggtcatgactggatttt

SEQ ID NO: 120512 - DNA, 80 bp, synthetic construct
  source 1..80: mol_type = other DNA
gcgggggggacatttatcacagcgtgtcccgagctcgaccccgcatattactcctgtgcctactcctactttccgtagtg

SEQ ID NO: 120513 - DNA, 80 bp, synthetic construct
  source 1..80: mol_type = other DNA
aaaggttcctctggtggtcctgttatgtgcccttcggggcatgttgcagggatctttagggctgctgtatgcaccagagg

SEQ ID NO: 120514 - DNA, 80 bp, synthetic construct
  source 1..80: mol_type = other DNA
agccatagtggtctgcggaaccggtgagtacaccggaatcgctggggtgaccgggtcctttcttggaacaacccgctcaa

SEQ ID NO: 120515 - DNA, 80 bp, synthetic construct
  source 1..80: mol_type = other DNA
gcgcacatgctatctcattgggtttctcgtcaagagggtgatcaccacacgtgaggtggtgactgtttacttcctactct

SEQ ID NO: 120516 - DNA, 80 bp, synthetic construct
  source 1..80: mol_type = other DNA
gtagtgtccgggtgtgctctccctccacagggacttcctcctattccacccccaaggagaaagaaactcgtgcagctgga

SEQ ID NO: 120517 - DNA, 80 bp, synthetic construct
  source 1..80: mol_type = other DNA
caaccggtcccgttgttggattccggtaacgcccaacgtcgccgtaagggagagaggggccctcaccaaaggcctgcgga

SEQ ID NO: 120518 - DNA, 80 bp, synthetic construct
  source 1..80: mol_type = other DNA
tcaactcgtccgggtgcccggagcgcatggccagctgccgccccattgactggttcgcccaggggtgtggccccatcacc

SEQ ID NO: 120519 - DNA, 80 bp, synthetic construct
  source 1..80: mol_type = other DNA
cttgggaaatactctgacttgctacataaaggctacggctgcttgtaaagcagcgggcctaaaggactttgacatgttgg

SEQ ID NO: 120520 - DNA, 80 bp, synthetic construct
  source 1..80: mol_type = other DNA
gtttctcgaaccggtcggaaaagtgattgaccttggatgtggaagaggcggttggtgttactatatggcaacccaaaaaa

SEQ ID NO: 120521 - DNA, 80 bp, synthetic construct
  source 1..80: mol_type = other DNA
atcctctggaggcccccttctttgttcgtcgggccacgtggttgggttgttccgcgcagcagtttgcactcgtggcgttg

SEQ ID NO: 120522 - DNA, 80 bp, synthetic construct
  source 1..80: mol_type = other DNA
cacccaaacagacaaaatatagaagatcatagtcactgttaacgttgaactgcgcaaggcggcgactttcttccaatgcc

SEQ ID NO: 120523 - DNA, 80 bp, synthetic construct
  source 1..80: mol_type = other DNA
tccgcgccacactcctatcccagggggggagagccgctatatgcggtaagtatctcttcaactggtcggtgaaaaccaaa

SEQ ID NO: 120524 - DNA, 80 bp, synthetic construct
  source 1..80: mol_type = other DNA
actaagtctacactggtgaccacttcgccgcgcaagctctcattagtccaggctaaacgaccgccttttcgagagcaaaa

SEQ ID NO: 120525 - DNA, 80 bp, synthetic construct
  source 1..80: mol_type = other DNA
cagtgactacacctcattccaacatagaggaggtcgccctgccaacaacgggggaaatacccttttacggcaaggcgatc

SEQ ID NO: 120526 - DNA, 80 bp, synthetic construct
  source 1..80: mol_type = other DNA
ctaacagcagcatcgtttatgaggcggagacgctgatcttgcacttacctgggtgcgtaccttgtgtgagggtgggtaat

SEQ ID NO: 120527 - DNA, 80 bp, synthetic construct
  source 1..80: mol_type = other DNA
atatggggtcgtgggcccgcgttgctctggggctcggcaccctggcgcggcacggccgcccccgaaagctgtccccaatc

SEQ ID NO: 120528 - DNA, 80 bp, synthetic construct
  source 1..80: mol_type = other DNA
gggccaggccatgaagaacccatgttgatgcagagctatgggtggaacatcgttactatgaaaagtggcgttgatgtttt

SEQ ID NO: 120529 - DNA, 80 bp, synthetic construct
  source 1..80: mol_type = other DNA
aggtcacggttgactgtgagccacggtcaggaatagacactagcgcctattacgttatgtcagttggcgcgaagtccttc

SEQ ID NO: 120530 - DNA, 80 bp, synthetic construct
  source 1..80: mol_type = other DNA
ccatggagcttctgggctggctggcctatttacatctgggcctaaacaaaatctccagttggtaaattccaacgggagct

SEQ ID NO: 120531 - DNA, 80 bp, synthetic construct
  source 1..80: mol_type = other DNA
tatgatacccgctgcttcgactcaactgtcacagagagagacatcagaactgaggagtccatatatcaggcctgcacgct

SEQ ID NO: 120532 - DNA, 80 bp, synthetic construct
  source 1..80: mol_type = other DNA
cggaagataagccctactgctggcactacccgccaagaccatgtggggtagtgccggcctcacaagtgtgcggtcctgtc

SEQ ID NO: 120533 - DNA, 80 bp, synthetic construct
  source 1..80: mol_type = other DNA
cccaggaaagaaccagaaagtaacttagtaaggtcaatggtgactgcaggatcaactgatcacatggatcacttctccct

SEQ ID NO: 120534 - DNA, 80 bp, synthetic construct
  source 1..80: mol_type = other DNA
gccggtaccatcaaccacccggccatccgcgccaaggtggactggttggaagcgcgggtgcgggaatgcgcctccgttcc

SEQ ID NO: 120535 - DNA, 80 bp, synthetic construct
  source 1..80: mol_type = other DNA
ttccctgcagaccccaggacgaactaataggaagagcgagaatctctcaaggagcgggatggagtctcagagaaaccgca

SEQ ID NO: 120536 - DNA, 80 bp, synthetic construct
  source 1..80: mol_type = other DNA
caggatcaacatgggtttgtgtccatcgtaaacgctaacgtatgtgaatttaccgagtctatagaggatgcagaattggc

SEQ ID NO: 120537 - DNA, 80 bp, synthetic construct
  source 1..80: mol_type = other DNA
caatgcatttccaagtgggaaaaacggtggtacgttcgtctggtaataatcgcagacgccacccgcgattatgcagtgta

SEQ ID NO: 120538 - DNA, 80 bp, synthetic construct
  source 1..80: mol_type = other DNA
ccccccggtaaaagtactccttaaccgcgccctcgatcgcccgacgggcctgggtccgcacctcctccagccgaacctga

SEQ ID NO: 120539 - DNA, 80 bp, synthetic construct
  source 1..80: mol_type = other DNA
tacattacaggggtcactactgataacgtcaagtgcccctgtcaagtgcctgccccagaattcttcacggaagtggacgg

SEQ ID NO: 120540 - DNA, 80 bp, synthetic construct
  source 1..80: mol_type = other DNA
cgacataaaggacccggctcgccaagtggcctcggtggtcctggtggtgcaaccggccccagttccgaccccacccccga

SEQ ID NO: 120541 - DNA, 80 bp, synthetic construct
  source 1..80: mol_type = other DNA
caacatggggccctaatgacccccggcgaaggtcccgcaacctaggtaaagtcatcgatacccttacttgcggcctcgcc

SEQ ID NO: 120542 - DNA, 80 bp, synthetic construct
  source 1..80: mol_type = other DNA
aagtcaaccccataactctcacagcagctcttcttttattggtagcacattatgctatcatagggccaggactccaagcg

SEQ ID NO: 120543 - DNA, 80 bp, synthetic construct
  source 1..80: mol_type = other DNA
agagcggtggcgtagaggaggacaaacgagctctcggagccttcacggaggctatgacgagatactcggcccctcccggg

SEQ ID NO: 120544 - DNA, 80 bp, synthetic construct
  source 1..80: mol_type = other DNA
agcagttcaaacaaaaagtccttggcctcatccagaccaccacccgacaagccgaggagatcgagcctgtcgtccactct

SEQ ID NO: 120545 - DNA, 80 bp, synthetic construct
  source 1..80: mol_type = other DNA
gacggtgtgaggttgcacagatatgctcccccttgccgaccactgatcagggacgaggtgtccttcagtgtaggactctc

SEQ ID NO: 120546 - DNA, 80 bp, synthetic construct
  source 1..80: mol_type = other DNA
gtttcgattaccgtgttttttacctgaatttccgcgtaccgtgtcaaagtcttctgtttttacgtaggtgtcagctgatc

SEQ ID NO: 120547 - DNA, 80 bp, synthetic construct
  source 1..80: mol_type = other DNA
tcttcgccctgcgcgtcggcaagatagcagttgaccataagctggtagttaagggcctcggcggcatggcccttggcgcg

SEQ ID NO: 120548 - DNA, 80 bp, synthetic construct
  source 1..80: mol_type = other DNA
tgaagaggagaaactgcctatcagcccactcagcaactcgttgttgagacatcataacctagtctattcaacgtcgtcta

SEQ ID NO: 120549 - DNA, 80 bp, synthetic construct
  source 1..80: mol_type = other DNA
agccggctcgtctagaacccccacaggatgaacaggagcacgagcaagacgcaggccaggaggagaccgacgctgggctc

SEQ ID NO: 120550 - DNA, 80 bp, synthetic construct
  source 1..80: mol_type = other DNA
ctcacagagcgactgtacatcgggggtcccatgtataacagcaaaggactccaatgcggttatcgccgctgccgcgctag

SEQ ID NO: 120551 - DNA, 80 bp, synthetic construct
  source 1..80: mol_type = other DNA
cacagtgtgtgccagagctaaggcccccccaccatcgtgggataccatgtggaagtgcctcatcaggcttaaacctactt

SEQ ID NO: 120552 - DNA, 80 bp, synthetic construct
  source 1..80: mol_type = other DNA
cattgccggactcatgttcgtggcatttgtcatctctggaaagtcaacagacatgtggattgagaggacggctgatatta

SEQ ID NO: 120553 - DNA, 80 bp, synthetic construct
  source 1..80: mol_type = other DNA
cagggctgtcgacattgccggggaaccctgctgtggcttcaatgatggcgtttagtgccgctcttaccagcccgctctcc

SEQ ID NO: 120554 - DNA, 80 bp, synthetic construct
  source 1..80: mol_type = other DNA
tgtatctgttgagagcatggaaacaactatgcggtctcccaccttcaccgacaattctacgccaccagctgtacctcaga

SEQ ID NO: 120555 - DNA, 80 bp, synthetic construct
  source 1..80: mol_type = other DNA
catcacaattagcggtttgcaaattggaactgaggaagaagatggaaatcctacaaaggagatttttgcagataaaacat

SEQ ID NO: 120556 - DNA, 80 bp, synthetic construct
  source 1..80: mol_type = other DNA
gggggtgatgggggcgatagttgtcagtctgactggtcgtgacaagaatgaggtggaaggcgaggtgcaggtcctgtcca

SEQ ID NO: 120557 - DNA, 80 bp, synthetic construct
  source 1..80: mol_type = other DNA
gttacagcgggggagacatatatcacagcgtgtctcgtgcccggccccgctggttcatggtttgcctactcctactttcc

SEQ ID NO: 120558 - DNA, 80 bp, synthetic construct
  source 1..80: mol_type = other DNA
acaaagcacttgattagagtcgaaaattggatattcaggaaccctggcttcgcgttagcagcagctgccatcgcttggct

SEQ ID NO: 120559 - DNA, 80 bp, synthetic construct
  source 1..80: mol_type = other DNA
ggccgcaaaccagcccgcctaatcgtgtacccggacctcggcgtccgggtgtgcgaaaagagagccttatatgacattac

SEQ ID NO: 120560 - DNA, 80 bp, synthetic construct
  source 1..80: mol_type = other DNA
aacgggactatgaggatttccggtccaaaagcatgcagtaacacctggcatggaactttccccatcaacgcctacacgac

SEQ ID NO: 120561 - DNA, 80 bp, synthetic construct
  source 1..80: mol_type = other DNA
gcggcggcgaacaaggcacacagggccgtgcctcccaaaaacacggacatcccccaaaacacgggcgccgacaacggcag

SEQ ID NO: 120562 - DNA, 80 bp, synthetic construct
  source 1..80: mol_type = other DNA
tcaagcgagcgctaagcaggcagaggaactgaagcctgctgtccattccgcgtggcctagggtggaggagttctggagga

SEQ ID NO: 120563 - DNA, 80 bp, synthetic construct
  source 1..80: mol_type = other DNA
gctacggtctgcgccagagcgctggcccctccaccaagctgggacaccatgtggaagtgcctgatccgcctaaaacctac

SEQ ID NO: 120564 - DNA, 80 bp, synthetic construct
  source 1..80: mol_type = other DNA
acgggaaggctatccccctcgaatacatcaagggagggagacaccttatattctgccattccaagaagaagtgcgacgag

SEQ ID NO: 120565 - DNA, 80 bp, synthetic construct
  source 1..80: mol_type = other DNA
tgtggcttcgccgacctcatggggtacatacccgtcgtaggaggccccttaggtggtgtcgctgcagccttagctcacgg

SEQ ID NO: 120566 - DNA, 80 bp, synthetic construct
  source 1..80: mol_type = other DNA
ctttccgaagtgacagacctgtcacctgacatcgtccaagccaattccttgttttccttctatggcgatgatgagattgt

SEQ ID NO: 120567 - DNA, 80 bp, synthetic construct
  source 1..80: mol_type = other DNA
catgtttgactcttcagtaagctggcctggtaatgacagattgctaactccaaatgagttcgaaatcaagcgcacagttg

SEQ ID NO: 120568 - DNA, 80 bp, synthetic construct
  source 1..80: mol_type = other DNA
gacggcgagccatgcgccgagccgctgccgctgccagtgctggtcgagcccgccgtcaggccgctcgccaggctgccgcg

SEQ ID NO: 120569 - DNA, 80 bp, synthetic construct
  source 1..80: mol_type = other DNA
ccagggacaaaagtcaccattacagaggattgtagcaagagaggcccttcggtcagaaccactactgacagtggaaagtt

SEQ ID NO: 120570 - DNA, 80 bp, synthetic construct
  source 1..80: mol_type = other DNA
tcagccaggtggtgtttttgtagatgctgcgttcgacggcggtggcggacgggtcgcagcaggtgaatcccgctatgttg

SEQ ID NO: 120571 - DNA, 80 bp, synthetic construct
  source 1..80: mol_type = other DNA
gtaaaccgggtgtcccgggaacagctcccccgtcaggagggaggcgtcgaagggccgcccgaggatggcccgcgcgaaga

SEQ ID NO: 120572 - DNA, 80 bp, synthetic construct
  source 1..80: mol_type = other DNA
agaaagagatccccgggcttaaatgggaaaagatggacttgcgttgctatgaggaatgcctgcccccaagcgatgatgag

SEQ ID NO: 120573 - DNA, 80 bp, synthetic construct
  source 1..80: mol_type = other DNA
aacctgctgattaagtgccatatgcacctgggtgccagaaggggcaccttccagccgtaccagtgcaactttagccagac

SEQ ID NO: 120574 - DNA, 80 bp, synthetic construct
  source 1..80: mol_type = other DNA
gccatagggccccccggaggcttgggaggcggttttttctggacatgtcggcggaatccaccacggagacggaaacggat

SEQ ID NO: 120575 - DNA, 80 bp, synthetic construct
  source 1..80: mol_type = other DNA
ggggcccttgtagcttttaagatcatgagcggcgaggccccgtcagtagaggatatggtcaacttgctgcctgccatctt

SEQ ID NO: 120576 - DNA, 80 bp, synthetic construct
  source 1..80: mol_type = other DNA
gaggagggggcgccctgccaggtggtcctgcagggcgccgaacttaatggaatcctacaggcgtttgccccgctgcgcac

SEQ ID NO: 120577 - DNA, 80 bp, synthetic construct
  source 1..80: mol_type = other DNA
ttcccaaagttgcccggccttccctttatctcttgccaaaagggatacaggggcgtgtgggccggtactggcatcatgac

SEQ ID NO: 120578 - DNA, 80 bp, synthetic construct
  source 1..80: mol_type = other DNA
tcgctggtcaatggagtggtcaggctcctctcaaaaccatgggacaccatcacgaatgttaccaccatggccatgactga

SEQ ID NO: 120579 - DNA, 80 bp, synthetic construct
  source 1..80: mol_type = other DNA
cttggggatagggacggccttggatcaggcggagacggccggctgccgtctaaccgtccttgccaccgctacgccccctg

SEQ ID NO: 120580 - DNA, 80 bp, synthetic construct
  source 1..80: mol_type = other DNA
gttccagtactcaccagcgcagcgagtcgattacctggtcaaagcctggaaatcaaagaaaacccccatgggtttctcct

SEQ ID NO: 120581 - DNA, 80 bp, synthetic construct
  source 1..80: mol_type = other DNA
cttcttggcttagtatcgttgagaagaatcgaaagattagtgcagtttaaacagttttttagaacggaagaacaaccatg

SEQ ID NO: 120582 - DNA, 80 bp, synthetic construct
  source 1..80: mol_type = other DNA
ctgctttgactccacagtcactgagagagacatccgtacggaggaggccatctaccaatgttgtgacctggacccccaag

SEQ ID NO: 120583 - DNA, 80 bp, synthetic construct
  source 1..80: mol_type = other DNA
tgtatgatggtgcgctctgcaatgggagggaagtacatgcaaatgctggtgctgacagttggccggtggttcaacaccta

SEQ ID NO: 120584 - DNA, 80 bp, synthetic construct
  source 1..80: mol_type = other DNA
atggatgtcatctccagagaagatcagagggggagtggacaagttgtcacctacgccctaaacactttcaccaacctggc

SEQ ID NO: 120585 - DNA, 80 bp, synthetic construct
  source 1..80: mol_type = other DNA
tgtaccagcaatacgatgagatggaagagtgtgcagcccgtctcccttacatcgtggaggcccaagcaatagcagagcag

SEQ ID NO: 120586 - DNA, 80 bp, synthetic construct
  source 1..80: mol_type = other DNA
ggtgtctgcagaggaatacgtggagataaggcgggtggtggacttccactacgtaacgggcatgactactgacaatctca

SEQ ID NO: 120587 - DNA, 80 bp, synthetic construct
  source 1..80: mol_type = other DNA
ttatcatctacgacatcttcgcggggagccactggggcatactagcaggcctactgtactatggtatggtgggtaactgg

SEQ ID NO: 120588 - DNA, 80 bp, synthetic construct
  source 1..80: mol_type = other DNA
tgtctagttgactacccctatagactgtggcactatccgtgcaccgtcaattataccatccacaaggtgaggttatactt

SEQ ID NO: 120589 - DNA, 80 bp, synthetic construct
  source 1..80: mol_type = other DNA
cttgggaaacagctcggcacactccggtgaactcttggttgggcaacatcattatgtacgcccccacaatatgggcgcgt

SEQ ID NO: 120590 - DNA, 80 bp, synthetic construct
  source 1..80: mol_type = other DNA
gcttgcctgcttgttcgtaggctagcagggggtaagtacgtgcaggcgtgccttctgaggttgggcgcttggactggcac

SEQ ID NO: 120591 - DNA, 80 bp, synthetic construct
  source 1..80: mol_type = other DNA
atacgattcaaaattcgaaaagcaactaggacaggtcatgctcctggttctgtgtgcagttcaacttttgttaatgagaa

SEQ ID NO: 120592 - DNA, 80 bp, synthetic construct
  source 1..80: mol_type = other DNA
agtttcttctggacttgagaccggcaacagcctggtcactgtacgctgtgaccacagcggtcctcactccattgctaaag

SEQ ID NO: 120593 - DNA, 80 bp, synthetic construct
  source 1..80: mol_type = other DNA
aaaaagacctgatctcatatggaggaggttggaggcttcaaggatcctggaacacgggagaagaagtgcaggtgattgct

SEQ ID NO: 120594 - DNA, 80 bp, synthetic construct
  source 1..80: mol_type = other DNA
catggccatgccgcacgccacgctgatcgccggaaacgtctgctcttggttgctgcagatcaccgtcctgttgctggccc

SEQ ID NO: 120595 - DNA, 80 bp, synthetic construct
  source 1..80: mol_type = other DNA
agcttcactcatcgcccaaggaggaagagcagccacatgtggcatctacctcttcaattgggcggtgaaaacgaagcgca

SEQ ID NO: 120596 - DNA, 80 bp, synthetic construct
  source 1..80: mol_type = other DNA
gtggggcccggggaaggggcggtgcagtggatgaacagactcatagcgttcgcttcacggtgtaaccacgtgtcaccaac

SEQ ID NO: 120597 - DNA, 80 bp, synthetic construct
  source 1..80: mol_type = other DNA
aacaactcggccgcgtaaggaaaagacttccgccattgctactcgccaggatacaccagtcgcgcaggaactaagaaaac

SEQ ID NO: 120598 - DNA, 80 bp, synthetic construct
  source 1..80: mol_type = other DNA
tatgacacccgttgctttgactcaacagtcacagagagggatattaggaccgaagaggccatttacctttcctgctctct

SEQ ID NO: 120599 - DNA, 80 bp, synthetic construct
  source 1..80: mol_type = other DNA
ctgccgagcatgcacaatgcctccagtaacgttccgaactggaaccgactgctggtatgccatggaaataaggccagtac

SEQ ID NO: 120600 - DNA, 80 bp, synthetic construct
  source 1..80: mol_type = other DNA
tattttgaacataaaaatacgacccctcgcgtacatcaaccaaacgactccagcggatcggaagatgactttgaagacat

SEQ ID NO: 120601 - DNA, 80 bp, synthetic construct
  source 1..80: mol_type = other DNA
ggacgagctcattgggagaggaagggtgtctccaggaaacggctggatgatcaaggaaacagcttgcctcagcaaagcct

SEQ ID NO: 120602 - DNA, 80 bp, synthetic construct
  source 1..80: mol_type = other DNA
ccccccccccatcgtgggacgtaatgtggaagtgcctgaccaggctgaaacccacgttggtgggtcccactcccctgcta

SEQ ID NO: 120603 - DNA, 80 bp, synthetic construct
  source 1..80: mol_type = other DNA
gtgtggcctctcttactgctactgctcaccctaccccggagggcctacgcccaggatgctgagcaagcggcatcagtggg

SEQ ID NO: 120604 - DNA, 80 bp, synthetic construct
  source 1..80: mol_type = other DNA
ttcaccgtgggtgccggcgggggcgacatctttcacagcgtgtcgcatgcccgaccccgcctattactcctttgcctact

SEQ ID NO: 120605 - DNA, 80 bp, synthetic construct
  source 1..80: mol_type = other DNA
cgcgcactgggtggtgtcgcgaatggccgccaggcgcgcccacgccagccgcgcgtcgggatgctcggcaacgcgcgccg

SEQ ID NO: 120606 - DNA, 80 bp, synthetic construct
  source 1..80: mol_type = other DNA
gtagcttcaaggcccaatgtcagaccacgccatggcgtgccactctgcggagagtgcagtctgcgacagtgccccaggag

SEQ ID NO: 120607 - DNA, 80 bp, synthetic construct
  source 1..80: mol_type = other DNA
ggggggacagattcatctagccattatggcagtgttcaagatgtcgccaggatatgtgttgggtatatttctgaggaagc

SEQ ID NO: 120608 - DNA, 80 bp, synthetic construct
  source 1..80: mol_type = other DNA
gatttcattgaggaggtgcatgggggaacctgggtttcagccaccttggaacaggacaagtgtgtcactgtgatggcccc

SEQ ID NO: 120609 - DNA, 80 bp, synthetic construct
  source 1..80: mol_type = other DNA
gtcctggtcttgctagctttgctgaccttgtctccacactacaaacggtggctagctcgaggtatttggtggttgcagta

SEQ ID NO: 120610 - DNA, 80 bp, synthetic construct
  source 1..80: mol_type = other DNA
gctaacttcaaggctagcagagttatagacagcagaaagagtgtcaaaccaacaatcctcacagagggggaaggaagagt

SEQ ID NO: 120611 - DNA, 80 bp, synthetic construct
  source 1..80: mol_type = other DNA
ctggacacaggatggcctgggatatgatgatgaattggagccccaccagtacgttgatccttgctcagatcatgaggatc

SEQ ID NO: 120612 - DNA, 80 bp, synthetic construct
  source 1..80: mol_type = other DNA
gacagcgctactctcggtgctggggtcttgatcctcttcggcttctttaccttatcaccttggtacaagcattggatcgg

SEQ ID NO: 120613 - DNA, 80 bp, synthetic construct
  source 1..80: mol_type = other DNA
ccttctgtcgtgtgtcacggtgccagtgtctgcagtggaagtcaggaacaccagttctagttactacgccactaatgatt

SEQ ID NO: 120614 - DNA, 80 bp, synthetic construct
  source 1..80: mol_type = other DNA
tgaccaccttagcccgctaaaagattgggctagtgagggactgaaagacttggccgtagcggttgagccggtcatcttca

SEQ ID NO: 120615 - DNA, 80 bp, synthetic construct
  source 1..80: mol_type = other DNA
cgcccgcaacgggattccgcaggcatgtggatcttctagcgggcgccgcagtggtttgctcatccctgtacatcggggat

SEQ ID NO: 120616 - DNA, 80 bp, synthetic construct
  source 1..80: mol_type = other DNA
atggcgtgcgactacatcgctacgctcccccctgcaagcccctcctgagggatgagatctccttttctgtggggcttaac

SEQ ID NO: 120617 - DNA, 80 bp, synthetic construct
  source 1..80: mol_type = other DNA
gtgccctgagcgggtgtctgcatgtaggcctctgaccgatttccaccaaggatgggggcccatccagcattacgaagtga

SEQ ID NO: 120618 - DNA, 80 bp, synthetic construct
  source 1..80: mol_type = other DNA
ccggcagtcatacccgacagggaagtcctctaccgggagttcgatgagatggaggagtgctctcagcacttgccttacat

SEQ ID NO: 120619 - DNA, 80 bp, synthetic construct
  source 1..80: mol_type = other DNA
gtggggaccactgcggtgggagcggaatgtcaccaccgaccctagccgccgaccatactgttggcactatgctccccccc

SEQ ID NO: 120620 - DNA, 80 bp, synthetic construct
  source 1..80: mol_type = other DNA
tggaatggttcgacatctgttatgcccaattagttagcggggacactccagcagatttctggaaacggcgtcccctatca

SEQ ID NO: 120621 - DNA, 80 bp, synthetic construct
  source 1..80: mol_type = other DNA
ataatggggcaggcgtacgggttccaatattcaccatcgcagcgggtcgaatacttagttaagacgtggaagtccaaacg

SEQ ID NO: 120622 - DNA, 80 bp, synthetic construct
  source 1..80: mol_type = other DNA
ttagttcagctgcaatgattaatgttaatgtcactagaggtggtaaaattacattgaatgggacttatccacaaactaca

SEQ ID NO: 120623 - DNA, 80 bp, synthetic construct
  source 1..80: mol_type = other DNA
gaaacgagatggcgcagtgcctgcaaagagcagggaagaaagtgattcaactaaaccggaagtcgtatgagacggagtac

SEQ ID NO: 120624 - DNA, 80 bp, synthetic construct
  source 1..80: mol_type = other DNA
aagtaaatcatacatgcaatgaacagaacctcacactgttgtttgtcaatcgcacttttgcaggggcatatttgggattt

SEQ ID NO: 120625 - DNA, 80 bp, synthetic construct
  source 1..80: mol_type = other DNA
tcaccttccggcctcgccgccatacaaccacccaggactgcaactgttccatctatgcaggacacatcacaggtcaccga

SEQ ID NO: 120626 - DNA, 80 bp, synthetic construct
  source 1..80: mol_type = other DNA
cgtctggttcgtggcaagcgtaaaaatgagcaatgagatcgcgcagtgcttgcaacgagcagggaagcgagttatccaat

SEQ ID NO: 120627 - DNA, 80 bp, synthetic construct
  source 1..80: mol_type = other DNA
cactcggaatgccgacgtcatccctgctcgccgcaggggcgacactcgtgcttccctcctgagtcctagacccttggcca

SEQ ID NO: 120628 - DNA, 80 bp, synthetic construct
  source 1..80: mol_type = other DNA
aatgcgatatcttgaatgggaacagaagaaacgcctaatccttctctctctaaacgtaaataggttgaagtgaatgcctc

SEQ ID NO: 120629 - DNA, 80 bp, synthetic construct
  source 1..80: mol_type = other DNA
caacgcagctctgggggctgtgttcaccgatgagaacaagaggaagtcagcacgcgaagcggtcgaagaagaaagatttt

SEQ ID NO: 120630 - DNA, 80 bp, synthetic construct
  source 1..80: mol_type = other DNA
ccagtccggccggtcgccgccggccagggcttcccatccgcgatccaaccactcgaccagcgaccgcggctttgtggtac

SEQ ID NO: 120631 - DNA, 80 bp, synthetic construct
  source 1..80: mol_type = other DNA
gctaactagagaacccactgcttactggcttatcgaaattaatacgactcactatagggagacccaagcttctaggaaga

SEQ ID NO: 120632 - DNA, 80 bp, synthetic construct
  source 1..80: mol_type = other DNA
tgtcccaccgactgcttcaggaaacacccggagactacctatgccaagtgcgggtcagggccctggcttacaccacggtg

SEQ ID NO: 120633 - DNA, 80 bp, synthetic construct
  source 1..80: mol_type = other DNA
ttggaacactcattgacgccgtgaacaagcggggcagaaagcaaaacaaaagaggaggaaatgaaggctcaatcatgtgg

SEQ ID NO: 120634 - DNA, 80 bp, synthetic construct
  source 1..80: mol_type = other DNA
ataccgatggcccagctcaagggggggagacaccttatcttctgccattccaagaaaaagtgtgatgagatagcatctaa

SEQ ID NO: 120635 - DNA, 80 bp, synthetic construct
  source 1..80: mol_type = other DNA
gtatagtctactgaaagtgccgtactttgtacgagcgcacgccttgttgcgcgtgtgtgcattcttccggaacatcgccg

SEQ ID NO: 120636 - DNA, 80 bp, synthetic construct
  source 1..80: mol_type = other DNA
cttgctgggcccggctgatgactacacttcgaaagggtggaagctcctggctccaattactgcctatgtacaacaaaccc

SEQ ID NO: 120637 - DNA, 80 bp, synthetic construct
  source 1..80: mol_type = other DNA
cttgtataggctagggcctgtccagaatgagactacactaacgcaccccattacaaagtacatcatggcctgcatgtcag

SEQ ID NO: 120638 - DNA, 80 bp, synthetic construct
  source 1..80: mol_type = other DNA
agaacatcgtggacatccagtacttgtacgggatagggtcggccgtggtgtcgtgggctatcaagtgggagtacgttgtg

SEQ ID NO: 120639 - DNA, 80 bp, synthetic construct
  source 1..80: mol_type = other DNA
gcagtgccccagtcttaccaggtggctcacctgcatgctcccaccggcagcggtaagagcaccaaggtcccggctgcgta

SEQ ID NO: 120640 - DNA, 80 bp, synthetic construct
  source 1..80: mol_type = other DNA
tcctaacaatggtattgagaggctggtagacaaaatggcccgttggaaaacatacgcgcaggaacgccgagaatgggagg

SEQ ID NO: 120641 - DNA, 80 bp, synthetic construct
  source 1..80: mol_type = other DNA
gtcttttttgccgcctcgttcgccgccatcgcgtacctgcgcaccaacaacctcctgcgggtcacctgccagtcgaacga

SEQ ID NO: 120642 - DNA, 80 bp, synthetic construct
  source 1..80: mol_type = other DNA
acaaatgtctactcataccccaagatgcaccgcttgcgcaggactcgggctacgtgactccccccgaggaattggaaggc

SEQ ID NO: 120643 - DNA, 80 bp, synthetic construct
  source 1..80: mol_type = other DNA
tggtatcacaagcagaagcagccttggagaatcttgtcgcgctgaacgccatctctgctgccggaacacacggtatcggc

SEQ ID NO: 120644 - DNA, 80 bp, synthetic construct
  source 1..80: mol_type = other DNA
gctgcctcggcgtgcttacgcttttgatgacggccaagcggcggcaatcggctctggagtcattgtcgctctgacagtct

SEQ ID NO: 120645 - DNA, 80 bp, synthetic construct
  source 1..80: mol_type = other DNA
gcggcgcgtaaaacttctgaacggtcacagcctcgtggacggcggcagcctatccccacggcgcgtcggagcgaaggccg

SEQ ID NO: 120646 - DNA, 80 bp, synthetic construct
  source 1..80: mol_type = other DNA
cacatcgcattgctggatccctgtaacacctactgttgccgtgcgcgccccgggcgttatcacggcatccatccgttccc

SEQ ID NO: 120647 - DNA, 80 bp, synthetic construct
  source 1..80: mol_type = other DNA
caccaagcgatcaggcggagtctggggtgggttcttctacttacccttctgacacaacaccaccatctgatgaggctgac

SEQ ID NO: 120648 - DNA, 80 bp, synthetic construct
  source 1..80: mol_type = other DNA
tccttttcgccggagtcgacgctgagacccgaacaacaggcggggcagtggccttcaacacgcggggtcttgccagcttg

SEQ ID NO: 120649 - DNA, 80 bp, synthetic construct
  source 1..80: mol_type = other DNA
ctcggtgggcgtgaggggctgcagctggaccaggggccgcagctgctcgacggcacctctggagatcacgtacagctccc

SEQ ID NO: 120650 - DNA, 80 bp, synthetic construct
  source 1..80: mol_type = other DNA
ataattgccctgctgaccctagtgttcgggggcgtgacttacactgatttgattcggtatgtgatacttgttggagcagc

SEQ ID NO: 120651 - DNA, 80 bp, synthetic construct
  source 1..80: mol_type = other DNA
ggccggtcctgggcccagcccgggtacccctggcccctctacgggaatgagggctgtgggtgcgcaggttggctcctgtc

SEQ ID NO: 120652 - DNA, 80 bp, synthetic construct
  source 1..80: mol_type = other DNA
actacttaatgaaatttcacatgcagaagctagagaggcaacatattttaagcaaacacataatcaatcctcaggtgcgt

SEQ ID NO: 120653 - DNA, 80 bp, synthetic construct
  source 1..80: mol_type = other DNA
aggtggtagacggtctggcctctggcattagcggggtggtggacctggccaaccaggcagtgcaaaataagattaacagt

SEQ ID NO: 120654 - DNA, 80 bp, synthetic construct
  source 1..80: mol_type = other DNA
ctatttgggctttaagcccctccgaaaaaaacagcccgcaggacttgctagaaaacatgttgttgccacagctcacatct

SEQ ID NO: 120655 - DNA, 80 bp, synthetic construct
  source 1..80: mol_type = other DNA
ggaaccagatgacgttgactgctggtgcaatgccacagacacatgggtgacctatgggacgtgttctcaaaccggcgaac

SEQ ID NO: 120656 - DNA, 80 bp, synthetic construct
  source 1..80: mol_type = other DNA
agatattacagcaaagggtttgcaaattggagttgatactactgaaaataatgcaggtcctatttatgcaaatgaaatat

SEQ ID NO: 120657 - DNA, 80 bp, synthetic construct
  source 1..80: mol_type = other DNA
tgcaagaggattgtgaccatagaggcccatctttgaggaccaccactgcatctggaaaattggtcacgcagtggtgctgt

SEQ ID NO: 120658 - DNA, 80 bp, synthetic construct
  source 1..80: mol_type = other DNA
tggcggcgtttcttgtcaaccccaatgtcaccaccgtgagagaggcaggtgtgttggtgacggcagccacactcaccttg

SEQ ID NO: 120659 - DNA, 80 bp, synthetic construct
  source 1..80: mol_type = other DNA
tgcgcaagcgttgaaacaggtagttcaaggtggtggcaatatgttccgagacaaagaaataaagaatccagcggcgcagc

SEQ ID NO: 120660 - DNA, 80 bp, synthetic construct
  source 1..80: mol_type = other DNA
gctgcagcagcgcgcgaataaactgctgccgccgccgctccgtcctgcaggaatacaacatggcagtggtctcctcagcg

SEQ ID NO: 120661 - DNA, 80 bp, synthetic construct
  source 1..80: mol_type = other DNA
agggaaatttactcaactgtgccttggaatcatccacctggcgttaccaggaaaccaacgcagtggcctctaatgcctta

SEQ ID NO: 120662 - DNA, 80 bp, synthetic construct
  source 1..80: mol_type = other DNA
tttgaaaagcagttgggacaagtaatgctcttagttctctgcgtgactcaagtattgatgatgaggactacatgggcctt

SEQ ID NO: 120663 - DNA, 80 bp, synthetic construct
  source 1..80: mol_type = other DNA
ggatcagcctcatctatggtgaatggagtggtgagattgctcacaaaaccatgggatgttatccccatggtcacacaaat

SEQ ID NO: 120664 - DNA, 80 bp, synthetic construct
  source 1..80: mol_type = other DNA
cagaaactgcccatcaacgcactgagcaactcgttgctacgccaccacaatttggtatattccaccacctcacgcagtgc

SEQ ID NO: 120665 - DNA, 80 bp, synthetic construct
  source 1..80: mol_type = other DNA
atggagaaagcctccttcattgaagttaaaagctgccactggccaaagtcacacaccctctggagcaatggagtattgga

SEQ ID NO: 120666 - DNA, 80 bp, synthetic construct
  source 1..80: mol_type = other DNA
tttttgacatcactaagctgctgatagcggtgataggcccattatacctaatacaggccgccatcaccgccaccccctac

SEQ ID NO: 120667 - DNA, 80 bp, synthetic construct
  source 1..80: mol_type = other DNA
atgagctgggcctggctcaggcgccccgttgcgtacagcggtggggccgccggcgtgtttttgggacccccggcctggcg

SEQ ID NO: 120668 - DNA, 80 bp, synthetic construct
  source 1..80: mol_type = other DNA
tatcggaaagaagccatcttggaggtggatagaaccgaagccagaagggccagaagagagggaaacaaggtaggaggcca

SEQ ID NO: 120669 - DNA, 80 bp, synthetic construct
  source 1..80: mol_type = other DNA
ttgttgtgcagggtcgctagtggcgttgacttggcccaaactgtcatccttaagcttgacaagacagtggaacaccttcc

SEQ ID NO: 120670 - DNA, 80 bp, synthetic construct
  source 1..80: mol_type = other DNA
tcccgttggctgaggacgtcgagaaggacaaacccaaccgtccagtagtcccatcccccgatcccaacaactcccccgcg

SEQ ID NO: 120671 - DNA, 80 bp, synthetic construct
  source 1..80: mol_type = other DNA
gaaaccttcagtggggtggcacgactggcagcaagtgccattctgttccaaccacttcactgagctcatcatgaaagatg

SEQ ID NO: 120672 - DNA, 80 bp, synthetic construct
  source 1..80: mol_type = other DNA
tacgtggtcagacccatcatacaaatgccacagtaatggcagcattactattcatgcttttaatattacttctggccaat

SEQ ID NO: 120673 - DNA, 80 bp, synthetic construct
  source 1..80: mol_type = other DNA
tgcccatgggcttttcttatgacacccgctgctttgactcaacagtgactgaaagagacattcaagttgaggaagaaatc

SEQ ID NO: 120674 - DNA, 80 bp, synthetic construct
  source 1..80: mol_type = other DNA
acgaggataacgtcaccaacccagaagatatgagaccatactgctggcactacccaccaaaacagtgtggcatagtctcc

SEQ ID NO: 120675 - DNA, 80 bp, synthetic construct
  source 1..80: mol_type = other DNA
agtcgttatctgtgaaagtgcgggggtccaggaggacgcggcgagcctgagagccttcacggaggctatgaccaggtact

SEQ ID NO: 120676 - DNA, 80 bp, synthetic construct
  source 1..80: mol_type = other DNA
cgctcccatttcagacattcaaactgaaatcccggacagggcatggaacgcagggtatgaatggatcactgagttcgttg

SEQ ID NO: 120677 - DNA, 80 bp, synthetic construct
  source 1..80: mol_type = other DNA
gtaccggtttcaccaaagcttgcggtgctcccccatgcgaggtgcagaccaacaacggcacctggaactgccccactgac

SEQ ID NO: 120678 - DNA, 80 bp, synthetic construct
  source 1..80: mol_type = other DNA
ctacgtgcccgagacggacgcgtcggctaaggtcacgcaactgctcagctccctcacagtaacatctcttctgaagaggc

SEQ ID NO: 120679 - DNA, 80 bp, synthetic construct
  source 1..80: mol_type = other DNA
agccaactatcagctccgtcgttgaaggccacttgccatacgcataggcctcatccagacgctgagctagtggatgccaa

SEQ ID NO: 120680 - DNA, 80 bp, synthetic construct
  source 1..80: mol_type = other DNA
gcgacagttccggtgcggcaggccatcgcagcgctccgcaaaattagaaagacagttggactgctattggactctctaaa

SEQ ID NO: 120681 - DNA, 80 bp, synthetic construct
  source 1..80: mol_type = other DNA
cgtgtcccgggacacatacctaggtcacttgctgacactgtaccgcgaggccataggtcaggcgcatgtggacgagcata

SEQ ID NO: 120682 - DNA, 80 bp, synthetic construct
  source 1..80: mol_type = other DNA
ttcgtccgtcttctggtaaggcgccccatcccgaggccccacgtcggtcgccgaactgggcgaccgccggcgaggtggac

SEQ ID NO: 120683 - DNA, 80 bp, synthetic construct
  source 1..80: mol_type = other DNA
gacagtgctggaccaggccgaaacggcggggatccgacttgtggtgctagccacggctacgccccctggctcggtcacaa

SEQ ID NO: 120684 - DNA, 80 bp, synthetic construct
  source 1..80: mol_type = other DNA
gttgcctggagaacagccactctgattttggctggagtttcacttttaccagtgtgccagtcttcgagcttgagaaaaac

SEQ ID NO: 120685 - DNA, 80 bp, synthetic construct
  source 1..80: mol_type = other DNA
cccccgccctcagactgtgatcagagcagcgaggcgtcttacacttcgatgcctcccctcgagggtgaaccggaggatcc

SEQ ID NO: 120686 - DNA, 80 bp, synthetic construct
  source 1..80: mol_type = other DNA
aatgagtttcttcgggaaggcgggaagccccggggcaccgacgcaggccaagcccctgttgcgtcggtggtagtggcatg

SEQ ID NO: 120687 - DNA, 80 bp, synthetic construct
  source 1..80: mol_type = other DNA
gccccgtggtcagcaagactatacaaactttttaagtgcattaagactcatggtatctgaggtgccccagagcgaggtgt

SEQ ID NO: 120688 - DNA, 80 bp, synthetic construct
  source 1..80: mol_type = other DNA
cagcagacacggggtctcttgggctgcatcatcaccagcctcaccggtcgggacaaaaatcaagtggaggtggaagtcca

SEQ ID NO: 120689 - DNA, 80 bp, synthetic construct
  source 1..80: mol_type = other DNA
cagaaggaaagctggccctgcagacatcgggccccctttctgccactgataacaacacccttactattactacttcaccc

SEQ ID NO: 120690 - DNA, 80 bp, synthetic construct
  source 1..80: mol_type = other DNA
ttcagcccttatctgacagggcgtctcccatcctgggcaggagttcgtcagaatgttatgggatctactgtggatggaag

SEQ ID NO: 120691 - DNA, 80 bp, synthetic construct
  source 1..80: mol_type = other DNA
gccagtgctccgttggagtcgttgcgacgccacgtggacatgatggtaggtgctgccactctgtgctccgccctctacgt

SEQ ID NO: 120692 - DNA, 80 bp, synthetic construct
  source 1..80: mol_type = other DNA
ggatggcaagctgaagcgatgcgatcggcacagcgcagaacagccgccggaatcatgaagaatgcagtggtggatggaat

SEQ ID NO: 120693 - DNA, 80 bp, synthetic construct
  source 1..80: mol_type = other DNA
agcgcctgattcgccacctggacggcgagaagaacgtcacatggaccctgttcgaccgggacaccagcatgtcgctcgcc

SEQ ID NO: 120694 - DNA, 80 bp, synthetic construct
  source 1..80: mol_type = other DNA
actgggccgtaaaaaccaagctcaaactcactccattgcgcgacgctcaccaccttgatttatctgggtggtttgtggcg

SEQ ID NO: 120695 - DNA, 80 bp, synthetic construct
  source 1..80: mol_type = other DNA
ttgggaataacgccaagatcaccgagagtctgttaaaaaggtttattcccgaagtgtggcaccccccggacgacgtgacc

SEQ ID NO: 120696 - DNA, 80 bp, synthetic construct
  source 1..80: mol_type = other DNA
atccgtggcccacgaccataccggacagagatactactacctcacaagagaccctaccacaccattggtccgagctgctt

SEQ ID NO: 120697 - DNA, 80 bp, synthetic construct
  source 1..80: mol_type = other DNA
ggtggttgtgatccccgagccagggcaacaaaggtccatccaagacaaccaagtggcatacctcattattggcatcctga

SEQ ID NO: 120698 - DNA, 80 bp, synthetic construct
  source 1..80: mol_type = other DNA
agaaatcttgcggcggtctcggagattcaccccggccctgcccgtttgggcacggccggattacaaccccccgttgttgg

SEQ ID NO: 120699 - DNA, 80 bp, synthetic construct
  source 1..80: mol_type = other DNA
cgacagggcaggtgcaaggccacacgatcagccgtttcacaggcctcttttcaagtgggtcggctcagaaaatccagctt

SEQ ID NO: 120700 - DNA, 80 bp, synthetic construct
  source 1..80: mol_type = other DNA
gcctggcgatggcgcacgaagcgaccgaacagctgaaagttggcggcctgggcgtcgctgagggccagctggagccggtt

SEQ ID NO: 120701 - DNA, 80 bp, synthetic construct
  source 1..80: mol_type = other DNA
gcatggtagactacccctaccggctgtggcactatccttgcaccgtgaattttaccatccataaggtccgggtctttgtc

SEQ ID NO: 120702 - DNA, 80 bp, synthetic construct
  source 1..80: mol_type = other DNA
tgagtacaccaccgggcccagcacaccttgcccatcacccaactacacccgcgcactatggcgcgtggctgccaacagct

SEQ ID NO: 120703 - DNA, 80 bp, synthetic construct
  source 1..80: mol_type = other DNA
aaggggagatccaggtgctgtccaccgccacccagactttcctgggcacaaccatcaatggcgtgctgtggactgtttac

SEQ ID NO: 120704 - DNA, 80 bp, synthetic construct
  source 1..80: mol_type = other DNA
cctggggcccagctacctccttagagcgaccctgctacgggtaccgtactttgtgagggcccacgccctgctacgagtat

SEQ ID NO: 120705 - DNA, 80 bp, synthetic construct
  source 1..80: mol_type = other DNA
tcaaaaaagaaacaaaaatgaagccctgctatggctcatttgccagacctaccaatgaaaaaggcggacaagctaaattt

SEQ ID NO: 120706 - DNA, 80 bp, synthetic construct
  source 1..80: mol_type = other DNA
gatgcatagtggattacccttacaggctgtggcactatccttgcactgtcaactacaccatccataaagtgcgcatgtat

SEQ ID NO: 120707 - DNA, 80 bp, synthetic construct
  source 1..80: mol_type = other DNA
cattgtggggaggaagcatgaaggggctcttactaattatcctttccctggttggtggtgtagtgtcatgccacgaacag

SEQ ID NO: 120708 - DNA, 80 bp, synthetic construct
  source 1..80: mol_type = other DNA
aaaaccaacctcgagaaactcgagcagttctgggccaaacacatgtggaacttcatcagcgggatccaatacctggctgg

SEQ ID NO: 120709 - DNA, 80 bp, synthetic construct
  source 1..80: mol_type = other DNA
atgtgggtttatacaacagatgtttccagttgaaatgtcgcccggcatagaatctgaggatgatcccaattatgacgtta

SEQ ID NO: 120710 - DNA, 80 bp, synthetic construct
  source 1..80: mol_type = other DNA
acgacccccgcgggccgttttttgtggggctgatcgcctgcgtgcagctggagcgcgtcctcgagacggccgccagcgct

SEQ ID NO: 120711 - DNA, 80 bp, synthetic construct
  source 1..80: mol_type = other DNA
gtcatcgcgcagcaatttaaagaaaaggttgtgggtctcctccaacatgctggtaagcaagcagaagacataagacccgc

SEQ ID NO: 120712 - DNA, 80 bp, synthetic construct
  source 1..80: mol_type = other DNA
agtaatttagaagtccacagtgattacattgaattgatggttgtggacctgccacctccaaaatgtgaggtttcctcctc

SEQ ID NO: 120713 - DNA, 80 bp, synthetic construct
  source 1..80: mol_type = other DNA
tggaacatagtccgtcttaagagtggggtggacgtctttcatatggcggctgagccgtgtgacacgttgctgtgtgacat

SEQ ID NO: 120714 - DNA, 80 bp, synthetic construct
  source 1..80: mol_type = other DNA
cggcctcaacgctgtagcctactatagaggcttagacgtttcggtgatacccgcttcgggtgacgtcgtggtatgtgcca

SEQ ID NO: 120715 - DNA, 80 bp, synthetic construct
  source 1..80: mol_type = other DNA
cgtcagcggaatagcgcaaacaaatgcagaaccagatggaccgatgccagagttggaagaagagatgttcaaaaagcgaa

SEQ ID NO: 120716 - DNA, 80 bp, synthetic construct
  source 1..80: mol_type = other DNA
gcggccacgttggcctcaaacccgctctccacggtcaggccgacgatgaggggcgcgacggcgacgtccgcgtcgccgct

SEQ ID NO: 120717 - DNA, 80 bp, synthetic construct
  source 1..80: mol_type = other DNA
tcagcttggacattgtacgccgtggccactacagtaataacaccaatgttaagacataccatagagaattctacagcaaa

SEQ ID NO: 120718 - DNA, 80 bp, synthetic construct
  source 1..80: mol_type = other DNA
agtgaggaacgattgagcaatccagtgagttttgagatgtacggggccacctatacggtgtgccccacagacttgccgga

SEQ ID NO: 120719 - DNA, 80 bp, synthetic construct
  source 1..80: mol_type = other DNA
tctctatgaccacctatcccccatgagggactgggctgctgagggtctcaaggaactggcagtggccacagagcccgtca

SEQ ID NO: 120720 - DNA, 80 bp, synthetic construct
  source 1..80: mol_type = other DNA
gggcggcacatagagccagagcaaatgaaagtgcaacaatcttgatgactgccacccctccgggaaccagtgatgaattt

SEQ ID NO: 120721 - DNA, 80 bp, synthetic construct
  source 1..80: mol_type = other DNA
aggagactaagctgccgatcaacgcgctgagcaacaccttgttgcgtcatcacaatctagtctactccacaacatcgcgt

SEQ ID NO: 120722 - DNA, 80 bp, synthetic construct
  source 1..80: mol_type = other DNA
acagattgtgtccaccgcaacgcagaccttccttgcaactgcagtgaacggtgtgctatggaccgtgtatcacggtgcag

SEQ ID NO: 120723 - DNA, 80 bp, synthetic construct
  source 1..80: mol_type = other DNA
cccagacggcgggaccatggcatttaggaaaattagagctggacttcaactattgtgaaggaacaacggttgtcattaca

SEQ ID NO: 120724 - DNA, 80 bp, synthetic construct
  source 1..80: mol_type = other DNA
actgtgctggaccaggcggagacggctggggccaggctcactgtcctggctacagccactcctcccggctcagtgacggt

SEQ ID NO: 120725 - DNA, 80 bp, synthetic construct
  source 1..80: mol_type = other DNA
cgcttcctatttgggcaagaccagactacaatccaccattgctccagccttggcaatctccggactatgaaccacccaca

SEQ ID NO: 120726 - DNA, 80 bp, synthetic construct
  source 1..80: mol_type = other DNA
cacttgacagaggtggaacgggaggagcgtcgtttggccttatggcttgtgttcggcctactggcatcggcttatcattg

SEQ ID NO: 120727 - DNA, 80 bp, synthetic construct
  source 1..80: mol_type = other DNA
actgtctatcacggtgccgggtcaaggtcgcttgctgccagtaagcggcccgcgctccaaatgtacaccaatgtggatca

SEQ ID NO: 120728 - DNA, 80 bp, synthetic construct
  source 1..80: mol_type = other DNA
agcagggtcctatagctcaatgccccctcttgagggggagcctggtgaccctgacctaagctcaggttcttggtccactg

SEQ ID NO: 120729 - DNA, 80 bp, synthetic construct
  source 1..80: mol_type = other DNA
aaggcatatggtaccgaccccaacatcagaactggggtaaggaccattaccacgggcgcttccattacgtattccaccta

SEQ ID NO: 120730 - DNA, 80 bp, synthetic construct
  source 1..80: mol_type = other DNA
catgggatctggtggtcccttgttgccttctgcgttgcttggcacattcggggcaggattttccccatagcggtctacag

SEQ ID NO: 120731 - DNA, 80 bp, synthetic construct
  source 1..80: mol_type = other DNA
cttcaaagtgcaaccagcattcttagcgggtctattttttagaatgcaatggagtaaccaggaaaacatcgtgatggtta

SEQ ID NO: 120732 - DNA, 80 bp, synthetic construct
  source 1..80: mol_type = other DNA
caaactctacagccaaagaacagataatggcatttgtaagatgttgcacaatggcttccaaaaggcaaactgccctcacg

SEQ ID NO: 120733 - DNA, 80 bp, synthetic construct
  source 1..80: mol_type = other DNA
gactggctattggagcatctaagccgccgagccaaagtgaggatgtgtaccaaagaggagttcatagcgaaggtgaggtc

SEQ ID NO: 120734 - DNA, 80 bp, synthetic construct
  source 1..80: mol_type = other DNA
gaaagcaaagcaattcgcaaggacgaagcgggactgatttacaatgctctgctggaaagggtggcccgatacaacagtac

SEQ ID NO: 120735 - DNA, 80 bp, synthetic construct
  source 1..80: mol_type = other DNA
ctctatctactgggctaatccatctccaccagaacatcgtggatgtccagtacctctatggcgtgtcccccatgatttca

SEQ ID NO: 120736 - DNA, 80 bp, synthetic construct
  source 1..80: mol_type = other DNA
acaccctgcgcctgcggctcctcagacctctacttggtcacgaggcacgccgatgtcatccccgtgcgccggcggggtga

SEQ ID NO: 120737 - DNA, 80 bp, synthetic construct
  source 1..80: mol_type = other DNA
cacctacgctaacatcagcggcccctcccaggatagaccctattgctggcactaccctcccaggccatgccgggtggagc

SEQ ID NO: 120738 - DNA, 80 bp, synthetic construct
  source 1..80: mol_type = other DNA
tgtccggatgtgcgggcagcccggacggcgtgggttgcggactttctgcggtgcggcccaaatggccctttaaacgtgtg

SEQ ID NO: 120739 - DNA, 80 bp, synthetic construct
  source 1..80: mol_type = other DNA
gagaccagagagggccaaccagggtgcctgaacttgacctgggagttggaactcggtgtgtggtcttagctgaggataag

SEQ ID NO: 120740 - DNA, 80 bp, synthetic construct
  source 1..80: mol_type = other DNA
gcttgcctcaggaaacttggggtacctcccttgcgagcctggagacatcgagccagagctgtcagagccaaactcattgc

SEQ ID NO: 120741 - DNA, 80 bp, synthetic construct
  source 1..80: mol_type = other DNA
cggaagcgcccagagcgccttacctggtacgagctacagcaggagtgcagggatgagataggcctgatgcaggataaata

SEQ ID NO: 120742 - DNA, 80 bp, synthetic construct
  source 1..80: mol_type = other DNA
ccctgcccgtgtacaggattaccatgtccccgaccggccaggcgtttgccgcggcggcgcgggacgactgggcccgcgtg

SEQ ID NO: 120743 - DNA, 80 bp, synthetic construct
  source 1..80: mol_type = other DNA
ctgcactacctatatgggcgaggccagattacaatcctccgctattggagtcttggaaagcgccggattacgaccccccc

SEQ ID NO: 120744 - DNA, 80 bp, synthetic construct
  source 1..80: mol_type = other DNA
gtcctgggcatatggccgctcttattgctcctcttgtgtttgccgcatcgggcgttcgccatggataacgagcaagctgc

SEQ ID NO: 120745 - DNA, 80 bp, synthetic construct
  source 1..80: mol_type = other DNA
ctccatttatacaggccacgtcaccggccacaagatggcttgggatatgatgatgaattggtcgcccacaaccactctgg

SEQ ID NO: 120746 - DNA, 80 bp, synthetic construct
  source 1..80: mol_type = other DNA
gaggctccccgccgtctcaggccagttcctctgcaagccagctgtcggcgccttccttgaaggcgacgtgcacaacagcc

SEQ ID NO: 120747 - DNA, 80 bp, synthetic construct
  source 1..80: mol_type = other DNA
aactgcctgtcgttatccggaatgggttatcatttaggtctcggaggttattgtccgacatgcactgcatctggagaacc

SEQ ID NO: 120748 - DNA, 80 bp, synthetic construct
  source 1..80: mol_type = other DNA
cacgatgcggtcccccgttttcacagacaattccacacctccagctgtgcccctgacctatcaggtcgcccacttgcatg

SEQ ID NO: 120749 - DNA, 80 bp, synthetic construct
  source 1..80: mol_type = other DNA
gtatcctccggctctccctatttgggctaggccagactacaaccctccactgttggatcgctggaaatcaccggattatg

SEQ ID NO: 120750 - DNA, 80 bp, synthetic construct
  source 1..80: mol_type = other DNA
atcatggcaaagaacgaggtcttctgcgtcgcgcctgagaaggggggccgtaaaccggcccgccttatcgtattccctga

SEQ ID NO: 120751 - DNA, 80 bp, synthetic construct
  source 1..80: mol_type = other DNA
gaggcgagggcatctgccatacttcatgcccctgcggggctatgatcacaggccacgtgaagaatgggaccatgaaaatc

SEQ ID NO: 120752 - DNA, 80 bp, synthetic construct
  source 1..80: mol_type = other DNA
ccatcacagccatgctccggaggctccacgagtggatcaacggagactggacaaccccatgcgctacttcctggttgaag

SEQ ID NO: 120753 - DNA, 80 bp, synthetic construct
  source 1..80: mol_type = other DNA
tggtggatgagaagtaggtgacaaagtcgaccaggcctgactcagcgaaccgcgtcgccagggtctgggtaaaactccga

SEQ ID NO: 120754 - DNA, 80 bp, synthetic construct
  source 1..80: mol_type = other DNA
aagggttcctctggaggtcctattatgtgtccttcagggcatgttgcggggatctttagggccgccgtgtgcaccagagg

SEQ ID NO: 120755 - DNA, 80 bp, synthetic construct
  source 1..80: mol_type = other DNA
atagatccaaacatcaggactggtgtcaggacgatcacaacggggggggcgattacctactccacctatggtaaattctt

SEQ ID NO: 120756 - DNA, 80 bp, synthetic construct
  source 1..80: mol_type = other DNA
ggactcgcagactccagttgacggcggaatggacgggactggctgaatggaaccctgagttggtcaacgagggtggtgag

SEQ ID NO: 120757 - DNA, 80 bp, synthetic construct
  source 1..80: mol_type = other DNA
ccgtggcggtagacgtatggaacgtcatgtacacattgttggaacgtttataccctgtgggtaaacgcgagaatttacac

SEQ ID NO: 120758 - DNA, 80 bp, synthetic construct
  source 1..80: mol_type = other DNA
caaagtccggatgtttgtggctggccttgagcacaggttcgacgccgcttgcaactggaccaggggggagcgttgtgact

SEQ ID NO: 120759 - DNA, 80 bp, synthetic construct
  source 1..80: mol_type = other DNA
tatgctacccgctttaacagcagcgggtgcccagagcggcttgcttcatgcaagcggttggaagacttcggccagggttg

SEQ ID NO: 120760 - DNA, 80 bp, synthetic construct
  source 1..80: mol_type = other DNA
caaaccagatatggtaatgtacaccgaaaatgtttatctggaaacacctgacactcatgtggtgttcaagccaggaaaag

SEQ ID NO: 120761 - DNA, 80 bp, synthetic construct
  source 1..80: mol_type = other DNA
acaccttctcctacattgcccaggaataaagaatcgtgaacctgttgcatgttatgtttcaacgtgtttatttttcaatt

SEQ ID NO: 120762 - DNA, 80 bp, synthetic construct
  source 1..80: mol_type = other DNA
cagctaaacgtcacctctggccacccttatcccccacacccgcgaaaacatatcagttccatgcaagccttaagttatat

SEQ ID NO: 120763 - DNA, 80 bp, synthetic construct
  source 1..80: mol_type = other DNA
gtaggaaaaggtgtgcagcacacggattacaagaggatcaaatccagaatagaaaaactgaaggaggagtatgcagccac

SEQ ID NO: 120764 - DNA, 80 bp, synthetic construct
  source 1..80: mol_type = other DNA
gcgtcggcccgcgtaaccgccatactgtcttccctcacagtgacatctcttctcagacggcttcacaaatggataaacga

SEQ ID NO: 120765 - DNA, 80 bp, synthetic construct
  source 1..80: mol_type = other DNA
agttcacctgcatggtgggcgtcaaccccatagtcatcacccagcagtctggcgagaccagcggctgcatccactgctcc

SEQ ID NO: 120766 - DNA, 80 bp, synthetic construct
  source 1..80: mol_type = other DNA
cactgggctcggggtcggcagtgttaccagtgataccacgaggaggatcacaagcatcttctccccgggccccagtcaaa

SEQ ID NO: 120767 - DNA, 80 bp, synthetic construct
  source 1..80: mol_type = other DNA
gtcatactgctcacttgcttgttgcacccgcatttggggtttgaggtcaccaaaatcatcttggcactaatgggccccat

SEQ ID NO: 120768 - DNA, 80 bp, synthetic construct
  source 1..80: mol_type = other DNA
gagcagataccgggggagatagcgtccagcagcctcccgacgaggctgccgcttcagaggagggatcactgtcctccatg

SEQ ID NO: 120769 - DNA, 80 bp, synthetic construct
  source 1..80: mol_type = other DNA
ggatgcttattttgttgggccaagctgaggcagcgctggagaaactggtcattttgcacgcagctagtgctgctagcagc

SEQ ID NO: 120770 - DNA, 80 bp, synthetic construct
  source 1..80: mol_type = other DNA
ctcaatatccgttgcgtttcctgtcaaaagtatgcgtagtgctgaacatttcgtgatgaatgccaccgaggaagaagcac

SEQ ID NO: 120771 - DNA, 80 bp, synthetic construct
  source 1..80: mol_type = other DNA
tgcaaccggagcccaggccatgcgagacctcggaggagaggctccattttttggggtagcagggcatgtaatagctttgg

SEQ ID NO: 120772 - DNA, 80 bp, synthetic construct
  source 1..80: mol_type = other DNA
tccgccagacggggtcgtgagatactactcggtccggccgacactgaggttcaaggtggatggaggctcctcgccccaat

SEQ ID NO: 120773 - DNA, 80 bp, synthetic construct
  source 1..80: mol_type = other DNA
ggcacataaaccgtactgccctcaattgcaatgacagtctgaacactgggtttattgcggctttgttctacacccgcagc

SEQ ID NO: 120774 - DNA, 80 bp, synthetic construct
  source 1..80: mol_type = other DNA
caatgaggcagtccttgatccaaagttttgggaaatggtcgatgcagaacgcaaacttcatcagcaggggcgatgccaat

SEQ ID NO: 120775 - DNA, 80 bp, synthetic construct
  source 1..80: mol_type = other DNA
cgcagggcccggggtcgccgtgggaccccccctgactcatacacagagacacgcccccacaacaaacacacagggaccgg

SEQ ID NO: 120776 - DNA, 80 bp, synthetic construct
  source 1..80: mol_type = other DNA
accccaacatagaggaggtggctctcggccacgagggtgaaatcccattctatggcaaggctatccctctagctcacatc

SEQ ID NO: 120777 - DNA, 80 bp, synthetic construct
  source 1..80: mol_type = other DNA
ccatcaaccactgtggcaatcgtggtgggagtgattgcgggcttcataactataatcattgtcattctgtgctacatctg

SEQ ID NO: 120778 - DNA, 80 bp, synthetic construct
  source 1..80: mol_type = other DNA
gtaaccatgtctcccccacgcactatgtgcctgagagcgacgccgcagcgcgtgtcactcaggtcctctccagccttacc

SEQ ID NO: 120779 - DNA, 80 bp, synthetic construct
  source 1..80: mol_type = other DNA
aggtcgtgacctatgctttgaataccctcaccaacataaaggtccaattgatccggatgatggagggggaaggagtcata

SEQ ID NO: 120780 - DNA, 80 bp, synthetic construct
  source 1..80: mol_type = other DNA
ctacaaggtgctagtgctgaacccctctgtcgctgcgactctgggcttcggggcatacatgtccaaggcacatggcattg

SEQ ID NO: 120781 - DNA, 80 bp, synthetic construct
  source 1..80: mol_type = other DNA
aggtcgtcaccagcacctgggtgctggtgggcggcgtcttagccgccttggccgcttactgcctgtctacgggcagtgtg

SEQ ID NO: 120782 - DNA, 80 bp, synthetic construct
  source 1..80: mol_type = other DNA
tctgggtcgcatccaggcccgggcgctgcagaaagttgtaaaaggagataagcccgctaaatatgagccgcgacaggaac

SEQ ID NO: 120783 - DNA, 80 bp, synthetic construct
  source 1..80: mol_type = other DNA
gggagccaggtgatccagacctagataccaattcatggtccacgtgttccgacaccgaagactcggtcgtatgctgttcc

SEQ ID NO: 120784 - DNA, 80 bp, synthetic construct
  source 1..80: mol_type = other DNA
tatacctctttaactgggcggtaaaaaccaaactcaaactcactccattgcctgccgctgccaaactcgacttgtcgagc

SEQ ID NO: 120785 - DNA, 80 bp, synthetic construct
  source 1..80: mol_type = other DNA
tatgtttgtatgccttattattatgtggctcatctgctgcctaaagcgcaaacgcgcccgaccacccatctatagtccca

SEQ ID NO: 120786 - DNA, 80 bp, synthetic construct
  source 1..80: mol_type = other DNA
tgcctggcctatgctcctggtgttgttgagccttccccccagagcctacgcttggactggggatgtggcgccaacgctag

SEQ ID NO: 120787 - DNA, 80 bp, synthetic construct
  source 1..80: mol_type = other DNA
ccgtgtgccttgggttcaagactggcaaacacaatttatatgctggaccccagtaacacctccagtggcagtcagcggcg

SEQ ID NO: 120788 - DNA, 80 bp, synthetic construct
  source 1..80: mol_type = other DNA
gacccctcccacatcacagcagagacggctaagcgtagactggccagggggtccccaccctctttggccagttcctcagc

SEQ ID NO: 120789 - DNA, 80 bp, synthetic construct
  source 1..80: mol_type = other DNA
caacagcaagggggacctttgcggctatcggagatgccgcgcaagcggcgtctataccacaagcttcgggaacacagtga

SEQ ID NO: 120790 - DNA, 80 bp, synthetic construct
  source 1..80: mol_type = other DNA
gaaacaatcactttgattgttgcccttgccgtcatgacagcaggagtgtttctcctccttgttcagagaagaggcattgg

SEQ ID NO: 120791 - DNA, 80 bp, synthetic construct
  source 1..80: mol_type = other DNA
aaggtgagagagtctaacaccaccgagtgtgacgcgaaaatcataggcacagcagtaaaaaataacatggctgtgcacag

SEQ ID NO: 120792 - DNA, 80 bp, synthetic construct
  source 1..80: mol_type = other DNA
cagactgggccgccgcgggtcttagggacctggcagtggccacagagccagtcgtgttcgcccctatggagaagagggtg

SEQ ID NO: 120793 - DNA, 80 bp, synthetic construct
  source 1..80: mol_type = other DNA
cgatacactcaaaaggagaatggatgacaacagaagacatgttgcaggtgtggaacagagtatggattgaagagaatgaa

SEQ ID NO: 120794 - DNA, 80 bp, synthetic construct
  source 1..80: mol_type = other DNA
ccgtttaactatatgcaatgcgccctggtgccggccagctggaaccggaggttaataccagccgaccctatacccattga

SEQ ID NO: 120795 - DNA, 80 bp, synthetic construct
  source 1..80: mol_type = other DNA
cggcgtcagggtctgcgagaagatggccctttatgacattacacaaaaacttcctcaggcggtgatgggggcttcttatg

SEQ ID NO: 120796 - DNA, 80 bp, synthetic construct
  source 1..80: mol_type = other DNA
ttcgactcggtgatagactgcaatacgtgtgtcacccagacagtcgacttcagccttgaccctaccttcaccattgagac

SEQ ID NO: 120797 - DNA, 80 bp, synthetic construct
  source 1..80: mol_type = other DNA
aaaacggggggtgggttagtttaaaagtacactcaaagtaatttttttttttactgttttaggtcctgtttcagacaatg

SEQ ID NO: 120798 - DNA, 80 bp, synthetic construct
  source 1..80: mol_type = other DNA
tacaagagacgagctgcgggatacaggattactagactacagtgaaattcaacgccgaaatcaaatgcattcgctgcgtt

SEQ ID NO: 120799 - DNA, 80 bp, synthetic construct
  source 1..80: mol_type = other DNA
cagacgcccggtgttcgtgtcgcgccagtacatgcggtccatgcccaggccatccaaaaaccatgggtctgtctgctcag

SEQ ID NO: 120800 - DNA, 80 bp, synthetic construct
  source 1..80: mol_type = other DNA
tttggttcggtgggtggtgtgctgtcatcagtggggaaggctctgcacacagcttttggtgcagcattcaacaccatttt

SEQ ID NO: 120801 - DNA, 80 bp, synthetic construct
  source 1..80: mol_type = other DNA
tacaactggtgggagaatgagtcagacgtattcctgctggaatcagtaaggccccctacgggcccctggttcgggtgcac

SEQ ID NO: 120802 - DNA, 80 bp, synthetic construct
  source 1..80: mol_type = other DNA
gcgcgcgaacgtttccgcgggcgcctccgggctgccgccgagcgggaggaaccggcgattggagggactcagccggtgac

SEQ ID NO: 120803 - DNA, 80 bp, synthetic construct
  source 1..80: mol_type = other DNA
acagagatcgtgccgacctatcgcccctgctgctttccaccactcagtggcaggtgcttccctgttccttcacaccaatg

SEQ ID NO: 120804 - DNA, 80 bp, synthetic construct
  source 1..80: mol_type = other DNA
ggtcgatgcttcgactaccttgactggaggagtggatggccggggcgcgtttcgtctggctagcatattcagtcccggat

SEQ ID NO: 120805 - DNA, 80 bp, synthetic construct
  source 1..80: mol_type = other DNA
agatgatccagtcgtagcaggagcgctgggcgtggtgcctaaaaatgtctttcagtagcaagctgattgccaggggcagg

SEQ ID NO: 120806 - DNA, 80 bp, synthetic construct
  source 1..80: mol_type = other DNA
aaaccctgagcattattaacaaacgcaaaaaaaccagcctgtgcctgatggaaaccatggaaaccattctgccggcggcg

SEQ ID NO: 120807 - DNA, 80 bp, synthetic construct
  source 1..80: mol_type = other DNA
ttgctgtcctgtattaccaccccggtctccgctgtccaagtgaagaacaccagcaacagctacatggtgaccaacgactg

SEQ ID NO: 120808 - DNA, 80 bp, synthetic construct
  source 1..80: mol_type = other DNA
ggatcagcttcgccagcgccaggcgaccgatcagagagttttcgtccagcacgtgctggacgaggggcagatgggcggcc

SEQ ID NO: 120809 - DNA, 80 bp, synthetic construct
  source 1..80: mol_type = other DNA
gcccatggaaaagcgagtcatcacatggggggcggacactgcggcctgtggcgacatactaggcggtctacccgtgtcag

SEQ ID NO: 120810 - DNA, 80 bp, synthetic construct
  source 1..80: mol_type = other DNA
gaatgaagtcttctgtgtgaacccagctaaaggcgggaagaagccagctagactgattgtctaccctgacttaggtgtta

SEQ ID NO: 120811 - DNA, 80 bp, synthetic construct
  source 1..80: mol_type = other DNA
ccagcgacgtcgagtttaactgtacggcggacaacctggccatcgaggggggcatgagcgacctaccggcatacaagctc

SEQ ID NO: 120812 - DNA, 80 bp, synthetic construct
  source 1..80: mol_type = other DNA
ctaggaatttaacttttagcttaatgaccagacaccgtcctgagtgtgttacttttcagcagattaaggataattgcgct

SEQ ID NO: 120813 - DNA, 80 bp, synthetic construct
  source 1..80: mol_type = other DNA
catgccccaggcttcgttttgacatcggcgcaggtctttgtagtagtcttgcatgagcctttctaccggcacttcttctt

SEQ ID NO: 120814 - DNA, 80 bp, synthetic construct
  source 1..80: mol_type = other DNA
aaggtggtgcgtgtgcaaagaccaacaccaagaggcacagtaatggatatcatatcaagaagagaccaaagaggcagtgg

SEQ ID NO: 120815 - DNA, 80 bp, synthetic construct
  source 1..80: mol_type = other DNA
taatcgatggatgagcacgcaaaccacagcctatagcttattggcaatggcaaaaatggcggaagcaaacggcggaaaat

SEQ ID NO: 120816 - DNA, 80 bp, synthetic construct
  source 1..80: mol_type = other DNA
acgcctaccggcccctgggccccgggacaccccccatgcgggctcggctccccgccgcggcctgggttggcgtcgggacc

SEQ ID NO: 120817 - DNA, 80 bp, synthetic construct
  source 1..80: mol_type = other DNA
ctgtccccgcccccgcgccgaccctccgtgcagtccaggagacgggcgcaatccttccagttcatcagcgcggtggtgag

SEQ ID NO: 120818 - DNA, 80 bp, synthetic construct
  source 1..80: mol_type = other DNA
cctttaagcaacaccctattgcgccaccacaatcttgtgtattccacttcctctcgaagtgcgggtcagaggcagaagaa

SEQ ID NO: 120819 - DNA, 80 bp, synthetic construct
  source 1..80: mol_type = other DNA
gcgcatcgaacgggccacggccttcgaaagcatgagccaaagagtgtaatcaataaaaaccatttttatttgacatgcta

SEQ ID NO: 120820 - DNA, 80 bp, synthetic construct
  source 1..80: mol_type = other DNA
aagaaggtgataacctggggtgctgacactgccgcgtgcggtgacatccttagaggtcttccggtgtcggccaggttagg

SEQ ID NO: 120821 - DNA, 80 bp, synthetic construct
  source 1..80: mol_type = other DNA
gggtgcatcatcaccagcctcaccggccgcgacaagaatcaagtggagggagaggtccagattgtgtccaccgcaaccca

SEQ ID NO: 120822 - DNA, 80 bp, synthetic construct
  source 1..80: mol_type = other DNA
ttagctgggccactcagccatcacaataccagagagggctacaggacccaaatgaaagggccatggcacagtgaagagct

SEQ ID NO: 120823 - DNA, 80 bp, synthetic construct
  source 1..80: mol_type = other DNA
atccaaatcttgcttcacgaaaccaaatatgcaagggtaacatcttcgccatggagatcaacctccaggccaacctgtgg

SEQ ID NO: 120824 - DNA, 80 bp, synthetic construct
  source 1..80: mol_type = other DNA
gcctcctgaaatgcagaggaatgagctccccttctccgtttatttaattagcggaaatgccggctccggaaaaagcacgt

SEQ ID NO: 120825 - DNA, 80 bp, synthetic construct
  source 1..80: mol_type = other DNA
tacgtggacccggcgttcacggccaacacgcgcgcctccggcaccggcatcgcggtcgtcgggaggtaccgcgacgattt

SEQ ID NO: 120826 - DNA, 80 bp, synthetic construct
  source 1..80: mol_type = other DNA
cacaccgcgttcgggtttgctagcttcctcgccccaggcgctaagcaaaagatccagctcataaataccaacggcagctg

SEQ ID NO: 120827 - DNA, 80 bp, synthetic construct
  source 1..80: mol_type = other DNA
catcctggagaacgtggagcacgcgtacggcatgcgcgcggcccagttccacgcgcggtttatggacgccatcacaccga

SEQ ID NO: 120828 - DNA, 80 bp, synthetic construct
  source 1..80: mol_type = other DNA
gacgacgacgaggacggagacgaggacggggacgagcgcgaggaggtcgcgcgcgagaccgggagccggcacgttgggta

SEQ ID NO: 120829 - DNA, 80 bp, synthetic construct
  source 1..80: mol_type = other DNA
gaggagaaactccccataagcccactaagtaactcacttataagacatcacaaccttgtgtattccacatcttcacgtag

SEQ ID NO: 120830 - DNA, 80 bp, synthetic construct
  source 1..80: mol_type = other DNA
tcgaatgcgtaaacaaaagcttgaagctttacaacttaaagccttcagattctggcttgtatcatgctgtagttgaaaaa

SEQ ID NO: 120831 - DNA, 80 bp, synthetic construct
  source 1..80: mol_type = other DNA
agtggctccttgctatcttagggcctggctatcttctcagagaggctttaacatcaaccccgtacttcgtcagggcacac

SEQ ID NO: 120832 - DNA, 80 bp, synthetic construct
  source 1..80: mol_type = other DNA
aggcggccgcgggggggacatatttcacagcgtgtcccgggcccgaccccgcgtgttactcctttgcctactcctactaa

SEQ ID NO: 120833 - DNA, 80 bp, synthetic construct
  source 1..80: mol_type = other DNA
agcgatattggcccggggaggctaagatccaccccaacgcccggccacccgtgtacgtgcccgacggcccaaggtccacc

SEQ ID NO: 120834 - DNA, 80 bp, synthetic construct
  source 1..80: mol_type = other DNA
agtaacagttaaggtatgtgtatagattagtgttgtaaataggattagctaaagtatgcatgtaggttagtgttgagaat

SEQ ID NO: 120835 - DNA, 80 bp, synthetic construct
  source 1..80: mol_type = other DNA
cgctctctaaccagcctcggtagatgtatccgcgaacagcgccaagagctagaaaaaacactcagggtaaacgtttatgg

SEQ ID NO: 120836 - DNA, 80 bp, synthetic construct
  source 1..80: mol_type = other DNA
cggaccctgaggtgccccactgactgcttccgaaaacatccagaagccagttatgctaagtgtgggtcaggaccctggct

SEQ ID NO: 120837 - DNA, 80 bp, synthetic construct
  source 1..80: mol_type = other DNA
ccgtttccagagggtcagccaagctgaggtggttagtggaaagaaaatttgttgaaccggtaggacgtgtcattgaccta

SEQ ID NO: 120838 - DNA, 80 bp, synthetic construct
  source 1..80: mol_type = other DNA
cttgaggttcgtggacactattagatgtcctatacattaaatataaacataataccgcacactcgaacgcggagtacgct

SEQ ID NO: 120839 - DNA, 80 bp, synthetic construct
  source 1..80: mol_type = other DNA
ctccgcgggtctgcggcgacggggccgcacggcccgaaaacatctgggttcccgtggtgacctttgcgggcgcgctcgcg

SEQ ID NO: 120840 - DNA, 80 bp, synthetic construct
  source 1..80: mol_type = other DNA
ggtctgctgggcgctatagtggtgagcttgacggggcgtgacaagacggaacaggccggtgaggtccagattttgtccac

SEQ ID NO: 120841 - DNA, 80 bp, synthetic construct
  source 1..80: mol_type = other DNA
ctcatggctacattcaagattcaaccagtctttctggtggcttcctttttgaaggcaaggtggaccaaccaagagagtat

SEQ ID NO: 120842 - DNA, 80 bp, synthetic construct
  source 1..80: mol_type = other DNA
tctaacagtttatttgaatagagagcagatctctggaaaaatgaaccaacgaaaaaaggtggttagaccacctttcaata

SEQ ID NO: 120843 - DNA, 80 bp, synthetic construct
  source 1..80: mol_type = other DNA
tggttcctatgcttatgttacaggtttgacaaatgacaatctcaaagtcccttgccagttgcctgcaccggagttcttct

SEQ ID NO: 120844 - DNA, 80 bp, synthetic construct
  source 1..80: mol_type = other DNA
gtaggcatcttcctgctccccgcccgataggcggggagaagaaataacactccactttcattttactttttttttttccc

SEQ ID NO: 120845 - DNA, 80 bp, synthetic construct
  source 1..80: mol_type = other DNA
gcgccgatccacgcggcagggagtgcagtggtggttcgggtggcgggaggagcgcggtgagggtcagcggcgtagcagag

SEQ ID NO: 120846 - DNA, 80 bp, synthetic construct
  source 1..80: mol_type = other DNA
gcgtggctgaaggccaggatcttgccttccttgccgggcgtccccttcttctcctgccagcgaggcttcaaaggggtttg

SEQ ID NO: 120847 - DNA, 80 bp, synthetic construct
  source 1..80: mol_type = other DNA
ttttataactttaaggatcgctccgtttatcccccttcaaacggatactactaatattgccgttgttgtagccacaattt

SEQ ID NO: 120848 - DNA, 80 bp, synthetic construct
  source 1..80: mol_type = other DNA
cttcggaacggtcgcagccccgtggcaggcgtcaacctatccccaaggcgcgccggtccacgggcaggtcctgggcacag

SEQ ID NO: 120849 - DNA, 80 bp, synthetic construct
  source 1..80: mol_type = other DNA
gagcgaccagagcggtgcttgggagacacatgcgcccgaggacgctcaccgccgccagcgcctgggcgggactcagcttt

SEQ ID NO: 120850 - DNA, 80 bp, synthetic construct
  source 1..80: mol_type = other DNA
cccgcagaaacatgccgcccaaagggaacaagcaagccattgcggatcggcggtcccaaaagcaacagaaactacaagag

SEQ ID NO: 120851 - DNA, 80 bp, synthetic construct
  source 1..80: mol_type = other DNA
tatcactgcttatgctcagcagacaaggggcctcttgggatgtataatcaccagcttgactggccgggacaacaaccaag

SEQ ID NO: 120852 - DNA, 80 bp, synthetic construct
  source 1..80: mol_type = other DNA
aaggtccccctggacgggtacggccgcatgaacggccggggcgtgtttcgcgtgtgggacataggccagagccacttcca

SEQ ID NO: 120853 - DNA, 80 bp, synthetic construct
  source 1..80: mol_type = other DNA
gcacaaccggaattattttttatgtatcatattatgagggaggggggcatgcgagatatacgcgtacttttttatcgtga

SEQ ID NO: 120854 - DNA, 80 bp, synthetic construct
  source 1..80: mol_type = other DNA
cagcccttaagcgggtttgcccagggctggggccccatcacgcatgtcatcggcaacccgggcgatcaacgaccatactg

SEQ ID NO: 120855 - DNA, 80 bp, synthetic construct
  source 1..80: mol_type = other DNA
ttttttatttttacaatgcgccgtatatggtatgtctgtcatgtgctctaaagtcccatatataaaagaagccccaacga

SEQ ID NO: 120856 - DNA, 80 bp, synthetic construct
  source 1..80: mol_type = other DNA
cggtcataattctactggtcagtggctggaattcaataacggtgatgcccctgctttgtggcattggatgcgccatgctt

SEQ ID NO: 120857 - DNA, 80 bp, synthetic construct
  source 1..80: mol_type = other DNA
cagcagatggcatgactggaaaaggctggagacttcttgcgcctataacggcctacgcacaacaaacgcggggcctatta

SEQ ID NO: 120858 - DNA, 80 bp, synthetic construct
  source 1..80: mol_type = other DNA
ctcacatcgatatcgttgtgatgtccgccacactttgttctgcccttcatatggaggacgtgtgcggggcggtgatgata

SEQ ID NO: 120859 - DNA, 80 bp, synthetic construct
  source 1..80: mol_type = other DNA
gagggacccacccgttctcaaggatccgtgacggattgcagtatggatggaagacctggggaaaaaaccttgttttctca

SEQ ID NO: 120860 - DNA, 80 bp, synthetic construct
  source 1..80: mol_type = other DNA
tacatcatggcatgcatgtcggcggacctagaagtggtgactagcacgtgggtcctggtgggcggcgtcctggcagccct

SEQ ID NO: 120861 - DNA, 80 bp, synthetic construct
  source 1..80: mol_type = other DNA
gtatgtcggctgatctagaggtaatcactagcacttgggtggtggctgggtggatcctggcggcgttggcggcgtactgc

SEQ ID NO: 120862 - DNA, 80 bp, synthetic construct
  source 1..80: mol_type = other DNA
tctggaatggcctatgctatgaatttttcatggtctctaaatgcagaggaagccccggaaactaccgaagtcactctcat

SEQ ID NO: 120863 - DNA, 80 bp, synthetic construct
  source 1..80: mol_type = other DNA
ggcgtgacaaaaatgaggtcgaaggggaggtacaagtggtttccacggatacccaatcctttgtggcgacctccattaac

SEQ ID NO: 120864 - DNA, 80 bp, synthetic construct
  source 1..80: mol_type = other DNA
gtagaattctgcactgtggggggtcctttggtgtgcaagactctaaacttagcattgccaccaaaggacccctcacagtg

SEQ ID NO: 120865 - DNA, 80 bp, synthetic construct
  source 1..80: mol_type = other DNA
atctcgccggaacaccaccagttcgttcaggactgcaattgctccatatacccaggtcacatctcggggcatcggatggc

SEQ ID NO: 120866 - DNA, 80 bp, synthetic construct
  source 1..80: mol_type = other DNA
gcctcgctcatcgcccagggggggagggcggccatttgtggtcgctacctcttcaactggtcggtgaagacaaagctcaa

SEQ ID NO: 120867 - DNA, 80 bp, synthetic construct
  source 1..80: mol_type = other DNA
tccgtcaccgtgccacattccaacatcgaggaagttgcattgtccactgagggggagataccattctatggtaaggccat

SEQ ID NO: 120868 - DNA, 80 bp, synthetic construct
  source 1..80: mol_type = other DNA
tggcccatctgcatgctccaactggcagcggcaagagcactaaggtgccggctgcatacgcagcccaagggtataaggta

SEQ ID NO: 120869 - DNA, 80 bp, synthetic construct
  source 1..80: mol_type = other DNA
tcgtagtcgtccgaagacgacgagtcccggtagagggcatacccagcctcgtcataatggagaaagcgaacctcgcccct

SEQ ID NO: 120870 - DNA, 80 bp, synthetic construct
  source 1..80: mol_type = other DNA
tgtactactacgagacgcgccccgctctgttttaccgcgtctacgtccgaagcgggcgcgtgctgtcgtacctgtgcgac

SEQ ID NO: 120871 - DNA, 80 bp, synthetic construct
  source 1..80: mol_type = other DNA
cactgaaacagaaaaaccagacatgacaatcattgggagaaggcttcagagattgcgagaagagcacaaagaaacctggc

SEQ ID NO: 120872 - DNA, 80 bp, synthetic construct
  source 1..80: mol_type = other DNA
ttctcacagtaagtgcagcacataatcaccatgttattcagcagcccataattcagggtgctccagccaaagctcatgtt

SEQ ID NO: 120873 - DNA, 80 bp, synthetic construct
  source 1..80: mol_type = other DNA
ggacgccgagctggggctggtgggcccgggcgcggcgtttctgtacctggtattcacttaccgccagcgccgggaccagc

SEQ ID NO: 120874 - DNA, 80 bp, synthetic construct
  source 1..80: mol_type = other DNA
ggacttgttggaagactctacaactccaattccgaccactatcatggcgaagaacgaagtgtttgccgtcaacccctcca

SEQ ID NO: 120875 - DNA, 80 bp, synthetic construct
  source 1..80: mol_type = other DNA
tcttactcacatagacgcccactttctatcccagacaaagcagagtggggaaaaccttccttacctggtagcgtaccaag

SEQ ID NO: 120876 - DNA, 80 bp, synthetic construct
  source 1..80: mol_type = other DNA
accaggtactcagccccacccggagacgaaccgcacccggagtacgacctcgagctgataacatcctgctcttccaacgt

SEQ ID NO: 120877 - DNA, 80 bp, synthetic construct
  source 1..80: mol_type = other DNA
cacggagcggctttattgcggaggccctatgttcaacagcaagggggaccagtgcggctatcgccgctgccgtgccagtg

SEQ ID NO: 120878 - DNA, 80 bp, synthetic construct
  source 1..80: mol_type = other DNA
atctaaccaagagacaagacaagctgtgcggatcactgattggaatgaccaatagggccacctgggcctcccacatccat

SEQ ID NO: 120879 - DNA, 80 bp, synthetic construct
  source 1..80: mol_type = other DNA
ttggcagggcaactatttacctttcagccccgccgtcactggactgtgcaagactgcaactgctccatttatacaggcca

SEQ ID NO: 120880 - DNA, 80 bp, synthetic construct
  source 1..80: mol_type = other DNA
cagcaaccaccctacttcttaacatcttggggggttgggtggctactcaggtagcacctcctcccgcgtccacggctttc

SEQ ID NO: 120881 - DNA, 80 bp, synthetic construct
  source 1..80: mol_type = other DNA
ccagaccctcggcctcgagctgggcccggcgctcgcgcgcggccagcacatcccgcagccccgccgtgacccgctcggtg

SEQ ID NO: 120882 - DNA, 80 bp, synthetic construct
  source 1..80: mol_type = other DNA
cgcagtcaacgccgaggacgtacggggagaggtaggctaggtacctaccgatatgtgtcccaggtggagagaccatcagg

SEQ ID NO: 120883 - DNA, 80 bp, synthetic construct
  source 1..80: mol_type = other DNA
cacaccccctgggtctgtgacaactccacatcccaacatagaggaggtcagccttggccacgagggtgagatcccctttt

SEQ ID NO: 120884 - DNA, 80 bp, synthetic construct
  source 1..80: mol_type = other DNA
tgcaggcttcatggcccaaagtggaacaattttgggccagacacatgtggaacttcattagcggcatccaatacctcgca

SEQ ID NO: 120885 - DNA, 80 bp, synthetic construct
  source 1..80: mol_type = other DNA
ttacaaatagtagtaccatcagccgggactcataccttggccatctgatcactttgtaccgcgaggctatcggtcagacc

SEQ ID NO: 120886 - DNA, 80 bp, synthetic construct
  source 1..80: mol_type = other DNA
ggctagctcttactttgatattagaggggtgctggatcgcggtcccagttttaagccttattcgggtaccgcctataact

SEQ ID NO: 120887 - DNA, 80 bp, synthetic construct
  source 1..80: mol_type = other DNA
ccccgaccaacagggtcgcgatgagctcaacggcaaaccactccttttcctttatggtcttaacggcaagcttatgttcg

SEQ ID NO: 120888 - DNA, 80 bp, synthetic construct
  source 1..80: mol_type = other DNA
atttaaagtaccatatcaacaaagaaaacattaccttgcattcgcctattcacctgggatattaccgctgctttgccaca

SEQ ID NO: 120889 - DNA, 80 bp, synthetic construct
  source 1..80: mol_type = other DNA
cccgaagttgttctggagatcatcgccggagcacattggggcgtgatgttcggcctggcttacttctctatgcagggagc

SEQ ID NO: 120890 - DNA, 80 bp, synthetic construct
  source 1..80: mol_type = other DNA
ctgggcgcggcctgattacaacccgccgctgctggagacctggaagagaccagactatacaccaccagtggtcgccggat

SEQ ID NO: 120891 - DNA, 80 bp, synthetic construct
  source 1..80: mol_type = other DNA
gtaatgcatacaacgtgcccatgcggcgcacaaatagccggccatatcaagaacggctcgatgagaatcgtcgggcctaa

SEQ ID NO: 120892 - DNA, 80 bp, synthetic construct
  source 1..80: mol_type = other DNA
ttctatctgcaaaaaagccgtctgagcctttgttccttccgagaaaaacagaccgcaggacttggcagaaaacacattgg

SEQ ID NO: 120893 - DNA, 80 bp, synthetic construct
  source 1..80: mol_type = other DNA
gggagccagggccaaggtgtctcctagttggcccgcgtgggtcagccaggcgacgagcgcctcgtaaagcggcagccttc

SEQ ID NO: 120894 - DNA, 80 bp, synthetic construct
  source 1..80: mol_type = other DNA
cccaaatttaacagcactgggtgtttggaacggctatccaagtgccgccccatcactcacttcgatcaagggtatgggcc

SEQ ID NO: 120895 - DNA, 80 bp, synthetic construct
  source 1..80: mol_type = other DNA
gttccggttttacgcgcagtgatacaacagagtttgccaaaaagcgtggcttcaaaccggttacctcccgcgcctcgcat

SEQ ID NO: 120896 - DNA, 80 bp, synthetic construct
  source 1..80: mol_type = other DNA
aggggccgctcggcgatgagcgcggacaggcgcgggagctgtgccgccagacacgcgttttcgatcgggttcaggtcggc

SEQ ID NO: 120897 - DNA, 80 bp, synthetic construct
  source 1..80: mol_type = other DNA
gaacccagggagctagaaggggtggagcagagggaagcacccttggtgacatctggaagcagcggctgaattcatgcacc

SEQ ID NO: 120898 - DNA, 80 bp, synthetic construct
  source 1..80: mol_type = other DNA
ctcatcgcccagggagggagggcggccatctgtggccgctacctcttcaactgggctgtgaggacaaagctcaaactcac

SEQ ID NO: 120899 - DNA, 80 bp, synthetic construct
  source 1..80: mol_type = other DNA
gatgtggtcatctgcgccactgacgcccttatgactggttacacaggcgacttcgactccgtcatagactgcaacgtggc

SEQ ID NO: 120900 - DNA, 80 bp, synthetic construct
  source 1..80: mol_type = other DNA
gtgctgatactgtgatgtgcgatattggagagagtagcccggacgccgccattgaaggtgagagaacccgcaaagtgata

SEQ ID NO: 120901 - DNA, 80 bp, synthetic construct
  source 1..80: mol_type = other DNA
aacatgaaaaacagagtgttcagtggggaaagaacataacgcttgtgggtcctaatgataaacctgttgaatggcacgga

SEQ ID NO: 120902 - DNA, 80 bp, synthetic construct
  source 1..80: mol_type = other DNA
acatcttgggcgggtgggtggcatcccagctagcaccacccacggcatccacggcattcgttgtcagtgggcttgccgga

SEQ ID NO: 120903 - DNA, 80 bp, synthetic construct
  source 1..80: mol_type = other DNA
ggaggacacacgaacgaagatgattccaactacgctcactggacggaggctagaatcatgctggacaacattaacatgcc

SEQ ID NO: 120904 - DNA, 80 bp, synthetic construct
  source 1..80: mol_type = other DNA
agtcaaggtaaaaataaaattgtaagcaatatttatcttggaggagaggtatatcaaccaggatttattgttgttaaatt

SEQ ID NO: 120905 - DNA, 80 bp, synthetic construct
  source 1..80: mol_type = other DNA
ataaccagcctactcagaagactccacaattggataactgaggactgccccatcccatgctccggatcctggctccgcga

SEQ ID NO: 120906 - DNA, 80 bp, synthetic construct
  source 1..80: mol_type = other DNA
agtagtcgtactaggatcacaagaaggagcaatgcacactgcgttgactggagcgacagaaatccaaacgtctggaacga

SEQ ID NO: 120907 - DNA, 80 bp, synthetic construct
  source 1..80: mol_type = other DNA
gcggctaccgtgagttcttcttgcaggaggcggatgagatcggcgaccgtgtcgcgtacctcctgttcgaaagcgccccg

SEQ ID NO: 120908 - DNA, 80 bp, synthetic construct
  source 1..80: mol_type = other DNA
ccaacatggtgtcttacaaacaggaacaccatcagccatagccccacaggcgtactggggatatagacagggacaatcca

SEQ ID NO: 120909 - DNA, 80 bp, synthetic construct
  source 1..80: mol_type = other DNA
gggccaaaatctaacactaagcggaccaccaggaacgccagttacatggcttggtgagggacacaaactttgcgaaggca

SEQ ID NO: 120910 - DNA, 80 bp, synthetic construct
  source 1..80: mol_type = other DNA
tttgactccacagtgactgaaagagacatcagggtcgaggaagaggtctaccagtgttgcgacctagagcccgaaacacg

SEQ ID NO: 120911 - DNA, 80 bp, synthetic construct
  source 1..80: mol_type = other DNA
tacctttcggctccacttgtgtcgctgcggcggcacgtggacctgatggtgggcgcagctaccctgtgctctgccctcta

SEQ ID NO: 120912 - DNA, 80 bp, synthetic construct
  source 1..80: mol_type = other DNA
cctcacccccggggccaaacaaaacattcaactcatcaacaccaacggcagttggcacatcaatcgcactgccttgaact

SEQ ID NO: 120913 - DNA, 80 bp, synthetic construct
  source 1..80: mol_type = other DNA
gtcacagacacctactcccccataaaatccaataatggaagcggttggcaagtagacaacgatacgtttgccgacagggg

SEQ ID NO: 120914 - DNA, 80 bp, synthetic construct
  source 1..80: mol_type = other DNA
acagcaccaactgggtcggcggcatcactgatcaatggggtcgtgaagcttctcagctggccatggaacgcgcgggaaga

SEQ ID NO: 120915 - DNA, 80 bp, synthetic construct
  source 1..80: mol_type = other DNA
ggcctgtgtgttcaaggtgctggctccataccgcccagaggtaatagaagcattgcacagattccagcttcagtggggtg

SEQ ID NO: 120916 - DNA, 80 bp, synthetic construct
  source 1..80: mol_type = other DNA
gaatgctgacgtcataccagccaggcgtcgaggtgacactcgagccggtctcctaagccccagacccttgtcgacgctta

SEQ ID NO: 120917 - DNA, 80 bp, synthetic construct
  source 1..80: mol_type = other DNA
ccatgaaaatagtcggaccccgtacatgcagcaacacctggcacgggacctttccaatcaatgctaccaccactggcccg

SEQ ID NO: 120918 - DNA, 80 bp, synthetic construct
  source 1..80: mol_type = other DNA
ggccctaataaaaaactcaggggatttttgctgtctattgggaaataaaggtttacttttgtatcttttccctgtctgtg

SEQ ID NO: 120919 - DNA, 80 bp, synthetic construct
  source 1..80: mol_type = other DNA
tcgacgcatacacccataccatcggggggactacgggccagcaagcatacgggctcgcatccctttttaatccagtggcg

SEQ ID NO: 120920 - DNA, 80 bp, synthetic construct
  source 1..80: mol_type = other DNA
taccgccataaattcaacagctccgggtgtccagagaggctctccagctgcagacgcctcgacacattctcgcaaggatg

SEQ ID NO: 120921 - DNA, 80 bp, synthetic construct
  source 1..80: mol_type = other DNA
gcttggttagtaccatcgtgacgagcctcactggcagggacaccaatgccaactgtggtgaggtccaggtgctgtccact

SEQ ID NO: 120922 - DNA, 80 bp, synthetic construct
  source 1..80: mol_type = other DNA
gttgagcacctagacacggtgatgcgttcaccagtgtttagtgacaacaccaccccgcccgcggtacctcaggaatttca

SEQ ID NO: 120923 - DNA, 80 bp, synthetic construct
  source 1..80: mol_type = other DNA
gcccctgcggggctcaaatagctggacatgtcaaaaatgggtcaatgaggattaccggcccaaggacctgtagcaacacg

SEQ ID NO: 120924 - DNA, 80 bp, synthetic construct
  source 1..80: mol_type = other DNA
gctcttctgtcatgtctcactgtgccagtctcatcggcagaggtcaagaacaccagcaccagctacatggttaccaatga

SEQ ID NO: 120925 - DNA, 80 bp, synthetic construct
  source 1..80: mol_type = other DNA
cgctggttacaccctgcgctgcggaagagtctaagctgcccattaatgcgctgagcaactccctcctgcgccatcataac

SEQ ID NO: 120926 - DNA, 80 bp, synthetic construct
  source 1..80: mol_type = other DNA
tcctgatgactcacttcttctctatccttctagctcaggaacaacttgagaaagccctggattgtcagatctacggggcc

SEQ ID NO: 120927 - DNA, 80 bp, synthetic construct
  source 1..80: mol_type = other DNA
gggtgctaactttgacatgttttgcaatggctctaaaatacatcacaaggaattgaatcacacttgctctattcagaaca

SEQ ID NO: 120928 - DNA, 80 bp, synthetic construct
  source 1..80: mol_type = other DNA
ccgccacgctttgctccgcgctctatgtaggggacgtgtgcggtgcggtgatgttggccgctcaggttgtcatcgtctcg

SEQ ID NO: 120929 - DNA, 80 bp, synthetic construct
  source 1..80: mol_type = other DNA
gaataacccgcacatgacggacaaaacaaccatcaaggagtggagagatgttccctacctcacaaagagacaggataagc

SEQ ID NO: 120930 - DNA, 80 bp, synthetic construct
  source 1..80: mol_type = other DNA
ggtcccggtacacggccatgcactcctcgggaaggtctcccccgaggtaggtcacgacgtacgagaccagcgagtagtcg

SEQ ID NO: 120931 - DNA, 80 bp, synthetic construct
  source 1..80: mol_type = other DNA
gaatctccatgcgtagcattagttgtacaaagtcatccaaatcattgcatataagctctgtcagttcgctatcaggaagc

SEQ ID NO: 120932 - DNA, 80 bp, synthetic construct
  source 1..80: mol_type = other DNA
agactcaggtcctgttgtcgtagacgaccagtccgacgacggatcctactcgtcgatgccccctttagagggagagcccg

SEQ ID NO: 120933 - DNA, 80 bp, synthetic construct
  source 1..80: mol_type = other DNA
ccctttacagtacatcaagggtggtaggcacttgatcttctgtcactcaaaaaagaagtgtgacgagctggcaggccaat

SEQ ID NO: 120934 - DNA, 80 bp, synthetic construct
  source 1..80: mol_type = other DNA
agcaaaactgagatggctggtcgagcggaggtttctcgaaccggtcggaaaagtgattgaccttggatgtggaaggggcg

SEQ ID NO: 120935 - DNA, 80 bp, synthetic construct
  source 1..80: mol_type = other DNA
tccagtgcacttgtttgcgctgagattcatactcctgggcttgagtgcacgattccattggttcattccattcggagtac

SEQ ID NO: 120936 - DNA, 80 bp, synthetic construct
  source 1..80: mol_type = other DNA
ggcgccccccttggcggtgtcgcggctgccctagcacacggtgtaagggcaatcgaagacgggattaactatgcaacagg

SEQ ID NO: 120937 - DNA, 80 bp, synthetic construct
  source 1..80: mol_type = other DNA
ggtggtgaagtacccggccggggccccaaggccccggcgcttgaccagatggtgtgtgtgggcaaacttcatcatcccga

SEQ ID NO: 120938 - DNA, 80 bp, synthetic construct
  source 1..80: mol_type = other DNA
gtcctgttccttgcctgaggaagctcgaactgctatacactcactgactgagagactatacgtagggggccccatgacaa

SEQ ID NO: 120939 - DNA, 80 bp, synthetic construct
  source 1..80: mol_type = other DNA
gctaaggttttgattgtgatgctgctctttgccggcgttgacggggctacctacgcgacaggggcggcgcaaggtcacgc

SEQ ID NO: 120940 - DNA, 80 bp, synthetic construct
  source 1..80: mol_type = other DNA
agggcgaccacgtgagcttgcaagttaacagcagtctcacgtctatccttattcccatgcaaaatgataattatacagag

SEQ ID NO: 120941 - DNA, 80 bp, synthetic construct
  source 1..80: mol_type = other DNA
aatctgggaagcgtgaatctggcccgatgcgtctccaggcagacgtttgactttgggcggctccgcgacgccgtgcaggc

SEQ ID NO: 120942 - DNA, 80 bp, synthetic construct
  source 1..80: mol_type = other DNA
tatggaaacaacacagcctacaactattgaaaccactacacagtcagacactacagtgcagaatactactttattgattg

SEQ ID NO: 120943 - DNA, 80 bp, synthetic construct
  source 1..80: mol_type = other DNA
ccgtctgacgatcttgattggcgctacgagaccccctcggctataaactatgctttgatagacggtatatttttgcgtta

SEQ ID NO: 120944 - DNA, 80 bp, synthetic construct
  source 1..80: mol_type = other DNA
ggtgcgcatgatattgatgacccacttctttggaatactccagtcccaagagcagttgaacaaagcactcgacttcgaca

SEQ ID NO: 120945 - DNA, 80 bp, synthetic construct
  source 1..80: mol_type = other DNA
tcaggttcacagcaatcgctcctaccaaagcggttctggacagatggagaaaagttaacaaacaaacagcaatgaaacac

SEQ ID NO: 120946 - DNA, 80 bp, synthetic construct
  source 1..80: mol_type = other DNA
gtacggaagagtccctttaccaatgctgtgacctggcccccgaagcgcgtgccgcaataaagtctcttacggagaggctt

SEQ ID NO: 120947 - DNA, 80 bp, synthetic construct
  source 1..80: mol_type = other DNA
gcggacccatgtacaactctcggggtcaactatgcgggtatcgtaggtgccgcgccagcggcgtactcaccaccagcttg

SEQ ID NO: 120948 - DNA, 80 bp, synthetic construct
  source 1..80: mol_type = other DNA
ccccgctacaaggcatggcttgcttggataatgtggtggatacaatattaccttactagaactgaggctatgctgcatgt

SEQ ID NO: 120949 - DNA, 80 bp, synthetic construct
  source 1..80: mol_type = other DNA
agaccgcccgacggcccgggcccgcggcggcggaggacccgcgcgccaccgccgccgcctcctcgtcctccgcgggtccg

SEQ ID NO: 120950 - DNA, 80 bp, synthetic construct
  source 1..80: mol_type = other DNA
gccttcacgtttagacctcgtcgccatcaaacggtccagacctgcaactgctcgctgtacccaggccaactcacaggaca

SEQ ID NO: 120951 - DNA, 80 bp, synthetic construct
  source 1..80: mol_type = other DNA
ccaatcctgcggttacaggcgttgtcgtgccagcggagtgcttaccactagcatgggaaacaccatcacgtgctacgtga

SEQ ID NO: 120952 - DNA, 80 bp, synthetic construct
  source 1..80: mol_type = other DNA
caataatgggacctggcactgccccaccgattgcttcaggaagcatccggagactacctacgccaagtgcggatcagggc

SEQ ID NO: 120953 - DNA, 80 bp, synthetic construct
  source 1..80: mol_type = other DNA
cctgctctcttgcctgactgtgcccgcttcagcctaccaagtgcgcaattcctcggggctttaccatgtcaccaatgatt

SEQ ID NO: 120954 - DNA, 80 bp, synthetic construct
  source 1..80: mol_type = other DNA
gcgcatgctggggattctttggcatgccgtgacaggcacggccagacccccagtgctgaaaatgttctggaaaacggtac

SEQ ID NO: 120955 - DNA, 80 bp, synthetic construct
  source 1..80: mol_type = other DNA
actcatgctgaccgcgggcgtgcaggcggagacgtacatcactggtgctgccactggaagccaagtctccacgtttgcca

SEQ ID NO: 120956 - DNA, 80 bp, synthetic construct
  source 1..80: mol_type = other DNA
tgtgtgagcatcatcggccgcatccaccttaaccaaaggactgtcatcgctcctgacagggaggtcctttacgaggcatt

SEQ ID NO: 120957 - DNA, 80 bp, synthetic construct
  source 1..80: mol_type = other DNA
ctaacaacccagcagaccctcctatttaacatcttaggggggtgggtggctgctcaactggcaaccccgagcgccgcttc

SEQ ID NO: 120958 - DNA, 80 bp, synthetic construct
  source 1..80: mol_type = other DNA
cgaaatacatcgccacgtgcatgcaagccgaccttgagatcatgacaagcacatgggttctggcaggggtggtgctggcc

SEQ ID NO: 120959 - DNA, 80 bp, synthetic construct
  source 1..80: mol_type = other DNA
atggggcgaaggacgttaggagccattctagcaaggccattaaccacatcaactccgtgtgggaggacttgttagaggac

SEQ ID NO: 120960 - DNA, 80 bp, synthetic construct
  source 1..80: mol_type = other DNA
aggggtcgactcctcctcctcggcccagccgacgatatgaggagcaaggagtggaggctactcgcgcccatcactgcata

SEQ ID NO: 120961 - DNA, 80 bp, synthetic construct
  source 1..80: mol_type = other DNA
actacccgtgtaccgtcaactttaccatctttaaggtgaggatgtttgtcggtggcgtggaacatcgactagaggcagca

SEQ ID NO: 120962 - DNA, 80 bp, synthetic construct
  source 1..80: mol_type = other DNA
atcaactgatcacatggatcacttctcccttggagtgcttgtgattctgctcatggtgcaggaagggctaaagaagagaa

SEQ ID NO: 120963 - DNA, 80 bp, synthetic construct
  source 1..80: mol_type = other DNA
gggacttgacaaaggatggccaatatcgaagatggacataggagttccacttctcgccttggggtgctattcccaggtga

SEQ ID NO: 120964 - DNA, 80 bp, synthetic construct
  source 1..80: mol_type = other DNA
tagacactaccacctacacggagtatcagaatgtaactctccctttccagcataataactctggctttgtaggatacatg

SEQ ID NO: 120965 - DNA, 80 bp, synthetic construct
  source 1..80: mol_type = other DNA
ctacatctatgaccacctggcccccctctccacgtgggctagcaacgggttgcgcgacctcgccgtcgcggtagaacccg

SEQ ID NO: 120966 - DNA, 80 bp, synthetic construct
  source 1..80: mol_type = other DNA
acataggtattgggaatatagccgccatggaaattaatttgcaggctaatttgtggagaagcttcttgtactcaaatgtg

SEQ ID NO: 120967 - DNA, 80 bp, synthetic construct
  source 1..80: mol_type = other DNA
aattgaaagatggctggtgaggaaccccttctttgcggcaacagccttggccattgcctacctggtggggagcaacatga

SEQ ID NO: 120968 - DNA, 80 bp, synthetic construct
  source 1..80: mol_type = other DNA
gctaaggttctggttgtgatgctactatttgctggcgttgacgggaggaccatcttgatggccgggaggcaagccgaagt

SEQ ID NO: 120969 - DNA, 80 bp, synthetic construct
  source 1..80: mol_type = other DNA
tcgactgctgtcactggaaacattgtgaattctgtcaacatccagtcaaggaaactcctggcccggttcggggaccagag

SEQ ID NO: 120970 - DNA, 80 bp, synthetic construct
  source 1..80: mol_type = other DNA
cctcgtcccactccgcctcggcctcctcgagagacctccgcagggcctcgacgcggcgacgggcgtcgaagagcgcctgc

SEQ ID NO: 120971 - DNA, 80 bp, synthetic construct
  source 1..80: mol_type = other DNA
cactcgtggccgaagaagacaaggaggtttctgtcgaagccgagatcttgcgccccggaaaaaagaaattcccgccggcc

SEQ ID NO: 120972 - DNA, 80 bp, synthetic construct
  source 1..80: mol_type = other DNA
atcgtgtcggggtgtgcgctgcccccaaaagggctgacacccgtacccccgcctcgacggaagagggtcgtaaagctcga

SEQ ID NO: 120973 - DNA, 80 bp, synthetic construct
  source 1..80: mol_type = other DNA
ccccattgaggccatcaagggggggaggcatctcattttctgccattcaaaaaaaaagtgtgatgagctcgccgcaaagc

SEQ ID NO: 120974 - DNA, 80 bp, synthetic construct
  source 1..80: mol_type = other DNA
actcatgttcatggtgcacgtaaaaccgttcgacgacgagttcgtcctgccccactggtacatggcccggtacctgctgg

SEQ ID NO: 120975 - DNA, 80 bp, synthetic construct
  source 1..80: mol_type = other DNA
gcatgacatttaccaatgttgccagctggatcctacgacccgcaaagccatcacgtcactcaccgagcgactgtactgtg

SEQ ID NO: 120976 - DNA, 80 bp, synthetic construct
  source 1..80: mol_type = other DNA
tccacggagggcgcggtggtgcttaagaggatcgcggcgctcttctgcgtgcccgtggccaccaagaccaaaccccgagc

SEQ ID NO: 120977 - DNA, 80 bp, synthetic construct
  source 1..80: mol_type = other DNA
gctgaaggcatcaactacgcagacagaaagtggtgttttgacggaattaagaacaaccaaatactggaagaaaatgtgga

SEQ ID NO: 120978 - DNA, 80 bp, synthetic construct
  source 1..80: mol_type = other DNA
cgagtccaaggtcgtcgtcttagactcccttaacccgatggtcgaagtggaggatgagcgcgaaccttcaataccatcag

SEQ ID NO: 120979 - DNA, 80 bp, synthetic construct
  source 1..80: mol_type = other DNA
ccgctatggcggcgcggctgagggactgcactatgctgctatgcggcgacttgctcgttatcgcaagcgagggtgtggag

SEQ ID NO: 120980 - DNA, 80 bp, synthetic construct
  source 1..80: mol_type = other DNA
cccagggtgcggccatcgccggctccaacctctgcaccgagatcgtccatccggcctccaagcgatccagtggggtctgc

SEQ ID NO: 120981 - DNA, 80 bp, synthetic construct
  source 1..80: mol_type = other DNA
accccaacatagaggaggtggcccttggccaagagggcgagatccccttttatgggaaagccatccccttggcttatatt

SEQ ID NO: 120982 - DNA, 80 bp, synthetic construct
  source 1..80: mol_type = other DNA
ccgaggccacttggcgagccgggtcctttatgtcgcccacagacagggtatacaggccgctgtccgtctctcggaccccg

SEQ ID NO: 120983 - DNA, 80 bp, synthetic construct
  source 1..80: mol_type = other DNA
tctcccccttttacaagatgttacttgtacatctgttgtggtggacccagtatttcatcgcacggttggaggctctcctc

SEQ ID NO: 120984 - DNA, 80 bp, synthetic construct
  source 1..80: mol_type = other DNA
aggatgcggcgtgcctgagagccttcacggaggctatgaccaggtactccgctccccccggggaccccccccaaccagaa

SEQ ID NO: 120985 - DNA, 80 bp, synthetic construct
  source 1..80: mol_type = other DNA
gatgtcatcacaagaagagatcagagaggctcgggccaggttgtgacctatgcccttaacaccctcaccaacataaaggt

SEQ ID NO: 120986 - DNA, 80 bp, synthetic construct
  source 1..80: mol_type = other DNA
aatatgcatctgggggctcgccgaggcatgtttatgccctaccagtgcaacctgaattatgtaaaggtgctcctggagcc

SEQ ID NO: 120987 - DNA, 80 bp, synthetic construct
  source 1..80: mol_type = other DNA
atcgcagcgggcaggagcccgaagagatgagggatcgcaggttttacgcggggcaggagctgcgggccggttttaaccgc

SEQ ID NO: 120988 - DNA, 80 bp, synthetic construct
  source 1..80: mol_type = other DNA
gcaatcacccccacgcttgctggtcggaatgcctctgcgcccacacgggcgatacgacggcacatcgacttgcttgtggg

SEQ ID NO: 120989 - DNA, 80 bp, synthetic construct
  source 1..80: mol_type = other DNA
gagtcacaaaagacacaaacaacagcaagctgtataagctgcatggggggcatgtcgcgtgtagggtgaagttgtcagct

SEQ ID NO: 120990 - DNA, 80 bp, synthetic construct
  source 1..80: mol_type = other DNA
tggtgtccgagctggccgaggatcccgcatacgccattgcccacggcgtcgccctgaacacggactattacttctcccac

SEQ ID NO: 120991 - DNA, 80 bp, synthetic construct
  source 1..80: mol_type = other DNA
atgcttgcgggcggtcactggggcgtcctggctggcatagctttcttcagtatgcaggccaactgggctaaagtcatcct

SEQ ID NO: 120992 - DNA, 80 bp, synthetic construct
  source 1..80: mol_type = other DNA
tctcgtagcccgtgcaacatgagcacactacctaaacctcaaagaccaacaaacagaaacaccaaccgtcgcccaaagga

SEQ ID NO: 120993 - DNA, 80 bp, synthetic construct
  source 1..80: mol_type = other DNA
ccggcccgccgaccaggactcggtgcgttccagcgcgtcggtgccgctttaccccgcggcctcgcccgtcccggcagaag

SEQ ID NO: 120994 - DNA, 80 bp, synthetic construct
  source 1..80: mol_type = other DNA
ccctggatcacacctaggtgtctggtggattacccctacaggctgtggcactacccctgtactgtcaacttcaccttgca

SEQ ID NO: 120995 - DNA, 80 bp, synthetic construct
  source 1..80: mol_type = other DNA
gcggtatcacggagccaacgacgaggccgcacggggcggggtaaaccggaggtgtacagatttgtctcccaagtggagag

SEQ ID NO: 120996 - DNA, 80 bp, synthetic construct
  source 1..80: mol_type = other DNA
aggaggtctaaggaatcttcttttctctttttcagtatggtgatcagccatgattcctaggttcttcctatttaacatcc

SEQ ID NO: 120997 - DNA, 80 bp, synthetic construct
  source 1..80: mol_type = other DNA
tggttagtggcttggctggagctgctgttggtagtatagggctgggtaaggtcattgtagacatccttgccgggtatggc

SEQ ID NO: 120998 - DNA, 80 bp, synthetic construct
  source 1..80: mol_type = other DNA
agaccccccatctataggcctatcattgtgctcaacccacacaatgaaaaaattcatagattggacggtctgaaaccatg

SEQ ID NO: 120999 - DNA, 80 bp, synthetic construct
  source 1..80: mol_type = other DNA
tggttagaaggggattcattgcggacgcacctcactagagttgagggatgggtctggaagaataaaatactcaccctggc

SEQ ID NO: 121000 - DNA, 80 bp, synthetic construct
  source 1..80: mol_type = other DNA
cgacgcggcactcgcccgtcaactcgtgggtaggcaacatcatcatgtttgcgcctacaatctgggtaaggatggtcttc

SEQ ID NO: 121001 - DNA, 80 bp, synthetic construct
  source 1..80: mol_type = other DNA
ttggcgcggggttcacctccgtctgaggctagctcctcagccagccagctgtcggcgccgtcgttgcgggctaactgtgc

SEQ ID NO: 121002 - DNA, 80 bp, synthetic construct
  source 1..80: mol_type = other DNA
ccccccccaagaaggccccgacgcctcccccaaggagacgccggacagtgggtctgagcgagagcaccatatcagaagcc

SEQ ID NO: 121003 - DNA, 80 bp, synthetic construct
  source 1..80: mol_type = other DNA
aggaatccatcacaagttggagatgagtactgctatggagggcacacgaatgaggatgactcgaactgtgctcactggac

SEQ ID NO: 121004 - DNA, 80 bp, synthetic construct
  source 1..80: mol_type = other DNA
cattgcaacgggtacttttttttatcccgttccggtcaaccctctgtttgcatgtccggaacatttggcatcattgcgtg

SEQ ID NO: 121005 - DNA, 80 bp, synthetic construct
  source 1..80: mol_type = other DNA
agtgtgtttcaaaactcttccgcgagttgtattcctagcgaagaaaacaaatcccaggatatgtttttggacggttgtcc

SEQ ID NO: 121006 - DNA, 80 bp, synthetic construct
  source 1..80: mol_type = other DNA
cgcctggccgcttgtcgcagcattgaatccttccggataggatggggcgctctggagtacgaagaaaatgtcaccaatgt

SEQ ID NO: 121007 - DNA, 80 bp, synthetic construct
  source 1..80: mol_type = other DNA
ggtggagtttacttgctgccgcgcaggggccctagattgggtgtgcgcgcagttaggaagacttctgaacgatcccagcc

SEQ ID NO: 121008 - DNA, 80 bp, synthetic construct
  source 1..80: mol_type = other DNA
gtgactttgattcagtgatcgactgtaatacgtgtgtcacccagacagtcgacttcagcttggaccccaccttcaccatt

SEQ ID NO: 121009 - DNA, 80 bp, synthetic construct
  source 1..80: mol_type = other DNA
tggcaaagccatccctctcgagcatatcaaggggggtaggcatctcatcttctgtcattcaaaaaagaagtgcgatgaac

SEQ ID NO: 121010 - DNA, 80 bp, synthetic construct
  source 1..80: mol_type = other DNA
agcacatatccccttcttcagcatccagaaatgtgattggcttgtaggtgtaagtcacatgacctgaggtttctggtggg

SEQ ID NO: 121011 - DNA, 80 bp, synthetic construct
  source 1..80: mol_type = other DNA
tcatcttctctcctatggaaacaaaggtcatcgtccacggggcggatgtggcggcgtgcggggacatccttcacggcctg

SEQ ID NO: 121012 - DNA, 80 bp, synthetic construct
  source 1..80: mol_type = other DNA
caaaacaacgaacagataactatcaccaagatgctggaaatagggatcagaacaccgactacctcatagggcttgacggg

SEQ ID NO: 121013 - DNA, 80 bp, synthetic construct
  source 1..80: mol_type = other DNA
ataaacgactggacggagattacacagtttatcctggagcaccgagccaagggctcctgtaagtacgccctcccgctgcg

SEQ ID NO: 121014 - DNA, 80 bp, synthetic construct
  source 1..80: mol_type = other DNA
aagcaagcaggggacaacttcgcctatctagttgcctaccaggctacggtctgtgccagagccaaagcccccccaccatc

SEQ ID NO: 121015 - DNA, 80 bp, synthetic construct
  source 1..80: mol_type = other DNA
gtttgcccccacattgtgggcgagaatgatactgatgacccacttcttcagtgtcctcatggccagagatcagcttgagc

SEQ ID NO: 121016 - DNA, 80 bp, synthetic construct
  source 1..80: mol_type = other DNA
actcctacttacagtaggagtaggcatctttttactccccgcccgatagaggggggggcctaagcaacactccacttgct

SEQ ID NO: 121017 - DNA, 80 bp, synthetic construct
  source 1..80: mol_type = other DNA
cacatgtggccgctacctcttcaactgggctgtgaagacgaagctcaaactcactccattgccggcggcgcgcctcctgg

SEQ ID NO: 121018 - DNA, 80 bp, synthetic construct
  source 1..80: mol_type = other DNA
ggagaacatcgtcgcttggccagatccatcattgagctcacttaccggcacaaggtcgtgaaggtgatgcgccccgccgc

SEQ ID NO: 121019 - DNA, 80 bp, synthetic construct
  source 1..80: mol_type = other DNA
tcgcaggccagttggcaggcttccttaacaagggcttcctcccccgagagatgcataactagcataaaggggaccagctg

SEQ ID NO: 121020 - DNA, 80 bp, synthetic construct
  source 1..80: mol_type = other DNA
gggcgctgacctgcgctgggccccaagccgacgcgccctggaggcagctggagccggacctgggctggcggtggcacccg

SEQ ID NO: 121021 - DNA, 80 bp, synthetic construct
  source 1..80: mol_type = other DNA
tcccattagcggaacaataagtagtgctcacattattctcagatttaatgaacatggggtgctaatgaatcattctggtt

SEQ ID NO: 121022 - DNA, 80 bp, synthetic construct
  source 1..80: mol_type = other DNA
caggtgtgggagccggaaccaacaacaacccacccggccctttgtcccccggaggccgtgtatcgccccccaccacacag

SEQ ID NO: 121023 - DNA, 80 bp, synthetic construct
  source 1..80: mol_type = other DNA
cgattgatgttctgaatttgccgacgttgtgtaaacaccactggtcccgttgttttgaacctgaaagaaagttcaacaga

SEQ ID NO: 121024 - DNA, 80 bp, synthetic construct
  source 1..80: mol_type = other DNA
gccatgtttaaggacaaagttgttggtatcgcccagtctttggcacccgccgcagaggcagcgaagccggtcgttgagtc

SEQ ID NO: 121025 - DNA, 80 bp, synthetic construct
  source 1..80: mol_type = other DNA
gtctcgtagaccgtgcaacatgagcacacttcctaaacctaaaagacaaacaaaaagaaacacactccgccgcccaaaga

SEQ ID NO: 121026 - DNA, 80 bp, synthetic construct
  source 1..80: mol_type = other DNA
aaggtgacatttgaccgagtgcaacttctggaccagcactattatgatactgtaaaggagataaagctccgggcgtccca

SEQ ID NO: 121027 - DNA, 80 bp, synthetic construct
  source 1..80: mol_type = other DNA
caccttgcactgccccactgactgcttccgcaaacatccggaagctacatactctcgatgtggctccggtccctggctca

SEQ ID NO: 121028 - DNA, 80 bp, synthetic construct
  source 1..80: mol_type = other DNA
gcctcctcgagagacctccgcagggcctcgacgcggcgacgggtgtcgaagagcgcctgcaggcgcgcgccctgtcgcgt

SEQ ID NO: 121029 - DNA, 80 bp, synthetic construct
  source 1..80: mol_type = other DNA
ggttgtctgtgggatctttattcttgtggttcttctgtactttgtctgctgcaaagccagagagaaatctagcaggccca

SEQ ID NO: 121030 - DNA, 80 bp, synthetic construct
  source 1..80: mol_type = other DNA
gcattacccgccacgaccgtgcggtacagagccagctgggaaaatctgtgggcccgtgtactgctttacccccagtcctg

SEQ ID NO: 121031 - DNA, 80 bp, synthetic construct
  source 1..80: mol_type = other DNA
caggattgcctgtgtgccaggaccacttggagttttgggagagcgtcttcaccggcctcactcacatagatgcccacttc

SEQ ID NO: 121032 - DNA, 80 bp, synthetic construct
  source 1..80: mol_type = other DNA
atactgctaacatgcctggcacacccagccttggggtttgacatcactaaagtgctcttggcaatactgggccccctcta

SEQ ID NO: 121033 - DNA, 80 bp, synthetic construct
  source 1..80: mol_type = other DNA
ggccctcggccggtggcgacgacggcgacggggactggttccccgacgccggtggtcccggcgacgaggagtgtgaggag

SEQ ID NO: 121034 - DNA, 80 bp, synthetic construct
  source 1..80: mol_type = other DNA
tcccggacatgaagagccccaactagtgcaaagttatggatggaacattgtcaccatgaagagtggagtggatgtgttct

SEQ ID NO: 121035 - DNA, 80 bp, synthetic construct
  source 1..80: mol_type = other DNA
gttgatcagaccaaaattcagtatgtcatcagagcacaattgcatgtaggggccaagcaggaaaattggaataccgacat

SEQ ID NO: 121036 - DNA, 80 bp, synthetic construct
  source 1..80: mol_type = other DNA
agaagctttccaacagggctggggcaagcttggggtcgccaacatcaatggatcatctgatgataggccttactgctggc

SEQ ID NO: 121037 - DNA, 80 bp, synthetic construct
  source 1..80: mol_type = other DNA
aggtccacaccgaatatgagaaatatataactacacgcaaacattcaaaacaccgtggtatcattaacgtcatatgaaaa

SEQ ID NO: 121038 - DNA, 80 bp, synthetic construct
  source 1..80: mol_type = other DNA
ctggtcacatccatctccaccacatggtccttgtggatcattaccgtcccgtgcagacacttaagctggccttccacctc

SEQ ID NO: 121039 - DNA, 80 bp, synthetic construct
  source 1..80: mol_type = other DNA
atgtaccaacagtatgatgagatggaagaatgctctcgacacctcccttacttggttgaaggtcaccacctggccgagca

SEQ ID NO: 121040 - DNA, 80 bp, synthetic construct
  source 1..80: mol_type = other DNA
aggcggaagaggacgagagggaggtatccgtcccggcagagatcctgcggaaatccaggaagtttccccgggcgttgccc

SEQ ID NO: 121041 - DNA, 80 bp, synthetic construct
  source 1..80: mol_type = other DNA
atatcttggggtggtgggtggcctcccaaatggcgcccccgtcagcctctaccgctttcgtggtgagcggcctggctgtg

SEQ ID NO: 121042 - DNA, 80 bp, synthetic construct
  source 1..80: mol_type = other DNA
gagtatggagaagtgacagtggaatgcgaaccaagaagtggtttagacacgagtgcgtactatgtgttcactattggtac

SEQ ID NO: 121043 - DNA, 80 bp, synthetic construct
  source 1..80: mol_type = other DNA
gtttttctgaataatgtggtatttatggcagggtggagtatttgttcagggccaggtagactttgacccattacgtggag

SEQ ID NO: 121044 - DNA, 80 bp, synthetic construct
  source 1..80: mol_type = other DNA
cgcccacagggttgcatagggtcattgtattgaattgaataaaagcatacttaccaaagccatggcgaccagtgttcgtc

SEQ ID NO: 121045 - DNA, 80 bp, synthetic construct
  source 1..80: mol_type = other DNA
cgctggctgctggtgccccaggcggacgacagcgacgacgcggactacgccggcaacgacgacgcagagtgggcgaacag

SEQ ID NO: 121046 - DNA, 80 bp, synthetic construct
  source 1..80: mol_type = other DNA
atggctgcgagcgggtggagcatggggtggcgctggttctcgggagtgtatgggttaaacgcaagtgccgtctccaggtg

SEQ ID NO: 121047 - DNA, 80 bp, synthetic construct
  source 1..80: mol_type = other DNA
tggccgcctattgcctcgcaaccggctgtgtgtgtatcatcgggcgcatccacatcaatcaaaggacgatcatcgccccc

SEQ ID NO: 121048 - DNA, 80 bp, synthetic construct
  source 1..80: mol_type = other DNA
ggtggcgcacgacgcgctcggcggcacaggcctccgtcagggccgtggccagctcggaggacagccgcgggaggcgtgcg

SEQ ID NO: 121049 - DNA, 80 bp, synthetic construct
  source 1..80: mol_type = other DNA
caacagctgacaaagagattctcacttggaatgctgcaaggacgcggaccattaaaactgttcatggcccttgtggcgtt

SEQ ID NO: 121050 - DNA, 80 bp, synthetic construct
  source 1..80: mol_type = other DNA
ccattagttgatcaatttcttcctcctggagatctccatgacccgctcgttcaatggtagctgcaaggtcattagatatg

SEQ ID NO: 121051 - DNA, 80 bp, synthetic construct
  source 1..80: mol_type = other DNA
tctaagaataaatcattggaattaatgtttcaataaagatcacttacttgaaatctgaaagtatgtctctggtgtagttg

SEQ ID NO: 121052 - DNA, 80 bp, synthetic construct
  source 1..80: mol_type = other DNA
aagggcgtggcggtttattacagagccagtcccttgagcggggatgcgtcatagacgagatactgcgcgaagtgggtctc

SEQ ID NO: 121053 - DNA, 80 bp, synthetic construct
  source 1..80: mol_type = other DNA
catccgtacccgggaggcctcctttgaggaatggatgcgctccaaggaggtggacctggacttcgggctgacggaaaggc

SEQ ID NO: 121054 - DNA, 80 bp, synthetic construct
  source 1..80: mol_type = other DNA
ctacaacccaccattgctcgagtcatggaaaaaacccgactacgagccgcccgtggttcatgggtgtccgctcccacctg

SEQ ID NO: 121055 - DNA, 80 bp, synthetic construct
  source 1..80: mol_type = other DNA
ccgtcctccggcccgacggcttccgggtagtcgtcctcctcgtactgcagctcctctaggaacagcggcgacggcgccac

SEQ ID NO: 121056 - DNA, 80 bp, synthetic construct
  source 1..80: mol_type = other DNA
atacagcttcaattgcttgggaatgagtaacagagatttcctggagggagtgtctggagctacatgggttgatctggtac

SEQ ID NO: 121057 - DNA, 80 bp, synthetic construct
  source 1..80: mol_type = other DNA
gactctccactctaccaggcaaccctgccatagcttctctaatgtctttcactgcttccattaccagccctctcagcaca

SEQ ID NO: 121058 - DNA, 80 bp, synthetic construct
  source 1..80: mol_type = other DNA
tgccattcttttcatctgtgcggcttggcatgtaaagggtaaattcccagctgtggccacttatgcagcttgcgggatgt

SEQ ID NO: 121059 - DNA, 80 bp, synthetic construct
  source 1..80: mol_type = other DNA
aagtgctcgacgcccattatgactcagtcttaaaggacatcaagctagcggcttccaaggtcagcgcaaggctcctcacc

SEQ ID NO: 121060 - DNA, 80 bp, synthetic construct
  source 1..80: mol_type = other DNA
taacaatacccccggagacatattgtttgatttacaattaggcccccatttaaatccattcctatcacaccttctccaaa

SEQ ID NO: 121061 - DNA, 80 bp, synthetic construct
  source 1..80: mol_type = other DNA
gggctaaggtcatcggcatcctgttgctgttctcaggtgtggaggcggaaacttatatcaccggcagcggcgcaggccac

SEQ ID NO: 121062 - DNA, 80 bp, synthetic construct
  source 1..80: mol_type = other DNA
tagatgggatcgagtaaagggtgacggtaagcaccagcggcagggctaccgatcatggagggcccacaaagccgcgatta

SEQ ID NO: 121063 - DNA, 80 bp, synthetic construct
  source 1..80: mol_type = other DNA
actgggaaccaggagatgagcagaactacacggtcactgtccatggtagcgatggaaatcacactttcggtttcaaattt

SEQ ID NO: 121064 - DNA, 80 bp, synthetic construct
  source 1..80: mol_type = other DNA
acttcttctttcaccttttcatacattgcccaagaatgaaaacgagaacgaataaagtatttttcaactaatcaagtctt

SEQ ID NO: 121065 - DNA, 80 bp, synthetic construct
  source 1..80: mol_type = other DNA
tccaacaccgtctccgcggccccaaaaccgggcggccacattactctgggaatcggggtgagggcattccgagcctcgtc

SEQ ID NO: 121066 - DNA, 80 bp, synthetic construct
  source 1..80: mol_type = other DNA
gtgggcggcttgtccccctcgccacctacgcgatcttgcaggtgtggcctctcttgttgctagtgctcactctaccccgg

SEQ ID NO: 121067 - DNA, 80 bp, synthetic construct
  source 1..80: mol_type = other DNA
atgtggcgctccaagaagagtccgatgggattctcgtatgacaccagatgctttgactcaacggtcacagagcgcgacat

SEQ ID NO: 121068 - DNA, 80 bp, synthetic construct
  source 1..80: mol_type = other DNA
gcttccacccgtggccggtcggtcggtggcgctgtatgcgtcggcggacgaggctcggaatgccctccccccgattccca

SEQ ID NO: 121069 - DNA, 80 bp, synthetic construct
  source 1..80: mol_type = other DNA
aaggggtttgggccggcactggcatcatgacaacacggtgtccctgtggagctgtcgtctcgggcaatgtccgacacggc

SEQ ID NO: 121070 - DNA, 80 bp, synthetic construct
  source 1..80: mol_type = other DNA
tcgacttcagcctagaccccacattctcaattgagaccacaaccgttccccaggatgcagtttcgcgcagtcaacgtcgc

SEQ ID NO: 121071 - DNA, 80 bp, synthetic construct
  source 1..80: mol_type = other DNA
tggggccctaccaccacccccacgcagacacggagacccccgcccaaccaccccgctaccccgccgaggccgtctatctg

SEQ ID NO: 121072 - DNA, 80 bp, synthetic construct
  source 1..80: mol_type = other DNA
cgggacaccaggccgcgactaactggggaaagcgattacttaaacgaccctatgctgcttccagtacgggacaaaaactt

SEQ ID NO: 121073 - DNA, 80 bp, synthetic construct
  source 1..80: mol_type = other DNA
ccccaaggtcatgagcacagttatgagcgagctgatcgtgcgccgtgcgcggcctctggagagggatgcaaacttgcaag

SEQ ID NO: 121074 - DNA, 80 bp, synthetic construct
  source 1..80: mol_type = other DNA
cggcgcgtctccagaaacgcccacaaccaagggggtcgccaccccgcgtcggcgcggacggacggccccggcgccaccca

SEQ ID NO: 121075 - DNA, 80 bp, synthetic construct
  source 1..80: mol_type = other DNA
cgtcgtctgctgttccatgtcatactcctggacgggagcactgatcactccctgcgctgctgaggaagagaagttgccta

SEQ ID NO: 121076 - DNA, 80 bp, synthetic construct
  source 1..80: mol_type = other DNA
aaaggtagtactgatagacagctctatgaagtaacaattcttgatgattataaaacagcaggacagacaaaagatgatgc

SEQ ID NO: 121077 - DNA, 80 bp, synthetic construct
  source 1..80: mol_type = other DNA
tggctaggcgccagattcctggagtttgaagctctgggctttctgaatgaggaccattggttaggaagaaagaattctgg

SEQ ID NO: 121078 - DNA, 80 bp, synthetic construct
  source 1..80: mol_type = other DNA
cctgctacatgaaagcccaagcggcctgccgcgcagcaggtctcaccaattatgacatgttggtctgcggagacgatctg

SEQ ID NO: 121079 - DNA, 80 bp, synthetic construct
  source 1..80: mol_type = other DNA
caccaacgcagacttggaggatgaagagcagatccttcggtacatggaaggagaacaccatgtgctagcaaaaacaatac

SEQ ID NO: 121080 - DNA, 80 bp, synthetic construct
  source 1..80: mol_type = other DNA
gagacccacgtgacggagggtcgcagggccgtgctgccttcagtcttacgtccctcttttcgcccggggcgtcccagaaa

SEQ ID NO: 121081 - DNA, 80 bp, synthetic construct
  source 1..80: mol_type = other DNA
gacccactttttctcaatactccagagccaggaggcgcttgaaaaagccttggacttcgacatgtacggagtcacatact

SEQ ID NO: 121082 - DNA, 80 bp, synthetic construct
  source 1..80: mol_type = other DNA
tcgtagaactcatgaggaggggtgaccttccagtttggttagcccacaaagtagcatcagaagggatcaaatatacagac

SEQ ID NO: 121083 - DNA, 80 bp, synthetic construct
  source 1..80: mol_type = other DNA
gtgcacaggaaaattctcaatagacaaagagatggctgaaacgcaacatggaaccacagttgtgaaagtcaagtatgaag

SEQ ID NO: 121084 - DNA, 80 bp, synthetic construct
  source 1..80: mol_type = other DNA
aatgaaagtgcaacaatcttgatgacagccacaccgcctgggactagtgatgaatttccacattcaaatggtgaaataga

SEQ ID NO: 121085 - DNA, 80 bp, synthetic construct
  source 1..80: mol_type = other DNA
agctgttgctccttcaatgacaatgcgttgtataggaatatcaaatagagactttgtggaaggggtttcaggaggaagct

SEQ ID NO: 121086 - DNA, 80 bp, synthetic construct
  source 1..80: mol_type = other DNA
taaattaggggatggaataaaacttaatgcacagggtcaacttacagctagtaacactgctaaggtactagagcccctta

SEQ ID NO: 121087 - DNA, 80 bp, synthetic construct
  source 1..80: mol_type = other DNA
gacgaaatggaggaatgttccaaacatcttccactagtcgaacacggactgcaattggcagagcaatttaagcaaaaggc

SEQ ID NO: 121088 - DNA, 80 bp, synthetic construct
  source 1..80: mol_type = other DNA
ccgccaaatggaagcagaaggagtcatcacacaagatgacatgcagaaccctaaagggttgaaagaaagagttgagaaat

SEQ ID NO: 121089 - DNA, 80 bp, synthetic construct
  source 1..80: mol_type = other DNA
caggccaacgcctcgccctgctgcagggtttggcggaaaaacaccgcggggttgtcgggtgaggcgaagtgcatgacccc

SEQ ID NO: 121090 - DNA, 80 bp, synthetic construct
  source 1..80: mol_type = other DNA
cttgggatacgatgtggaagtgtctcatcagactcaaacccacccttactggccccactccacttttgtatcggctgggg

SEQ ID NO: 121091 - DNA, 80 bp, synthetic construct
  source 1..80: mol_type = other DNA
gggcgtcaagttctgctaggccctgcagatggcttggaggccaaaggctggagacttctcgcccccattacagcctatcg

SEQ ID NO: 121092 - DNA, 80 bp, synthetic construct
  source 1..80: mol_type = other DNA
cagggccgcatctagggcgtcgaagcgccgcagctcggccagacccgagctgcggcgcgcctgctggtcgttaatgtcgc

SEQ ID NO: 121093 - DNA, 80 bp, synthetic construct
  source 1..80: mol_type = other DNA
gtccgcctccagctgacccgagttaatgtaggcgtaccccagggcccggagaacgcgaatacagaacagatgcgccagac

SEQ ID NO: 121094 - DNA, 80 bp, synthetic construct
  source 1..80: mol_type = other DNA
acgtcaccacctcaaaatctaagccatgcaaatagttccgtaaagactccggaaacaacacggagtaatgaacaagcgac

SEQ ID NO: 121095 - DNA, 80 bp, synthetic construct
  source 1..80: mol_type = other DNA
attcaaacagaaggccttgggcgttttgcagacggctggcaggcaggcacaggaagcagctcctgtagtccaatctaact

SEQ ID NO: 121096 - DNA, 80 bp, synthetic construct
  source 1..80: mol_type = other DNA
gtgtattggtgcgatggcgacacacctgtgtggcggttggtccagacgcgggcgacgcacacaccctagcgtgcgttacg

SEQ ID NO: 121097 - DNA, 80 bp, synthetic construct
  source 1..80: mol_type = other DNA
tggacaaccactatcatgagacacttaaggagatcaaggcacgagcgtcgcgtgtgaaggcgcggaccctctcagttgag

SEQ ID NO: 121098 - DNA, 80 bp, synthetic construct
  source 1..80: mol_type = other DNA
caagtatgtccagatggccttgctcaagataggggccttgaccggcacctacatttatgaccatcttgccccactgtcgg

SEQ ID NO: 121099 - DNA, 80 bp, synthetic construct
  source 1..80: mol_type = other DNA
ttcgagccctcgatgctgaagaagaagcagctaactgtcttagacttgcatcctggagctgggaaaaccaggagagttct

SEQ ID NO: 121100 - DNA, 80 bp, synthetic construct
  source 1..80: mol_type = other DNA
tatccctataggctatggcattacccctgcacggtcaactacaccatctttaagatacggttgttcgtgggagtggttga

SEQ ID NO: 121101 - DNA, 80 bp, synthetic construct
  source 1..80: mol_type = other DNA
ccgggcatttataggtttgtttcacctggggaacgaccatcaggaatgttcgattccgtgactttgtgtgagtgctatga

SEQ ID NO: 121102 - DNA, 80 bp, synthetic construct
  source 1..80: mol_type = other DNA
gcagcgtggcgtggccggcggcgacggtcgcgttggcgtcggggtgcggggtcgcctcgggccgcttgtgcggctttttg

SEQ ID NO: 121103 - DNA, 80 bp, synthetic construct
  source 1..80: mol_type = other DNA
gagatgatcctcatgaagatgaagagcaagacctggcttgtgcataaacaatggttcttggatctccctctcccgtggac

SEQ ID NO: 121104 - DNA, 80 bp, synthetic construct
  source 1..80: mol_type = other DNA
tgggtcgtcctcctatttctgctcttggcagacgccagggtctgtgcctgcctttggatgctcatcctattgggtcaggc

SEQ ID NO: 121105 - DNA, 80 bp, synthetic construct
  source 1..80: mol_type = other DNA
accggctaatgtcagctgccatcaaggatagcaaagcagtccatgctgacatggggtactggatagaaagtgaaaagaac

SEQ ID NO: 121106 - DNA, 80 bp, synthetic construct
  source 1..80: mol_type = other DNA
gctgctttgactcaacggtcactgagagggacatcagaactgaggagtccatttatcagtcctgttcgctgcccgaggag

SEQ ID NO: 121107 - DNA, 80 bp, synthetic construct
  source 1..80: mol_type = other DNA
gactcaaaccaacattgcatggtcccacccctcttctgtacaggttgggaccagtccaaaatgacatctgcacctctcac

SEQ ID NO: 121108 - DNA, 80 bp, synthetic construct
  source 1..80: mol_type = other DNA
gagcacacagcaatacccccctcacattcatatccgccacagaaaaaaaacgtcccagatacccagtgggaatatccaac

SEQ ID NO: 121109 - DNA, 80 bp, synthetic construct
  source 1..80: mol_type = other DNA
ggctctcagcttccctgcgaacctgagccggacgttgtgatactaacgtccatgcttactgatccagaccacattacagc

SEQ ID NO: 121110 - DNA, 80 bp, synthetic construct
  source 1..80: mol_type = other DNA
gggcttggcgtgcccgccgaggtagttgttgtagatgtaacacgaggccgtcgtgtgcacggcctcgtcccggctgatga

SEQ ID NO: 121111 - DNA, 80 bp, synthetic construct
  source 1..80: mol_type = other DNA
tagttttactctttctcctactggcagatgccagagtctgtgcatgtttctggatgattatcctactaggccaggccgag

SEQ ID NO: 121112 - DNA, 80 bp, synthetic construct
  source 1..80: mol_type = other DNA
tgggcgcgcgcgcatcgggccagcgccgcggcggaagtcgtcgcgcggactctctgggtccgccggtgagaccgggccat

SEQ ID NO: 121113 - DNA, 80 bp, synthetic construct
  source 1..80: mol_type = other DNA
ataatttacatacagttggtaataaagcagaccgtggatgtttaaggcatttccttccccctcccaacaaactaggactt

SEQ ID NO: 121114 - DNA, 80 bp, synthetic construct
  source 1..80: mol_type = other DNA
ttcgaggatatgacccccgccgagctggaggttgtcttcccgactacggacgccaagctgaactacctgtcgcggacgca

SEQ ID NO: 121115 - DNA, 80 bp, synthetic construct
  source 1..80: mol_type = other DNA
cgccgtaccgggcgcctcgggggacgcgcggcgatgagacgagcggctcattcgccatcgggatagtcccgcgcgaagcc

SEQ ID NO: 121116 - DNA, 80 bp, synthetic construct
  source 1..80: mol_type = other DNA
agtggagagacatcccctatctaccaaaaacacaggacctggtatgttcctcacttgttgggagaaaggagagggcagag

SEQ ID NO: 121117 - DNA, 80 bp, synthetic construct
  source 1..80: mol_type = other DNA
gcccgctccccctggcgctaggtctttcactccctgcacatgcgggggttgtgatcttttcctggtcaccaggaatgctg

SEQ ID NO: 121118 - DNA, 80 bp, synthetic construct
  source 1..80: mol_type = other DNA
aagcgtggaagtccaagaagaccccaatggggttttcatatgatacccgttgttttgactccacagtcactgagagtgat

SEQ ID NO: 121119 - DNA, 80 bp, synthetic construct
  source 1..80: mol_type = other DNA
ccggtggaaccacgtcttacattactcgcgatgttgtgagcctgtttactcgaggcccgcgccagaacctgcatttggtg

SEQ ID NO: 121120 - DNA, 80 bp, synthetic construct
  source 1..80: mol_type = other DNA
tggtctcttcggtaaagggagcatagacacgtgtgctaaattcgcatgcacaagcaaagcaaccgggtggatcatacaga

SEQ ID NO: 121121 - DNA, 80 bp, synthetic construct
  source 1..80: mol_type = other DNA
cctgcgccatcacaacatggtgtacgcgacgacctcccgctcagcgaccacccgccagaagaaggtcacttttgaccgtc

SEQ ID NO: 121122 - DNA, 80 bp, synthetic construct
  source 1..80: mol_type = other DNA
cgagctgtgcgcgctaagcttatcgcccagggaggtaaggccgccatttgcggcatctatctcttcaactgggcggtaaa

SEQ ID NO: 121123 - DNA, 80 bp, synthetic construct
  source 1..80: mol_type = other DNA
gtttatcagtgggcagcgtggtgattgtcggaagggtcatcctgtcaggccatcctgctatcatccctgaccgagaggcg

SEQ ID NO: 121124 - DNA, 80 bp, synthetic construct
  source 1..80: mol_type = other DNA
cacaaactttataagcgctttgcgcctgatggttactgaagttccacaaagcgaagtgtatcagtctggtcctgattatt

SEQ ID NO: 121125 - DNA, 80 bp, synthetic construct
  source 1..80: mol_type = other DNA
aagcagtttgaaagatcggaagccatttctatttgaacagagtggtgatgtcaacatggttgtcgaaaaactactacaac

SEQ ID NO: 121126 - DNA, 80 bp, synthetic construct
  source 1..80: mol_type = other DNA
tcctacgacgacgaatagaaaccggtgaggttacgtgggacgatgcatggacaacatttaaaagagaaacgggggatatg

SEQ ID NO: 121127 - DNA, 80 bp, synthetic construct
  source 1..80: mol_type = other DNA
ggctgtacgccggggtggtaaggttcgcgctgggctgccccaacgggaccggcgccatcttgagcgacgtctccccaagg

SEQ ID NO: 121128 - DNA, 80 bp, synthetic construct
  source 1..80: mol_type = other DNA
gttccaaatacgggtatggtgcaaaagatgtccggggccatgctagcaaggccattaaccacatcaactccgtgtgggag

SEQ ID NO: 121129 - DNA, 80 bp, synthetic construct
  source 1..80: mol_type = other DNA
cttggtgttgtggattgggactaattcaagaaacgcatcaatggccctatcatgcttggcagtgggaggaataacactgt

SEQ ID NO: 121130 - DNA, 80 bp, synthetic construct
  source 1..80: mol_type = other DNA
gttttccagaatacgtgatggcctacaatacggctggaagacttggggcaaaaaccttgtgttctccccaggaagaaaga

SEQ ID NO: 121131 - DNA, 80 bp, synthetic construct
  source 1..80: mol_type = other DNA
ctcctccatgcaagcccctacttcgagaggaggtcaccttcatggtagggctcaatgagtacctggtcggttctcaacta

SEQ ID NO: 121132 - DNA, 80 bp, synthetic construct
  source 1..80: mol_type = other DNA
tgaaaaacagtgacgtagatgaccaaagttcacctgcgcaacaaaaaaccccgaaacacccgcgaaattcacttccgtaa

SEQ ID NO: 121133 - DNA, 80 bp, synthetic construct
  source 1..80: mol_type = other DNA
gctaacatttccggcccccaggaggacaagccctattgctggcattacgcaccaagaccgtgtggcatcgtaccagcagc

SEQ ID NO: 121134 - DNA, 80 bp, synthetic construct
  source 1..80: mol_type = other DNA
gccagactacaaccccccaacagtggagagctggaagagggctgattatactgcgcccgtggtacacggatgtgctatcg

SEQ ID NO: 121135 - DNA, 80 bp, synthetic construct
  source 1..80: mol_type = other DNA
tcatggctatcttgtgcgtcccaaacgcagtgatattacaaaatgcatggaaagtgagttgcacaatactggcagtggtg

SEQ ID NO: 121136 - DNA, 80 bp, synthetic construct
  source 1..80: mol_type = other DNA
ctgacgtccttcctcttaggaggaagggtgacggtacagcgtccctactgtccccgcgccctgtgtcctcccttaaaggc

SEQ ID NO: 121137 - DNA, 80 bp, synthetic construct
  source 1..80: mol_type = other DNA
gtggatggaagacaagactccggtcgaacgttggagcgacattccatattccggaaaacgggaagacatctggtgtggaa

SEQ ID NO: 121138 - DNA, 80 bp, synthetic construct
  source 1..80: mol_type = other DNA
tgttccgttcatgcctaacataacagcttataaacccgtcaattctaaaagctatgccagaagtcacatatttggaaatg

SEQ ID NO: 121139 - DNA, 80 bp, synthetic construct
  source 1..80: mol_type = other DNA
gagacagtgcaggtccatgcctttccaccggggagagctcatgaggtgcatcaatgtcagcccggagagctgctcctgga

SEQ ID NO: 121140 - DNA, 80 bp, synthetic construct
  source 1..80: mol_type = other DNA
ggccaagtccttacaattcatacctgtagagaccttgagcactcaagctcggtctccatccttttctgacaattctctcc

SEQ ID NO: 121141 - DNA, 80 bp, synthetic construct
  source 1..80: mol_type = other DNA
gtgttactgggcaaacacttggggactgtaggtttctgtgggtgccgaccctaggcgctatggggattttgggttgcgtc

SEQ ID NO: 121142 - DNA, 80 bp, synthetic construct
  source 1..80: mol_type = other DNA
gcctggccggcggactggggaccgagcggggggggcacaccagacaccaaagagtggggctctgactctggggttttggg

SEQ ID NO: 121143 - DNA, 80 bp, synthetic construct
  source 1..80: mol_type = other DNA
aaggtgacatcgttgaaaagtatctttcccgcgcgaggcataaagttgcgtgtgatgcggaagggtcccggcacctcgga

SEQ ID NO: 121144 - DNA, 80 bp, synthetic construct
  source 1..80: mol_type = other DNA
tgccgtggacaggatgagctcatcgggagagctagaatctcccctggtgcgggttggaacgttcgtgacacagcatgtct

SEQ ID NO: 121145 - DNA, 80 bp, synthetic construct
  source 1..80: mol_type = other DNA
cttttattgatctcatcgcgtacgtcggcgtacgtcctgggtccaacccgcatgttgtccaggaaggtgtccgccatttc

SEQ ID NO: 121146 - DNA, 80 bp, synthetic construct
  source 1..80: mol_type = other DNA
tttgtccccccagtacaaaatgtggcttgctcgggggatatggtggctacaatacctattggccagacttgaggctatga

SEQ ID NO: 121147 - DNA, 80 bp, synthetic construct
  source 1..80: mol_type = other DNA
gatcattgtcattctgtgctacatctgctgccgcaagcgtccaagggcatacaatcatatggtagacccactactcagct

SEQ ID NO: 121148 - DNA, 80 bp, synthetic construct
  source 1..80: mol_type = other DNA
agccaaggttccccgagttgtgggaattaaccgtggagattgaaccgatatagggtcatataatcggtccatatacgagt

SEQ ID NO: 121149 - DNA, 80 bp, synthetic construct
  source 1..80: mol_type = other DNA
accgcgttcgtcgttagtggaatggccggggccgcagtcggtaacatcgggctgggtagggtccttattgacatcctagc

SEQ ID NO: 121150 - DNA, 80 bp, synthetic construct
  source 1..80: mol_type = other DNA
gcgggacaacagggttacgtctggtacctggttgcattctgcgccgcatggcacatccggtggaagctcgttccgctgat

SEQ ID NO: 121151 - DNA, 80 bp, synthetic construct
  source 1..80: mol_type = other DNA
cttttccccaatgggcgtaaatttgacttagccggttatgaaggaagcacccccccccctttaaaaaatttgcgaggcaa

SEQ ID NO: 121152 - DNA, 80 bp, synthetic construct
  source 1..80: mol_type = other DNA
tggcaacaaaatgaatgtaacaaaatgaatgtatagtatagagtgtacatatggagtcaggccagcgttagctgccaccg

SEQ ID NO: 121153 - DNA, 80 bp, synthetic construct
  source 1..80: mol_type = other DNA
gagagacggaagaggcataattattccagacggttgtaaagccagccaaagtgcaagtcacgaagatcacacctctcccc

SEQ ID NO: 121154 - DNA, 80 bp, synthetic construct
  source 1..80: mol_type = other DNA
gggctgtccacgttaccgggaaaccccgccgtagcctcaatgatgtccttcagtgctgctctcaccagcccactctccac

SEQ ID NO: 121155 - DNA, 80 bp, synthetic construct
  source 1..80: mol_type = other DNA
tgagactacggtgagacttcgggcttatttcaacacgcccggtctacccgtgtgtcaggaccacctggagttctgggaag

SEQ ID NO: 121156 - DNA, 80 bp, synthetic construct
  source 1..80: mol_type = other DNA
gaaaaatgctacctgggagtatgtaccgagggcaatgctagagtaagacactgctcttccctagagacgggctgcttttg

SEQ ID NO: 121157 - DNA, 80 bp, synthetic construct
  source 1..80: mol_type = other DNA
ggaggcagcagccatctttatgacagcgaccccgcctggaaccacggatccttttcctgactcaaatgccccaatccatg

SEQ ID NO: 121158 - DNA, 80 bp, synthetic construct
  source 1..80: mol_type = other DNA
attagcacacagactactagggagacaacacaacctaccactgtacctactacacaaccaaccatcatagccagtacaac

SEQ ID NO: 121159 - DNA, 80 bp, synthetic construct
  source 1..80: mol_type = other DNA
gtcttgggaaaggatggccattgtcaaaaatggacatcggagttcccctccttgccattggatgctactcacaagtcaac

SEQ ID NO: 121160 - DNA, 80 bp, synthetic construct
  source 1..80: mol_type = other DNA
gggtccaaccccgttgttgtacaggctagggtctgtagctaatgagatcacaacgacacatccaatcaccaaatacatca

SEQ ID NO: 121161 - DNA, 80 bp, synthetic construct
  source 1..80: mol_type = other DNA
tcggcggggggttacgtgaacaccacaaccccgtgtggattttatgggttatcgcgggcttcgtgccgcctgacatgata

SEQ ID NO: 121162 - DNA, 80 bp, synthetic construct
  source 1..80: mol_type = other DNA
atgatgacgaccctaacgaggaggctgtgaatttaatatttccagaatctatgattcttcaggctgacatagccaacgaa

SEQ ID NO: 121163 - DNA, 80 bp, synthetic construct
  source 1..80: mol_type = other DNA
catgaggaccccgcacgcgtgcacgttctcctcggcgaggtccccgggttggtgaaagacgaagcgcccggcgtcggcgt

SEQ ID NO: 121164 - DNA, 80 bp, synthetic construct
  source 1..80: mol_type = other DNA
aattcgctcatcaggcatcataatctggtttactctaccacctcgcgtagcgcagtgctacgccagaaaaaggtcacctt

SEQ ID NO: 121165 - DNA, 80 bp, synthetic construct
  source 1..80: mol_type = other DNA
cggggcacttgtcgcatttaaaatcatgtgcggcgagaccccgtccgcagaggacatggtcaacctcctcccagccctgt

SEQ ID NO: 121166 - DNA, 80 bp, synthetic construct
  source 1..80: mol_type = other DNA
aagagggatggtaaaaccaaaagggaaagttatggaccttggttgcgggagaggaggatggtcgtactacatggcgacac

SEQ ID NO: 121167 - DNA, 80 bp, synthetic construct
  source 1..80: mol_type = other DNA
attacgcgcaaccttacgttcaaaaaactctgcgtattcccccccaaggttatgtaaaataaattgcactggaacattcg

SEQ ID NO: 121168 - DNA, 80 bp, synthetic construct
  source 1..80: mol_type = other DNA
cggatctccagatacggaggggagtctttttgtcgttttttgtagatgcatccggtgttgcgacagatgcgtccgacgca

SEQ ID NO: 121169 - DNA, 80 bp, synthetic construct
  source 1..80: mol_type = other DNA
tggagagatatggcacacacactcataatgattgggtccaacgcttctgacaggatgggaatgggcgttacctacctagc

SEQ ID NO: 121170 - DNA, 80 bp, synthetic construct
  source 1..80: mol_type = other DNA
cgcgccacgtccgcaaaggcggggtggtgcacgtgcgggtgcaggcgcgcccccacgaccaccgagagccactggaccgt

SEQ ID NO: 121171 - DNA, 80 bp, synthetic construct
  source 1..80: mol_type = other DNA
cagcattgtttatgaggcggaggtccttataatgcacttgccaggctgcgtgccttgtgtacgtactggcaacgtgtccc

SEQ ID NO: 121172 - DNA, 80 bp, synthetic construct
  source 1..80: mol_type = other DNA
cgcatagagtctgagtctaaggtgctcgtcctcgactccttcgactctatggtcgattcggaggatgagcgcgagccctc

SEQ ID NO: 121173 - DNA, 80 bp, synthetic construct
  source 1..80: mol_type = other DNA
ttgtcgaaaatggacatcggagttccccttctcgctatcggatgctattcacaagtcaaccccataaccctcacagcagc

SEQ ID NO: 121174 - DNA, 80 bp, synthetic construct
  source 1..80: mol_type = other DNA
gccgccccatggccgtggggaccgcctggtccacgtactgcagggtctcgagttcggccatgacgcgctcggtcgccgcg

SEQ ID NO: 121175 - DNA, 80 bp, synthetic construct
  source 1..80: mol_type = other DNA
ggaatgtcagaattttcttcccaattcctacccaccatcttcagcttttttagatgaagcgcagcagaacccagtacgct

SEQ ID NO: 121176 - DNA, 80 bp, synthetic construct
  source 1..80: mol_type = other DNA
cttcagaacggtcgcaaccccgtggacggcgtcagcctatccccaaggcgcgccagcccacgggccggtcctggggtcaa

SEQ ID NO: 121177 - DNA, 80 bp, synthetic construct
  source 1..80: mol_type = other DNA
tcacgaatgactgctccaactctagtatcatctatgaggcagacggcgtgatcatgcatatgcctgggtgcgtcccctgc

SEQ ID NO: 121178 - DNA, 80 bp, synthetic construct
  source 1..80: mol_type = other DNA
ggagccacgggatttaccgcggaagagctggacgccatggacagggaggcggctcgagccatcagccgcggcggcaagcc

SEQ ID NO: 121179 - DNA, 80 bp, synthetic construct
  source 1..80: mol_type = other DNA
ggtggtcctcttgtttctactccttgcagacgccagagtctgcgcgtgtttgtggatgcttctcttgctgggacaagccg

SEQ ID NO: 121180 - DNA, 80 bp, synthetic construct
  source 1..80: mol_type = other DNA
gaaaggatggaagtgctccaaaggcgctatggaggtggcttggttcgcaaccccctgtcacgcaactcaactcatgagat

SEQ ID NO: 121181 - DNA, 80 bp, synthetic construct
  source 1..80: mol_type = other DNA
tgcgcgactccgtcacgggcgtgcgcgtgcccgtgcgcacccgtcctcctcgtccctgatctaatgcttgtgtcctcccc

SEQ ID NO: 121182 - DNA, 80 bp, synthetic construct
  source 1..80: mol_type = other DNA
gacatcaatggcaatcccaccttcacctctggatccaatgacaccgatttcttcctgctcaacaatacaaggccaccgct

SEQ ID NO: 121183 - DNA, 80 bp, synthetic construct
  source 1..80: mol_type = other DNA
gtccgtgttatgttaaaaacatctatttcgttttagtccatttcaataaatgtactataattgttcagtctaaaaataat

SEQ ID NO: 121184 - DNA, 80 bp, synthetic construct
  source 1..80: mol_type = other DNA
accactgataacctaaaggtgccctgccaactgccatctcccgagtttttctcgtgggtggacggagtacagatccatcg

SEQ ID NO: 121185 - DNA, 80 bp, synthetic construct
  source 1..80: mol_type = other DNA
ggggtcccagctgcgccatgccgggggcggggggagagcaaaccacagaggcggagaccaacagcgcggggaggagtggg

SEQ ID NO: 121186 - DNA, 80 bp, synthetic construct
  source 1..80: mol_type = other DNA
gccgggggtggcgtcggtgaatagcgtggaggccaggcttccgggccccaacgagccctccgtcccaacaaggtccgccg

SEQ ID NO: 121187 - DNA, 80 bp, synthetic construct
  source 1..80: mol_type = other DNA
tcccctgttggtataggtccacggccactggccgggagcaccacataaccgaccgcagtccctgagttgggaataaaccg

SEQ ID NO: 121188 - DNA, 80 bp, synthetic construct
  source 1..80: mol_type = other DNA
cagtctagatgctgggtgccagcctcacctacgctggcggttccgaacgcctcggcgcctctcaccgggttccgcaaaca

SEQ ID NO: 121189 - DNA, 80 bp, synthetic construct
  source 1..80: mol_type = other DNA
agaagagaggcaacaatggaccaggactagtgatgatcataacactcatgacggttgtttcaatggtttcctctttaaag

SEQ ID NO: 121190 - DNA, 80 bp, synthetic construct
  source 1..80: mol_type = other DNA
ggctataaggtattggtgcttaatccatcagtggctgctacattaagttttggggcctacatgagcaaagcttatggtat

SEQ ID NO: 121191 - DNA, 80 bp, synthetic construct
  source 1..80: mol_type = other DNA
gtctctggggtggaggtagcaccactgcagagcttcatgctgcggggtggtgttgtagatgatccagtcgtagcaggagc

SEQ ID NO: 121192 - DNA, 80 bp, synthetic construct
  source 1..80: mol_type = other DNA
agtggcgtgttgaccaccagtatgggcaataccctcacctgctatcttaaggcttctgctgcctgccgagccgccggcct

SEQ ID NO: 121193 - DNA, 80 bp, synthetic construct
  source 1..80: mol_type = other DNA
agatcctgcggggctgacgcgcgcttcggcggggcaccggcaccgggaccgacttgttttacataacagtaggaggtgtg

SEQ ID NO: 121194 - DNA, 80 bp, synthetic construct
  source 1..80: mol_type = other DNA
aatacaaccaatcttcaccgtggcttcttttttaaaagctaaatggaccaatcaggagaacatcttgctcatgttggctg

SEQ ID NO: 121195 - DNA, 80 bp, synthetic construct
  source 1..80: mol_type = other DNA
atggtccaggcggcgaactgattaccttcagaagccccaatggagctgaacggaagctgaagccaatctggaaagacagc

SEQ ID NO: 121196 - DNA, 80 bp, synthetic construct
  source 1..80: mol_type = other DNA
tgaaggtgacagctgtgtgaccattatgtccaaggacaagcccaccatcgatgtgaagatgatgaacatggaggccgcta

SEQ ID NO: 121197 - DNA, 80 bp, synthetic construct
  source 1..80: mol_type = other DNA
tgatgttctgagatacatcattcttgtgggtgcggcctttatggaagccaactcaggtggagatgtggtgcatcttgctc

SEQ ID NO: 121198 - DNA, 80 bp, synthetic construct
  source 1..80: mol_type = other DNA
aaacgggcggtggcatgcgtataaataacaacttgttaattctagatgtggattacccatttgatgctcaaacaaaacta

SEQ ID NO: 121199 - DNA, 80 bp, synthetic construct
  source 1..80: mol_type = other DNA
catagggaaaatgttcgaagcaaccgcccgaggagcacgaaggatggctatcctgggagacaccgcatgggacttcggtt

SEQ ID NO: 121200 - DNA, 80 bp, synthetic construct
  source 1..80: mol_type = other DNA
cgccccccggagtcagatctcttgcgccgtgcacctgtggcgcgtcagacttgtacttagtcaccaggcacgcagatgtg

SEQ ID NO: 121201 - DNA, 80 bp, synthetic construct
  source 1..80: mol_type = other DNA
aacttatcagccagagccgcaagtaggaccaagtgaatggaacaccagcattgaaaacgttaaggctggtgggagggcat

SEQ ID NO: 121202 - DNA, 80 bp, synthetic construct
  source 1..80: mol_type = other DNA
taccgacagttcgacgaaatggaagagtgctccaagcacgttccactagtcgagcatggcctacagctagcggagcaatt

SEQ ID NO: 121203 - DNA, 80 bp, synthetic construct
  source 1..80: mol_type = other DNA
gttctcggcttatggtccttcctcctcctagtcctggccttaccacagcaggcttatgccttggacgctgctgaacaagg

SEQ ID NO: 121204 - DNA, 80 bp, synthetic construct
  source 1..80: mol_type = other DNA
cagttggggattggcggctagaaaaccgcgccatagctggagggcaaaatgggcttgcaagcggttgcggtactctcgaa

SEQ ID NO: 121205 - DNA, 80 bp, synthetic construct
  source 1..80: mol_type = other DNA
gctcgccatctcccccgcggcctcgacctcgctgtcgtcgtccacgttaaacaccgcccgcaggtaccccattaacccga

SEQ ID NO: 121206 - DNA, 80 bp, synthetic construct
  source 1..80: mol_type = other DNA
tgggcgcatggtcggatgaacagaataaatggagctcagcaaaagaagcagtggaagacccagagttttggaacctggtg

SEQ ID NO: 121207 - DNA, 80 bp, synthetic construct
  source 1..80: mol_type = other DNA
gctgtacgtaggaggccccatgtacaactcacggggcgaatcctgcggctatcgtcggtgcagggctagtgtggtcctcc

SEQ ID NO: 121208 - DNA, 80 bp, synthetic construct
  source 1..80: mol_type = other DNA
gaatagcggaaatgctgaagtccaaaatccaaggcttgctacaacaagccacgaagcaggcccaagacattcagcccgct

SEQ ID NO: 121209 - DNA, 80 bp, synthetic construct
  source 1..80: mol_type = other DNA
cgaattgatcatggacatttttgtcggaggtcattggggtgtgcttggggcgctgctgtattattccatggtagctaatt

SEQ ID NO: 121210 - DNA, 80 bp, synthetic construct
  source 1..80: mol_type = other DNA
acacccacgacactctccccccaccccgaccgccgccgcgccccaccggcgggatcgcggcgagacgcagccgggccacc

SEQ ID NO: 121211 - DNA, 80 bp, synthetic construct
  source 1..80: mol_type = other DNA
atgggtggggatgaacctttggacctgagcttgaaacgccccaggaactaggcgcagctgcgcttagtcatgtgtaaata

SEQ ID NO: 121212 - DNA, 80 bp, synthetic construct
  source 1..80: mol_type = other DNA
gacagctgaaccaactgagcaagtcagaattcaacacttataaaaggagtgggatcatggaagtggacagatccgaagcc

SEQ ID NO: 121213 - DNA, 80 bp, synthetic construct
  source 1..80: mol_type = other DNA
tgatgcctacagccttggcgttccatttgactacacgagggggagagccgcacatgatagtcagcaagcaggaaagagga

SEQ ID NO: 121214 - DNA, 80 bp, synthetic construct
  source 1..80: mol_type = other DNA
cggaaacggtcccgcgctctcgcctttatacgcgggccgccctgcgacacaatcacccgtccgtggtttcgaatctacac

SEQ ID NO: 121215 - DNA, 80 bp, synthetic construct
  source 1..80: mol_type = other DNA
ccatttaccaatcatgtgacttgcagcctgaggcacgcgcggctatacggtcacttacccaacgcctgtactgtggaggc

SEQ ID NO: 121216 - DNA, 80 bp, synthetic construct
  source 1..80: mol_type = other DNA
tacttttaataaggaaactggatgtacttattctatgacatttgattttggatggagcaaagtgtacaatgatccaatac

SEQ ID NO: 121217 - DNA, 80 bp, synthetic construct
  source 1..80: mol_type = other DNA
tatcaactcttgcttgattccataggtgatagaaccagatatttttctatgtggaatcaggctgtagacagctatgatcc

SEQ ID NO: 121218 - DNA, 80 bp, synthetic construct
  source 1..80: mol_type = other DNA
tcggcgccgcgtgcgggtaggttctggtactgcgccctgagaagacttgcgtgcgcaacgacgcggcggttgacgtcttg

SEQ ID NO: 121219 - DNA, 80 bp, synthetic construct
  source 1..80: mol_type = other DNA
ccggccacggtgacggcgtacttggccgccacggccccgctcttgaacggggtgcgcgccagcagctttggcgccagggt

SEQ ID NO: 121220 - DNA, 80 bp, synthetic construct
  source 1..80: mol_type = other DNA
tgtaccgcagcagctctcaccctgtgggacaacaacgccagcgcggcttggaattccaccacggctactgggctgtgcca

SEQ ID NO: 121221 - DNA, 80 bp, synthetic construct
  source 1..80: mol_type = other DNA
ccccacttaccttctgcaggccagcctgttgtatgtgccgtactatgtgcgagcccacatcctgctgcgggcttgtctgc

SEQ ID NO: 121222 - DNA, 80 bp, synthetic construct
  source 1..80: mol_type = other DNA
tcgtagtggagcgacggggttccgctccgaagcaggtccggggccagggcggccccgaaccaggacttgatgctgagttc

SEQ ID NO: 121223 - DNA, 80 bp, synthetic construct
  source 1..80: mol_type = other DNA
cgagcctgatgatgacagggaggtgtctgtcgctgcagaaattctgcgaccctccaagaggttcccgccggccatgccca

SEQ ID NO: 121224 - DNA, 80 bp, synthetic construct
  source 1..80: mol_type = other DNA
ttaagggtaaggtgcggagcctattacaggtataaaggttggggtagagtaaaaaaaagggaagttacaaaatgagtggc

SEQ ID NO: 121225 - DNA, 80 bp, synthetic construct
  source 1..80: mol_type = other DNA
aacgaagcagaagatccgtttcggtccaaacgcatggggaaagctcactagtgaacaaaaaagaggcttggctggattca

SEQ ID NO: 121226 - DNA, 80 bp, synthetic construct
  source 1..80: mol_type = other DNA
gatgtttgactccgtagtgctctgcgagtgctacgacgtaggctgcgcctggtatgagctgactcccgctgagactacag

SEQ ID NO: 121227 - DNA, 80 bp, synthetic construct
  source 1..80: mol_type = other DNA
ctgtctttggtcaaggggggcaggcatcttatcttctgccattcaaagaaaaagtgtgatgagttggccaagcaactatc

SEQ ID NO: 121228 - DNA, 80 bp, synthetic construct
  source 1..80: mol_type = other DNA
ggtgggttgggcgatcaagtgggagttcgtcatccttattttcctcctactggcagatgcaagagtgtgtgtcgtcttgt

SEQ ID NO: 121229 - DNA, 80 bp, synthetic construct
  source 1..80: mol_type = other DNA
acaaatcctaaacctcaaagaaaaaccaaaagaaacactaaccgccgcccacaggacgtcaagttcccgggcggtggcca

SEQ ID NO: 121230 - DNA, 80 bp, synthetic construct
  source 1..80: mol_type = other DNA
ggtccacgtactgcagggtctcgagttcggccatgacgcgctcggtcgccgcgcggtacgtctcctgcatgatggtccgg

SEQ ID NO: 121231 - DNA, 80 bp, synthetic construct
  source 1..80: mol_type = other DNA
cgcggaagccgggacggatgggcggttttgtggtgcccggaaccgaaccgccggatactccccgggtgctacatgcccat

SEQ ID NO: 121232 - DNA, 80 bp, synthetic construct
  source 1..80: mol_type = other DNA
gcttatcacccaagctgaagcagcgcttgagaacctagtagtcatcaacgcagtttctgcatccagcaaccatgggtggt

SEQ ID NO: 121233 - DNA, 80 bp, synthetic construct
  source 1..80: mol_type = other DNA
acaagcctcactggcagggacactaatgagaattgtggtgagatccaggtgctgtccacggccacgcagtccttcctagg

SEQ ID NO: 121234 - DNA, 80 bp, synthetic construct
  source 1..80: mol_type = other DNA
caagaaattcacctggtgagatattgctctatctcgcattgggccccgagttgaacccataccttgctcatttggcacgc

SEQ ID NO: 121235 - DNA, 80 bp, synthetic construct
  source 1..80: mol_type = other DNA
acatgctgtcacagactaaacagggtggggagaacttcccataccttgtagcgtaccaagcaacagtctgtgtccgcgcg

SEQ ID NO: 121236 - DNA, 80 bp, synthetic construct
  source 1..80: mol_type = other DNA
ggcatttggccgaagggaaggtggacaccggggtggcggtctccaggtggaccgcaaagttaaggtggttccatgagcgt

SEQ ID NO: 121237 - DNA, 80 bp, synthetic construct
  source 1..80: mol_type = other DNA
gcacttggcctgtggcaggtacgtgcaggcggccttgctccaccttggtaggctgaccggaacgtacatttatgaccacc

SEQ ID NO: 121238 - DNA, 80 bp, synthetic construct
  source 1..80: mol_type = other DNA
agggcccgaccgtccagatgtataccaacgtggaccaggacctggtggagtggccagctccgcagggaactcgatcgtta

SEQ ID NO: 121239 - DNA, 80 bp, synthetic construct
  source 1..80: mol_type = other DNA
ggtaccgatcgttgttaattaaagggttagaactttctaaggtgtgtaaacacatgtctccttcttcagcgtccatgaat

SEQ ID NO: 121240 - DNA, 80 bp, synthetic construct
  source 1..80: mol_type = other DNA
gacggacccgcgcgcgtcggccgactccgattccgcggcccacgccgccgcaccccaggcggacgtggcgccggttctgg

SEQ ID NO: 121241 - DNA, 80 bp, synthetic construct
  source 1..80: mol_type = other DNA
atggtgatgtcatacctgccaggcgaaagggggatagtcgcgcagcactcctaagcccacgacctattagcactctaaaa

SEQ ID NO: 121242 - DNA, 80 bp, synthetic construct
  source 1..80: mol_type = other DNA
ccacagtcacggagagggacatcagaaccgaggagtccatctatttgtcctgttcactgcccgaggaggctcggactgcc

SEQ ID NO: 121243 - DNA, 80 bp, synthetic construct
  source 1..80: mol_type = other DNA
cagcgtttctagtgggccaactgttcaccttccgcccgcgccgccattggaccacccaagaatgcaactgttccatctat

SEQ ID NO: 121244 - DNA, 80 bp, synthetic construct
  source 1..80: mol_type = other DNA
tcaggcgccaatgacaccgatgtcctgctgttggcaagtttgcggcctcctgccggctcctggtacggatgtacctggat

SEQ ID NO: 121245 - DNA, 80 bp, synthetic construct
  source 1..80: mol_type = other DNA
gcgaatggccgccaggcgcgcccacgccagccgcgcgtcgggatgctcggcaacgcgcgccgccagggccatagggtcga

SEQ ID NO: 121246 - DNA, 80 bp, synthetic construct
  source 1..80: mol_type = other DNA
acctcagattctttttgacatcatcgctggcgcacattggggcatcctgggcgccgtgttgtactacagcatggttgcca

SEQ ID NO: 121247 - DNA, 80 bp, synthetic construct
  source 1..80: mol_type = other DNA
tgccgcctatgtggcacagggttatactgtcctggtgctaaatccatcggtggccgccaccctaggcttcggcatgtaca

SEQ ID NO: 121248 - DNA, 80 bp, synthetic construct
  source 1..80: mol_type = other DNA
acgttcggtgagaacgagactgacgtcctcctactggagagcctacgaccacctgacggcggttggttcggttgcacctg

SEQ ID NO: 121249 - DNA, 80 bp, synthetic construct
  source 1..80: mol_type = other DNA
tcgcagctgctcttcggggcatgggcttaaacgcagttgcttactacagagggctcgacgtctccgtgataccaacccag

SEQ ID NO: 121250 - DNA, 80 bp, synthetic construct
  source 1..80: mol_type = other DNA
atgccaccgctggaggaggaccccggagatccggacttggaatcggggtcctggtccacggtcagtgaggaaggtgacag

SEQ ID NO: 121251 - DNA, 80 bp, synthetic construct
  source 1..80: mol_type = other DNA
gttttcccacaacaccgcgaccggggtcatggagatgtccacgagcaccagacacggcgggccccgggcgagtggccgct

SEQ ID NO: 121252 - DNA, 80 bp, synthetic construct
  source 1..80: mol_type = other DNA
acagggaggcggctcgagccatcagccgcggcggcaagcccccctcgaccatggccaagctggtgactggcatgggcttt

SEQ ID NO: 121253 - DNA, 80 bp, synthetic construct
  source 1..80: mol_type = other DNA
accagcttgggcaacacgatgacctgctatctcaaagcacaggcagcctgtcgggcggccaatctcaaaaactatgacat

SEQ ID NO: 121254 - DNA, 80 bp, synthetic construct
  source 1..80: mol_type = other DNA
gtaacatccatgtggccgaggctcgaacaattttggcataaacatatgtggaattttgttagtggaatacagtacctagc

SEQ ID NO: 121255 - DNA, 80 bp, synthetic construct
  source 1..80: mol_type = other DNA
gaatgtctccgtggcccacgacgcaactggacagagatattactacctcacgcgtgaccctaccattcctctgtcacggg

SEQ ID NO: 121256 - DNA, 80 bp, synthetic construct
  source 1..80: mol_type = other DNA
accagcccccgcccccccaaagggtggtggttcgggtgcacgtggatgaattcgtctggattcaccaagacatgcggtgg

SEQ ID NO: 121257 - DNA, 80 bp, synthetic construct
  source 1..80: mol_type = other DNA
ccagcagcttggcgggcctcttccaaagtgggccgtctcagaaaattcagcttataaacaccaatggcagttggcacata

SEQ ID NO: 121258 - DNA, 80 bp, synthetic construct
  source 1..80: mol_type = other DNA
ataccttgctggcctttcgaccttgccgggtaatcccgccgtggccacgttgatgtctttcaccgccgcggtgacctccc

SEQ ID NO: 121259 - DNA, 80 bp, synthetic construct
  source 1..80: mol_type = other DNA
cggggccgctcgcttgttctgcccaccgtgcgctaccaccccagcatcctttaattcgtgtgctgtgatactgttgcaga

SEQ ID NO: 121260 - DNA, 80 bp, synthetic construct
  source 1..80: mol_type = other DNA
gagttcaaacagtggacattcaaattcctgtgaaaaccgcgtttggtgaacctatggaaacccaaacttcgccaatggaa

SEQ ID NO: 121261 - DNA, 80 bp, synthetic construct
  source 1..80: mol_type = other DNA
atgccgatgtagtcaccggtcgacgttatgtccgagggaccgccttgggagcactggccctgttaagccaggcatgtcgg

SEQ ID NO: 121262 - DNA, 80 bp, synthetic construct
  source 1..80: mol_type = other DNA
gattctaatgaacaggctgtgaatgatttttttccggaatcgtttattttagctgctgctgaaggggtaatattaccgga

SEQ ID NO: 121263 - DNA, 80 bp, synthetic construct
  source 1..80: mol_type = other DNA
tgccgcagctgcactcgcggagcttgctcgcaagagctttccaccagaacacttagactcacaagggggctctgcaacca

SEQ ID NO: 121264 - DNA, 80 bp, synthetic construct
  source 1..80: mol_type = other DNA
tccccttgcacgtgctgcatgggaaacagcaagacacactccagtcaactcctggctaggcaacattattatgtttgccc

SEQ ID NO: 121265 - DNA, 80 bp, synthetic construct
  source 1..80: mol_type = other DNA
ggaaagaatctatgcattgttagagcaatggatgtgggatacatgtgtgatgacactatcacttatgaatgcccagtgct

SEQ ID NO: 121266 - DNA, 80 bp, synthetic construct
  source 1..80: mol_type = other DNA
gggttggcaggcgccgcagttggtagtgtagggttggggaaggtcctagtggacatactcgctggctatggtgcgggtgt

SEQ ID NO: 121267 - DNA, 80 bp, synthetic construct
  source 1..80: mol_type = other DNA
attcatctgggtgccccgagcggttggcggcgtgcaaaccgatcaccgagtttgcccaggggtgtggccctctttctcac

SEQ ID NO: 121268 - DNA, 80 bp, synthetic construct
  source 1..80: mol_type = other DNA
tgagtcctctccaaacccaactatagaggaaggaagaacgctacgcgtcctaaagatggtggaaccatggctcagaggaa

SEQ ID NO: 121269 - DNA, 80 bp, synthetic construct
  source 1..80: mol_type = other DNA
ataattaaggcaagctcgatggaagaccgaaaaggtctaggattcttattggctgggctcatgacacaaagacatctgac

SEQ ID NO: 121270 - DNA, 80 bp, synthetic construct
  source 1..80: mol_type = other DNA
gagaaggacgtcggggccgcggagtcatggtcagacggcccgtcgtccgactccgaaacggaggactcggactcctcgga

SEQ ID NO: 121271 - DNA, 80 bp, synthetic construct
  source 1..80: mol_type = other DNA
ttctctcccaggcgccactggacgacgcaggactgtaattgctccatctacccaggccatgtgacaggtcatcggatggc

SEQ ID NO: 121272 - DNA, 80 bp, synthetic construct
  source 1..80: mol_type = other DNA
ggagagaagagagggtccgcaaaacccactggggatgcgtgagtggccctctgtgggcggtgagggagagtcttatagga

SEQ ID NO: 121273 - DNA, 80 bp, synthetic construct
  source 1..80: mol_type = other DNA
taaccaggcatggccatcatacataattttaaagtaaattaaatggcgacctctaacaaaggtgcttcccacatacatca

SEQ ID NO: 121274 - DNA, 80 bp, synthetic construct
  source 1..80: mol_type = other DNA
cgggccatgaagatggcagagagggacgctcccgaggccatgttgacgcttctggaggtggcggtgctaggcatcgccac

SEQ ID NO: 121275 - DNA, 80 bp, synthetic construct
  source 1..80: mol_type = other DNA
gcggtggtatctagttgatatgcatctctgggtgtttttggggtgtggcggacgcggtgcggtcattggacgtggtgcag

SEQ ID NO: 121276 - DNA, 80 bp, synthetic construct
  source 1..80: mol_type = other DNA
gactttcctggccacctgtatcaacggggtgtgctggactgtctaccatggcgccggtaacaggtccttggccggcccta

SEQ ID NO: 121277 - DNA, 80 bp, synthetic construct
  source 1..80: mol_type = other DNA
ttccgcttattgctgcggccattggagccgttcccggaattgcctcagtggccttgcaggcttctcgaaaaaattaaaat

SEQ ID NO: 121278 - DNA, 80 bp, synthetic construct
  source 1..80: mol_type = other DNA
tccgcggaccacttcgaggcggaggtggtggagcgcaccgacgtgtactactacgagacgcgccccgctctgttttaccg

SEQ ID NO: 121279 - DNA, 80 bp, synthetic construct
  source 1..80: mol_type = other DNA
ccctgcagtccagaagaggagaagttgccaattaaccccctgagtaactcattgttgcggtaccacaacaaagtgtactg

SEQ ID NO: 121280 - DNA, 80 bp, synthetic construct
  source 1..80: mol_type = other DNA
acgagatggaggagtgctccaggcatctctcctacctcgccgaaggccagcaaatagccgaacagttcaaaaacaaaatc

SEQ ID NO: 121281 - DNA, 80 bp, synthetic construct
  source 1..80: mol_type = other DNA
gcataaggctgcatagatacgcgccaccctgccgtccgcttatcagagatgaaatcaccttttcggtaggactttccacc

SEQ ID NO: 121282 - DNA, 80 bp, synthetic construct
  source 1..80: mol_type = other DNA
gtggcagctaccctcagaaaacttggggcgccccctctcagagcgtggaagagtcgggcacgtgcggtgagggcagctct

SEQ ID NO: 121283 - DNA, 80 bp, synthetic construct
  source 1..80: mol_type = other DNA
gaaagagaggaaaacatggtgcgctctcaagtgaccgcaggagatggaagctcagaaaacttctccatgggcctcttatg

SEQ ID NO: 121284 - DNA, 80 bp, synthetic construct
  source 1..80: mol_type = other DNA
atgtgctctaacacctggcacggaactttcccgataaacggcagcacgacgggccctagcgtccctgtgccagcgcccaa

SEQ ID NO: 121285 - DNA, 80 bp, synthetic construct
  source 1..80: mol_type = other DNA
gcgtgagaaaccgtgtgtcaactggatcacagttggcgaagagattctcaaaaggaagatggggaaccttcaagaagtcg

SEQ ID NO: 121286 - DNA, 80 bp, synthetic construct
  source 1..80: mol_type = other DNA
tgaccacaccagcctcggcagtcaacttcgccaataaaagtggcatctaccacctgaccaacgactgccccaacagcagc

SEQ ID NO: 121287 - DNA, 80 bp, synthetic construct
  source 1..80: mol_type = other DNA
ctgctcggtccagctgatgaccacgtctctgcaggctggcgactcctcgccccaatcacagcatacgcgcagcagacgcg

SEQ ID NO: 121288 - DNA, 80 bp, synthetic construct
  source 1..80: mol_type = other DNA
tcagttccaggaggactgggttaacaaatctgacaacggaaggtgggaaagccctcagaaccgtctcggaagcaggtccc

SEQ ID NO: 121289 - DNA, 80 bp, synthetic construct
  source 1..80: mol_type = other DNA
tgggaagttcctggctgatggggggtgctcaggaggagcatacgacattatcatctgtgacgaatgccactccacagacc

SEQ ID NO: 121290 - DNA, 80 bp, synthetic construct
  source 1..80: mol_type = other DNA
atggagaagttgcaacttaagggaacaacatatggagtatgttcaaaagcgtttaaattcgctgggactcccgctgacac

SEQ ID NO: 121291 - DNA, 80 bp, synthetic construct
  source 1..80: mol_type = other DNA
tgctctagttgtaggtgttatctgtgcagctattctgcgtcgtcatgtgggccagggggaaggcgcggtccagtggatga

SEQ ID NO: 121292 - DNA, 80 bp, synthetic construct
  source 1..80: mol_type = other DNA
actcctcgccggtggcgatctccgggaccaccatgttctgcagggtggcgtatacgcggtcgaagcgaacccccgcggtg

SEQ ID NO: 121293 - DNA, 80 bp, synthetic construct
  source 1..80: mol_type = other DNA
ggctaaagatggctgttggtatggaatggagataaggcccaggaaagaaccagaaagcaacttagtaaggtcagtggtga

SEQ ID NO: 121294 - DNA, 80 bp, synthetic construct
  source 1..80: mol_type = other DNA
acccttaccggttgtggcattacccgtgcaccctaaattataccatcttcaaggtgcgcatgtacattgggggcctcgag

SEQ ID NO: 121295 - DNA, 80 bp, synthetic construct
  source 1..80: mol_type = other DNA
ccacacagaccagagcctctggatgaaatccgtgagaaacgacacagggacctacatagtggaacttctggtcactgacc

SEQ ID NO: 121296 - DNA, 80 bp, synthetic construct
  source 1..80: mol_type = other DNA
gaaacgacaattgaattccctctccagaagagagtttgaagagtataaaaaaagtggaattattgaagtggataggactg

SEQ ID NO: 121297 - DNA, 80 bp, synthetic construct
  source 1..80: mol_type = other DNA
ctgtggagcaattttcattgtagggcaggggttcagctgggtacctagactacactggaccaagcaggactgcaattgct

SEQ ID NO: 121298 - DNA, 80 bp, synthetic construct
  source 1..80: mol_type = other DNA
gtgagaatgtttgtgtgcgggtttgagcaccgcttcaatgccgcttgcaattggaccaggggggagcgctgcgatatcga

SEQ ID NO: 121299 - DNA, 80 bp, synthetic construct
  source 1..80: mol_type = other DNA
cattacagcagaggcggctaagcgtagattggccagggggtcccccccctctttggccagctcttcagctagccagttgt

SEQ ID NO: 121300 - DNA, 80 bp, synthetic construct
  source 1..80: mol_type = other DNA
ttaccgtagaactacgcgcccgggaagaagcatacacaaaactactagttacttattgtaaatcgattatacgttatctc

SEQ ID NO: 121301 - DNA, 80 bp, synthetic construct
  source 1..80: mol_type = other DNA
ccttattctcacctggcaaaccgctatgggagtctggcagcagtgcttggaagagcaaaacctccaggagcttaataaat

SEQ ID NO: 121302 - DNA, 80 bp, synthetic construct
  source 1..80: mol_type = other DNA
atgttcggagccattcccgcaaggccattaaccacatcaactccgtgtgggaggacttgctggaggacaacaacacacct

SEQ ID NO: 121303 - DNA, 80 bp, synthetic construct
  source 1..80: mol_type = other DNA
tactgctactccacctggcagtgtgaccgtcccgcatcccaatatagaggaaatagccctctccggcgagggagaagtcc

SEQ ID NO: 121304 - DNA, 80 bp, synthetic construct
  source 1..80: mol_type = other DNA
ttaacaaacgcaaaaaaaccagcctgtgcctgatggaaaccatggaaaccattctgccggcggcgctggcgtttcatctg

SEQ ID NO: 121305 - DNA, 80 bp, synthetic construct
  source 1..80: mol_type = other DNA
gggaatgttaatcgggatgcctgtctttccctagtcttggtgtcaggcaagtgctcaaagtcaggataagcaaactctcc

SEQ ID NO: 121306 - DNA, 80 bp, synthetic construct
  source 1..80: mol_type = other DNA
aatgacagcttgaagacgggtttcatcgcatctctattttatgttcaccgtttcaacagttcaggctgccaagagcgcat

SEQ ID NO: 121307 - DNA, 80 bp, synthetic construct
  source 1..80: mol_type = other DNA
ccaactttcgtacgggatgtgccaacgggcggcaaactttctccacgtcctaaagggtatatcggtgttcacctttttac

SEQ ID NO: 121308 - DNA, 80 bp, synthetic construct
  source 1..80: mol_type = other DNA
ggctttggcactatccttgtaccatcaattacaccacatttaaggtcaggatgtatgtgggaggggtcgagcacaggctg

SEQ ID NO: 121309 - DNA, 80 bp, synthetic construct
  source 1..80: mol_type = other DNA
ctgtacatcggggatttgtgcggttctctcttcctggcgggacaactattcaccttccagccccgccgtcactggaccgt

SEQ ID NO: 121310 - DNA, 80 bp, synthetic construct
  source 1..80: mol_type = other DNA
tccaaccaccacagccagaacaactactcaaactacacagctagacactacagtgcagaatagtactgtgttggttaggt

SEQ ID NO: 121311 - DNA, 80 bp, synthetic construct
  source 1..80: mol_type = other DNA
gattaccgcgcatccggtggtgaccaaaaaagaagaaccggtgaacattgaagcgggcaccccgtttggcgaaagcaaca

SEQ ID NO: 121312 - DNA, 80 bp, synthetic construct
  source 1..80: mol_type = other DNA
cccttaagtcagctgaaggggggcagacatctcatcttttgccattccaagaaaaagtgtgatgagctcgctgcggcgct

SEQ ID NO: 121313 - DNA, 80 bp, synthetic construct
  source 1..80: mol_type = other DNA
attgacctacaacgacgtgaattgaaatgtggaggaggcatcttcgtgtacaacgacgttgagaagtggaagagcgacta

SEQ ID NO: 121314 - DNA, 80 bp, synthetic construct
  source 1..80: mol_type = other DNA
gtttcgacagcttatgaaaaagcaattggttttatgcctaatttggtagcgtatccgaaacccagtaattctaaaaaata

SEQ ID NO: 121315 - DNA, 80 bp, synthetic construct
  source 1..80: mol_type = other DNA
aagccctccatggaggacgtcgtcaacctgctgcctgggattttgtctccaggtgccctggtggtgggagtcatttgcgc

SEQ ID NO: 121316 - DNA, 80 bp, synthetic construct
  source 1..80: mol_type = other DNA
caaggaccagagcagcaagagggtgcttccaatcttaagcttactccggcgctctggacttcagcctatttgcgcaaatt

SEQ ID NO: 121317 - DNA, 80 bp, synthetic construct
  source 1..80: mol_type = other DNA
ccggagcctaagatgatgctgagggatgaggttagcttcaccgttggccttaactcttacgtcgtcggttcccagctacc

SEQ ID NO: 121318 - DNA, 80 bp, synthetic construct
  source 1..80: mol_type = other DNA
tctcggcatcggaacggtccttgatcaagcagagacagccggggtcagactaactgtgctggctacggccacaccccccg

SEQ ID NO: 121319 - DNA, 80 bp, synthetic construct
  source 1..80: mol_type = other DNA
caaacgatgccggtggcttccatgccacgacgcccggtggttgccgtgtatcgaacgagcgcggccccagacttataggg

SEQ ID NO: 121320 - DNA, 80 bp, synthetic construct
  source 1..80: mol_type = other DNA
ggactgcacaatgctcgtgaacggagacgaccttgtcattatctgtgagagcgcgggaacccaagaggatgcggcaagcc

SEQ ID NO: 121321 - DNA, 80 bp, synthetic construct
  source 1..80: mol_type = other DNA
agctttcaaacttccaagggaaagtgatgatgacaatcaatgctaccgacatatctgatgtgataacggtgccaacaccc

SEQ ID NO: 121322 - DNA, 80 bp, synthetic construct
  source 1..80: mol_type = other DNA
gtccggtgcgggcagtaatgacaaacgccttattactgggcaccctcctgtgcacggccgccgccgcggtctcgttgaac

SEQ ID NO: 121323 - DNA, 80 bp, synthetic construct
  source 1..80: mol_type = other DNA
cgtcgtcctcgacgggggtgttggaatgaggcgccccctcgcggtccgcctggcgtgggccgtgcccataggcctccggc

SEQ ID NO: 121324 - DNA, 80 bp, synthetic construct
  source 1..80: mol_type = other DNA
tggagtggaaggcttgggcttgcagaagctggggtacgtccttagagaagtcggattgaagcctggtggaaagatgtacg

SEQ ID NO: 121325 - DNA, 80 bp, synthetic construct
  source 1..80: mol_type = other DNA
tactcctgcttagtgtaggggtaggcatctttttgctccccgctcgataagctgggagctaaacactccataactcctgt

SEQ ID NO: 121326 - DNA, 80 bp, synthetic construct
  source 1..80: mol_type = other DNA
ggaccaagatctcaactttgagatgtacggagcagtgtactcggtcagtcctttggacctcccagccataattgaacgac

SEQ ID NO: 121327 - DNA, 80 bp, synthetic construct
  source 1..80: mol_type = other DNA
ccataccgttcaaggctttgctagcctatttgcggttgggccccagcagcaattacggctaatcaacaccaatgggagct

SEQ ID NO: 121328 - DNA, 80 bp, synthetic construct
  source 1..80: mol_type = other DNA
acgatccccttgcttcatataacttcttgtttttatgacaaaaaaacacgccgcaacaacccatccttaaaataaaaggt

SEQ ID NO: 121329 - DNA, 80 bp, synthetic construct
  source 1..80: mol_type = other DNA
caatgtgtcggtcgcccatgacggcgctggaaaaagggtctattaccttacccgtgaccctacaactcccctcgcgagag

SEQ ID NO: 121330 - DNA, 80 bp, synthetic construct
  source 1..80: mol_type = other DNA
cgacaccttgcgacaaaacctaaggacagcggcccgcgcgacggggtccgagaggctaaggtaggccgcgatgttaatgg

SEQ ID NO: 121331 - DNA, 80 bp, synthetic construct
  source 1..80: mol_type = other DNA
gccattcttttcatctgtatagtctggcacatcaaaggtaggctcccagctgcggccacttacgcagcgtgcggaatgtg

SEQ ID NO: 121332 - DNA, 80 bp, synthetic construct
  source 1..80: mol_type = other DNA
ccagggcgttatggcgggtctccgctgaggagtatgtggaagtgcggagaattggcgacagccactacgtggtgggagtt

SEQ ID NO: 121333 - DNA, 80 bp, synthetic construct
  source 1..80: mol_type = other DNA
agcacagcagtcctcacccctctcttaaaacatttgataacatcagattacatcaacacctcactcacttccatcaacgt

SEQ ID NO: 121334 - DNA, 80 bp, synthetic construct
  source 1..80: mol_type = other DNA
gcggcgcggagcaagtctactggtcgctgccggacctcatgcaagaccccgtcaccttccgctctacccagcaagtcagc

SEQ ID NO: 121335 - DNA, 80 bp, synthetic construct
  source 1..80: mol_type = other DNA
cgtctaccatggtgccgggacgaggttccttgctggaataaaggggcctgtgactcaaatgtacaccaatgtggaccagg

SEQ ID NO: 121336 - DNA, 80 bp, synthetic construct
  source 1..80: mol_type = other DNA
agcacgcggccccctagaaactcggcatacagggcgtcgatgagatgggctgcgctgggcgccactgcgtcgtacgccga

SEQ ID NO: 121337 - DNA, 80 bp, synthetic construct
  source 1..80: mol_type = other DNA
cgcagctattgtttgatatggtgtcaggtggccattggggtgtgctcgcagcggtcgcttttttcggcatgtcaggcaat

SEQ ID NO: 121338 - DNA, 80 bp, synthetic construct
  source 1..80: mol_type = other DNA
gctggggttcgcctcaccgtgttagccaccgcgactccccccgggtcggtgaccgtcccgcatcccaacattacagagac

SEQ ID NO: 121339 - DNA, 80 bp, synthetic construct
  source 1..80: mol_type = other DNA
cgtgctcctcttcttactgctggcagatgctcgcgtttgcgcctgcttgtggatgatgcttctcgtgtctcaggtagagg

SEQ ID NO: 121340 - DNA, 80 bp, synthetic construct
  source 1..80: mol_type = other DNA
gagcggcaaataccctgcaaaaacaaaacgaacaaagtcagtacggaactagcgccctggtagagctggaaggtgacaac

SEQ ID NO: 121341 - DNA, 80 bp, synthetic construct
  source 1..80: mol_type = other DNA
tttggccctttagtgacgtacaataaaattgtttttctgttaagtgttttattggtttcattgggcgtggttaacatgga

SEQ ID NO: 121342 - DNA, 80 bp, synthetic construct
  source 1..80: mol_type = other DNA
caaccatggcaaacgagatgggtttcctggaaaaaaccaagaaagacctcggattgggaagcatcacaacccaggaatct

SEQ ID NO: 121343 - DNA, 80 bp, synthetic construct
  source 1..80: mol_type = other DNA
cccgctaccttcagcgatttactcgtagggggtcactggggggtcctagctggtatagccttcttcagcatgcaggctaa

SEQ ID NO: 121344 - DNA, 80 bp, synthetic construct
  source 1..80: mol_type = other DNA
cagcccccccccagcggagactcgggtcactctacggtggtggatgcttccggcactgcagaccaattatccctggagga

SEQ ID NO: 121345 - DNA, 80 bp, synthetic construct
  source 1..80: mol_type = other DNA
gcagagaaaggggggaaagcccatcgaatggctctagaagaattgccagatgcactggaaacggtgacactcattgcagc

SEQ ID NO: 121346 - DNA, 80 bp, synthetic construct
  source 1..80: mol_type = other DNA
ccggaaaaaacgtagtgaatgtccaaacaaagccaagcctattcaaggttaagaatggaggagaaatcggggcggttgcc

SEQ ID NO: 121347 - DNA, 80 bp, synthetic construct
  source 1..80: mol_type = other DNA
cagtgggaacagaaaaagactggtgttggaccagaagctatggaaaaacacacatttggaatggcagccatggctggaga

SEQ ID NO: 121348 - DNA, 80 bp, synthetic construct
  source 1..80: mol_type = other DNA
tcagtccgttgagtaactctctcatacgccaccacaatctggtgtatgctaccacctcacgtagtgcttccctccgtcaa

SEQ ID NO: 121349 - DNA, 80 bp, synthetic construct
  source 1..80: mol_type = other DNA
gatgcccggcatcccctttctgtcctgccaacgcgggtacaggggggtatggcgtggagacggcataatgaacaccgttt

SEQ ID NO: 121350 - DNA, 80 bp, synthetic construct
  source 1..80: mol_type = other DNA
ttgtgccggttgaatcccttgaaaccaccatgaggtccccagtgttctctgacaattctgctcctcctgctgtgccccag

SEQ ID NO: 121351 - DNA, 80 bp, synthetic construct
  source 1..80: mol_type = other DNA
ttaacagctcctcagcccgtggagatatgctgacattataccttattatgtccccataaacgttcaaacagcaggttaaa

SEQ ID NO: 121352 - DNA, 80 bp, synthetic construct
  source 1..80: mol_type = other DNA
tggatccccaatactggaatttcagaaaaggggatttaacaaacgctacagcatatactaacgcagttggttttatgccc

SEQ ID NO: 121353 - DNA, 80 bp, synthetic construct
  source 1..80: mol_type = other DNA
atcactgcctatgctcaacagactcgtggtctcttgggcgccatcgtggttagcctaacgggccgcgacaaaaacgagca

SEQ ID NO: 121354 - DNA, 80 bp, synthetic construct
  source 1..80: mol_type = other DNA
cgccgctcaaagcaaatggggttaccttacacatctgccgacccaattggggtacaagatccttcttgttaagacactca

SEQ ID NO: 121355 - DNA, 80 bp, synthetic construct
  source 1..80: mol_type = other DNA
ggcgtggttgagcacaggcttgacgccgcgtgcaactggacgcggggagagcgctgcgatttggacgacagggatcgggc

SEQ ID NO: 121356 - DNA, 80 bp, synthetic construct
  source 1..80: mol_type = other DNA
acctgtgctgccagggccgtccgccgttgttgtaacccgccctagccgcgcgtccctgcgccgtgccgccagcggtccgc

SEQ ID NO: 121357 - DNA, 80 bp, synthetic construct
  source 1..80: mol_type = other DNA
aatgcagtggtggatgggatcgtggctactgatgtacctgaacttgagcgaacaactccagtcatgcagaaaaaagttgg

SEQ ID NO: 121358 - DNA, 80 bp, synthetic construct
  source 1..80: mol_type = other DNA
gactgaggtagaggacgatcgtgagccttctataccatcagagtacttgatcaagaggagaaagttcccaccggcactac

SEQ ID NO: 121359 - DNA, 80 bp, synthetic construct
  source 1..80: mol_type = other DNA
cggggttatccactttacccggcaatccggctgtagctgccctcatgtctttctcggcctcattgacgagcccactaccc

SEQ ID NO: 121360 - DNA, 80 bp, synthetic construct
  source 1..80: mol_type = other DNA
cgtagtggacgaagcccgggtcggcgaggacgttggggtgaatgccctcgagggcgaggaagcggatctgggtcgccgcg

SEQ ID NO: 121361 - DNA, 80 bp, synthetic construct
  source 1..80: mol_type = other DNA
tctgagtatgttaagactagagccaatgattgggactttgtggtcacgactgacatttcagaaatgggtgccaacttcaa

SEQ ID NO: 121362 - DNA, 80 bp, synthetic construct
  source 1..80: mol_type = other DNA
gcttactctataacatttgaatttgtatggaataaagaatatgccagggttgaatttgaaaccacttcctttaccttctc

SEQ ID NO: 121363 - DNA, 80 bp, synthetic construct
  source 1..80: mol_type = other DNA
tcttccgcctttgtggtgagtggcttggcgggagccgccgtgggaggtataggccttggtagggtgttgcttgacatact

SEQ ID NO: 121364 - DNA, 80 bp, synthetic construct
  source 1..80: mol_type = other DNA
ccagcgtactggtggccttgcgcagcaccaggggccccgggcctccgctcactcgcaggtacgcctcgccccggcggcgc

SEQ ID NO: 121365 - DNA, 80 bp, synthetic construct
  source 1..80: mol_type = other DNA
gggtatcttcatgcccctacaggcagtggcaagagcactaaagttccagcggcatatgccgctcaggggtacaaggtact

SEQ ID NO: 121366 - DNA, 80 bp, synthetic construct
  source 1..80: mol_type = other DNA
agcaggtgttcctgcccctggaacactcgcaattcagtcggtatcgctggcgcggacccacggcggcgttcctgtctctc

SEQ ID NO: 121367 - DNA, 80 bp, synthetic construct
  source 1..80: mol_type = other DNA
cgtggttttggaaggtgacagctgcataaccatcatggccaaggacaagccgaccattgacattaagatgatggaaactg

SEQ ID NO: 121368 - DNA, 80 bp, synthetic construct
  source 1..80: mol_type = other DNA
aaataaccacaaagttgaagcctttaatgaggataaaaatccacaggatatgcctctaatcgcatcaaaatataattctg

SEQ ID NO: 121369 - DNA, 80 bp, synthetic construct
  source 1..80: mol_type = other DNA
gcagcacctctaccagcaggtccgcggtgggctggagaaactcggccgtcccggagcaggcggtcgtcgggtgtggaggc

SEQ ID NO: 121370 - DNA, 80 bp, synthetic construct
  source 1..80: mol_type = other DNA
ctgcactaaggaggaattcttcgtttacaggcgtactggcattctggaaaccgaacgtgacaaggccagagagctgctca

SEQ ID NO: 121371 - DNA, 80 bp, synthetic construct
  source 1..80: mol_type = other DNA
tatggcatttgacgactggttaagtcttacagacgatgagtttttagccagagacttggaggagttacacgaccagatta

SEQ ID NO: 121372 - DNA, 80 bp, synthetic construct
  source 1..80: mol_type = other DNA
ccacgcgaattttaacacaggtcgctcgctgtcgcatcatctctaagcgcgcgcgggactttagccgcgcctccaattcc

SEQ ID NO: 121373 - DNA, 80 bp, synthetic construct
  source 1..80: mol_type = other DNA
cgctatatcatggttatgttttcaggggtcgatgccagcacacgtatcaccggtggcagtgcagcccatactacccttgg

SEQ ID NO: 121374 - DNA, 80 bp, synthetic construct
  source 1..80: mol_type = other DNA
gtagggctagagtatcacaaggtgctggatggagcctgagagaaactgcatgcctaggcaagtcatatgcacaaatgtgg

SEQ ID NO: 121375 - DNA, 80 bp, synthetic construct
  source 1..80: mol_type = other DNA
gggggggtcgggcgctgggtggtctctggccgcgcccactacaccagccaatccgtgtcggagagtggaaaagtgaaaga

SEQ ID NO: 121376 - DNA, 80 bp, synthetic construct
  source 1..80: mol_type = other DNA
gcggccctgagtggtgcccgcccccggggagaaattcattagcatactaggaagcccaggggaccaataggtgccgatca

SEQ ID NO: 121377 - DNA, 80 bp, synthetic construct
  source 1..80: mol_type = other DNA
tagcaatcatatccatcttcactcttaccccagggcgtacgagactctcactaagtatggcacgctcggtagtggtggac

SEQ ID NO: 121378 - DNA, 80 bp, synthetic construct
  source 1..80: mol_type = other DNA
ggagggagacaagaggaaacctccctcggcccccgcgctgcttctgggccgcggtggccgaggaagtgtgcccggaagac

SEQ ID NO: 121379 - DNA, 80 bp, synthetic construct
  source 1..80: mol_type = other DNA
gcgtcttgggcgccattctttacttttccatggtggcgaattgggctaaggtgttggctgtcctcgtcctgtttgcaggg

SEQ ID NO: 121380 - DNA, 80 bp, synthetic construct
  source 1..80: mol_type = other DNA
gacaggttttcacattccgacctcggcgatataccactgtccaagagtgcaattgctccatttacaccggtcacgtcaca

SEQ ID NO: 121381 - DNA, 80 bp, synthetic construct
  source 1..80: mol_type = other DNA
acaggatgtgcggttatttgtggtaggatttcaacttctgggagacctgccgtggtcccggatagagaggtactctacca

SEQ ID NO: 121382 - DNA, 80 bp, synthetic construct
  source 1..80: mol_type = other DNA
tatataccatggatggggaataccggctcagaggagaagagagaaaaaactttctggaactgttgaggactgcagatctg

SEQ ID NO: 121383 - DNA, 80 bp, synthetic construct
  source 1..80: mol_type = other DNA
atgtgcacagacaaaatgtcatttgtcaagaatccaacggatacagggcatggcacagttgtcatgcaagtaaaggtccc

SEQ ID NO: 121384 - DNA, 80 bp, synthetic construct
  source 1..80: mol_type = other DNA
cgaaggccacatacggacgctcgaacgcgccctccttccagctgctgcccggcgactcttcgcgcacggcggcgctcgac

SEQ ID NO: 121385 - DNA, 80 bp, synthetic construct
  source 1..80: mol_type = other DNA
cccgtagtcaacgtagagggagaactgggagggggcgattgggcacttacaggtatgtctcatcaggcgaaaggccgtct

SEQ ID NO: 121386 - DNA, 80 bp, synthetic construct
  source 1..80: mol_type = other DNA
tcttggggccagccgatgacatcagagaggcgggctggcgacttctcgcccctatcaccgcgtatgcgcagcagacgcga

SEQ ID NO: 121387 - DNA, 80 bp, synthetic construct
  source 1..80: mol_type = other DNA
tacccgcaaccccttccgtgtggtgcgggagtaccgtggaactcccccccaccacacgcgataccgcgggacagggcctg

SEQ ID NO: 121388 - DNA, 80 bp, synthetic construct
  source 1..80: mol_type = other DNA
cagcaaacgcggagtctaatggggacgattgtcaccagccttaccggccgggacaggaatgaggtcgagggcgaggtgca

SEQ ID NO: 121389 - DNA, 80 bp, synthetic construct
  source 1..80: mol_type = other DNA
tgtagctccgcccttcgtttcttccgacgggttacaggaaaaccccccgggagttttagcactcaagtacactgacccca

SEQ ID NO: 121390 - DNA, 80 bp, synthetic construct
  source 1..80: mol_type = other DNA
agtgcatataaccacaacccatgggtctaaccaatccccaggggccaagaaacagacacgccccaaacggtctcggtttc

SEQ ID NO: 121391 - DNA, 80 bp, synthetic construct
  source 1..80: mol_type = other DNA
gtcatagtcggcaggatcgtcctgtccgggaaaccggccgtcatacctgacagagaagtcctctaccgcgaattcgatga

SEQ ID NO: 121392 - DNA, 80 bp, synthetic construct
  source 1..80: mol_type = other DNA
ggcaagcggccccgcggcgcgcggggggaggagcggcgcccgcgggggagcggccggttcctggggggggccgaggaagt

SEQ ID NO: 121393 - DNA, 80 bp, synthetic construct
  source 1..80: mol_type = other DNA
cgggggaaaacaggatagcttccggagtctccatacgcacggtcaccccacgcacgtgtgagacttcggtggcgctgggc

SEQ ID NO: 121394 - DNA, 80 bp, synthetic construct
  source 1..80: mol_type = other DNA
gggcctgtcatgtgttcttctgggcatgccgttgggctctttcgcgcggcggtctgcacgaggggcgtcgccaaggcgat

SEQ ID NO: 121395 - DNA, 80 bp, synthetic construct
  source 1..80: mol_type = other DNA
aaccaacggaaaaaggcgaaaaacacgcctttcaatatgctgaaacgcgagagaaaccgcgtgtcgactgtgcaacagct

SEQ ID NO: 121396 - DNA, 80 bp, synthetic construct
  source 1..80: mol_type = other DNA
tgtacttggacagaaacgatgctggggaggccatatcttttccaaccacattggggatgaataagtgttatatacagatc

SEQ ID NO: 121397 - DNA, 80 bp, synthetic construct
  source 1..80: mol_type = other DNA
gcaaccaccattctcggtatcggaacggtccttgatcaggctgaaacggcgggtgttaggctggtagtcttggccacggc

SEQ ID NO: 121398 - DNA, 80 bp, synthetic construct
  source 1..80: mol_type = other DNA
atccctgaggctcctcggcgtttcatggtgggtacagagggacaaagtgaatgcccattagagagacgaaaaacaggtgt

SEQ ID NO: 121399 - DNA, 80 bp, synthetic construct
  source 1..80: mol_type = other DNA
gaggggacaaggggggagcgctgctctctccgagacatctttcaacactaaaggggtcctcgggggggccggggctctgc

SEQ ID NO: 121400 - DNA, 80 bp, synthetic construct
  source 1..80: mol_type = other DNA
aactctgtcaacatacaatcgaggaagctcctggcccggtttggagaccagagagggccaaccaaagtccctgagcttga

SEQ ID NO: 121401 - DNA, 80 bp, synthetic construct
  source 1..80: mol_type = other DNA
ttccggtatttttttcgtttctttttgttaataaattgcgtcttttttttaatggtggttcatccttcacagattccgtg

SEQ ID NO: 121402 - DNA, 80 bp, synthetic construct
  source 1..80: mol_type = other DNA
cttactcctggacaggcgcactcgtcaccccgtgtgccgcggaagagcagaaactgcccatcaacgcactcagcaactca

SEQ ID NO: 121403 - DNA, 80 bp, synthetic construct
  source 1..80: mol_type = other DNA
cgagatcgccccgcccctgcgctgccagagttttccctgcctgcaccccttctgcatcccgtgcatgaagacctggattc

SEQ ID NO: 121404 - DNA, 80 bp, synthetic construct
  source 1..80: mol_type = other DNA
tgctataattctccttacttgcttgcttcatccatctctggggttcgaggttaccaagatcctcctcgccatgatcggcc

SEQ ID NO: 121405 - DNA, 80 bp, synthetic construct
  source 1..80: mol_type = other DNA
ctatgaccacctggcccccttgtccacctgggctagcgacggccttcgtgacctcgcggtcgcgacggagcccgtcgttt

SEQ ID NO: 121406 - DNA, 80 bp, synthetic construct
  source 1..80: mol_type = other DNA
gtgtcgcgagcccgaccccgctacttcttcttctgcctactcctactttgcgtaggagtaggcatctttttactccccgc

SEQ ID NO: 121407 - DNA, 80 bp, synthetic construct
  source 1..80: mol_type = other DNA
cgggccctgtcgtccaaatgtataccaatgtggaccaagacctcgtgggctgggcagcgcctcaagggtcgcgctcctta

SEQ ID NO: 121408 - DNA, 80 bp, synthetic construct
  source 1..80: mol_type = other DNA
gcggaggaggaagctcgtgcggcttaatgagtcagttacttcacagttactggctcagatggctgagaaatctttcccga

SEQ ID NO: 121409 - DNA, 80 bp, synthetic construct
  source 1..80: mol_type = other DNA
acccgcgacccccaggctttggaacagcggcgcaagctcatgctggccgtggtcctggtcaccctcgagcttgaatgcat

SEQ ID NO: 121410 - DNA, 80 bp, synthetic construct
  source 1..80: mol_type = other DNA
cacactcaaaaagccccaaagcgcatacgcctcccccacatccgggaagacgaccagccgtcctcgcaccagcccttgtt

SEQ ID NO: 121411 - DNA, 80 bp, synthetic construct
  source 1..80: mol_type = other DNA
tctcgggcagtgaccaccatactcggctcccttactatcaccagtctcctacgcaggctccatcattggatcactgagga

SEQ ID NO: 121412 - DNA, 80 bp, synthetic construct
  source 1..80: mol_type = other DNA
tatcctctgagcccgcctcctctggtcgtcccccagactccgacgctgagtcctgttcttccatgccccccctggaggtg

SEQ ID NO: 121413 - DNA, 80 bp, synthetic construct
  source 1..80: mol_type = other DNA
tcccgatgctgggtgtcacttactccctcattggcggcggttaacgctagcttccccgtctcgtcggttcgacggcatgt

SEQ ID NO: 121414 - DNA, 80 bp, synthetic construct
  source 1..80: mol_type = other DNA
ttttgctcctagcgttgccccctcgggcgttcgcattggacggagagcaggctgctaccataggggcccttgtcaccctg

SEQ ID NO: 121415 - DNA, 80 bp, synthetic construct
  source 1..80: mol_type = other DNA
ggacattcctacgccaaaggtgattgaggaatgtgagcacctggaggatgggatctatggcatatttcagtcaaccttcc

SEQ ID NO: 121416 - DNA, 80 bp, synthetic construct
  source 1..80: mol_type = other DNA
ataggtcaggcctttactttccagccacgccgccactggacgactcaggattgcaattgctccatctactcaggccacat

SEQ ID NO: 121417 - DNA, 80 bp, synthetic construct
  source 1..80: mol_type = other DNA
ccttctcttattggtagcacattatgctatcatagggccaggactccaagcgaaagcaaccagagaggctcagaaaagag

SEQ ID NO: 121418 - DNA, 80 bp, synthetic construct
  source 1..80: mol_type = other DNA
ggctcttttggcgtttttcagattcactgcaatcgctccgactcgtgcggtgctggacagatggagaggcgtcaacaaac

SEQ ID NO: 121419 - DNA, 80 bp, synthetic construct
  source 1..80: mol_type = other DNA
cagtggtcaacaggaagaatacaaagcagacattgttatgtacactgaaaatgtcaaccttgaaaccccagacacccacg

SEQ ID NO: 121420 - DNA, 80 bp, synthetic construct
  source 1..80: mol_type = other DNA
ccgataagcccattgagcaacacactgatccggcatcacaatctggtgtattccaccacatcccgcagcgccgccctccg

SEQ ID NO: 121421 - DNA, 80 bp, synthetic construct
  source 1..80: mol_type = other DNA
ggctcgggagggtgttggttgatgtgcttgccgggtacggagccggtgtgtcgggtgctctagtcgctttcaagatcatg

SEQ ID NO: 121422 - DNA, 80 bp, synthetic construct
  source 1..80: mol_type = other DNA
ccatgccctcgctactgctgattactctaaatgcaaattcgcggacatatggaatttcttagactgctatcaggagaaaa

SEQ ID NO: 121423 - DNA, 80 bp, synthetic construct
  source 1..80: mol_type = other DNA
tcctgttgctgccccagcgggcatatgctttcaacggagatgaagcggcctcagttggtctcctggtagtcggtgccctg

SEQ ID NO: 121424 - DNA, 80 bp, synthetic construct
  source 1..80: mol_type = other DNA
cacagactcatactcggaaaacaaaatgggtctgtgcctctccatcagcgcccttaacagtctctgccgccggggctcgg

SEQ ID NO: 121425 - DNA, 80 bp, synthetic construct
  source 1..80: mol_type = other DNA
gcgcaggctggggaggggatcccccccctccttggccagctcttccgccagccagttatccgcgccctctctcaaagcga

SEQ ID NO: 121426 - DNA, 80 bp, synthetic construct
  source 1..80: mol_type = other DNA
gcttaactcctatgttgtcgggtcccagttaccttgtgagccagagccagacgttacagtgttaacatctatgctgcggg

SEQ ID NO: 121427 - DNA, 80 bp, synthetic construct
  source 1..80: mol_type = other DNA
tacgacttggagctcataacatcgtgctcctctaacgtgtcagtcgcccaagacggtgctggaaagagggtctactacct

SEQ ID NO: 121428 - DNA, 80 bp, synthetic construct
  source 1..80: mol_type = other DNA
gacaacatatacctcccaaacggactggtggcacaaatgtaccagcccgagcgagataaggttttcaccatggatgggga

SEQ ID NO: 121429 - DNA, 80 bp, synthetic construct
  source 1..80: mol_type = other DNA
cacgacctcccaaagtcccccttacagcctgtgttatcacccaaagccaaattctggcccaattacaagctattcagcag

SEQ ID NO: 121430 - DNA, 80 bp, synthetic construct
  source 1..80: mol_type = other DNA
ccattactcctacgcgcgcaattaacgaatccaccatcggggcagctggtgtcgataacgaagtatcttcaaccggttga

SEQ ID NO: 121431 - DNA, 80 bp, synthetic construct
  source 1..80: mol_type = other DNA
ggccagcagatccgcgtcttcacgtgcctcctgcgccttgcgggccagaagggcttcatcctgccggacacccagaggcg

SEQ ID NO: 121432 - DNA, 80 bp, synthetic construct
  source 1..80: mol_type = other DNA
cgaatggagcggagagaaccctcaggccggtgtggagagacgcacgcatgttcagagagggacatgacatcaaggaattt

SEQ ID NO: 121433 - DNA, 80 bp, synthetic construct
  source 1..80: mol_type = other DNA
agtgatctatatctggtgacccgagatgcccatgtcatccccgctcgccgcaggggcgacagccgtgctggactcatcag

SEQ ID NO: 121434 - DNA, 80 bp, synthetic construct
  source 1..80: mol_type = other DNA
caggtcggcgtggtactgctggtcctcataaccgtcttcactctcactccagcttacaaggagatgctcgcccgtagtgt

SEQ ID NO: 121435 - DNA, 80 bp, synthetic construct
  source 1..80: mol_type = other DNA
tattctaccacctcacgcagtgcgtgccaaaggcagaagaaagtcacatttgacagactacaggtcctggataaccacta

SEQ ID NO: 121436 - DNA, 80 bp, synthetic construct
  source 1..80: mol_type = other DNA
tgaccagatattcagcacctcccggggatgagccatgcccagcgtatgacctggagttgataacatcttgctcctccaac

SEQ ID NO: 121437 - DNA, 80 bp, synthetic construct
  source 1..80: mol_type = other DNA
tagctggccctaagggaccagtgtgccagatgtacaccaacgtggaccaggacatggttggctggcctgcacctcccggc

SEQ ID NO: 121438 - DNA, 80 bp, synthetic construct
  source 1..80: mol_type = other DNA
cgcgaaatccattgacttcatccccgtcgagtctcttgacgtcattaccaggtcaccttcattcactgacaatagcacgc

SEQ ID NO: 121439 - DNA, 80 bp, synthetic construct
  source 1..80: mol_type = other DNA
ggggaagcgtgagaaaaagactggagagtttgggaaggctaaaggaagcagagccatttggtacatgtggttgggagctc

SEQ ID NO: 121440 - DNA, 80 bp, synthetic construct
  source 1..80: mol_type = other DNA
ctcagggatacaaagtcctggtgctaaacccgtcggttgcagctaccttagggtttggggcctatatgtctaaggcccat

SEQ ID NO: 121441 - DNA, 80 bp, synthetic construct
  source 1..80: mol_type = other DNA
acgtagacctcttggttggcgctgccgctttttgttccgccatgtacatcggtgatctgtgcggtggcgtgttcctggtc

SEQ ID NO: 121442 - DNA, 80 bp, synthetic construct
  source 1..80: mol_type = other DNA
gcggcaggaaatgggaggtaacatcactcgagttgagtctgagaacaaggttgtggtactcgactcctttgaccctcttg

SEQ ID NO: 121443 - DNA, 80 bp, synthetic construct
  source 1..80: mol_type = other DNA
gaactggcacggttgcgagatatggccgctgcgggagggtttgatatacacgcagtttacccacaagcacgtcaggttgt

SEQ ID NO: 121444 - DNA, 80 bp, synthetic construct
  source 1..80: mol_type = other DNA
gaggtaaagctgtcccccttgccacttacaccctgttgcagacgtggcccctcctcctcttggtggttatcatgccgcag

SEQ ID NO: 121445 - DNA, 80 bp, synthetic construct
  source 1..80: mol_type = other DNA
cttgattttgtgccagtggagaacatgcagtccaccgcgcgttctccatccttctctgacaatacaaccccaccagcggt

SEQ ID NO: 121446 - DNA, 80 bp, synthetic construct
  source 1..80: mol_type = other DNA
aacacaggcttcctggcggggctgttttactatcataaattcaacagttccgggtgtccagcacggctcgccagctgccg

SEQ ID NO: 121447 - DNA, 80 bp, synthetic construct
  source 1..80: mol_type = other DNA
taccgggacttggaggagggcgagggcctggcgcggctaggagcgccctctcctgagcgacacccaagggtgcagctgaa

SEQ ID NO: 121448 - DNA, 80 bp, synthetic construct
  source 1..80: mol_type = other DNA
tgccccaattccagcatagtttacgaagctgaccaccacatcctacacctcccaggatgcgtgccctgtgtgaggatcgg

SEQ ID NO: 121449 - DNA, 80 bp, synthetic construct
  source 1..80: mol_type = other DNA
caccataacatgatctatgccacaacatcccgcagcgcaagccaacggcagaggaaggtcacctttgacaggctgcaagt

SEQ ID NO: 121450 - DNA, 80 bp, synthetic construct
  source 1..80: mol_type = other DNA
ggggttacgttcagggtggggggcagggccacgagctccagctctccggtgacgttgatcgtgtggatgacgcccgtagc

SEQ ID NO: 121451 - DNA, 80 bp, synthetic construct
  source 1..80: mol_type = other DNA
tggtcgcattgggcatcaatgccgtggcctactaccgcggtcttgacgtgtctgtcatcccgaccagcggcgatgttgtc

SEQ ID NO: 121452 - DNA, 80 bp, synthetic construct
  source 1..80: mol_type = other DNA
cggttggatgtgggctctacttttcatctgttgtgcgtggcacatacggggtcggttggtccctgccgccacgtacggtg

SEQ ID NO: 121453 - DNA, 80 bp, synthetic construct
  source 1..80: mol_type = other DNA
gtcctcagggccgcttgggcagattgtattaaaaaataaaaaaccacttaccagagccatggcaacagcgtcggtccctt

SEQ ID NO: 121454 - DNA, 80 bp, synthetic construct
  source 1..80: mol_type = other DNA
agcccgtgaccctgcagcaggtgctgccccaggcggtgctgctgccgagccgcggggtcaagcgcgagggcgagagcatg

SEQ ID NO: 121455 - DNA, 80 bp, synthetic construct
  source 1..80: mol_type = other DNA
aggcaggaagtgggtggtaatataacacgggttgagtcagagaataagatcatagtcctcgactcgtttgaccccctagt

SEQ ID NO: 121456 - DNA, 80 bp, synthetic construct
  source 1..80: mol_type = other DNA
cgacacactccagtcaattcctggttgggtaacatcatactctacgcgcccacaatatgggctcgtatgatattgatgac

SEQ ID NO: 121457 - DNA, 80 bp, synthetic construct
  source 1..80: mol_type = other DNA
caatgaaatattgcttggcccggctgacactgcacctgaaaggggctggagacttcttgctcccatcactgcgtacgcgc

SEQ ID NO: 121458 - DNA, 80 bp, synthetic construct
  source 1..80: mol_type = other DNA
gtatgcgcgagagccaaagctccccccccctcctgggatacaatgtggaaatgtcttatccgcctcaagcccatgcttac

SEQ ID NO: 121459 - DNA, 80 bp, synthetic construct
  source 1..80: mol_type = other DNA
tatcagcgacccacgtccacggtggattccgtgattgacagcgtggtagcagatgccaggcgctatgcgcagcgcaaaag

SEQ ID NO: 121460 - DNA, 80 bp, synthetic construct
  source 1..80: mol_type = other DNA
agttctcgtgtgttattgtcgctctccgcctctcgcagatggacccgtactgcccatttgacgctctggacgtctgggaa

SEQ ID NO: 121461 - DNA, 80 bp, synthetic construct
  source 1..80: mol_type = other DNA
acagcaaaagatacagagtaaaagtaaacactactaattctcaaagtgtgaaaattcagccgtacaacagacctactact

SEQ ID NO: 121462 - DNA, 80 bp, synthetic construct
  source 1..80: mol_type = other DNA
gcaacacctgtgtcacccaaacagtggacttcagccttgaccccaccttcaccattgagacaaccacattgccccaagac

SEQ ID NO: 121463 - DNA, 80 bp, synthetic construct
  source 1..80: mol_type = other DNA
ctgctgcaaagccagagaaaaatctaggaggcccatctacaggccagtaattggggatcctcagcctctccaagtggaag

SEQ ID NO: 121464 - DNA, 80 bp, synthetic construct
  source 1..80: mol_type = other DNA
gaaggaaagccaactaaaaatcatgatatcacaatggctttctttgatactcctggtggacaattgaatggaaaagatga

SEQ ID NO: 121465 - DNA, 80 bp, synthetic construct
  source 1..80: mol_type = other DNA
ctgacacatattgatgctcacttcctctcccaaaccaagcaggcgggcgaaaacctggcgtacctagtggcctatcaggc

SEQ ID NO: 121466 - DNA, 80 bp, synthetic construct
  source 1..80: mol_type = other DNA
aatgccttaattactaagttacaaagctaatgtcaccactgctttactcgctgcttgcaaaacaaattcaaaaagttagc

SEQ ID NO: 121467 - DNA, 80 bp, synthetic construct
  source 1..80: mol_type = other DNA
atggcaaattcctggcggacggcggctgctccggaggtgcttatgacatcatcatatgtgacgagtgccattccacggac

SEQ ID NO: 121468 - DNA, 80 bp, synthetic construct
  source 1..80: mol_type = other DNA
gccaaggttttggttgtgatgctgctcttcgccggcgttgacgggcgaacccatgtgacaggtgggaaggcagcccacac

SEQ ID NO: 121469 - DNA, 80 bp, synthetic construct
  source 1..80: mol_type = other DNA
gaatgagatcaccctgacgcacccggtcaccaagtacatcatgacatgcatgtcggctgatctggaggtcgtcacgagca

SEQ ID NO: 121470 - DNA, 80 bp, synthetic construct
  source 1..80: mol_type = other DNA
tgggccaaggtcgctatcatcatggttatgttttcaggggttgatgccagcacacacgtcaccgctggccaagcagctcg

SEQ ID NO: 121471 - DNA, 80 bp, synthetic construct
  source 1..80: mol_type = other DNA
gaagacgtaacagaagaggaaaccaatactgctacttacacttttggcaatgctcctgtaaaagctgaagctgaaattac

SEQ ID NO: 121472 - DNA, 80 bp, synthetic construct
  source 1..80: mol_type = other DNA
gagaagatggagctgctccagcgccggtatggggggggactggtcagaaatccactctcacggaattccacgcacgagat

SEQ ID NO: 121473 - DNA, 80 bp, synthetic construct
  source 1..80: mol_type = other DNA
ctggggctcctgtcgccatcctgtgaacgccaccgtttttacccacccaaagcagaccaaagcaaacctcacctccggtt

SEQ ID NO: 121474 - DNA, 80 bp, synthetic construct
  source 1..80: mol_type = other DNA
tcggttgttgccctgggctcacaagaaggcgctctccaccaggccctggccggagcaatcccggtggactataagaacag

SEQ ID NO: 121475 - DNA, 80 bp, synthetic construct
  source 1..80: mol_type = other DNA
caacagcaatgggagctggcatataaataggactgcccttaactgcaatgacagcttaaacactgggttcttggctagct

SEQ ID NO: 121476 - DNA, 80 bp, synthetic construct
  source 1..80: mol_type = other DNA
cagcttatcataacgatggaaaggggcaaaatggttggttgcccatctgtacatggggcgatcccatctatgtgtgccat

SEQ ID NO: 121477 - DNA, 80 bp, synthetic construct
  source 1..80: mol_type = other DNA
gtcggcagccgtcaaggatgaaagggccgtacacgccgacatgggctattggatagaaagccaaaagaatggaagttgga

SEQ ID NO: 121478 - DNA, 80 bp, synthetic construct
  source 1..80: mol_type = other DNA
actagcatattgggtataggcacagtcttggatcaggctgagacggctggggtgaggctgacggttctagcgacagcaac

SEQ ID NO: 121479 - DNA, 80 bp, synthetic construct
  source 1..80: mol_type = other DNA
tgtcactccactggatctaccccaaatcattcaacgactccacggtatggccgctttctcgctacatgggtattcccctg

SEQ ID NO: 121480 - DNA, 80 bp, synthetic construct
  source 1..80: mol_type = other DNA
acgactaagctcggccgtcataacaaacttattaatatccaatttgggtgatgtaatctggcgatgtgcatctgcaatta

SEQ ID NO: 121481 - DNA, 80 bp, synthetic construct
  source 1..80: mol_type = other DNA
ccgagaaagccttggctgaccttgctaagaagtcatttccacccagctcgcagggttcgcaagaagagtcgggcaaggtg

SEQ ID NO: 121482 - DNA, 80 bp, synthetic construct
  source 1..80: mol_type = other DNA
gctttggcagctcttcaacttccggcatcacgggcgacaatacaacaacgtcctccgagcccaccccttctgtttgcccc

SEQ ID NO: 121483 - DNA, 80 bp, synthetic construct
  source 1..80: mol_type = other DNA
acctacgctgaccggccctacccccctcctgtaccgcctgggtgccgtgaccaatgaggttaccttgacgcaccccgtga

SEQ ID NO: 121484 - DNA, 80 bp, synthetic construct
  source 1..80: mol_type = other DNA
tcgcacctcccttacatcgaacagggaatgcaactcgccgagcaattcaagcagaaggcgctcgggttgttgcaaacagc

SEQ ID NO: 121485 - DNA, 80 bp, synthetic construct
  source 1..80: mol_type = other DNA
gaacacaaagaatggatctatctccctcacatgcttagccctggggggagtgatgatcttcctttccacggctgtttctg

SEQ ID NO: 121486 - DNA, 80 bp, synthetic construct
  source 1..80: mol_type = other DNA
atcatatggggtgcggagacagtggcgtgcggggacatcctgcacggacttccagtgtccgcacgattaggcaggtaggt

SEQ ID NO: 121487 - DNA, 80 bp, synthetic construct
  source 1..80: mol_type = other DNA
gctcagggtcccgcaagccatcttggacatgatcgctggtgcccactggggagtcctagcgggcatagcgtatttctcca

SEQ ID NO: 121488 - DNA, 80 bp, synthetic construct
  source 1..80: mol_type = other DNA
tgggactcgcaagttctttgcagctttcgacatatcaaggcaaggtaatgatgtcgataaataagactgacgttcagagc

SEQ ID NO: 121489 - DNA, 80 bp, synthetic construct
  source 1..80: mol_type = other DNA
ctaatgttagtgggccctcagaagagaagccctattgttggcactatgcacctaggccatgcaagaaaacaccagcctcg

SEQ ID NO: 121490 - DNA, 80 bp, synthetic construct
  source 1..80: mol_type = other DNA
aataatatccacggccacccagaccttcctagggaccactataaatggtgtgctctggactgtctatcacggagcggggt

SEQ ID NO: 121491 - DNA, 80 bp, synthetic construct
  source 1..80: mol_type = other DNA
atcgccgggggcattagtagtgggtgtggtgtgcgccgcgatcttgcgccgccacgtgggtccaggtgaggtggctgtgc

SEQ ID NO: 121492 - DNA, 80 bp, synthetic construct
  source 1..80: mol_type = other DNA
agtgacgtgctaccttaaagccacggcagccaccagggccgctgggctgaaggactgcaccatgctggtacacggtgatg

SEQ ID NO: 121493 - DNA, 80 bp, synthetic construct
  source 1..80: mol_type = other DNA
gccggcgggggcgacgtttttcacagcgcgccgcgtgcccgaccccgcctgttactccttagcctactcctactttttgt

SEQ ID NO: 121494 - DNA, 80 bp, synthetic construct
  source 1..80: mol_type = other DNA
ccccagggagccgcgccatgaaaatggcggagagagatgctcctgaggcgatgctgacacttctggaagtggcggttctg

SEQ ID NO: 121495 - DNA, 80 bp, synthetic construct
  source 1..80: mol_type = other DNA
cgtaagccagccagactgatcgtgtacccggaccttagcgtgcgggtgtgtgagaagagggccctctatgacatcacgcg

SEQ ID NO: 121496 - DNA, 80 bp, synthetic construct
  source 1..80: mol_type = other DNA
attgttattgtaataagcgttaagcgacgtagaattaaaaaacatccaatttatcgcccaaatacaaaaacaagaagggg

SEQ ID NO: 121497 - DNA, 80 bp, synthetic construct
  source 1..80: mol_type = other DNA
ctagaggaggttttatctgccccgtaacaggtccctcgtcgggaaatcgagaaaccaccctatccgaccaagttcgcggt

SEQ ID NO: 121498 - DNA, 80 bp, synthetic construct
  source 1..80: mol_type = other DNA
aaccccttcagtcccccaggcggcattttcagctcgtatgcgtcctaacaggaagccaataccacgaccaaaacattgtt

SEQ ID NO: 121499 - DNA, 80 bp, synthetic construct
  source 1..80: mol_type = other DNA
ctgtcaggcttcgggcatatttcaacacgcctggcttgcctgtgtgccaggaccatttagagttctgggaggcggtcttc

SEQ ID NO: 121500 - DNA, 80 bp, synthetic construct
  source 1..80: mol_type = other DNA
acaggtcttgtttgacatctttgcgggcggccattggggtatcataggggcgttgctgtactacagcacggccgctaatt

SEQ ID NO: 121501 - DNA, 80 bp, synthetic construct
  source 1..80: mol_type = other DNA
cttgcgtccctctttacgcccggggcccagaaaatccaacttgtaaacaccaatggcagctggcatatcaacagaactgc

SEQ ID NO: 121502 - DNA, 80 bp, synthetic construct
  source 1..80: mol_type = other DNA
cgacttcatgagccagagcatgttgcaaaactaccgcactttcattctcgagcgatctgggatgctgcccgccacctgca

SEQ ID NO: 121503 - DNA, 80 bp, synthetic construct
  source 1..80: mol_type = other DNA
cttgttccttgtgaccaggcacgctgatgtgatacctgtgaggaggaggggcgacacccggggtgctctattgagtccta

SEQ ID NO: 121504 - DNA, 80 bp, synthetic construct
  source 1..80: mol_type = other DNA
aactcatttgtggacgccggggccttggggcccgacggcgtagtggaggaagacctgcttattctcggtgagcttcgctt

SEQ ID NO: 121505 - DNA, 80 bp, synthetic construct
  source 1..80: mol_type = other DNA
tggagttcgaagctctgggctttcttaatgaagaccactggcttggaagaaagaactcaggaggaggtgtcgagggcttg

SEQ ID NO: 121506 - DNA, 80 bp, synthetic construct
  source 1..80: mol_type = other DNA
attcctgagagatcatggaactcaggctatgagtggatcactgacttcccgggcaaaacagtttggtttgttccaagcat

SEQ ID NO: 121507 - DNA, 80 bp, synthetic construct
  source 1..80: mol_type = other DNA
tcccattatcgccgccgccattggcgcaatcccaggcattgcctctgtggcgttgcaagcacgcaaacaataaaagaagc

SEQ ID NO: 121508 - DNA, 80 bp, synthetic construct
  source 1..80: mol_type = other DNA
tagcgccgatgcaacactgggctgcagctggcctcaaagacctagcggtagctactgaacctgtgatatttagtcctatg

SEQ ID NO: 121509 - DNA, 80 bp, synthetic construct
  source 1..80: mol_type = other DNA
tcgaactgtacgcgcccctcgttcatgtaggccagctccggaaacttggtacacacgcacgccaccgacaacccgagctc

SEQ ID NO: 121510 - DNA, 80 bp, synthetic construct
  source 1..80: mol_type = other DNA
aacttgccgagcaattcaagcagaaggcgctcgggttgctgcaaacagctacccaacaagcggaggctgctgctcccgtg

SEQ ID NO: 121511 - DNA, 80 bp, synthetic construct
  source 1..80: mol_type = other DNA
tacatttacctcgccacatttagcccagcgtgttgcaagcacagtgtatcaaaattgtgaacatgcagataactacaccg

SEQ ID NO: 121512 - DNA, 80 bp, synthetic construct
  source 1..80: mol_type = other DNA
aggacggcaacatcctggggcacaagctggagtacaactacaacagccacaacgtctatatcatggccgacaagcagaag

SEQ ID NO: 121513 - DNA, 80 bp, synthetic construct
  source 1..80: mol_type = other DNA
agtcacgcagatcgtcgacttcagcctggatcccaccttctcgattgagactactactgttccccaagacgcagtggccc

SEQ ID NO: 121514 - DNA, 80 bp, synthetic construct
  source 1..80: mol_type = other DNA
cttgtggacatcttggcgggctatggggcggtggtggctggcgcactcgtggcctttaaggtcatgagcggctaggtgcc

SEQ ID NO: 121515 - DNA, 80 bp, synthetic construct
  source 1..80: mol_type = other DNA
agaggtttgcggacctgtgtattgctttacacctagccccgtggtcgttgggactacggataggaaggggctccccacat

SEQ ID NO: 121516 - DNA, 80 bp, synthetic construct
  source 1..80: mol_type = other DNA
gacgtcaatgggtggagtatttacggtaaactgcccacttggcagtacatcaagtgtatcatatgccaagtacgccccct

SEQ ID NO: 121517 - DNA, 80 bp, synthetic construct
  source 1..80: mol_type = other DNA
ttggcggagtctacctactgccgcgcaggggccccaggttgggtgtgcgtggcactaggaagagttcggagcgatcacag

SEQ ID NO: 121518 - DNA, 80 bp, synthetic construct
  source 1..80: mol_type = other DNA
ctcctgttcaacatcttggggtggtgggtggcatcacagatcgccacccctacagcgtccacggctttcgtcgtgagcgg

SEQ ID NO: 121519 - DNA, 80 bp, synthetic construct
  source 1..80: mol_type = other DNA
gagatcaccggtcttcactgacaattcaactccgcctgcggtgccgcaatcttaccaggtgggctatcttcacgctccga

SEQ ID NO: 121520 - DNA, 80 bp, synthetic construct
  source 1..80: mol_type = other DNA
tcgggatcaaacacggccacgtccgtccgcacgcgcgccattagcgtccccggtggcgcacaggccgagcgcgggctgac

SEQ ID NO: 121521 - DNA, 80 bp, synthetic construct
  source 1..80: mol_type = other DNA
cgctgccacatacggggtgttgcagttgtggccactcctgctcctggttcttgcccttccgcaccgtgcttttgctcagg

SEQ ID NO: 121522 - DNA, 80 bp, synthetic construct
  source 1..80: mol_type = other DNA
acggggagggctacaatgtggcccaatgcaacatgaccaaggactggttcctcgtccagatgctctcccactacaacatc

SEQ ID NO: 121523 - DNA, 80 bp, synthetic construct
  source 1..80: mol_type = other DNA
tcaattgatcatcgacattattgccggtggtcattggggcgtgcttgctggtctactgtattactctatggtgaccaatt

SEQ ID NO: 121524 - DNA, 80 bp, synthetic construct
  source 1..80: mol_type = other DNA
caccatatccagcgccgccaggtggctcccgaacgcgcgatcgaaatgctccgcccgccgcccgaacagcgccagttcca

SEQ ID NO: 121525 - DNA, 80 bp, synthetic construct
  source 1..80: mol_type = other DNA
taatcccgctgtggcctccctaatgtccttctccgccgccctgactagcccgctttctacgtcaacgaccctcctgctca

SEQ ID NO: 121526 - DNA, 80 bp, synthetic construct
  source 1..80: mol_type = other DNA
ggcaccacacgtagggcttggtctagaaacaagaaccgaaacgtggatgtcctctgaaggcgcttggaaacaaatacaaa

SEQ ID NO: 121527 - DNA, 80 bp, synthetic construct
  source 1..80: mol_type = other DNA
ctgcataggttcgcgcccccttgcaagcccttgttacgggatgaggtatcgttcagagtaggactacacgattacccggt

SEQ ID NO: 121528 - DNA, 80 bp, synthetic construct
  source 1..80: mol_type = other DNA
ggagaagaaggtcatcacctggggcgctgatacggccgcttgcggcgacatcatcgccggccttccagtctcagctaggc

SEQ ID NO: 121529 - DNA, 80 bp, synthetic construct
  source 1..80: mol_type = other DNA
ttttcattctgttaatgctggtaacaccatccatggcaatgcgatgtgtgggaataggcagcagggacttcgtggaagga

SEQ ID NO: 121530 - DNA, 80 bp, synthetic construct
  source 1..80: mol_type = other DNA
cggctctcgcccaaattggggcccaaatgaccccaggcggaggtcccgcaacttgggtaaagtcatcgacacccttactt

SEQ ID NO: 121531 - DNA, 80 bp, synthetic construct
  source 1..80: mol_type = other DNA
actgaggtgaaagaggaggggaaagaggagctacaggaaatcccgacaatgttgaagaaagggatgacaaccattcttga

SEQ ID NO: 121532 - DNA, 80 bp, synthetic construct
  source 1..80: mol_type = other DNA
cagattggattggtgttgcctgcagttatctctagctccagcggcatcgcatactccatcttgttctttgtgaccgcccg

SEQ ID NO: 121533 - DNA, 80 bp, synthetic construct
  source 1..80: mol_type = other DNA
atgccgccccttgagggcgagccaggagaccccgacctcagctcggggtcctggtccacagttagtgaagagggcgacag

SEQ ID NO: 121534 - DNA, 80 bp, synthetic construct
  source 1..80: mol_type = other DNA
ccaagcaagcggaggctgctgctcccgtggtggagtccaaatggcgagcccttgagaccttctgggcgaagcacatgtgg

SEQ ID NO: 121535 - DNA, 80 bp, synthetic construct
  source 1..80: mol_type = other DNA
gtagctcaggctgaggccgccttagagaacttggtggtcctcaatgcagcgtctgtggccggaacgcacggcgttttctc

SEQ ID NO: 121536 - DNA, 80 bp, synthetic construct
  source 1..80: mol_type = other DNA
aaccttcttcccacaaactaactgatttaagcccaaaaaccaatcaaacccccttttcccatctacccaaataaacattt

SEQ ID NO: 121537 - DNA, 80 bp, synthetic construct
  source 1..80: mol_type = other DNA
tcatctggactgggcactctgtcggacgctactcctcccccgccgcttgacgtcgatgctgcatccgacgccgggtcgtg

SEQ ID NO: 121538 - DNA, 80 bp, synthetic construct
  source 1..80: mol_type = other DNA
ccaccagcaccaccatcctcttgaacatcatggggtggtggttggcctctcagattgccccccctgccggagccactggc

SEQ ID NO: 121539 - DNA, 80 bp, synthetic construct
  source 1..80: mol_type = other DNA
gagatttaaaggagcgtctttcaggactcctatgtaccgcaacaaaaattcgagaacggatacaggaaaattgcatatgg

SEQ ID NO: 121540 - DNA, 80 bp, synthetic construct
  source 1..80: mol_type = other DNA
tctcgtggcagtggcactcggatggatgcttggcagcaacaacggccagcgtgtggtgttcacaattctcttgttgttgg

SEQ ID NO: 121541 - DNA, 80 bp, synthetic construct
  source 1..80: mol_type = other DNA
cctcctttgtgacatcggagagtcttcatcaagtgctgaggttgaagagcataggacgatccgggtccttgaaatggttg

SEQ ID NO: 121542 - DNA, 80 bp, synthetic construct
  source 1..80: mol_type = other DNA
aatcccattctacggcaaggccatcccattggcagtactaaaagggggaagacatctcgtgttctgccattcaaagaaga

SEQ ID NO: 121543 - DNA, 80 bp, synthetic construct
  source 1..80: mol_type = other DNA
tccccgaggtcattctggagatcattaccgaagcgcactggggcgtagcgtttggcctagcctacttctccatgcaggtg

SEQ ID NO: 121544 - DNA, 80 bp, synthetic construct
  source 1..80: mol_type = other DNA
ctcaaccctgccaggtaatccagctatagcctccctcatgtctttctcggcctccctaactagccctctaccggcttcca

SEQ ID NO: 121545 - DNA, 80 bp, synthetic construct
  source 1..80: mol_type = other DNA
tcacgggccagcctcttaacaatgacgaagaccatgctcactggacagaagcaaaaatgctgctagacaacatcaacaca

SEQ ID NO: 121546 - DNA, 80 bp, synthetic construct
  source 1..80: mol_type = other DNA
ccagacgccgtacccggtgagggtcgcgttgatgatatactgggcgtggtgatggacgatcgacagaacctccaccgtgg

SEQ ID NO: 121547 - DNA, 80 bp, synthetic construct
  source 1..80: mol_type = other DNA
atgggtcagatctcttttgccccaccgactgcttcaggaaacatcctggggccacatacagtcggtgtggtgcagggccc

SEQ ID NO: 121548 - DNA, 80 bp, synthetic construct
  source 1..80: mol_type = other DNA
ccctctcgagggggagccaggcgatcctgatttgactgcggactcatggtctactgtcagcagcagcgaggacgtcgtgt

SEQ ID NO: 121549 - DNA, 80 bp, synthetic construct
  source 1..80: mol_type = other DNA
ttgagacgagaacgtacatgattaaaaaaattagcagtagctctttttcccaggttggatgattttaagaggaccggttt

SEQ ID NO: 121550 - DNA, 80 bp, synthetic construct
  source 1..80: mol_type = other DNA
gtttgggggtggagattttactatgttctgtaatggaagtaaaactcacttgcgtaacataagacacacttgtaatgaac

SEQ ID NO: 121551 - DNA, 80 bp, synthetic construct
  source 1..80: mol_type = other DNA
tcaggctcgaaccctttaagatcaacgttcttgagcagatcacgaagcatatcgaaaaactgcagtgcggaggtgtagtc

SEQ ID NO: 121552 - DNA, 80 bp, synthetic construct
  source 1..80: mol_type = other DNA
tccatgtgactcatcctggctatgggagatttgggactgggtatgcaccgtactgtctgatttcaaaacttggctgaagg

SEQ ID NO: 121553 - DNA, 80 bp, synthetic construct
  source 1..80: mol_type = other DNA
tgttatgcgtggtagctggctcgccggtgcctcgattgcttggactctcataaaaaatgcggagaagccaacatttaagc

SEQ ID NO: 121554 - DNA, 80 bp, synthetic construct
  source 1..80: mol_type = other DNA
ggaagacagtgtggtttgctgttcaatgtcctatacctggacgggggccatcatcaccccttgcgctcctgaggaggaaa

SEQ ID NO: 121555 - DNA, 80 bp, synthetic construct
  source 1..80: mol_type = other DNA
acagccagcctgatgaatcgcaggcgacctgagcgcattacctggcatgagctacagcaggagtgcagggatgagatagg

SEQ ID NO: 121556 - DNA, 80 bp, synthetic construct
  source 1..80: mol_type = other DNA
agagcttagtagacaaaatgtctcgttggaaaacgtatgcgcaagagcggcatgaatgggaagagagacaacccaaaccg

SEQ ID NO: 121557 - DNA, 80 bp, synthetic construct
  source 1..80: mol_type = other DNA
tgtaatactcaaaacttaactctaatcaatgtaactaaaggttatgagggaacttactatggtactaatgacaaagatga

SEQ ID NO: 121558 - DNA, 80 bp, synthetic construct
  source 1..80: mol_type = other DNA
gacatgcagcaacacctggcatgggaccttccccatcaatgcctacaccacaggacccggcgtgcccgtcccggcgccaa

SEQ ID NO: 121559 - DNA, 80 bp, synthetic construct
  source 1..80: mol_type = other DNA
gatcgggggaaaacaagagccgtcaagcaccgatgagagaccttattgctggcactatccgccccgaccgtgcggagtgg

SEQ ID NO: 121560 - DNA, 80 bp, synthetic construct
  source 1..80: mol_type = other DNA
tgaaccaccctttggcgactcttatatcgtcgtcggaagaggtaccacccagatcaactaccactggcacaaagagggaa

SEQ ID NO: 121561 - DNA, 80 bp, synthetic construct
  source 1..80: mol_type = other DNA
ggatcagcagacgggaaacgctatcgttgatgtgatgtgtcatgcgacctacgtcaacaggaggctgctgcctcagggac

SEQ ID NO: 121562 - DNA, 80 bp, synthetic construct
  source 1..80: mol_type = other DNA
tctcctgcatgatggtccgggtgttctcggacccgtccgcgcgcttcagggccgagaaggcggcgtagttccccagcacg

SEQ ID NO: 121563 - DNA, 80 bp, synthetic construct
  source 1..80: mol_type = other DNA
gcggcctgaccagcttccccaaatatatcgactggctgacgtgcctggggctggtccccatattacgcaagcgacaagaa

SEQ ID NO: 121564 - DNA, 80 bp, synthetic construct
  source 1..80: mol_type = other DNA
gctcggtggttcgcgcatctctggctccaggccaccacgctgggcttcgtggggtctgtcgttctgtcgcgcggcccgta

SEQ ID NO: 121565 - DNA, 80 bp, synthetic construct
  source 1..80: mol_type = other DNA
accctcctacgattgagacatggaagaggccggactatgaaccacccactgtcctaggctgtgcccttccccccacacct

SEQ ID NO: 121566 - DNA, 80 bp, synthetic construct
  source 1..80: mol_type = other DNA
gggctgctcttcgctctcctaaccatttgtgcaatgtggtacattaagggtcgagcggtcccggccgctacctactgtta

SEQ ID NO: 121567 - DNA, 80 bp, synthetic construct
  source 1..80: mol_type = other DNA
caagagacagcagctgataagaaggtagaagtcttgcccattgaaaaggatgagagtggtagaagttacaacctgatcca

SEQ ID NO: 121568 - DNA, 80 bp, synthetic construct
  source 1..80: mol_type = other DNA
catccaggccgccatgcggcgcagcgggcccgaggcgcgcaggtggccaaagaggcggcccccggcggccccgtggtggt

SEQ ID NO: 121569 - DNA, 80 bp, synthetic construct
  source 1..80: mol_type = other DNA
caagcagctgaaaaggatctggtcattgtaccagtaacacaagatgaaagcaagagaagctataatgtcatagatggcac

SEQ ID NO: 121570 - DNA, 80 bp, synthetic construct
  source 1..80: mol_type = other DNA
ccaccatgccagctttatcaacaggcctcattcatttacatcagaacatcgtggatgtgcaatacctctacgggttatcc

SEQ ID NO: 121571 - DNA, 80 bp, synthetic construct
  source 1..80: mol_type = other DNA
tgtcgtctgctgttcgatgtcatacaattggacaggagctctcatcactccctgcgcggctgaggaagagaagctgccca

SEQ ID NO: 121572 - DNA, 80 bp, synthetic construct
  source 1..80: mol_type = other DNA
tacccttactccagcctacaaggaaatgttggtccgccttgtatggtggacacaatacttcattgctctttgtgaggcca

SEQ ID NO: 121573 - DNA, 80 bp, synthetic construct
  source 1..80: mol_type = other DNA
tcaatcctaccaggtggggtatctccatgctccaacaggtagtgggaaaagcaccaaagtgccagctgcgtacgcttccc

SEQ ID NO: 121574 - DNA, 80 bp, synthetic construct
  source 1..80: mol_type = other DNA
aaggagaaggactacacaaacttggatacatactcagagacatatcaaagattccggggggaaatatgtatgcagatgat

SEQ ID NO: 121575 - DNA, 80 bp, synthetic construct
  source 1..80: mol_type = other DNA
tatggcggcctgcagcaggtaaaacaccgccgggtagttgcggtcttcgaacgccccgcgaacggcggcgatggtgtcgg

SEQ ID NO: 121576 - DNA, 80 bp, synthetic construct
  source 1..80: mol_type = other DNA
cccctgacgccgagctcatagaggccaacctcctgtggaggcaggagatgggcggtaacatcaccagggttgagtcggaa

SEQ ID NO: 121577 - DNA, 80 bp, synthetic construct
  source 1..80: mol_type = other DNA
catagtgatggatgaagcgcatttcacagacccttctagtgttgcagctagaggatatatctcaaccagggtggaaatgg

SEQ ID NO: 121578 - DNA, 80 bp, synthetic construct
  source 1..80: mol_type = other DNA
tagagatgggtgaagcagccgggattttcatgacagccactcctccgggaagtagagacccatttcctcagagcaatgca

SEQ ID NO: 121579 - DNA, 80 bp, synthetic construct
  source 1..80: mol_type = other DNA
cctgactgggctctggtcccttgctctgctcgtcctgatgctaccgacccgggcatatgcttggacaggagaggacactg

SEQ ID NO: 121580 - DNA, 80 bp, synthetic construct
  source 1..80: mol_type = other DNA
acaggcacatcctcctcaggagtaggtacagaatccaccgctgagtccggtgactcgcccgaaactggcgaagaatcgga

SEQ ID NO: 121581 - DNA, 80 bp, synthetic construct
  source 1..80: mol_type = other DNA
gaggtagcaccactgcagagcttcatgctgcggggtggtgttgtagatgatccagtcgtagcaggagcgctgggcgtggt

SEQ ID NO: 121582 - DNA, 80 bp, synthetic construct
  source 1..80: mol_type = other DNA
tcaagtgtctgcggccctgtgtactgcttcacaccatcgccagtggtcgtaggcactactgatatcaaaggcaagccgac

SEQ ID NO: 121583 - DNA, 80 bp, synthetic construct
  source 1..80: mol_type = other DNA
tacaccttgttcagcagtcgctgctgcgtatcccctactttgtccgggcccaaatcttgcttcgggcttgcatgcttgcg

SEQ ID NO: 121584 - DNA, 80 bp, synthetic construct
  source 1..80: mol_type = other DNA
ggaaacgaatccctcgcccgcacagtcactcaagcggcattccccatccaaaaccaggtccatgattttatcctacaaaa

SEQ ID NO: 121585 - DNA, 80 bp, synthetic construct
  source 1..80: mol_type = other DNA
gtacctgcttcaatacagcttgcttaaaacaccatatttcgtgcgggctcacattttgctgcgggcctgcatgtttttcc

SEQ ID NO: 121586 - DNA, 80 bp, synthetic construct
  source 1..80: mol_type = other DNA
ccaatatccattatgctaaacgtttccttctatccgtttcaatccattaaaagtccattaccaaaaatgatgcatcatac

SEQ ID NO: 121587 - DNA, 80 bp, synthetic construct
  source 1..80: mol_type = other DNA
ccgatggggttttcttatgacacccgctgctttgactccacagtgactgaacgcgacatccgcgtagaagagtcaatata

SEQ ID NO: 121588 - DNA, 80 bp, synthetic construct
  source 1..80: mol_type = other DNA
agctggttatgaaggacgggagaagtttggtggtcccctgtcggggtcaagacgagttgataggaagggctagaatatcc

SEQ ID NO: 121589 - DNA, 80 bp, synthetic construct
  source 1..80: mol_type = other DNA
gctgccctgcgagcccgagccagacgtagctgtgctgacatcgatgcttacagacccatcccacatcactgcagagacgg

SEQ ID NO: 121590 - DNA, 80 bp, synthetic construct
  source 1..80: mol_type = other DNA
acattcttgcaggtctccctgtctccgctcggaggggtaaccttatccttcttgggcctgctgacgatgcaaagagcaag

SEQ ID NO: 121591 - DNA, 80 bp, synthetic construct
  source 1..80: mol_type = other DNA
agtcacgcaggtgacagcgttccccgccgctgtgctggtggaaacagacagccaggtcaaaacccactctattttcaagg

SEQ ID NO: 121592 - DNA, 80 bp, synthetic construct
  source 1..80: mol_type = other DNA
gcgcccgccgtcagggcgcagaagcgcgcgcgcgccgcaaagccgttggcgaccgcggcgaacgtcgcgggcagcacctc

SEQ ID NO: 121593 - DNA, 80 bp, synthetic construct
  source 1..80: mol_type = other DNA
acacacaaaaggcgtaccaaacaaacaaaccaaaagatgcacatgcggtttaacacccgtggtttttatttacaacaaac

SEQ ID NO: 121594 - DNA, 80 bp, synthetic construct
  source 1..80: mol_type = other DNA
gcctcatccacctgcatcagaacatcgtggacgtacagtatctctatggtctgaccccgtccgtcgtgtcgtggtcgatc

SEQ ID NO: 121595 - DNA, 80 bp, synthetic construct
  source 1..80: mol_type = other DNA
gcttttcaacatcctagggggatgggtcgcctcccaaattgcaacccccacggcctccacggcttttgtcgtgagtggcc

SEQ ID NO: 121596 - DNA, 80 bp, synthetic construct
  source 1..80: mol_type = other DNA
atgactctcctgaaccacacggccagcagggtgcctcccgcccgacactgcagggagcccggggatgaacaatggcaatg

SEQ ID NO: 121597 - DNA, 80 bp, synthetic construct
  source 1..80: mol_type = other DNA
acgcgtgtattcagaccaccagtccttaaaatggttcaaggactttgcagctgggaagcggtcggcgatcggattttttg

SEQ ID NO: 121598 - DNA, 80 bp, synthetic construct
  source 1..80: mol_type = other DNA
cgtaagcgcgggccaaaggatggggtgtggtgagggtaaaagcacaaagggagtaccagaccgaaaacaaggacggatcg

SEQ ID NO: 121599 - DNA, 80 bp, synthetic construct
  source 1..80: mol_type = other DNA
tggcggccgaaatggaagaagcactacgtggactaccaatccgttatcagaccccagctgtgaaatcagaacacacagga

SEQ ID NO: 121600 - DNA, 80 bp, synthetic construct
  source 1..80: mol_type = other DNA
cgcgacccgagtacgacttggagcctataacatcctgctccagcaacgtgtcagtcgcgcatgatgccatggggaagagg

SEQ ID NO: 121601 - DNA, 80 bp, synthetic construct
  source 1..80: mol_type = other DNA
gataaggaggtcctgtatgaggcttttgatgagatggaggaatgcgcctctagggcggctctcatcgaagaggggcagcg

SEQ ID NO: 121602 - DNA, 80 bp, synthetic construct
  source 1..80: mol_type = other DNA
cgactgcgtttctgtcgatgatacacatatgcacgcatcaatctgagaagcaacatgacaacggaaaacacggccaggca

SEQ ID NO: 121603 - DNA, 80 bp, synthetic construct
  source 1..80: mol_type = other DNA
cgccccctacggtcctccccagggtccggcgtcccatgcccccactcccccgtatgccccagctgcctgcccgccaggcc

SEQ ID NO: 121604 - DNA, 80 bp, synthetic construct
  source 1..80: mol_type = other DNA
tgaacaacacttttaatgggaggtactatggtattattgattaatgtgaatgaaacctatgctggaacttattatggttc

SEQ ID NO: 121605 - DNA, 80 bp, synthetic construct
  source 1..80: mol_type = other DNA
atcgctcaatactgaccatttaaatcatacctgacctccatagcagaaagtcaaaagcctccgaccggaggcttttgact

SEQ ID NO: 121606 - DNA, 80 bp, synthetic construct
  source 1..80: mol_type = other DNA
ggcagggatatgtttctgtactgcaaacgctgatgccacttgaattctggaataacaagcctagggggggagccgtcaaa

SEQ ID NO: 121607 - DNA, 80 bp, synthetic construct
  source 1..80: mol_type = other DNA
ggggggaaagccgcaacatgcggcaagtacctcttcaattgggcggtgaggacgaagctcaaactcactcctctgcgtga

SEQ ID NO: 121608 - DNA, 80 bp, synthetic construct
  source 1..80: mol_type = other DNA
aagacaaaccaacactggacattgaactcttgaagacggaggtcacaaaccctgccgtcctgcgcaaactgtgcattgaa

SEQ ID NO: 121609 - DNA, 80 bp, synthetic construct
  source 1..80: mol_type = other DNA
gaggacccagtaaaacttgcttcaatagtgaaagcttcctttgaggaagggaagtgtggcctgaactcagtcgactccct

SEQ ID NO: 121610 - DNA, 80 bp, synthetic construct
  source 1..80: mol_type = other DNA
ccagtctcagctaggttaggcaatgagattttgctcggcccggctgacactgaggtgtcaggggggtggaggcttctcgc

SEQ ID NO: 121611 - DNA, 80 bp, synthetic construct
  source 1..80: mol_type = other DNA
gttttgactggaaagaagattactgctcatctgaagaaactatggagaatgctggacccaagacagggcttagttgtcct

SEQ ID NO: 121612 - DNA, 80 bp, synthetic construct
  source 1..80: mol_type = other DNA
gtacatcaagggtagggcagcccccttggccgcctactcaatgcttggtatgtggtcctttgtcatgttactcctggcgt

SEQ ID NO: 121613 - DNA, 80 bp, synthetic construct
  source 1..80: mol_type = other DNA
atgctcgtccaacgtctccgtagcccacgatggcaccggacagagatattactacctcacccgtgactgtaccactccac

SEQ ID NO: 121614 - DNA, 80 bp, synthetic construct
  source 1..80: mol_type = other DNA
accagcatggggaacactatgacatgttaccttaaggcgcaggcagcatgtagggcggcaggtatcaaagcttttgacat

SEQ ID NO: 121615 - DNA, 80 bp, synthetic construct
  source 1..80: mol_type = other DNA
ttattgttgtctggatcgtgcggtccgagggtcgccggggcaggggcgggggcgggggtgctcgtcgatctaccgtgctc

SEQ ID NO: 121616 - DNA, 80 bp, synthetic construct
  source 1..80: mol_type = other DNA
ctgctccaacagcagcatcacttggcaacttgaaggggcagtgcttcacgttcctgggtgcgtcccctgtgtgaaggaga

SEQ ID NO: 121617 - DNA, 80 bp, synthetic construct
  source 1..80: mol_type = other DNA
tctcacctggagcactggttgtgggcgtcgtctgcgcggcggtgctgcgtcgacatgttgggccgtccgagggtgcggcg

SEQ ID NO: 121618 - DNA, 80 bp, synthetic construct
  source 1..80: mol_type = other DNA
atgtggagaggtccacagagattgcccgtgcctgtgaacgagctgccccatggctggaaggcttgggggaaatcgtactt

SEQ ID NO: 121619 - DNA, 80 bp, synthetic construct
  source 1..80: mol_type = other DNA
ccccctatagagcgggaaggccaaacctccgatttgtttaaccttgaagaacgccgcttggttcttagtggcaatcgcgc

SEQ ID NO: 121620 - DNA, 80 bp, synthetic construct
  source 1..80: mol_type = other DNA
ggacagcaccaaagcgacaaggtacttggtcaaaacggaatcgtggatcttgagaaaccctgggtatgctctagtggccg

SEQ ID NO: 121621 - DNA, 80 bp, synthetic construct
  source 1..80: mol_type = other DNA
tcagcaggtggtcgagttgcgagtacaaactgagtctgctgtcggcacggcaaagtctaaataaaaaaatcccagaatca

SEQ ID NO: 121622 - DNA, 80 bp, synthetic construct
  source 1..80: mol_type = other DNA
cgcagcggcaccgtgctggcggcggcgagggccgtggaggtgctgggtgcggaggcaggcttggccacgcccccgcggcg

SEQ ID NO: 121623 - DNA, 80 bp, synthetic construct
  source 1..80: mol_type = other DNA
ctacccgggaacccctcggttgcgtcaatgatggcttttagcgcagctctgacgagcccacttgctaccagcaccaccat

SEQ ID NO: 121624 - DNA, 80 bp, synthetic construct
  source 1..80: mol_type = other DNA
gacggcctggcaggtccaccgggactggttcaatgatctggccctaccgtggaaacatgaaggagcacagaactggaaca

SEQ ID NO: 121625 - DNA, 80 bp, synthetic construct
  source 1..80: mol_type = other DNA
tgtaccaacagtttgatgagatggaagaatgttccaaacaccttccactcgtcgaacacggcctgcaactcgcagagcag

SEQ ID NO: 121626 - DNA, 80 bp, synthetic construct
  source 1..80: mol_type = other DNA
gtgggcagattggtcactgttaacccttttgtttcagtggccacggccaatgccaaggttctgattgaattggaaccacc

SEQ ID NO: 121627 - DNA, 80 bp, synthetic construct
  source 1..80: mol_type = other DNA
gggtgcgttatcgcacccccgcgccgcctcgggtgccgtcccgtagatcgttgcggtgatgtagatggtgtccggggtcc

SEQ ID NO: 121628 - DNA, 80 bp, synthetic construct
  source 1..80: mol_type = other DNA
aagaaaaggaagcaaactgtgcttactccataactttgaaatttggatggggaaagacatatgaaacacccataccattt

SEQ ID NO: 121629 - DNA, 80 bp, synthetic construct
  source 1..80: mol_type = other DNA
ccaggcggctgcttcgctggatggccttatagatctccggatcgatgcggacggaggtaatgatcagggcgatcggaacg

SEQ ID NO: 121630 - DNA, 80 bp, synthetic construct
  source 1..80: mol_type = other DNA
tctggccggaatgcacggtcttgcatccttcctcgtgtttttctgctttgcatggtatctaaagggtaggtgggtgcccg

SEQ ID NO: 121631 - DNA, 80 bp, synthetic construct
  source 1..80: mol_type = other DNA
tcagtcttaaaggacattaagcaggcggcttccacagtcaccgccaagctcctttcagtggaggatgcatgtgcgttgac

SEQ ID NO: 121632 - DNA, 80 bp, synthetic construct
  source 1..80: mol_type = other DNA
catttcagggtcaactgtccctggtcttaaacgaccccccgaagatgacgaactctttgatcttagtggtattcccataa

SEQ ID NO: 121633 - DNA, 80 bp, synthetic construct
  source 1..80: mol_type = other DNA
caacgatctgtgagtgtcgcggcgcgcttctacccgtgtttgcccataataaacctctgaaccaaactttgggtctcatt

SEQ ID NO: 121634 - DNA, 80 bp, synthetic construct
  source 1..80: mol_type = other DNA
atcactggtgcccccaccttcacctcgggggccaatgacactgacttcctcctgctgaacaacacgagaccgccactagg

SEQ ID NO: 121635 - DNA, 80 bp, synthetic construct
  source 1..80: mol_type = other DNA
aagaccaaacttagactcactccattgcgtggtgcatccgctctcgacttgtcggggtggtttacatcaggctacggcgg

SEQ ID NO: 121636 - DNA, 80 bp, synthetic construct
  source 1..80: mol_type = other DNA
cacttccgcatactgtttcacatatcgtcacttccgccgcaccgcgcccgtcctccgaccccacacgtcatccgcctcca

SEQ ID NO: 121637 - DNA, 80 bp, synthetic construct
  source 1..80: mol_type = other DNA
gggcaaacgggggagaaaaggaagttagaaaatgacggtgcggattttctaaaggagttaaccttgagtttaatgtctcg

SEQ ID NO: 121638 - DNA, 80 bp, synthetic construct
  source 1..80: mol_type = other DNA
gcgaaggaaggggggggtggcggcggcggtggaaagcggaaaaacggaggatggaatggcagaagatggagagtcccgat

SEQ ID NO: 121639 - DNA, 80 bp, synthetic construct
  source 1..80: mol_type = other DNA
ctgtcgggctgcactcctatgcaataggatcccaactgccatgcgagcccgaaccagacgtctcggtgctgacctcaatg

SEQ ID NO: 121640 - DNA, 80 bp, synthetic construct
  source 1..80: mol_type = other DNA
ccccctccgcggcgtggggtgcggcaccggaggtgttggtgccgcggaggaccccgggtcctccctccgcgcccggccct

SEQ ID NO: 121641 - DNA, 80 bp, synthetic construct
  source 1..80: mol_type = other DNA
acaggacaccgtatggcatgggatatgatgatgaactggtctccagcaaccaccatgatcatggcatacttcatgcgcgt

SEQ ID NO: 121642 - DNA, 80 bp, synthetic construct
  source 1..80: mol_type = other DNA
ggaatttcatcagcgggatacagtacttagcgggcttatccaccctgcctgggaaccccgcgatagcatcactgatggca

SEQ ID NO: 121643 - DNA, 80 bp, synthetic construct
  source 1..80: mol_type = other DNA
gtctttgtctggaattgcacagtcagcctcagttttgtcattcatggacaagggcatcccgtttatgaagatgaacatct

SEQ ID NO: 121644 - DNA, 80 bp, synthetic construct
  source 1..80: mol_type = other DNA
atgctaacatcactggtccttctgatgatagaccgtactgctggcactacgcacctagactttgtgaaaccgtcccagca

SEQ ID NO: 121645 - DNA, 80 bp, synthetic construct
  source 1..80: mol_type = other DNA
tatgaaaatagtaggccctcgcacttgcagcaacgtatggcatggcactttccccatcaatccatcgacaacaggcccaa

SEQ ID NO: 121646 - DNA, 80 bp, synthetic construct
  source 1..80: mol_type = other DNA
ccggccaccggatggcatgggacatgatgatgaattggtcacctacaacagctttggtgatggcccagttgttacggatt

SEQ ID NO: 121647 - DNA, 80 bp, synthetic construct
  source 1..80: mol_type = other DNA
cgtctcagccaatccctgggtgagtttcaccagttttgatttaaacgtggccaatatggacaacttcttcgcccccgttt

SEQ ID NO: 121648 - DNA, 80 bp, synthetic construct
  source 1..80: mol_type = other DNA
cccggctcccaactacaagtttgctttgtggagcgtgggcgctgcggactacgcggaggtacgtcgcgtgggagactccc

SEQ ID NO: 121649 - DNA, 80 bp, synthetic construct
  source 1..80: mol_type = other DNA
ttcactggactaactcacatagatgcccactttctgtcacagactaagcaagcaggactcaacttctcgtacctcactgc

SEQ ID NO: 121650 - DNA, 80 bp, synthetic construct
  source 1..80: mol_type = other DNA
cgagacagatgtcttcatccttaactcgaccaggcctccacaaggctcatggtttgggtgcacgtggatgaatggcactg

SEQ ID NO: 121651 - DNA, 80 bp, synthetic construct
  source 1..80: mol_type = other DNA
tgacattgacaaaaatggacttcaaataggagtcgaacaaacagctgacaatgggcagaaagaaatctatgccgataaat

SEQ ID NO: 121652 - DNA, 80 bp, synthetic construct
  source 1..80: mol_type = other DNA
ggaattttttagattgttatactaaagaaacaaactacataggttgggtttatggaattatgtctggcttagtatttgtc

SEQ ID NO: 121653 - DNA, 80 bp, synthetic construct
  source 1..80: mol_type = other DNA
gagggcaactcctctcgttgctggatagcacttacccccacgcttgcggttaaagaagctggtgtccccactgaggcgat

SEQ ID NO: 121654 - DNA, 80 bp, synthetic construct
  source 1..80: mol_type = other DNA
gggtgagatgtgtgaggacaccgtcacgtataaatgccccttattggttaacaccgaacccgaagacattgactgctggt

SEQ ID NO: 121655 - DNA, 80 bp, synthetic construct
  source 1..80: mol_type = other DNA
ccaatcttgtgacctggtccctgaggcccgcgcggccataaggtctctcacagagaggctttacatcgggggcccgctta

SEQ ID NO: 121656 - DNA, 80 bp, synthetic construct
  source 1..80: mol_type = other DNA
ggcccccccgtgcgacattggaccagacggtaacaactccctgacctgccccacggactgtttccggaaacatccggagg

SEQ ID NO: 121657 - DNA, 80 bp, synthetic construct
  source 1..80: mol_type = other DNA
gaggagtatccactcccttgcgccggctcttggctaagagaagtttgggaatgggtttgtgaggtcatggcagacttttc

SEQ ID NO: 121658 - DNA, 80 bp, synthetic construct
  source 1..80: mol_type = other DNA
taccatggcgcaggctcaaggacacttgcgggcgctaaacatcctgcgctccaaatgtacacaaatgtagatcaggacct

SEQ ID NO: 121659 - DNA, 80 bp, synthetic construct
  source 1..80: mol_type = other DNA
gatcttgaagtaccccgccatgagcgcgtaggtcagcgcgttctccccggccgcgctctcgcggacgtgctgcacgacgg

SEQ ID NO: 121660 - DNA, 80 bp, synthetic construct
  source 1..80: mol_type = other DNA
ttgcatgctcgtgcgctccgtgatggggggaaagtacttccagatggccatactgagcattggcagatggttcaacacct

SEQ ID NO: 121661 - DNA, 80 bp, synthetic construct
  source 1..80: mol_type = other DNA
gagtggatttgtcggtctcttcactactggtgctaaacagaaactcagtctaattaacaccaacggcagttggcacataa

SEQ ID NO: 121662 - DNA, 80 bp, synthetic construct
  source 1..80: mol_type = other DNA
gcccgaggccagcaccgtgcggcgcaggtcccgcgccgccggccagcgcacggcgcactgcacggcgggcagcagctcgc

SEQ ID NO: 121663 - DNA, 80 bp, synthetic construct
  source 1..80: mol_type = other DNA
acatcactgccgaaacggcgggtcgacgcctcgcacggggctcccctccgtcattggctagttcctctgcaagccagctt

SEQ ID NO: 121664 - DNA, 80 bp, synthetic construct
  source 1..80: mol_type = other DNA
ctggcctgccccgcctggctccaagtccctcgagccctgctcgtgcgggtcagcagacctttacttggtgacgcgcaatg

SEQ ID NO: 121665 - DNA, 80 bp, synthetic construct
  source 1..80: mol_type = other DNA
cgtgaagcactggtggagggccgtcgagaccgaggggtttgttgtgcgcagggacgccagttggccgatatacttaccga

SEQ ID NO: 121666 - DNA, 80 bp, synthetic construct
  source 1..80: mol_type = other DNA
agtactccgcgtccaaccgtttcttaaacgcgtccacgataaggcggtcgcaggcgtcctccataaggccccgggccgtg

SEQ ID NO: 121667 - DNA, 80 bp, synthetic construct
  source 1..80: mol_type = other DNA
caacaacactcctggtgacattttatttgacctacaattgggcccacatcttaaccctttcttgtcccatttagctcaaa

SEQ ID NO: 121668 - DNA, 80 bp, synthetic construct
  source 1..80: mol_type = other DNA
cattcgtagtgagcgggctagctggtgccgccgtgggtggcataggcctgggcagggtgctgcttgacatacttgcagtg

SEQ ID NO: 121669 - DNA, 80 bp, synthetic construct
  source 1..80: mol_type = other DNA
cgccccctggcgccccgcggagcagcagcagcggcggcgccccgttgcgggcggtggtgcgatctgggtctggttgcggc

SEQ ID NO: 121670 - DNA, 80 bp, synthetic construct
  source 1..80: mol_type = other DNA
acttgcttgttgcacccatcgttaggcttcgaggtgactaagatcttactggctttattaggtcccatctacctgttgca

SEQ ID NO: 121671 - DNA, 80 bp, synthetic construct
  source 1..80: mol_type = other DNA
actgtctgggaacatcaaacagggacttcgtcgaaggagccagcggggcaacatggattgacttggtacttgaaggagga

SEQ ID NO: 121672 - DNA, 80 bp, synthetic construct
  source 1..80: mol_type = other DNA
ccagtgggcagactggtcactgtcaacccttttgtttcagtggctacggccaacgccaaggtactgattgaactggaacc

SEQ ID NO: 121673 - DNA, 80 bp, synthetic construct
  source 1..80: mol_type = other DNA
cctggctcggggccgcgctccccgtcctcgctcgcgggcgtccccgcgccacgcctccgcccgccatcctccgcggcggc

SEQ ID NO: 121674 - DNA, 80 bp, synthetic construct
  source 1..80: mol_type = other DNA
cccgtcgtgggtggcgctgtggcccccccgacgggtgctcgagacggtcgtggatgcggcgtgcatgcgcgccccggaac

SEQ ID NO: 121675 - DNA, 80 bp, synthetic construct
  source 1..80: mol_type = other DNA
gactgtgttacccaataaaggttctacaaaaaatgctttattgggtgtttgtttaatagctattatcgtaacccaccccc

SEQ ID NO: 121676 - DNA, 80 bp, synthetic construct
  source 1..80: mol_type = other DNA
tgcacttggatgaacgggactgggttcactaagacatgcggtgcaccaccttgccgcattaggaaagactacaacagcac

SEQ ID NO: 121677 - DNA, 80 bp, synthetic construct
  source 1..80: mol_type = other DNA
caccgtaggggtaggcatctttttactgcccgcccggtaggcgggtaaccactccggccttttggcccatcctgtttttt

SEQ ID NO: 121678 - DNA, 80 bp, synthetic construct
  source 1..80: mol_type = other DNA
gagactagatctagactggacgatagaggagccaggtaatagcttaaaaattttaacccagctatcaagtgtagtacaag

SEQ ID NO: 121679 - DNA, 80 bp, synthetic construct
  source 1..80: mol_type = other DNA
tggatgctcatcctgcttggccaagccgaggctgccctcgagaggctggtcgttctgcatgcggcgagcgccgccggcgc

SEQ ID NO: 121680 - DNA, 80 bp, synthetic construct
  source 1..80: mol_type = other DNA
tagtcagtctcccaccaccagcccatttcacagtgtaaacaattctctcagcacgggtggccttaaatagggcaatgttc

SEQ ID NO: 121681 - DNA, 80 bp, synthetic construct
  source 1..80: mol_type = other DNA
ggtgatgtgatcccagcccgtcgccgtggtgataaccgagctggcctcctgagcccgcggccgatagccactctgaaggg

SEQ ID NO: 121682 - DNA, 80 bp, synthetic construct
  source 1..80: mol_type = other DNA
aggtagtcgatttcagcctggatcccactttcacgatcgagactaccaccgtcccacaagatgccgtggccaggagtcag

SEQ ID NO: 121683 - DNA, 80 bp, synthetic construct
  source 1..80: mol_type = other DNA
cgatggtgaagatgcctggcaggaggtcggggtcgaagtagcttatgcaggtgcccagatcgtccagagaagcttgccat

SEQ ID NO: 121684 - DNA, 80 bp, synthetic construct
  source 1..80: mol_type = other DNA
acacactccagtcaactcctggctaggcaacatcatcatgtatgcgcctaccttatgggcaaggatgattctgatgactc

SEQ ID NO: 121685 - DNA, 80 bp, synthetic construct
  source 1..80: mol_type = other DNA
tagctgacgggggctgcggagggggggcatatgacatcatcatctgtgacgagtgccactccaccgacgccacaacagtc

SEQ ID NO: 121686 - DNA, 80 bp, synthetic construct
  source 1..80: mol_type = other DNA
atgttccacccttggaagtgcgtggaggtcgggattccctcatccttcttgccgccatggtacaccccactttggtcttt

SEQ ID NO: 121687 - DNA, 80 bp, synthetic construct
  source 1..80: mol_type = other DNA
ggaggtatgtggccccgtgtactgcttcacgcccagccccgtagtcgttggcacgacggacaggagggtggcccccactt

SEQ ID NO: 121688 - DNA, 80 bp, synthetic construct
  source 1..80: mol_type = other DNA
gcggaatctgcgttgaagaagatcaagagagtcattggaaacttgatgcagagcctccacatgaggggacgtcgcagatc

SEQ ID NO: 121689 - DNA, 80 bp, synthetic construct
  source 1..80: mol_type = other DNA
ccagctgtgcgaaaggcgcgtgtactcgcgtagggtgcggttgcagatgaggtacgtgagcacgttttcgctctgccgga

SEQ ID NO: 121690 - DNA, 80 bp, synthetic construct
  source 1..80: mol_type = other DNA
accacgctatacgtccaccacgaggtgcgcgtgcttgccgcgtaccgcagggcgtattatggaagcgcgcagagtccctt

SEQ ID NO: 121691 - DNA, 80 bp, synthetic construct
  source 1..80: mol_type = other DNA
gtggagctgagatcactggacatgtcaagaacgggacgatgaggatcgtcggtcctaagacctgcaggaacatgtggagt

SEQ ID NO: 121692 - DNA, 80 bp, synthetic construct
  source 1..80: mol_type = other DNA
gattgggcagcgacaggtctccgcgatctagcggtggccacggagcccatcatcttctctgacatggagaagaaggtcat

SEQ ID NO: 121693 - DNA, 80 bp, synthetic construct
  source 1..80: mol_type = other DNA
aagaacagagtctgtgccgggcgcgtgcgacggtggcgcgcggctcgggtgcgccgggcgtggagggtgtgcacgggccc

SEQ ID NO: 121694 - DNA, 80 bp, synthetic construct
  source 1..80: mol_type = other DNA
atcattcagagtaggactccacgcgtacccggtggggtcgcaattaccttgcgagcccgaaccggatgtggccgtgttga

SEQ ID NO: 121695 - DNA, 80 bp, synthetic construct
  source 1..80: mol_type = other DNA
attaaaattgtatcttttaaacaccgattcggaatagtttggctacaaaacatatcacctgtatttactgccgtttccaa

SEQ ID NO: 121696 - DNA, 80 bp, synthetic construct
  source 1..80: mol_type = other DNA
gtgggactgctgttgctcacaaggagtgggaagcggagctggccccctagcgaagtactcacagctgttggcctgatatg

SEQ ID NO: 121697 - DNA, 80 bp, synthetic construct
  source 1..80: mol_type = other DNA
tcgaatggcttgggatatgatgatgaactggtcccccgctgtcggcatggtagtggcgcacattttgcgcttaccccaga

SEQ ID NO: 121698 - DNA, 80 bp, synthetic construct
  source 1..80: mol_type = other DNA
gaggcagaagacgcacacaacccgagactacttcgagtggaacgctggctgaaagagcatggagaagaacgtcttggaag

SEQ ID NO: 121699 - DNA, 80 bp, synthetic construct
  source 1..80: mol_type = other DNA
aggatgaccttcagaatgaggctaaaattactgacatcatggaacccgagcatgccctactggctaaggcaatcttcaag

SEQ ID NO: 121700 - DNA, 80 bp, synthetic construct
  source 1..80: mol_type = other DNA
tcaacatatgggtggaatctggtgcgtcttcagagtggagttgacgtcttcttcatcccgccagaaaagtgtgacacatt

SEQ ID NO: 121701 - DNA, 80 bp, synthetic construct
  source 1..80: mol_type = other DNA
ctcaacacgtttgtggtagggtcccagctcccctgtgaaccggagccagacgtagcagtattaacatctatgctgacaga

SEQ ID NO: 121702 - DNA, 80 bp, synthetic construct
  source 1..80: mol_type = other DNA
tccccgcccctgggcacgcgcaagcgcaagcgccctgcccgccccctctcatcggagtctgaggtcgaatccgagacagc

SEQ ID NO: 121703 - DNA, 80 bp, synthetic construct
  source 1..80: mol_type = other DNA
gatcgcggatatccacgtactcggcgtagcccttttgaaaaaacggcacgtactggcgcagggccggcacgccccccaag

SEQ ID NO: 121704 - DNA, 80 bp, synthetic construct
  source 1..80: mol_type = other DNA
tgtgtaagtgtattagcttctccaatcatgtcagatggatgacgaaggattaagacgattgacccagcatgctcaatgtc

SEQ ID NO: 121705 - DNA, 80 bp, synthetic construct
  source 1..80: mol_type = other DNA
gttgggtggtgtgcagaacgagatcactctaacacatccaattaccaagtacatcatggcttgcatgtcagcagacctgg

SEQ ID NO: 121706 - DNA, 80 bp, synthetic construct
  source 1..80: mol_type = other DNA
tggcacataaaccgcaccgccctcaattgcaatgacagtttgaacaccgggttcattgcggccttgttctacgcccgtaa

SEQ ID NO: 121707 - DNA, 80 bp, synthetic construct
  source 1..80: mol_type = other DNA
atctggagcctgaggctcgcaaggtcataaccgccctcacagagagactctatgtgggcggccccatgtataacagcaag

SEQ ID NO: 121708 - DNA, 80 bp, synthetic construct
  source 1..80: mol_type = other DNA
gatgaggccagtggtgacttggtcacctttaggagtccgaatggggcggagagaactctcaggccggtgtggaaggacgc

SEQ ID NO: 121709 - DNA, 80 bp, synthetic construct
  source 1..80: mol_type = other DNA
gagttcttcaccgagttagacggagtgaggctccaccgctatgctcctccttgtaagccccttctgagggacgagatcac

SEQ ID NO: 121710 - DNA, 80 bp, synthetic construct
  source 1..80: mol_type = other DNA
aatctccgcgtccgtgggtttctctgcgttgcgccggaccacgagcacaaacgtgctctgccacacgtgggcgacgaacc

SEQ ID NO: 121711 - DNA, 80 bp, synthetic construct
  source 1..80: mol_type = other DNA
ctggcacgtcagcagacctcactgtagaaaaagcagcagatgtaacatgggaggaagaggctgagcaaacaggagtgtcc

SEQ ID NO: 121712 - DNA, 80 bp, synthetic construct
  source 1..80: mol_type = other DNA
ggaaaggggacggcatcacgactaccaagtgcggctgtggtgcctcactaaccggccacgtcaagaacgggaccatgaag

SEQ ID NO: 121713 - DNA, 80 bp, synthetic construct
  source 1..80: mol_type = other DNA
tacgcgcatacctgaatacgcccggtctacccgtgtgtcaagatcacctagagttttgggagggggtgttcacaggtctt

SEQ ID NO: 121714 - DNA, 80 bp, synthetic construct
  source 1..80: mol_type = other DNA
cagtgagagtgaaaattctatcgtactaagtctcgacgaacatcggtcatgtcgcgttcctaggcacgtacgtgttgtta

SEQ ID NO: 121715 - DNA, 80 bp, synthetic construct
  source 1..80: mol_type = other DNA
acagagaccagcagaggaggacgccggctcgaccaccggatcactgtcctccatgccccccctggagggagagccaggag

SEQ ID NO: 121716 - DNA, 80 bp, synthetic construct
  source 1..80: mol_type = other DNA
agcaatcagacactcaatatgtctgcaaaagaacgttagtggacagaggctggggaaatggatgtggactttttggcaaa

SEQ ID NO: 121717 - DNA, 80 bp, synthetic construct
  source 1..80: mol_type = other DNA
agatgtcttcctattgaacaacaccagaccgccgaaagggccttggtttggctgctcttggatgaactcgcccgggttca

SEQ ID NO: 121718 - DNA, 80 bp, synthetic construct
  source 1..80: mol_type = other DNA
agctcattaaatatagtccagacaaaacagaacatgacaaagcaaataggctgagctaaaagttcccactacgggactgc

SEQ ID NO: 121719 - DNA, 80 bp, synthetic construct
  source 1..80: mol_type = other DNA
tcaggctacagtctgtgcacgtgctgcagctcccccacctagctgggacgagatgtggaaatgtctcatccggctcaaac

SEQ ID NO: 121720 - DNA, 80 bp, synthetic construct
  source 1..80: mol_type = other DNA
attgccggtgcagctgttggcagcataggtcttgggaaggtgcttgtggacatcttggcgggctacggagcggtggtggc

SEQ ID NO: 121721 - DNA, 80 bp, synthetic construct
  source 1..80: mol_type = other DNA
ggcgcgaaacgtcagcttccctgtccagacgatcaggcgtcatgtcgatctgatggtgggggctgctgtgttttgctccg

SEQ ID NO: 121722 - DNA, 80 bp, synthetic construct
  source 1..80: mol_type = other DNA
agacccaaacatcaggacaggggtcagaactatcacaaccggggcgcccatcacttattccacctatgggaagtttctgg

SEQ ID NO: 121723 - DNA, 80 bp, synthetic construct
  source 1..80: mol_type = other DNA
atgggggccaatttggacgtcaacagggtcattgatggcaggaccaatatcaagcctgaagaaatagacggaagagtgga

SEQ ID NO: 121724 - DNA, 80 bp, synthetic construct
  source 1..80: mol_type = other DNA
gagcccgcgcggtccgagcaaagctcatcgcccagggtggaaacgctgcaatttgcggtagatatctcttcaactgggcg

SEQ ID NO: 121725 - DNA, 80 bp, synthetic construct
  source 1..80: mol_type = other DNA
tgctgcattccaccactgagtgggccattctaccttgcacctactctgacatgccggctttatctaccggtcttttacac

SEQ ID NO: 121726 - DNA, 80 bp, synthetic construct
  source 1..80: mol_type = other DNA
cgtggccgaagcttgagcaattctggcataaacacatgtggaacttcgtgagcgggattcagtacctcgcagggttgaca

SEQ ID NO: 121727 - DNA, 80 bp, synthetic construct
  source 1..80: mol_type = other DNA
tcagcaccatcccgatcgtgaacgacccccagacccgcgtggaggccgaggaggccgtcatggcgggcacggccgtggac

SEQ ID NO: 121728 - DNA, 80 bp, synthetic construct
  source 1..80: mol_type = other DNA
atacctcggcttatggtccttcagcctcttactcttagctttgccccaacaagcctatgcccttgatacaaccgagcaag

SEQ ID NO: 121729 - DNA, 80 bp, synthetic construct
  source 1..80: mol_type = other DNA
catgcactgttcaccatgactccccagatgctgacctcatagaggcgaatctcttgtggagacaggagatgggaggtaac

SEQ ID NO: 121730 - DNA, 80 bp, synthetic construct
  source 1..80: mol_type = other DNA
ggcagctcttcacgtttaggccccgaacacattggaccgtccaagagtgcaattgttccatctacatcgggaaggtcacc

SEQ ID NO: 121731 - DNA, 80 bp, synthetic construct
  source 1..80: mol_type = other DNA
catgccgacatgggctactggatagaaagccaaaagaatggaagttggaagctagaaaaagcatccctcatagaggtgaa

SEQ ID NO: 121732 - DNA, 80 bp, synthetic construct
  source 1..80: mol_type = other DNA
gctatttagatgtagacttgcacccagcatcagcctggacattgtacgccgtagccacaacagtaataacaccaatgttg

SEQ ID NO: 121733 - DNA, 80 bp, synthetic construct
  source 1..80: mol_type = other DNA
gctggacacatcacgggccacaggatggcctgggatatgatgatgaactggagcccaactgcgaccctgatcctcgctca

SEQ ID NO: 121734 - DNA, 80 bp, synthetic construct
  source 1..80: mol_type = other DNA
atgaaagatggaagaaagttggtggttccctgcagaccccaggatgaactaataggaagagcaagaatctctcaaggagc

SEQ ID NO: 121735 - DNA, 80 bp, synthetic construct
  source 1..80: mol_type = other DNA
gaatatcaggccgtgtccgttcgccgggccgtcattaaggacgactgggtcctgctgcagctgatacccggccgcggcgc

SEQ ID NO: 121736 - DNA, 80 bp, synthetic construct
  source 1..80: mol_type = other DNA
ccatggacggggagtaccgactgagaggagaggagagaaagaccttcctggagttgctgaggactgcagacctgccagtg

SEQ ID NO: 121737 - DNA, 80 bp, synthetic construct
  source 1..80: mol_type = other DNA
tcggcggcccagcgctcgtggctactgcgggcgcgctgggccgccatcttctctctgaggtcggcggttgcggcctcaag

SEQ ID NO: 121738 - DNA, 80 bp, synthetic construct
  source 1..80: mol_type = other DNA
gctggcttcgggtagacctaccgcgttgcggataaactgagcgtaggattcgcgcaacttttgcaccagggcggcggtaa

SEQ ID NO: 121739 - DNA, 80 bp, synthetic construct
  source 1..80: mol_type = other DNA
gcgttccggcaacagcgccgccggtccgcggacgaccacgtaccgaacgagtgcggtcccgagacttatagggtgctaaa

SEQ ID NO: 121740 - DNA, 80 bp, synthetic construct
  source 1..80: mol_type = other DNA
gtgggggacctttgcggcgggctgatgcttgcagcccagatgttcattgtctcgccgcagcaccactggttcgtgcaaga

SEQ ID NO: 121741 - DNA, 80 bp, synthetic construct
  source 1..80: mol_type = other DNA
cccgggaggagcgtctgctgtacctgatcaccaactacctgccatcggtctcgctgtccacaaaacgccggagggacgag

SEQ ID NO: 121742 - DNA, 80 bp, synthetic construct
  source 1..80: mol_type = other DNA
tggtggtagaaggtcaggcgcggattcgccataatgcgggctctgataatgtgtgttttttactgctaaagggaactgcc

SEQ ID NO: 121743 - DNA, 80 bp, synthetic construct
  source 1..80: mol_type = other DNA
caggccattgctcaacagttcaaggacaaagttctcggcttgttgcaaagggcgagccagcaagaggccgacatcaggcc

SEQ ID NO: 121744 - DNA, 80 bp, synthetic construct
  source 1..80: mol_type = other DNA
tcttatttggtggaatcagtacgccataagcaggtgtgaggcttccttgcacgtgtgggtcccccccctacttgcgcgcg

SEQ ID NO: 121745 - DNA, 80 bp, synthetic construct
  source 1..80: mol_type = other DNA
catcgccttcgcctcacggggcaaccatgtgtccccaacacactacgtgcccgagacggatgcttcccgcaatgtcacac

SEQ ID NO: 121746 - DNA, 80 bp, synthetic construct
  source 1..80: mol_type = other DNA
gcctcccctcagagcgtggaagagtcgggcacgtgcagtgcgggcctctcttatctcccaggaagggagagctgccatat

SEQ ID NO: 121747 - DNA, 80 bp, synthetic construct
  source 1..80: mol_type = other DNA
ctacggcagaagaaggtgacatttgaccgagtccagattctcgatcaacactaccaagatgtactcaaggagattaaggt

SEQ ID NO: 121748 - DNA, 80 bp, synthetic construct
  source 1..80: mol_type = other DNA
gctagctctcttgtcctgcatcaccgtgccagtttccgctgtagaagtcagaaacaccagccaaacatacatggtgacca

SEQ ID NO: 121749 - DNA, 80 bp, synthetic construct
  source 1..80: mol_type = other DNA
gatggtagttaccaaagttttaatgccggcgaacgtgatttgcccacacctacccgggactggtgttctatttcccaacg

SEQ ID NO: 121750 - DNA, 80 bp, synthetic construct
  source 1..80: mol_type = other DNA
tgatggaaattgtcataccttaaaaactgttcatattgtgagccacagtagacattgttggcctgtatgtgatcataaca

SEQ ID NO: 121751 - DNA, 80 bp, synthetic construct
  source 1..80: mol_type = other DNA
tcagttaccgtcccgcatccaaatataagggaagaggcattgcccaccaccggggaaatacccttctacgggagtggcat

SEQ ID NO: 121752 - DNA, 80 bp, synthetic construct
  source 1..80: mol_type = other DNA
gatcactgaagactgccccgttccatgctccgggtcgtggctccgggacgtatgggactgggtttgttccatcttgacgg

SEQ ID NO: 121753 - DNA, 80 bp, synthetic construct
  source 1..80: mol_type = other DNA
gctggcacatcaacaggacggcgctgaactgcaatgagtcccaacagaccggcttccttgccggcctgatgtatgtccac

SEQ ID NO: 121754 - DNA, 80 bp, synthetic construct
  source 1..80: mol_type = other DNA
aatggcgtgctttgctttatgatctttttcgtagctgcctggtatgtcaagggtcgagtagtccccttggctgcctactc

SEQ ID NO: 121755 - DNA, 80 bp, synthetic construct
  source 1..80: mol_type = other DNA
gttgtagtgcaggaagatcccaaatactacaaaagggctccacgacgcctgaagaagctggaagatgagctgaactacgg

SEQ ID NO: 121756 - DNA, 80 bp, synthetic construct
  source 1..80: mol_type = other DNA
ggttaatagcatttgcctcgcggggcaaccatgtgtcccccacacactatgtgccagaaactgacgcctcccggcaagtc

SEQ ID NO: 121757 - DNA, 80 bp, synthetic construct
  source 1..80: mol_type = other DNA
ggttacggggcgaaggacgtccgagctggctcctctaaagcgctcaatcacatcaagagcgtttgggcagacttactcga

SEQ ID NO: 121758 - DNA, 80 bp, synthetic construct
  source 1..80: mol_type = other DNA
tgaaggaatgcccactcaaacatagagcatggaacagctttcttgtggaggatcatgggttcggggtatttcacactagt

SEQ ID NO: 121759 - DNA, 80 bp, synthetic construct
  source 1..80: mol_type = other DNA
cgcgttcggcaagtacggcctgttggatttgagctagggtggtggcaaagtcatccaagtccacaaacctgtgatatgct

SEQ ID NO: 121760 - DNA, 80 bp, synthetic construct
  source 1..80: mol_type = other DNA
ggtcacggaacagtagtcttggaactgcagtatacaggaactgatggaccgtgtaaaattcccatctcctcggtggcgtc

SEQ ID NO: 121761 - DNA, 80 bp, synthetic construct
  source 1..80: mol_type = other DNA
tataacagcagaggcggccgggagaaggttggcgagagggtcacccccttctatggccagctcctcggccagccagctgt

SEQ ID NO: 121762 - DNA, 80 bp, synthetic construct
  source 1..80: mol_type = other DNA
ggtggcctcgcgcagcaccaggggccccgggcctccgctcactcgcaggtacgcctcgccccggcggcgcagcatctgcg

SEQ ID NO: 121763 - DNA, 80 bp, synthetic construct
  source 1..80: mol_type = other DNA
ctgacagtgggtagcgttgtcatctgcggcaggattgtgacatcagggaaacctgtcccaatgccggatcgtgaggtcct

SEQ ID NO: 121764 - DNA, 80 bp, synthetic construct
  source 1..80: mol_type = other DNA
cggtacctacgtctacaaccacctcaccccgctgcgagattgggcccacacgggcctgcaggatctcgcggtggcagtcg

SEQ ID NO: 121765 - DNA, 80 bp, synthetic construct
  source 1..80: mol_type = other DNA
ctcaatacccattcgccttattttcgctctcatcgtacacacatcgaaagggccactgcgttcgaccgtatggatgtgca

SEQ ID NO: 121766 - DNA, 80 bp, synthetic construct
  source 1..80: mol_type = other DNA
cctgggtgcagcagtgaatggaaagaagagcgcgcatgggtccccaacattctggatgggaagccatgaggtgaatggaa

SEQ ID NO: 121767 - DNA, 80 bp, synthetic construct
  source 1..80: mol_type = other DNA
cctaccccattgctgtatcggctgggagctgttcaaaatgaggtgataacaactcacccaatcaccaaatacatcatggc

SEQ ID NO: 121768 - DNA, 80 bp, synthetic construct
  source 1..80: mol_type = other DNA
accgcgatgccctccgtgtagttctgaccctcgggccgggtcgggcagcggcgcggctgctcgaactgcaccaccgtggc

SEQ ID NO: 121769 - DNA, 80 bp, synthetic construct
  source 1..80: mol_type = other DNA
acaattcaacagaaagaccttcggaccagcgaccctattgctggcactacgcgccatcgccgtgtggtattgtgccggct

SEQ ID NO: 121770 - DNA, 80 bp, synthetic construct
  source 1..80: mol_type = other DNA
caccctgtatggtatcacctccattttttcccagggtcctcagcagaagctcgaactcgtcaaatccaacgggtcgtggc

SEQ ID NO: 121771 - DNA, 80 bp, synthetic construct
  source 1..80: mol_type = other DNA
aagccgctgacggcacagctgtttttgattgtgcaacacagccgggacaacgaggctttccgcgaggccatgctgaatat

SEQ ID NO: 121772 - DNA, 80 bp, synthetic construct
  source 1..80: mol_type = other DNA
tatcttcttgctggccctgttgtcctgcatcaccgttccggtctctgctgcccaggtgaagaataccagtagcagctaca

SEQ ID NO: 121773 - DNA, 80 bp, synthetic construct
  source 1..80: mol_type = other DNA
gggcagttagtttatgtgaggcctcggatacaccagaccactcaggactgcaactgctccatctactcagggcggatcac

SEQ ID NO: 121774 - DNA, 80 bp, synthetic construct
  source 1..80: mol_type = other DNA
cccagcgccaaactacacgttcgcgctgtggagggtggctgcggaggagtacgtggaagtcaggcgtgtggtggatttcc

SEQ ID NO: 121775 - DNA, 80 bp, synthetic construct
  source 1..80: mol_type = other DNA
catctgtgccaccgacgccctaatgacagggtatacaggcgactttgactctgttattgactgcaacgtcgcggtcacgc

SEQ ID NO: 121776 - DNA, 80 bp, synthetic construct
  source 1..80: mol_type = other DNA
atgtactacaattccactggcaacatgggagtgctggccgggcaagcttctcagctcaacgcagtggtggacttacaaga

SEQ ID NO: 121777 - DNA, 80 bp, synthetic construct
  source 1..80: mol_type = other DNA
agctgatggaggcgaccgccctggggtcggggcgagccgagagcgggtgcacgcgcgcgggcctagtgtcgtttaacttc

SEQ ID NO: 121778 - DNA, 80 bp, synthetic construct
  source 1..80: mol_type = other DNA
gttcatggacctgaaccttccctgggctagtcctggagcttccacctggaggaatagagagactctactggagtttgaag

SEQ ID NO: 121779 - DNA, 80 bp, synthetic construct
  source 1..80: mol_type = other DNA
catcagcgcgcgggccccggcctccaggcccgccccgccctgcgcggaccacgcggccgccgcctgcacgctggtgggac

SEQ ID NO: 121780 - DNA, 80 bp, synthetic construct
  source 1..80: mol_type = other DNA
attccctttgtgtcctgccaacgcgggtacgggggggtctggcaaggagatggcattatgcacactcgttgccactgtgg

SEQ ID NO: 121781 - DNA, 80 bp, synthetic construct
  source 1..80: mol_type = other DNA
atcagttaccgtgccgcaccctagcatcgaggaggtggccctgtccaacaccggggagatccccttctatggtaaagcca

SEQ ID NO: 121782 - DNA, 80 bp, synthetic construct
  source 1..80: mol_type = other DNA
cccttgcccgtgcggcttgggagactgcccgacacactccagtcaactcctggttggggaatatcatcatgttcgcgccc

SEQ ID NO: 121783 - DNA, 80 bp, synthetic construct
  source 1..80: mol_type = other DNA
tcctggttctgctcctgtttgcgggggtcgacgctgagacccacgtcggctcagcggtgtcccaaaacactgccggcctt

SEQ ID NO: 121784 - DNA, 80 bp, synthetic construct
  source 1..80: mol_type = other DNA
cttgggccagatggaaaggtcacttggtatgatgatgatttaaaaagaccatgcgagcctgggtataagttagagtgtaa

SEQ ID NO: 121785 - DNA, 80 bp, synthetic construct
  source 1..80: mol_type = other DNA
tcatacaatgggggatgcacatatttacttgaatcatatagatgctttaaaagtgcagctagctcgatccccaaaacctt

SEQ ID NO: 121786 - DNA, 80 bp, synthetic construct
  source 1..80: mol_type = other DNA
ggagccatcgtggtggagtactcgagctcagtgaagttgacatcaggtcacctgaaatgcaggctaaaaatggacaaact

SEQ ID NO: 121787 - DNA, 80 bp, synthetic construct
  source 1..80: mol_type = other DNA
gatcgacccgaacatcaggaccggtgtgagaaccatcactacaggcgcccccatcacgtactccacctacggcaagttcc

SEQ ID NO: 121788 - DNA, 80 bp, synthetic construct
  source 1..80: mol_type = other DNA
ggtcacgccaaacgtggccgtgagccagcccggcgccctcactagaggcttgcgggcacacattgatgttatcgtgatgt

SEQ ID NO: 121789 - DNA, 80 bp, synthetic construct
  source 1..80: mol_type = other DNA
gaaagccaggggactgaggaggacgagcggaacctgagagccttcacggaggccatgaccaggtactctgcccctcctgg

SEQ ID NO: 121790 - DNA, 80 bp, synthetic construct
  source 1..80: mol_type = other DNA
ggccaggactttaacctgcttttcgtcgacgaggccaactttattcgcccggatgcggtccagacgattatgggctttct

SEQ ID NO: 121791 - DNA, 80 bp, synthetic construct
  source 1..80: mol_type = other DNA
gattctggaaagcgaggacggaaagggtgacggtgccccgagagccgcacgtccagatctcagcacgagtggggcggaga

SEQ ID NO: 121792 - DNA, 80 bp, synthetic construct
  source 1..80: mol_type = other DNA
ccatccccgcagctcacctaaaagggggaagacacctcatcttctgtcactcaaagaagaaatgcgacgaactagcaagc

SEQ ID NO: 121793 - DNA, 80 bp, synthetic construct
  source 1..80: mol_type = other DNA
ataacgggtttttcataatttgacggcgagtttgataagggttgaacttgtatcgatttaaaaattggatccagatgttt

SEQ ID NO: 121794 - DNA, 80 bp, synthetic construct
  source 1..80: mol_type = other DNA
ccgtctctctggcgttagcagagctcgcccagaagacgttcccatcccccccagcttcatcgcagggggactcaggagcg

SEQ ID NO: 121795 - DNA, 80 bp, synthetic construct
  source 1..80: mol_type = other DNA
gtaagccagcgctcgttccagacaaggaggtgttgtatcaacaatacgatgagatggaggagtgctcgcaagccgcccca

SEQ ID NO: 121796 - DNA, 80 bp, synthetic construct
  source 1..80: mol_type = other DNA
tgggatcagcggattcgccggcaacgctggaggcgctctacgttcctccccgctacctggggcctacggaagggcgaaac

SEQ ID NO: 121797 - DNA, 80 bp, synthetic construct
  source 1..80: mol_type = other DNA
ccttaagaagtggaagggaaggaatcatcgagcaacagagcaacgtgaaccctttcgagtaatagaagagcaatggattc

SEQ ID NO: 121798 - DNA, 80 bp, synthetic construct
  source 1..80: mol_type = other DNA
caagttcttcctcacgacccccgtccccagtctgtgcgtcaccgccaccggtcccaacgcggtatcggcggtatttctcc

SEQ ID NO: 121799 - DNA, 80 bp, synthetic construct
  source 1..80: mol_type = other DNA
tttgttttccatagttgttggtttaggaggtattcttccttgtccttccaatactcttccacgggaaaaccgtctgcatt

SEQ ID NO: 121800 - DNA, 80 bp, synthetic construct
  source 1..80: mol_type = other DNA
cgaactcgaacacgttccccatcaactccaggttttagttgataccaaccaaaactaacaaagccgggattatccattag

SEQ ID NO: 121801 - DNA, 80 bp, synthetic construct
  source 1..80: mol_type = other DNA
acaaccatcatggcaaaaaacgaggtgttcgcagtggagccgtccaagggggggaagaagccggcacggctgatagtcta

SEQ ID NO: 121802 - DNA, 80 bp, synthetic construct
  source 1..80: mol_type = other DNA
cgtacagggtggggggggagggaaaggcagaacgaaaaggaaccgatgcgcccgcgtctctgtatccgatccgattcgtg

SEQ ID NO: 121803 - DNA, 80 bp, synthetic construct
  source 1..80: mol_type = other DNA
ggtcaggcagttgtcggccacggtctggtccagacagaagggcagcgagacgggagtggtcttcaccaggggcaccgaga

SEQ ID NO: 121804 - DNA, 80 bp, synthetic construct
  source 1..80: mol_type = other DNA
aggccaacgagcgccttggggagtttgcctacggaaagcggcataaggacatgttggcgttgccgctggacgagggcaac

SEQ ID NO: 121805 - DNA, 80 bp, synthetic construct
  source 1..80: mol_type = other DNA
gcttacgccagccagggatataaggtgctagtgttgaacccatctgttgctgccactctcagctttggtagcttcatgag

SEQ ID NO: 121806 - DNA, 80 bp, synthetic construct
  source 1..80: mol_type = other DNA
tgccaaccggttgatgcccaactacgtgttgcatccttccatcattccgacgccgggctaccgcggcacccggtattacg

SEQ ID NO: 121807 - DNA, 80 bp, synthetic construct
  source 1..80: mol_type = other DNA
tgctcggggggggcatatgacatcattatatgtgacgagtgccattctacggaccctactacggtcctaggaattggcac

SEQ ID NO: 121808 - DNA, 80 bp, synthetic construct
  source 1..80: mol_type = other DNA
catcaagtacgaggttggcatattcgtgcacggaaccaccacctcggaaaaccatgggaattactcagcgcaagtaggag

SEQ ID NO: 121809 - DNA, 80 bp, synthetic construct
  source 1..80: mol_type = other DNA
gaacgcacccccatcgcccccgcagaccgcgaacttcaccgagctggccgtctcctcgatctgcaggcagacggcggcca

SEQ ID NO: 121810 - DNA, 80 bp, synthetic construct
  source 1..80: mol_type = other DNA
tgtaaattttgcacacatgcttttcccatttagacaatatcatgtcccaccacattggccactcctgcaatactacaaaa

SEQ ID NO: 121811 - DNA, 80 bp, synthetic construct
  source 1..80: mol_type = other DNA
atgctcatccaaatctcgcctaacatcaccttcagtgtcgtctacaacgagataaacagtgggtatgcttttacgtttaa

SEQ ID NO: 121812 - DNA, 80 bp, synthetic construct
  source 1..80: mol_type = other DNA
ggtatgccacatttaccgcggatagcataaggaaatgcaatattacttaaaacgttgtgttttaagtgtatttgggtgtt

SEQ ID NO: 121813 - DNA, 80 bp, synthetic construct
  source 1..80: mol_type = other DNA
ttccatcgtcctttgcgaggcgtacgatactggttgtgcgtggtacgaactaacaccttcagagaccaccgtcagactac

SEQ ID NO: 121814 - DNA, 80 bp, synthetic construct
  source 1..80: mol_type = other DNA
ttcggtaaatgagacgatcgtgccgatgatgtatggccaacattacccaggtttggatatacaaattactttcctgattg

SEQ ID NO: 121815 - DNA, 80 bp, synthetic construct
  source 1..80: mol_type = other DNA
gtggacaccaccgatgccaccggccagacaccatcagacgagcccgctgactcggaaacgggatccgtgtcctccatgcc

SEQ ID NO: 121816 - DNA, 80 bp, synthetic construct
  source 1..80: mol_type = other DNA
ttcgataccattgtcctatgcgaggcgtatgatactggttgcgcgtggtacgagctaacaccatctgaaaccacagttcg

SEQ ID NO: 121817 - DNA, 80 bp, synthetic construct
  source 1..80: mol_type = other DNA
cccgcgcccgcccccgcgcggcaggacggggactagcaggctcactcactcggctacccaaagactcccgccgtcacggc

SEQ ID NO: 121818 - DNA, 80 bp, synthetic construct
  source 1..80: mol_type = other DNA
cgcagcggtctcccggcagctcctaagcgccattgactacattcaccgccagggcattatccaccgcgacattaagaccg

SEQ ID NO: 121819 - DNA, 80 bp, synthetic construct
  source 1..80: mol_type = other DNA
tcaaagaaaaaccaaaagaaacaccatccgtcgcccacaggacgtcaagttcccgggcggcggacagatcgtgggtggag

SEQ ID NO: 121820 - DNA, 80 bp, synthetic construct
  source 1..80: mol_type = other DNA
aatatgttggcattcttcctttgtctgcagcactcacagggcccaatgggaactcaggtcgggccagaaggttgttccaa

SEQ ID NO: 121821 - DNA, 80 bp, synthetic construct
  source 1..80: mol_type = other DNA
gaggcggacgaggcatgtgcaaacttatttcatacgcgtacagtggctttggtttatacgacagatactgatttactctt

SEQ ID NO: 121822 - DNA, 80 bp, synthetic construct
  source 1..80: mol_type = other DNA
gggtcgatggcgtgtgcgccccccggcgagaggggaatgtcggtggttggcgtgccggatgaggcctcagagagagccgg

SEQ ID NO: 121823 - DNA, 80 bp, synthetic construct
  source 1..80: mol_type = other DNA
aaccatcagatcatctgacattgttcccgtggtacctttacccgtgtaagtttttgtgtctagattacccataccgcctt

SEQ ID NO: 121824 - DNA, 80 bp, synthetic construct
  source 1..80: mol_type = other DNA
ggaagacggtttggtttgtgcctagtgtgaagatgggaaatgagatagccctctgtctgcagcgcgctggcaaaaaagtc

SEQ ID NO: 121825 - DNA, 80 bp, synthetic construct
  source 1..80: mol_type = other DNA
accttcacagctaagaaaaagcaagtaagagaagtcgccggaggaggaggaggcctgaggatcgcggcgaacgagccctt

SEQ ID NO: 121826 - DNA, 80 bp, synthetic construct
  source 1..80: mol_type = other DNA
accagtgtcgtgctgctctctcttcttgtagcttttagtgaggcaggaattattaacttaaatgtatcatggggaatcaa

SEQ ID NO: 121827 - DNA, 80 bp, synthetic construct
  source 1..80: mol_type = other DNA
ccccataaataccccgattatattttatttgatttagaatttggaacttatttacaccccctttcatctccttttgtcca

SEQ ID NO: 121828 - DNA, 80 bp, synthetic construct
  source 1..80: mol_type = other DNA
actagcgcgtgccgcttgggaaacggcgcgacacactccagttaacacatggttgggcaatatcatcatgtacgcgccta

SEQ ID NO: 121829 - DNA, 80 bp, synthetic construct
  source 1..80: mol_type = other DNA
gctaacctcctcatgggaggcgatgtgacccggattgagtccgactctaaggtgattgtcctcgattccctcgattccat

SEQ ID NO: 121830 - DNA, 80 bp, synthetic construct
  source 1..80: mol_type = other DNA
atgtggcctccgactgtggttgcttcatgctagtgaaaagcgtggctgtgattaagcataacatggtatgtggcaactgc

SEQ ID NO: 121831 - DNA, 80 bp, synthetic construct
  source 1..80: mol_type = other DNA
ccttccccgggagttcgacagcatcgcaagaagagtcgggaagaggtgactctctcccgagctctgacgcggtgctttct

SEQ ID NO: 121832 - DNA, 80 bp, synthetic construct
  source 1..80: mol_type = other DNA
ccggcaacagaaaattccctcgcaattcacactgagtaccgaggaagagcgtatcttgcgttacgtgcaacagtctgtca

SEQ ID NO: 121833 - DNA, 80 bp, synthetic construct
  source 1..80: mol_type = other DNA
ccgttgttgacggaatagtcgccacggatgtgcccgagttagaacgcacgactccaatcatgcagaagaaagtcggccag

SEQ ID NO: 121834 - DNA, 80 bp, synthetic construct
  source 1..80: mol_type = other DNA
cattcgcacaaagcagttcacccacattaaagcctggagaggtcggcggtcaatacccccacctcgtttaattgattcca

SEQ ID NO: 121835 - DNA, 80 bp, synthetic construct
  source 1..80: mol_type = other DNA
gagcccaccccctctgtctgccctccggactccgacgctgagtcctgttcttccatgcccccccttgagggagagcctgg

SEQ ID NO: 121836 - DNA, 80 bp, synthetic construct
  source 1..80: mol_type = other DNA
gcctgagactgatgcttcccgggcagtgactaccatactcagttccctcaccataactagcctcctccgcaagctccatg

SEQ ID NO: 121837 - DNA, 80 bp, synthetic construct
  source 1..80: mol_type = other DNA
tgggtcaattactgtcccacatcccaatattacggagtcagctctccctaccactggagagatacccttctatggaaagg

SEQ ID NO: 121838 - DNA, 80 bp, synthetic construct
  source 1..80: mol_type = other DNA
gcagcttgcctgagaaagaatgggaagaaagtgatacaactcagcaggaagacctttgattctgaatatatcaagactag

SEQ ID NO: 121839 - DNA, 80 bp, synthetic construct
  source 1..80: mol_type = other DNA
cacatcggagtgctggaccccggcgacaccaacggtggcagtcagatacgctggtgcaacgacggcttccgtacgcggac

SEQ ID NO: 121840 - DNA, 80 bp, synthetic construct
  source 1..80: mol_type = other DNA
atgctttagtggttttaggccatcggccatggtcattttttcaagggattgacgcagcaaatagagccgatcccagagct

SEQ ID NO: 121841 - DNA, 80 bp, synthetic construct
  source 1..80: mol_type = other DNA
gcccatcatacagcaggcgaatatatataaaatgcctacctctgacaaacacgctccccataaataacacttccttgggc

SEQ ID NO: 121842 - DNA, 80 bp, synthetic construct
  source 1..80: mol_type = other DNA
agagaagtcctctacaaagagttcgatgagatggaagagtgctctcagcacttaccgtacatcgagcaagggatgatgct

SEQ ID NO: 121843 - DNA, 80 bp, synthetic construct
  source 1..80: mol_type = other DNA
cacatctacccaagatatgccccaagtttctacctttgttaataattgggcaaacttgggcatgtggtggttttcaatag

SEQ ID NO: 121844 - DNA, 80 bp, synthetic construct
  source 1..80: mol_type = other DNA
ccgctcatgaccatgtaataattgagtaacttcaacatttatagtggcacaacacatacatacactcatgtattttttca

SEQ ID NO: 121845 - DNA, 80 bp, synthetic construct
  source 1..80: mol_type = other DNA
cacctggacctactcgtgggcactgctgccttctgctcggctatgtacgtaggcgatctgtgcggaggtgtcttcttggt

SEQ ID NO: 121846 - DNA, 80 bp, synthetic construct
  source 1..80: mol_type = other DNA
ttgtgggacaagcattcaccttcaggccacgccggcatttaacagagcaaacgtgtaactgttcaatctatccgggccat

SEQ ID NO: 121847 - DNA, 80 bp, synthetic construct
  source 1..80: mol_type = other DNA
tcagtcactttcatttcagaaccatgaaggctttcacagcttgcgttctgattagcctagtcacacttagttcagctgca

SEQ ID NO: 121848 - DNA, 80 bp, synthetic construct
  source 1..80: mol_type = other DNA
cccccgcgcaaacgtgataggtcttgggaacccgagtggcgacgcggggaaagcgcgcccccgcccggccgccgcgcgcc

SEQ ID NO: 121849 - DNA, 80 bp, synthetic construct
  source 1..80: mol_type = other DNA
ttcaaagagaaagtggacacgagaacccaagaaccgaaggaaggcacaaagaaactgatgagaattacggcagagtggct

SEQ ID NO: 121850 - DNA, 80 bp, synthetic construct
  source 1..80: mol_type = other DNA
gacccgcttcgagcggaggaagatgagagggaagtgtccgttccggcggagatcctgctgaaatccaggaaatttccccc

SEQ ID NO: 121851 - DNA, 80 bp, synthetic construct
  source 1..80: mol_type = other DNA
tacaactggaggtgctatcacctattccacatatggcaagttcctggcggacggcggctgctcggggggcgcatatgata

SEQ ID NO: 121852 - DNA, 80 bp, synthetic construct
  source 1..80: mol_type = other DNA
tgcacctccctggttgtgttccatgtgttaaacaggcaaacagatctacttgttggctacaagccacgcctaccctcgcg

SEQ ID NO: 121853 - DNA, 80 bp, synthetic construct
  source 1..80: mol_type = other DNA
tagcagcaccattagccgtgactcgtaccttggtcatctaatcacgctgtaccaggaggctattggccagacgcaggtgg

SEQ ID NO: 121854 - DNA, 80 bp, synthetic construct
  source 1..80: mol_type = other DNA
cttgggagagtgacgctgaaatcacaggctctagtgaaagagtagatgttaggctggatgatgatggaaattttcaattg

SEQ ID NO: 121855 - DNA, 80 bp, synthetic construct
  source 1..80: mol_type = other DNA
tcgtggttgatgggagaatcgttaacccaccatacgaaatgtacaacgccacgtggcacacattttgccgtacatactat

SEQ ID NO: 121856 - DNA, 80 bp, synthetic construct
  source 1..80: mol_type = other DNA
gccatttcatagtgggtgtgaccaaccaagacctcaaatgcccatgtcaagtaccggctccagagttctttacagaggtt

SEQ ID NO: 121857 - DNA, 80 bp, synthetic construct
  source 1..80: mol_type = other DNA
ctacgacagtgttgggtatcggtacggtcttggaccaagccgaaacagccggcgttcgtcttacggtgcttgcaaccgcg

SEQ ID NO: 121858 - DNA, 80 bp, synthetic construct
  source 1..80: mol_type = other DNA
tagctcagggaaccataagttcggcagatcttttaacgcagcaggcagcgcccaacagaccgaactacattggctttagg

SEQ ID NO: 121859 - DNA, 80 bp, synthetic construct
  source 1..80: mol_type = other DNA
acagcaacgctgcacttggagctatgtttgaagaacagaatcaatggaagagtgccagggaagcagtagaagacccaaag

SEQ ID NO: 121860 - DNA, 80 bp, synthetic construct
  source 1..80: mol_type = other DNA
agcatcgctaatggctttcactgccgctgtcaccagtccactaaccactagtcaaaccctcctcttcaatatcctggggg

SEQ ID NO: 121861 - DNA, 80 bp, synthetic construct
  source 1..80: mol_type = other DNA
aaccactccttttcccggatggtcttcacggcgagcttgtgttcgcgaatcaactgcacctcgccgtacccccccgagcc

SEQ ID NO: 121862 - DNA, 80 bp, synthetic construct
  source 1..80: mol_type = other DNA
ttggtggaacggtaatcaggaatcccctctctagaaattcaacccacgagatgtattatgtgtcgggagcccgcagtaac

SEQ ID NO: 121863 - DNA, 80 bp, synthetic construct
  source 1..80: mol_type = other DNA
catggaagctgtacgcatggggtagcagactagtggttagaggagacccctcccaagacacaacgcagcagcggggccca

SEQ ID NO: 121864 - DNA, 80 bp, synthetic construct
  source 1..80: mol_type = other DNA
tcggactttacggaaatggggtagtaaccaaatcaggtgattatgttagtgccataacacaagctgaaagaattggtgag

SEQ ID NO: 121865 - DNA, 80 bp, synthetic construct
  source 1..80: mol_type = other DNA
gcgggttaaaaaaaaggatgaggtggacgaggtggcagtagagtttgtgcgcgagttcgctccgcggcggcgcgtaaatt

SEQ ID NO: 121866 - DNA, 80 bp, synthetic construct
  source 1..80: mol_type = other DNA
ccccaggaggactgggttaacaaagcttaacagccccagcggcccaaaccatggagtgcgtgaccatggcgtaaggacta

SEQ ID NO: 121867 - DNA, 80 bp, synthetic construct
  source 1..80: mol_type = other DNA
cggatcctccgcccaactgcactctcagacaagaacttgatgcaaaactaactttgtgtttaacaaagaacgaatctatt

SEQ ID NO: 121868 - DNA, 80 bp, synthetic construct
  source 1..80: mol_type = other DNA
ggtggccgaaccacacctgcgacacggtcacgtctttgtagtacatggtggccttgaatttgtacggggcgatgttctcc

SEQ ID NO: 121869 - DNA, 80 bp, synthetic construct
  source 1..80: mol_type = other DNA
tcacgttgactgttgcctggagaacagccaccctgattttggccggagtttcacttttaccagtgtgccagtcttcgagc

SEQ ID NO: 121870 - DNA, 80 bp, synthetic construct
  source 1..80: mol_type = other DNA
ccttcctcgtgttcttctgctttgcgtggtatctgaagggtaggtgggtgcccggagcggcctacgccctctacgggatg

SEQ ID NO: 121871 - DNA, 80 bp, synthetic construct
  source 1..80: mol_type = other DNA
taacccccaggtgtcttgtggactatccgtacaggctgtggcactatccttgcaccattaattataccctacacagcgtc

SEQ ID NO: 121872 - DNA, 80 bp, synthetic construct
  source 1..80: mol_type = other DNA
tcaaggtgaggatgtttgtaggtgggtttgagcaccggttctccgccgcctgcaactggaccaggtgggagcgctgcaat

SEQ ID NO: 121873 - DNA, 80 bp, synthetic construct
  source 1..80: mol_type = other DNA
catcacttatgtcaacaacaccacccaggtcgcaaatgacagcgagcgccggccctattgctggcactatagtccacccc

SEQ ID NO: 121874 - DNA, 80 bp, synthetic construct
  source 1..80: mol_type = other DNA
tcaaaatcttcaaacattaagctgcaatcttgaataattcccaaataattttccgcttgccacccgcgcaacacatccat

SEQ ID NO: 121875 - DNA, 80 bp, synthetic construct
  source 1..80: mol_type = other DNA
atttcttaccatgaccggaggtggtgctttgacggcccacgcacgaacacggttctggaggagaacacggaagtagaaat

SEQ ID NO: 121876 - DNA, 80 bp, synthetic construct
  source 1..80: mol_type = other DNA
catatgcagctcaagggtacaaggtacttgtcttgaatccgtccgttgccgctaccctaggttttggggcgtatatgtcc

SEQ ID NO: 121877 - DNA, 80 bp, synthetic construct
  source 1..80: mol_type = other DNA
ggccccagtgatgacaagccctattgctggcactaccccccacgcccgtgcggaatagtgccagcccgaggtgtctgcgg

SEQ ID NO: 121878 - DNA, 80 bp, synthetic construct
  source 1..80: mol_type = other DNA
aagttgaatgcagaaactgaatctgcttattcaatgacatttgaatttacatgggcaaaaacatttgaaaatttgcagtt

SEQ ID NO: 121879 - DNA, 80 bp, synthetic construct
  source 1..80: mol_type = other DNA
ctgaagagttaaaagaacaaaacagcgataaactaataggagttggaattagtgtaagagcaagaggaggtttgacattt

SEQ ID NO: 121880 - DNA, 80 bp, synthetic construct
  source 1..80: mol_type = other DNA
tcaggaggggcctatgacatcatcatgtgtgacgagtgccactccactgattccacgagcatcttaggaataggcaccgt

SEQ ID NO: 121881 - DNA, 80 bp, synthetic construct
  source 1..80: mol_type = other DNA
gccaagtttggtctggtcgttcgagggacaggcccagacgaccgcgtggtcgccaactatgtacgaagcgaactccgaca

SEQ ID NO: 121882 - DNA, 80 bp, synthetic construct
  source 1..80: mol_type = other DNA
cgctcgcatttgcttggctctgtggctgatgttgctggttggccaggccgaagcggcgttagagaacctaatagtcctca

SEQ ID NO: 121883 - DNA, 80 bp, synthetic construct
  source 1..80: mol_type = other DNA
tgcctaacagtaggtagtgttgttatttgcggcaggatcgacacatcgggaaagcccgcagtggtgcctgatcgcgaggt

SEQ ID NO: 121884 - DNA, 80 bp, synthetic construct
  source 1..80: mol_type = other DNA
cccattggggaggacgaggtgtttctggacagcgtgtgtcttctaaacccgaacgtgagctccgagctggatgtgattaa

SEQ ID NO: 121885 - DNA, 80 bp, synthetic construct
  source 1..80: mol_type = other DNA
ggcgtgacgcaagataagatcaagtgtccatgccaggttcctgcccccgagttcttcactgaggtggatggtgttagact

SEQ ID NO: 121886 - DNA, 80 bp, synthetic construct
  source 1..80: mol_type = other DNA
tccatgtgctatatgttttgaagaattatgtataacagctaaccaaggtgagaccttacatcgtagattattaggatgta

SEQ ID NO: 121887 - DNA, 80 bp, synthetic construct
  source 1..80: mol_type = other DNA
tttcaacattacatccggagtttacaaagcagaagggtataaaaaagaggttagaacattttcatctagaaatcaaaaac

SEQ ID NO: 121888 - DNA, 80 bp, synthetic construct
  source 1..80: mol_type = other DNA
gaggccaagctccacagagctggtttcttgacagtctcaagcaacaccagcgccccagtggtagtacctgacaagggtat

SEQ ID NO: 121889 - DNA, 80 bp, synthetic construct
  source 1..80: mol_type = other DNA
cgacgccttaccatcccccggccaccccgaacaacatgggcctgatcgccggcgcggtgggcggcagtctcctggtagcc

SEQ ID NO: 121890 - DNA, 80 bp, synthetic construct
  source 1..80: mol_type = other DNA
aggatataaagtgctcgtgctcaacccatcggtggcagctacccttgggtttggggcgtacatgtccaaagcccacggga

SEQ ID NO: 121891 - DNA, 80 bp, synthetic construct
  source 1..80: mol_type = other DNA
atcaacatcatctagactgggggataccttgggaactcgcgcaattttacgcgtctgtgtgtttgatggaccctctactg

SEQ ID NO: 121892 - DNA, 80 bp, synthetic construct
  source 1..80: mol_type = other DNA
gagatgtgggttggcttgcatgaaagaagcccagagctcgcgggccataagggtctgaagctcgtcgcgaaagaggcgga

SEQ ID NO: 121893 - DNA, 80 bp, synthetic construct
  source 1..80: mol_type = other DNA
gctgcttactgcctaacagtgggcagcgttgtcatctgcgggaggatcaccacgactggcaggcctgcagtcatacctga

SEQ ID NO: 121894 - DNA, 80 bp, synthetic construct
  source 1..80: mol_type = other DNA
ccatagccaagtacatcatgacctgtatgtcagctgacttagaagtcatcactagcacgtggatcctggtaggaggggtc

SEQ ID NO: 121895 - DNA, 80 bp, synthetic construct
  source 1..80: mol_type = other DNA
tggaatctataaagccgaaggataccaaagagaaactagaacttcatattttaaaaatgaaagaaatacatttgaagata

SEQ ID NO: 121896 - DNA, 80 bp, synthetic construct
  source 1..80: mol_type = other DNA
gagatgagcccgctgctgttctcaacaactgagcttgccatcttgccatgctcgttttcgaccatgccagcattgtcaac

SEQ ID NO: 121897 - DNA, 80 bp, synthetic construct
  source 1..80: mol_type = other DNA
ggtcctgcgggtcgcccgggacccccacggcagtgccaaccgcctgcgccacctgatacgcgactgttacctgatgggat

SEQ ID NO: 121898 - DNA, 80 bp, synthetic construct
  source 1..80: mol_type = other DNA
catgctgccgccgcttctatacttgcttgcattgcaaaacagcttacaaccttagcattataatagcatgtcttgcaacg

SEQ ID NO: 121899 - DNA, 80 bp, synthetic construct
  source 1..80: mol_type = other DNA
gctacagcggccgcgaaggccgcaggcctccgaaacccggactttctcgtctgcggagatgatttggtcgtggtggctga

SEQ ID NO: 121900 - DNA, 80 bp, synthetic construct
  source 1..80: mol_type = other DNA
gcaatggacgtgggatacatgtgcgatgatactatcacttatgaatgcccagtgctgtcggctggtaatgacccagaaga

SEQ ID NO: 121901 - DNA, 80 bp, synthetic construct
  source 1..80: mol_type = other DNA
ccgtcttcctcgtcggccaactgtttaccttctcgccccgcgtgcaccagacaatgcaggactgcaattgttccatctac

SEQ ID NO: 121902 - DNA, 80 bp, synthetic construct
  source 1..80: mol_type = other DNA
cacaatgcaaaatgtgcagcaaaaactccgacatgtttgtctttaaaaactctaccacagaaatgtccatattatttaaa

SEQ ID NO: 121903 - DNA, 80 bp, synthetic construct
  source 1..80: mol_type = other DNA
gtccggcgccgccatacctggtattgtatccttagaggaggtacccagaatttttgaaggcttgggacgtgatgaaaaac

SEQ ID NO: 121904 - DNA, 80 bp, synthetic construct
  source 1..80: mol_type = other DNA
caaacagttcgccccagattatcttgaacagcgccaccgcgtggtccgtctcgctaacggacccgcgcgggggacagccg

SEQ ID NO: 121905 - DNA, 80 bp, synthetic construct
  source 1..80: mol_type = other DNA
aacaggaggtgagctcaactcccggaaatcaggtcaaaaaagcattttgctgattgtagtcgggctgctgggatttttta

SEQ ID NO: 121906 - DNA, 80 bp, synthetic construct
  source 1..80: mol_type = other DNA
ctaatgccgaaggtcagcccacagaggagttagacattgacctgaacttctttgatattaatggaggggcaggtgataat

SEQ ID NO: 121907 - DNA, 80 bp, synthetic construct
  source 1..80: mol_type = other DNA
tacaggctctggcactacccctgcacagtcaattacaccgtctttaaggtcaggatgttcttgggcggggttgagcacag

SEQ ID NO: 121908 - DNA, 80 bp, synthetic construct
  source 1..80: mol_type = other DNA
gagatccccttctacggcaaggctatcccccttgaggcaatcaagggggggaggcatctcatcttttgccactcaaagaa

SEQ ID NO: 121909 - DNA, 80 bp, synthetic construct
  source 1..80: mol_type = other DNA
tctacttggctgcattatcactagcctcacaggccgggacaagaaccaggtcgagggggaggtccaagtggtctccaccg

SEQ ID NO: 121910 - DNA, 80 bp, synthetic construct
  source 1..80: mol_type = other DNA
cacccctagagggggagccgggtgatccagacttgtctgatggctcttggtcaacagtcagcaccagatctgacgtgatt

SEQ ID NO: 121911 - DNA, 80 bp, synthetic construct
  source 1..80: mol_type = other DNA
tggcacctcgtggatgaagagagagaaaggcaccttatggggagatgcgcgcactgcgtgtacaacatgatgggcaagag

SEQ ID NO: 121912 - DNA, 80 bp, synthetic construct
  source 1..80: mol_type = other DNA
cccagtcggcgtcatccaggatggttccacaacccaccgcaatgaaccccaacaatgggtactcccaaattactcaggta

SEQ ID NO: 121913 - DNA, 80 bp, synthetic construct
  source 1..80: mol_type = other DNA
cgagctggaagccctgagccgccagctggccgccctgacccagcaggtgtccgagctccgcgagcaacagcagcagcaaa

SEQ ID NO: 121914 - DNA, 80 bp, synthetic construct
  source 1..80: mol_type = other DNA
acaacatggccggcaagggctggaggctacttgcgcccatcacggcttacgcacagcagacgcggggccttcttgggtgt

SEQ ID NO: 121915 - DNA, 80 bp, synthetic construct
  source 1..80: mol_type = other DNA
gggtccctcgctgtgcgtctggaggatgagtttggggagtttgactggaccccccaggagggctcccagccctggctgtc

SEQ ID NO: 121916 - DNA, 80 bp, synthetic construct
  source 1..80: mol_type = other DNA
cgcgggcgccgcgcagcaacaaaagccttcagatgtttgtgttgtgcaaacgcgcccacgccgctcgagtgcgagagcag

SEQ ID NO: 121917 - DNA, 80 bp, synthetic construct
  source 1..80: mol_type = other DNA
gagtcgagtcagagaacaaagttgtagtgcttgactcctttgagcctctaaccgctgagtatgacgagagggaaatctca

SEQ ID NO: 121918 - DNA, 80 bp, synthetic construct
  source 1..80: mol_type = other DNA
agattctattgataggagtgagtgtcacagccctgctggtcaacccacgcgtgaccaccgtcagagaagctggcgttctt

SEQ ID NO: 121919 - DNA, 80 bp, synthetic construct
  source 1..80: mol_type = other DNA
gagtcagatgcgtcgcagcgggtcacccagctgcttggctcccttacaataaccagcctgctcaggagactacaccaatg

SEQ ID NO: 121920 - DNA, 80 bp, synthetic construct
  source 1..80: mol_type = other DNA
taccatggatggggagttccgattacgaggagaagagaggaagacgttcttggaactgcttcgaacggctgacctcccag

SEQ ID NO: 121921 - DNA, 80 bp, synthetic construct
  source 1..80: mol_type = other DNA
tggctccagtccaagctcctgccgcagctaccgggagtcccttttttctcatgtcaacgagggtataagggaatctggcg

SEQ ID NO: 121922 - DNA, 80 bp, synthetic construct
  source 1..80: mol_type = other DNA
ttgtaaaataaaatctctgtttagaccttaaaatttgttgtgtgtgttgtgtggggggtccgtgaggatcgacctttaca

SEQ ID NO: 121923 - DNA, 80 bp, synthetic construct
  source 1..80: mol_type = other DNA
atacaattgaagattctggagattatgaacaacaaaaaatatatctatataatctaacaataattgaaccgccaactact

SEQ ID NO: 121924 - DNA, 80 bp, synthetic construct
  source 1..80: mol_type = other DNA
gcaagggccgtctccagggcaagggtcaccgccttggcgttggttcccagcgcctgctcggcccgctttcggaagtcccg

SEQ ID NO: 121925 - DNA, 80 bp, synthetic construct
  source 1..80: mol_type = other DNA
tacctgggcgcagcctgggtacccttggcccctttatggtaatgagggctgtgggtgcgcagggtggctcctgtctcccc

SEQ ID NO: 121926 - DNA, 80 bp, synthetic construct
  source 1..80: mol_type = other DNA
agggtgcttggcgaggcgatggagtcatgtccacgcgctgcccttgcggagccctcatctctggccacgtaaagaacggg

SEQ ID NO: 121927 - DNA, 80 bp, synthetic construct
  source 1..80: mol_type = other DNA
ggtcgagctggacgccgacgcggcctccggcgccttctacgcgcgctatcgcgacgggtacgtcagcggggagccgtggc

SEQ ID NO: 121928 - DNA, 80 bp, synthetic construct
  source 1..80: mol_type = other DNA
cccaccccattccgcacgatcaaagttcggttttggggcgaaagaagttcgcagcttatctaggagggccgttaaccaca

SEQ ID NO: 121929 - DNA, 80 bp, synthetic construct
  source 1..80: mol_type = other DNA
gcaccagccggtgggcgtccagggccgcgagggttctgtccttccagggtctcagtgttcgggtgagtgtggtctcggtg

SEQ ID NO: 121930 - DNA, 80 bp, synthetic construct
  source 1..80: mol_type = other DNA
gccgcagtgctcgttaccgtggagcttgagtgcatgcagcggttctttgctgacccggagatgcagcgcaagctagagga

SEQ ID NO: 121931 - DNA, 80 bp, synthetic construct
  source 1..80: mol_type = other DNA
acctgcccttctgtcaccaggggcattagttgtggaggtcgtttgtgctgcggtccttcggcgccatgtgggccctagtg

SEQ ID NO: 121932 - DNA, 80 bp, synthetic construct
  source 1..80: mol_type = other DNA
gtcagaggagaggcaggacaggcagggggaagcatggggagtatagatacgtctcgcaaggagaacggccatctggtatc

SEQ ID NO: 121933 - DNA, 80 bp, synthetic construct
  source 1..80: mol_type = other DNA
aatcaaacaccaattcctacaaccatcatggccaagaatgaggtcttctgcgttgatgtgtcgaaggggggtcgtaagcc

SEQ ID NO: 121934 - DNA, 80 bp, synthetic construct
  source 1..80: mol_type = other DNA
cagataggaacagatacaacaaatcagcctatttatgccgacaaaacctatcaaccagagcctcaagtgggtcaaacaca

SEQ ID NO: 121935 - DNA, 80 bp, synthetic construct
  source 1..80: mol_type = other DNA
cgacgagaagcgcgcggcaaacgctctgcaacaagaaaacagcgaaaatgaaagtcactgtggagtgctggtggaacttg

SEQ ID NO: 121936 - DNA, 80 bp, synthetic construct
  source 1..80: mol_type = other DNA
gccgggaagctcacctcattggggctgactgccgttgcttactataggtggttggatgtttcggtgatcccaacgtctgg

SEQ ID NO: 121937 - DNA, 80 bp, synthetic construct
  source 1..80: mol_type = other DNA
gaacggtcctcgaccaggctgagactgcgggtgccaggttagtggttctagccacagccacgcctcccggtacggtgaca

SEQ ID NO: 121938 - DNA, 80 bp, synthetic construct
  source 1..80: mol_type = other DNA
aataagtctgatgtgttcctgttgacgtctttgaggccccccctcggcgggtggtacggctgcacgtggatgaactctac

SEQ ID NO: 121939 - DNA, 80 bp, synthetic construct
  source 1..80: mol_type = other DNA
cacttacttgaaatctgaaagtatgtctctggtgtagttgtttagcagcacctcggtaccctcctcccagctctggtact

SEQ ID NO: 121940 - DNA, 80 bp, synthetic construct
  source 1..80: mol_type = other DNA
gcgtcgcagtgctggcttcctgtttcaccgacgttggcagtcccgaatggttcggtgccggtacacgggttccgcaggca

SEQ ID NO: 121941 - DNA, 80 bp, synthetic construct
  source 1..80: mol_type = other DNA
gcataacaggccaacacctccccagaaagccgctgtaagggtgagtcaaatactacaccctccccacatacaacggtcgg

SEQ ID NO: 121942 - DNA, 80 bp, synthetic construct
  source 1..80: mol_type = other DNA
tcctacgcaatggggtctcaactcccgtgtgagcccgagccggacgtcatggtcgtcacatccatgctaactgacccatc

SEQ ID NO: 121943 - DNA, 80 bp, synthetic construct
  source 1..80: mol_type = other DNA
agtgaaattggacaaggaaatctctctgccatggaaattaacctccaagctaatctctggagaagttttctttattccaa

SEQ ID NO: 121944 - DNA, 80 bp, synthetic construct
  source 1..80: mol_type = other DNA
cagtgccattgcccaagctaaagcatcacaagaagggcctctaccagagattgaggacgaggtgtttaagaaaagaaact

SEQ ID NO: 121945 - DNA, 80 bp, synthetic construct
  source 1..80: mol_type = other DNA
acccactctcaagaaattctacccatgaaatgtattgggtttcatgtggaacgggaaacattgtgtcggcagtgaacatg

SEQ ID NO: 121946 - DNA, 80 bp, synthetic construct
  source 1..80: mol_type = other DNA
ggctgcgtgtcaaaggctagcaaatgaatgacggttccgtttggaaatagcaacaaggccgtggacggcacgtcgctcga

SEQ ID NO: 121947 - DNA, 80 bp, synthetic construct
  source 1..80: mol_type = other DNA
ccagcggatgactacaggtccatggggtggcgcctactagctccaatctcagttcatgcccaacagacacgcggccttgt

SEQ ID NO: 121948 - DNA, 80 bp, synthetic construct
  source 1..80: mol_type = other DNA
accaattgtcggattggaaaaataatccacagcaaaaccaaacgttaaaccaagcgttcaataaaccaatacttgagatt

SEQ ID NO: 121949 - DNA, 80 bp, synthetic construct
  source 1..80: mol_type = other DNA
gcccgggcccacgggcgccgtcccaaccgcacagtcccaggtaacctccacgcccaactcggaacccgcggtcaggagcg

SEQ ID NO: 121950 - DNA, 80 bp, synthetic construct
  source 1..80: mol_type = other DNA
atactccttacctgtctgttgcacccctcgctcgggtttgatgtcaccaaagtgctgttagccctccttggcccgctcta

SEQ ID NO: 121951 - DNA, 80 bp, synthetic construct
  source 1..80: mol_type = other DNA
agaagaattggaaaagtggaagaagagcagcacagacaccgtcgccgcaccatccgcgccgcagcccggcggtcacggat

SEQ ID NO: 121952 - DNA, 80 bp, synthetic construct
  source 1..80: mol_type = other DNA
cgaggaggcaacagaggatgtggtgtgctgctcaatgtcctactcgtggactggcgctcttataacaccatgcgctgcgg

SEQ ID NO: 121953 - DNA, 80 bp, synthetic construct
  source 1..80: mol_type = other DNA
gcgcctgcttatagcttcaactgccttggtatgagcaacagagacttccttgagggagtctctggtgctacctgggttga

SEQ ID NO: 121954 - DNA, 80 bp, synthetic construct
  source 1..80: mol_type = other DNA
cggcaggagacgtcgtagtgtgcgccaccgacgcacttatgactgggtatacaggggattttgactctgtaatagactgc

SEQ ID NO: 121955 - DNA, 80 bp, synthetic construct
  source 1..80: mol_type = other DNA
ccctgccgggcaatcccgctgttgcgtccatgatgtcattcactgctgccctgaccagtcctctgtccacatctacgacc

SEQ ID NO: 121956 - DNA, 80 bp, synthetic construct
  source 1..80: mol_type = other DNA
tcaatgcttccgtccaatccctacaaaacacgaatataacattgctctatttcgtttaatttgggaacaattatttggcg

SEQ ID NO: 121957 - DNA, 80 bp, synthetic construct
  source 1..80: mol_type = other DNA
atcccggaaaattttggaatacaaccattgctgtgtcaacggccaacatatttaggggtagctaccttgccggagctgga

SEQ ID NO: 121958 - DNA, 80 bp, synthetic construct
  source 1..80: mol_type = other DNA
atagggcccgagcagtcagagccaagttaattgctcaaggggggaaagccgctatatgcggaaagtacctcttcaattgg

SEQ ID NO: 121959 - DNA, 80 bp, synthetic construct
  source 1..80: mol_type = other DNA
gccacggccacgccccccggtacggtgacaactccccatagcaacatagaggaggtggccctcggtcatgagggcgagat

SEQ ID NO: 121960 - DNA, 80 bp, synthetic construct
  source 1..80: mol_type = other DNA
tggttatgttctcaggagtggatgcggtaacacgcatcactggcggtaccgaggctcgctttgcttccagttttacgagc

SEQ ID NO: 121961 - DNA, 80 bp, synthetic construct
  source 1..80: mol_type = other DNA
tcagcgggattcagtacttggcgggcttatccactctgcccggcaacccagctgtggcatcattgatgtcatttacagcg

SEQ ID NO: 121962 - DNA, 80 bp, synthetic construct
  source 1..80: mol_type = other DNA
attcctcttgctcgccgacgctcgagtttgcgcctgcctctggatgatgctgctaatatcgcaagcggaggcggctttag

SEQ ID NO: 121963 - DNA, 80 bp, synthetic construct
  source 1..80: mol_type = other DNA
taggagtcagcaatagggactttgtggaaggtatgtcaggtgggacttgggttgatgttgtcttggaacatggaggttgt

SEQ ID NO: 121964 - DNA, 80 bp, synthetic construct
  source 1..80: mol_type = other DNA
cagcgcagctcttcgtcagaagaaggtgacctttgacaggaaccaggtactcgaccaacattaccatgatgttgtcaagg

SEQ ID NO: 121965 - DNA, 80 bp, synthetic construct
  source 1..80: mol_type = other DNA
ttctgcagcctgtcgagctgcgaagctccgggactgcacgatgcttgtgtgcggagacgacctcgtcgttatctgtgaga

SEQ ID NO: 121966 - DNA, 80 bp, synthetic construct
  source 1..80: mol_type = other DNA
ggaagagcggagagaaacagaccacgcggacatggggggtgtttggaggtttattggcaccggaggctacagagtggtaa

SEQ ID NO: 121967 - DNA, 80 bp, synthetic construct
  source 1..80: mol_type = other DNA
cgagcagaccttccaggagatcacgagcgtgagccgcgcgctggggcagaacgacaccgacagtctgagggccaccctga

SEQ ID NO: 121968 - DNA, 80 bp, synthetic construct
  source 1..80: mol_type = other DNA
gtccgcgctaggctaatctcccagggggggggggctgccatatgtggcaagtacctcttcaactggtcggtgaaaaccaa

SEQ ID NO: 121969 - DNA, 80 bp, synthetic construct
  source 1..80: mol_type = other DNA
taaatgccactgacgtcacagacgtcatcacgattccaacagctgctggaaagaatctatgcattgtcagagcaatggac

SEQ ID NO: 121970 - DNA, 80 bp, synthetic construct
  source 1..80: mol_type = other DNA
ggaaaagtttgagatgggttggaaagcatgggggaagagcattctctttgcaccagaactagccaattcaacatttgtga

SEQ ID NO: 121971 - DNA, 80 bp, synthetic construct
  source 1..80: mol_type = other DNA
tcggcacccctctccgtgcaaaacaactctctctccttattcattacttctcctttaaaagttattaattctatgttagc

SEQ ID NO: 121972 - DNA, 80 bp, synthetic construct
  source 1..80: mol_type = other DNA
aatgcgggtaaaatgtatgtacaacacattcctgggttttatgacgtgtccttacgtgctgtgggccaaggaacggccat

SEQ ID NO: 121973 - DNA, 80 bp, synthetic construct
  source 1..80: mol_type = other DNA
tcctacatcgtagttggaaggggagacaagcagatcaaccaccattggcacaaagctggaagcacgctgggcaaggcctt

SEQ ID NO: 121974 - DNA, 80 bp, synthetic construct
  source 1..80: mol_type = other DNA
cccctaaccaccaaccagaccatgttctttaacatactgggtggctgggttgccacccacttggcgggacccacagcgtc

SEQ ID NO: 121975 - DNA, 80 bp, synthetic construct
  source 1..80: mol_type = other DNA
ttttacatgaacaaggaggaggtcgacaggcacctacaatgccgcgccccacgagatctctgcgagcgcatggccgcggc

SEQ ID NO: 121976 - DNA, 80 bp, synthetic construct
  source 1..80: mol_type = other DNA
aggcggtatctgctctttcacgatggagtggcaattcctaggaatgttctccattactaccgtcatctctacagcccctt

SEQ ID NO: 121977 - DNA, 80 bp, synthetic construct
  source 1..80: mol_type = other DNA
ctgatccgacgacactgcggtgccccaccgattgcttcaggaaacatccggaggctacctacgggaagtgcggatcaggg

SEQ ID NO: 121978 - DNA, 80 bp, synthetic construct
  source 1..80: mol_type = other DNA
caccgtgagcgctagactcctcaccactgaggaggcgtgtgatctcacccccccgcactcggcccgttctaagttcgggt

SEQ ID NO: 121979 - DNA, 80 bp, synthetic construct
  source 1..80: mol_type = other DNA
atgattaaatgagacatgattcctcgagttttcatattattgacccttattgcgcttttctgcgcgtgctccacattggc

SEQ ID NO: 121980 - DNA, 80 bp, synthetic construct
  source 1..80: mol_type = other DNA
aaataatacccccggtgatatattgtttgatttacaattgggaccacatctaaatccttccttagcacatttgtcccaga

SEQ ID NO: 121981 - DNA, 80 bp, synthetic construct
  source 1..80: mol_type = other DNA
ggacaacatcaacacaccagaagggattataccagctctctttgaaccagaaagggagaagtcagccgccatagacggtg

SEQ ID NO: 121982 - DNA, 80 bp, synthetic construct
  source 1..80: mol_type = other DNA
cgtagtctggagaagcatcgccagggttgagtcgcggcgagcgggacttggtcaccccgccgatttaaagacccacagcc

SEQ ID NO: 121983 - DNA, 80 bp, synthetic construct
  source 1..80: mol_type = other DNA
tagcctgtggaggtttctgcctcttggccatagactctggcttcgagcttctgggggtaggcgtggtggttctgagggag

SEQ ID NO: 121984 - DNA, 80 bp, synthetic construct
  source 1..80: mol_type = other DNA
tctccttctcgtttccggacgggtcgcgcagtaccatcgtgtttgcctccagccacaacacaaacgtaagtcctcttttc

SEQ ID NO: 121985 - DNA, 80 bp, synthetic construct
  source 1..80: mol_type = other DNA
tactcgcccaagcaacgcgtagactacctccttagcttgtggcgttccaagaagacaccaatgggattttcctatgacac

SEQ ID NO: 121986 - DNA, 80 bp, synthetic construct
  source 1..80: mol_type = other DNA
gccctattaccaatgaggtcaccctcacacaccctgggacgaagtacatcgccacatgcatgcaagctgaccttgaggtc

SEQ ID NO: 121987 - DNA, 80 bp, synthetic construct
  source 1..80: mol_type = other DNA
gacaatgacggctacttagtagcttggaatccaaagtatgatacacgcacactttggacaactccagacacatctcctaa

SEQ ID NO: 121988 - DNA, 80 bp, synthetic construct
  source 1..80: mol_type = other DNA
ctagtgatcgtaccaattgaaaaggatgagagcaacagaagttacaacctgatcaaggacacccatgacaccctgtaccg

SEQ ID NO: 121989 - DNA, 80 bp, synthetic construct
  source 1..80: mol_type = other DNA
gttcgtagcgggtggtcgcggggtggacatatttcacagcgtgtcccgggcccgaccccgcatgttactcctgtgcctac

SEQ ID NO: 121990 - DNA, 80 bp, synthetic construct
  source 1..80: mol_type = other DNA
ccgccgaaatatggcgctgctgcgggtggccatgggaacgcggagacaggcctccagcaacgccaggtaaataaaccgcg

SEQ ID NO: 121991 - DNA, 80 bp, synthetic construct
  source 1..80: mol_type = other DNA
tgttcagcagcacctcggtcccctcctcccagctctggtactccagtccccggcgggcggcgaacttcctccacaccttg

SEQ ID NO: 121992 - DNA, 80 bp, synthetic construct
  source 1..80: mol_type = other DNA
gggcggtagggactccatcatcttacttacctgcttgttacatccacagctggggtttgaggtcaccaaaattctactag

SEQ ID NO: 121993 - DNA, 80 bp, synthetic construct
  source 1..80: mol_type = other DNA
ggcgcccaggccgctctcgttccagacgcggctgtacaccacgtccccgtcaacgtcgcgcgcgcgcatgaccacctgcg

SEQ ID NO: 121994 - DNA, 80 bp, synthetic construct
  source 1..80: mol_type = other DNA
ccttctaaggggtaaatccaccccacaagctgcattttcttcaaactttgttaaagcggaacgatggcatgatttcgcac

SEQ ID NO: 121995 - DNA, 80 bp, synthetic construct
  source 1..80: mol_type = other DNA
gcggcaaagaccttccggtcctggaccagctgaccgaccctccggtggtccggcgcgtgtaccacatccaggcgggccta

SEQ ID NO: 121996 - DNA, 80 bp, synthetic construct
  source 1..80: mol_type = other DNA
atgagatccttttgaatcaatgattccgcactctcagaggcccatacagctcatgtcactcttgggtgaagcagcactgc

SEQ ID NO: 121997 - DNA, 80 bp, synthetic construct
  source 1..80: mol_type = other DNA
gaggcggctcttgagaatctcataatcctcaatgccgcgtcagccgccagcaaccagggctgggtatggtgtttgctgtt

SEQ ID NO: 121998 - DNA, 80 bp, synthetic construct
  source 1..80: mol_type = other DNA
tgccactggctgtcatgggcgatgcctatggtttccagtattcacctcagcagcgggtggatcgcctgctccgaatgtgg

SEQ ID NO: 121999 - DNA, 80 bp, synthetic construct
  source 1..80: mol_type = other DNA
ggggtggctccggacccgccgggagaggtggcaggagctggtgctgcgcgcgtaggttgctggcgaacgcgacgacgcgg

SEQ ID NO: 122000 - DNA, 80 bp, synthetic construct
  source 1..80: mol_type = other DNA
ggtggccttaaataggggaatgttctgattagtgcgggaactgatcttggggtctataatccacacagtttcctggcgag

SEQ ID NO: 122001 - DNA, 80 bp, synthetic construct
  source 1..80: mol_type = other DNA
gcccccccctcgtaagaagagggcggtccggcttgatgagtcgaacgtatctgcggcgctccaagcgctcgcggagaagt

SEQ ID NO: 122002 - DNA, 80 bp, synthetic construct
  source 1..80: mol_type = other DNA
agcacctacagaatcgcgtccttgttcacagctggctcggctcagaaaatccaacttataaacaccaatggcaggtggca

SEQ ID NO: 122003 - DNA, 80 bp, synthetic construct
  source 1..80: mol_type = other DNA
aaacatctacagcgacaaagcactatcgttcgcgacgccatatctgatcgctcttcaataccagtttcaattgcagaact

SEQ ID NO: 122004 - DNA, 80 bp, synthetic construct
  source 1..80: mol_type = other DNA
acagtctgtgctagggctaaagccccgcccccctcgtgggatacaatgtggaagtgccttatacgcctcaagcctatgct

SEQ ID NO: 122005 - DNA, 80 bp, synthetic construct
  source 1..80: mol_type = other DNA
tcccctattgaggccggcacgcagactattaactttgatgaacggtctcgttggggtgtggatttgaaaacaatactgca

SEQ ID NO: 122006 - DNA, 80 bp, synthetic construct
  source 1..80: mol_type = other DNA
gggagatttctgttccagctgagattctgcggaaatctaagaagtttcccgccgccatgcccatatgggcacggccagat

SEQ ID NO: 122007 - DNA, 80 bp, synthetic construct
  source 1..80: mol_type = other DNA
ctcactccattagctgacgcctatcggctggacttgtccagctggtttaccgttggcgccggcgggggggacatttatca

SEQ ID NO: 122008 - DNA, 80 bp, synthetic construct
  source 1..80: mol_type = other DNA
tgagactgccggggttcgccttactgtgctcgcaacagcgacgccaccgggttctgtcactgtcccccatcctaacataa

SEQ ID NO: 122009 - DNA, 80 bp, synthetic construct
  source 1..80: mol_type = other DNA
ggtggaacttggtgaaactacatactggagtggatgtgttttacaaacctccagagcaggttgacacactgctttgtgac

SEQ ID NO: 122010 - DNA, 80 bp, synthetic construct
  source 1..80: mol_type = other DNA
gcgtgcccatccctgcgccgaattacaacaaggcgctatggagggtgagcgctgaagaatacgtcgaagtcgtccgggtg

SEQ ID NO: 122011 - DNA, 80 bp, synthetic construct
  source 1..80: mol_type = other DNA
gtaaggctataccgatagccctgcttaagggggggaggcaccttgtcttttgccattccaaaaagaaatgtgatgagata

SEQ ID NO: 122012 - DNA, 80 bp, synthetic construct
  source 1..80: mol_type = other DNA
aacatagaaaaccgggataaaaactacgggcggagaaccggactccccacttgagaaatgtaaataagaaaccgggataa

SEQ ID NO: 122013 - DNA, 80 bp, synthetic construct
  source 1..80: mol_type = other DNA
taagaatagaagctataatgtgttggaagataaaatcaacacagcctatcgcagttggtacctttcgtacaattatggcg

SEQ ID NO: 122014 - DNA, 80 bp, synthetic construct
  source 1..80: mol_type = other DNA
cacctgctatctcaaggcaactgcagcttgtagagctgcgaagctccaagactgcaccatgctggtgtgtggcgacgacc

SEQ ID NO: 122015 - DNA, 80 bp, synthetic construct
  source 1..80: mol_type = other DNA
cagctcgcatagcttcagttgaacagaagattcgtgatatacaatccaaggttgaggaacaaacaagtattcaacagatt

SEQ ID NO: 122016 - DNA, 80 bp, synthetic construct
  source 1..80: mol_type = other DNA
ggattctgcggtgggcaccagtagccaacccgactcagggcctgaggagaagcgtgatgatgactcggacgcggcttcat

SEQ ID NO: 122017 - DNA, 80 bp, synthetic construct
  source 1..80: mol_type = other DNA
aattgcccatctctccactgagcaatagtctcatacgccaccacaatctggtgtactctaccaccacacgcagcgcttgc

SEQ ID NO: 122018 - DNA, 80 bp, synthetic construct
  source 1..80: mol_type = other DNA
cttgggcaatacactcacctgttttttaaaagcccaagctgcctgtcgggcagctaagcttaaagactatgacatgctgg

SEQ ID NO: 122019 - DNA, 80 bp, synthetic construct
  source 1..80: mol_type = other DNA
tcacccggcccgggtgcggtgggaacgcgagggaatggagggttaatagacaatgaccacattcggatcgcgtagagcag

SEQ ID NO: 122020 - DNA, 80 bp, synthetic construct
  source 1..80: mol_type = other DNA
tcgacacgaagccccgcgccggcatgatataccgcccccccatggcgtgtagtctttataaataaatacaatggtttggc

SEQ ID NO: 122021 - DNA, 80 bp, synthetic construct
  source 1..80: mol_type = other DNA
cttcacatccacagcatgcccccgaaagccgccaaacaggccattgctctacaacgttcaaagaaacagcagcaacagca

SEQ ID NO: 122022 - DNA, 80 bp, synthetic construct
  source 1..80: mol_type = other DNA
gccatccggcatgtttgacacctcagtgctctgtgagtgctatgatgccgggtgtgcttggtatgaactgacaccggctg

SEQ ID NO: 122023 - DNA, 80 bp, synthetic construct
  source 1..80: mol_type = other DNA
tcccatcacggcctatgcgcagcaaacgcggggtctcctgggatgcatcatcaccagcctcacgggccgagacaaaaacc

SEQ ID NO: 122024 - DNA, 80 bp, synthetic construct
  source 1..80: mol_type = other DNA
ttcactggattgactcacatagacgcccactttctgtcacagactaagcaacagggacttaacttctcgttcctaactgc

SEQ ID NO: 122025 - DNA, 80 bp, synthetic construct
  source 1..80: mol_type = other DNA
catcaataggacggccctcaattgcaatgacagcctcaacaccgggtttatcgcagcgctggtctacgcccataagttta

SEQ ID NO: 122026 - DNA, 80 bp, synthetic construct
  source 1..80: mol_type = other DNA
acgaggacagcgaaaactgttcatcgagcggcagttcgccgtcctccccgccacacgcggcctcgtctaccagctcgcga

SEQ ID NO: 122027 - DNA, 80 bp, synthetic construct
  source 1..80: mol_type = other DNA
gctggaagacaacactacacctataccaaccactatcatggcaaagaacgaggtctttgctgtagccccccataagggag

SEQ ID NO: 122028 - DNA, 80 bp, synthetic construct
  source 1..80: mol_type = other DNA
tatcatgcttcagtcactgacatctcgacggtggctcggtgccccacgactggagaagcctacaacgagaagcgagctga

SEQ ID NO: 122029 - DNA, 80 bp, synthetic construct
  source 1..80: mol_type = other DNA
gcctttggccaacctcccccaagcggtgactcgggccattccacaggggtggatactaccaattccgctaaccagacaac

SEQ ID NO: 122030 - DNA, 80 bp, synthetic construct
  source 1..80: mol_type = other DNA
ccattccgccgtatgccccagctgcctgcccgccaggcccgccaccgcccccatgtccttccacccagacgcgcgcccct

SEQ ID NO: 122031 - DNA, 80 bp, synthetic construct
  source 1..80: mol_type = other DNA
tgtgccgcctcgtacgacgcgcgcgacgccgccgatgcggtacgggcccacgtcacggccaactaccgcgggacgcgggt

SEQ ID NO: 122032 - DNA, 80 bp, synthetic construct
  source 1..80: mol_type = other DNA
ggggatcggagtcgatacttctccatgtggaaccaggcagtggacagctatgacccagacgtgagaattattgaaaatca

SEQ ID NO: 122033 - DNA, 80 bp, synthetic construct
  source 1..80: mol_type = other DNA
attttagcggtacggttttcctggccaataccaaccttatcctacacggtgtaagcttctatgggtttaacaatacctgt

SEQ ID NO: 122034 - DNA, 80 bp, synthetic construct
  source 1..80: mol_type = other DNA
gcggcaggagatgggcggggacatcacccgcgtggagtcaaagaataaggtagtaatcctggactcttttgacccgctcc

SEQ ID NO: 122035 - DNA, 80 bp, synthetic construct
  source 1..80: mol_type = other DNA
tccacggagacggcgggctatagccctggaccagagtactgtaggggaggcccttaaggaactggccataaaaagctttg

SEQ ID NO: 122036 - DNA, 80 bp, synthetic construct
  source 1..80: mol_type = other DNA
tctgccccgtgaggcgggcgcagtcctgtacgctctagatggaaaaaagacagggcggtcatcgactcccttccgtagct

SEQ ID NO: 122037 - DNA, 80 bp, synthetic construct
  source 1..80: mol_type = other DNA
cccgtctactgctttacaccaagccctgtggtgctaggcaccaccgacaagcaaggcaaccctacctacacctgggggga

SEQ ID NO: 122038 - DNA, 80 bp, synthetic construct
  source 1..80: mol_type = other DNA
gatccaagaatgggtacctcccttgcaagcaggggggggccgtgatggcatcatatgggctgctgccatgctctatccgt

SEQ ID NO: 122039 - DNA, 80 bp, synthetic construct
  source 1..80: mol_type = other DNA
gaaggggatccgaatgaggaagcggtagatggtatgtttcctaactggatgctgtccgaggaccacagtgctgacagtgg

SEQ ID NO: 122040 - DNA, 80 bp, synthetic construct
  source 1..80: mol_type = other DNA
tgtgtgcgagagcaaaagccccccccccaagctgggacaccatgtggaagtgccttatccggctgaaacctactcttaca

SEQ ID NO: 122041 - DNA, 80 bp, synthetic construct
  source 1..80: mol_type = other DNA
cgctgtgccccattaaaccagttgccgtgagagttggtgggcgtcgccgggctgtggaatgtatcgaggacttgcttaac

SEQ ID NO: 122042 - DNA, 80 bp, synthetic construct
  source 1..80: mol_type = other DNA
tccacggtggtgcgatgaaagggtgtcgtctgaccagagtgcgcttgccgacttcataaagtttgctgagggcaggagag

SEQ ID NO: 122043 - DNA, 80 bp, synthetic construct
  source 1..80: mol_type = other DNA
acagcttccatggccatgcgtacagcttccatggaagctgtacgcatggccatggatgcgtacgcatggatggattgcgt

SEQ ID NO: 122044 - DNA, 80 bp, synthetic construct
  source 1..80: mol_type = other DNA
gaaggccacatgcacagcacgtcatgacagccccgacgcggacctgatagaggccaatctcctgtggaggcaggagatgg

SEQ ID NO: 122045 - DNA, 80 bp, synthetic construct
  source 1..80: mol_type = other DNA
ccaccttccagggcaagataatgatgactgtgaacgctacggacattgctgatgtgatcgccattccaaccccgaaggga

SEQ ID NO: 122046 - DNA, 80 bp, synthetic construct
  source 1..80: mol_type = other DNA
ggagggttagagcacagactgcaggtggcttgtaactggactcgcggggagcgctgtgagttggatgatcgagacagagc

SEQ ID NO: 122047 - DNA, 80 bp, synthetic construct
  source 1..80: mol_type = other DNA
cgctgctgcattccaccactgaaatggccatcttaccttgcacatttgtagaagtcccggccctttctaccggccttata

SEQ ID NO: 122048 - DNA, 80 bp, synthetic construct
  source 1..80: mol_type = other DNA
catataaataggactgcccttaactgcaatgacagcttaaacactgggttcttggctagcttgttctacacccacaagtt

SEQ ID NO: 122049 - DNA, 80 bp, synthetic construct
  source 1..80: mol_type = other DNA
ctagtcatgaaagatggcagaacactggtggtcccgtgcaggggccaggatgagttgattgggagtgcccgcatctctcc

SEQ ID NO: 122050 - DNA, 80 bp, synthetic construct
  source 1..80: mol_type = other DNA
tggctccgggcttctgggggcaggcgtggtggctctgatggagacacgcttggtgacctttggaagcgcaggctgaacaa

SEQ ID NO: 122051 - DNA, 80 bp, synthetic construct
  source 1..80: mol_type = other DNA
cggcctaaaacaggggccgtggggtcggcgaggtcccagggtgaagggagtgattcccgcgattcggacagcgacgcgac

SEQ ID NO: 122052 - DNA, 80 bp, synthetic construct
  source 1..80: mol_type = other DNA
ccggcgccgtcgcgagtagcaccatcagcaggttaacgagcctattctcaccaggtccaaaacagagcctgcaattggtg

SEQ ID NO: 122053 - DNA, 80 bp, synthetic construct
  source 1..80: mol_type = other DNA
tctgccagagacgcccagatccttagcgaagatcgtccataaagcacatcaagaaggagtgtgcggggtcagatccgtca

SEQ ID NO: 122054 - DNA, 80 bp, synthetic construct
  source 1..80: mol_type = other DNA
ggccggcgggcaaagaacgaaggttaacttgcagaaggcgggtaagggcggacgccaggcgttgatgaaacttaatttca

SEQ ID NO: 122055 - DNA, 80 bp, synthetic construct
  source 1..80: mol_type = other DNA
ggttcgtcgggcgggcccgtcctctgcccgtcagggcatgtggtgggcattttccgcgcggctatctgcgctagtggcgt

SEQ ID NO: 122056 - DNA, 80 bp, synthetic construct
  source 1..80: mol_type = other DNA
ttgggtgtgcgagcgactcgtaagacttcggagcggtcacagcctaggggtaggcggcagcctatcccgaaggcaaaacc

SEQ ID NO: 122057 - DNA, 80 bp, synthetic construct
  source 1..80: mol_type = other DNA
aaagccagtgttactgagtaacacaaccccacgcccttctaatacataaagtgtaatcacgtgatttgttgtggtttccg

SEQ ID NO: 122058 - DNA, 80 bp, synthetic construct
  source 1..80: mol_type = other DNA
ctcactaacagagagactctacgtgggaggccccatgcttaatagcaaggggcaggcctgcgggtacaggcgttgtcgcg

SEQ ID NO: 122059 - DNA, 80 bp, synthetic construct
  source 1..80: mol_type = other DNA
agaagtggacggggtacggttgcacaggtacgctccggcgtgcaagcctctcctgcgggatgaggtcacattccaagtcg

SEQ ID NO: 122060 - DNA, 80 bp, synthetic construct
  source 1..80: mol_type = other DNA
tcccatttagacaatatcatgtcccaccacattggccactcctgcaatactacaaaaggcgcacaagatggaatagacct

SEQ ID NO: 122061 - DNA, 80 bp, synthetic construct
  source 1..80: mol_type = other DNA
agatcgtgaccgcagcgagcagcaaccgctgctgcattcaacgaccgagtttgccatactgccttgctctttcacgccca

SEQ ID NO: 122062 - DNA, 80 bp, synthetic construct
  source 1..80: mol_type = other DNA
ttccacctttgttaggcatcgccacgccgaatggggtaaaaccaacgcacgcagagccattgcagagatatacgccggcc

SEQ ID NO: 122063 - DNA, 80 bp, synthetic construct
  source 1..80: mol_type = other DNA
taataaacagccgacacacaccgcgtatgatgagttgcttgccaatgtttattgctatggttgcgaaccctctatcgcga

SEQ ID NO: 122064 - DNA, 80 bp, synthetic construct
  source 1..80: mol_type = other DNA
ggggctttccacctacgtggtgggatctcagttaccttgtgaacctgaaccagatgagatggtactaacatccatgctca

SEQ ID NO: 122065 - DNA, 80 bp, synthetic construct
  source 1..80: mol_type = other DNA
gcactggggccccatgtaaaattccagtggaaatcagggatgtaaataaagaaaagatagtgtggaggattatctcgtca

SEQ ID NO: 122066 - DNA, 80 bp, synthetic construct
  source 1..80: mol_type = other DNA
cgagctcgctggaggccctggtgagcggcctgtttgacggcatccccgccccacgccagccacttgacgcccacaacccg

SEQ ID NO: 122067 - DNA, 80 bp, synthetic construct
  source 1..80: mol_type = other DNA
atgactcggcacaatataatattcccacggttcgtcacatccggcgcgcccggctcccacacgcgtcacatccggcttcg

SEQ ID NO: 122068 - DNA, 80 bp, synthetic construct
  source 1..80: mol_type = other DNA
ctggatgaactctacagggtttgtgaagacttgcggggccccaccgtgcgacttaggaccgtcaggtaacaacagcctca

SEQ ID NO: 122069 - DNA, 80 bp, synthetic construct
  source 1..80: mol_type = other DNA
gactcccatttacatccttcaatacagcttcctcaagacaccttacttcgtgcgcgcccacatattgctgcgggcctgta

SEQ ID NO: 122070 - DNA, 80 bp, synthetic construct
  source 1..80: mol_type = other DNA
gggaggtgcaggtgctgtccactgccacccagtctttccttggcaccaccatcaacgggtgtatgtggaccgtctatcac

SEQ ID NO: 122071 - DNA, 80 bp, synthetic construct
  source 1..80: mol_type = other DNA
aaaagtgtgtccaccacgagccagctccttttggggcgcatggacgggcccaggaggccagtgaaatatgaagaggatgt

SEQ ID NO: 122072 - DNA, 80 bp, synthetic construct
  source 1..80: mol_type = other DNA
ccaccttggaacaggacaagtgtgtcactgtgatggcccccgacaagccttcactagacatatcactagaaacagttgcc

SEQ ID NO: 122073 - DNA, 80 bp, synthetic construct
  source 1..80: mol_type = other DNA
ggcttgcttacaaggtagcgtcaaatggcatccagtacaatgacaggaaatggtgttttgatggaccccgatccaacatt

SEQ ID NO: 122074 - DNA, 80 bp, synthetic construct
  source 1..80: mol_type = other DNA
ccaatacctggctgggctctccacattgccaggcaaccccgcagtggcctctctcatggccttcactgctgcagttacta

SEQ ID NO: 122075 - DNA, 80 bp, synthetic construct
  source 1..80: mol_type = other DNA
cccactacaccagccaatccgtgtcggggaggggaaaagtgaaagacacgggcaccacacaccagcgggtctttagtgtt

SEQ ID NO: 122076 - DNA, 80 bp, synthetic construct
  source 1..80: mol_type = other DNA
cagtcgcactcgtccctggctcaggccgcgaaccaagaacagagtctgtgccgggcgcgtgcgacggtggcgcgcggctc

SEQ ID NO: 122077 - DNA, 80 bp, synthetic construct
  source 1..80: mol_type = other DNA
ccctccaggggctaagtctctcgaaccgtgcacctgcgggtctgcagacttatacttggtcacccgcgatgctgatgtca

SEQ ID NO: 122078 - DNA, 80 bp, synthetic construct
  source 1..80: mol_type = other DNA
cacatatattcgcaagatgtggcgtgttacggtgaaaacctggcctatttccctaaagggtttattgagaatatgttttt

SEQ ID NO: 122079 - DNA, 80 bp, synthetic construct
  source 1..80: mol_type = other DNA
aacattgcactacacctttcgacagggctacgtacgccaggcctgcaagatctccaacgtggagctctgcaacctggtct

SEQ ID NO: 122080 - DNA, 80 bp, synthetic construct
  source 1..80: mol_type = other DNA
gtctgtgccacggatgccctcatgactggatatacaggtgacttcgaccctgttattgactgtaacgtagcagttactca

SEQ ID NO: 122081 - DNA, 80 bp, synthetic construct
  source 1..80: mol_type = other DNA
gcagggtcaggagaagtggatagtttttcattaggaatactatgcgtgtcaataatgattgaagaagtgatgagatccag

SEQ ID NO: 122082 - DNA, 80 bp, synthetic construct
  source 1..80: mol_type = other DNA
cctcacagtggtggccgcaaccatggcaaacgagatgggtttcctagaaaaaacgaagaaggatcttggattaggaagca

SEQ ID NO: 122083 - DNA, 80 bp, synthetic construct
  source 1..80: mol_type = other DNA
gagggtgcacaggagcggggtcaggtggtgcgtcacgctccggaggtggacgatcgcgcagtagcggcgctcgcggttaa

SEQ ID NO: 122084 - DNA, 80 bp, synthetic construct
  source 1..80: mol_type = other DNA
gctggcactatccacccaggccttgcaagacagttcctgcagggaccgtttgtggcccagtctactgcttcacaccgtca

SEQ ID NO: 122085 - DNA, 80 bp, synthetic construct
  source 1..80: mol_type = other DNA
ctgaccgcccaacgacccccgcccattgacgtcaataatgacgtatgttcccatagtaacgccaatagggactttccatt

SEQ ID NO: 122086 - DNA, 80 bp, synthetic construct
  source 1..80: mol_type = other DNA
ttgaagagggggtcgaatgacgccactccatctgatgatgtcgcagccggcctgttaccagaggtcaacaatgaggttat

SEQ ID NO: 122087 - DNA, 80 bp, synthetic construct
  source 1..80: mol_type = other DNA
gaacaaaatggtaaattggaaagtcaagtggaaatgcaatttttttcaacttctgtaaatgctatgaacgaggcaaacgc

SEQ ID NO: 122088 - DNA, 80 bp, synthetic construct
  source 1..80: mol_type = other DNA
acctactcagtcactccactggacttaccagctatcattgaaagactccatggtttgagcgcgttctcgcttcacagtta

SEQ ID NO: 122089 - DNA, 80 bp, synthetic construct
  source 1..80: mol_type = other DNA
ccgactgcaggcgatgtggtcatatgcgccacagacgccctcatgacgggttacacgggcgactttgactctgtcataga

SEQ ID NO: 122090 - DNA, 80 bp, synthetic construct
  source 1..80: mol_type = other DNA
tgcatggctgcagtttctttggcttcaacaatatgtgtgcagaggtctggggcgcttccaagatcaggggatgtaagttt

SEQ ID NO: 122091 - DNA, 80 bp, synthetic construct
  source 1..80: mol_type = other DNA
ctggggtggaggcagctggaccgcgggccgcagctgctcgacggcccccctggcgatcacgtacagctcgcgcagcagct

SEQ ID NO: 122092 - DNA, 80 bp, synthetic construct
  source 1..80: mol_type = other DNA
gggaggacttgatataactaatgaaggattgcaaataggagttgaagaaattaatgatgtagaagaagaagtttttgctg

SEQ ID NO: 122093 - DNA, 80 bp, synthetic construct
  source 1..80: mol_type = other DNA
acaatagcaagggggacctttgcggtgtccgcaggtgccgcgctagcggcgtattcaccaccagcctcgggaacacactg

SEQ ID NO: 122094 - DNA, 80 bp, synthetic construct
  source 1..80: mol_type = other DNA
ttcagacctcgtcgccaccacacggtccagacctgcaactgttcactgtacccgggccacctctcaggtcatcgaatggc

SEQ ID NO: 122095 - DNA, 80 bp, synthetic construct
  source 1..80: mol_type = other DNA
ttgctgggtccagctgatgacatgaaggacatgggttggaggctgctcgccccaataaccgcgtatgctcagcagacacg

SEQ ID NO: 122096 - DNA, 80 bp, synthetic construct
  source 1..80: mol_type = other DNA
ctggatcactgatgattgccccgtcccgtgtgccggctcatggcttagcgacatatgggattgggtttgtaccatcttga

SEQ ID NO: 122097 - DNA, 80 bp, synthetic construct
  source 1..80: mol_type = other DNA
gacacggcctgggattttgggtccattggaggagtttttaattccattggcaaggccgtgcaccaggtgtttggaggagc

SEQ ID NO: 122098 - DNA, 80 bp, synthetic construct
  source 1..80: mol_type = other DNA
agggttcgtccggtggcccggttatgtgctcggcgggacatgccgtcgggttgttccgggccgccgtttgtacgcgaggc

SEQ ID NO: 122099 - DNA, 80 bp, synthetic construct
  source 1..80: mol_type = other DNA
caactggggggcgaatgagacggacgtgctgattctcaacaacacgcggccgccgcaaggcaactggtttggctgtacgt

SEQ ID NO: 122100 - DNA, 80 bp, synthetic construct
  source 1..80: mol_type = other DNA
ccgcaggaagagaatagctcatcctcaggggttgacacgcagtccagcactacttccaaggtgctcccctcgcttgaagg

SEQ ID NO: 122101 - DNA, 80 bp, synthetic construct
  source 1..80: mol_type = other DNA
tgaccatactcatcagaacgggattgttggtgatctcaggagtctttccagtatcaataccaatcacggcagcagcatgg

SEQ ID NO: 122102 - DNA, 80 bp, synthetic construct
  source 1..80: mol_type = other DNA
tgcatcagcagggcaggtgccgaacttgtgtgtacaacatgatggggaagagagaaaagaagctgtcagagtttggaaag

SEQ ID NO: 122103 - DNA, 80 bp, synthetic construct
  source 1..80: mol_type = other DNA
aagagcagttcttgatgatggtatctatagaatcatgcagagaggactgttgggcaggtcccaagtaggggtaggagttt

SEQ ID NO: 122104 - DNA, 80 bp, synthetic construct
  source 1..80: mol_type = other DNA
aactgcgatgaaagcattaacaccggctttattgcgggcctgttttatcagcatcgttttaacagcaccggctgcccgca

SEQ ID NO: 122105 - DNA, 80 bp, synthetic construct
  source 1..80: mol_type = other DNA
acgtccccgagtctgatgcagctgctcgcgtgacagccatactctcatctttaactgtgacatccctcctaagacgactg

SEQ ID NO: 122106 - DNA, 80 bp, synthetic construct
  source 1..80: mol_type = other DNA
cgtcctggcctctgtgttccgggcacggtttccctgcttttacgccacggcgagctcttatgccggggtgaactccacgg

SEQ ID NO: 122107 - DNA, 80 bp, synthetic construct
  source 1..80: mol_type = other DNA
cagtgacgaatttcctcactccaatggtgagattgaggacgtccagactgacatccccagcgagccatggaccacaggac

SEQ ID NO: 122108 - DNA, 80 bp, synthetic construct
  source 1..80: mol_type = other DNA
gctaccgagcctcccaggaggcgaagatggggccctgccaaccggctgatgcccaactacgtgttgcatccttccatcat

SEQ ID NO: 122109 - DNA, 80 bp, synthetic construct
  source 1..80: mol_type = other DNA
ggggaccaccatcacttccaccggagggctgtcgtgcatggatatcacgagccccatgaattcccgcccgtagcgcgcgc

SEQ ID NO: 122110 - DNA, 80 bp, synthetic construct
  source 1..80: mol_type = other DNA
cgctcaagtggcccccccccccgcgtctacagcttttgtcgtgagcggtctagcaggagccgcggttggaagcatccggc

SEQ ID NO: 122111 - DNA, 80 bp, synthetic construct
  source 1..80: mol_type = other DNA
gaccccccggccatcgagtcccactgcaggcacgcggccatggtgctgcacagacggaacagctcccagacggaggcgac

SEQ ID NO: 122112 - DNA, 80 bp, synthetic construct
  source 1..80: mol_type = other DNA
cacagccgctacggcggcccggcgtctcgcacgtggttcccctccatcggaagctagctcctctgctagccagctctcag

SEQ ID NO: 122113 - DNA, 80 bp, synthetic construct
  source 1..80: mol_type = other DNA
tgggtgcgtatggtgctgatgacgcatttcttttcaatactccagtcccaagagcgactccacaaagcactcgacttcga

SEQ ID NO: 122114 - DNA, 80 bp, synthetic construct
  source 1..80: mol_type = other DNA
gtcggcatcggcggcggcgtcgtcgtcctcgtcttcgttctcctccggcccaccgtgccacccgaacccgggccgcgcgg

SEQ ID NO: 122115 - DNA, 80 bp, synthetic construct
  source 1..80: mol_type = other DNA
ccctgtctactgtttcactcccagtcctgtggtggtcggcactaccgataaaaagggcctacccacttatacttggggtg

SEQ ID NO: 122116 - DNA, 80 bp, synthetic construct
  source 1..80: mol_type = other DNA
ggttaacctgcaccagtgtaaaagaggtattttttgtctggttaagcaggcaaaagttacctacgagaaagaccacacca

SEQ ID NO: 122117 - DNA, 80 bp, synthetic construct
  source 1..80: mol_type = other DNA
aattgggctgtgagaactaagctcaaactcactccattgcgtgacgcagccaatctggatctttcagaatggtttgtgtc

SEQ ID NO: 122118 - DNA, 80 bp, synthetic construct
  source 1..80: mol_type = other DNA
caaattgtaagcgattttccaaatgttcaacaacagcttctaaaagagccacagctctgatttcgataaacaaaagcaaa

SEQ ID NO: 122119 - DNA, 80 bp, synthetic construct
  source 1..80: mol_type = other DNA
aaaagagacaagtcaaaagaaagctaatgacaaacagaaggcgacacacaggaggccatcaaaactaaagccgcacacac

SEQ ID NO: 122120 - DNA, 80 bp, synthetic construct
  source 1..80: mol_type = other DNA
tgccatcctgaatccgcattggatgcccccgtccggcttctacaccggggagtttgacctgcccgaagccgacgacggct

SEQ ID NO: 122121 - DNA, 80 bp, synthetic construct
  source 1..80: mol_type = other DNA
acgtattccggaaaacggaacggcgcctcggatgaccttatggtcgccgtcattatggccatctaccttgcggcccaggc

SEQ ID NO: 122122 - DNA, 80 bp, synthetic construct
  source 1..80: mol_type = other DNA
tacatacccgtcgtcggcgccccagttggcggcgtagccagagcactcgcgcatggcgtgagggtcctggaggacgggat

SEQ ID NO: 122123 - DNA, 80 bp, synthetic construct
  source 1..80: mol_type = other DNA
ccaggaacagctctacagcttcctggagcgccactcgccctacttccgcagccacagtgcgcagattaggagcgccactt

SEQ ID NO: 122124 - DNA, 80 bp, synthetic construct
  source 1..80: mol_type = other DNA
tttgccaccgccacagaaacagcaatgaggaaaaagagaaaatgccttgagctttttctcatttttgttttttttgttta

SEQ ID NO: 122125 - DNA, 80 bp, synthetic construct
  source 1..80: mol_type = other DNA
tacgagcccttatcatgttaggggatactatgtctggtagaataggagggcagattcacctagccatcatggcagtgttc

SEQ ID NO: 122126 - DNA, 80 bp, synthetic construct
  source 1..80: mol_type = other DNA
tctgtgccacagacgctctcatgacgggtttcaccggcgactttgactcagtgatagattgcaacacgtccgtcgtacaa

SEQ ID NO: 122127 - DNA, 80 bp, synthetic construct
  source 1..80: mol_type = other DNA
taagctcggccaccgtgtcgcgcacttcttgctgaaatgcgcccggaactatttcttgttcttcctcttctacctccatt

SEQ ID NO: 122128 - DNA, 80 bp, synthetic construct
  source 1..80: mol_type = other DNA
tggatttggaaaaaagacatgtcttaggtcgcttgatcacagtcaacccaattgtcacagaaaaagacagcccagtcaac

SEQ ID NO: 122129 - DNA, 80 bp, synthetic construct
  source 1..80: mol_type = other DNA
gtccccggaccaattaatccccccaacaacgatgttgttttcccgggaggttcccccgtggctcaatattgttatgccta

SEQ ID NO: 122130 - DNA, 80 bp, synthetic construct
  source 1..80: mol_type = other DNA
gcaacaatcttttgttactaaaactgcggtgtcgaaggttcgtagtaaatccacgtgttccgaaggaatcacgagatgtt

SEQ ID NO: 122131 - DNA, 80 bp, synthetic construct
  source 1..80: mol_type = other DNA
tgttatcacctggagctcttgtggtgggcgtagtttgcgctgcaatactgcgacgccacgctgggccctccgagggagca

SEQ ID NO: 122132 - DNA, 80 bp, synthetic construct
  source 1..80: mol_type = other DNA
agatggcggtggacatgcagaccctgaccccagttggaaggctgataaccgccaatcctgtgatcactgaaagtactgag

SEQ ID NO: 122133 - DNA, 80 bp, synthetic construct
  source 1..80: mol_type = other DNA
agacggggcctccatcaccttcaccagcattaacctctacgccaccttcttccccatggcgcacaacaccgcctccacgc

SEQ ID NO: 122134 - DNA, 80 bp, synthetic construct
  source 1..80: mol_type = other DNA
ttgtagtcccacgagaaacaaccgcgatgctgaggttattgcacacgaattacattcttgagggtttccgacacatcctt

SEQ ID NO: 122135 - DNA, 80 bp, synthetic construct
  source 1..80: mol_type = other DNA
gccaactttattcgcccggatgcggtccagacgattatgggctttctcaaccaggccaactgcaagattatcttcgtgtc

SEQ ID NO: 122136 - DNA, 80 bp, synthetic construct
  source 1..80: mol_type = other DNA
cgcgtacaggggctgggtcgctcggaggacgcacgcgtagcgcagggtggtgtacgtgcccacctcgggtgccgtgaatc

SEQ ID NO: 122137 - DNA, 80 bp, synthetic construct
  source 1..80: mol_type = other DNA
acatgggagtacttgcaggacaggcttctcagctcaatgcagtggttgatctgcaagataggaacacagagctgtcctac

SEQ ID NO: 122138 - DNA, 80 bp, synthetic construct
  source 1..80: mol_type = other DNA
gtgcaacatgagcacaaaacctaaaccccaaaaacaaaccaaaacaaacaccaaccgtcgcccacaggacgtcaagttcc

SEQ ID NO: 122139 - DNA, 80 bp, synthetic construct
  source 1..80: mol_type = other DNA
tcaacatcttaggggggtgggtggcttctcagctcgccactcctagcgctgccacggccttcgtaggcgccggaataacc

SEQ ID NO: 122140 - DNA, 80 bp, synthetic construct
  source 1..80: mol_type = other DNA
gtgtcatcacccagagccaaattttggcccaattgcaagccatccagcaggcgcgacaggagtttctgctaaaaaaaggt

SEQ ID NO: 122141 - DNA, 80 bp, synthetic construct
  source 1..80: mol_type = other DNA
ccaccacccttctccttaacatactaggagggtgggtggcctcccagatagcgccgccaacagcgtcaacggcgtttgtt

SEQ ID NO: 122142 - DNA, 80 bp, synthetic construct
  source 1..80: mol_type = other DNA
ggcaataccatcacatgttacttgaaagcacaggcagcctgccgtgcagcaggcctcactaattctgacatgttggtttg

SEQ ID NO: 122143 - DNA, 80 bp, synthetic construct
  source 1..80: mol_type = other DNA
agaacacagtgggaatgagattgttgatgtcatgtgccatgccaccctcactcatagactgatgtctcctcacagagtcc

SEQ ID NO: 122144 - DNA, 80 bp, synthetic construct
  source 1..80: mol_type = other DNA
ggttcggttacggtccctcacccaaacatcacggaagaggccttacccggcactggtgagatacccttctacgggagggc

SEQ ID NO: 122145 - DNA, 80 bp, synthetic construct
  source 1..80: mol_type = other DNA
tgttagggctgatgatggagtctcctctgtttcttctctaccaactgcggtgacctcagttcccagctctaggacagccg

SEQ ID NO: 122146 - DNA, 80 bp, synthetic construct
  source 1..80: mol_type = other DNA
caacagtgaacgcaagcgtgcaaacagacccttggtacccgccaatgctttcaacaaaaacaaaaaagcgtcactacaga

SEQ ID NO: 122147 - DNA, 80 bp, synthetic construct
  source 1..80: mol_type = other DNA
tggcagaaactcgaggtcttctgggcgaagcacatgtggaatttcatcagtgggatacaatacttggcgggcctgtcaac

SEQ ID NO: 122148 - DNA, 80 bp, synthetic construct
  source 1..80: mol_type = other DNA
gagagacacgccagcgtgcatctctcaaagtagtgtttgtaacggaatttgttgtagatgcgcgacccccgccccagcga

SEQ ID NO: 122149 - DNA, 80 bp, synthetic construct
  source 1..80: mol_type = other DNA
cgggcatagaatggcctgggatatgatgcagaactggtcgcccactgtcacctgggtgatctccagcctactcaggatcc

SEQ ID NO: 122150 - DNA, 80 bp, synthetic construct
  source 1..80: mol_type = other DNA
ccgttcgacgacgagttcgtcctgccccactggtacatggcccggtacctgctggccaacaaccctccccccgttctctc

SEQ ID NO: 122151 - DNA, 80 bp, synthetic construct
  source 1..80: mol_type = other DNA
tcaagatcaccagagaggagtgccccgggactaaggtcgccatagatgccagctgcgataagcggggtgcgtctgtgaga

SEQ ID NO: 122152 - DNA, 80 bp, synthetic construct
  source 1..80: mol_type = other DNA
cgtggtcatagtgggcaggataatcctaggtgggaagccggcagtcatacctgacagggaggttctctaccgggagtttg

SEQ ID NO: 122153 - DNA, 80 bp, synthetic construct
  source 1..80: mol_type = other DNA
attggaagaggtgcaacaggagcaggcaacagagcagcccgtcgccgcaccatccgcgccggcagcccctccggtcaagc

SEQ ID NO: 122154 - DNA, 80 bp, synthetic construct
  source 1..80: mol_type = other DNA
cagcactaccatcctccttaacatcatggggtggtggctcgcttcccaaattgctccccctgcaggggccactggcttcg

SEQ ID NO: 122155 - DNA, 80 bp, synthetic construct
  source 1..80: mol_type = other DNA
tcttcctatgggcggcagaggtccctggaaccaaaatagcgggtaccttactggtcgccctgttgctgatggtggtcctc

SEQ ID NO: 122156 - DNA, 80 bp, synthetic construct
  source 1..80: mol_type = other DNA
cgtcaggctccatcggtacgctcccccacgcaagcccttgttaagggaagaggttaccttttcggtgggcctcaattcat

SEQ ID NO: 122157 - DNA, 80 bp, synthetic construct
  source 1..80: mol_type = other DNA
cacgtacgttgtcaaggttgagccccacacgggggattacaaagctgcaaatgaaaccaacgagaacaggaaaacggccc

SEQ ID NO: 122158 - DNA, 80 bp, synthetic construct
  source 1..80: mol_type = other DNA
taacacgtgaagctgatgtcataccggcacgtcgcagaggggactctaccgcgagcctgctcagtcccagacccatctcc

SEQ ID NO: 122159 - DNA, 80 bp, synthetic construct
  source 1..80: mol_type = other DNA
atgcatggcggatgctgcgaccacccgtgtctgccgcccggcagaagaaggccttcgaccgcctccaggtggtggacaat

SEQ ID NO: 122160 - DNA, 80 bp, synthetic construct
  source 1..80: mol_type = other DNA
tgtgttgccttcgtctgttttgcctggtacatcaaggggcgtgccgttcctgccttcacatatggcttgttacaactatg

SEQ ID NO: 122161 - DNA, 80 bp, synthetic construct
  source 1..80: mol_type = other DNA
aatattctgtcactccaggaagaaatgtgatgagctggccaaaaacttgtcagctctcggactcaatgcagtggcctatt

SEQ ID NO: 122162 - DNA, 80 bp, synthetic construct
  source 1..80: mol_type = other DNA
aagggggaaaactgtggctatcgcagatgccgcgcgagcggcgtgctgacgactagctgtggtaacaccctcacttgtta

SEQ ID NO: 122163 - DNA, 80 bp, synthetic construct
  source 1..80: mol_type = other DNA
ctcctcagcatcctcctgcgggactggctcgccatgcgaaagcagatccgctcgcggattccccagagcagccccgagga

SEQ ID NO: 122164 - DNA, 80 bp, synthetic construct
  source 1..80: mol_type = other DNA
tgtcctcaggcctcatccacctgcaccagaacatagtggatgtccagtacctctacggagtgtccacgaacattatatcg

SEQ ID NO: 122165 - DNA, 80 bp, synthetic construct
  source 1..80: mol_type = other DNA
actcgcgcggggacatgggcaccggcgtgtccgggccgaagcgcgtgcgcacgcggtagcgcacgttgccgccgcggcac

SEQ ID NO: 122166 - DNA, 80 bp, synthetic construct
  source 1..80: mol_type = other DNA
atctgctatggagacagtgcatgggaggtaacatcacgcgagtggaagccgagaacaaggtcgtgatccttgactccttt

SEQ ID NO: 122167 - DNA, 80 bp, synthetic construct
  source 1..80: mol_type = other DNA
ccccgcccgggccaccccccctctccgaggccgcgcccaagccccgggcgacggcgaggacccccgcggcctccgcgggc

SEQ ID NO: 122168 - DNA, 80 bp, synthetic construct
  source 1..80: mol_type = other DNA
acacttgtaggccccacgcccctgttgtaccgcctgggcgcggtcagcaatgaggttaccctcacccaccccgtaaccaa

SEQ ID NO: 122169 - DNA, 80 bp, synthetic construct
  source 1..80: mol_type = other DNA
tatgaccacctctgccccctgtctgattgggctagcgaaggcctccgcgatctggccgtagctgtggaaccagtcatttt

SEQ ID NO: 122170 - DNA, 80 bp, synthetic construct
  source 1..80: mol_type = other DNA
gtcaggagcactcgtcgcttttaagatcatgagcggtgagaccccctcagccgaggatatggtcaacatgcttccggcgc

SEQ ID NO: 122171 - DNA, 80 bp, synthetic construct
  source 1..80: mol_type = other DNA
cgtaattggccctccaccctggtgtaccaggaaattcccgggccaactaccgtactacttccgcgtgacgcactggccga

SEQ ID NO: 122172 - DNA, 80 bp, synthetic construct
  source 1..80: mol_type = other DNA
tggggttttcgtatgatacccgctgctttgactctaccgtcacagagagggacatacggacagaagagtccatttatctg

SEQ ID NO: 122173 - DNA, 80 bp, synthetic construct
  source 1..80: mol_type = other DNA
gtgtgttcccggcggatggcccgccgggtctgagagcgactcggtggggtccagtgacattcgcgcagcacatcctccac

SEQ ID NO: 122174 - DNA, 80 bp, synthetic construct
  source 1..80: mol_type = other DNA
tcgtgtctgtatcacccgcagctcccagaatgtctgtccccggccgacgcgccgtgcgccgcgagtacgtggacgtctcg

SEQ ID NO: 122175 - DNA, 80 bp, synthetic construct
  source 1..80: mol_type = other DNA
gtgcgcctttcagtttcatggccataacgggtccgacgagtcgtttcccatcgagtatgtactgcggcttatgaacgact

SEQ ID NO: 122176 - DNA, 80 bp, synthetic construct
  source 1..80: mol_type = other DNA
ggtcagcggtatggctggcgccgctgtgggtggcattgggctgggtagggtcctcgttgacatcctggccggctatggcg

SEQ ID NO: 122177 - DNA, 80 bp, synthetic construct
  source 1..80: mol_type = other DNA
acttcaagacctggctccaatccaagctcctgccgcagttaccgggagtccccttcctctcgtgtcaacgagggtacaag

SEQ ID NO: 122178 - DNA, 80 bp, synthetic construct
  source 1..80: mol_type = other DNA
gcgggtggaatacctcctcaagatgtggcgctcgaagaggacacctatgggattttcctacgacactaggtgtttcgatt

SEQ ID NO: 122179 - DNA, 80 bp, synthetic construct
  source 1..80: mol_type = other DNA
gacatcaccaaggtgctcttggcaatactgggccccccctaccttttgcaagcaagcttgcttcgtgtcccatactatgt

SEQ ID NO: 122180 - DNA, 80 bp, synthetic construct
  source 1..80: mol_type = other DNA
taccttcgtgacactgatcaccgggaatctttcttacaaagacctagggagggtgataataatggtgggagctgccatga

SEQ ID NO: 122181 - DNA, 80 bp, synthetic construct
  source 1..80: mol_type = other DNA
ccctgcgcccagattgcaagtacatagtgaccaagaccgtgaatatcagacatgcctgctacatttcgggaaacggggca

SEQ ID NO: 122182 - DNA, 80 bp, synthetic construct
  source 1..80: mol_type = other DNA
gcacgttgtcctcgtgcgacacctgggccgccagctcgtcgcacacccccaggtgcgccgtggtttcggtgatgacggaa

SEQ ID NO: 122183 - DNA, 80 bp, synthetic construct
  source 1..80: mol_type = other DNA
ccagaaaaacaaagaactccccaagacaaccaactcgcatatgtcgtgataggcatactcacactggctgcgatagtagc

SEQ ID NO: 122184 - DNA, 80 bp, synthetic construct
  source 1..80: mol_type = other DNA
acagtgcgcgtcttggaaatggtggaagattggctgcaccgcggaccacgcgagttttgtgtgaaggtgctgtgtcctta

SEQ ID NO: 122185 - DNA, 80 bp, synthetic construct
  source 1..80: mol_type = other DNA
agacgccacctccatactgggcataggtacggtgctggaccaggcggagaccgctggagtaaggctgacagtcttggcta

SEQ ID NO: 122186 - DNA, 80 bp, synthetic construct
  source 1..80: mol_type = other DNA
agtacatcatgacctgcatgtctgcagacctggaggtcataactagcacatgggtaatagtgggcggcgttttagccgca

SEQ ID NO: 122187 - DNA, 80 bp, synthetic construct
  source 1..80: mol_type = other DNA
tcacagccagtgggctcctttggtatgcccaaatccagccacactggattgcagcctctataatactagagttctttctg

SEQ ID NO: 122188 - DNA, 80 bp, synthetic construct
  source 1..80: mol_type = other DNA
acggaagctatgaccaggtactcagctcctccaggtgacccgccccagcctacttacgacttggagctcattacatcttg

SEQ ID NO: 122189 - DNA, 80 bp, synthetic construct
  source 1..80: mol_type = other DNA
atttggagcctgagccggtagaagacccgatcgttattactgatggtccggaggatcccggctcggactccaattcatgg

SEQ ID NO: 122190 - DNA, 80 bp, synthetic construct
  source 1..80: mol_type = other DNA
cccacccttctttatgttttgtttgaagttttcgacgtggtgcgcattcatcaaccacaccgcggagtcattgaagcggt

SEQ ID NO: 122191 - DNA, 80 bp, synthetic construct
  source 1..80: mol_type = other DNA
ttccagtactcaccagcgcagcgggtcgacttcctgcttaaagcgtggaaatcaaagaaaaaccctatggggttctccta

SEQ ID NO: 122192 - DNA, 80 bp, synthetic construct
  source 1..80: mol_type = other DNA
tggcacagagcataggttcatagccgcctgcaattggaccagaggggagcgttgcaatttggaggatagggacagggtcg

SEQ ID NO: 122193 - DNA, 80 bp, synthetic construct
  source 1..80: mol_type = other DNA
ggcattctggcgcgctggagcagctttaaaaaaaacggcgcgattaaagtgctgcgcggctttaaaaaagaaattagcag

SEQ ID NO: 122194 - DNA, 80 bp, synthetic construct
  source 1..80: mol_type = other DNA
tttctttatagatctaaatcagaaccttgtgtacaattaaatgcttactagcttttttttgttttacagtatggtgacgg

SEQ ID NO: 122195 - DNA, 80 bp, synthetic construct
  source 1..80: mol_type = other DNA
atcgaggaccatctcttaggaccacaacagttacaggaaagataattcatgaatggtgttgcagatcttgtacgctacca

SEQ ID NO: 122196 - DNA, 80 bp, synthetic construct
  source 1..80: mol_type = other DNA
ggcaactctggctcacagtacgcgtagtgcaaccgaacgcgaccgcatggtcagaagccgggcacatcagcgcctggcag

SEQ ID NO: 122197 - DNA, 80 bp, synthetic construct
  source 1..80: mol_type = other DNA
catattgacgcacactttctatcccagacgaagcaggcaggagacaacttcgcttacctagttgcctaccaagctacggt

SEQ ID NO: 122198 - DNA, 80 bp, synthetic construct
  source 1..80: mol_type = other DNA
ctacgtgacgggcatgaccactgacaacgtgaagtgcccatgccaggtcccggcccccgaatttttcacagaactggacg

SEQ ID NO: 122199 - DNA, 80 bp, synthetic construct
  source 1..80: mol_type = other DNA
ttgcccggcaatcctgcgattgcctctctcatgtcattcaccgctgctgttacgagcccattgaccacccaacaaaccct

SEQ ID NO: 122200 - DNA, 80 bp, synthetic construct
  source 1..80: mol_type = other DNA
caggcgctatcatcatggttatgttttcaggggtcgatgccatcacatataccgtcggtggcaatgtagctcgttctacc

SEQ ID NO: 122201 - DNA, 80 bp, synthetic construct
  source 1..80: mol_type = other DNA
ctggtcatactatgccgcctcaagaccatccgtcatggctgtgagagcttacactattggagggaagggccatgaggcgc

SEQ ID NO: 122202 - DNA, 80 bp, synthetic construct
  source 1..80: mol_type = other DNA
gcccgtggggggtgggcacacgtaaaagtttgcatcggtgttctccgccttgatgtcccgcaggtgctcgcgcaggttgg

SEQ ID NO: 122203 - DNA, 80 bp, synthetic construct
  source 1..80: mol_type = other DNA
gaacatccaaacagcgataaatcaagtcagatcccttataggcaatgaggaatacacagactacatgccatccatgaaga

SEQ ID NO: 122204 - DNA, 80 bp, synthetic construct
  source 1..80: mol_type = other DNA
tggatgaactcaactggattcaccaaagtgtgcggagcgcccccttgtgtcatcggaggggtgggcaacaacaccttgct

SEQ ID NO: 122205 - DNA, 80 bp, synthetic construct
  source 1..80: mol_type = other DNA
gccgcgggggagcgggcccgcggcgcgcggggggagtagcggcgcccgcgtgagagcggccggttccggaggagggccgg

SEQ ID NO: 122206 - DNA, 80 bp, synthetic construct
  source 1..80: mol_type = other DNA
actcgacaacccttacctacgccactattggatcgtcggtggataccgctgcagctgctgccgcgtctgctgctgcctct

SEQ ID NO: 122207 - DNA, 80 bp, synthetic construct
  source 1..80: mol_type = other DNA
gccacgataactcccaggtcaccatcggttgaagtcaaactgccggactatggagaactaacactcgattgtgaacccag

SEQ ID NO: 122208 - DNA, 80 bp, synthetic construct
  source 1..80: mol_type = other DNA
cctggtcggcggaaacgccagggtggtgtattcgcgcgcaaaacgcgcggtcctcgtcgtgatggtgacggcgagcgagg

SEQ ID NO: 122209 - DNA, 80 bp, synthetic construct
  source 1..80: mol_type = other DNA
ggaggttactgctagactcctctcagtagaggaggcatgtgacctcactcccccgcactccgcccgttcaaaattcgggt

SEQ ID NO: 122210 - DNA, 80 bp, synthetic construct
  source 1..80: mol_type = other DNA
gtcaaacgtcacggcgtgccgacaaagcgaatttccatgcaagatttggatgtagtatttatacacccaatcacacgtca

SEQ ID NO: 122211 - DNA, 80 bp, synthetic construct
  source 1..80: mol_type = other DNA
atactactggcccaggacactctgaaccagaatctcaatttcgagatgtacggggcagtatactcggtcaatccactaga

SEQ ID NO: 122212 - DNA, 80 bp, synthetic construct
  source 1..80: mol_type = other DNA
gcaaagtgggtgacttccattatgtcaccggtgtgacacaagataagatcaagtgtccatgccaggttcctgcccccgag

SEQ ID NO: 122213 - DNA, 80 bp, synthetic construct
  source 1..80: mol_type = other DNA
gtccccgtgcgcaggagaggagacaccagaggagcccttttaagccctagaccaatagccacccttaaggggtcttccgg

SEQ ID NO: 122214 - DNA, 80 bp, synthetic construct
  source 1..80: mol_type = other DNA
cgccgcctgcggtgcctcagacctaccaggtggggtacctgcacgctccgacgggtagcggtaaaagtactcgtgtcccg

SEQ ID NO: 122215 - DNA, 80 bp, synthetic construct
  source 1..80: mol_type = other DNA
gctgccagacccaaggttaacagcaccgggtgtttggagcggttggctagctgccaccccatcacccactttgcccaggg

SEQ ID NO: 122216 - DNA, 80 bp, synthetic construct
  source 1..80: mol_type = other DNA
gcataataataccctttagtaatcgctgacgctgaatttctactcggctatgtttcaaggaacgagaagtacttttcata

SEQ ID NO: 122217 - DNA, 80 bp, synthetic construct
  source 1..80: mol_type = other DNA
aggggttctgatgccaaaatgcggcactgcctaagcaggaagctccacagggccgggcttgcgtcgacggaagtccggtg

SEQ ID NO: 122218 - DNA, 80 bp, synthetic construct
  source 1..80: mol_type = other DNA
gaagagctgtgacgctcccctcccattccactaggaagctgcaaacgcggtcgcaaacctggctggaatcaagagaatac

SEQ ID NO: 122219 - DNA, 80 bp, synthetic construct
  source 1..80: mol_type = other DNA
aagatacaatcacgtacaagtgtcctctcctcagacaaaatgaaccagaagacatagattgttggtgcaactctacgtcc

SEQ ID NO: 122220 - DNA, 80 bp, synthetic construct
  source 1..80: mol_type = other DNA
cgaggaagacttccgagcggtcacagccccgcggacggcgacagcctatccccaaggctcgcccgtccgagggtaggtcc

SEQ ID NO: 122221 - DNA, 80 bp, synthetic construct
  source 1..80: mol_type = other DNA
cataaacattacctcttttggcatgttgtaattcaccacctcccggtaccatataaacctctgattaaacatggcgccat

SEQ ID NO: 122222 - DNA, 80 bp, synthetic construct
  source 1..80: mol_type = other DNA
tgactgtccaggaatgcaattgctccatctacaccggccacgtcaccggccacaggatggcatgggatatgatggtgaac

SEQ ID NO: 122223 - DNA, 80 bp, synthetic construct
  source 1..80: mol_type = other DNA
cacatgcatgcaagctgaccttgaggtcatgaccagcacgtgggtcctagctggaggagtcctggcagccgtcgccgcat

SEQ ID NO: 122224 - DNA, 80 bp, synthetic construct
  source 1..80: mol_type = other DNA
ttatgaacatcaaaaaataactttttatcagctaacaattattgaactacctactaccacagccagtacaactattgaaa

SEQ ID NO: 122225 - DNA, 80 bp, synthetic construct
  source 1..80: mol_type = other DNA
tcgcgaaccctttggtgggtttacgcgggcacgcacgctcccatcgcgggcgccatggcgggactgggcaagccctacac

SEQ ID NO: 122226 - DNA, 80 bp, synthetic construct
  source 1..80: mol_type = other DNA
tgactgggttccaactgggagaaccacctggtcaatccatggaaagggagaatggatgaccactgaagacatgcttgtgg

SEQ ID NO: 122227 - DNA, 80 bp, synthetic construct
  source 1..80: mol_type = other DNA
cgagctcagcccgttgctgctgtccaccacacagtggcaggtccttccgtgttctttcacgaccctgccagccttgtcca

SEQ ID NO: 122228 - DNA, 80 bp, synthetic construct
  source 1..80: mol_type = other DNA
cccgagcgcctaaggcagacgctgaaaggcgggctgcccgacttcatgagccagagcatgttgcaaaactaccgcacttt

SEQ ID NO: 122229 - DNA, 80 bp, synthetic construct
  source 1..80: mol_type = other DNA
tataaaagtccgtatgttccgatcgacaaggaagtaaaaatagacagtttttatatgcgcatggctttaaaggtactaac

SEQ ID NO: 122230 - DNA, 80 bp, synthetic construct
  source 1..80: mol_type = other DNA
ccagccgtccaacatgcagtgaccacttcatacaacaactactccttaatggcgatggccacgcaagctggagtgttgtt

SEQ ID NO: 122231 - DNA, 80 bp, synthetic construct
  source 1..80: mol_type = other DNA
gtatggcgatgccacacgccacgctaatcgccggaaacgtctgcgcgtggctgttgcagatcacagtcctgctgctggcc

SEQ ID NO: 122232 - DNA, 80 bp, synthetic construct
  source 1..80: mol_type = other DNA
tccgtgccgaggagtccatctaccagtgctgccaactagacccgcaagcgcggaaagctataagctcattgaccgagaga

SEQ ID NO: 122233 - DNA, 80 bp, synthetic construct
  source 1..80: mol_type = other DNA
tccactggtatttcgcggtcttggcgatcagccatgtgcgttgcaccatagccttgtaatggttgcaataaagctaaatc

SEQ ID NO: 122234 - DNA, 80 bp, synthetic construct
  source 1..80: mol_type = other DNA
cccaattacaatctgttcataatggatgaagcccatttcacggatccagcgagcatcgcagccagaggatacatagcaac

SEQ ID NO: 122235 - DNA, 80 bp, synthetic construct
  source 1..80: mol_type = other DNA
aaccttctttggaatcccttgtcgtcatcaaatcaacaagaccatcaacttcacctttgaggaacaggtgaactttacct

SEQ ID NO: 122236 - DNA, 80 bp, synthetic construct
  source 1..80: mol_type = other DNA
aaagtgggagtatgttgtcctactgttcttggtcttggccgacgcacgaatctgcgcatgcctatggctcatgttactca

SEQ ID NO: 122237 - DNA, 80 bp, synthetic construct
  source 1..80: mol_type = other DNA
aagctcaggactatggggatcaacgctgtagcctactacaggggtcttgacgtgtccgtgatacccaaggagagggacgt

SEQ ID NO: 122238 - DNA, 80 bp, synthetic construct
  source 1..80: mol_type = other DNA
tacccttttctctacacagtgtacatagcagcgaagtgggtagaataagtcgcccgagtttaatgggcgaagaggagtac

SEQ ID NO: 122239 - DNA, 80 bp, synthetic construct
  source 1..80: mol_type = other DNA
tcttgggaatggctctgttcctggaagaaatgctcaggacccgagtaggaacgaaacatgcaatactgctagttgcagta

SEQ ID NO: 122240 - DNA, 80 bp, synthetic construct
  source 1..80: mol_type = other DNA
agttaaggctaaacttctatctgtagaagaagcctgcaagctgacacccccacattcggccaaatccaaattcggctacg

SEQ ID NO: 122241 - DNA, 80 bp, synthetic construct
  source 1..80: mol_type = other DNA
ttccagaaccacactcccgcctggctccaggcgactgcgtgggtgtagacgccctcgagggccaggcacagtgggtgccg

SEQ ID NO: 122242 - DNA, 80 bp, synthetic construct
  source 1..80: mol_type = other DNA
ctccattaacccacggggtccccacacgggccgtgtggtatgaatctctgcggatcccgcggtgagcacccggtcggtga

SEQ ID NO: 122243 - DNA, 80 bp, synthetic construct
  source 1..80: mol_type = other DNA
ttgctacgtcggtttattgctcaccacacactcgccggttttattcacggaagcgttgtagcagacgagcatattacaga

SEQ ID NO: 122244 - DNA, 80 bp, synthetic construct
  source 1..80: mol_type = other DNA
gactcggctgggcagggtggctcctgtccccccgaggttcccgtccctcatggggccccactgacccccggcataggtcg

SEQ ID NO: 122245 - DNA, 80 bp, synthetic construct
  source 1..80: mol_type = other DNA
acgggaaacatgggggtgcttgccggtcaggcttcgcagctaaatgcggtagtagatttgcaagatagaaatacggaact

SEQ ID NO: 122246 - DNA, 80 bp, synthetic construct
  source 1..80: mol_type = other DNA
actgccgccgccctatacggagtggctaagtatcgcccggggacccttcgaaaccccgggcgtgtcgcaagtacgccgcg

SEQ ID NO: 122247 - DNA, 80 bp, synthetic construct
  source 1..80: mol_type = other DNA
accaggccggccaggaccagcagccccacggcaagcgccccgaaggggttggacataaaggaggacacgcccgagacggc

SEQ ID NO: 122248 - DNA, 80 bp, synthetic construct
  source 1..80: mol_type = other DNA
aatggaactatctgattctaccgtgtcccaagtcatggccgacttggcggacgccaggttcaaggtcgacacaccatcca

SEQ ID NO: 122249 - DNA, 80 bp, synthetic construct
  source 1..80: mol_type = other DNA
gggaggttggctagcctcacagatctctcctccagcaagtgccactggcttcgttgtcagtggcctggtggaggctgctg

SEQ ID NO: 122250 - DNA, 80 bp, synthetic construct
  source 1..80: mol_type = other DNA
gtgggacaagcgttcacctttagacctcgccaacacaagactgtgcagacgtgcaactgctcaatatacccaggtcatgt

SEQ ID NO: 122251 - DNA, 80 bp, synthetic construct
  source 1..80: mol_type = other DNA
gcaccgactggatctcggtcactcacgccatgcacgtgtggcgcatcagatctctatctagtgaccagacatgctgatgt

SEQ ID NO: 122252 - DNA, 80 bp, synthetic construct
  source 1..80: mol_type = other DNA
tccgcccgtctaggccgtgaggtcttgctgggccctgccgacgagtacacctccaaagggtggaagctcctcgcgcccat

SEQ ID NO: 122253 - DNA, 80 bp, synthetic construct
  source 1..80: mol_type = other DNA
cgcttgtcgggcttctggtaggcgctctggaggctggcgacccgcgccttggcggcctcggacgcgttggcgctcgcgcc

SEQ ID NO: 122254 - DNA, 80 bp, synthetic construct
  source 1..80: mol_type = other DNA
cctacagactgtggcattatccgtgtacagtcaattataccatcttcaagatacggatgtttgtggggggagttgaacac

SEQ ID NO: 122255 - DNA, 80 bp, synthetic construct
  source 1..80: mol_type = other DNA
cactccgctggacctgccagccataatccaaagactccatggcttgagcgcatttacactgcacggatactctccacacg

SEQ ID NO: 122256 - DNA, 80 bp, synthetic construct
  source 1..80: mol_type = other DNA
tcctcggccagtgtctgtggtggttgtgctatctcctgaccctgggggaagccatgattcaggagtgggtaccacccatg

SEQ ID NO: 122257 - DNA, 80 bp, synthetic construct
  source 1..80: mol_type = other DNA
ctgatgtttgatgagaaaggaaaacttcttgacaagtctagtcttgataaggaatattggaacttcagaagcaatgacag

SEQ ID NO: 122258 - DNA, 80 bp, synthetic construct
  source 1..80: mol_type = other DNA
tcccctgttcaccacctgcctgtaccagggaaacctcacatttatcagggagccatagatagccatcttaaaccaattag

SEQ ID NO: 122259 - DNA, 80 bp, synthetic construct
  source 1..80: mol_type = other DNA
gagatgtctgtggtcctgtctactgttttacacctagcccagtggtcgttggcaccaccgaccgcagagggtatcccact

SEQ ID NO: 122260 - DNA, 80 bp, synthetic construct
  source 1..80: mol_type = other DNA
tggtactgaacccctcggtggctgccaccctggggtttggggcttacatgtcaaaagcgcatggaatcaatcccaacatc

SEQ ID NO: 122261 - DNA, 80 bp, synthetic construct
  source 1..80: mol_type = other DNA
cccccgcgtttgagaccgccggcacgtacctgcggctcgtgaagataaacgactggacggagattacacagtttatcctg

SEQ ID NO: 122262 - DNA, 80 bp, synthetic construct
  source 1..80: mol_type = other DNA
tccttcttggccctgctgatgccttgggggacgctgggtggaggttgctcgctcccattacggcgtacgcacagcagacg

SEQ ID NO: 122263 - DNA, 80 bp, synthetic construct
  source 1..80: mol_type = other DNA
cgccccaccagcaatctgactcccgctgctctggtgcggagagtgtatcgcgatggccgcgcggatcccctgacgttgcc

SEQ ID NO: 122264 - DNA, 80 bp, synthetic construct
  source 1..80: mol_type = other DNA
acatcgcaatgctggttacctgttgctcccacgctcgctatcccgaatgccaccgtgccggtaagagggttccgctctca

SEQ ID NO: 122265 - DNA, 80 bp, synthetic construct
  source 1..80: mol_type = other DNA
gcattgtcttcgtgtgctcggcctggtacatcaaaggccggttcatccccgccgccacctatggactattgcagctgtgg

SEQ ID NO: 122266 - DNA, 80 bp, synthetic construct
  source 1..80: mol_type = other DNA
cgcccgcggccgccccgccgccgccccccgccggtgggcccccgccttcttgttcgctgctgctgcgccagtggctccac

SEQ ID NO: 122267 - DNA, 80 bp, synthetic construct
  source 1..80: mol_type = other DNA
gcagatgtcatttcgtttggtgttgagtcatggaacaaaccaaccccctgaaatcttgcttgattatattaatggaacgg

SEQ ID NO: 122268 - DNA, 80 bp, synthetic construct
  source 1..80: mol_type = other DNA
aagtggaaatgaccctgaagacattgactgctggtgtgacaaacaagctgtgtacgtaaactatggaaggtgcacacgtg

SEQ ID NO: 122269 - DNA, 80 bp, synthetic construct
  source 1..80: mol_type = other DNA
gatcttgcaggccagtctgctcaaggtaccgtacttcgtgcgtgcccacggtctcattaggctctgcatgctggtgcgca

SEQ ID NO: 122270 - DNA, 80 bp, synthetic construct
  source 1..80: mol_type = other DNA
catgggttcaaatgctgcataccaaggtgttaagccaaaagataacggcggatgggatccaaatactaatgctgcaaggc

SEQ ID NO: 122271 - DNA, 80 bp, synthetic construct
  source 1..80: mol_type = other DNA
cgcaacttctttttgggaggaagtgacggggcccgttccggactcgtctcctgcaagtagggagtgatggtgtggagttc

SEQ ID NO: 122272 - DNA, 80 bp, synthetic construct
  source 1..80: mol_type = other DNA
gacatacaaaatacaccagggcgtggaagtactcgcgagcgcgggggggcagccataccgcgtaaagggtaatggcgctg

SEQ ID NO: 122273 - DNA, 80 bp, synthetic construct
  source 1..80: mol_type = other DNA
tgcgttcagcctgagaaggggggtcgtaagccagctcgtctcatcgtgttccccgatctgggtgtgcgcgtgtgcgagaa

SEQ ID NO: 122274 - DNA, 80 bp, synthetic construct
  source 1..80: mol_type = other DNA
cccggctcatcgtgtaccctgacctatcggtaagggtgtgcgagaagatggccctgtatgacattacacagaagctcccc

SEQ ID NO: 122275 - DNA, 80 bp, synthetic construct
  source 1..80: mol_type = other DNA
catcactaatgactgccccaattccagcatagtctttgaggcagaccatcatattctgcacctcccagggtgcgtcccct

SEQ ID NO: 122276 - DNA, 80 bp, synthetic construct
  source 1..80: mol_type = other DNA
ggccgtgggtgttggtctcggccgagttgacaaagagggcgtggtgcagaacgcagcgataggcgaggagggccacggca

SEQ ID NO: 122277 - DNA, 80 bp, synthetic construct
  source 1..80: mol_type = other DNA
cgcgtggatgaacagtactggcttcaccaaagtctgcggggcccctccctgtttggtgcaaacctccaatggatcctggg

SEQ ID NO: 122278 - DNA, 80 bp, synthetic construct
  source 1..80: mol_type = other DNA
ggccggcactgggcgcagcctggttacccctggcccctgtatggtaacgagggctgcggatgggcagtgtggctcctgtc

SEQ ID NO: 122279 - DNA, 80 bp, synthetic construct
  source 1..80: mol_type = other DNA
atgttaggtccctctcaactgagttaagttctgatgaccagggtggggaccgcaagacagagtaacgaatcatggagatg

SEQ ID NO: 122280 - DNA, 80 bp, synthetic construct
  source 1..80: mol_type = other DNA
acgcccccaccatttgggtgcgcatggtgatgatgacccatttcttctccatactgcagtcccaggaggtacttgagaaa

SEQ ID NO: 122281 - DNA, 80 bp, synthetic construct
  source 1..80: mol_type = other DNA
gacttgtccagttggtttaccgtggcgccggcgggggcgatattttatcacagcgtatcgcatgcccgaccccgcctttt

SEQ ID NO: 122282 - DNA, 80 bp, synthetic construct
  source 1..80: mol_type = other DNA
tgcaaactgccagtggcggtcatgggggcagcctatgggttccaatactcacccagtcagagggtggaacgcctcctgaa

SEQ ID NO: 122283 - DNA, 80 bp, synthetic construct
  source 1..80: mol_type = other DNA
agggggtgagggctgccatttgtggcaagtacctcttcaactggtcggtgaggacaaaggttagactcactccaatcccg

SEQ ID NO: 122284 - DNA, 80 bp, synthetic construct
  source 1..80: mol_type = other DNA
gggattgtgactgactttgctttcctgagcccgcttgcaagcagtgcagcttcccgttcatccgcccgcgatgacaagtt

SEQ ID NO: 122285 - DNA, 80 bp, synthetic construct
  source 1..80: mol_type = other DNA
cctcgagggcgagccaggagatcctgacctctccgaaggggaaggctcaggatcgtggtccacagtcagcaccgaggaga

SEQ ID NO: 122286 - DNA, 80 bp, synthetic construct
  source 1..80: mol_type = other DNA
ccacactttttaaaatcacctcatttacatattggcaccattccatctataaggtatattattgatgatgagatcggaag

SEQ ID NO: 122287 - DNA, 80 bp, synthetic construct
  source 1..80: mol_type = other DNA
gggtaaccacgtgatgccccccgagtacccgacggcccccgcgtcggagtggaacagcctctggatgacccccgtgggga

SEQ ID NO: 122288 - DNA, 80 bp, synthetic construct
  source 1..80: mol_type = other DNA
ctctgactgtgacttcccttctcagaagacttcacaagtggatcaacgaagattgctccaccccctgcgactcgtcgtgg

SEQ ID NO: 122289 - DNA, 80 bp, synthetic construct
  source 1..80: mol_type = other DNA
ggcagtttgattggcacacgaacccgcgctacttgggctgaaaatatccatgtggcaatcaatcaggtccgttcagtgat

SEQ ID NO: 122290 - DNA, 80 bp, synthetic construct
  source 1..80: mol_type = other DNA
gggcgcgcgacccgcccgagtcagcggcccgccagttaccacccgccgaccaaacccccgcctccacggaggtcggtgtg

SEQ ID NO: 122291 - DNA, 80 bp, synthetic construct
  source 1..80: mol_type = other DNA
tggacctcatggtggggactgcctctttctgttctgccatgtaccttggggacgtctgtggagctgtcttcttggtgtgc

SEQ ID NO: 122292 - DNA, 80 bp, synthetic construct
  source 1..80: mol_type = other DNA
acacaagctggagtgctgtttggcatgggcaaagggatgccattttatgcatgggactttggagtcccgctgctaatgat

SEQ ID NO: 122293 - DNA, 80 bp, synthetic construct
  source 1..80: mol_type = other DNA
atggatcttggacacatgtgtgatgccaccatgagctatgaatgccctatgctggatgagggggtggaaccagatgacgt

SEQ ID NO: 122294 - DNA, 80 bp, synthetic construct
  source 1..80: mol_type = other DNA
tcgtcatccttttgcttaccgcaggagttgacgccaacacctttgttgggtctagtgtggctcggggggcggccagtctc

SEQ ID NO: 122295 - DNA, 80 bp, synthetic construct
  source 1..80: mol_type = other DNA
gggggaacattacaagagtagagtcagagaacaaagtggtcgttctcgactcgtttgacccacttgtccccgaatatgac

SEQ ID NO: 122296 - DNA, 80 bp, synthetic construct
  source 1..80: mol_type = other DNA
agctggggtcaacccggctacccttggcccctttatggcaacgagggctgcggatgtgcgggatggctcctgtccccccg

SEQ ID NO: 122297 - DNA, 80 bp, synthetic construct
  source 1..80: mol_type = other DNA
tgcagtgcctcaatcctaccaagttgcccatttgcatgcgccgacgggaagtggcaagagcaccaaagttccggcagcct

SEQ ID NO: 122298 - DNA, 80 bp, synthetic construct
  source 1..80: mol_type = other DNA
ccataagcccggccggccgggccgacgcgaataaaccgggccgccggccggggcgccgcgcagcagctcgccgcccggat

SEQ ID NO: 122299 - DNA, 80 bp, synthetic construct
  source 1..80: mol_type = other DNA
tggttggcctgggcgtcaacgcagtggccttttaccgcggcctcgacgtgtctgtcatcccaaccacaggagacgtcgtt

SEQ ID NO: 122300 - DNA, 80 bp, synthetic construct
  source 1..80: mol_type = other DNA
cgagaaccagacattcaaaaagaagcaagagatcagtggcagtccaggctcacggagaaagcacgctagtgaataagaaa

SEQ ID NO: 122301 - DNA, 80 bp, synthetic construct
  source 1..80: mol_type = other DNA
aggcggccatggcccgcctcggagccgagctgcgatcccacccaaacaccccccccaaaccccgacgccgttcgtcgtcg

SEQ ID NO: 122302 - DNA, 80 bp, synthetic construct
  source 1..80: mol_type = other DNA
atgcaaatatctccggcccctccgaggacagaccgtattgctggcactacccccctaggccttgtgacatcatcccagca

SEQ ID NO: 122303 - DNA, 80 bp, synthetic construct
  source 1..80: mol_type = other DNA
cgcctaccttaatacccccggactgcctgtatgccaggaccatcttgaattctgggagggagtgttcactggcctaacac

SEQ ID NO: 122304 - DNA, 80 bp, synthetic construct
  source 1..80: mol_type = other DNA
gctaggaagcaacagcatgcaaaggatagtgtttgcaattctgttgttgctggtggccccggcttacagctttaactgct

SEQ ID NO: 122305 - DNA, 80 bp, synthetic construct
  source 1..80: mol_type = other DNA
ctgatgcccgagtatactctgatcaccaagcgttgaagtctttcaaagattttgctgcaggaaagcgctcacagatagga

SEQ ID NO: 122306 - DNA, 80 bp, synthetic construct
  source 1..80: mol_type = other DNA
gaccgggggagggcgcggtccaatggatgaacaggcttattgcctttgcttccagaggaaaccacgtcgcccctactcac

SEQ ID NO: 122307 - DNA, 80 bp, synthetic construct
  source 1..80: mol_type = other DNA
cgtggagtcatattcgtccatgccgccccttgagggggaaccgggtgacccggacctggatgctgactcttggtccaccg

SEQ ID NO: 122308 - DNA, 80 bp, synthetic construct
  source 1..80: mol_type = other DNA
aacagcaagggggacctatgcggcgtccgcaggtgtcgcgccagtggcgtgttcaccaccagcttcggaaacacactgac

SEQ ID NO: 122309 - DNA, 80 bp, synthetic construct
  source 1..80: mol_type = other DNA
tcgaggaccagcggccatactgctggcactaccctccgcgaccatgcggggtggtgccggcgagtaccatctgcggcccg

SEQ ID NO: 122310 - DNA, 80 bp, synthetic construct
  source 1..80: mol_type = other DNA
actttttgctgaccaatagacagcagaagatcccgccgcagtatgcgctgtcggccgaggaggaaagaatcctgagatat

SEQ ID NO: 122311 - DNA, 80 bp, synthetic construct
  source 1..80: mol_type = other DNA
ctccgtcacggtgccgcatccaaacatcgaggaggttgccttgccttctacaggagaaattcccttttatggcaaagcta

SEQ ID NO: 122312 - DNA, 80 bp, synthetic construct
  source 1..80: mol_type = other DNA
agtgtgggccccccccctgcttgcgcgtgggggtagggacggtgtcatcttgttggcaagcctgcttcatccatccctaa

SEQ ID NO: 122313 - DNA, 80 bp, synthetic construct
  source 1..80: mol_type = other DNA
tgtgagtgaggaggagagcgacagtgttgtttgccgttcatactcatactcgtggacaggagccctcataacaccttgtg

SEQ ID NO: 122314 - DNA, 80 bp, synthetic construct
  source 1..80: mol_type = other DNA
accgcagagggtgtcccacttataactggggcagcaacgagactgacatccttctcttgaataacattaggccccccgct

SEQ ID NO: 122315 - DNA, 80 bp, synthetic construct
  source 1..80: mol_type = other DNA
tgatatcgacatggagttttttgatgcggcatcgcagaaaacaaacttaagtcctaaaattgtcatgtatgcagaaaatg

SEQ ID NO: 122316 - DNA, 80 bp, synthetic construct
  source 1..80: mol_type = other DNA
aaatagtagatggcattgccatggggctgatattgctgaaaatgattgttcaattcgacaatgaacaaattgggacagtg

SEQ ID NO: 122317 - DNA, 80 bp, synthetic construct
  source 1..80: mol_type = other DNA
gggaatactttacaaatgcaattctaaatccgcattggttgccccctcctggattttacactggtgaattcgatttgccg

SEQ ID NO: 122318 - DNA, 80 bp, synthetic construct
  source 1..80: mol_type = other DNA
agggggaggtccaagtggtctccaccgcaacgcaatctttcctcgcgacctgtgttaatggtgtgtgttggactgtctac

SEQ ID NO: 122319 - DNA, 80 bp, synthetic construct
  source 1..80: mol_type = other DNA
aaagagtcctgattttcatcctactgacagctgtcgctccttcaatgacaatgcgctgtataggaatatcaaacagagac

SEQ ID NO: 122320 - DNA, 80 bp, synthetic construct
  source 1..80: mol_type = other DNA
cattgtgtggggagctgagacagtggcatgtggagatatcctgcatggccttccagtttccgcaaggctaggtagagaag

SEQ ID NO: 122321 - DNA, 80 bp, synthetic construct
  source 1..80: mol_type = other DNA
aacggccgatccagcgtactggtggcctcgcgcagcaccaggggccccgggcctccgctcactcgcaggtacgcctcgcc

SEQ ID NO: 122322 - DNA, 80 bp, synthetic construct
  source 1..80: mol_type = other DNA
cacatcaatagtactgccctgaactgcaatgattccctaaacaccgggttcatagccgggctgatctattatcataagtt

SEQ ID NO: 122323 - DNA, 80 bp, synthetic construct
  source 1..80: mol_type = other DNA
cttacacccgtcgtgggtctcgctgatgccccccaagcaggtgcccgagacggtcgtggatgcggcgtgcatgcgcgctc

SEQ ID NO: 122324 - DNA, 80 bp, synthetic construct
  source 1..80: mol_type = other DNA
gaggaacccgtccctgatgcatacaatccaaacatgctcaagaaaaggcagctgacagtgttggacctgcatccaggatc

SEQ ID NO: 122325 - DNA, 80 bp, synthetic construct
  source 1..80: mol_type = other DNA
gccgtggacgctgacccgcagcatcttctcgagctccccgcgctgctcgcggacgcagcgccccaggctggccaacgacc

SEQ ID NO: 122326 - DNA, 80 bp, synthetic construct
  source 1..80: mol_type = other DNA
ttctcttatgacacccgctgctttgactccactgtaaccgaaaaggacatcagagccgaggaagaggtctatcagtgttg

SEQ ID NO: 122327 - DNA, 80 bp, synthetic construct
  source 1..80: mol_type = other DNA
aggtgtcgggggggtggaggcttctcgcccccattaccgcctacgcgcagcagactcgaggcttactcggcaccatagtg

SEQ ID NO: 122328 - DNA, 80 bp, synthetic construct
  source 1..80: mol_type = other DNA
gttggcactacgcgccccgtcagtgcgaggtggtgccggcaaaaaatgtatgcggtccggtgtactgtttcacccctagc

SEQ ID NO: 122329 - DNA, 80 bp, synthetic construct
  source 1..80: mol_type = other DNA
ttaacggctaaaaggtgcggtgcgaccgtgggaaaatgacgttttgtggtggtggagtttttttgcaagttgtcgcggga

SEQ ID NO: 122330 - DNA, 80 bp, synthetic construct
  source 1..80: mol_type = other DNA
ggcgcttctttttcttcttgggcgcaatggccaaatccgccgccgaggtcgatggccgcgggctgggtgtgcgcggcacc

SEQ ID NO: 122331 - DNA, 80 bp, synthetic construct
  source 1..80: mol_type = other DNA
ccgacacggtcggaatctccgcgtccgtgggtttctctgcgttgcgccggaccacgagcacaaacgtgctctgccacacg

SEQ ID NO: 122332 - DNA, 80 bp, synthetic construct
  source 1..80: mol_type = other DNA
gcccgacgttgcggtgctcacgtccatgctcactgatcctgcccacatcactgcagagacggcgcgacgacgcctcggaa

SEQ ID NO: 122333 - DNA, 80 bp, synthetic construct
  source 1..80: mol_type = other DNA
agaccacctgcccatgtggagcacagatctccggccacgtcaagaacggttccatgaggatcgttgggcctaagacctgc

SEQ ID NO: 122334 - DNA, 80 bp, synthetic construct
  source 1..80: mol_type = other DNA
acaacttcctcaaatcttcacttccgttttcccacggtacgtcacttcccattttaaaaaaactacaattcccaatacat

SEQ ID NO: 122335 - DNA, 80 bp, synthetic construct
  source 1..80: mol_type = other DNA
catggcccaaagtggaacaattttgggccagacacatgtggaacttcattagcggcatccaatacctcgcaggattgtca

SEQ ID NO: 122336 - DNA, 80 bp, synthetic construct
  source 1..80: mol_type = other DNA
cgtggaggtggtgtggaccgccgcggggctggccacgccgccgaggcgcgagcccgtggacatggacgcggagctggagg

SEQ ID NO: 122337 - DNA, 80 bp, synthetic construct
  source 1..80: mol_type = other DNA
cgaaggggccgcccaatggatgaaccgtctgatagctttcgcttcacgcggtaatcatgtgtcgcctacccattacgtgc

SEQ ID NO: 122338 - DNA, 80 bp, synthetic construct
  source 1..80: mol_type = other DNA
catggatgattcataccctagagacactggactacaaggaatgtgaatggccgctgacacacacgattggaacatcagtt

SEQ ID NO: 122339 - DNA, 80 bp, synthetic construct
  source 1..80: mol_type = other DNA
ggtggccataatggatgaagcacattggactgatcctcacagtatagcagcacgtggtcacctgtactctttggctaaag

SEQ ID NO: 122340 - DNA, 80 bp, synthetic construct
  source 1..80: mol_type = other DNA
tgtgtggtggtggctcatctttttcatctgttgggcttggtacgtgcggggccgggcggtgcccgctttcacctatggat

SEQ ID NO: 122341 - DNA, 80 bp, synthetic construct
  source 1..80: mol_type = other DNA
attcttccatgcctccgctggagggcgagcctggggaccctgacctttcgtcagggtcgtggtcaactgtcagcgatgag

SEQ ID NO: 122342 - DNA, 80 bp, synthetic construct
  source 1..80: mol_type = other DNA
cgggcgctttggcacccagtcccaggccacggtgaacttggaggtcgtgagcaggttccgggtggtcggcgccgtggccc

SEQ ID NO: 122343 - DNA, 80 bp, synthetic construct
  source 1..80: mol_type = other DNA
tccgcgccccgacagggaagaaactctggtgacgcaaatagacgagcctccctcgtacgaggaggcactaaagcaaggcc

SEQ ID NO: 122344 - DNA, 80 bp, synthetic construct
  source 1..80: mol_type = other DNA
atgctggcaaaggctctgcggagactctgtaggataaagtgtttttgggcccggtcgtaccgacggctcatagccacggc

SEQ ID NO: 122345 - DNA, 80 bp, synthetic construct
  source 1..80: mol_type = other DNA
cagttgttgcacctcctgcctccacacgaaaacctttgtcaaagccaaaacaagtgaatgtccaatatggacataatgta

SEQ ID NO: 122346 - DNA, 80 bp, synthetic construct
  source 1..80: mol_type = other DNA
ggccacgacggcggtgtagcccacgcccaggtccacgttcccgcgcggctgggtgagcgtgaagtttacccccccgccag

SEQ ID NO: 122347 - DNA, 80 bp, synthetic construct
  source 1..80: mol_type = other DNA
gagtacggctgcacaggtacgccccggcgtgcagacctctcctgcgggaggaggtcactttccaggtcgggctcaatcag

SEQ ID NO: 122348 - DNA, 80 bp, synthetic construct
  source 1..80: mol_type = other DNA
gacggttccaaggacggagcgaccgccgcaaaaccgtcgctttcaaccgaaccctctccagtgaaacacactgtcaacaa

SEQ ID NO: 122349 - DNA, 80 bp, synthetic construct
  source 1..80: mol_type = other DNA
atactccttgcttgcttgttgcacccacaactgggttttgaggttacaaagattctcctggctttgcttggccctcttta

SEQ ID NO: 122350 - DNA, 80 bp, synthetic construct
  source 1..80: mol_type = other DNA
cccgttgtggtcggcacgactgatcgccagggcgttccgacgtaccggtggggggagaatgagacggacgtgctgcttct

SEQ ID NO: 122351 - DNA, 80 bp, synthetic construct
  source 1..80: mol_type = other DNA
ttcccgctcgtagacggggcgacactcgcgcctccctgctcagtccgagacccatcagttaccttaagggttcctcaggc

SEQ ID NO: 122352 - DNA, 80 bp, synthetic construct
  source 1..80: mol_type = other DNA
actaataccccaatatcaacaacaatcatggcaaagaatgaggtgttctccgtgaaaccggagaaaggcggccgaaagcc

SEQ ID NO: 122353 - DNA, 80 bp, synthetic construct
  source 1..80: mol_type = other DNA
cctacacccgggttgtttattcaaaatacatcccccgttgatctttgtaatggcgattacatctgcttacttcctccggt

SEQ ID NO: 122354 - DNA, 80 bp, synthetic construct
  source 1..80: mol_type = other DNA
gtttgggtacggtgcgaaggatgtccgtggccactccagtaaggccatcaaccacatcaactccgtgtgggaggacttgc

SEQ ID NO: 122355 - DNA, 80 bp, synthetic construct
  source 1..80: mol_type = other DNA
tatgtgtcctcacgtttatcagcgccgttgcagccaatgagatgggctggttggacaaaaccaaaaatgacatgagcaac

SEQ ID NO: 122356 - DNA, 80 bp, synthetic construct
  source 1..80: mol_type = other DNA
gcgaaacctgcgggcctttacggaggccatgaccaggtattctgcccctcccggggaccccccaaaaccagaatatgacc

SEQ ID NO: 122357 - DNA, 80 bp, synthetic construct
  source 1..80: mol_type = other DNA
aggggtggaggcatctcattttctgccattccaagaagaagtgcgacgagctcgcttcaaagctggttggcctaggcgtt

SEQ ID NO: 122358 - DNA, 80 bp, synthetic construct
  source 1..80: mol_type = other DNA
cggtgctgttaggatcttttggatgcaaaccattaactatgtttcttataacagaaaacaaaatctggggaaggaaaagt

SEQ ID NO: 122359 - DNA, 80 bp, synthetic construct
  source 1..80: mol_type = other DNA
ccgttaccacgccccaccccaacatagaggaggttgctcttggacacgagggcgagatacccttttatggcaaggctatc

SEQ ID NO: 122360 - DNA, 80 bp, synthetic construct
  source 1..80: mol_type = other DNA
gagcggctttactgcgggggccccatgttcaacagcaaggtggcccagtgcggttatcgccgttgccgtgctagtggagt

SEQ ID NO: 122361 - DNA, 80 bp, synthetic construct
  source 1..80: mol_type = other DNA
cgctcttgttttcaacaactgagctagcgattctcccttgctcattcacgaccatgccggctttgtctactgggttgata

SEQ ID NO: 122362 - DNA, 80 bp, synthetic construct
  source 1..80: mol_type = other DNA
tgcgcatgttggtggtggacgcggtgttggcgcccgcgtcgggcgccgccgagcagagcagcgccgttgtgcgttcggcc

SEQ ID NO: 122363 - DNA, 80 bp, synthetic construct
  source 1..80: mol_type = other DNA
ccgcttgagtctttgagacgtcacgtggatctgatggtgggcagcgccactctttgctccgctctttacatcggagacgt

SEQ ID NO: 122364 - DNA, 80 bp, synthetic construct
  source 1..80: mol_type = other DNA
attccgtcatcgactgtaacgtagccgtgacacaggtggtggatttcagcttggacccaacattttccatagagactact

SEQ ID NO: 122365 - DNA, 80 bp, synthetic construct
  source 1..80: mol_type = other DNA
aacggcacgtctctcacgtgccctacagattgcttcaggaaacacccagaggctacatacagtcggtgcgggtccggtcc

SEQ ID NO: 122366 - DNA, 80 bp, synthetic construct
  source 1..80: mol_type = other DNA
ctcctggaaaagctggggccattcaatgatctggagcattcctgaggccccccgtcgtttcatggtgggcacggaaggac

SEQ ID NO: 122367 - DNA, 80 bp, synthetic construct
  source 1..80: mol_type = other DNA
ttacccatattgatgcacacttcctctcacaaacgaagcaggggggggagaacctagcgtatctggtggcatatcaagct

SEQ ID NO: 122368 - DNA, 80 bp, synthetic construct
  source 1..80: mol_type = other DNA
tacgacgctttagacgttcaaaatatcttacagattcttcaccaagcgtacgaccaaacattatcaatgacatttaacat

SEQ ID NO: 122369 - DNA, 80 bp, synthetic construct
  source 1..80: mol_type = other DNA
ggcgcaggctcgagaacgctcgcgagcgccaagcatcccgcgctccaaatgtacacaaatgtagatcaggacctcgttgg

SEQ ID NO: 122370 - DNA, 80 bp, synthetic construct
  source 1..80: mol_type = other DNA
gcctcacaggccgggacaggaaccaggtcgagggggaggtccaagtggtctccaccgcaacacaatctttcctggcgacc

SEQ ID NO: 122371 - DNA, 80 bp, synthetic construct
  source 1..80: mol_type = other DNA
actccggccccgggaccgccagcgtcatgcccgccctcaaggtccttgactcgctggtggcggcgcacaacaaagagagc

SEQ ID NO: 122372 - DNA, 80 bp, synthetic construct
  source 1..80: mol_type = other DNA
tgattcttcttccactataaagtcttccccgtccgatgattccgcgtcggaatcccgaaattcaattacatccgatggcg

SEQ ID NO: 122373 - DNA, 80 bp, synthetic construct
  source 1..80: mol_type = other DNA
agctgtcattgagcccatagtagctaccaactggcaaaagcttgaggccttctggcacaagcatatgtggaattttgtga

SEQ ID NO: 122374 - DNA, 80 bp, synthetic construct
  source 1..80: mol_type = other DNA
tgctgatgttatccctgctcgccgtaggggtgacaatcgggccgccttgcttagtccgagaccgatatccactcttaaag

SEQ ID NO: 122375 - DNA, 80 bp, synthetic construct
  source 1..80: mol_type = other DNA
tttacaacatgatggggaagcgtgagaagaagctcggagagtttggtaaagcgaaaggtagtcgagccatatggttcatg

SEQ ID NO: 122376 - DNA, 80 bp, synthetic construct
  source 1..80: mol_type = other DNA
ttactttagcactagatgcagcgctgcctttgcaatataaaaacaaccaacttcaactcagaattggctccgcgtctgct

SEQ ID NO: 122377 - DNA, 80 bp, synthetic construct
  source 1..80: mol_type = other DNA
ccggagggctcgtaaaagattgtccggaaccaaaaggaaagcaagcaacttacagagatagagctcggactggagagctc

SEQ ID NO: 122378 - DNA, 80 bp, synthetic construct
  source 1..80: mol_type = other DNA
gtggtggacagtcactacaatgaagtacttaaggagattaaggcacgagcctccacagtgaaggcgcggttactcacggt

SEQ ID NO: 122379 - DNA, 80 bp, synthetic construct
  source 1..80: mol_type = other DNA
ccgagatggcgtcatatgggctgtgaccatgctttacccgggcatagtgtttgatgtgactaagtggctcctagccatcc

SEQ ID NO: 122380 - DNA, 80 bp, synthetic construct
  source 1..80: mol_type = other DNA
tttcgggtgaacccggggcacccattcggccaaatcccccccgtacaacatccgcgctagcgatacgctcgacgtgtact

SEQ ID NO: 122381 - DNA, 80 bp, synthetic construct
  source 1..80: mol_type = other DNA
ggctcgctggtggcgctaaatgcttttttgagtactttgccagccaacgttccgcgcggccaagaggattacacaaactt

SEQ ID NO: 122382 - DNA, 80 bp, synthetic construct
  source 1..80: mol_type = other DNA
aggtgcctaaaatttttgaaggtttaggtcgggatgaaaaacgagcagcaaatgccctgcaaaaagaaaatgaacaaaat

SEQ ID NO: 122383 - DNA, 80 bp, synthetic construct
  source 1..80: mol_type = other DNA
attaccttcctcttcggacttgatatccacgacgtcaaagtcgtgggcggtcagcgagacgacctccccgtcgtcggtga

SEQ ID NO: 122384 - DNA, 80 bp, synthetic construct
  source 1..80: mol_type = other DNA
gaaccggtgacgggagtggaaaacccagacgggggatgcgggtccggtcgcgccccctacccaccgtactcgtcaattcc

SEQ ID NO: 122385 - DNA, 80 bp, synthetic construct
  source 1..80: mol_type = other DNA
gttttgggagaatatcgcgcaaaataccactgaaacaccttgtataacgtcgacgttaacatgcaacttgacagaagact

SEQ ID NO: 122386 - DNA, 80 bp, synthetic construct
  source 1..80: mol_type = other DNA
gagcaattcaagtaactctacaagcttgtctaatttttctggaatcggggtcggggttatccttactcttgtaattctgt

SEQ ID NO: 122387 - DNA, 80 bp, synthetic construct
  source 1..80: mol_type = other DNA
atatcttaccaccagagccgaggcgcttctgcacgtgtgggttccccccctcaatgttcggggtggccgcgatgccatca

SEQ ID NO: 122388 - DNA, 80 bp, synthetic construct
  source 1..80: mol_type = other DNA
tggtacacgggtgcccattgccacctaccaaggcccctccagtaccacctccacggaggaagaggacggtcgtcctttcc

SEQ ID NO: 122389 - DNA, 80 bp, synthetic construct
  source 1..80: mol_type = other DNA
aaagaaaaagacacctaggatgtgcactagagaagaattcacaagaaaggtgagaagcaatgcagccctaggtgccatat

SEQ ID NO: 122390 - DNA, 80 bp, synthetic construct
  source 1..80: mol_type = other DNA
ggtgtgtttgtcggtggacatgaggctcagcggaaagctggcgtcggggggtgaggcggaaaacagtggcttcatgtgga

SEQ ID NO: 122391 - DNA, 80 bp, synthetic construct
  source 1..80: mol_type = other DNA
ccggcgtacggcatgcccgcgcacggacatggtggccggaggcccgattttttacacacgccctccccgcagacggacga

SEQ ID NO: 122392 - DNA, 80 bp, synthetic construct
  source 1..80: mol_type = other DNA
gggcctacccccttgctgtataggcttggcgctgtgcagaatgagatcaccacaactcacccggtcacgaagtacatcat

SEQ ID NO: 122393 - DNA, 80 bp, synthetic construct
  source 1..80: mol_type = other DNA
ccctgtgccacgtcttggctaagggacgtttgggactggatttgcacagtcttggcagactttaaggtctggctgaaatc

SEQ ID NO: 122394 - DNA, 80 bp, synthetic construct
  source 1..80: mol_type = other DNA
tgctaggatctattctgacccactggcactgaaagaattcaaggaatttgcagctggaagaaaatctttgaccctgaacc

SEQ ID NO: 122395 - DNA, 80 bp, synthetic construct
  source 1..80: mol_type = other DNA
tggtcttctgtatttcatcctcttctttgtagccgcttggtgtattaaaggtcgtgcggtcccgatggtaacgtatacct

SEQ ID NO: 122396 - DNA, 80 bp, synthetic construct
  source 1..80: mol_type = other DNA
cagactcatagcgttcgcgtcgcgtggtaaccacgtgtcgcctacgcattatgtgcctgagactgatgcctccaaaactg

SEQ ID NO: 122397 - DNA, 80 bp, synthetic construct
  source 1..80: mol_type = other DNA
gtccacgcattgcatgagcccgtagctgcgcggggccacgaccgtgccgcggtgggtttttaaaagcggtgtcgcggacg

SEQ ID NO: 122398 - DNA, 80 bp, synthetic construct
  source 1..80: mol_type = other DNA
gagctaagagaatggccatcctgggtgagacagcatgggactttggatcggttggtggtgtgtttacatctttgggaaag

SEQ ID NO: 122399 - DNA, 80 bp, synthetic construct
  source 1..80: mol_type = other DNA
ctccagaaactcggatacattctgcaagaaatctcccaaattccaggaggaaagatgtacgcagatgatacagctggctg

SEQ ID NO: 122400 - DNA, 80 bp, synthetic construct
  source 1..80: mol_type = other DNA
tgaaaatagtcgggccccgcacctgcagcaacgtgtggaatggcactttccccattaatgcgacgacgaccggtccaagc

SEQ ID NO: 122401 - DNA, 80 bp, synthetic construct
  source 1..80: mol_type = other DNA
tgtcttgtcttgcatggtgtttactttcttaactttagtaacatttgtgtagagtcttggaataaggtttctgctagggg

SEQ ID NO: 122402 - DNA, 80 bp, synthetic construct
  source 1..80: mol_type = other DNA
ggttttatgcggatgacacggcatggtgggacacacgcatcacagaagctgacctggatgacgagcaagagatcatgagt

SEQ ID NO: 122403 - DNA, 80 bp, synthetic construct
  source 1..80: mol_type = other DNA
tggtttgtgtcgggctacagcgggggggacatatttcacagcgtgtcctacgcccgaccccgcatgttactcctgtgcct

SEQ ID NO: 122404 - DNA, 80 bp, synthetic construct
  source 1..80: mol_type = other DNA
ggcactactgatgccaggggtcagccaacctacaactggggtgagaatgcaacagacgtgttcctgctggagtccctgcg

SEQ ID NO: 122405 - DNA, 80 bp, synthetic construct
  source 1..80: mol_type = other DNA
tggggatcggtacagtcctggaccaggcggagacggctggcgcccgcctaaccgtgctcgctacggcgacaccgccgggc

SEQ ID NO: 122406 - DNA, 80 bp, synthetic construct
  source 1..80: mol_type = other DNA
aaagcacacgggatcaatcccaacatcagaactggggttcgaaccgtgacgaccggagagtccatcacatattctaccta

SEQ ID NO: 122407 - DNA, 80 bp, synthetic construct
  source 1..80: mol_type = other DNA
ctggcggacgcggaccggccccagggccgccgcggtgcgcaggccggcggaatccagcgcatgggacgtgtcggagccgg

SEQ ID NO: 122408 - DNA, 80 bp, synthetic construct
  source 1..80: mol_type = other DNA
ttagtttacgggacaatcgataacagcatacacgtacatctgcgcaggatatgtacggaaaggcaatttatttccagaaa

SEQ ID NO: 122409 - DNA, 80 bp, synthetic construct
  source 1..80: mol_type = other DNA
gggcaagctttcaggttccgtcaacgccaacattggacaacacaggactgcaactgttccatgtatccgggccacctaac

SEQ ID NO: 122410 - DNA, 80 bp, synthetic construct
  source 1..80: mol_type = other DNA
cacttcagagttcgtcaacagctccaagatccggcgggattggaactcttcaatttgtggaggaatttactccatctgtt

SEQ ID NO: 122411 - DNA, 80 bp, synthetic construct
  source 1..80: mol_type = other DNA
acgacaaactgacaagatgatctgcctgcgcgaccaaaacgtatgcagtcttacctctacaatgccatcccgaggacatc

SEQ ID NO: 122412 - DNA, 80 bp, synthetic construct
  source 1..80: mol_type = other DNA
tcctgcccgccatcctgtctcctggcgccttggtagtgggagtcatctgcgcagcaatcttgcgccgccacgttggtcag

SEQ ID NO: 122413 - DNA, 80 bp, synthetic construct
  source 1..80: mol_type = other DNA
taactatcaccaagatgctggaaatagggatcagaacaccgactacctcatagggcttgacggggaagacgcgctcctta

SEQ ID NO: 122414 - DNA, 80 bp, synthetic construct
  source 1..80: mol_type = other DNA
aagatggatgttggtacgggatggagattaggcccttgagtgaaaaagaagagaacatggtcaaatcacaggtaacagcc

SEQ ID NO: 122415 - DNA, 80 bp, synthetic construct
  source 1..80: mol_type = other DNA
aacagactcatagctttcgcttcgcggggcaaccatgtgtctccaacacattatgtgcccgagacggatgcctcgcgggc

SEQ ID NO: 122416 - DNA, 80 bp, synthetic construct
  source 1..80: mol_type = other DNA
tattgtgcctagcaacgttttttctatggatggccgatgtgtcatgtacgaagatcgctgggatgctactcttgtcgctg

SEQ ID NO: 122417 - DNA, 80 bp, synthetic construct
  source 1..80: mol_type = other DNA
gtccagacggtgctgcgtgttgtagatgttcgtcagggtctcggaggcccccagcacctgccagtaagtcatcggctcgg

SEQ ID NO: 122418 - DNA, 80 bp, synthetic construct
  source 1..80: mol_type = other DNA
aaatttggctatggagcgaaggaggtgcggtccttgtccagcaaggccattaaccatatcaactccgtatgggaggactt

SEQ ID NO: 122419 - DNA, 80 bp, synthetic construct
  source 1..80: mol_type = other DNA
ggagaccgacgagcggcactgctatccccgcggcccctctcaacattgaaggggtcctcaggaggacctgtcctctgttc

SEQ ID NO: 122420 - DNA, 80 bp, synthetic construct
  source 1..80: mol_type = other DNA
tggtgtttcaggagccctcgtagccttcaaaatcatgagcggcgagactccgtcaatcgaggacatggtgaacctactcc

SEQ ID NO: 122421 - DNA, 80 bp, synthetic construct
  source 1..80: mol_type = other DNA
gtccgatccaggccatggtaccaccggcggtgagtcaacaccatcagcggaggatgatgacccctcagaggctgactcat

SEQ ID NO: 122422 - DNA, 80 bp, synthetic construct
  source 1..80: mol_type = other DNA
cgtggacctcctcgtgggcgctgcggcactgtgctctgctttgtatgtgggtgacttctgtggagtggcgttcttaatgg

SEQ ID NO: 122423 - DNA, 80 bp, synthetic construct
  source 1..80: mol_type = other DNA
acccctggggcggaaatgattctgatgtgttcctgctggcaagcccgagaccccccgcagggtgttggtttggatgcacg

SEQ ID NO: 122424 - DNA, 80 bp, synthetic construct
  source 1..80: mol_type = other DNA
atctggctcaagtccaggctggttccatctttgcctggtgttcccttcttttcatgtcaaaaggggttccgtggagagtg

SEQ ID NO: 122425 - DNA, 80 bp, synthetic construct
  source 1..80: mol_type = other DNA
cagctcgctcccccaacagcatcgacggcctttgtcgtcagcggcatggccggcgctgctgtgggcagcattgggttgtg

SEQ ID NO: 122426 - DNA, 80 bp, synthetic construct
  source 1..80: mol_type = other DNA
ctaatagcatgttatgtcatatctggaagctcggccgatttatcactggagaaagcggctgaggtctcctgggaagaaga

SEQ ID NO: 122427 - DNA, 80 bp, synthetic construct
  source 1..80: mol_type = other DNA
cccaatagcagcatcgtttatgaggcagacaatttaatactgcatctgcctgggtgcaccccctgcgtcaagactgataa

SEQ ID NO: 122428 - DNA, 80 bp, synthetic construct
  source 1..80: mol_type = other DNA
ttcacgggtctcacccacatagacgcccacttcctatcccagacaaagcagagtggagaaaaccttccttatctggtagc

SEQ ID NO: 122429 - DNA, 80 bp, synthetic construct
  source 1..80: mol_type = other DNA
gcaagtcgttgatttcagcctagaccctacttttactatagaaaccaccactgtgccccaggacgctgtctcccgcagtc

SEQ ID NO: 122430 - DNA, 80 bp, synthetic construct
  source 1..80: mol_type = other DNA
ggcccgccttattgtgtacccagacctaggggtgagggtgtgcgaaaagaaggccttgtacgacataactcagaagctgc

SEQ ID NO: 122431 - DNA, 80 bp, synthetic construct
  source 1..80: mol_type = other DNA
gtgcgctttgccttctaagggactaccacctatcccgcctcctaggaggaagaaggttgtcaaacttgacgaggcaacgg

SEQ ID NO: 122432 - DNA, 80 bp, synthetic construct
  source 1..80: mol_type = other DNA
cctggatgaattccacagggtttgtcaagacttgcggggctccaccctgcaacttagggcctacaggcaacaatagcctt

SEQ ID NO: 122433 - DNA, 80 bp, synthetic construct
  source 1..80: mol_type = other DNA
accacctccaaggcggaagaaacgacctgtgcgccttgatgattcggtggtagcgcaggctctggctgaactcgctcaga

SEQ ID NO: 122434 - DNA, 80 bp, synthetic construct
  source 1..80: mol_type = other DNA
gaagtcacgactagcacctgggtgctggttggtggtgtcttggccgcggtagctgcttactgcatggctactggtagcgt

SEQ ID NO: 122435 - DNA, 80 bp, synthetic construct
  source 1..80: mol_type = other DNA
gcggtgacccccacggtggccaccagggacggcagactccccacaacacagcttcgacgtcacatcgatctgcttgtcgg

SEQ ID NO: 122436 - DNA, 80 bp, synthetic construct
  source 1..80: mol_type = other DNA
agtggtggcagcaaatgaatacggaatgctggaaaaaaccaaagcagaccttaagagcatgtttggcggaaagacgcaag

SEQ ID NO: 122437 - DNA, 80 bp, synthetic construct
  source 1..80: mol_type = other DNA
cacccacccccacaggcaggactcgcagacgagcggccgttgccgccgccgcggccatctctagcatgaccagacccagg

SEQ ID NO: 122438 - DNA, 80 bp, synthetic construct
  source 1..80: mol_type = other DNA
taaggaggtgagcgcgtatatgagtaagttacacgcgcatttaaaactatcgaaaaatgaccatttttctgtgtttgcct

SEQ ID NO: 122439 - DNA, 80 bp, synthetic construct
  source 1..80: mol_type = other DNA
ccaccgggttcaagatcactaacaccctgtacctgtggcgccagtgacctctacctcgtcaccagacacgcggatgttat

SEQ ID NO: 122440 - DNA, 80 bp, synthetic construct
  source 1..80: mol_type = other DNA
tattccagaggactatcacgcccaccaaattaagttctacgaagaccaatcccgacctcccaaagcccccctcacggctt

SEQ ID NO: 122441 - DNA, 80 bp, synthetic construct
  source 1..80: mol_type = other DNA
attttgcatctccccggatgtgttccatgcgttaagactgacaatcaatctaaatgctgggtaccagccacgcctacgct

SEQ ID NO: 122442 - DNA, 80 bp, synthetic construct
  source 1..80: mol_type = other DNA
tgtcctggcccgggctgcttgggaaactgctcgacacactccagtcaattcctggttgggcaacatcattatgtacgcgc

SEQ ID NO: 122443 - DNA, 80 bp, synthetic construct
  source 1..80: mol_type = other DNA
atattttgttgtttttaggtcctgtttccgataatgagcctgaacctaatagcactttggatggcgatgagcgaccctca

SEQ ID NO: 122444 - DNA, 80 bp, synthetic construct
  source 1..80: mol_type = other DNA
agagagacagcttgcctgagcaaatcttatgctcagatgtggttactcatgtacttccaccggcgggatctcaggatgat

SEQ ID NO: 122445 - DNA, 80 bp, synthetic construct
  source 1..80: mol_type = other DNA
atgaaagtggacccaagcgttgagccggaagtaaaagtgcgccccattaaggaaataggtccaggtctgggagtgcaaac

SEQ ID NO: 122446 - DNA, 80 bp, synthetic construct
  source 1..80: mol_type = other DNA
cagtggcagtcattgtgtggatgaccgtggaaagtgcggtgaccaggattgtcatcgtgtcagcactgctctgcttagcc

SEQ ID NO: 122447 - DNA, 80 bp, synthetic construct
  source 1..80: mol_type = other DNA
ttcgtccagatgttgggtgccggccactcccacacttgccgtgccgaacgcttcgactcccctcacagggttccgcaagc

SEQ ID NO: 122448 - DNA, 80 bp, synthetic construct
  source 1..80: mol_type = other DNA
tcgcaggtcgaagcagcgctcgccaacctgattaccatcaatgctgtctcagtcgctggcattcacgggttctggtacgc

SEQ ID NO: 122449 - DNA, 80 bp, synthetic construct
  source 1..80: mol_type = other DNA
tacgcgcaacaaactcgaggcgtgttaggcaccatcgtgactagcctcacgggccgtgacaaaaatgaggtggaaggtga

SEQ ID NO: 122450 - DNA, 80 bp, synthetic construct
  source 1..80: mol_type = other DNA
catgttggttggagccagaggatgattgggaggtggccattaaaaattatgcgaagatagctttgaggcctgataagcag

SEQ ID NO: 122451 - DNA, 80 bp, synthetic construct
  source 1..80: mol_type = other DNA
tgcttcacccccagtcctgtagttgtcggcactactgatagggctcgagtgcctacctatagctggggagagaatgaaac

SEQ ID NO: 122452 - DNA, 80 bp, synthetic construct
  source 1..80: mol_type = other DNA
gccccgggcgagtggccgctcggcgatgagcgcggacaggcgcgggagctgtgccgccagacacgcgttttcgatcgggt

SEQ ID NO: 122453 - DNA, 80 bp, synthetic construct
  source 1..80: mol_type = other DNA
cggagttccggaggacgcgtcacacctgagagctttcacggaagctatgaccaggtactccgcgccccccggggatccgc

SEQ ID NO: 122454 - DNA, 80 bp, synthetic construct
  source 1..80: mol_type = other DNA
acgcctgcaggaatcgccccatcatcgtcacaaaggtcttgttgctggtgaaggtcagctgcaacccgcggtgctcctcg

SEQ ID NO: 122455 - DNA, 80 bp, synthetic construct
  source 1..80: mol_type = other DNA
ttatcatcactctgagcccgcactataagaggttgattatgtacatcatatggtggttaacatacttcttgaccagggcg

SEQ ID NO: 122456 - DNA, 80 bp, synthetic construct
  source 1..80: mol_type = other DNA
agtgctacgacgcgggagctgcctggtacgaactcaccccatcagagactactgtcaggctcagggcgtacttcaatacc

SEQ ID NO: 122457 - DNA, 80 bp, synthetic construct
  source 1..80: mol_type = other DNA
aactcacgatgcaaggcgttaacgccgtcgcattctatagaggtgtggatgttgccgtcataccaactgacggcgacgtg

SEQ ID NO: 122458 - DNA, 80 bp, synthetic construct
  source 1..80: mol_type = other DNA
gtcgtgggtcattcccggggccgcccggtcgcacatcctaccccccaaagtcgtcaatgcccatggcatcggtaaacatc

SEQ ID NO: 122459 - DNA, 80 bp, synthetic construct
  source 1..80: mol_type = other DNA
ttgagagagaggaaagaggacactaaagggagagcttaacttgtatgtgccttaccgccagagaacgcgcgaagatggcc

SEQ ID NO: 122460 - DNA, 80 bp, synthetic construct
  source 1..80: mol_type = other DNA
ttttttaattttgacatgctcaataccaaatctccaagtctccttgtgggtacaccaagaatcggaacgtatgaatgtgg

SEQ ID NO: 122461 - DNA, 80 bp, synthetic construct
  source 1..80: mol_type = other DNA
gtagggtcttgcttgacatcctagcaggatatggggctggagtctcaggcgctctagtggctttcaagatcatgggagga

SEQ ID NO: 122462 - DNA, 80 bp, synthetic construct
  source 1..80: mol_type = other DNA
gaatcgagccagtcccggtcttgggtgacgagcgcctcctccgggcccgggacgcgcccgggcgcgaagtagcgcacgcc

SEQ ID NO: 122463 - DNA, 80 bp, synthetic construct
  source 1..80: mol_type = other DNA
ctccacctatggtaagttcctagcagatggcggctgcagtggaggagcctatgatatcataatatgcgatgagtgccatt

SEQ ID NO: 122464 - DNA, 80 bp, synthetic construct
  source 1..80: mol_type = other DNA
cacatgcttggtctttctggcttgcttcttttttggagggctgtccacggggaccacgtcctcctcggaagacccggatc

SEQ ID NO: 122465 - DNA, 80 bp, synthetic construct
  source 1..80: mol_type = other DNA
attggctagcattagcttgctggtggatacaatatttcattgctagggctgaggcgctgctgcacatttatgctccaccc

SEQ ID NO: 122466 - DNA, 80 bp, synthetic construct
  source 1..80: mol_type = other DNA
ggatacggtcagtgaatagatttgaacatcaaatgtgggaatctgtgcgtgatgaactcaatgctttactcaaggaaaat

SEQ ID NO: 122467 - DNA, 80 bp, synthetic construct
  source 1..80: mol_type = other DNA
tgtcaaccaatgcggttatattctacgtgtttgtatcatcccaacgcaccccaatgcctctctcatatgaattccggttg

SEQ ID NO: 122468 - DNA, 80 bp, synthetic construct
  source 1..80: mol_type = other DNA
tctgcggagacgatttggtcgtcatctctgagagtgcgggggtctcggaggatgctgccgccctgcgagcgttcacggac

SEQ ID NO: 122469 - DNA, 80 bp, synthetic construct
  source 1..80: mol_type = other DNA
atggcaaggctatcccgatagccctgcttaagggaggaaggcatcttatattctgccactcaaagaagaagtgtgatgag

SEQ ID NO: 122470 - DNA, 80 bp, synthetic construct
  source 1..80: mol_type = other DNA
tttactgtttcacccccagccccgtagtggtgggcacgaccgacaagctcgggatacccacctacacttggaggtggaat

SEQ ID NO: 122471 - DNA, 80 bp, synthetic construct
  source 1..80: mol_type = other DNA
agacaaattattccagccagaacctcaagtaggagaggaaaactggcaagacagcaatgcattctatggaggcagggctc

SEQ ID NO: 122472 - DNA, 80 bp, synthetic construct
  source 1..80: mol_type = other DNA
ccggcgtggccggcgctgtggtcaccttcaagataatgagcggtgagatgccgacaacagaggacatagtgaacttgctc

SEQ ID NO: 122473 - DNA, 80 bp, synthetic construct
  source 1..80: mol_type = other DNA
gtgaaactttaggagaaaaatggaaaaagaaattgaatcaattgtcccggaaagagtttgacctttacaagaagtctgga

SEQ ID NO: 122474 - DNA, 80 bp, synthetic construct
  source 1..80: mol_type = other DNA
ttgcgtggtacctgaaaggcagatgggtccccggagccgtttataccatctatgggatgtggccactgctcatgctcctt

SEQ ID NO: 122475 - DNA, 80 bp, synthetic construct
  source 1..80: mol_type = other DNA
gggcaggaaatcgccaccatgtttaaggacaaagcgctcagcgtattggagtcgatgaggcccgctgcggaagcagccaa

SEQ ID NO: 122476 - DNA, 80 bp, synthetic construct
  source 1..80: mol_type = other DNA
tcacacagctgctgagctctctgaccattacgtccctgctaaggagacttcaccagtggattagcgaggactattccacc

SEQ ID NO: 122477 - DNA, 80 bp, synthetic construct
  source 1..80: mol_type = other DNA
tcactccacttgatctcccagcaatcattcaaagactccacggaatggccgcattttcactccataattattctccaggc

SEQ ID NO: 122478 - DNA, 80 bp, synthetic construct
  source 1..80: mol_type = other DNA
caagcgccagtgcccccacctcggaggcgccgcgccaaagtcccaattccggtcaaagtggaggtggttctcagggagat

SEQ ID NO: 122479 - DNA, 80 bp, synthetic construct
  source 1..80: mol_type = other DNA
ggaagcattgacacatgtgccaagtttacttgctcaacacaagccgtggggaagatcatacagaaagagaacatcaagta

SEQ ID NO: 122480 - DNA, 80 bp, synthetic construct
  source 1..80: mol_type = other DNA
tccaccagccaatacagcagggtctaccgttgatgcggtcattgatgaggtagtggcaaacgcacgagcttatgccagac

SEQ ID NO: 122481 - DNA, 80 bp, synthetic construct
  source 1..80: mol_type = other DNA
gcgtggagtcggagaacaaggtggtagtcctagactctttcgagccgcttcgagcggagggggatgagaatgaaatatcc

SEQ ID NO: 122482 - DNA, 80 bp, synthetic construct
  source 1..80: mol_type = other DNA
ccgacgacaccgctggatgggacacccggatcacgaaagctgatttggagaacgaggcaaaagttcttgagctgttggat

SEQ ID NO: 122483 - DNA, 80 bp, synthetic construct
  source 1..80: mol_type = other DNA
gtcctaatggcccaggaaaccctggatcaagacctaaactttgaaatgtacggagcagtgtattctgtgaaccctctgga

SEQ ID NO: 122484 - DNA, 80 bp, synthetic construct
  source 1..80: mol_type = other DNA
cgtcaccatcatacaatccccctctccttgaggtgtggaagaggccggattacgaaccacctgtagtccacggatgtccc

SEQ ID NO: 122485 - DNA, 80 bp, synthetic construct
  source 1..80: mol_type = other DNA
atcatgctgatcttggtgtctctagctgcagtagtagtgaacccgtctgtgaagacagtacgagaagccggaattttgat

SEQ ID NO: 122486 - DNA, 80 bp, synthetic construct
  source 1..80: mol_type = other DNA
ttataccctcgcggaggatgcgtacctggcccccgggcccccggaaaccatccacccttcccgcccaccgtcccccggcg

SEQ ID NO: 122487 - DNA, 80 bp, synthetic construct
  source 1..80: mol_type = other DNA
gctaaccctggccagcggtatgatgcggcacacatcccaggaggctctttgcgcgctcgccgtggcttcgttccttctgc

SEQ ID NO: 122488 - DNA, 80 bp, synthetic construct
  source 1..80: mol_type = other DNA
tcatcaccgtaatttcactttccgcttcgctgggctcttcctcttcctcttgcgtccgcataccacgcgccactgggtcg

SEQ ID NO: 122489 - DNA, 80 bp, synthetic construct
  source 1..80: mol_type = other DNA
ccagaagggatcataccagctctctttgaaccagagagggagaagtcagccgccatagacggtgaataccgcctgaaggg

SEQ ID NO: 122490 - DNA, 80 bp, synthetic construct
  source 1..80: mol_type = other DNA
ccacacagtctactacacatccaaccaccacagccagtacaactactgagaccactactcaaactacacagctagacact

SEQ ID NO: 122491 - DNA, 80 bp, synthetic construct
  source 1..80: mol_type = other DNA
attcaaggttaagaatggaggagaaatcggggcggttgcccttgactacccaagtggcacttctggttctcccatcgtca

SEQ ID NO: 122492 - DNA, 80 bp, synthetic construct
  source 1..80: mol_type = other DNA
cgccgtgcaggcgtgcgtgctgatggtgaacatcatgatcgacagcacgctacaacccacgccccagtgcacccgcggca

SEQ ID NO: 122493 - DNA, 80 bp, synthetic construct
  source 1..80: mol_type = other DNA
agcagggccagctgccgcggcgagacgacgccgtccgcggcaggctcgtcgacggcctccccggacgccggggccgcctc

SEQ ID NO: 122494 - DNA, 80 bp, synthetic construct
  source 1..80: mol_type = other DNA
atttgatgagatggaggagtgttcggcctcgttgccctacatggacgaggcacgtgctattgccgagcaattcaaggaga

SEQ ID NO: 122495 - DNA, 80 bp, synthetic construct
  source 1..80: mol_type = other DNA
cccctgctgctctccactacacagtggcaggtcctcccctgctcattcacaactatgcctgctctgtcaactggcctact

SEQ ID NO: 122496 - DNA, 80 bp, synthetic construct
  source 1..80: mol_type = other DNA
tcgccccatactcccgccagcaccccggtaaacaccaactcaatctcgcgcaggatttcgcgcaggtgatgagcgcagtc

SEQ ID NO: 122497 - DNA, 80 bp, synthetic construct
  source 1..80: mol_type = other DNA
gtacaggtcggcgttggtcggtagcgccgaaaacagatcctcgttccaggtatcgagcatggtacatagcgcggggcccg

SEQ ID NO: 122498 - DNA, 80 bp, synthetic construct
  source 1..80: mol_type = other DNA
agcttcaacctcccccccagggggggggggtagctcccggttcgggctcgtggtcttggtctacttgctccgagtaggac

SEQ ID NO: 122499 - DNA, 80 bp, synthetic construct
  source 1..80: mol_type = other DNA
ccccgatggaaaaaaagatcatcacttggggggccgactcagtcgcttgtggtgacatcctcagtggattgcccgtgtca

SEQ ID NO: 122500 - DNA, 80 bp, synthetic construct
  source 1..80: mol_type = other DNA
ccaaatggctctattgaagctaggggctctcactggtacctacatctatgaccaccttgctcctctgtctgactgggccg

SEQ ID NO: 122501 - DNA, 80 bp, synthetic construct
  source 1..80: mol_type = other DNA
cccttctatgggagggcgattcccctatcctgcatcaagggagggagacacctgattttctgccactcaaagaaaaagtg

SEQ ID NO: 122502 - DNA, 80 bp, synthetic construct
  source 1..80: mol_type = other DNA
ctttatatcgtggttatgttctcaggggtcgatgccgatacacgtaccatcggtggcaatgcggctcatggtgccatggg

SEQ ID NO: 122503 - DNA, 80 bp, synthetic construct
  source 1..80: mol_type = other DNA
ggctatgtcaagctggaaggtagggtgattgacctggggtgtggccgcggaggctggtgttactacgctgctgcgcaaaa

SEQ ID NO: 122504 - DNA, 80 bp, synthetic construct
  source 1..80: mol_type = other DNA
gaggtggtcatcgataccctggacaaggccgccttcaggtgttgcatgatgggaatgagagccggagtgatgaatatgaa

SEQ ID NO: 122505 - DNA, 80 bp, synthetic construct
  source 1..80: mol_type = other DNA
tgtgcgccagggctctggcgcccccaccgagctgggacaccatgtggaaatgcctgattcgcctcaagcctaccctgcac

SEQ ID NO: 122506 - DNA, 80 bp, synthetic construct
  source 1..80: mol_type = other DNA
ttagggcgggggcgcttgggggggctgtcggagccacgagggttgtcctcggccagagcccagggacgcttagtctcgtt

SEQ ID NO: 122507 - DNA, 80 bp, synthetic construct
  source 1..80: mol_type = other DNA
gctccaacagccccgggtgcgccgggtacggcgaccgcagggcgttgatggtgagctgcgaacacgcggccacctcgcgg

SEQ ID NO: 122508 - DNA, 80 bp, synthetic construct
  source 1..80: mol_type = other DNA
aaaagggctcaacctccgcatcgccgtgaccggtgggaagggccacgttgcgatattgcaaacgggtgctccacttgaat

SEQ ID NO: 122509 - DNA, 80 bp, synthetic construct
  source 1..80: mol_type = other DNA
tcagtccaatggagaaaaaggtgattgtctgtggggcggagacgacagcctgcggggacatcctgcatggtctgcccgtc

SEQ ID NO: 122510 - DNA, 80 bp, synthetic construct
  source 1..80: mol_type = other DNA
actacagagaacatgctagatgtgtggaatcgagtgtggatcctggacaaccccttcatggagaacaaagaaaaggttgg

SEQ ID NO: 122511 - DNA, 80 bp, synthetic construct
  source 1..80: mol_type = other DNA
aagagtgatggctttttggctgctggcaggactggcggcttcagcctttcactggtccggcatccttggtgtgatgggat

SEQ ID NO: 122512 - DNA, 80 bp, synthetic construct
  source 1..80: mol_type = other DNA
ccgggccccgaagactcggcggacgctggttggccgggccccgccgcgctggcggccgccgattggccagtcccgccccc

SEQ ID NO: 122513 - DNA, 80 bp, synthetic construct
  source 1..80: mol_type = other DNA
cgcgtccaggcgctcgctaagcgcgggatcgaggtaccgtcggtgtgcggttagaaaatcacgtcgcgccgcttgctctt

SEQ ID NO: 122514 - DNA, 80 bp, synthetic construct
  source 1..80: mol_type = other DNA
aatgcccttcaccgccatggacatatcagtaccactgctggtcttaggatgctggaaccaaatgaccctgccaagcttgg

SEQ ID NO: 122515 - DNA, 80 bp, synthetic construct
  source 1..80: mol_type = other DNA
gacgagctcgccggccagcttagaactctgggcctcaatgccgttgctttctacagaggcatagacgtttccgtcatccc

SEQ ID NO: 122516 - DNA, 80 bp, synthetic construct
  source 1..80: mol_type = other DNA
gacaactgcacaccaattcctactacaatcatggcaaagaatgaggttttctgtgtgaacccccagaagggtggtcgaaa

SEQ ID NO: 122517 - DNA, 80 bp, synthetic construct
  source 1..80: mol_type = other DNA
cagctcagggagatgtggtggtcgtcgccaccgacgccctcatgacggggtacactggagactttgactccgtgatcgac

SEQ ID NO: 122518 - DNA, 80 bp, synthetic construct
  source 1..80: mol_type = other DNA
agcggcccgcgcgacggggtccgagaggctaaggtaggccgcgatgttaatggtgaacgcaaagccgccgggaaagacaa

SEQ ID NO: 122519 - DNA, 80 bp, synthetic construct
  source 1..80: mol_type = other DNA
tgcttaaccgcgcacgtcgcaccggccgacgggcggccatgcgggccgctcgaaggctggccgcgggtattgtcactgtg

SEQ ID NO: 122520 - DNA, 80 bp, synthetic construct
  source 1..80: mol_type = other DNA
gtccttgggcgctctcgctctcgtggtgctgaccatcttcaccattacgccagcatacaagctgctcttaacccagaccc

SEQ ID NO: 122521 - DNA, 80 bp, synthetic construct
  source 1..80: mol_type = other DNA
gtgtgcgcgagggctagggcaccccccccctcctgggacactatgtggaaatgtctcattcggcttaagccgacccttac

SEQ ID NO: 122522 - DNA, 80 bp, synthetic construct
  source 1..80: mol_type = other DNA
gttctcctacctaacaatctcaccagtggactaaccttctcagttaaaagggcaaagctaattcttcatcgccctattgt

SEQ ID NO: 122523 - DNA, 80 bp, synthetic construct
  source 1..80: mol_type = other DNA
accgggataggagccaactcagtcctttgctgcattccaccactgaatgggccattctaccttgtaccttcgctgacata

SEQ ID NO: 122524 - DNA, 80 bp, synthetic construct
  source 1..80: mol_type = other DNA
tgagctcggctactgtttcgcgaacttcccgttcaaatgcccatggcgcctcctcctcctcctcctcttgtatttccatt

SEQ ID NO: 122525 - DNA, 80 bp, synthetic construct
  source 1..80: mol_type = other DNA
acctgtcgcggacgcagcggctggcctccctcctgacgtacgccgggcctataaaagcgcccgacgacgccgccgccccg

SEQ ID NO: 122526 - DNA, 80 bp, synthetic construct
  source 1..80: mol_type = other DNA
ccccggtaaacaccaactcaatctcgcgcaggatttcgcgcaggtgatgagcgcagtccacgggggggagcacaagaggc

SEQ ID NO: 122527 - DNA, 80 bp, synthetic construct
  source 1..80: mol_type = other DNA
tgggcactgtggccggtcacactacacgcggcgtccttaaccttttctcccctggctccaaacaaaacttgcagttgatc

SEQ ID NO: 122528 - DNA, 80 bp, synthetic construct
  source 1..80: mol_type = other DNA
atcgtgctcctcaaacgtctccgtcgcccatgactcgacgggaaagcgggtatactatctcacacgagattgtgacatcc

SEQ ID NO: 122529 - DNA, 80 bp, synthetic construct
  source 1..80: mol_type = other DNA
gcgactcgggggtctgccatatcctgaagaacatccatgtgacctcccaccccagaaaaaagtggccagtgtttgagaat

SEQ ID NO: 122530 - DNA, 80 bp, synthetic construct
  source 1..80: mol_type = other DNA
tgaaggagaagaaaagcccatttatgccgataaaacatatcagccagagcctcaagttggagaagaatcatggactgata

SEQ ID NO: 122531 - DNA, 80 bp, synthetic construct
  source 1..80: mol_type = other DNA
atcttgccagtgacaaaaatggcttccatgtccggccacgcctccgcgccgaccgttgacgccgtgcgtcgtgacgtcac

SEQ ID NO: 122532 - DNA, 80 bp, synthetic construct
  source 1..80: mol_type = other DNA
ctttgcgaggcgtatgatgttgggtgcgcatggtatgaactgactccatcagagacgaccgtcagactgcgcgcctacct

SEQ ID NO: 122533 - DNA, 80 bp, synthetic construct
  source 1..80: mol_type = other DNA
aaaacgtttgtggagctcatgagaagaggagatctaccagtttggctatcctacaaagtagcctcagaaggtttccagta

SEQ ID NO: 122534 - DNA, 80 bp, synthetic construct
  source 1..80: mol_type = other DNA
ttggggttcagcttgcgggcctcgttccacagggtcagctcgtgattctgcagctcgcaccacgcgatggcaacgcggcc

SEQ ID NO: 122535 - DNA, 80 bp, synthetic construct
  source 1..80: mol_type = other DNA
tgtggacctcatggtgggcgcagccgccttctgttcagccatgtacgtgggtgacatatgcggtggtctgtttctgctcg

SEQ ID NO: 122536 - DNA, 80 bp, synthetic construct
  source 1..80: mol_type = other DNA
aagggcagcccaacccttcccaactactttataactaactttaatgtttcaggtattactaaaagctttaatcacactta

SEQ ID NO: 122537 - DNA, 80 bp, synthetic construct
  source 1..80: mol_type = other DNA
aaccgcatgcaacgaagcaatcagtagtcgctttaggctcccaggaaggagctctgcaccaagctctagccggtgccata

SEQ ID NO: 122538 - DNA, 80 bp, synthetic construct
  source 1..80: mol_type = other DNA
aacaattcaagcagaaggtccttggcctcttccagactgctactagacaggccgaagagcttaagcctgcagtccactca

SEQ ID NO: 122539 - DNA, 80 bp, synthetic construct
  source 1..80: mol_type = other DNA
tgaggaactgctcatggcctgccagccacaccatcgataatgctgacgtggtggactcggagttgttccttccggcgagc

SEQ ID NO: 122540 - DNA, 80 bp, synthetic construct
  source 1..80: mol_type = other DNA
cccacaagctgtcgtggacatggtggcgagggcccactggggagtcctggcgggccttgcctactattccatggtagtga

SEQ ID NO: 122541 - DNA, 80 bp, synthetic construct
  source 1..80: mol_type = other DNA
ggtctcagcgaccacccgtcgggtggtggttcggctgcacttggatgaatggcacggggttcgttaagacgtgcggcgcc

SEQ ID NO: 122542 - DNA, 80 bp, synthetic construct
  source 1..80: mol_type = other DNA
aactgcatgctggaataagctctctttgtgtcaccggtgatgccttccaagaggtgagtgataaagcgaggtagtttttc

SEQ ID NO: 122543 - DNA, 80 bp, synthetic construct
  source 1..80: mol_type = other DNA
gaagagcaaaacgctcgagatcaggctactaagaaaacacatgtctatgcccaggctcctttgtctggagaaacaattac

SEQ ID NO: 122544 - DNA, 80 bp, synthetic construct
  source 1..80: mol_type = other DNA
tgacatcacacgcaaattgcccgtagcaataatgggggcggcatatggtttccaatactcacccagtcaacgggtagagt

SEQ ID NO: 122545 - DNA, 80 bp, synthetic construct
  source 1..80: mol_type = other DNA
cttctttcatgcctgactgtcccgacctctgccgttccctaccgaaatgcctctggggtttatcatgtcaccaatgattg

SEQ ID NO: 122546 - DNA, 80 bp, synthetic construct
  source 1..80: mol_type = other DNA
agcggtcgcaacctcgaggtagacgtcagcctatccccaaggcacgtcgccccgagggcaggacctgggcccagcccggg

SEQ ID NO: 122547 - DNA, 80 bp, synthetic construct
  source 1..80: mol_type = other DNA
gtccttgccaatttcagtttcagagttaagcagtgcatacgagcggaatttgttttccccacgtgtgcctccaaagcgac

SEQ ID NO: 122548 - DNA, 80 bp, synthetic construct
  source 1..80: mol_type = other DNA
gtcacctactctgtcactccattggatctaccagcaatcattcagaggttgcatggtatggccgctttttcactccatgg

SEQ ID NO: 122549 - DNA, 80 bp, synthetic construct
  source 1..80: mol_type = other DNA
ccacgggggcgattatggatataattattattgacagcaaagatacagaacgacaactagccgctatgggaaactccaca

SEQ ID NO: 122550 - DNA, 80 bp, synthetic construct
  source 1..80: mol_type = other DNA
ctacgcctgcatctgcggcgcactatactaacaggtctggcctctaccacttgaccaacgactgccccaatagcagtatc

SEQ ID NO: 122551 - DNA, 80 bp, synthetic construct
  source 1..80: mol_type = other DNA
agtccgtgtgggaggaccttctggaagaccatgacacaccaattcctactactattatggcaaagaatgaggtgttctgt

SEQ ID NO: 122552 - DNA, 80 bp, synthetic construct
  source 1..80: mol_type = other DNA
gctgcgccagcgcgttcaggttgtcggcgaaggcgtccatggtggagtggcgggcgcgatcgccggacgccagccagaag

SEQ ID NO: 122553 - DNA, 80 bp, synthetic construct
  source 1..80: mol_type = other DNA
tggctgacacctcgatgcatggttgactatccataccggctttggcattacccatgcactgtgaattttaccatcttcaa

SEQ ID NO: 122554 - DNA, 80 bp, synthetic construct
  source 1..80: mol_type = other DNA
atgtcccgtacctccccaaatcccatgatatgctgtgttcctcccttgttgggaggaaagagagggcagagtgggccaag

SEQ ID NO: 122555 - DNA, 80 bp, synthetic construct
  source 1..80: mol_type = other DNA
tttgttgataatttggatgtattaaacgaacatgaaaaacacgcagaacttacagccgtaacggttgagttggcgttatt

SEQ ID NO: 122556 - DNA, 80 bp, synthetic construct
  source 1..80: mol_type = other DNA
atctggtggaaccaatatgccatcgcacgatgtgaggctgctttacaggtttgggttccccccctcctcgttagaggtgg

SEQ ID NO: 122557 - DNA, 80 bp, synthetic construct
  source 1..80: mol_type = other DNA
gactggcttcgagctacatgcccagcagcagcagtagcccctctgtgcccagttccatcatcgccgaggagaaactgctg

SEQ ID NO: 122558 - DNA, 80 bp, synthetic construct
  source 1..80: mol_type = other DNA
cttgggattttgggtcagttggaggggttttcacctcagtggggaaagccatacaccaagtctttggaggagcttttaga

SEQ ID NO: 122559 - DNA, 80 bp, synthetic construct
  source 1..80: mol_type = other DNA
tcttccttctggcacttctctcgtgcctaaccgttcccacctcggctgtgcattatcacaacacctcgggcatctatcac

SEQ ID NO: 122560 - DNA, 80 bp, synthetic construct
  source 1..80: mol_type = other DNA
ctttgggggccatattcactgatgagaacaaatggaaatcggctcgtgaggctgttgaagatagtaggttttgggagctg

SEQ ID NO: 122561 - DNA, 80 bp, synthetic construct
  source 1..80: mol_type = other DNA
tcttcacaactaggagcatcacaggctgggcggtttaccatcactcccaactccccagccatcactgtgaagatgggtga

SEQ ID NO: 122562 - DNA, 80 bp, synthetic construct
  source 1..80: mol_type = other DNA
ggtgggtggattgcctcccaactagcgaccccaacagcagctacgggattcgtagtgagtggcctagctggcgccacagt

SEQ ID NO: 122563 - DNA, 80 bp, synthetic construct
  source 1..80: mol_type = other DNA
tcaagtgtctgcggccctgtgtactgcttcacgccgtcaccggtggtcgtgggcactactgatgctaagggcgcgccaac

SEQ ID NO: 122564 - DNA, 80 bp, synthetic construct
  source 1..80: mol_type = other DNA
ctaaggggcgtgccccagggcatggggtgggtgagcgcggaggcgtacatgccgcagatgtcgtagacgtagaggtgctc

SEQ ID NO: 122565 - DNA, 80 bp, synthetic construct
  source 1..80: mol_type = other DNA
aaaacttggcttgggtggcatgatactgggcttggcaaccttttttctgtggatggctgacgtgccaggaacaaagattg

SEQ ID NO: 122566 - DNA, 80 bp, synthetic construct
  source 1..80: mol_type = other DNA
atacacctggggagagaataagaccgatgtcttcctccttggttcagccaggccgccgcatggtgcgtggttcggatgcg

SEQ ID NO: 122567 - DNA, 80 bp, synthetic construct
  source 1..80: mol_type = other DNA
ggttgaagctacgaccactgttgggcatgcagtgggccggcaagcatacagcttggcaagcttgttcaaccctggtgcca

SEQ ID NO: 122568 - DNA, 80 bp, synthetic construct
  source 1..80: mol_type = other DNA
tcatcgctttgcttccagacgaaatcacgtcgccccaacccactatggtgacgatcgaatggcgttcgcaagcgtggtga

SEQ ID NO: 122569 - DNA, 80 bp, synthetic construct
  source 1..80: mol_type = other DNA
gaccaactggctgtgggcgtttctggctcgcgagaaaagacccaggctgtgcacacgagaagagttcatcaggaaagtca

SEQ ID NO: 122570 - DNA, 80 bp, synthetic construct
  source 1..80: mol_type = other DNA
gttgggggaatcactctgtttttgggcttcacggttcaagcggacatgggttgtgtggtgtcatggagtgggagagaatt

SEQ ID NO: 122571 - DNA, 80 bp, synthetic construct
  source 1..80: mol_type = other DNA
aatggccggggccgcggttggtagcattgggttgggtagggtcctcattgacatcttagctggatatggagcaggtgtgg

SEQ ID NO: 122572 - DNA, 80 bp, synthetic construct
  source 1..80: mol_type = other DNA
cccatcggcgcatcaccgacccggagagggacatccaggactttgtcctcaccgccgaactaagcagacacccgcgcgcg

SEQ ID NO: 122573 - DNA, 80 bp, synthetic construct
  source 1..80: mol_type = other DNA
tagctgggcgagcttccccaggccgatctgggggtcgcatcgtcgaagcagctctagctgaaaaacgtacgtctgtacct

SEQ ID NO: 122574 - DNA, 80 bp, synthetic construct
  source 1..80: mol_type = other DNA
gcgcgatagtgcagggtgaaaggatggatgagccaatcccagccggattcgagcctgagatgctgaggaaaaaacagatc

SEQ ID NO: 122575 - DNA, 80 bp, synthetic construct
  source 1..80: mol_type = other DNA
gccaacatatcgggtccttcaactgaaaagccctactgctggcactatccccctcggccctgtgatattgagccggccgg

SEQ ID NO: 122576 - DNA, 80 bp, synthetic construct
  source 1..80: mol_type = other DNA
agactcgaggcgggaagttcatggaccatagtatgcgtttaaggagagaccgctggttggcgatgtacgcccggtgtcta

SEQ ID NO: 122577 - DNA, 80 bp, synthetic construct
  source 1..80: mol_type = other DNA
cctgcgggggcgcggtccctgacaccgtgctcctgtggctcaagtgacctctatctggtcacgagaaatgctgatgttat

SEQ ID NO: 122578 - DNA, 80 bp, synthetic construct
  source 1..80: mol_type = other DNA
cactttctcccccaggcgccactggacaacgcaagaatgcaactgttccatctaccccggccacgtaacaggtcaccgca

SEQ ID NO: 122579 - DNA, 80 bp, synthetic construct
  source 1..80: mol_type = other DNA
gtcgggcccaagacctgcagcaatgtgtggcatggaacctttcccatcaacgcttacaccactgggcctggcgtgccaat

SEQ ID NO: 122580 - DNA, 80 bp, synthetic construct
  source 1..80: mol_type = other DNA
acggagctaaggaagtccgtagccattctagcagggccattaaccacatcaactccgtgtgggaggacctgttagaagac

SEQ ID NO: 122581 - DNA, 80 bp, synthetic construct
  source 1..80: mol_type = other DNA
caagcaccttctggctgtgctaggtccgctctatttgctccaaagctcacttttgcgtgtcccttactatgtgagggctc

SEQ ID NO: 122582 - DNA, 80 bp, synthetic construct
  source 1..80: mol_type = other DNA
cttgtgacgctaatcgaaggaacggccggagttgtctggaattgcacaacagcggttggcctctgtaacctcatgagggg

SEQ ID NO: 122583 - DNA, 80 bp, synthetic construct
  source 1..80: mol_type = other DNA
catccatttgccctcttgctggtcttgggaggatggatcctgcacattaaaggtgctaggaggagtggggatgttctttg

SEQ ID NO: 122584 - DNA, 80 bp, synthetic construct
  source 1..80: mol_type = other DNA
aagaggtggactgccaagatcagtggaccagctatcatgatcgctctgctggttctagtgcttgggggcattacctacac

SEQ ID NO: 122585 - DNA, 80 bp, synthetic construct
  source 1..80: mol_type = other DNA
ggcgacgccgccaggctctgtcactgtcccccatcctaatataacagagacagctctcccgactacgggggagataccat

SEQ ID NO: 122586 - DNA, 80 bp, synthetic construct
  source 1..80: mol_type = other DNA
tatgtgacgggggtgacacaagacaacatcaagtgcccctgccaggttccctcgcccgagtttttcaccgaggtagacgg

SEQ ID NO: 122587 - DNA, 80 bp, synthetic construct
  source 1..80: mol_type = other DNA
aagaacatggaagggaaaatcgtgcaaccagaaaatttggaatacaccattgtggtaacacctcactcaggggaggagca

SEQ ID NO: 122588 - DNA, 80 bp, synthetic construct
  source 1..80: mol_type = other DNA
tgtgacgcaagtagttgacttcagcctggatcccacctttacaattgagaccactactgtcccacaagacgctgtggcca

SEQ ID NO: 122589 - DNA, 80 bp, synthetic construct
  source 1..80: mol_type = other DNA
tccgctgctgtgccccatggggcatgctgtaggcatattccgagccgcggtgtgcacacgtggagtggcaaaggcagtgg

SEQ ID NO: 122590 - DNA, 80 bp, synthetic construct
  source 1..80: mol_type = other DNA
caccaggcaggctacagggtccccaacgcgaccctcgtaaaacctgtcagtatgattaaaaagcatcaccgaaagaggct

SEQ ID NO: 122591 - DNA, 80 bp, synthetic construct
  source 1..80: mol_type = other DNA
gtggtggactccaactgtgatggacgtggaaaatcaacgagatcaaccactgacagtgggaaaataatcccggaatggtg

SEQ ID NO: 122592 - DNA, 80 bp, synthetic construct
  source 1..80: mol_type = other DNA
tgagcccgttgctgttctcgaccacagagctcgctatcttgccttgctcattcaccaccatgcctgcgctgtccacaggc

SEQ ID NO: 122593 - DNA, 80 bp, synthetic construct
  source 1..80: mol_type = other DNA
acgtgcccgagagcgacgcggcggcacgagtcactcaggtcctcgcctccctcactgtcactcaactcctgaaaaggctc

SEQ ID NO: 122594 - DNA, 80 bp, synthetic construct
  source 1..80: mol_type = other DNA
ggatgattgtgtggttaaaccactggatgatcgatttgcctcgtcactccacttcctcaacgcgatgtcaaaggtccgga

SEQ ID NO: 122595 - DNA, 80 bp, synthetic construct
  source 1..80: mol_type = other DNA
agagtggaaagcttataacagactggtgttgccgaacttgcacacttcctcccctgaggtatcagacggaaagtggatgc

SEQ ID NO: 122596 - DNA, 80 bp, synthetic construct
  source 1..80: mol_type = other DNA
tgtacgcgctcacctctttgtgggaggagaacagccgcgtccagccggggaggttggcgtggttggtgatgtagttttcc

SEQ ID NO: 122597 - DNA, 80 bp, synthetic construct
  source 1..80: mol_type = other DNA
atctaaccataatggatcttcatcctgggtcaggaaagacacggaaataccttccagccattgttagagaggcaatcaag

SEQ ID NO: 122598 - DNA, 80 bp, synthetic construct
  source 1..80: mol_type = other DNA
tccagggcgtgggcgcgctcccgaagccgggagcgcgcctccggagcgagctccgccgtcatcttggccgcctccatggc

SEQ ID NO: 122599 - DNA, 80 bp, synthetic construct
  source 1..80: mol_type = other DNA
aaacgtggtgaccggcgaggtccaagtgttatccacggctactcagaccttcctaggcacgacagtcggggtggtcatgt

SEQ ID NO: 122600 - DNA, 80 bp, synthetic construct
  source 1..80: mol_type = other DNA
gtattatttacctatatccgtgtatgtcgatttctttcccccccctccccggaaaccaaagaaggaagcaaagaatggat

SEQ ID NO: 122601 - DNA, 80 bp, synthetic construct
  source 1..80: mol_type = other DNA
ttctctcgtgccttaccacgcccgcctcagcggttaattatgccaacaaatctggaatctaccatctgaccaatgactgc

SEQ ID NO: 122602 - DNA, 80 bp, synthetic construct
  source 1..80: mol_type = other DNA
tctggcaccatacatgcccgatgtgatagagaaactggagcttcttcaaagaagattcggtggaaccgtcatcaggaatc

SEQ ID NO: 122603 - DNA, 80 bp, synthetic construct
  source 1..80: mol_type = other DNA
cagggaagtgctctatcaacaattcgacgagatggaggaatgctcacgccacatcccctatctcgctgaaggtcagcagc

SEQ ID NO: 122604 - DNA, 80 bp, synthetic construct
  source 1..80: mol_type = other DNA
cgttgtgcaggtgcgtgatgtccagctccgtcgtcgggtgccgccgggccccaaccggcggtcgggggtgcggtgtatca

SEQ ID NO: 122605 - DNA, 80 bp, synthetic construct
  source 1..80: mol_type = other DNA
ataggttagggccggtcaataatgagatcactaccacccatcccataactaagtacatcatgacctgtatgtcggctgac

SEQ ID NO: 122606 - DNA, 80 bp, synthetic construct
  source 1..80: mol_type = other DNA
cttttcactcaagggcccaaacaaaacatccagctcatccacaccaacggcagttggcacatcaatcggacagctctgaa

SEQ ID NO: 122607 - DNA, 80 bp, synthetic construct
  source 1..80: mol_type = other DNA
agcccatcgttaggggtcgacgtgcagtctactcaagtagtgactgcagtcgtcccagctggtggggagtccgacgcgga

SEQ ID NO: 122608 - DNA, 80 bp, synthetic construct
  source 1..80: mol_type = other DNA
cattgccggggaatcccgcgatagcatcactaatggcattcaccgccagtgtgaccagtccactaaccacccaacagacc

SEQ ID NO: 122609 - DNA, 80 bp, synthetic construct
  source 1..80: mol_type = other DNA
acactcagccagatcaaaatttggctatggggcaaaagatgtccgttgccatgccagaaaggccgtaaaccacatcaact

SEQ ID NO: 122610 - DNA, 80 bp, synthetic construct
  source 1..80: mol_type = other DNA
aatgaccagtacatattcacgggccagcctctcaacaatgatgaagaccatgctcactggacagaagcaaaaatgctgct

SEQ ID NO: 122611 - DNA, 80 bp, synthetic construct
  source 1..80: mol_type = other DNA
taggctcgcggttggcctctgcccggcgccggttgctggtgttggacgcggtggccctcgagaggtggcccagggatgga

SEQ ID NO: 122612 - DNA, 80 bp, synthetic construct
  source 1..80: mol_type = other DNA
gactttcctggctacgtgcgtcaacggcgcgtgttggactgtttaccacggggccgggtcgaggaccctcgccacgtcat

SEQ ID NO: 122613 - DNA, 80 bp, synthetic construct
  source 1..80: mol_type = other DNA
atgaactcctcggggttcgtgaagacatgcggcgcccccccctgcaacatcacaccagagggcggtggcaacaacacgtt

SEQ ID NO: 122614 - DNA, 80 bp, synthetic construct
  source 1..80: mol_type = other DNA
cccgcgtccatcatagccctggtgtttctggggagctgtatttgctttatacacagatgtcaacgccgctaccgacgctc

SEQ ID NO: 122615 - DNA, 80 bp, synthetic construct
  source 1..80: mol_type = other DNA
aatgaggactacccaagtccttgcagcggtgactggctgcgtaccatctgggactgggtttctgcggtgttgactgactt

SEQ ID NO: 122616 - DNA, 80 bp, synthetic construct
  source 1..80: mol_type = other DNA
ccctcttagagcgtggaagagtcgggctcgtgcagtcagagcgtcccttctcgcccggtggggtaaggcggccatatgcg

SEQ ID NO: 122617 - DNA, 80 bp, synthetic construct
  source 1..80: mol_type = other DNA
tggaggcaggagatggggagtaacattacccgggtagagtctgagaccaaagtcatcgtgctcgactcatttgatcccat

SEQ ID NO: 122618 - DNA, 80 bp, synthetic construct
  source 1..80: mol_type = other DNA
aagagtttgagattgggtggaaggcttggggaaagagcttggtgttcgcaccagaactggccaaccacacttttgtggtt

SEQ ID NO: 122619 - DNA, 80 bp, synthetic construct
  source 1..80: mol_type = other DNA
ccaacatagttgtcagcgaccctgtaagggtggctaatgccgaagaagtcagaggagacaactatacagcttcatctgtt

SEQ ID NO: 122620 - DNA, 80 bp, synthetic construct
  source 1..80: mol_type = other DNA
tgcacatggatgaatagtactgggtttactaagacctgcggcgcaccaccttgccgcataaggccagacttcaattcctc

SEQ ID NO: 122621 - DNA, 80 bp, synthetic construct
  source 1..80: mol_type = other DNA
cacttggcgtggtgatggcatatgttgtactacatgcccttgtggagcagccatcacaggccatgtcaagaacgggtcaa

SEQ ID NO: 122622 - DNA, 80 bp, synthetic construct
  source 1..80: mol_type = other DNA
aggcttgtccactctgcctgggaaccccgcaatagcatcactgatggcattcacagcctctatcaccagcccgctcacca

SEQ ID NO: 122623 - DNA, 80 bp, synthetic construct
  source 1..80: mol_type = other DNA
aagacgatgccaccatcggggccggggtgctcctgctcctcgggttctttaccttatcaccatggtataagcactggatt

SEQ ID NO: 122624 - DNA, 80 bp, synthetic construct
  source 1..80: mol_type = other DNA
aagaaagtgacttttgatagggtccaggtcttagaccaatactacaatgatgttctcaaggaggtaaaagctcgggctgc

SEQ ID NO: 122625 - DNA, 80 bp, synthetic construct
  source 1..80: mol_type = other DNA
tggagctgatgccgtagtcggcgtttatggccatggccagctccgtagagtcaatggactcgacaaactcgctgatgttg

SEQ ID NO: 122626 - DNA, 80 bp, synthetic construct
  source 1..80: mol_type = other DNA
acgggaaacctacaaactgaggtcccaggtcaacaccaacaataccagctacaattaactaaccttgatggctcccccat

SEQ ID NO: 122627 - DNA, 80 bp, synthetic construct
  source 1..80: mol_type = other DNA
gggaggctgggtggctgcccagctcgcagccccgagcgctgcctcggcattcgtgggcgccggcattgtcggcgccgccg

SEQ ID NO: 122628 - DNA, 80 bp, synthetic construct
  source 1..80: mol_type = other DNA
cagctttgcgatggtccaaaaattttacatacagaatttaatcacacctgtaatgaacagaatctcactctgatattctt

SEQ ID NO: 122629 - DNA, 80 bp, synthetic construct
  source 1..80: mol_type = other DNA
ataccagaacaccgcaaccaaaaccaggcacacgaatggttatgaccacgacagccaattggctatgggccctccttgga

SEQ ID NO: 122630 - DNA, 80 bp, synthetic construct
  source 1..80: mol_type = other DNA
acagagagatcttgctggaatttgaagaagcccacgcgacgaaacagtctgttgttgcacttggatcacaagagggagct

SEQ ID NO: 122631 - DNA, 80 bp, synthetic construct
  source 1..80: mol_type = other DNA
ctggtcacgaggcatgccgatgtcatccccgtacgccggctgggtgacggcaggggcagcctgctttcgccccggcctat

SEQ ID NO: 122632 - DNA, 80 bp, synthetic construct
  source 1..80: mol_type = other DNA
ccggtgccctcgttgcttttaagatcatgagtggcgaggcaccagctgtggaggacatggtcaaccttctacctgctctc

SEQ ID NO: 122633 - DNA, 80 bp, synthetic construct
  source 1..80: mol_type = other DNA
cttcaggaaacacccggaagcgacatacgggaagtgcgggtcaggcccatggttaacacctaggtgcttggtcgactacc

SEQ ID NO: 122634 - DNA, 80 bp, synthetic construct
  source 1..80: mol_type = other DNA
gaaggaaaccctggaaaattctggaacacaacaatagcagtatccatggctaatatattcagaggaagttacctggcagg

SEQ ID NO: 122635 - DNA, 80 bp, synthetic construct
  source 1..80: mol_type = other DNA
tgggaaagttgaagctcaaaggaacgacctatggagtatgcgcaaaagccttcaagttttctgggaatccagctgacaca

SEQ ID NO: 122636 - DNA, 80 bp, synthetic construct
  source 1..80: mol_type = other DNA
gtcgcttctgaaatggcagaggcgctcaagggaatgccaataaggtatcagacaacagcagtgaagagtgaacacacggg

SEQ ID NO: 122637 - DNA, 80 bp, synthetic construct
  source 1..80: mol_type = other DNA
tccctcaccattaccaacctgctccggagactccatcactggatcactgaagactgccccgtcccatgctcgggctcctg

SEQ ID NO: 122638 - DNA, 80 bp, synthetic construct
  source 1..80: mol_type = other DNA
ggagtgtgagatcattgattcggactccaagtcgtggtccacagtctctgatcaagaggattctgttgtctgctgctcca

SEQ ID NO: 122639 - DNA, 80 bp, synthetic construct
  source 1..80: mol_type = other DNA
tgtttggggaaagcctacgcccaaatgtggagtctcatgtattttcacagaagagatctcagactagcgtccaatgccat

SEQ ID NO: 122640 - DNA, 80 bp, synthetic construct
  source 1..80: mol_type = other DNA
aacttacattatgataatctgcatgatcacaatcgggcaacagagggtgttgttcagtcagagaggccctggtctcctca

SEQ ID NO: 122641 - DNA, 80 bp, synthetic construct
  source 1..80: mol_type = other DNA
tgctgaaacgcgagagaaaccgcgtatcaacccctcaagggttggtgaagagattctcaaccggacgtttttctgggaaa

SEQ ID NO: 122642 - DNA, 80 bp, synthetic construct
  source 1..80: mol_type = other DNA
tgcagcgcgctgtatgtgggcgatatgtgcggcgcggtgtttctggtgggccaggcgtttacctttcgtccgcgtcgtca

SEQ ID NO: 122643 - DNA, 80 bp, synthetic construct
  source 1..80: mol_type = other DNA
cgcgggcaacgtcgccctcgaagctgctctcggcgtgggccgtctggccggccgtcaggctggtggcgcagatagccgca

SEQ ID NO: 122644 - DNA, 80 bp, synthetic construct
  source 1..80: mol_type = other DNA
ttctaggcctagttggggccccactgacccccggcgtaggtcgcgcaatttgggtaaggtcatcgataccctcacgtgcg

SEQ ID NO: 122645 - DNA, 80 bp, synthetic construct
  source 1..80: mol_type = other DNA
ttctgctcggccctgccgatagctacacctcaaaggggtggaagctcctagctcccattactgcctacgctcagcagact

SEQ ID NO: 122646 - DNA, 80 bp, synthetic construct
  source 1..80: mol_type = other DNA
ggattcttgccccttgggcatagactctggctcagggcttctgggagtaggcgtggcggctctgaaggggacactctcgg

SEQ ID NO: 122647 - DNA, 80 bp, synthetic construct
  source 1..80: mol_type = other DNA
cctactaagttcactcctcaaaaatgatgtgccgctagctgggccactaatagctggaggcatgctaatagcatgttatg

SEQ ID NO: 122648 - DNA, 80 bp, synthetic construct
  source 1..80: mol_type = other DNA
gagccagtcgtcttttcccagatggagaccaaactcatcacgtggggggcggacaccgctgcatgcggtgacatcattga

SEQ ID NO: 122649 - DNA, 80 bp, synthetic construct
  source 1..80: mol_type = other DNA
aagctacggtgtgcgctagggccaaggctccccctccctcatgggacactatgtggaagtgtcttatcagacttaaacct

SEQ ID NO: 122650 - DNA, 80 bp, synthetic construct
  source 1..80: mol_type = other DNA
acggccaatacgcctacgtgacggggttgactacagacaacttaaaagtcccctgccaattgccagctccagagttcttc

SEQ ID NO: 122651 - DNA, 80 bp, synthetic construct
  source 1..80: mol_type = other DNA
cgcgccgccccgtgaccgttgaaccccaagccaatccccttccgctctccattttcaaaccacctcatttacatattggc

SEQ ID NO: 122652 - DNA, 80 bp, synthetic construct
  source 1..80: mol_type = other DNA
gaattctaaccgttaatccccctccccccttccactttaccttatacacctccctctccccctgtaccaccgcaaacaac

SEQ ID NO: 122653 - DNA, 80 bp, synthetic construct
  source 1..80: mol_type = other DNA
acgacgccagccccggcaccgccagcatcatgccggccctgaaggtcctcgactccctggtggcggcgcacaacaaacag

SEQ ID NO: 122654 - DNA, 80 bp, synthetic construct
  source 1..80: mol_type = other DNA
tttcaaccccatgatccttgctgctggactgattgcatgtgatcccaaccgtaaacgcggatggcccgcaactgaagtga

SEQ ID NO: 122655 - DNA, 80 bp, synthetic construct
  source 1..80: mol_type = other DNA
gcgtaacataataaagctttattggtaactagttaacggcaagtccgtgggtggcgcgacggtgtcctccgggatcatct

SEQ ID NO: 122656 - DNA, 80 bp, synthetic construct
  source 1..80: mol_type = other DNA
tggtgcaggatatcctgctgatgaagcagaacaactttaacgccgtgcgctgttcgcattatccgaaccatccgctgtgg

SEQ ID NO: 122657 - DNA, 80 bp, synthetic construct
  source 1..80: mol_type = other DNA
gggtccgcatcgatggtgaagatgcccggacagagttccttgtcaaaataatcaatttttaaggatgcatcatccaaggc

SEQ ID NO: 122658 - DNA, 80 bp, synthetic construct
  source 1..80: mol_type = other DNA
cccgccctatcaacaggtctcatacatctccaccaaaatatcgtggatgttcaatacctgtacggaattagttcaggtct

SEQ ID NO: 122659 - DNA, 80 bp, synthetic construct
  source 1..80: mol_type = other DNA
tcctaccccgactaccagaggttcccttcttgtcctgccaacgcgggtacaggggggtttggcgtggtgacggtattatg

SEQ ID NO: 122660 - DNA, 80 bp, synthetic construct
  source 1..80: mol_type = other DNA
ttctctcatgcctcaccgtgcccgcttcggcggtgcactatgccaataagtctggtctctatcatctgaccaacgactgc

SEQ ID NO: 122661 - DNA, 80 bp, synthetic construct
  source 1..80: mol_type = other DNA
taccgcaacaagcttacgcactgggagcggcggaagaaggtcaaatcggcttagtcctactagtgattctgtccatttac

SEQ ID NO: 122662 - DNA, 80 bp, synthetic construct
  source 1..80: mol_type = other DNA
gcagtggtgactcccgcgcgggccttttatcccccaggccggtaagcacactcaagggctcatcggagtggcccgtcatg

SEQ ID NO: 122663 - DNA, 80 bp, synthetic construct
  source 1..80: mol_type = other DNA
tcgatcgtatgggatattaataagtcatgtaaaaccgtgttcaataaacagaactttattttttacatgcactggtggtt

SEQ ID NO: 122664 - DNA, 80 bp, synthetic construct
  source 1..80: mol_type = other DNA
gcaacactgcctcgaaggcccggaacgtcccactaaacccaaaaaccagttttcgcaggcgcgcggtcaccgcgatctgg

SEQ ID NO: 122665 - DNA, 80 bp, synthetic construct
  source 1..80: mol_type = other DNA
gtgccctggtcgcctcgcctcctgtttgtctctcgacgactttaggataggttggggctctctggagtatgcggaaaatg

SEQ ID NO: 122666 - DNA, 80 bp, synthetic construct
  source 1..80: mol_type = other DNA
gaaagttccttgccgacggaggctgctcaggcggtgcctatgacatcatcatctgtgacgagtgccactcaacagatgct

SEQ ID NO: 122667 - DNA, 80 bp, synthetic construct
  source 1..80: mol_type = other DNA
tgacaggtggagcaatgcttttcttgatatcaggtaaagggattggaaagacttcaataggactcatttgtgtaatcgct

SEQ ID NO: 122668 - DNA, 80 bp, synthetic construct
  source 1..80: mol_type = other DNA
tactaggcataggcacggtgcttgaccaggcggaaaccagcggagtgcgtcttacggtattggctaccgcgacgcccccc

SEQ ID NO: 122669 - DNA, 80 bp, synthetic construct
  source 1..80: mol_type = other DNA
taccaagtcgagtttgcgcagggtgacacttgcatattattttcctctcaaagcagcgggtgtcatacgagaaaccctat

SEQ ID NO: 122670 - DNA, 80 bp, synthetic construct
  source 1..80: mol_type = other DNA
ctggcggggcccagatcctggtataacaggatacctgggtactcagaacaggtgaaaggaccatggaagtactcgcccat

SEQ ID NO: 122671 - DNA, 80 bp, synthetic construct
  source 1..80: mol_type = other DNA
gaataaacaaagatggagatgacagaacaagttatgaggttactgtgttagatggttatgaaaatgcagggcaacataaa

SEQ ID NO: 122672 - DNA, 80 bp, synthetic construct
  source 1..80: mol_type = other DNA
ccgcaaggagcgtgtgcggcccagtctactgctttacccccagtccggtggtggtgggcacgaccgataagttcgtggcg

SEQ ID NO: 122673 - DNA, 80 bp, synthetic construct
  source 1..80: mol_type = other DNA
ccaagtctatagacttcatccccgtcgagtcactcgacattgtcaccagatctccctccttttctgacaacagcacccca

SEQ ID NO: 122674 - DNA, 80 bp, synthetic construct
  source 1..80: mol_type = other DNA
accactgcaggcgcggcacctgcgtgacgtcgagctgctgctgcgagagctctcggatgcgtgcgatgattggttggacc

SEQ ID NO: 122675 - DNA, 80 bp, synthetic construct
  source 1..80: mol_type = other DNA
acgttccgccctcgcatacatcagactgtgcaagattgcaactgctctatataccctggccatatcaccggccacaggat

SEQ ID NO: 122676 - DNA, 80 bp, synthetic construct
  source 1..80: mol_type = other DNA
aaggtaccaaacaacagcaacaaaatctgaacatacgggaagagagattgttgatctaatgtgccacgcaacgttcacaa

SEQ ID NO: 122677 - DNA, 80 bp, synthetic construct
  source 1..80: mol_type = other DNA
tccttttcctttctttccaatctccaatttccttcctacttggtggctccatcttagccctagtcacggctagctgtgaa

SEQ ID NO: 122678 - DNA, 80 bp, synthetic construct
  source 1..80: mol_type = other DNA
cagaaccatgaatactctgaccagtgtcgtgctgctctctcttttagttgttaatgtggattcggcagatcctattctag

SEQ ID NO: 122679 - DNA, 80 bp, synthetic construct
  source 1..80: mol_type = other DNA
cctccagcccttcctatctgggctaggccagactacaaccctccattgttagaccgctggaaagcaccggattatgttcc

SEQ ID NO: 122680 - DNA, 80 bp, synthetic construct
  source 1..80: mol_type = other DNA
gaggcgcaggctagccaggggatcacccccctcgctggccacctctcctcctagccagcgagccgctccatccttgaaag

SEQ ID NO: 122681 - DNA, 80 bp, synthetic construct
  source 1..80: mol_type = other DNA
aacgcagcggcgacggcctggatggtggtgcgggcgattacgttccccacgacctccaccatcacgatgcccattctagc

SEQ ID NO: 122682 - DNA, 80 bp, synthetic construct
  source 1..80: mol_type = other DNA
gcgatgctgcagcgagggtcactgcattgctaagttctctaactgtcacaagtctgctccggcgattacaccagtggatc

SEQ ID NO: 122683 - DNA, 80 bp, synthetic construct
  source 1..80: mol_type = other DNA
acaggaagtgggggtgggagtggggggggacggacacggccccgaacagcaacacacaccagcattttgttatggacttt

SEQ ID NO: 122684 - DNA, 80 bp, synthetic construct
  source 1..80: mol_type = other DNA
aaaatttcccaaacaatggaatagaaagtttggtggataaaatgagtagatggaagacttatgctcaggatcacagagac

SEQ ID NO: 122685 - DNA, 80 bp, synthetic construct
  source 1..80: mol_type = other DNA
atgacatgggaaagattagaaaagatatacaacagtgggaaccttcaaaaggatggaacgattggacacaagtgcccttc

SEQ ID NO: 122686 - DNA, 80 bp, synthetic construct
  source 1..80: mol_type = other DNA
cccgccgggttcggtcaccgttccccaccccaacatcgacgaagtggcccttggccatgaaggtgagatcccgttctatg

SEQ ID NO: 122687 - DNA, 80 bp, synthetic construct
  source 1..80: mol_type = other DNA
catgccgaaagtcatagagaagatggagctgctccaacgccggtatggggggggactggtcagaaacccactctcacgga

SEQ ID NO: 122688 - DNA, 80 bp, synthetic construct
  source 1..80: mol_type = other DNA
gacctcctcccaatgaactgatgttgattaaaagcccaaaaaccaatcagccccttcccccatttccccatcgccaatta

SEQ ID NO: 122689 - DNA, 80 bp, synthetic construct
  source 1..80: mol_type = other DNA
atctggtagcgtaccaagccaccgtgtgcgctagagcccaagcccctcccccatcgtgggaccagatgtggaagtgcttg

SEQ ID NO: 122690 - DNA, 80 bp, synthetic construct
  source 1..80: mol_type = other DNA
cggggcgacggtccgggttcggggtgtgcggcggtccgtcggctggatccggagatccggtgccgccggtcgtctccgcc

SEQ ID NO: 122691 - DNA, 80 bp, synthetic construct
  source 1..80: mol_type = other DNA
gttctcccaacagcgttacaaaattactgcccccgcttgggcacgccacgtgtattttcaagcacatcaaatgcacttgg

SEQ ID NO: 122692 - DNA, 80 bp, synthetic construct
  source 1..80: mol_type = other DNA
acaccgttttgcacaaccccctaacaccgccttattttttaccgtggaaaacgttggcctatttccgcacttaaaagagg

SEQ ID NO: 122693 - DNA, 80 bp, synthetic construct
  source 1..80: mol_type = other DNA
ccataatctgcttaaaagcttgctgggccttagctccctcgctaaaaaacaggccgcagcttttcccgctaaactggtta

SEQ ID NO: 122694 - DNA, 80 bp, synthetic construct
  source 1..80: mol_type = other DNA
acgcccacttcctgtctcagaccaagcagagcggggataactttgcatatctggtggcttaccaggccaccgtgtgcgcg

SEQ ID NO: 122695 - DNA, 80 bp, synthetic construct
  source 1..80: mol_type = other DNA
aactgggcggttaaaacaaagctcaaactcactccaatgccagccgcatccagacttgatttatcaaactggtttacggt

SEQ ID NO: 122696 - DNA, 80 bp, synthetic construct
  source 1..80: mol_type = other DNA
ggcttacaaaaccatcattgccaaggtcatatggtggctccagtatctcttgacccggaccgaggccgcgttgcaagtgt

SEQ ID NO: 122697 - DNA, 80 bp, synthetic construct
  source 1..80: mol_type = other DNA
caaccgaaggtaggaaagccctcagaaccgtctcggaagaaggtccctgcttactggaggttggaagaccgtgtcaggcc

SEQ ID NO: 122698 - DNA, 80 bp, synthetic construct
  source 1..80: mol_type = other DNA
agacagccaggtcaaaacccactctattttcaaggtgctcgactgtggcttcaagcagtggctctacgcgtacatccagc

SEQ ID NO: 122699 - DNA, 80 bp, synthetic construct
  source 1..80: mol_type = other DNA
acgatccctcttgatgttaacgtacaggaggagcgcccgcaccgcccacgtaacgtagtagccgacgatggcggccagga

SEQ ID NO: 122700 - DNA, 80 bp, synthetic construct
  source 1..80: mol_type = other DNA
aaaggtcacggggtttacttggatccccagaccggtgaggaactgaataccccgtcaccctccgccgccgcttcgtgccg

SEQ ID NO: 122701 - DNA, 80 bp, synthetic construct
  source 1..80: mol_type = other DNA
aggccatccccctcgaagtcatcaaggggggtcggcacctcatattttgtcattcaaagaagaagtgcgacgagctagct

SEQ ID NO: 122702 - DNA, 80 bp, synthetic construct
  source 1..80: mol_type = other DNA
gcataccaggaggaaggatgtatgcagatgacactgctggctgggacacccgcatcagcaggtttgatctggagaatgaa

SEQ ID NO: 122703 - DNA, 80 bp, synthetic construct
  source 1..80: mol_type = other DNA
cagtctgagggccaccctgaacttcttgctgaccaatagacagcagaagatcccggcgcagtacgcgctgtcggccgagg

SEQ ID NO: 122704 - DNA, 80 bp, synthetic construct
  source 1..80: mol_type = other DNA
gtgcccctcatcgcgctgtcactggcctcctttcgggggatcaagatcggctacacggcgcacatccgcaaggcgaccga

SEQ ID NO: 122705 - DNA, 80 bp, synthetic construct
  source 1..80: mol_type = other DNA
tgttcagacaggcaatacatcccagtgctggaccccagtgacacctacagtggcagtcaggtacgtcggagcaaccaccg

SEQ ID NO: 122706 - DNA, 80 bp, synthetic construct
  source 1..80: mol_type = other DNA
ctatacctaaaaccactaaattaacaaccacaaccagcaccacacttgctgtgacctcacaggcaactactgaaaacgaa

SEQ ID NO: 122707 - DNA, 80 bp, synthetic construct
  source 1..80: mol_type = other DNA
catgccccaggcctgaccctgacaccggctgaggttcttgtagtagtcatgcatgagcctctcaatgtcatcatttgcgg

SEQ ID NO: 122708 - DNA, 80 bp, synthetic construct
  source 1..80: mol_type = other DNA
agcgcggctcatcgtataccccgacttatcagtgagggtgtgcgaaaagaaggcgctgtacgacatcacacgcaaactac

SEQ ID NO: 122709 - DNA, 80 bp, synthetic construct
  source 1..80: mol_type = other DNA
tggttgattacccctataggctgtggcactacccatgcactgtgaacttcaccttgcacaagattcgcatgtatgttggc

SEQ ID NO: 122710 - DNA, 80 bp, synthetic construct
  source 1..80: mol_type = other DNA
ggcgaaacgttacgcccttctccgcgctggtgcggtgcctgccgataaacgtcaccagatgcgagtggggggggcagtcg

SEQ ID NO: 122711 - DNA, 80 bp, synthetic construct
  source 1..80: mol_type = other DNA
gatgtttgccatcgttggagggctggctgaactggatgtggactcaatggcaatccccatgacaattgccggcctcatgt

SEQ ID NO: 122712 - DNA, 80 bp, synthetic construct
  source 1..80: mol_type = other DNA
tcttctggaaatctattaactgatgaatcaaacttaaaaattccacttaaaaataaatcttctacagcgaccagtgaagc

SEQ ID NO: 122713 - DNA, 80 bp, synthetic construct
  source 1..80: mol_type = other DNA
gttgcgcatcagctgctccacctcgcggtccacgacctgcctgacgttgttcaccaccgtatgcagggcctcgcggttgg

SEQ ID NO: 122714 - DNA, 80 bp, synthetic construct
  source 1..80: mol_type = other DNA
atagcgagcagctcatgtgctgctcgctctcatactcgtggacgggcgccctaatcaccccctgtgctgccgaggaagag

SEQ ID NO: 122715 - DNA, 80 bp, synthetic construct
  source 1..80: mol_type = other DNA
tcggctaatcgtatacccggacctaggggtccgggtgtgtgagaagcgagcgctttttgatgtcactcgtaagctgccta

SEQ ID NO: 122716 - DNA, 80 bp, synthetic construct
  source 1..80: mol_type = other DNA
atggcttgggatatgatgatgaattggtcccccgctgttggcatggtggtggcgcacgttttacgcttgccccagaccct

SEQ ID NO: 122717 - DNA, 80 bp, synthetic construct
  source 1..80: mol_type = other DNA
atgcataccgtgtgtgaaggttggaaatcagtccaaatgctggactgcagcaacacccacgcttgccgtcccaaactcgt

SEQ ID NO: 122718 - DNA, 80 bp, synthetic construct
  source 1..80: mol_type = other DNA
gggagaatagtagtagcaatcctttgcctaccacccccagtgagaaaattcccagatccatgattggcattatcgctgct

SEQ ID NO: 122719 - DNA, 80 bp, synthetic construct
  source 1..80: mol_type = other DNA
tggggtggtggttggcttcccaaattgccccccctgcaggggccactggctttgttgtcagtggtctagtggtggctgcc

SEQ ID NO: 122720 - DNA, 80 bp, synthetic construct
  source 1..80: mol_type = other DNA
tgtcctacggattgcttccggaaacatccacgtgccacgtacgccaagtgtgggtccgggccctggatcacccccagatg

SEQ ID NO: 122721 - DNA, 80 bp, synthetic construct
  source 1..80: mol_type = other DNA
ttaagactaagctcaaactcactccaataccggccgcatccatgctcgacctgtcgggatggtttagggccggttacagc

SEQ ID NO: 122722 - DNA, 80 bp, synthetic construct
  source 1..80: mol_type = other DNA
tcatgggcttaattgcctgtgccagcgcgctcaccctgtcaaactttcaaggaaagttgatgatgaccataaatgccacg

SEQ ID NO: 122723 - DNA, 80 bp, synthetic construct
  source 1..80: mol_type = other DNA
atgtggtgtttgaggtgactaagtggctattggctatccttggaccagccttcctcctcaaagacgtcttggcaggggtg

SEQ ID NO: 122724 - DNA, 80 bp, synthetic construct
  source 1..80: mol_type = other DNA
accttgccggcctgtccacgctgcccggtaatcctgctgtggcgtctttgatgtcattcacagcctccctgaccagtccc

SEQ ID NO: 122725 - DNA, 80 bp, synthetic construct
  source 1..80: mol_type = other DNA
taggaatgagcaacagagattttttggaaggtgtgtctggagccacatgggtggatctagtcctggaaggtgatagctgc

SEQ ID NO: 122726 - DNA, 80 bp, synthetic construct
  source 1..80: mol_type = other DNA
ataacttcagcacttagagtgtcagtttccacaaacgaggtggatttgatatttatctgccctgcggcaatgcttttgat

SEQ ID NO: 122727 - DNA, 80 bp, synthetic construct
  source 1..80: mol_type = other DNA
agaagtgagtggggtcaggggattcacccttggaaaggaaggccacgaaaagcccatgaatgtgcagagcctggtgtgga

SEQ ID NO: 122728 - DNA, 80 bp, synthetic construct
  source 1..80: mol_type = other DNA
aacttacaaaaccatcattgccaggatcatatggtggctccagtactttttgaccaagaccgaagccgcgttgcaagtat

SEQ ID NO: 122729 - DNA, 80 bp, synthetic construct
  source 1..80: mol_type = other DNA
aaataggcgactgatgtacgaagagaagacacacaggcgccacccggcgctggtcggggggatgttgtccgcgccgcacc

SEQ ID NO: 122730 - DNA, 80 bp, synthetic construct
  source 1..80: mol_type = other DNA
aatcgtccccggcgccttcctgcgacggtgaactggactccgaagctgaatcttactcctccatgccccctctcgaggtg

SEQ ID NO: 122731 - DNA, 80 bp, synthetic construct
  source 1..80: mol_type = other DNA
cgcgtttgtggtcagcggtttagctggcgctgctattggcagtatagggctgagtaaagtcatcatagacattctcgctg

SEQ ID NO: 122732 - DNA, 80 bp, synthetic construct
  source 1..80: mol_type = other DNA
ggtgcatccgtggtcccacaggacgcagccggtgcactcccagttcttgtgcgcgatcccgctgtggctgaaaatgtaac

SEQ ID NO: 122733 - DNA, 80 bp, synthetic construct
  source 1..80: mol_type = other DNA
ccagggggaggaaccggttgacgtggattgcttttgcaggaatgttgacggagtttacctggagtatgtgcggtgtggaa

SEQ ID NO: 122734 - DNA, 80 bp, synthetic construct
  source 1..80: mol_type = other DNA
cgaaacgcccctgcaagtgcacagacccaccccagtcagacccagtggcgagaggcgagcagctgttgaaaaaattgagg

SEQ ID NO: 122735 - DNA, 80 bp, synthetic construct
  source 1..80: mol_type = other DNA
ccttttcaatcagaccagggctgctcatcggctttgggctcaggaccctatggagccctcgggaacgccttgtgctgacc

SEQ ID NO: 122736 - DNA, 80 bp, synthetic construct
  source 1..80: mol_type = other DNA
aagacggccgcgtccgtccgcacgcgcgccatcagcgtccccggtggcgcgcacgccgaccgcgggctgacgcggcttag

SEQ ID NO: 122737 - DNA, 80 bp, synthetic construct
  source 1..80: mol_type = other DNA
gcccccaccctcgggttcgtgtatttcctttccctgtccttataaaagccgtatgtggggcgctgacggaaccaccccgc

SEQ ID NO: 122738 - DNA, 80 bp, synthetic construct
  source 1..80: mol_type = other DNA
cagcgccgcagaccacgccgcgggctggaccctcggcgcggacgacgaggaggcgtgggtgcccgcgagggccccggtgg

SEQ ID NO: 122739 - DNA, 80 bp, synthetic construct
  source 1..80: mol_type = other DNA
cttgaaaatgacatgaaattcacagtggttgtaggagatgttgctggaatcttggctcaagggaaaaaaatgattaggcc

SEQ ID NO: 122740 - DNA, 80 bp, synthetic construct
  source 1..80: mol_type = other DNA
catagatttgcgcccccttgcaagcccttgctacgagacgaggtgtcgttcagagtgggactacacgattacccggtggg

SEQ ID NO: 122741 - DNA, 80 bp, synthetic construct
  source 1..80: mol_type = other DNA
ctggacttcaactattgtgaaggaacaacagttgtcatcacagaaaattgtgggacaagaggcccatcattgagaacgac

SEQ ID NO: 122742 - DNA, 80 bp, synthetic construct
  source 1..80: mol_type = other DNA
gtcacttactcaatcactccactggatctcccagtaatcatccaaagactccacggcatggccgcattttcactccatgg

SEQ ID NO: 122743 - DNA, 80 bp, synthetic construct
  source 1..80: mol_type = other DNA
gtatgtctctggtgtagttgttcagcaacacctcagtaccctcctcccagctctggtattccagtccccggcgggcggca

SEQ ID NO: 122744 - DNA, 80 bp, synthetic construct
  source 1..80: mol_type = other DNA
tggtcaaacaggcaaagatcacctacgagctcgtgtccggcggcaagcagcatcgcctcgcctatgagctgccccagcag

SEQ ID NO: 122745 - DNA, 80 bp, synthetic construct
  source 1..80: mol_type = other DNA
ggtgtgcgcgcgacgaggaagacttccgaacggtcccagcccagaggtagaccccagcccataccaaaggcgcgtcacca

SEQ ID NO: 122746 - DNA, 80 bp, synthetic construct
  source 1..80: mol_type = other DNA
cggcaaaagtctgtggcccggtatactgtttcacaccgagtcccgtggtagtcggaaccactgatgccagcggggatccc

SEQ ID NO: 122747 - DNA, 80 bp, synthetic construct
  source 1..80: mol_type = other DNA
gagactcgcgtgacggtggggacgcaggcccgtaccctctacgggcttacgtccctcttttcggttgggccgtcccaaaa

SEQ ID NO: 122748 - DNA, 80 bp, synthetic construct
  source 1..80: mol_type = other DNA
gagtcaggggaccgacgaggatgaacggaacctgagagccttcacggaggctatgaccaggtattccgccccccccggtg

SEQ ID NO: 122749 - DNA, 80 bp, synthetic construct
  source 1..80: mol_type = other DNA
gcatggtctcggtgacggcgcggccgttctcgcgggggcgcagttggaagacgccgcccgtcatgtcccggttatgggtt

SEQ ID NO: 122750 - DNA, 80 bp, synthetic construct
  source 1..80: mol_type = other DNA
caaagaccctagccggtgcaaaaggcccaatcacccaaatgtacactaatgtagaccaagacctcgtcggctggcaagcg

SEQ ID NO: 122751 - DNA, 80 bp, synthetic construct
  source 1..80: mol_type = other DNA
tgttactccattgagccacttgacctacctcagatcattcagcgactccatggtcttagcgctttttcactccatagtta

SEQ ID NO: 122752 - DNA, 80 bp, synthetic construct
  source 1..80: mol_type = other DNA
ccaatggaagctggcacgtcaacaggacagccctcagttgtgatgatagcttgcagacaggattcattgccggcctgttc

SEQ ID NO: 122753 - DNA, 80 bp, synthetic construct
  source 1..80: mol_type = other DNA
catcatcaataatataccttaaaactggaaacgagccaatatgataatgagggaggagggactaggggtggtgtaaggtg

SEQ ID NO: 122754 - DNA, 80 bp, synthetic construct
  source 1..80: mol_type = other DNA
cccgctcgcctcattgtgtaccctgacctgggggtgcgtgtctgtgagaaacgtgccctatatgacgtgatacagaagtt

SEQ ID NO: 122755 - DNA, 80 bp, synthetic construct
  source 1..80: mol_type = other DNA
gcgtagatccatcgaagggtggacgcaagccggcacgcctaatagtttacccagacttgggcgtgcgggtctgcgagaag

SEQ ID NO: 122756 - DNA, 80 bp, synthetic construct
  source 1..80: mol_type = other DNA
tgttactttcaactcagccgccacggggtattccttatcttttaagtggactgctgttgtacgtgaaaaatttgcagctc

SEQ ID NO: 122757 - DNA, 80 bp, synthetic construct
  source 1..80: mol_type = other DNA
atggaaatcctgggggaaagcaaaaatactctcaacagagctccagaatcaaaccttcctcatagacggtcctgaaacaa

SEQ ID NO: 122758 - DNA, 80 bp, synthetic construct
  source 1..80: mol_type = other DNA
cggtagggggagcgcaaggccgcaccacccaccagctcacgtccctctttacatttgggccgtctcagaacatccagctt

SEQ ID NO: 122759 - DNA, 80 bp, synthetic construct
  source 1..80: mol_type = other DNA
gctcacttggcattggttgcggcatttaaagtcagaccagccttgttggtttccttcatcttcagagccaactggacacc

SEQ ID NO: 122760 - DNA, 80 bp, synthetic construct
  source 1..80: mol_type = other DNA
tctccgtggcccacgatggcacaggacagagatactactacctcacacgtgacccaaccatcccactagcacgagccgca

SEQ ID NO: 122761 - DNA, 80 bp, synthetic construct
  source 1..80: mol_type = other DNA
gataggactaaagagggctatgttgagtctgattgatggcaaaggaccaattcgttttgttttggccctgttggccttct

SEQ ID NO: 122762 - DNA, 80 bp, synthetic construct
  source 1..80: mol_type = other DNA
gagcatacgcgtttgacggggaggtggccgctttcctcggcagcggggttgtggccctattgctgatcatcacactttct

SEQ ID NO: 122763 - DNA, 80 bp, synthetic construct
  source 1..80: mol_type = other DNA
tcagtcgcgcacgacgtgacgggtaaaaaggtatattacctaacccgagaccctgaaactcccttggcgcgagctgtatg

SEQ ID NO: 122764 - DNA, 80 bp, synthetic construct
  source 1..80: mol_type = other DNA
ttgaaagttattattaccgcttttaaacttcccatcaaaccccgtcgctccgcgcaagattacattgttggtaggggttc

SEQ ID NO: 122765 - DNA, 80 bp, synthetic construct
  source 1..80: mol_type = other DNA
tacgtgaaggcccaagcggcgtgcaaggctgcgggcattgttgcaccgacgatgctggtgtgtggcgacgacctggtcgt

SEQ ID NO: 122766 - DNA, 80 bp, synthetic construct
  source 1..80: mol_type = other DNA
gcgataccacaacaaggtgtacagcacgacatcgcgaagcgcgtcacagcgggctaagaaggtaacctttgacagggtgc

SEQ ID NO: 122767 - DNA, 80 bp, synthetic construct
  source 1..80: mol_type = other DNA
gcactagacccccactcggacgatggtttggttgcacctggatgaactccacggggttcgtcaagacgtgcggcgcgcca

SEQ ID NO: 122768 - DNA, 80 bp, synthetic construct
  source 1..80: mol_type = other DNA
aggtgaacagccatgcagctctgggagccatgtttgaagagcaaaatcagtggagtagcgcccgtgaagctgtggaagat

SEQ ID NO: 122769 - DNA, 80 bp, synthetic construct
  source 1..80: mol_type = other DNA
atagctccatgccgcccctcgagggcgagccaggggaccctgatctttccgagggtgagggttcgaggtcatggtcgacc

SEQ ID NO: 122770 - DNA, 80 bp, synthetic construct
  source 1..80: mol_type = other DNA
cattctcgagcgatctgggatgctacccgccacctgcaacgctttcccctccgactttgtccctctgagctaccgcgagt

SEQ ID NO: 122771 - DNA, 80 bp, synthetic construct
  source 1..80: mol_type = other DNA
cgcataggacggggggtgggtcttaggtggttgggaggcgacagggaccccagagcatgcgcgtggaggtctgtcttgcc

SEQ ID NO: 122772 - DNA, 80 bp, synthetic construct
  source 1..80: mol_type = other DNA
aatacaccaggcctccccgtctgccaagaccacctcgagttctgggagagcgtctttaccggtctaacccatatagacgc

SEQ ID NO: 122773 - DNA, 80 bp, synthetic construct
  source 1..80: mol_type = other DNA
ctctatgtcttttacatggtcctgggaaagtggaaaatacaccactgaaacttttgctaccaactcttacaccttctcct

SEQ ID NO: 122774 - DNA, 80 bp, synthetic construct
  source 1..80: mol_type = other DNA
ggggccaattttagagctgggagagtgatagaccctaggagatgccttaagccagttatcttaactgatgggccagaaag

SEQ ID NO: 122775 - DNA, 80 bp, synthetic construct
  source 1..80: mol_type = other DNA
gggggccgtggccgccacgggcatcgtcggcctggcctgcgagcactattacaccaacggctactacgttgtggagacgc

SEQ ID NO: 122776 - DNA, 80 bp, synthetic construct
  source 1..80: mol_type = other DNA
caaaggcttcatgcccagcaccaccgcctatccatttataacatacgccactgagaccctaaatgaagattacatttatg

SEQ ID NO: 122777 - DNA, 80 bp, synthetic construct
  source 1..80: mol_type = other DNA
cttgagcgcgttttcgctccacagttactctccagctgagctcaacagggtcgcaggagcgctcaggaagcttgggtgcc

SEQ ID NO: 122778 - DNA, 80 bp, synthetic construct
  source 1..80: mol_type = other DNA
gctgcgcggagaggaaaggaagaactttgttgagctaatgcgcaacggtgaccttccagtgtggctagcttacaaagtgg

SEQ ID NO: 122779 - DNA, 80 bp, synthetic construct
  source 1..80: mol_type = other DNA
tgatgacacagctggctgggacactaggatcacaagggttgatctggacaatgaggcgaaggtactagagctcttggatg

SEQ ID NO: 122780 - DNA, 80 bp, synthetic construct
  source 1..80: mol_type = other DNA
atagacctcggttgtggaagaggtggctggtcatattattgtgctgggctgaagaaagtaactgaagtgaagggatacac

SEQ ID NO: 122781 - DNA, 80 bp, synthetic construct
  source 1..80: mol_type = other DNA
ttactctccaggagagctcaatcgcgtggcatcgagcctcaggcaacttggggccccacccttgagagcctggagacatc

SEQ ID NO: 122782 - DNA, 80 bp, synthetic construct
  source 1..80: mol_type = other DNA
actttagcaggtcccaaggggcccgtctgccagatgtacaccaacgtagaccaagatatggtgggttggccagcgccgcc

SEQ ID NO: 122783 - DNA, 80 bp, synthetic construct
  source 1..80: mol_type = other DNA
ggacggtgtcatcctgctaacgagtctgctttatccatctttaatttttgacatcaccaagctgctgctggcaatattgg

SEQ ID NO: 122784 - DNA, 80 bp, synthetic construct
  source 1..80: mol_type = other DNA
ggaccgtgtccttgatgacgtccatctcccggaaggccgcctcggaggtctcggggagcgccaccgccatgcggtgcacc

SEQ ID NO: 122785 - DNA, 80 bp, synthetic construct
  source 1..80: mol_type = other DNA
catattgctgacctgcctgatacatcctgcccttgggtttgacatcaccaaggtgctgttagcccttttggggccccttt

SEQ ID NO: 122786 - DNA, 80 bp, synthetic construct
  source 1..80: mol_type = other DNA
ttcaagaccgcgtttgactacgaccagaagttgctgatcgacctgtgtgcggaccgcgccccctacgtcgaccatagcca

SEQ ID NO: 122787 - DNA, 80 bp, synthetic construct
  source 1..80: mol_type = other DNA
ttctcaggcagaagcggcaatggagaatttggtaatgctgaatgccctcagcgctgcgggaggacagggttacgtctggt

SEQ ID NO: 122788 - DNA, 80 bp, synthetic construct
  source 1..80: mol_type = other DNA
caatctccggaccctattgggctgacgtcagggaagatgttgtatgctatggtggagcatggagccttgagagccggtgg

SEQ ID NO: 122789 - DNA, 80 bp, synthetic construct
  source 1..80: mol_type = other DNA
ctctgttgagtgtgatgaccatgggagtgttttttcttctcatgcagaggaagggcatcggaaagataggcctgggaggc

SEQ ID NO: 122790 - DNA, 80 bp, synthetic construct
  source 1..80: mol_type = other DNA
actggacctacctctaatcattcaaagactccatggccttagcgcattctcactccatagttactctccaggtgaaatca

SEQ ID NO: 122791 - DNA, 80 bp, synthetic construct
  source 1..80: mol_type = other DNA
tcatctctacagcccctactgcaccggcggcagcggcagcggcagcaacagcagcggtcacacagaagcaaaggcgaccg

SEQ ID NO: 122792 - DNA, 80 bp, synthetic construct
  source 1..80: mol_type = other DNA
ggcggcgcctcggcactatcgtcacctacgacaccggtctcgacgccgccatcgcgccctttcgccacctgtcgccggcg

SEQ ID NO: 122793 - DNA, 80 bp, synthetic construct
  source 1..80: mol_type = other DNA
aatctctcaaggagcgggatggagccttagagaaaccgcatgtctggggaaagcctacgctcaaatgtggagtctcatgt

SEQ ID NO: 122794 - DNA, 80 bp, synthetic construct
  source 1..80: mol_type = other DNA
agctgtcatccccgatagggaggtcctctaccgagagttcgatgaaatggaggagtgcgcctcacacctcccttatatcg

SEQ ID NO: 122795 - DNA, 80 bp, synthetic construct
  source 1..80: mol_type = other DNA
ggcagatgttcaccttcgctccccagcatcatatgactgtccaagagtgcaactgctccatctatactggtcatataact

SEQ ID NO: 122796 - DNA, 80 bp, synthetic construct
  source 1..80: mol_type = other DNA
caattcccttttgcgtcaccataatctggtgtacgccacgacctcccgttctgcgaccgcccggcagaagaaggtcactt

SEQ ID NO: 122797 - DNA, 80 bp, synthetic construct
  source 1..80: mol_type = other DNA
cccagggctacaaggtcctagtactgaacccctcggtggctgccacactagggtttggcgcttatatgagcaaggcccat

SEQ ID NO: 122798 - DNA, 80 bp, synthetic construct
  source 1..80: mol_type = other DNA
atggagccaaggatgtccggagccatgctagcaaggccattaaccatatcaactccgtatggaaggacttgttagaagac

SEQ ID NO: 122799 - DNA, 80 bp, synthetic construct
  source 1..80: mol_type = other DNA
cccagttggcccgccgcccaggtgtatcaggaaactccccgcccgaccacagtcctcctgccacgcgacgcggaggccga

SEQ ID NO: 122800 - DNA, 80 bp, synthetic construct
  source 1..80: mol_type = other DNA
tgtagtgggttgggctctcaagtgggagttcgttgtcctcgtgttcctccttctagcggacgcgcgcgtgtgcgtagctc

SEQ ID NO: 122801 - DNA, 80 bp, synthetic construct
  source 1..80: mol_type = other DNA
ggcccagttgttgcggattccccaggtggtcattgacatcattgccgggggccactgggaggtcctgctcgccgccgcat

SEQ ID NO: 122802 - DNA, 80 bp, synthetic construct
  source 1..80: mol_type = other DNA
cacccgagccccccgcccccatgatgaaccgggcgagctcctccttcaggtgcggcaggagccccacgttctcgacgctg

SEQ ID NO: 122803 - DNA, 80 bp, synthetic construct
  source 1..80: mol_type = other DNA
ggacctggctgtttgagaatggggaggaaagactcagccgcatggctgtcagcggagatgactgtgtggtaaagccccta

SEQ ID NO: 122804 - DNA, 80 bp, synthetic construct
  source 1..80: mol_type = other DNA
ctcaatgtcttattcctggacaggcgcactcgtcaccccgtgcgctgcggaagaacaaaaactgcccatcaacgcactga

SEQ ID NO: 122805 - DNA, 80 bp, synthetic construct
  source 1..80: mol_type = other DNA
agtgacgaagatgggggaaaggaaaatccttagaccccgttgggcagacgcgagagtgtactcagaccatcaggctctaa

SEQ ID NO: 122806 - DNA, 80 bp, synthetic construct
  source 1..80: mol_type = other DNA
aaacacagctcctgtttgcgggcgtgaggcggcaggctcttccgggaggcccgacgcaccacgcccagagtcccgccggc

SEQ ID NO: 122807 - DNA, 80 bp, synthetic construct
  source 1..80: mol_type = other DNA
ccctattgcgccaccacaatcttgtgtattccacttcctctcgaagtgcgggtcagaggcagaagaaggtcacctttgac

SEQ ID NO: 122808 - DNA, 80 bp, synthetic construct
  source 1..80: mol_type = other DNA
gccaagcatggcactggacctgcgtccagccacagcctgggcactgtatgggtggagcacagtcgtgctaacccctcttc

SEQ ID NO: 122809 - DNA, 80 bp, synthetic construct
  source 1..80: mol_type = other DNA
cgtaccaaaaccagactcactccaatcccagctgcgggcctgctggatctttccagttggttcactgttggcgtcggcgg

SEQ ID NO: 122810 - DNA, 80 bp, synthetic construct
  source 1..80: mol_type = other DNA
gagaaaatatggaggaggatcttaagctgcagccagactccgaaaccttaaccacccccaactctgaggtcggcgccgtc

SEQ ID NO: 122811 - DNA, 80 bp, synthetic construct
  source 1..80: mol_type = other DNA
ggagcagctgctctatgttgtcggccatctgcatagtggggccgaggccgccccgggcggccggttcgaggatggtgatc

SEQ ID NO: 122812 - DNA, 80 bp, synthetic construct
  source 1..80: mol_type = other DNA
gtgccagaccgaagaggtgctgccgccgcgggaggatgtgttttcgtggactcgttattgcacccccgacgaggtgcgcg

SEQ ID NO: 122813 - DNA, 80 bp, synthetic construct
  source 1..80: mol_type = other DNA
ggactgtcactacgtggtgggggcaactgctgacaatcttaagtgcccgtgccaggtgccagcacccgagttcttcacgg

SEQ ID NO: 122814 - DNA, 80 bp, synthetic construct
  source 1..80: mol_type = other DNA
tacgtggctgggtttttggccctgtatgacagcggggactcgggcgagttggcattggatccggatacggtgcgtgcggc

SEQ ID NO: 122815 - DNA, 80 bp, synthetic construct
  source 1..80: mol_type = other DNA
gccaaaactgggaagtggctataatggatgaggcccactggacagaccctcacagcatagccgccagaggccatttgtat

SEQ ID NO: 122816 - DNA, 80 bp, synthetic construct
  source 1..80: mol_type = other DNA
agtggaaggggaaggtctgcacagattgggatacatcttggaggacatagacaagaaggatggagacctgatatatgctg

SEQ ID NO: 122817 - DNA, 80 bp, synthetic construct
  source 1..80: mol_type = other DNA
gggcaatcctgtggttacaggcgttgccgcgcaagcggcgttttcaccactagcatggggaataccatgacatgctacat

SEQ ID NO: 122818 - DNA, 80 bp, synthetic construct
  source 1..80: mol_type = other DNA
gggactggatatgcgaggtgctgagcgattttaagacctggctgaaggccaagctcatgccgcaactgcctgggattccc

SEQ ID NO: 122819 - DNA, 80 bp, synthetic construct
  source 1..80: mol_type = other DNA
taggtgcagttggccatgacggaccagttcacgacttgcatgccgggttgggtgatctccgtgtacttgaggcgcgagta

SEQ ID NO: 122820 - DNA, 80 bp, synthetic construct
  source 1..80: mol_type = other DNA
acctatgcgatagggtcgcagctcccatgtgagccagagcccgataccgtagtattgacatccatgctacgtgacccaga

SEQ ID NO: 122821 - DNA, 80 bp, synthetic construct
  source 1..80: mol_type = other DNA
tcgttcacccgcccgaacatcaccgccgaagactgtacatccggtcgcaggctggcgttgtgcttcagccactggggcga

SEQ ID NO: 122822 - DNA, 80 bp, synthetic construct
  source 1..80: mol_type = other DNA
gttgacttcagcctagatcccaccttctccatagagaccacaaccgtgccccaggacgcagtgtcccggagtcaacggag

SEQ ID NO: 122823 - DNA, 80 bp, synthetic construct
  source 1..80: mol_type = other DNA
actggacaccgtatggcatgggacatgatgatgaactggtcgcccacgactactatgatcttggcatacgcgatgcgtgt

SEQ ID NO: 122824 - DNA, 80 bp, synthetic construct
  source 1..80: mol_type = other DNA
acttcaaggtctggctcaagaccaagctcttacctcgccttccaggagtccccttcctctcatgtcaacgggggtataaa

SEQ ID NO: 122825 - DNA, 80 bp, synthetic construct
  source 1..80: mol_type = other DNA
taaccgcacctgctacctgttcgacccttttggtttctccgacgaaaggctgaagcagatctaccagttcgagtacgagg

SEQ ID NO: 122826 - DNA, 80 bp, synthetic construct
  source 1..80: mol_type = other DNA
gcgccttagtgactccctccggaccagaggaggagaggctcccgataaatgccctcagtaacaccatgctgcggcattac

SEQ ID NO: 122827 - DNA, 80 bp, synthetic construct
  source 1..80: mol_type = other DNA
attgaacgactcaggcgtgagtacagctcaacgtggcaccacgatgagaaccacccatatagaacctggaactatcacgg

SEQ ID NO: 122828 - DNA, 80 bp, synthetic construct
  source 1..80: mol_type = other DNA
caagttgcccacttgcacgcgcctacagggagcggcaagagcaccaaagttccggctgcttacgctgcccagggatacaa

SEQ ID NO: 122829 - DNA, 80 bp, synthetic construct
  source 1..80: mol_type = other DNA
acgccgccgcggcgcagtatgatcagggcgcgtccctacgctcgctcgtggggcgcacgtccctgggacaacgcggcctt

SEQ ID NO: 122830 - DNA, 80 bp, synthetic construct
  source 1..80: mol_type = other DNA
cggccctgggcgtgctcggccggggcgccgcccccggagccctcgcgggcacccccgcctcctcgtcgtccgcgccgagg

SEQ ID NO: 122831 - DNA, 80 bp, synthetic construct
  source 1..80: mol_type = other DNA
gctatttgccggcgtcgacgcggaaaccttcgtcaccgggggaagcgccgccagaagcgtgcttggagttgccggactct

SEQ ID NO: 122832 - DNA, 80 bp, synthetic construct
  source 1..80: mol_type = other DNA
cttcttttccgtactcagcgcccaggacgccctgggccaagatctcaacttcgagatgtacggatccacgtactcagtaa

SEQ ID NO: 122833 - DNA, 80 bp, synthetic construct
  source 1..80: mol_type = other DNA
cgagcacgtagccctgcaccaagatctgcttaaagttcgggtgacgggggttcgcgaagacgggctcgcggcggaccaga

SEQ ID NO: 122834 - DNA, 80 bp, synthetic construct
  source 1..80: mol_type = other DNA
tcttgagggcgaacccggagacccagacctttccgaggtggaaggttcggggtcttggtcgacggtcagcgaagaggaga

SEQ ID NO: 122835 - DNA, 80 bp, synthetic construct
  source 1..80: mol_type = other DNA
cggcaaagactccgacgctgagtcatgctcctctatgcccccccttgaggtggagccgggggaccccgatctcagcgacg

SEQ ID NO: 122836 - DNA, 80 bp, synthetic construct
  source 1..80: mol_type = other DNA
gcgccccccgaacggcctcggggaggtccgaccagcccgccggcagggaggcccgcagggtcgccaggacggccggacag

SEQ ID NO: 122837 - DNA, 80 bp, synthetic construct
  source 1..80: mol_type = other DNA
aaacactgcacgggacagtcacagtggaggtacagtacgcagggacagatggaccttgcaaggttccagctcagatggcg

SEQ ID NO: 122838 - DNA, 80 bp, synthetic construct
  source 1..80: mol_type = other DNA
ctacggggtgcccggaacggatgagtaaatgtagaccattgcactcgttcgagcagggctggtggcctatctcatatgtc

SEQ ID NO: 122839 - DNA, 80 bp, synthetic construct
  source 1..80: mol_type = other DNA
ccccccctcgagggcgaaccaggagatcccgatcttagttcaggatcctggtccacggtcagcgaggagggagacagtgt

SEQ ID NO: 122840 - DNA, 80 bp, synthetic construct
  source 1..80: mol_type = other DNA
gaaaaatggatggcgccatatattattccagaccgagaacaaccatcatcaggggatgaagattctgacaccgattaaat

SEQ ID NO: 122841 - DNA, 80 bp, synthetic construct
  source 1..80: mol_type = other DNA
ctacaactggggtgaaaatgagacggacgtgttcctgctggagtcccagcggcctcccggtggtcggtggtttgggtgtg

SEQ ID NO: 122842 - DNA, 80 bp, synthetic construct
  source 1..80: mol_type = other DNA
acaatttccactccaacaatcagcatcatcgctgccgtgacaattggaatatctattcttgtttttaccataacctacta

SEQ ID NO: 122843 - DNA, 80 bp, synthetic construct
  source 1..80: mol_type = other DNA
ggggtttgtcaaaacatgcggagcacctccgtgctgcactaggccggacaacaacaatgacacacttgtctgtcccacgg

SEQ ID NO: 122844 - DNA, 80 bp, synthetic construct
  source 1..80: mol_type = other DNA
aagccctagcggcctgcaaggctgcggggatagttgcgcccacaatgctggtatgcggcgatgacctagtagtcatctca

SEQ ID NO: 122845 - DNA, 80 bp, synthetic construct
  source 1..80: mol_type = other DNA
tacgtgcagttggccatgacggaccagtttacaacttgcattccgggctgggtgatctctgtgtacctaaggcgggagta

SEQ ID NO: 122846 - DNA, 80 bp, synthetic construct
  source 1..80: mol_type = other DNA
gtgccctcctccgggtagccgcccacgcggcggagggcgtccagcgcggagccgttgtcggcccgcgtcagggaccctag

SEQ ID NO: 122847 - DNA, 80 bp, synthetic construct
  source 1..80: mol_type = other DNA
gttcttgtcggtgtatcgggggttcccaccaacgtctcctccaccacccaaccccaactccagaccaccggtcgtccctc

SEQ ID NO: 122848 - DNA, 80 bp, synthetic construct
  source 1..80: mol_type = other DNA
tttcggtcatcgtgttcattaccatcttcactctcaccccgcactacaagtggttgcttatgcagttgctgtggtggaac

SEQ ID NO: 122849 - DNA, 80 bp, synthetic construct
  source 1..80: mol_type = other DNA
ggtggttctgtacagcgaagatgttaacttagaagcgcccgatacccaccttgtgtttaagccagatgtcaacggcacaa

SEQ ID NO: 122850 - DNA, 80 bp, synthetic construct
  source 1..80: mol_type = other DNA
gactttactgtcagttggctatggccatagaggtgattactatggttttagacatgataacacaggcagaaaacattata

SEQ ID NO: 122851 - DNA, 80 bp, synthetic construct
  source 1..80: mol_type = other DNA
ttcgtagtgagcgggttagctggcgctgctataggaggcgtaggcctgggcaaggtcctgcttgacatcctagcaggata

SEQ ID NO: 122852 - DNA, 80 bp, synthetic construct
  source 1..80: mol_type = other DNA
acggacccgccgcttacgggtgcgggggggaagggctccaggtccttgagaagaaaggcgtggtctgccgtcccggacac

SEQ ID NO: 122853 - DNA, 80 bp, synthetic construct
  source 1..80: mol_type = other DNA
cccccctggaacgcgctcgctcactccgtgcacttgcggatcggcggacctgtacctggttaccaggcatgcagacgtcg

SEQ ID NO: 122854 - DNA, 80 bp, synthetic construct
  source 1..80: mol_type = other DNA
ccggggtctcggatcgggtggcttgagccagcgcgtccaggataaacacgctctcgtctagatcaaagcgcagggaggcc

SEQ ID NO: 122855 - DNA, 80 bp, synthetic construct
  source 1..80: mol_type = other DNA
taccatggcgctgggtcgcggacacttgctggcaacaaacggcctgcgctccaaatgtacaccaatgtagaccaggacct

SEQ ID NO: 122856 - DNA, 80 bp, synthetic construct
  source 1..80: mol_type = other DNA
ttatgccaacatatccggttcttctgaggacaggccgtattgctggcattatccgcccagaccttgtgacatagtgccag

SEQ ID NO: 122857 - DNA, 80 bp, synthetic construct
  source 1..80: mol_type = other DNA
tctcggggtctcgatggtgcagcaacgtctggcatggtacgtttcctatcaatgcatccacaacgggtcctagcgtgccc

SEQ ID NO: 122858 - DNA, 80 bp, synthetic construct
  source 1..80: mol_type = other DNA
ggtggaaaacatggagacctcaatgagatcgccggtcttcactgacaactcttcgccgcctgctgtcccgaactcgtatc

SEQ ID NO: 122859 - DNA, 80 bp, synthetic construct
  source 1..80: mol_type = other DNA
ggcgattggcgcggggttcgcccccatcggaggccagctcttccgcaagtcagctatcagcgccttcgctgcgggccacc

SEQ ID NO: 122860 - DNA, 80 bp, synthetic construct
  source 1..80: mol_type = other DNA
cgcaccatcgcgggcgggaagtacgcccaagcagcacttttgaagctgggagcttggactgggacatatatatatgacca

SEQ ID NO: 122861 - DNA, 80 bp, synthetic construct
  source 1..80: mol_type = other DNA
ccttctcttgatgattgtgctaattcctgagccagagaagcaacgttcgcagacagacaaccagctagccgtgttcctga

SEQ ID NO: 122862 - DNA, 80 bp, synthetic construct
  source 1..80: mol_type = other DNA
ccttagggatagcgtataacgggggccatgtctccggaccgcacaacggccgcgccgtcaaaggtgcacacccgaaccac

SEQ ID NO: 122863 - DNA, 80 bp, synthetic construct
  source 1..80: mol_type = other DNA
tgcatgcgtttgatcagggttggggctccctgtcttacgccaatgtagagggaccatctgatgacaagccctactgctgg

SEQ ID NO: 122864 - DNA, 80 bp, synthetic construct
  source 1..80: mol_type = other DNA
ttgttgccgcgcaggggccccaggttgggtgtgcgcgcagcgaggaagacttccgaacggtcccagccgcgtggaaggcg

SEQ ID NO: 122865 - DNA, 80 bp, synthetic construct
  source 1..80: mol_type = other DNA
acgaaggccacgcgatacctcatgaaaacggagaactggatcataaggaaccctggttatgctttcctggcggcggcact

SEQ ID NO: 122866 - DNA, 80 bp, synthetic construct
  source 1..80: mol_type = other DNA
ggaggctattagggtatatgcaaaggtggcacttaggccagattgcaagtacaagattagcaaacttgtaaatatcagga

SEQ ID NO: 122867 - DNA, 80 bp, synthetic construct
  source 1..80: mol_type = other DNA
caaagagtcgagagctggatactcagaaacccaggattttcgctactagctggatttatggcctacatggttggtcaaac

SEQ ID NO: 122868 - DNA, 80 bp, synthetic construct
  source 1..80: mol_type = other DNA
ccctagcagcctgtcgagccgcgaagctccaggactgcaccatgctcgtgtgtggcgacgacttggtcgtcatctgtgaa

SEQ ID NO: 122869 - DNA, 80 bp, synthetic construct
  source 1..80: mol_type = other DNA
gcaagttgtcgactttagcctagacccaactttcactatagagactaccactgtgcctcaggacgctgtctcccggagcc

SEQ ID NO: 122870 - DNA, 80 bp, synthetic construct
  source 1..80: mol_type = other DNA
cctgtacgtaggagaggcgacactaggggctccctcttgagccctaggccaatctctactctcaagggatcttctggtgg

SEQ ID NO: 122871 - DNA, 80 bp, synthetic construct
  source 1..80: mol_type = other DNA
aggtgatgaggtccagatggagtagaaaaatgctgatgactggaacactggctgtgttcttccttctcataatgggacaa

SEQ ID NO: 122872 - DNA, 80 bp, synthetic construct
  source 1..80: mol_type = other DNA
tcctcctcctcctcgcgctcccccatagggcgtacgcgtttgacggtgaggttgcaggggctataggcgacggcgtttta

SEQ ID NO: 122873 - DNA, 80 bp, synthetic construct
  source 1..80: mol_type = other DNA
gaaacccaggtcataggtaccttcgagatccagggaccccagcagcaagagggtgcttccggcttgaagctcactccggc

SEQ ID NO: 122874 - DNA, 80 bp, synthetic construct
  source 1..80: mol_type = other DNA
aatggagtggacttgagcgtggtggttgaaaagcagaaagggatttaccaccaagctccgaataggctcaagccaacggc

SEQ ID NO: 122875 - DNA, 80 bp, synthetic construct
  source 1..80: mol_type = other DNA
cccgaaacaaatttttatgtcatggggtcaattgcactctatgctcgctgttttgtgaatgaagatggcgtcaaatgacg

SEQ ID NO: 122876 - DNA, 80 bp, synthetic construct
  source 1..80: mol_type = other DNA
aatccgttatcagactccagctgtgaaatcagagcacacaggaagagagattgtagacctcatgtgtcatgcaaccttca

SEQ ID NO: 122877 - DNA, 80 bp, synthetic construct
  source 1..80: mol_type = other DNA
cggcgccgtcctccaggcggaacgttacgccctcctccgcgctggtgcggtgcctgccgataaacgtcaccagatgcggg

SEQ ID NO: 122878 - DNA, 80 bp, synthetic construct
  source 1..80: mol_type = other DNA
tacgctgaccacatccccctttttcttttcttatattagagaagacgacaactaaaaaataaagtttaagtgtttttatt

SEQ ID NO: 122879 - DNA, 80 bp, synthetic construct
  source 1..80: mol_type = other DNA
tttttaactttcctatctgtctatcttctagacttctttcttggtggctccatcttagccctagtcacggctagctgtga

SEQ ID NO: 122880 - DNA, 80 bp, synthetic construct
  source 1..80: mol_type = other DNA
ggctgttgttgacagaacctccagttatttctccagtagccgctagtgatgggctgttgttgacagaccctccgattctt

SEQ ID NO: 122881 - DNA, 80 bp, synthetic construct
  source 1..80: mol_type = other DNA
ctgggaagaagtgcccttctgctcacaccatttccatgagctcgtgatgaaggatgggcgttcccttatagtgccctgca

SEQ ID NO: 122882 - DNA, 80 bp, synthetic construct
  source 1..80: mol_type = other DNA
gtgatggcgtcatccttctcacgtgcttgttgcacccggccctgggttttgaaataaccaagatcctactagcaatagtg

SEQ ID NO: 122883 - DNA, 80 bp, synthetic construct
  source 1..80: mol_type = other DNA
accgtgcaacatgagcacaaatcctaaacctcaaagacaaacaaaaagaaacatgccccgtcgcccacaggacgtcaagt

SEQ ID NO: 122884 - DNA, 80 bp, synthetic construct
  source 1..80: mol_type = other DNA
aaagggaccaatagatgttgggttcgggcaatagatgtgggacacatgtgcgaggacacaatcacctacgaatgccctaa

SEQ ID NO: 122885 - DNA, 80 bp, synthetic construct
  source 1..80: mol_type = other DNA
cacgggatttactagcctctttatgccaggtgccaggcagcaactcatgttgatcaattccaacggcagctggcatataa

SEQ ID NO: 122886 - DNA, 80 bp, synthetic construct
  source 1..80: mol_type = other DNA
cccctgtaaaatcaggccagcaggcgaccacaactcaaataccaccttaacctgccccactgactgcttctggaaacatc

SEQ ID NO: 122887 - DNA, 80 bp, synthetic construct
  source 1..80: mol_type = other DNA
caaatcctgtccacagtctctcagtccttcctcggaacaaccatctcgggggttttgtggactgtttaccacggagctgg

SEQ ID NO: 122888 - DNA, 80 bp, synthetic construct
  source 1..80: mol_type = other DNA
ccactctgcgagatccaagtatgggttcggggctaaagaggttcgcagcttatccaggagggccgttaaccacatcaagt

SEQ ID NO: 122889 - DNA, 80 bp, synthetic construct
  source 1..80: mol_type = other DNA
tctatccacgcacgtggggagtggatgacaacagaagacatgcttgaggtgtggaaccgcgtctggattgaagaaaatga

SEQ ID NO: 122890 - DNA, 80 bp, synthetic construct
  source 1..80: mol_type = other DNA
ctgaggtggaggatagcgggatgaccgaagccaaggatgggggaccgggtccatcatttaatcgattttaccagtttgcc

SEQ ID NO: 122891 - DNA, 80 bp, synthetic construct
  source 1..80: mol_type = other DNA
ggttacactagcgccctggtagagttggaaggcgataacgccaggctggccgtgcttaagcgcagcgtcgagcttaccca

SEQ ID NO: 122892 - DNA, 80 bp, synthetic construct
  source 1..80: mol_type = other DNA
ctttgccaagcttgaacaattctgggcgaagcatatgtggaacttcatcagcggcatccaataccttgccggcttatcca

SEQ ID NO: 122893 - DNA, 80 bp, synthetic construct
  source 1..80: mol_type = other DNA
acttcaaaacttggctgaaagccaagctactgcccagcctcccgggcgtcccctttttctcgtgccaacggggatatagg

SEQ ID NO: 122894 - DNA, 80 bp, synthetic construct
  source 1..80: mol_type = other DNA
ctctgcctggcaacccagctgtggcgtctcttatggcgttcactgcttcagtcaccagtcccctgacgaccaaccaaact

SEQ ID NO: 122895 - DNA, 80 bp, synthetic construct
  source 1..80: mol_type = other DNA
ggagcgcgccggccccgggttttttgagctggcgctggccttcgactccacgcgcgtggcggactacgaccgcgtgtata

SEQ ID NO: 122896 - DNA, 80 bp, synthetic construct
  source 1..80: mol_type = other DNA
gagatgtggtggtcgtcgccaccgacgccctcatgacggggtacactggagactttgactccgtgatcgactgcaatgta

SEQ ID NO: 122897 - DNA, 80 bp, synthetic construct
  source 1..80: mol_type = other DNA
cgtctccgtggcccatgacaacaacggacagagatactattacctcacacgtgaccccgtcacaccattgacacgagcag

SEQ ID NO: 122898 - DNA, 80 bp, synthetic construct
  source 1..80: mol_type = other DNA
gtgggaggcattgagcatcggtttgaagctgcttgcaactggactcgtggggaacggtgcgagctggatgatagagacag

SEQ ID NO: 122899 - DNA, 80 bp, synthetic construct
  source 1..80: mol_type = other DNA
gtcgcttctcagcttgcaccccccagcgctgctactgcttttgtgggtgctggtttggtcggggcagccgtcggcggcgt

SEQ ID NO: 122900 - DNA, 80 bp, synthetic construct
  source 1..80: mol_type = other DNA
gcttgcatgtccgcggacttggaggtcattaccagcacgtgggttctggtgggtggtgtcgtggcggccttagcgtccta

SEQ ID NO: 122901 - DNA, 80 bp, synthetic construct
  source 1..80: mol_type = other DNA
tgaatgatcctggtgccccctggaaactttggatgctacgaatggcttgcttagcaataagtgcctacaccccttgggcc

SEQ ID NO: 122902 - DNA, 80 bp, synthetic construct
  source 1..80: mol_type = other DNA
catcctcccagtgaccctctctggtctccccggacggtccaaaccgcaccctgttggatgggagaggcgccgatccgggc

SEQ ID NO: 122903 - DNA, 80 bp, synthetic construct
  source 1..80: mol_type = other DNA
acctttggtgagaatgagacggatgtgttcttgctgagctccctgaggcccccccaaggccgatggtttgggtgtgtgtg

SEQ ID NO: 122904 - DNA, 80 bp, synthetic construct
  source 1..80: mol_type = other DNA
tcttcaccatcacccctatgtacaaacagctgctcatgcgcgccatttggtggaaccaatacatgctgacccgagctgag

SEQ ID NO: 122905 - DNA, 80 bp, synthetic construct
  source 1..80: mol_type = other DNA
ggcagctggagtggcgtctgctgacgtcactggcgatgacgatgacgaagaccagtacgaggactgatcggccgtacctt

SEQ ID NO: 122906 - DNA, 80 bp, synthetic construct
  source 1..80: mol_type = other DNA
gggcactaccgcgcgccctggggcgcgcacaaacgcggccgcactgggcgcaccaccgtcgatgacgccatcgacgcggt

SEQ ID NO: 122907 - DNA, 80 bp, synthetic construct
  source 1..80: mol_type = other DNA
gataatggcatttgtaagatgttgcacaatggcttccaaaaggcaaacggccctcacgtccaagtggacgtaaaggctaa

SEQ ID NO: 122908 - DNA, 80 bp, synthetic construct
  source 1..80: mol_type = other DNA
ccacgctggaggcgccttacgttcctcccagatacctgggacctacggagggcagaaacagcatccgttactccgagctg

SEQ ID NO: 122909 - DNA, 80 bp, synthetic construct
  source 1..80: mol_type = other DNA
gaaacttaaaagctgttttttcgtcattctccacgtgatatttctccatcaggacgttcatgagctccatgcccttctcc

SEQ ID NO: 122910 - DNA, 80 bp, synthetic construct
  source 1..80: mol_type = other DNA
cggtgagttagcagccaaactccggggcatgggtgtcaatgccgttgcatactataggggtctcgacgtctccgttatac

SEQ ID NO: 122911 - DNA, 80 bp, synthetic construct
  source 1..80: mol_type = other DNA
gaccttttgggcgaagcacatgtggaatttcatcagcgggatacagtacttggcaggtttgtccactctgcctgggaacc

SEQ ID NO: 122912 - DNA, 80 bp, synthetic construct
  source 1..80: mol_type = other DNA
tggaagggcaaagggtagccgggccatctggtacatgtggctaggagcaagatttctggaattcgaagcactcggcttcc

SEQ ID NO: 122913 - DNA, 80 bp, synthetic construct
  source 1..80: mol_type = other DNA
ccagatccgcgcgcacgcgcgtcgtctggggggcgctctcgagctcgtccagcgtctgccggttcaggtcgagctgctcc

SEQ ID NO: 122914 - DNA, 80 bp, synthetic construct
  source 1..80: mol_type = other DNA
ttgctggttgtgctctccccccccccaagaaggccccgacgcctcccccaaggagacgccggacagtgggtctgagcgag

SEQ ID NO: 122915 - DNA, 80 bp, synthetic construct
  source 1..80: mol_type = other DNA
taacatcaggactggggtgaggacaattaccactggcagctctatcacgtactccacctacggcaaattcctcgccgatg

SEQ ID NO: 122916 - DNA, 80 bp, synthetic construct
  source 1..80: mol_type = other DNA
tttcacccatcgactggtcggtttgaaaggcatcgacgtccggggttttcgtctgtgggggcttttgggtatttccgatg

SEQ ID NO: 122917 - DNA, 80 bp, synthetic construct
  source 1..80: mol_type = other DNA
atggttcttgtgcctacgtgacggggttgacagatgacaatctcaaagtcccttgccaactgcctgcaccggagttcttc

SEQ ID NO: 122918 - DNA, 80 bp, synthetic construct
  source 1..80: mol_type = other DNA
gcatacaggattccctgctggtgggccagctgttttttaagtttttgccccatctggagctctcggccgtcgcgcgcttg

SEQ ID NO: 122919 - DNA, 80 bp, synthetic construct
  source 1..80: mol_type = other DNA
gcccgaatttttcacagaactggacggggtgcgcttgcataggtacgcgcccccttgcaagcccttgatacgggacgagg

SEQ ID NO: 122920 - DNA, 80 bp, synthetic construct
  source 1..80: mol_type = other DNA
ctgcgtctgcagcattgtttgcttggtcgtcaccttcctgcagctcatcgactggtgctgcgcgcgctacaattatctcc

SEQ ID NO: 122921 - DNA, 80 bp, synthetic construct
  source 1..80: mol_type = other DNA
gcatgaggatccagaacacccataccgcacctggacataccatggaagttacgaagtgaaagccaccgggtcagccagct

SEQ ID NO: 122922 - DNA, 80 bp, synthetic construct
  source 1..80: mol_type = other DNA
ggggaaacctctgctgaattctgataccagcaagataaagaaccgggtcgagaggctgaagagagaatatggctcaacat

SEQ ID NO: 122923 - DNA, 80 bp, synthetic construct
  source 1..80: mol_type = other DNA
gctgacgtcatcccggctcgaagacgtggggacaagcggggagcactactctccccgagaccactttcgaccttaaaagg

SEQ ID NO: 122924 - DNA, 80 bp, synthetic construct
  source 1..80: mol_type = other DNA
agctcatgagggttccggaggtcctcgttgacatgttcaccggaggccactggggcgtcttggcagggttggccttcttc

SEQ ID NO: 122925 - DNA, 80 bp, synthetic construct
  source 1..80: mol_type = other DNA
ccgcggggacacacggcatcttgtggtatatggtcgctttttgcgccgcgtggcatgtgcggggaaagctcgtcccgctg

SEQ ID NO: 122926 - DNA, 80 bp, synthetic construct
  source 1..80: mol_type = other DNA
acccagacctggagctcgaggcggcaggacatggtcctcccagcgatggggggtccgtggttgtcaactctgactccaac

SEQ ID NO: 122927 - DNA, 80 bp, synthetic construct
  source 1..80: mol_type = other DNA
gtggcccttactcctcttgcttctgctgctgccggagagagcctacgctctcgacggggaggtggcagggttccttggcg

SEQ ID NO: 122928 - DNA, 80 bp, synthetic construct
  source 1..80: mol_type = other DNA
acacctggggcgcaaatgagaccgatgtgttcctcttggagagccgccgcccaccagccggcggttggttcggatgcacg

SEQ ID NO: 122929 - DNA, 80 bp, synthetic construct
  source 1..80: mol_type = other DNA
acgttacacccccctgactcaggagataggcatatcctccttagattgactcagcacacgatcgcaccccacccctgtgt

SEQ ID NO: 122930 - DNA, 80 bp, synthetic construct
  source 1..80: mol_type = other DNA
tttgtgtcctgccaacgcgggtataagggagtctggcaaggagatggcatcatgcacactcgctgccactgtggagctga

SEQ ID NO: 122931 - DNA, 80 bp, synthetic construct
  source 1..80: mol_type = other DNA
cgcttcaatcaaagattctccacgtatgactctctcacgcaacgcgcgggcaatacgtgagtccattttatatgactcaa

SEQ ID NO: 122932 - DNA, 80 bp, synthetic construct
  source 1..80: mol_type = other DNA
accattcacgtagccagccactctcgcaaggcctggccagtgtttgagcacaacatactgacccgctgttccttgcattt

SEQ ID NO: 122933 - DNA, 80 bp, synthetic construct
  source 1..80: mol_type = other DNA
gtggcgggtaaccgctgaggagtacgtggagattaggcgggtggtggacttccactacgtgacgggcatgaccactgaca

SEQ ID NO: 122934 - DNA, 80 bp, synthetic construct
  source 1..80: mol_type = other DNA
gcaactggctgctttgcgcggacatcgcaaaacacatccgagtgattaaacaacaaaacactaagctccattcttgagcc

SEQ ID NO: 122935 - DNA, 80 bp, synthetic construct
  source 1..80: mol_type = other DNA
ttgctgcctaatgatcaaaacaacaccgcatatcgcagctggtttttagcctacaactatggagaccccaagaagggagt

SEQ ID NO: 122936 - DNA, 80 bp, synthetic construct
  source 1..80: mol_type = other DNA
tcatggttgaaaaagatcaggttcccgtgtcacctgcagttcatttaaaagattaacattaggctcaaaaccccgatccc

SEQ ID NO: 122937 - DNA, 80 bp, synthetic construct
  source 1..80: mol_type = other DNA
actctcgtcgcttggcttgaatgccgtcgctttctacagaggtgtggacgtggctgttatccctacttcaggcgacgttg

SEQ ID NO: 122938 - DNA, 80 bp, synthetic construct
  source 1..80: mol_type = other DNA
tagaaaatgaggaggaggttcttgatataacggccaccgaagtgtagccgccgcaccgggagcaaggtcttctaacatga

SEQ ID NO: 122939 - DNA, 80 bp, synthetic construct
  source 1..80: mol_type = other DNA
caaggcatgcagacatcgtgccagtacgtaggaggggagacacgcggggtgcccttctaaaccccaggccaatatccacc

SEQ ID NO: 122940 - DNA, 80 bp, synthetic construct
  source 1..80: mol_type = other DNA
aaagtactagaaccccttccccacacctcacagggtcttacactttcttggagcgccccattatcagttaaggccagtgc

SEQ ID NO: 122941 - DNA, 80 bp, synthetic construct
  source 1..80: mol_type = other DNA
tttactgctcggatggccaccgtgcactactcccgccgacctgggaccccgccggtcaccctcacgtcgtcccccggcat

SEQ ID NO: 122942 - DNA, 80 bp, synthetic construct
  source 1..80: mol_type = other DNA
cacttcccgtccttccatcccccgttcccctcggttgttcctcgccccccccaacaccccgccgctttccgttgtggttg

SEQ ID NO: 122943 - DNA, 80 bp, synthetic construct
  source 1..80: mol_type = other DNA
gacgagtcggccgcagcgcaagcgctggcccagctcgcggagcggagcttcccacccatgtcggacgaggctcagactca

SEQ ID NO: 122944 - DNA, 80 bp, synthetic construct
  source 1..80: mol_type = other DNA
tgcgcgccgtgagcctggtcgccggggccctgggccccgcgctgccgcgggacccgcgcctgccgagctccgcggccgcc

SEQ ID NO: 122945 - DNA, 80 bp, synthetic construct
  source 1..80: mol_type = other DNA
actgcggactacctatacgttagagtggcatactatcgtcatcatccccaatataggaaccacgaggtggccgcccttct

SEQ ID NO: 122946 - DNA, 80 bp, synthetic construct
  source 1..80: mol_type = other DNA
gcggcaaaccgttccatgaccggattgaacaggcccaggggcaggacgaacgtcaggtccatggcgcccaccaggaggta

SEQ ID NO: 122947 - DNA, 80 bp, synthetic construct
  source 1..80: mol_type = other DNA
ccggagatcatgcgcgggtgtcctcgaggtgcgtgaacacctctggggtgcatgccggcggacggcacgccttttaagta

SEQ ID NO: 122948 - DNA, 80 bp, synthetic construct
  source 1..80: mol_type = other DNA
agatttaaagaatgaagagatgatatcggaacagatgaaaggtgagcataggacactggctgaggctattttcaaattaa

SEQ ID NO: 122949 - DNA, 80 bp, synthetic construct
  source 1..80: mol_type = other DNA
acatccggtcgggagtcagaaccatcaccacgggtgcgccgatcacatactccacgtacgggaaattcctggccgatgga

SEQ ID NO: 122950 - DNA, 80 bp, synthetic construct
  source 1..80: mol_type = other DNA
cttctcttctccggcgtcgatgcgacaacgcaggtcaccgggggtgagacggccaagcacacctccagcctcgtgagatt

SEQ ID NO: 122951 - DNA, 80 bp, synthetic construct
  source 1..80: mol_type = other DNA
gctgtgccctacggattgcttccggaaacatccagatgccacctacgggaaatgcgggtcaggcccgtggctcactctcc

SEQ ID NO: 122952 - DNA, 80 bp, synthetic construct
  source 1..80: mol_type = other DNA
ctagtcgactacccgtacaggctctggcattacccctgtactgtcaattacaccatccacaaggtccgcgttttcctggg

SEQ ID NO: 122953 - DNA, 80 bp, synthetic construct
  source 1..80: mol_type = other DNA
attgtggaggactaaaaaacgtaagagaagtgaaaggcctaacaaaaggaggaccaggacacgaagaacccatccctatg

SEQ ID NO: 122954 - DNA, 80 bp, synthetic construct
  source 1..80: mol_type = other DNA
tttccggtggtgggcgccgagctgttgcccgtgcactccaagagcttctacaacgaccaggccgtctactcccagctcat

SEQ ID NO: 122955 - DNA, 80 bp, synthetic construct
  source 1..80: mol_type = other DNA
ataccgctcccagcaataccacgttagagtggaatacagaccgtaaagtaattacagatgcttatattcaaaccggggca

SEQ ID NO: 122956 - DNA, 80 bp, synthetic construct
  source 1..80: mol_type = other DNA
accaggctaccacacacaaacagcaggaccttggcatctaggtaagctcgagatggacttcgatttctgcgaaggaacca

SEQ ID NO: 122957 - DNA, 80 bp, synthetic construct
  source 1..80: mol_type = other DNA
ttcgctctccgcctctcgcagatggacccgtactgcccatttgacgctctggacgtctgggaacacaggcgcttcatagt

SEQ ID NO: 122958 - DNA, 80 bp, synthetic construct
  source 1..80: mol_type = other DNA
catccctgccagacgcaggggtgacacccgagcaagcctgctcagccccaggccactaagcaccctcaagggatcctctg

SEQ ID NO: 122959 - DNA, 80 bp, synthetic construct
  source 1..80: mol_type = other DNA
tgtattaaaaaataaaaaaccacttaccagagccatggcaacagcgtcggtccctttgtgtgttttctccctcttcccag

SEQ ID NO: 122960 - DNA, 80 bp, synthetic construct
  source 1..80: mol_type = other DNA
gacgccgggtcttacagctctatgccccctttggaaggggagccgggggacccggatctgagcactggctcatggtccac

SEQ ID NO: 122961 - DNA, 80 bp, synthetic construct
  source 1..80: mol_type = other DNA
ggctacccagtcaatgatagcggttcctctgaggccaaaggcgacgttgagacactctccgacgccgggtcttacagctc

SEQ ID NO: 122962 - DNA, 80 bp, synthetic construct
  source 1..80: mol_type = other DNA
gaaggatcgggcttctaaggtaagtgccaggctcctctcaacggaggaagcctgtgacctcacccccccgcactcagctc

SEQ ID NO: 122963 - DNA, 80 bp, synthetic construct
  source 1..80: mol_type = other DNA
tgttcgcgggcgacgccgcggccgaatggctgcggccctcgttcggtcttaagcgcacgtattccccctttgtcgttcgc

SEQ ID NO: 122964 - DNA, 80 bp, synthetic construct
  source 1..80: mol_type = other DNA
gacgtagtggtatgcgccacggacgccctcatgaccgggtacactggggacttcgactcggtcatcgactgcaacacttc

SEQ ID NO: 122965 - DNA, 80 bp, synthetic construct
  source 1..80: mol_type = other DNA
cagtgaggaagacctctgaacgatcccagcctagaggcaggcgtcagcccataccaaaggcacgccagccgacgggccgg

SEQ ID NO: 122966 - DNA, 80 bp, synthetic construct
  source 1..80: mol_type = other DNA
ttctgactgttatgcttgccaagcttgaaactctaactgctcagctggaagagctatcgcaaaaggttgaggaattagct

SEQ ID NO: 122967 - DNA, 80 bp, synthetic construct
  source 1..80: mol_type = other DNA
acgagacagccgatgctattctgcacactccggggtgtgtcccttgcgttcgcgatggtaacacctcgaggtgttgggtg

SEQ ID NO: 122968 - DNA, 80 bp, synthetic construct
  source 1..80: mol_type = other DNA
gcctacggcctcgtgctcgcgtggtacatcgtctttggtgccagtccgctccaccgatgtatttacgcggtgcgccccgc

SEQ ID NO: 122969 - DNA, 80 bp, synthetic construct
  source 1..80: mol_type = other DNA
acgacgtggtttccactctccctcaggccgtgatgggctcctcatacgggttccagtactctcctggacagcgggtcgag

SEQ ID NO: 122970 - DNA, 80 bp, synthetic construct
  source 1..80: mol_type = other DNA
cgacgacggacggccacacctcgcgtgcgtggaggccctggcgcgggggttcatgcatatctggcttcaggccgccacgc

SEQ ID NO: 122971 - DNA, 80 bp, synthetic construct
  source 1..80: mol_type = other DNA
gaaagagggagaccggcggggtacgggagagcagcgagggcctgcgtaacccacggaggccgcgggagtggctccctgcg

SEQ ID NO: 122972 - DNA, 80 bp, synthetic construct
  source 1..80: mol_type = other DNA
cagacccagatcacatcacagcagaggcggctaggcggcgcctcgctagaggctctcctccatcactcgctagttcctct

SEQ ID NO: 122973 - DNA, 80 bp, synthetic construct
  source 1..80: mol_type = other DNA
ccggcctcaaagactttgacctattggtctgtggagacgacttggtggttatctccgaaagtgcaggagtctcggaggac

SEQ ID NO: 122974 - DNA, 80 bp, synthetic construct
  source 1..80: mol_type = other DNA
ttagtgccatcacccaagggaggagggaggaagagactcctgttgagtgcttcgagccttcgatgctgaagaagaagcag

SEQ ID NO: 122975 - DNA, 80 bp, synthetic construct
  source 1..80: mol_type = other DNA
tttccacaccctttggcatacaacaaaaggagccgctctgatgagcggggaaggccgcctggacccatactggggtagtg

SEQ ID NO: 122976 - DNA, 80 bp, synthetic construct
  source 1..80: mol_type = other DNA
agaaacaacctacaccaagtgtggttcaggtccttggctcacgccacggtgcttgatccactacccatatcggctgtggc

SEQ ID NO: 122977 - DNA, 80 bp, synthetic construct
  source 1..80: mol_type = other DNA
gcaaggcctttccgctctcacaagtgaagggcgggaggcatctcatattctgtcattccaagaagaagtgtgatgagctt

SEQ ID NO: 122978 - DNA, 80 bp, synthetic construct
  source 1..80: mol_type = other DNA
ctgaattgcaatgactcccttaacaccgggttcatcgccgcgctgttctacgcacacaagttcaactcgactggatgccc

SEQ ID NO: 122979 - DNA, 80 bp, synthetic construct
  source 1..80: mol_type = other DNA
acatgatcctccagagcagtctgggtaacgacctgcgggtcgacggagccagcgtcaggttcgatagcattaatctgtac

SEQ ID NO: 122980 - DNA, 80 bp, synthetic construct
  source 1..80: mol_type = other DNA
ttacagtgttagatggaaaactggccctgcagacatcagcccccctatctgccactgatgacaacgccctcactatcact

SEQ ID NO: 122981 - DNA, 80 bp, synthetic construct
  source 1..80: mol_type = other DNA
gggcttacacccgcggtgttatctcaagacgtaccaccgttgatgacgtcattgactccgtggtagccgatgcccaacgc

SEQ ID NO: 122982 - DNA, 80 bp, synthetic construct
  source 1..80: mol_type = other DNA
ctgctcgcggacgcagcgccccaggctggccaacgaccgcttcgtcaggcggtccgcgtacagccgccgtcgctcccgca

SEQ ID NO: 122983 - DNA, 80 bp, synthetic construct
  source 1..80: mol_type = other DNA
attcctaggttcttcctatttaacatcctcttctgtctttttaacgtgtgcgctgcctttgcggccgtttcgcacacctc

SEQ ID NO: 122984 - DNA, 80 bp, synthetic construct
  source 1..80: mol_type = other DNA
cgagcacttaccaggtggggtacttgcatgccccaacgggcagcgggaagagtacaaaggtaccggcagcatacgctagc

SEQ ID NO: 122985 - DNA, 80 bp, synthetic construct
  source 1..80: mol_type = other DNA
caacgaagtggtgaccagcacatgggtcctggtaggcggcgtcctggcagccgtggctgcgtactgcttgacagtgggca

SEQ ID NO: 122986 - DNA, 80 bp, synthetic construct
  source 1..80: mol_type = other DNA
cttgtggagacatcttggatggcctgccagtttcagcccgtttgggccgtgtcatcttgcttggcccagccgatgacgtc

SEQ ID NO: 122987 - DNA, 80 bp, synthetic construct
  source 1..80: mol_type = other DNA
caatagggtgagtagttgcctcaggaagcttggggtaccccctttgagagcttggagacatcgggctcgcgctgtacgcg

SEQ ID NO: 122988 - DNA, 80 bp, synthetic construct
  source 1..80: mol_type = other DNA
agagcggtaagctgatcacggattggtgctgccgtagttgtaccctcccccctttgcgttaccaaactgaaggtggttgc

SEQ ID NO: 122989 - DNA, 80 bp, synthetic construct
  source 1..80: mol_type = other DNA
agccacgtcatactggcaaaagttggagaccttttggagcaaacacatgtggaactttgtcagcggaattcaatatctgg

SEQ ID NO: 122990 - DNA, 80 bp, synthetic construct
  source 1..80: mol_type = other DNA
gacacgagaacccaagaaccaaaagaaggcacgaagaaactaatgaaaatcacggccgaatggctctggaaggaactagg

SEQ ID NO: 122991 - DNA, 80 bp, synthetic construct
  source 1..80: mol_type = other DNA
gaaggtgagcacagacaactagccagagcaatcattgagctgacctacaaacacaaggtggtgaaagttatgcgacctgg

SEQ ID NO: 122992 - DNA, 80 bp, synthetic construct
  source 1..80: mol_type = other DNA
tgcctcaagaggctaggactgtcatacactcgatcactgagagactctacgtaggagggcccatgacaaacagcaaaggg

SEQ ID NO: 122993 - DNA, 80 bp, synthetic construct
  source 1..80: mol_type = other DNA
aaagtgacgtttttggtgtgcgccggtgtacacgggaagtgacaattttcgcgcggttttaggcggatgttgtagtaaat

SEQ ID NO: 122994 - DNA, 80 bp, synthetic construct
  source 1..80: mol_type = other DNA
ttcttttgtactttgtctgctgcaaaaccaaaaaaaaatctaggcgacccatttacaggccagtaatcggggaacctcag

SEQ ID NO: 122995 - DNA, 80 bp, synthetic construct
  source 1..80: mol_type = other DNA
gtccccgccgcttatgttgcacagggatattctgtcctagtgctaaatccatcggtagcggctaccctgggttttggcac

SEQ ID NO: 122996 - DNA, 80 bp, synthetic construct
  source 1..80: mol_type = other DNA
agtgggaacagaaaaaggccaatggtggagctgatgaaatggaaacacacacctttggcgtggctgctatgggaggaaaa

SEQ ID NO: 122997 - DNA, 80 bp, synthetic construct
  source 1..80: mol_type = other DNA
gcaactccggcgtcacgtcgacttgcttgttgggactgccaccttgtgctcggctttgtacgtgggagatctttgcgggt

SEQ ID NO: 122998 - DNA, 80 bp, synthetic construct
  source 1..80: mol_type = other DNA
cctaataatacccccgatgatgtgctttttcatttggaattattacctcatttaaacccatttttctccgatctctctca

SEQ ID NO: 122999 - DNA, 80 bp, synthetic construct
  source 1..80: mol_type = other DNA
agcctgcagagcagccaagctcaaagactttgacatgttggtctgcggagatgatttggtcgtgattgcagagagcgcgg

SEQ ID NO: 123000 - DNA, 80 bp, synthetic construct
  source 1..80: mol_type = other DNA
tggaatgtttgactcagtcgttctctgtgagtgctatgacgcaggctgcgcttggtataatttgcagcccgccgagacca

SEQ ID NO: 123001 - DNA, 80 bp, synthetic construct
  source 1..80: mol_type = other DNA
tttccacttgacttcgcgagatggagagccgcggatgattgtggggaagaatgaaagagggaaatccctactttttaaga

SEQ ID NO: 123002 - DNA, 80 bp, synthetic construct
  source 1..80: mol_type = other DNA
gggacgaggaccgttgaaactgttcatggccttggtggcattccttcgtttcctaacaatcccaccaacagcagggatac

SEQ ID NO: 123003 - DNA, 80 bp, synthetic construct
  source 1..80: mol_type = other DNA
caattgccatcatgggagaagcctatggcttccagtattcgcccaagcagcgggtggactacctgctcaagatgtggcgt

SEQ ID NO: 123004 - DNA, 80 bp, synthetic construct
  source 1..80: mol_type = other DNA
gcggctcccgaccgagttggggccccaacgacccccggcgaaggtcccgcaatttgggtaaggtcatcgacactctcaca

SEQ ID NO: 123005 - DNA, 80 bp, synthetic construct
  source 1..80: mol_type = other DNA
ggatataagggcgtgtggcggggagacggtgtggtgtccacacgctgtccttgcggagcagtaataaccggacatgtgaa

SEQ ID NO: 123006 - DNA, 80 bp, synthetic construct
  source 1..80: mol_type = other DNA
atttaaaccagttaagcccgtcaagagactactcttgagtgccagcgagtagagttttctctaaactttgcttttaaagt

SEQ ID NO: 123007 - DNA, 80 bp, synthetic construct
  source 1..80: mol_type = other DNA
cagattaaaagagtgtatccgattggcgtacaccacagacatgcggacgcccaatttaacccccccctttttcacccccc

SEQ ID NO: 123008 - DNA, 80 bp, synthetic construct
  source 1..80: mol_type = other DNA
tccagaaattaatcacacatgcactaaacaaaacctaacgcttacatttgtaaattcgacttactggggcgcctattatg

SEQ ID NO: 123009 - DNA, 80 bp, synthetic construct
  source 1..80: mol_type = other DNA
tgcagcgcctgtgtctggacgttcctccggtcccgccgaacgcatacatgccctattatctcagggagtatgtgacgcgg

SEQ ID NO: 123010 - DNA, 80 bp, synthetic construct
  source 1..80: mol_type = other DNA
gagacggatatattgctcctcaacaactctaggccgccactggggaactggttcgggtgtacgtggatgaattcctccgg

SEQ ID NO: 123011 - DNA, 80 bp, synthetic construct
  source 1..80: mol_type = other DNA
gcgcgtgcggcgggcctgcgtaacccggattttctggtgtgcggcgatgatctggtggtggtggcggaaagcgatggcat

SEQ ID NO: 123012 - DNA, 80 bp, synthetic construct
  source 1..80: mol_type = other DNA
cgtcaccggccacaggatggcttgggacatgatgatgaattggtcacccacaaccactctggtcctatctagtatcttga

SEQ ID NO: 123013 - DNA, 80 bp, synthetic construct
  source 1..80: mol_type = other DNA
accattaactttgacgagcgctcgcggtggggtgctgacctaaaaacaatcctgcgcacaaacatgcccaacataaacga

SEQ ID NO: 123014 - DNA, 80 bp, synthetic construct
  source 1..80: mol_type = other DNA
acaccacattgcggtgcccgactgattgcttcaggaaacacccagatgccacttatagccggtgcgggtccggcccatgg

SEQ ID NO: 123015 - DNA, 80 bp, synthetic construct
  source 1..80: mol_type = other DNA
cgagtgctatgacgcgggctgtgcttggtatgagctcacgcccgccgagacctccgttaggttgcgggcttacctaaata

SEQ ID NO: 123016 - DNA, 80 bp, synthetic construct
  source 1..80: mol_type = other DNA
tctttagtcccggtttgttctggggtcagaggcaggtgggagttggttacggccacaagggtgtcttgcacacgatgtgg

SEQ ID NO: 123017 - DNA, 80 bp, synthetic construct
  source 1..80: mol_type = other DNA
aggaatgggtatactggggattggaggtagagtaaggaggaattggtctgggcaaaaacgggatccgacaggagaggagc

SEQ ID NO: 123018 - DNA, 80 bp, synthetic construct
  source 1..80: mol_type = other DNA
gccgtggcagcttattgtctggcgacaggctgcgtttccatcatcggccgcctacacctgaatgatcgggtagttgtgac

SEQ ID NO: 123019 - DNA, 80 bp, synthetic construct
  source 1..80: mol_type = other DNA
tctgaaatgggagcgaactttggagctagcagggtgattgactgcaggaagagtgtgaagcctgccattctagaagaagg

SEQ ID NO: 123020 - DNA, 80 bp, synthetic construct
  source 1..80: mol_type = other DNA
ctacacctggggtgcgaatgagtcagacgtgttcctgctggaatccctgcggcctcccagtggtcggtggtttgggtgcg

SEQ ID NO: 123021 - DNA, 80 bp, synthetic construct
  source 1..80: mol_type = other DNA
gtcacacgtggtgctgttttaatgcataaagggaagagaattgaaccatcatgggcggacgtcaagaaggacctaatatc

SEQ ID NO: 123022 - DNA, 80 bp, synthetic construct
  source 1..80: mol_type = other DNA
ggggtcttgtcttcgtgtgttgtgcatggtacatcaggggccgattagtgccagccatgacatacgggttacttcagctg

SEQ ID NO: 123023 - DNA, 80 bp, synthetic construct
  source 1..80: mol_type = other DNA
ctgcttgtcagtcggctgcgttgtgattgtgggtcatattgagctggggggcaagccggcactcgttccagacaaagagg

SEQ ID NO: 123024 - DNA, 80 bp, synthetic construct
  source 1..80: mol_type = other DNA
gccgcttatgtagcacaaggatataatgtcctcgtactaaatccatcggtggcggccacattaggcttcggctccttcat

SEQ ID NO: 123025 - DNA, 80 bp, synthetic construct
  source 1..80: mol_type = other DNA
caattcacggaatccgcctcatctcttgtaagcagtaaaacaggaagccgcgtcatcttacgtactcgttacgtatatat

SEQ ID NO: 123026 - DNA, 80 bp, synthetic construct
  source 1..80: mol_type = other DNA
ggcatacggcatcgacccaaacatacggtcgggtgtcaggaccatcaatacgggtgcgtcaatcacgtactccacctatg

SEQ ID NO: 123027 - DNA, 80 bp, synthetic construct
  source 1..80: mol_type = other DNA
aagatgtctaaaaccagtgatcctgacagatggaccagagcgggtgatcctggctggaccaatgccagtcaccgcggcga

SEQ ID NO: 123028 - DNA, 80 bp, synthetic construct
  source 1..80: mol_type = other DNA
ggaccaaagcgcttcgaaactaccccaggggtgttccggactcaaccgccgaacccaggaacccgccgctcctggtgttt

SEQ ID NO: 123029 - DNA, 80 bp, synthetic construct
  source 1..80: mol_type = other DNA
tccccctagaatacatcaaagggggaagacatcttattttctgtcactccaagaagaagtgtgacgagcttgccgcgaag

SEQ ID NO: 123030 - DNA, 80 bp, synthetic construct
  source 1..80: mol_type = other DNA
tgaaaatcatagtgaggaaacagagcaaaaaaatgatgaacatcataactggcagaaacagggtgggcaaaaacagggtg

SEQ ID NO: 123031 - DNA, 80 bp, synthetic construct
  source 1..80: mol_type = other DNA
gcgtacgcctatgacggtgtagaggcgtcgtcgctcggcctattggtcatctttgtcatcaccatctttactcttactcc

SEQ ID NO: 123032 - DNA, 80 bp, synthetic construct
  source 1..80: mol_type = other DNA
cccagcaagacgcaggggcgattcacgggccggtctccttagccccagacccataagtacgcttaaagggtcatcgggtg

SEQ ID NO: 123033 - DNA, 80 bp, synthetic construct
  source 1..80: mol_type = other DNA
gccgtcccttcggaggccatcgcccgtggggcctccgggtccgactcggaggccatcaagagcggagacaacaatctgga

SEQ ID NO: 123034 - DNA, 80 bp, synthetic construct
  source 1..80: mol_type = other DNA
gccgagcccgacgacagggagatctccacggccgcagaggccctgcgccgcgtgaaaagatttccgccagctctgcctat

SEQ ID NO: 123035 - DNA, 80 bp, synthetic construct
  source 1..80: mol_type = other DNA
cggaaagtgagtccgccataaacgctgttgttgcaactcttagtaaagcgacgttagtttcatctacagtgccagcctta

SEQ ID NO: 123036 - DNA, 80 bp, synthetic construct
  source 1..80: mol_type = other DNA
ggctccagtacttcatctcacgcacggaagccatcctgcatgtctgggtgccttctttccgggtcagaggcggccgagac

SEQ ID NO: 123037 - DNA, 80 bp, synthetic construct
  source 1..80: mol_type = other DNA
atcgagcacaggctcaccgcagcatgcaactggacgcggggggagcgctgctctctggaggacagggatagagccgacct

SEQ ID NO: 123038 - DNA, 80 bp, synthetic construct
  source 1..80: mol_type = other DNA
atgatcacttatcccccatgtccagctgggccgctcagggcttgcgcgatctcgcagtcgccgtggagcccgtggttttc

SEQ ID NO: 123039 - DNA, 80 bp, synthetic construct
  source 1..80: mol_type = other DNA
tcctctttaacatccttggggggtgggtggccgcccagcttgccgccccagctgccgccactgctttcgtcggcgctggt

SEQ ID NO: 123040 - DNA, 80 bp, synthetic construct
  source 1..80: mol_type = other DNA
atttcctaaatgatatgggcaaggttaggaaggatataccccaatgggaaccatcaaagggatggaaggattggcaggaa

SEQ ID NO: 123041 - DNA, 80 bp, synthetic construct
  source 1..80: mol_type = other DNA
gtgcacaagcaatggtttttggacctacctctaccatggacagcaggagcagacacatcagaagttcattggaattataa

SEQ ID NO: 123042 - DNA, 80 bp, synthetic construct
  source 1..80: mol_type = other DNA
gccaacccgattcagggcctgaggagaagcgtgatgatgactcggacgcggcttcatattcttccatgcctccgctggag

SEQ ID NO: 123043 - DNA, 80 bp, synthetic construct
  source 1..80: mol_type = other DNA
tcgccaagcaactcacgacgcttggcgtgaatgccgtcgcatactacagaggtgtggacgtggcagttatacccaccacc

SEQ ID NO: 123044 - DNA, 80 bp, synthetic construct
  source 1..80: mol_type = other DNA
tacttggtatgacggagaaggaaataaattctgcaatggagaaaaagttgaacatgcagaatttaatcatacatgtgatg

SEQ ID NO: 123045 - DNA, 80 bp, synthetic construct
  source 1..80: mol_type = other DNA
tgcaccgggggacgtagaccttcccggaccgcagcgtcccccggaagccatgccaaccgttaacgcaacattacggatta

SEQ ID NO: 123046 - DNA, 80 bp, synthetic construct
  source 1..80: mol_type = other DNA
aagctggaatacgagtccaacttcgcccgaatcaacaccataaagtacccagaggcgcgggcctggttgccatgcagggt

SEQ ID NO: 123047 - DNA, 80 bp, synthetic construct
  source 1..80: mol_type = other DNA
ttaggaaggatgtgaacatggttctacagagttccctcggtaacgacctgcgggtagatggcgccagcatcagttttacg

SEQ ID NO: 123048 - DNA, 80 bp, synthetic construct
  source 1..80: mol_type = other DNA
acaggaatgtcgggggttcctgaactcctgcgccacagatgcatgagtgccatggatgtcttttacacactgctttatga

SEQ ID NO: 123049 - DNA, 80 bp, synthetic construct
  source 1..80: mol_type = other DNA
tgactttgtttgtggaagaatgcttgagaagaagagtcaccaggaaacacatgatattggtcgtggtgaccaccctttgt

SEQ ID NO: 123050 - DNA, 80 bp, synthetic construct
  source 1..80: mol_type = other DNA
gtggaccgacaaagacagattctttgagggagctaagctcaacgtagttctaacagttttttaattagagagcagatctc

SEQ ID NO: 123051 - DNA, 80 bp, synthetic construct
  source 1..80: mol_type = other DNA
gtgcgtgccaaagccctcgcctaatttcagaactgccatttggagagtggcggctacggaatacgcggaggtgactcggc

SEQ ID NO: 123052 - DNA, 80 bp, synthetic construct
  source 1..80: mol_type = other DNA
ccgaggtgcgcgggggtgtagccgtgcccctcaggttggacacgcagagccttgtgggcacttatgtaatcacggccgtg

SEQ ID NO: 123053 - DNA, 80 bp, synthetic construct
  source 1..80: mol_type = other DNA
aacaagtactggaactcctctacagccacttcactgtgtaacatttttaggggaagctacttggctggagcttctctaat

SEQ ID NO: 123054 - DNA, 80 bp, synthetic construct
  source 1..80: mol_type = other DNA
aagacatcagggtagaggagtctatataccaatgctgtcaactcaagccagaagctaggaaggcaatcaaggctcttacc

SEQ ID NO: 123055 - DNA, 80 bp, synthetic construct
  source 1..80: mol_type = other DNA
ctacaaaccatctgaaatcagtgacacccttttgtgtgacataggagagtcatcacctagtgctgaaatagaagaacaac

SEQ ID NO: 123056 - DNA, 80 bp, synthetic construct
  source 1..80: mol_type = other DNA
tgcgcaccactccccctactttcgctcccaccgcgccgccatcgaacacgccaccgcttttgataaaatgaaacaactgc

SEQ ID NO: 123057 - DNA, 80 bp, synthetic construct
  source 1..80: mol_type = other DNA
tggcaatcgtggcgggagtgattgcgggctttgtaactctaatcattgtctttctctgctacatctgctgccgcaagcgt

SEQ ID NO: 123058 - DNA, 80 bp, synthetic construct
  source 1..80: mol_type = other DNA
agatcttgcacaatgccccccttgagattcaaaggtgaagatgggtgctggtatggaatggagattcgacctttaaaaga

SEQ ID NO: 123059 - DNA, 80 bp, synthetic construct
  source 1..80: mol_type = other DNA
cctggtgatccgaggcaaaggcacacagcttaacgacgagttggtaagctctgcaatcggtctgcgacctgatggagtgt

SEQ ID NO: 123060 - DNA, 80 bp, synthetic construct
  source 1..80: mol_type = other DNA
agccgccggtcgccggcgctggcgagcagccccagaaactccacggccccggcgaaggccaggtcccgcgtggacagcag

SEQ ID NO: 123061 - DNA, 80 bp, synthetic construct
  source 1..80: mol_type = other DNA
gagccgatcggaaagaaattgatctcctgccaccagccggaggactgggcgttgatatgatgaaagtagaagtttctccg

SEQ ID NO: 123062 - DNA, 80 bp, synthetic construct
  source 1..80: mol_type = other DNA
agcctggaaaaaatccaagagccgtccaaacaaaaccctggacttttcccctggaacgtcaggatctccaattatcgaca

SEQ ID NO: 123063 - DNA, 80 bp, synthetic construct
  source 1..80: mol_type = other DNA
tcacaccttgcgcaccgtgcacatagtgtcccactcgcgccgcacctggccaacatttgagcacaatatgctcatgcgtt

SEQ ID NO: 123064 - DNA, 80 bp, synthetic construct
  source 1..80: mol_type = other DNA
gggttcgcgtgtgcgagaagatggctctttatgacgtggtctccaccctccctcaggccgtgatgggcccctcatacgga

SEQ ID NO: 123065 - DNA, 80 bp, synthetic construct
  source 1..80: mol_type = other DNA
agctgtccaaaccaactggcaaaagctcgagaccttctgggcgaagcatatgtggaacttcatcagcgggatacaatatt

SEQ ID NO: 123066 - DNA, 80 bp, synthetic construct
  source 1..80: mol_type = other DNA
ccatggctagacgctttccgctcaatacccagaaatttgggcgtgcccccgcgagatcactagccgagtagtgttgggtc

SEQ ID NO: 123067 - DNA, 80 bp, synthetic construct
  source 1..80: mol_type = other DNA
ttacaacccaccactgctcgagccgtggaagaaacctggctacgagccacctgtggtccacgggtgcccacttccgcctg

SEQ ID NO: 123068 - DNA, 80 bp, synthetic construct
  source 1..80: mol_type = other DNA
gtcaccatcatgtcaaaagataaaccaacgctcgacgtcaagatgatgaacatggaggccactaatttggcagaagtgag

SEQ ID NO: 123069 - DNA, 80 bp, synthetic construct
  source 1..80: mol_type = other DNA
gcctccccgtggccggtgctatgggtgcgtgtggatgaactccacggggtttgtcaagacgtgtggagctcccccttgca

SEQ ID NO: 123070 - DNA, 80 bp, synthetic construct
  source 1..80: mol_type = other DNA
cagccgcgcccgcccgcttccccgcgcccgccgctcccggcccgcccccggacccggccgctcccccgcgggcgccgccc

SEQ ID NO: 123071 - DNA, 80 bp, synthetic construct
  source 1..80: mol_type = other DNA
cagcctgggaaactgcccgccacactccagtgaactcttggttgggtaacatcatcatctatgcgcccacaatatgggtg

SEQ ID NO: 123072 - DNA, 80 bp, synthetic construct
  source 1..80: mol_type = other DNA
aaagcagcaggaagggtgctcaagaacaccacacccatgtacccctgctatgggtcttacgcccgagccacaaatgaaaa

SEQ ID NO: 123073 - DNA, 80 bp, synthetic construct
  source 1..80: mol_type = other DNA
cagccgagacagcagctcgccgcttggcccgagggtccccgccatctctagctagttcgtcggctagtcagctatcagct

SEQ ID NO: 123074 - DNA, 80 bp, synthetic construct
  source 1..80: mol_type = other DNA
gtcggtccaaacacatggggagagttcactagtgaataaaaaagaggcttggctggattcaacgaaagccacacgatatc

SEQ ID NO: 123075 - DNA, 80 bp, synthetic construct
  source 1..80: mol_type = other DNA
cggggatctgctgggccggctgccccgctacctggcgtgcctggccgcggtgatcgggaccgagggccgccggccacagt

SEQ ID NO: 123076 - DNA, 80 bp, synthetic construct
  source 1..80: mol_type = other DNA
ttgacactcaaggggacatcctacaaaatatgcactgacaaaatgttttttgtcaagaacccaactgacactggccatgg

SEQ ID NO: 123077 - DNA, 80 bp, synthetic construct
  source 1..80: mol_type = other DNA
aagtctggaagcagtattggaaaggcgtttacgacgaccctgaagggagcgcaaaggttggcagctcttggagacaccgc

SEQ ID NO: 123078 - DNA, 80 bp, synthetic construct
  source 1..80: mol_type = other DNA
cagatctggcagcaaagagcttcggccagtcgggtgtggagtctgattcgggtgcgggtttcacctcaccaacagagccc

SEQ ID NO: 123079 - DNA, 80 bp, synthetic construct
  source 1..80: mol_type = other DNA
ttgaggaaaacatggaagtggaaatctggacgaaagagggtgagaagaaaagcttgagaccaagatggcttgacgccagg

SEQ ID NO: 123080 - DNA, 80 bp, synthetic construct
  source 1..80: mol_type = other DNA
tatcaatagaaccgccttaaactgtaatgacagcttacagacaggcttcattgcttccttgttctatttcaacaagttca

SEQ ID NO: 123081 - DNA, 80 bp, synthetic construct
  source 1..80: mol_type = other DNA
atggagcgagaaatcccacctgagttgggattacatgctggattacatgtcaatgcagctgtggagggcatggctgaaga

SEQ ID NO: 123082 - DNA, 80 bp, synthetic construct
  source 1..80: mol_type = other DNA
tgatgctcgtgtgcggcgacgacctagtagtcatctcagagagcaagggggtggaggaggatcagcgagacctgcgagtc

SEQ ID NO: 123083 - DNA, 80 bp, synthetic construct
  source 1..80: mol_type = other DNA
gaactgggagggggcgattgggcatttataggtatgtttcgtcgggcgagaggccgtctgggatgttcgacagcgtagtg

SEQ ID NO: 123084 - DNA, 80 bp, synthetic construct
  source 1..80: mol_type = other DNA
ttcaggtatgtttgatagcgtcgtgctctgtgaagcttatgacacggggtgcgcatggtatgagctaactcctgcagaga

SEQ ID NO: 123085 - DNA, 80 bp, synthetic construct
  source 1..80: mol_type = other DNA
cgttcaccaacctggccgtgcaactggtcaggatgatggaaggtgaaggtgtcatcgggccagatgacattgagaagtta

SEQ ID NO: 123086 - DNA, 80 bp, synthetic construct
  source 1..80: mol_type = other DNA
tgacaacggagccatgttaagtgaaggtggagtccctggcattgtggccgtattcgtggtcctggagctagtcattagga

SEQ ID NO: 123087 - DNA, 80 bp, synthetic construct
  source 1..80: mol_type = other DNA
tcgatttcatccccgttgagacactcgacgttgttacaaggtctcccactttcagtgacaacagcacgccaccggctgtg

SEQ ID NO: 123088 - DNA, 80 bp, synthetic construct
  source 1..80: mol_type = other DNA
ggccaccgaatggcatgggacatgatgatgaattggtcacccaccgccacgttggccgtgtcgtacatgctgcgtattcc

SEQ ID NO: 123089 - DNA, 80 bp, synthetic construct
  source 1..80: mol_type = other DNA
tggaactactagctgactgagacgaccccaaaaaaaaaaaaatcaccctgttgacgctgagaaatactggagttcctgca

SEQ ID NO: 123090 - DNA, 80 bp, synthetic construct
  source 1..80: mol_type = other DNA
gaagaaggtgacgtttgatcgcatgcaagtgctagaccaacattatcatgatgtccttaaggaggttaagctccgggcat

SEQ ID NO: 123091 - DNA, 80 bp, synthetic construct
  source 1..80: mol_type = other DNA
aactcgctgatgttggtgttgacgacggacatgaagccgtgttggtcccgcaagaccacgtaaggcaggggggcctcttc

SEQ ID NO: 123092 - DNA, 80 bp, synthetic construct
  source 1..80: mol_type = other DNA
aagagggcacgcagttgggatttttagagcggctgtttgttctcgaggggtcgcaaaatccatcgatttcatacccgttg

SEQ ID NO: 123093 - DNA, 80 bp, synthetic construct
  source 1..80: mol_type = other DNA
tgtggtgtttttggttatttttattaaatctcgtcgacaaacaggtggaaaggggcgtggtctagcgacggcagcacggg

SEQ ID NO: 123094 - DNA, 80 bp, synthetic construct
  source 1..80: mol_type = other DNA
ccaggtggtttggcaaactagaacaaagttcaatactaaggcagatggcctggaccaggggaccaaaccatgaggacccc

SEQ ID NO: 123095 - DNA, 80 bp, synthetic construct
  source 1..80: mol_type = other DNA
tatcccgacatatgggaggttgaggaatacaaggcaaaggcataaaagctaatcaagacggtcagcaagtatttgaatgc

SEQ ID NO: 123096 - DNA, 80 bp, synthetic construct
  source 1..80: mol_type = other DNA
gcgccaagcagaacatccagcttgtaaattccaacggcagctggcatgttaaccggacggccctgaattgcaacgactcc

SEQ ID NO: 123097 - DNA, 80 bp, synthetic construct
  source 1..80: mol_type = other DNA
tccgctgtaactgctgttgtaggcggtaacaggcgcggatcagcaccgccagggcgctacgaccggtgcgttgcacgtag

SEQ ID NO: 123098 - DNA, 80 bp, synthetic construct
  source 1..80: mol_type = other DNA
gaaaagatcaggcgctattattcagaccacttactaccaaaggaaccacagggggtagcacagtcaatgaacagtttgct

SEQ ID NO: 123099 - DNA, 80 bp, synthetic construct
  source 1..80: mol_type = other DNA
cataaaatgaggttgttgtgtatgctgtacacccccctcagaactggagcgtcttcttctggatctgacccctttgtgat

SEQ ID NO: 123100 - DNA, 80 bp, synthetic construct
  source 1..80: mol_type = other DNA
ggcatcactttccgatctcacccccattggtagaatggttacagcaaacccttatgtggcttcatccgaagccaacgcga

SEQ ID NO: 123101 - DNA, 80 bp, synthetic construct
  source 1..80: mol_type = other DNA
gtgttttccgcgttccgggtcaaagttggcgttttattattatagtcagctgacgtgtagtgtatttatacccggtgagt

SEQ ID NO: 123102 - DNA, 80 bp, synthetic construct
  source 1..80: mol_type = other DNA
tagggcgaatggaccgagcagtctggagaggacccaaatatgaggaagatgttaacttgggaagcgggactagagctgta

SEQ ID NO: 123103 - DNA, 80 bp, synthetic construct
  source 1..80: mol_type = other DNA
catactctgacccactggctctgcgcgaattcaaagagttcgcagcaggaagaagaagcgtctcaggtgacctaatatta

SEQ ID NO: 123104 - DNA, 80 bp, synthetic construct
  source 1..80: mol_type = other DNA
tatgctatagggtcccaactcccttgcgagccggagccagacgtgatggtgcttacatccatgctcactgacccagacca

SEQ ID NO: 123105 - DNA, 80 bp, synthetic construct
  source 1..80: mol_type = other DNA
aatataaccgtgttggggtcgacggatcttttgtatggcgaaacgcgtcaataagcgaggaccgtccctccgttgccgcg

SEQ ID NO: 123106 - DNA, 80 bp, synthetic construct
  source 1..80: mol_type = other DNA
atctatcgggggggtcgtcatcctaatactcactatcttcaccctcactccagcatacaagaccatgctgttgcagctgg

SEQ ID NO: 123107 - DNA, 80 bp, synthetic construct
  source 1..80: mol_type = other DNA
tcccctcctgtgcctccgccccgaaagaagcggacggtggtcctcaccgaatcaaccgtatctactgccttggccgagct

SEQ ID NO: 123108 - DNA, 80 bp, synthetic construct
  source 1..80: mol_type = other DNA
cgacgccccggctcgggatcgggatcgcatcggaaagggacacgcggacgcggtggtgaaagacccgccaaccccaccca

SEQ ID NO: 123109 - DNA, 80 bp, synthetic construct
  source 1..80: mol_type = other DNA
cccccccgcgctcgttttggcggcaggactcgtcctggtggccgctatttggtgggtggttggtgctggcgcgcgcctat

SEQ ID NO: 123110 - DNA, 80 bp, synthetic construct
  source 1..80: mol_type = other DNA
acatcctacaagcgagcttgacgcgcgtgccatattatgtgcgtgcgcacgctctgttacgagcctgcctactttttcgc

SEQ ID NO: 123111 - DNA, 80 bp, synthetic construct
  source 1..80: mol_type = other DNA
actacaagttcgcgctgtggcgggtagccgccgaggagtacgtggaggtccgcagggtgggcgactaccactatgtggtg

SEQ ID NO: 123112 - DNA, 80 bp, synthetic construct
  source 1..80: mol_type = other DNA
cgatacatgggagaggacggctgctggtatggcatggaaattagacctatcaatgagaaagaagagaacatggtaaagtc

SEQ ID NO: 123113 - DNA, 80 bp, synthetic construct
  source 1..80: mol_type = other DNA
tgcatgcaatttcactcgtggggatcgttgcaacttggaggacagagacagaagtcaactgtctcctttgttgcactcca

SEQ ID NO: 123114 - DNA, 80 bp, synthetic construct
  source 1..80: mol_type = other DNA
ttcaaagcatggctcaaggctaaactcgtgccaagcttgccgggaatccccttcatctcgtgtcagcgagggttccggtg

SEQ ID NO: 123115 - DNA, 80 bp, synthetic construct
  source 1..80: mol_type = other DNA
ataaaaggacagcttgtctttattggagagcaactacctaccgggacaaactatagcggaacactggaactgttatacgc

SEQ ID NO: 123116 - DNA, 80 bp, synthetic construct
  source 1..80: mol_type = other DNA
cagttgatgtacttccacaggagagacctgagactagccgctaatgctatctgttcagccgttccagttgattgggtccc

SEQ ID NO: 123117 - DNA, 80 bp, synthetic construct
  source 1..80: mol_type = other DNA
tcattcgagcccttgagagccgaggcaggtggtgatgaaccctcagtggctgcagagtgcttcaagaaaccgcccaagta

SEQ ID NO: 123118 - DNA, 80 bp, synthetic construct
  source 1..80: mol_type = other DNA
cagcccaatggagaaaaaagtcattgtgtggggagcggagacggcagcgtgtggtgacatcttgcacgggctgccggtct

SEQ ID NO: 123119 - DNA, 80 bp, synthetic construct
  source 1..80: mol_type = other DNA
taactcccaaatgcctatttcattacccctacaggctgtggcattacccgtgtaccatcaacttcaccatccacaaaata

SEQ ID NO: 123120 - DNA, 80 bp, synthetic construct
  source 1..80: mol_type = other DNA
tgccgcagacatatcaggtggggtaccttcacgcccccacgggtagcgggaagagcaccaaagtgccggccgcctacgcc

SEQ ID NO: 123121 - DNA, 80 bp, synthetic construct
  source 1..80: mol_type = other DNA
ctcccagctataattgaaaggttacatgggcttgacgctttttctctgcacacatacactccccacgaactgacacgggt

SEQ ID NO: 123122 - DNA, 80 bp, synthetic construct
  source 1..80: mol_type = other DNA
acaattcatgtatggcctatcacctgccctcacaaaatacatcgtccgatgggagtgggtaatactcttattcctgctct

SEQ ID NO: 123123 - DNA, 80 bp, synthetic construct
  source 1..80: mol_type = other DNA
gctgcccggtaatcccgctatagcgtcgctgatgtcgtttacagccgcggtgacgagtccactaaccacccagcaaaccc

SEQ ID NO: 123124 - DNA, 80 bp, synthetic construct
  source 1..80: mol_type = other DNA
gtacatcgctacctgcatgcaggctgatcttgagatcatgacgagtacgtgggtcctcgcaggaggggtgctggccgctg

SEQ ID NO: 123125 - DNA, 80 bp, synthetic construct
  source 1..80: mol_type = other DNA
attcagcccgctccaaacacgggtacggcgctcaggacgttcggagccattctagcaaggccgtcaaccacatccgctcc

SEQ ID NO: 123126 - DNA, 80 bp, synthetic construct
  source 1..80: mol_type = other DNA
atgtccaacacaaggagaggctacactggtggaagaacaagacgcgaactttgtgtgtcgccgaacgtttgtggacagag

SEQ ID NO: 123127 - DNA, 80 bp, synthetic construct
  source 1..80: mol_type = other DNA
ctccgccttgatgtcccgcaggtgctcgcgcagggtggcgtggcccgcggcgacggtcgcgttgtcgccggctgggcgcg

SEQ ID NO: 123128 - DNA, 80 bp, synthetic construct
  source 1..80: mol_type = other DNA
cctatcagatatgccaacggaggcggccccgaacaccgcccctactgctggcactacgccccgcaggcatgtggtatcgt

SEQ ID NO: 123129 - DNA, 80 bp, synthetic construct
  source 1..80: mol_type = other DNA
ccctgcgccggcgcgcgtccccgcaggccagggcgtatttcagggtaacggtcgccagggccgtgtgcagcgcgtacacg

SEQ ID NO: 123130 - DNA, 80 bp, synthetic construct
  source 1..80: mol_type = other DNA
atcttgccatcagttgttgggttctggatcactctccaatatactaagagagggggcgttctatgggacactccatcccc

SEQ ID NO: 123131 - DNA, 80 bp, synthetic construct
  source 1..80: mol_type = other DNA
tgcccagactctatcgtcctttttcacacttgggccgcagcagaagatccagcttataaataccaacggcagctggcaca

SEQ ID NO: 123132 - DNA, 80 bp, synthetic construct
  source 1..80: mol_type = other DNA
tacatctgcctgggtgtgttccctgcatcaggaccaacaatcagtccaggtgttgggttcccgcctcccctacattggca

SEQ ID NO: 123133 - DNA, 80 bp, synthetic construct
  source 1..80: mol_type = other DNA
cgccgcctactacccgcgtaaccccgtggagtttgtctggttcgaggacgaccaccaggtgtttaacccgggccagatcg

SEQ ID NO: 123134 - DNA, 80 bp, synthetic construct
  source 1..80: mol_type = other DNA
tggcggacgcgcgcgtctgcgcttgcttgtggatgatgctgctcatatcccaggtggaggcggccctggagaacttagtg

SEQ ID NO: 123135 - DNA, 80 bp, synthetic construct
  source 1..80: mol_type = other DNA
ccaggccgccgtacagcacccgccccgggtgcggtggcccggcgccgggccacggctccccgctgacgtacccgtctcga

SEQ ID NO: 123136 - DNA, 80 bp, synthetic construct
  source 1..80: mol_type = other DNA
catgcaccactcgccacgagtcccccgatgctgatctcatcgaggccaatctcctgtggaggcaggagatggggtggaac

SEQ ID NO: 123137 - DNA, 80 bp, synthetic construct
  source 1..80: mol_type = other DNA
gcagccgcgtaagcaggagcaggaggaggacttaaccacccacgagcaacccaaaatcgagcaggacctgggcttcgaag

SEQ ID NO: 123138 - DNA, 80 bp, synthetic construct
  source 1..80: mol_type = other DNA
agggaggtatcagtgcccgcggagatactaaggaagaccaaacgatttccttctagcttgcctgtgtgggcctcacccag

SEQ ID NO: 123139 - DNA, 80 bp, synthetic construct
  source 1..80: mol_type = other DNA
accatctgtccacgggtgtcccttaccacctcaacgccctacaccgataccgcctccccggaggaagaggacaatccatc

SEQ ID NO: 123140 - DNA, 80 bp, synthetic construct
  source 1..80: mol_type = other DNA
agagaccaccgtgcggctacgtgcttatctcaatacccctggacttccagtctgccaggatcacctggaattctgggagg

SEQ ID NO: 123141 - DNA, 80 bp, synthetic construct
  source 1..80: mol_type = other DNA
cgagacctgccggacagcagcgactctgaggcggagaccgaagtggggtggcggagggacgccgaccaccatgacgacga

SEQ ID NO: 123142 - DNA, 80 bp, synthetic construct
  source 1..80: mol_type = other DNA
gaacaaaagttgcctatcaacgcactgagcaactcgctactgcgtcatcacaatcttgtgtattctaccacctcacgcag

SEQ ID NO: 123143 - DNA, 80 bp, synthetic construct
  source 1..80: mol_type = other DNA
cgccagcgggacccccaggctcccgcctccccccgcccccccgaggtcttggcccagcgcccccgaagtctcacacgtgc

SEQ ID NO: 123144 - DNA, 80 bp, synthetic construct
  source 1..80: mol_type = other DNA
gtgtcattctggcaacagacatgggagagtggtgtgaagattcaatcacctactcttgtgtcacgattgaccaggaggaa

SEQ ID NO: 123145 - DNA, 80 bp, synthetic construct
  source 1..80: mol_type = other DNA
atcgatcctaacatcaggactggtgccaggaccatcacgacgggtgcacccataacatactccacttacgggaagttcct

SEQ ID NO: 123146 - DNA, 80 bp, synthetic construct
  source 1..80: mol_type = other DNA
gctttctctgcgcctttccgaaccactcgtcacctcccatggcatgcttgcgctcaaaatgggcagcggcctaaccctgg

SEQ ID NO: 123147 - DNA, 80 bp, synthetic construct
  source 1..80: mol_type = other DNA
ggttgctctttttctatcttccttctggcacttctctcgtgcctgaccgtttccgcctcagctgtgcactatcacaacac

SEQ ID NO: 123148 - DNA, 80 bp, synthetic construct
  source 1..80: mol_type = other DNA
ggaaaggcaaagaacttaaatgcggaagtggaattttcgtcaccaacgaggtccatacctggacagagcagtacaaattc

SEQ ID NO: 123149 - DNA, 80 bp, synthetic construct
  source 1..80: mol_type = other DNA
taaccacgcggtattggccccacgtggtcacgtccccgaggggggtgagcgagtgaagcaacagcacgcggtccgtaaac

SEQ ID NO: 123150 - DNA, 80 bp, synthetic construct
  source 1..80: mol_type = other DNA
tggagatgattgtgttgtcaagcccctggatgatcggtttgccaatgccctgcactttctcaattcgatgtccaaggtca

SEQ ID NO: 123151 - DNA, 80 bp, synthetic construct
  source 1..80: mol_type = other DNA
ttgacgtgtccgtcatcccgaccagcggcgatgttgtcgtcgtcgcaactgatgctctcatgaccggcttcaccggcgac

SEQ ID NO: 123152 - DNA, 80 bp, synthetic construct
  source 1..80: mol_type = other DNA
gggcaagcttggggtcgctaacatcacaggcccctccaatgatagaccttactgctggcactatgcgcctcgccaatgcg

SEQ ID NO: 123153 - DNA, 80 bp, synthetic construct
  source 1..80: mol_type = other DNA
tgttgattgcatagaagatttacttgaggaggatccgacggatgaacctttaaacttgtccttaaagcgccccaagtcct

SEQ ID NO: 123154 - DNA, 80 bp, synthetic construct
  source 1..80: mol_type = other DNA
gcacgttcaaaataccaggggtcgcgggctcgacaatgcgttttccgtccttgccttccttcaacagaaccggcggctgg

SEQ ID NO: 123155 - DNA, 80 bp, synthetic construct
  source 1..80: mol_type = other DNA
tacccagtgagccctggaacacagggcatgactggatcctggctgacaaaaggcccacggcatggttccttccatccatc

SEQ ID NO: 123156 - DNA, 80 bp, synthetic construct
  source 1..80: mol_type = other DNA
gacgttaacttacagttctttgccttgccaagcactcctaatgagccaaaagccgttctttacgctgaaaacgtgtccat

SEQ ID NO: 123157 - DNA, 80 bp, synthetic construct
  source 1..80: mol_type = other DNA
gagtcagggggttgaggaggatgagcgaaacctgagagtcttcacggaggctatgaccaggtattcggctccccccggag

SEQ ID NO: 123158 - DNA, 80 bp, synthetic construct
  source 1..80: mol_type = other DNA
accttgaatgggcccactccattactatacaggctgggtggtgtgcaaaatgagataacaacaacacatcctgtcaccaa

SEQ ID NO: 123159 - DNA, 80 bp, synthetic construct
  source 1..80: mol_type = other DNA
acgctctcctccacccacacgatatctgcggtgtccatcgcacggcccctaaggatcacgggcggtctgtgggtcccatg

SEQ ID NO: 123160 - DNA, 80 bp, synthetic construct
  source 1..80: mol_type = other DNA
ggttggtcctacaaaaactcctgtacagtggtatggtcctgagcataaactttgtgaaggaaaaaaggttctgcatccag

SEQ ID NO: 123161 - DNA, 80 bp, synthetic construct
  source 1..80: mol_type = other DNA
aacacctcaggctgcttagaaatgatgagctcctgtaacccccttaactggtttgaacaggggtatgggaaggtgaggcc

SEQ ID NO: 123162 - DNA, 80 bp, synthetic construct
  source 1..80: mol_type = other DNA
cggttcaagacggccttcgactacgaccaggaactgctgatcgacctgtgtgcagaccgcgccccctatgttgatcacag

SEQ ID NO: 123163 - DNA, 80 bp, synthetic construct
  source 1..80: mol_type = other DNA
acaggcaaagatcacctacgagctcgtgtccaacggcaaacagcatcgcctcacctatgagatgccccagcagaagcaga

SEQ ID NO: 123164 - DNA, 80 bp, synthetic construct
  source 1..80: mol_type = other DNA
acccccctcgaccggaatatgacttggagcacattacatcttgctcctccaatgtgtctgtggctttggactcgcgaggt

SEQ ID NO: 123165 - DNA, 80 bp, synthetic construct
  source 1..80: mol_type = other DNA
ccatcttcacgctcactcccacctacaagatcttactagcgcagctcctgtggtggattcagtacttcatagcatatatt

SEQ ID NO: 123166 - DNA, 80 bp, synthetic construct
  source 1..80: mol_type = other DNA
cccgctccaccaaaggcagctcccgcggtcgtgcagccccccccggtggcgaccgccgtgcgccgcgtccccgcccgccg

SEQ ID NO: 123167 - DNA, 80 bp, synthetic construct
  source 1..80: mol_type = other DNA
aaaggacctggaagggaccccaatacgaggaagatgtaaacctgggaagtggaaccagggcggtgtggaaacccctactc

SEQ ID NO: 123168 - DNA, 80 bp, synthetic construct
  source 1..80: mol_type = other DNA
gacacttggtgaacttttattgatttttcctattgaatttatggcccagccaatttctatagaacgtattttagttgaag

SEQ ID NO: 123169 - DNA, 80 bp, synthetic construct
  source 1..80: mol_type = other DNA
acatctatgcccatttcctctcccaaaccaagcaggggggggagaactttgcgtacctggtggcctatcaggccacagtg

SEQ ID NO: 123170 - DNA, 80 bp, synthetic construct
  source 1..80: mol_type = other DNA
ccgggttgtccactttacccggtaatcctgctatagcatctcttatggcattcactgcatctgtgaccagcccacttaca

SEQ ID NO: 123171 - DNA, 80 bp, synthetic construct
  source 1..80: mol_type = other DNA
tgttgttgttttaggatcccaagaaggggccatgcatacagcactcacaggagccacagaaatccaaatgtcgtcaggaa

SEQ ID NO: 123172 - DNA, 80 bp, synthetic construct
  source 1..80: mol_type = other DNA
gccgaattatatgaccgccccgggggaatttgtcacaggctttttgacgcgtacctgggctgcgggtcccttggagtccc

SEQ ID NO: 123173 - DNA, 80 bp, synthetic construct
  source 1..80: mol_type = other DNA
gacccaaacatccggacgggtgtcagaacaaccactactgggggtgccattacctattccacatacggtaagtttttggc

SEQ ID NO: 123174 - DNA, 80 bp, synthetic construct
  source 1..80: mol_type = other DNA
ctgtctacaaacctttcaatcatttcgccccggcggcggcgcatagtttccgtcactgctcgaccattttcacgcgggcg

SEQ ID NO: 123175 - DNA, 80 bp, synthetic construct
  source 1..80: mol_type = other DNA
ggcaccgagaggctgaaaagaatggcaatcagtggagatgactgtgtggtgaaaccaatcgatgacagatttgcaacagc

SEQ ID NO: 123176 - DNA, 80 bp, synthetic construct
  source 1..80: mol_type = other DNA
tttttaattaccataccgggaagtgggcggcccggcccattgggcggtaactcccgcccaatgggccgggccccgaagac

SEQ ID NO: 123177 - DNA, 80 bp, synthetic construct
  source 1..80: mol_type = other DNA
gattacaacccgccactcctcgaaccctggaaggcaccgggctacagtccaccggtagtgtctggctgcgcactcccccc

SEQ ID NO: 123178 - DNA, 80 bp, synthetic construct
  source 1..80: mol_type = other DNA
atgagtttgttctccagcgcgcagaacatcgaggagtattcgactggcctcaaggggacaggacatcagaaagggagaat

SEQ ID NO: 123179 - DNA, 80 bp, synthetic construct
  source 1..80: mol_type = other DNA
gggaggcgtcgaacggccgcccgaggatagctcgcgcgaggaaggcgtcctcgtcggtggcgctggcggcgaggacgtcc

SEQ ID NO: 123180 - DNA, 80 bp, synthetic construct
  source 1..80: mol_type = other DNA
ttctgtgggacgacgtggacagcgcggtatttttgcccgcctttcaaaagagacaggaagcaatgcgcacgcctagcgag

SEQ ID NO: 123181 - DNA, 80 bp, synthetic construct
  source 1..80: mol_type = other DNA
ggctgtggaagaggaggctggtgctactacatggcgactcaaaaaagagtgcaggaagtcagaggttatacaaaaggtgg

SEQ ID NO: 123182 - DNA, 80 bp, synthetic construct
  source 1..80: mol_type = other DNA
caattcatggctagggaacatcatattgtacgccccaaccatctgggtgcgtatggtcatcatgacccactttttctcca

SEQ ID NO: 123183 - DNA, 80 bp, synthetic construct
  source 1..80: mol_type = other DNA
cacacgggaaatgagatcatcgacgtcatgtgtcatgcaaccctaacgcacaggctgttgtcgccaactcgggttcccaa

SEQ ID NO: 123184 - DNA, 80 bp, synthetic construct
  source 1..80: mol_type = other DNA
tggaacctcagtagaagaaagtgacatgttcatgccccggtccattggaggtccggtgagttctcacaaccgcatcccgg

SEQ ID NO: 123185 - DNA, 80 bp, synthetic construct
  source 1..80: mol_type = other DNA
ggtgctgttgctgtttgccagcgtcgatgcggacacctacgtcaccggggggactgttgcctctgccacgtctaggcttg

SEQ ID NO: 123186 - DNA, 80 bp, synthetic construct
  source 1..80: mol_type = other DNA
tggcgggccctgcttcccggtggacagagcgaccccaggtcgctgtccatggcccagcagtagatctggccgctggtgag

SEQ ID NO: 123187 - DNA, 80 bp, synthetic construct
  source 1..80: mol_type = other DNA
agggcagagcgttccggactgtgggataatggttccctggggtcccgtggcataatttccctcacaaatttgcatttccc

SEQ ID NO: 123188 - DNA, 80 bp, synthetic construct
  source 1..80: mol_type = other DNA
tgtccagacaaaccaaaactgaactgaacaatagtgaaataggctgagcaaaaggtcccaacgtaccagaacgcttatac

SEQ ID NO: 123189 - DNA, 80 bp, synthetic construct
  source 1..80: mol_type = other DNA
tgagggaacggccgccgccatcctcaaacaggccatcgccggggaccgcagtctggtcgaggtggcggagtggatcagca

SEQ ID NO: 123190 - DNA, 80 bp, synthetic construct
  source 1..80: mol_type = other DNA
tgaaatcttgctcggcccggccgatgcacacgctgtgagggtgtggaggctgcttgcccccatcactgcatatgcgcagc

SEQ ID NO: 123191 - DNA, 80 bp, synthetic construct
  source 1..80: mol_type = other DNA
accactaaccatgtttcttataacagaaaacaaaatctggggaaggaaaagctggcctctcaatgaaggaattatggctg

SEQ ID NO: 123192 - DNA, 80 bp, synthetic construct
  source 1..80: mol_type = other DNA
cattatcttcgccctggagcactttttcctccgcgcgctcacgggatcggcccccgcggacatcgcccgctgcgtcgtgc

SEQ ID NO: 123193 - DNA, 80 bp, synthetic construct
  source 1..80: mol_type = other DNA
acatgaggccctactgttggcattacccacctaagccgtgtggtgtggttcctgccaagtctgtgtgtggcccagtctac

SEQ ID NO: 123194 - DNA, 80 bp, synthetic construct
  source 1..80: mol_type = other DNA
tcctgccccaactaccaggagtccccttcctgtcctgccaacgcgggtacagaggggtttggcgcgtggatggtgtcatg

SEQ ID NO: 123195 - DNA, 80 bp, synthetic construct
  source 1..80: mol_type = other DNA
gtaacagaggacgccgataaatccacacaacgccgcccacgagtgatcgatgtaacaccaaaacgaaaaccttcgggaaa

SEQ ID NO: 123196 - DNA, 80 bp, synthetic construct
  source 1..80: mol_type = other DNA
actttggctgaagaacaccagggtggcacagtgtgtaagagagatcagagtgatcgaggctggggcaaccactgtggact

SEQ ID NO: 123197 - DNA, 80 bp, synthetic construct
  source 1..80: mol_type = other DNA
cgctaaacgccttcctggcgacgcagccggcaaacgtgccgcgcgggcaggacgattacaccaattttatcagcgcactg

SEQ ID NO: 123198 - DNA, 80 bp, synthetic construct
  source 1..80: mol_type = other DNA
agttccgttttgctcccaccacttcaacaagctccatctcaaggacgggaggtccattgtggttccctgccgccaccaag

SEQ ID NO: 123199 - DNA, 80 bp, synthetic construct
  source 1..80: mol_type = other DNA
cgtccacgaaggccgcccggcccgagatcacggcccgtccccccggcccgtccccccggcccgtccccccggcccgtcgc

SEQ ID NO: 123200 - DNA, 80 bp, synthetic construct
  source 1..80: mol_type = other DNA
agcgttcgtcagcttctgcagtatacctctaaaaacacttcaggtttttggagatatctgtttggttctactttaagcaa

SEQ ID NO: 123201 - DNA, 80 bp, synthetic construct
  source 1..80: mol_type = other DNA
ctatggtggttgtcctacttattggtccgggcggaagccttgatccaagagtgggtaccgcccttgctggcacggtgcgg

SEQ ID NO: 123202 - DNA, 80 bp, synthetic construct
  source 1..80: mol_type = other DNA
ggtggatattgctaaccaggccttacaaaaccaaatcaatcagaggctggagaatagccgccaacctccagtagctctga

SEQ ID NO: 123203 - DNA, 80 bp, synthetic construct
  source 1..80: mol_type = other DNA
tatcaataggacagcactcaactgtaacgacagcctccacaccggctttgtgacagcgctgttctacagccacaaattca

SEQ ID NO: 123204 - DNA, 80 bp, synthetic construct
  source 1..80: mol_type = other DNA
tgcagacactgccgcttgtggagatatcatccaggggctgccggtctccgctaggagaggtcgcgaggtgttcttggggc

SEQ ID NO: 123205 - DNA, 80 bp, synthetic construct
  source 1..80: mol_type = other DNA
ccgcgccgtgcgtcgtgacgtcatttgcatcaccgcttctcgtccaatcagcgttgactccgccccaaaaccgttaaaat

SEQ ID NO: 123206 - DNA, 80 bp, synthetic construct
  source 1..80: mol_type = other DNA
cgcaagcgcccgggcgtccagagggtagagccctgagtcatccgaggttggctcatcgcccgggtcttgccgcaagtgcg

SEQ ID NO: 123207 - DNA, 80 bp, synthetic construct
  source 1..80: mol_type = other DNA
aggtttggcacctccctcctcttcttgaacgacatgggaaaggtgaggaaagacattccgcagtgggaaccatctaaggg

SEQ ID NO: 123208 - DNA, 80 bp, synthetic construct
  source 1..80: mol_type = other DNA
acagtaacggacgcattactgttagtaatagcagccgcactcgaactgtaacatcccttactaccatttggtctatctca

SEQ ID NO: 123209 - DNA, 80 bp, synthetic construct
  source 1..80: mol_type = other DNA
atgacaccttgcagactggatttttggcgggcttgttctactaccaccggtttaacaccactgggtgcatagaacgactc

SEQ ID NO: 123210 - DNA, 80 bp, synthetic construct
  source 1..80: mol_type = other DNA
ccgtggctctcgaccgtcttggggcccaaatgatccccggcggaggtcccgcaatttgggtaaggtcatcgataccctaa

SEQ ID NO: 123211 - DNA, 80 bp, synthetic construct
  source 1..80: mol_type = other DNA
cccaccacggttcttgggattgggaccgtcttggatcaggccgagacggcaggatgccgcctcactgtcctcgccacggc

SEQ ID NO: 123212 - DNA, 80 bp, synthetic construct
  source 1..80: mol_type = other DNA
ctcagttgatcatcgacattttcgttggtggtcactggggcgttcttgctgggctactgtactacagtatggtggcgaat

SEQ ID NO: 123213 - DNA, 80 bp, synthetic construct
  source 1..80: mol_type = other DNA
gcgcgctcgtcgggaagcaaccgcacatgccagccccggttgtgcagggttataaggtccacactggtaactacctcgcc

SEQ ID NO: 123214 - DNA, 80 bp, synthetic construct
  source 1..80: mol_type = other DNA
tcctgggtggatggagttcagattcacaggtttgctcccgcaccaaagccgttctttagagatgaggtcacgtttaccgt

SEQ ID NO: 123215 - DNA, 80 bp, synthetic construct
  source 1..80: mol_type = other DNA
gggtacctgagatctgtgcgagtgtgatatctggtggccattgggggatactactagccgttgcctactttggtatggct

SEQ ID NO: 123216 - DNA, 80 bp, synthetic construct
  source 1..80: mol_type = other DNA
cacgttcgtcacatctcatctacctcccggttttaatgaatacgattttgtgccagagtccttcgatagggacaagacaa

SEQ ID NO: 123217 - DNA, 80 bp, synthetic construct
  source 1..80: mol_type = other DNA
acccccttgtcgccgaagaggatgatagggagatctctgtatctgctgagtgcttcaaaaaacaccgtgcttttccggcc

SEQ ID NO: 123218 - DNA, 80 bp, synthetic construct
  source 1..80: mol_type = other DNA
agcagtgagtgtccactggcaaagagaagaacaggtgtcttcacagtggctgaatttggaatgggcttgagaacaaaagt

SEQ ID NO: 123219 - DNA, 80 bp, synthetic construct
  source 1..80: mol_type = other DNA
tggatgaattccactggtttcaccaagacgtgcggggctcctgcctgtaacgtcggcgggagcgagaccaacaccctgtc

SEQ ID NO: 123220 - DNA, 80 bp, synthetic construct
  source 1..80: mol_type = other DNA
taggaggagttaaataatgcattaccaacagccaaaactcaggtagcacgtctttaagaaacgccaccacctcaaaattt

SEQ ID NO: 123221 - DNA, 80 bp, synthetic construct
  source 1..80: mol_type = other DNA
ggggacgtgattgggctatatggtaatggagtgatcatgccaaacggtgcgtacatcagcgccatcgtccagggagaaag

SEQ ID NO: 123222 - DNA, 80 bp, synthetic construct
  source 1..80: mol_type = other DNA
atcaagatcgaggtttggatatgcaaattacttttctaattgtctgtgggatctttattcttgcggttcttctctactat

SEQ ID NO: 123223 - DNA, 80 bp, synthetic construct
  source 1..80: mol_type = other DNA
aaacagggaaaatgtgccacgtgtgtttacaacatgatggggaagagagagaaaaaactaggagagttcggaaaggcaaa

SEQ ID NO: 123224 - DNA, 80 bp, synthetic construct
  source 1..80: mol_type = other DNA
aaagaacgatacgtttgaccaaacatacgaaattgcgagcaccatgcttgattcttataatgtttttaaacctgcccctc

SEQ ID NO: 123225 - DNA, 80 bp, synthetic construct
  source 1..80: mol_type = other DNA
caactcttggcttgggaacatcataatctacgcgcccaccatttgggtgcgcatggttttgatgacccacttcttctcaa

SEQ ID NO: 123226 - DNA, 80 bp, synthetic construct
  source 1..80: mol_type = other DNA
gatgagatggaggagtgtgcttccaaagcggccttcattgaggaagcccaaaaaatagcagatatgctcaagtccaaaat

SEQ ID NO: 123227 - DNA, 80 bp, synthetic construct
  source 1..80: mol_type = other DNA
ggcgctgtcaacgggcttaatacatctccaccagaatattgtggacgtgcagtacctatacgggatatcatcgtccatcg

SEQ ID NO: 123228 - DNA, 80 bp, synthetic construct
  source 1..80: mol_type = other DNA
accggcgtcaggtctgtcatgtttaagaacatctttatcgtttttgcatatgacatatgcgcatggaattaatgcaaccc

SEQ ID NO: 123229 - DNA, 80 bp, synthetic construct
  source 1..80: mol_type = other DNA
cccaagacaaccaactcgcatatgtcgtgataggcatacttacaatggctgcaataatagcggccaatgaaatgggacta

SEQ ID NO: 123230 - DNA, 80 bp, synthetic construct
  source 1..80: mol_type = other DNA
agctttcagcaccatccttgaaggctacttgtaccacacacgggccacatccggacgttgaactcattgaggcgaatttg

SEQ ID NO: 123231 - DNA, 80 bp, synthetic construct
  source 1..80: mol_type = other DNA
ggcggggttgatggcgaacacggggctgcatagcttgcggatgcgcgtgagggtgaggatgtgcgaggtggacgatggtg

SEQ ID NO: 123232 - DNA, 80 bp, synthetic construct
  source 1..80: mol_type = other DNA
ctccgttggttcaacaaccctcattttcggttcatttaccacggtcggtggggtttcttacccaccacattaagcgtaag

SEQ ID NO: 123233 - DNA, 80 bp, synthetic construct
  source 1..80: mol_type = other DNA
gtgatcctccagcatggtgatgttgaggtcgatgaaggtgctgacggtggtgatgtcggcgcggctcagctggtgggagt

SEQ ID NO: 123234 - DNA, 80 bp, synthetic construct
  source 1..80: mol_type = other DNA
cctcatgatcctcatcgagggcatcttttttgccgcctcgtttgccgccatcgcctaccttcgcaccaacaaccttctgc

SEQ ID NO: 123235 - DNA, 80 bp, synthetic construct
  source 1..80: mol_type = other DNA
ccttgatgaccggctacaccggcgacttcgactcagtgatagactgcaacacctgcgtaacacagacagttgatttcagc

SEQ ID NO: 123236 - DNA, 80 bp, synthetic construct
  source 1..80: mol_type = other DNA
taagggagctagcgtcgggagtgcaggcagacttgctttctgtagaggaagcttgtagcctcactccccctcattcagcc

SEQ ID NO: 123237 - DNA, 80 bp, synthetic construct
  source 1..80: mol_type = other DNA
cttctggttgctgtcccggcctataaagcggtaggcacaaaattcggcgcgacagtcgataatcaccaacagcccaatgg

SEQ ID NO: 123238 - DNA, 80 bp, synthetic construct
  source 1..80: mol_type = other DNA
agacatgatgcgataaaatctgtttgtaaaatttattaagggtacaaattgtcctaacacaggggtggggttagggccgg

SEQ ID NO: 123239 - DNA, 80 bp, synthetic construct
  source 1..80: mol_type = other DNA
gggccttggtggtgaggtcgcgcgcgtagaagccgtcgacctgcttgaagcggtcggcggcgtagctggtgtgttcggtg

SEQ ID NO: 123240 - DNA, 80 bp, synthetic construct
  source 1..80: mol_type = other DNA
gccaatacgcacgtatttttaaacagtttattcctactccactcccactaaacactgtattaacaaaatattggaattaa

SEQ ID NO: 123241 - DNA, 80 bp, synthetic construct
  source 1..80: mol_type = other DNA
gggggcgcgggccctgctcggcgcccgcgtcccccgagaaaaactccgcgtatgcccgcgacaggaactgggcgtagttc

SEQ ID NO: 123242 - DNA, 80 bp, synthetic construct
  source 1..80: mol_type = other DNA
agtgctcaacccttccgttgcagcaacactgggcttcggggcatatatgtccaaggcgcatggcatcgacccgaacatac

SEQ ID NO: 123243 - DNA, 80 bp, synthetic construct
  source 1..80: mol_type = other DNA
gtcaacttgtcaccgttacaccacgcatacaccagacagtccagggctgcaattgctccatctacacaggccgcattact

SEQ ID NO: 123244 - DNA, 80 bp, synthetic construct
  source 1..80: mol_type = other DNA
gcgacccggatttgacatcgtcgatggccccttcagagggagagcccggcgacccggatttgacatcagactcttggtcc

SEQ ID NO: 123245 - DNA, 80 bp, synthetic construct
  source 1..80: mol_type = other DNA
gcctatgggattttcctatgacaccaggtgctttgattccactgtgaccgaacgcgacattcggactgagggtgatatct

SEQ ID NO: 123246 - DNA, 80 bp, synthetic construct
  source 1..80: mol_type = other DNA
ctcgggtggcccactgctgtgccccgcgggacacgccgtaggcatattcagagccgcggtgtgcacccgtggagtggcta

SEQ ID NO: 123247 - DNA, 80 bp, synthetic construct
  source 1..80: mol_type = other DNA
cgggggggacatatttcacagcgtgtcccgtgcccgaccccgcttgttactcctttgcctactcctactgtccgtaggtg

SEQ ID NO: 123248 - DNA, 80 bp, synthetic construct
  source 1..80: mol_type = other DNA
gcggcggcggccggcacggtaaacgtgggccagcccggaaatcccagcacggcaaagtattggacgggccctccccggac

SEQ ID NO: 123249 - DNA, 80 bp, synthetic construct
  source 1..80: mol_type = other DNA
aggatgagcgggagatctccgtgcccgcagaaatcctgcggaagtcgcggagattcgccccggcactgcctgtttgggcg

SEQ ID NO: 123250 - DNA, 80 bp, synthetic construct
  source 1..80: mol_type = other DNA
ctgggccaaggttgtgctggtcctgtttctgtttgcggtggtcgatgccagcacccgcactgtgggtggtagtgcggccc

SEQ ID NO: 123251 - DNA, 80 bp, synthetic construct
  source 1..80: mol_type = other DNA
acgctgtcatcttactcatgtgtgctgtacacccagccttaatgtttgacatcaccaagctgctgctggccgtcttcgga

SEQ ID NO: 123252 - DNA, 80 bp, synthetic construct
  source 1..80: mol_type = other DNA
acacatattgatgcccacttcctctcacaaactaagcaggggggggaaaacttcgcatacctcgtggcctatcaggctac

SEQ ID NO: 123253 - DNA, 80 bp, synthetic construct
  source 1..80: mol_type = other DNA
tttttactttgcaatttattcttaattaatttttactaacaatgcttcacatcttaattttgttcttttctctaactccc

SEQ ID NO: 123254 - DNA, 80 bp, synthetic construct
  source 1..80: mol_type = other DNA
cgtgatgaccatcatgtgtctcattccaacagtcttggcatttcacctaacaacacgagatggggaaccccacatgattg

SEQ ID NO: 123255 - DNA, 80 bp, synthetic construct
  source 1..80: mol_type = other DNA
cctccatcttcaccccgggggctaagcagaacctccagctcatcaataccaatggaagctggcacatcaacaggacagcc

SEQ ID NO: 123256 - DNA, 80 bp, synthetic construct
  source 1..80: mol_type = other DNA
tcgacttcagcttggaccctaccttctcaattgagaccacgactgtcccccaggacgcagtcgcccggagtcaacgccga

SEQ ID NO: 123257 - DNA, 80 bp, synthetic construct
  source 1..80: mol_type = other DNA
attgaacaaaataaaagcactcttaccaaagccatggcgaccagcgttcgtcttatttgttttttccgttagctgcaaaa

SEQ ID NO: 123258 - DNA, 80 bp, synthetic construct
  source 1..80: mol_type = other DNA
cccaaaagcaatcataacaggcggcccgggtacatgacacagaaccaaggaccgtgggatgaaggccgagttgagttgga

SEQ ID NO: 123259 - DNA, 80 bp, synthetic construct
  source 1..80: mol_type = other DNA
ataaccaaatacatcatgacttgcatgtcggctgacctggaggtcgtcactagcacctgggtgctggttggcggggtcct

SEQ ID NO: 123260 - DNA, 80 bp, synthetic construct
  source 1..80: mol_type = other DNA
ccggtgagtgtggcgcgaggtggggtccgacgaacgcaggcgctgtctccccggggcccgcgtaaccacgcgcatatccg

SEQ ID NO: 123261 - DNA, 80 bp, synthetic construct
  source 1..80: mol_type = other DNA
aaggagaacatcaagtatgaggtcgccatatttgtgcatggcccgacgactgttgaatctcatggcaattattcaacaca

SEQ ID NO: 123262 - DNA, 80 bp, synthetic construct
  source 1..80: mol_type = other DNA
gaaaacgtcgcggtcgtagaccacgaccgaccgggggccgatacagccgtcggtggcgctctcgacgatggccaccagcg

SEQ ID NO: 123263 - DNA, 80 bp, synthetic construct
  source 1..80: mol_type = other DNA
taccatcttagccctagctatatatccctaccttgacattggctggaacgcaatagatgccatgaaccacccaactttcc

SEQ ID NO: 123264 - DNA, 80 bp, synthetic construct
  source 1..80: mol_type = other DNA
tagtccgtcgcgcttgtggcggcaagtacatacaggcgtgcctcctgaaaatcggagcttggacagggacatatatctat

SEQ ID NO: 123265 - DNA, 80 bp, synthetic construct
  source 1..80: mol_type = other DNA
aaccttaccaggcaacccggcggttgcctccctaatgtctttttttgcttctctcaccagcccactatcgacctccacga

SEQ ID NO: 123266 - DNA, 80 bp, synthetic construct
  source 1..80: mol_type = other DNA
gactttcttccagagccacctgggcgaagaacattcacacggctataacccaggtcagaaatctgatcgggaaagaggaa

SEQ ID NO: 123267 - DNA, 80 bp, synthetic construct
  source 1..80: mol_type = other DNA
ctggagggttcttcacttcggttgggaaaggaattcatacggtgtttggctctgcctttcaggggctatttggcggcttg

SEQ ID NO: 123268 - DNA, 80 bp, synthetic construct
  source 1..80: mol_type = other DNA
atcgatgggtctttggaggaaaatataactgccgcagcgccactcactaaaactaaccactccataggtttatcaatagg

SEQ ID NO: 123269 - DNA, 80 bp, synthetic construct
  source 1..80: mol_type = other DNA
gaaagcagaactataagagttttgaagatggttgaaccatggctgaaaaacaaccagttttgcattaaagtactgaaccc

SEQ ID NO: 123270 - DNA, 80 bp, synthetic construct
  source 1..80: mol_type = other DNA
ctgtgggcagtgtcggactgggaaaagtcctgattgacattttagcgggctatggtgcaggagtgtcaggggcgcttgtg

SEQ ID NO: 123271 - DNA, 80 bp, synthetic construct
  source 1..80: mol_type = other DNA
ctccgcacacacggtttaagtaacagagatctctgtttatggcggggtaatatttatgatatgcatatgcaacgtcttat

SEQ ID NO: 123272 - DNA, 80 bp, synthetic construct
  source 1..80: mol_type = other DNA
ccccaggaggcggcgcacaccggccacccgggccggccccgctcggccgtgatcctcccggcatgtgcgttcgtggacct

SEQ ID NO: 123273 - DNA, 80 bp, synthetic construct
  source 1..80: mol_type = other DNA
atgcggaaggggagtctgagtcggggtcgcctgaggacactgattttccccaccctttaaccgccacgccgccacatgga

SEQ ID NO: 123274 - DNA, 80 bp, synthetic construct
  source 1..80: mol_type = other DNA
gtctttaaaaagcaggggttagggagttgttcggtcataagcttcagcgcgaacgaccaactaccccgatcatcagttat

SEQ ID NO: 123275 - DNA, 80 bp, synthetic construct
  source 1..80: mol_type = other DNA
tttaccactaggagccggattgggaacgaatgaaaataaactttgtatcaaattaggacaaggacttacattcaattcaa

SEQ ID NO: 123276 - DNA, 80 bp, synthetic construct
  source 1..80: mol_type = other DNA
tgctggttctaatggccatcacggtgtttacgctaactccacactacaagcgaatgcttgtgttgtcagtttggtggatc

SEQ ID NO: 123277 - DNA, 80 bp, synthetic construct
  source 1..80: mol_type = other DNA
ggtacgtgcttaaacttaaaacaagcccgatgaaggcattatatccactcacaaccaaggggttaaaacagttaccggaa

SEQ ID NO: 123278 - DNA, 80 bp, synthetic construct
  source 1..80: mol_type = other DNA
gtaggcgcgcccatcacgggctccgatgtcatcctgggtgaggaggagttatgggatgcggtgtttaagaaaacccgcct

SEQ ID NO: 123279 - DNA, 80 bp, synthetic construct
  source 1..80: mol_type = other DNA
ggaaatgggggggagcatcacgagggtggagtccgagaaaaaggtagttatcttagactccttcgaacccctcaagccag

SEQ ID NO: 123280 - DNA, 80 bp, synthetic construct
  source 1..80: mol_type = other DNA
gctgtacctgcttcaatacagcctgttgcgcacgccctatttcgtgcgcgctcacatcctcttgcgcgcatgcatgttcg

SEQ ID NO: 123281 - DNA, 80 bp, synthetic construct
  source 1..80: mol_type = other DNA
acgcccgcgttgtcgccgcggatcaggttggcaggcgtcaggcaccgcgccagccgcagggagctcgcgccgcgcgtccg

SEQ ID NO: 123282 - DNA, 80 bp, synthetic construct
  source 1..80: mol_type = other DNA
ttcagcactgtatgttggagacttatgcgggaccattttcctcgtgggccaagcgttcactttcagatctcggcaacaca

SEQ ID NO: 123283 - DNA, 80 bp, synthetic construct
  source 1..80: mol_type = other DNA
gctgtccacagctacccagaccttcctgggtacaacaattgggggggttatgtggactgtctaccacggtgctgggacgc

SEQ ID NO: 123284 - DNA, 80 bp, synthetic construct
  source 1..80: mol_type = other DNA
atcaaaaaccagactgcccccgtgttttttgatgcgtttcttacctcgggtttccatgaggcgatgaccggcttcggtga

SEQ ID NO: 123285 - DNA, 80 bp, synthetic construct
  source 1..80: mol_type = other DNA
acatcaacaggacagcgttgaactgcactgatagccttaacaccggctggttagcctcgttattctacagccgcagattc

SEQ ID NO: 123286 - DNA, 80 bp, synthetic construct
  source 1..80: mol_type = other DNA
cccacattgacgcccatttcctctcgcaaacaaaacaagcgggagaaaatcttgcgtatcttgtcgcctaccaggccaca

SEQ ID NO: 123287 - DNA, 80 bp, synthetic construct
  source 1..80: mol_type = other DNA
ctgccgtgccgcagacataccaagtgggatacctgcatgcccctaccgggagtgggaaaagcaccaaagtacctgctgcg

SEQ ID NO: 123288 - DNA, 80 bp, synthetic construct
  source 1..80: mol_type = other DNA
cagcccccccccagcggtgactcaggtcactctacgggggtggacgcctccggcactacagaccagttgtccttagacgg

SEQ ID NO: 123289 - DNA, 80 bp, synthetic construct
  source 1..80: mol_type = other DNA
accatatcactgcagagacggcggcccggcgcctcaggagggggtctcctccatcgttggctagctcatcagccagccaa

SEQ ID NO: 123290 - DNA, 80 bp, synthetic construct
  source 1..80: mol_type = other DNA
cctcactcaggggaagagcatgcggtcggaaatgacacaggaaaacacggcaaggaaatcaaagtaacaccacagagttc

SEQ ID NO: 123291 - DNA, 80 bp, synthetic construct
  source 1..80: mol_type = other DNA
aacatcagaacaggagtacggactgtgaccaccggggactctatcacctactctacttatggcaagtttatcgcggatgg

SEQ ID NO: 123292 - DNA, 80 bp, synthetic construct
  source 1..80: mol_type = other DNA
acaactggagaggcccacaatcctaagagagctgaggacacgtacgtgtgcaaaagtggtgtcactgacaggggctggtg

SEQ ID NO: 123293 - DNA, 80 bp, synthetic construct
  source 1..80: mol_type = other DNA
ctgcttgacaacgggcagcgtagtcatatgtggcaggattgtaacctcgggtaaacccgccgttatgcctgaccgcgagg

SEQ ID NO: 123294 - DNA, 80 bp, synthetic construct
  source 1..80: mol_type = other DNA
cccctctaagcttagatggaggtggaaacctaggtttaaatctttctgctcccctggacgttagtagtaacaacaatttg

SEQ ID NO: 123295 - DNA, 80 bp, synthetic construct
  source 1..80: mol_type = other DNA
agatctaatatcatatggaggaggctggaagctagaaggagaatggaaggaaggagaagaagtccaggtgctggcactgg

SEQ ID NO: 123296 - DNA, 80 bp, synthetic construct
  source 1..80: mol_type = other DNA
tattagtttcaataaggaaactactgctgactattcaataacatttgactttgcgtggagcaaagcttatgaaacccctg

SEQ ID NO: 123297 - DNA, 80 bp, synthetic construct
  source 1..80: mol_type = other DNA
gtcgccgggacggcgaccaccttcagcatggtcttgaggttggccaggccctcggcctcgatctgggcccggcgctcgcg

SEQ ID NO: 123298 - DNA, 80 bp, synthetic construct
  source 1..80: mol_type = other DNA
acatcgtatggcgtgggatatgatgatgaactggtcccctgcgatcgggctgttcgtgtcacacttaatgcggttgcccc

SEQ ID NO: 123299 - DNA, 80 bp, synthetic construct
  source 1..80: mol_type = other DNA
cacgcctgaatatgatgatagagagccatcagtgcccgctgagtgtcataggcccaaaaggccgaaatatccaccggcac

SEQ ID NO: 123300 - DNA, 80 bp, synthetic construct
  source 1..80: mol_type = other DNA
gctcacccccacgctcgcagcgcggatcgcgaacgctcccatcgatgaggtgcggcgtcacgtcgacctcctcgtggtgg

SEQ ID NO: 123301 - DNA, 80 bp, synthetic construct
  source 1..80: mol_type = other DNA
gtcaggcttagagcgtatttcaacacgcctggtttgcctgtgtgtcaagatcatcttgagttttgggaggcagtctttac

SEQ ID NO: 123302 - DNA, 80 bp, synthetic construct
  source 1..80: mol_type = other DNA
gccttagcggcttgtaaagctgcagggataatcgcgcccacaatgctggtatgcggcgatgacttggttgtcatctcaga

SEQ ID NO: 123303 - DNA, 80 bp, synthetic construct
  source 1..80: mol_type = other DNA
aagtcttccttagcctctgcttatggtggctgagttacctactggtcatggcggaggccatgatccaggaatgggtgcca

SEQ ID NO: 123304 - DNA, 80 bp, synthetic construct
  source 1..80: mol_type = other DNA
ggagtgtttacatctgtgggaaaattggtacatcaggtttttggaaccgcatatggggttctgtttagcggtgtttcttg

SEQ ID NO: 123305 - DNA, 80 bp, synthetic construct
  source 1..80: mol_type = other DNA
cacgcgtagcttgaagcgcgcgcccgcaaactcccgcttgtgggccataagcagggcgtacagctgcctgtgggtccggc

SEQ ID NO: 123306 - DNA, 80 bp, synthetic construct
  source 1..80: mol_type = other DNA
aatgcagcggccatagcctggatgatcatacgagctctcgcaagaccatctgcctctgcgctagctatgccaatgctagc

SEQ ID NO: 123307 - DNA, 80 bp, synthetic construct
  source 1..80: mol_type = other DNA
ggcgtcggagtcttcgtcgtcagagacatacagggtctgaagcagcgacacgggcgggggggtagcgtcgatgtgtagcg

SEQ ID NO: 123308 - DNA, 80 bp, synthetic construct
  source 1..80: mol_type = other DNA
gactgcgcgatctagcagttgcagtcgagccggtcattttctctcccatggagaagaaaatcattacctggggtgcggat

SEQ ID NO: 123309 - DNA, 80 bp, synthetic construct
  source 1..80: mol_type = other DNA
caagccgaaaccaatgggtcaatctgggggtttgttatcagcatggtcactgccttggaagagtcggattgattattttc

SEQ ID NO: 123310 - DNA, 80 bp, synthetic construct
  source 1..80: mol_type = other DNA
gatggaggagtgcgcatcgcatctcccctacatcgaacagggcatgcagttagccgagcagttcaaacaaaaagcactcg

SEQ ID NO: 123311 - DNA, 80 bp, synthetic construct
  source 1..80: mol_type = other DNA
gtcttggttgaagcccagattcagcaatgggttccccccctggaagcccggggggggcgtgacgggatcatctggctggc

SEQ ID NO: 123312 - DNA, 80 bp, synthetic construct
  source 1..80: mol_type = other DNA
cccccgcccccaggcgggcccgccccgaacggaattccattatgcacgaccccgccccgacgccggcacgccggaggccc

SEQ ID NO: 123313 - DNA, 80 bp, synthetic construct
  source 1..80: mol_type = other DNA
ggcgtgaactatgcaacagggaatttgcccggttgctctttctctatcttcctcctcgctcttctttcttgcttgacggt

SEQ ID NO: 123314 - DNA, 80 bp, synthetic construct
  source 1..80: mol_type = other DNA
atgcgagcagggcaaaaatgagagcttttgctggattccggtcacgccgaatgtggccgtggcccatcgtggggctctca

SEQ ID NO: 123315 - DNA, 80 bp, synthetic construct
  source 1..80: mol_type = other DNA
cattcgaacgcgttcgctgccttttcctccgcagttgccactgggtcctaaacacactcatgttcatggtgcacgtaaaa

SEQ ID NO: 123316 - DNA, 80 bp, synthetic construct
  source 1..80: mol_type = other DNA
atgcggttgcctcaaactctttttgacatgttcgcaggggcccactggggcgtgatggcaggcctcgcctatttttccat

SEQ ID NO: 123317 - DNA, 80 bp, synthetic construct
  source 1..80: mol_type = other DNA
gcaattgggtcccagcttccatgtgagcctgagccagacgtcgcagtgttgacctcgatgttgcgagaccctgcccacat

SEQ ID NO: 123318 - DNA, 80 bp, synthetic construct
  source 1..80: mol_type = other DNA
agatcgttgatttcagcctggatcccaccttctcaatcgagaccaccacagtcccacaagacgccgtagccaggagccag

SEQ ID NO: 123319 - DNA, 80 bp, synthetic construct
  source 1..80: mol_type = other DNA
ctccagcgattgcaagaggagcataaagaaacttggcactatgatcatgaaaatccatacagaacctgggcgtatcatgg

SEQ ID NO: 123320 - DNA, 80 bp, synthetic construct
  source 1..80: mol_type = other DNA
ggtcccagctcccttgtgaaccggagcctgacgttgcggtgctgacatccatgcttaccgacccatcccacatcacagcg

SEQ ID NO: 123321 - DNA, 80 bp, synthetic construct
  source 1..80: mol_type = other DNA
aacgtggccattagccagcccggtgcccttacaaaagggctacggacgcacattgaccccatcgtgctgtctgccacgct

SEQ ID NO: 123322 - DNA, 80 bp, synthetic construct
  source 1..80: mol_type = other DNA
cacgtcgacatgatcgtaatggcagctacggcctgctcggccttgtatgtgggagatgtgtgcggggccgtgatgattct

SEQ ID NO: 123323 - DNA, 80 bp, synthetic construct
  source 1..80: mol_type = other DNA
ggtgttgcgtccccggcttccaggggagacggactacctaaacgatcccctgttgcaacccgttcgtaataagaactttc

SEQ ID NO: 123324 - DNA, 80 bp, synthetic construct
  source 1..80: mol_type = other DNA
acttagattgaagggcgtgtcatactccttgtgtactgcagcgttcacattcaccaagatcccggctgaaacactgcacg

SEQ ID NO: 123325 - DNA, 80 bp, synthetic construct
  source 1..80: mol_type = other DNA
ccttaggggttcgttggtccagcacaagcgtcctcccttgcgcgagcagtatgggggtagtacatctagtaagttttcag

SEQ ID NO: 123326 - DNA, 80 bp, synthetic construct
  source 1..80: mol_type = other DNA
gccctgtcgccggtatggggcatgatcagacgagccgcgagccgcgcgttgggccctgtacagctcgcgcgaattgaccc

SEQ ID NO: 123327 - DNA, 80 bp, synthetic construct
  source 1..80: mol_type = other DNA
ccgatctgccccgaccgacggctcctgccacccgaacatggctcgcggggccgggttggtgttttttgttggagtttggg

SEQ ID NO: 123328 - DNA, 80 bp, synthetic construct
  source 1..80: mol_type = other DNA
cctgacgcccccgcattccgccagatccaagtttggctacggggcaaaggacgttcggagccactcccgcaaggccatta

SEQ ID NO: 123329 - DNA, 80 bp, synthetic construct
  source 1..80: mol_type = other DNA
agagcgaagctcattgcccaaggcgggaaagccgctatatgcggtaagtacctcttcaattgggcggtgaagactaagct

SEQ ID NO: 123330 - DNA, 80 bp, synthetic construct
  source 1..80: mol_type = other DNA
ataggccttctgaatgttgtgacactctcctttgtgatatcggagagtcctcatcaagtgctgaagttgaagaacataga

SEQ ID NO: 123331 - DNA, 80 bp, synthetic construct
  source 1..80: mol_type = other DNA
ctccaaacggagtgtttgctcctattcccgccatgtcgggtgtatgtctagaagaccaatcccgatgcattcgcgcgcgg

SEQ ID NO: 123332 - DNA, 80 bp, synthetic construct
  source 1..80: mol_type = other DNA
ggaccccagggaccacaatgtggtagcttacaccgcgtcgctgaagcatggttagtagagatgaaagtctgaaaaacaaa

SEQ ID NO: 123333 - DNA, 80 bp, synthetic construct
  source 1..80: mol_type = other DNA
acccaagatgattaggtacataatcctaggtttactcacccttgcgtcagcccacggtaccacccaaaaggtggatttta

SEQ ID NO: 123334 - DNA, 80 bp, synthetic construct
  source 1..80: mol_type = other DNA
acccccccagaccggagtatgatctggagctgataacatcttgctcctcaaatgtgtctgtggcgctgggcccacaaggc

SEQ ID NO: 123335 - DNA, 80 bp, synthetic construct
  source 1..80: mol_type = other DNA
ctcagatcgttgacttcagtctcgacccaactttctccatagaaaccaccacagtaccccaggatgctgtttcccgcagc

SEQ ID NO: 123336 - DNA, 80 bp, synthetic construct
  source 1..80: mol_type = other DNA
gacaaacggaccctggatgcaggtgccactagaggtgaaaagggaagcttgcccaggaaccagtgtggttgttgacggag

SEQ ID NO: 123337 - DNA, 80 bp, synthetic construct
  source 1..80: mol_type = other DNA
ttgcgtggtatctgaagggtaggtgggcgcccggagtggtctacgccctctacgggatgtggcctctcctcctgctcctg

SEQ ID NO: 123338 - DNA, 80 bp, synthetic construct
  source 1..80: mol_type = other DNA
tacatacccgtcctcggcgcccctctggggggcgttgccagggtcctggcgcatggtgtcagggtcctggaggatggtgt

SEQ ID NO: 123339 - DNA, 80 bp, synthetic construct
  source 1..80: mol_type = other DNA
ggagagatccaggtcctgtccacagtcactcagtccttcctcggaacgtccatctcgggggttttatggactgtctacca

SEQ ID NO: 123340 - DNA, 80 bp, synthetic construct
  source 1..80: mol_type = other DNA
ggtgtgtcagccgtcggtattcgtcaaactccttgaccgacacgaacgtaagcacggggagggtgaacacgacgaactcc

SEQ ID NO: 123341 - DNA, 80 bp, synthetic construct
  source 1..80: mol_type = other DNA
cacctactacgatggggtcgtagagctgtggcactaccccatgggacacaaatgcccacgggtcgtgcatgtcgtcacgg

SEQ ID NO: 123342 - DNA, 80 bp, synthetic construct
  source 1..80: mol_type = other DNA
agaagccaaagaagggttgaaaagaggagagacaacacatcatgccgtgtcccgaggtagcgcaaaacttcaatggtttg

SEQ ID NO: 123343 - DNA, 80 bp, synthetic construct
  source 1..80: mol_type = other DNA
ccgttcgttgtcttcctgttctgttgcatcgttgtcaccgtttggatccttgaaagtgacaacggaaagggtaacggcgc

SEQ ID NO: 123344 - DNA, 80 bp, synthetic construct
  source 1..80: mol_type = other DNA
gtaatattcagtcccatggaaatcaagatcatcacctggggcgcggacacagcagcttgtggagatattctttgcgggct

SEQ ID NO: 123345 - DNA, 80 bp, synthetic construct
  source 1..80: mol_type = other DNA
tttgggtgcgtttggatgaacggcaccggatttacaaaggcatgtggcggccctccgtgcgaggtgacaaccaacaacca

SEQ ID NO: 123346 - DNA, 80 bp, synthetic construct
  source 1..80: mol_type = other DNA
cacgctgtaggcatattccgcgctgcagtgtgtacgcggggcgtggcgaaggcggtcgactttgtgccagtagagtccct

SEQ ID NO: 123347 - DNA, 80 bp, synthetic construct
  source 1..80: mol_type = other DNA
tgagaactcttacagtggagtggaaggagaaggactgcacaagctaggctatatattaagggacatttccaagatacccg

SEQ ID NO: 123348 - DNA, 80 bp, synthetic construct
  source 1..80: mol_type = other DNA
gagatcgcagcgagcaacatccgctgctgcattcaacaactgagcttgcaatactgccttgctctttcacgcccatgcct

SEQ ID NO: 123349 - DNA, 80 bp, synthetic construct
  source 1..80: mol_type = other DNA
acccgtagtccacgggtgtgctctgccaccaactcgtcccactccagtgcctcccccccgcaagaagaagacaatcatac

SEQ ID NO: 123350 - DNA, 80 bp, synthetic construct
  source 1..80: mol_type = other DNA
actagacgggagatgggatggtgaggaggaagtccaactcatcgctgctgtgcctggaaaatctgttgtcaacgttcaaa

SEQ ID NO: 123351 - DNA, 80 bp, synthetic construct
  source 1..80: mol_type = other DNA
gcagcccaaatgttcattgtctcgccgcagcaccactggtttgtccaagactgcaattgctccatctaccctggtaccat

SEQ ID NO: 123352 - DNA, 80 bp, synthetic construct
  source 1..80: mol_type = other DNA
ggcacacacgcccagaatgccatcaggccggaccctcgggtccattgcgtcctcaagttttcgcacccgtcgcccctctc

SEQ ID NO: 123353 - DNA, 80 bp, synthetic construct
  source 1..80: mol_type = other DNA
attacagccgagactgctgctaggcgcttggcaaggggcacgaccccctcggaagccagctcctcagccagccagttgtc

SEQ ID NO: 123354 - DNA, 80 bp, synthetic construct
  source 1..80: mol_type = other DNA
gcgaaccgcggtgtggatcccgacgcgggcccgagcgtacgctccatcttgtggggagaagtggtctgggcttgccagtg

SEQ ID NO: 123355 - DNA, 80 bp, synthetic construct
  source 1..80: mol_type = other DNA
aggtagatgactctaatagggacaaacgaccgtcgcctccaacactaggaaacgcagttcctgaaggagtgttaaaacct

SEQ ID NO: 123356 - DNA, 80 bp, synthetic construct
  source 1..80: mol_type = other DNA
ctgttaactgcgggggtagacgccaatacgaacgtcgcgggtggtcgggtggctcaaactacgagcagctttgttcgcct

SEQ ID NO: 123357 - DNA, 80 bp, synthetic construct
  source 1..80: mol_type = other DNA
ctgcgccttccctgaaggcgacatgcactacccgtcatgactccccagacgctgacctcatcgaggccaatctcctgtgg

SEQ ID NO: 123358 - DNA, 80 bp, synthetic construct
  source 1..80: mol_type = other DNA
cacaatgacttacaagtgccctcgaatcactgaggcggaaccagatgatgttgattgttggtgcaatgccacagacacat

SEQ ID NO: 123359 - DNA, 80 bp, synthetic construct
  source 1..80: mol_type = other DNA
tccaggaattccagttagttggtattatcataatggcacacagttctgcgatggagataaaattattcatccagaattca

SEQ ID NO: 123360 - DNA, 80 bp, synthetic construct
  source 1..80: mol_type = other DNA
tttgcgggtcactgataggaatgacaaacagggccacatgggcatctcacatccaccttgtgatccaccggatcagaact

SEQ ID NO: 123361 - DNA, 80 bp, synthetic construct
  source 1..80: mol_type = other DNA
tcgcgcccgacaaagaagtcctttatcagcaatttgatgagatggaggagtgtgctgatgtggctggcgtgcttgccaga

SEQ ID NO: 123362 - DNA, 80 bp, synthetic construct
  source 1..80: mol_type = other DNA
ccgttccaccccctagaaggaagaggacggtggtacttgacgagtctacggtctccaacgtgttggcaggcctggccgag

SEQ ID NO: 123363 - DNA, 80 bp, synthetic construct
  source 1..80: mol_type = other DNA
actatgcttacatggtaccaggctggcaagcggaagccatgcgatccgcccagcggcggacagctgctggcatcatgaaa

SEQ ID NO: 123364 - DNA, 80 bp, synthetic construct
  source 1..80: mol_type = other DNA
gggtcggtatcatacataggtacacagggtgtgctccagggacaggagcgagatcgagtggcgtctaagcagcgcgcccg

SEQ ID NO: 123365 - DNA, 80 bp, synthetic construct
  source 1..80: mol_type = other DNA
ttttatattggatcaatggagcgcccaaacccatctgtcggaggggtatactctggattacatgacaatggccctgtgga

SEQ ID NO: 123366 - DNA, 80 bp, synthetic construct
  source 1..80: mol_type = other DNA
caccgtgcatgggtgtgcattgccaccacagaaacttccacccgtgccacctccgcgcaggaagagaaccatcgttctca

SEQ ID NO: 123367 - DNA, 80 bp, synthetic construct
  source 1..80: mol_type = other DNA
ccctgatcacgcggctgctgtacacgccggacgcggaggcgatggggtggctccagaacccgcgcgtggcgcccggtgac

SEQ ID NO: 123368 - DNA, 80 bp, synthetic construct
  source 1..80: mol_type = other DNA
gggtcacccccggacctcaaactcgggccccagaaaggcaaagacggaggccagggccccgggtgcggcgtggacagtgg

SEQ ID NO: 123369 - DNA, 80 bp, synthetic construct
  source 1..80: mol_type = other DNA
gccggcgggggcgacatttttcacagcgtgtcgcgcgcccgaccccgctcattactcttcggcctactcctacttttcgt

SEQ ID NO: 123370 - DNA, 80 bp, synthetic construct
  source 1..80: mol_type = other DNA
ctcttacgccctgcacatgtggtgcctcagacctctatttagtcacaagacacgctgacgtcgtcccggttcgccggcgc

SEQ ID NO: 123371 - DNA, 80 bp, synthetic construct
  source 1..80: mol_type = other DNA
ttctactgttactggctactctttaagctttacatggacaggtatctcaaactaccgtaatcaagctttttcatgcccat

SEQ ID NO: 123372 - DNA, 80 bp, synthetic construct
  source 1..80: mol_type = other DNA
gaaaggggtgttgaccaagggcaagagagcactcacacccccagcgagcgatctgaaatactcatggaagacatggggaa

SEQ ID NO: 123373 - DNA, 80 bp, synthetic construct
  source 1..80: mol_type = other DNA
cagtggatcaacgaggactacccaagcccttgtagcggtgattggttacatgacatttgggactgggtctgcacagtact

SEQ ID NO: 123374 - DNA, 80 bp, synthetic construct
  source 1..80: mol_type = other DNA
aagctcttggattcttgaatgaagaccactggttctcgcgtgaaaactcttacagtggagtagaaggagaaggactgcac

SEQ ID NO: 123375 - DNA, 80 bp, synthetic construct
  source 1..80: mol_type = other DNA
cttcctggacgggagcgatccctccagggctatctatgaaagcatacagagattcagccatagctcagcccgcttaccag

SEQ ID NO: 123376 - DNA, 80 bp, synthetic construct
  source 1..80: mol_type = other DNA
tcctactcttagcgttgcccgaaagggcttacgctcatgaccgggagacggcagggtcccttggattctgtgttgtcgcc

SEQ ID NO: 123377 - DNA, 80 bp, synthetic construct
  source 1..80: mol_type = other DNA
gctgtgaagtgggagtacgttgtcctagcgtttctggttttggcggacgcacgagtctgtgcatgcttgtggttaatgtt

SEQ ID NO: 123378 - DNA, 80 bp, synthetic construct
  source 1..80: mol_type = other DNA
ccgaaccccaacaaaccaccccccgcgcgccccgggcccatccgccccacgctcccgccaggaattcttgggccgctcgc

SEQ ID NO: 123379 - DNA, 80 bp, synthetic construct
  source 1..80: mol_type = other DNA
tcgtgaagtgctttaccggcagttcgacgagatggaggagtgctcacaccgcattccctacctcgtcgagggccagcaga

SEQ ID NO: 123380 - DNA, 80 bp, synthetic construct
  source 1..80: mol_type = other DNA
cccgcaattccactggtgaggttctaatgaacctggagttgggcccacaactgaatccctatttggcccatctggcacgc

SEQ ID NO: 123381 - DNA, 80 bp, synthetic construct
  source 1..80: mol_type = other DNA
gccaattccatccccaaactacactagggccttgtggcgagtctctgccgaagagtacgtggaggtgaggcgcgtgggag

SEQ ID NO: 123382 - DNA, 80 bp, synthetic construct
  source 1..80: mol_type = other DNA
agcggaaagggtatagggaagatgaccctgggaatgtgctgcatagtcacagctagtattcttctatggtatgcacaaat

SEQ ID NO: 123383 - DNA, 80 bp, synthetic construct
  source 1..80: mol_type = other DNA
ctgacactggtcatggcacggtcgtcatagaattgcagtacactggcactgatggaccgtgcaagatacccatctcttca

SEQ ID NO: 123384 - DNA, 80 bp, synthetic construct
  source 1..80: mol_type = other DNA
tattttctgtaaaatcggtctgaacactgtgttggctggctacctgtttaaaatttgggatcgaacacggtccacgatgc

SEQ ID NO: 123385 - DNA, 80 bp, synthetic construct
  source 1..80: mol_type = other DNA
aacacttccttgtccatagagaatggtttaatgacttggccctcccatggacttcaccagctagctcaaattggagaaat

SEQ ID NO: 123386 - DNA, 80 bp, synthetic construct
  source 1..80: mol_type = other DNA
ggtggttgcaatatttcatcgctagagttgaggctgagttgttcgtgtacattccatcatttgaagtacgcggcccgcga

SEQ ID NO: 123387 - DNA, 80 bp, synthetic construct
  source 1..80: mol_type = other DNA
tgcacctccaccaaaacatcgtggacgtgcagtacctctacggactttctccggctctgacaagatacatcgtgaagtgg

SEQ ID NO: 123388 - DNA, 80 bp, synthetic construct
  source 1..80: mol_type = other DNA
taggcgtgtagctttacaatgcaaaagccttcgacgtggaggaaggcgtgggggggaatcggcactgaccaaggtggtcc

SEQ ID NO: 123389 - DNA, 80 bp, synthetic construct
  source 1..80: mol_type = other DNA
agatcggcgctccgctggcaagtcctggggaaaaccaggatacccttggcccctatacgggaatgaggcgctcggctggg

SEQ ID NO: 123390 - DNA, 80 bp, synthetic construct
  source 1..80: mol_type = other DNA
actttgggggctgtggttccagttggcattattaaacccgtggcggtcagagtctcaggcagacggtgtgcagttgaaaa

SEQ ID NO: 123391 - DNA, 80 bp, synthetic construct
  source 1..80: mol_type = other DNA
tggagagtggcagctgaggagtatgttgaggtcacccgcgtgggcgactgtcactttgtgactggatgcacggccgacaa

SEQ ID NO: 123392 - DNA, 80 bp, synthetic construct
  source 1..80: mol_type = other DNA
cccagacgggggatgcgggtccggtcgcgccccctacccaccgtactcgtcaattccaagggcatcggtaaacatctgct

SEQ ID NO: 123393 - DNA, 80 bp, synthetic construct
  source 1..80: mol_type = other DNA
ttaacgacactgtgcgtgcctacctcgacgaggccggggggcacctgatagacgccccggccgtcgacggtaccctcccg

SEQ ID NO: 123394 - DNA, 80 bp, synthetic construct
  source 1..80: mol_type = other DNA
gtccgttccagggcggccagggcgcgaaactcgttccgcaactcctcgcccccggaggcggccagggcgcgcttcgtgag

SEQ ID NO: 123395 - DNA, 80 bp, synthetic construct
  source 1..80: mol_type = other DNA
ccctcagaaaacttggggccccaccgttgagagcttggcgacaccgggccagagcggtcagagctaaactcattgcccag

SEQ ID NO: 123396 - DNA, 80 bp, synthetic construct
  source 1..80: mol_type = other DNA
tgtgctgctccatgtcatacagctggactggggcgctcatcaccccttgctccgcggaggaggaaaaattacctatcaat

SEQ ID NO: 123397 - DNA, 80 bp, synthetic construct
  source 1..80: mol_type = other DNA
ctatcgagtcgcttgatgttgtcgccaggtctcccagcttcactgacaatggtacgccaccagccgtacctcagacatat

SEQ ID NO: 123398 - DNA, 80 bp, synthetic construct
  source 1..80: mol_type = other DNA
ggacggcgtacgagaagccatcgccttccttccaaaacgcgaggaggatgccggtttcgacattgtcgtccgtcgcccgg

SEQ ID NO: 123399 - DNA, 80 bp, synthetic construct
  source 1..80: mol_type = other DNA
caccgactcgagttccctggtgcccggggcccaggattccgccccgcccggccccacgctaagggagctgtggtgtgtgt

SEQ ID NO: 123400 - DNA, 80 bp, synthetic construct
  source 1..80: mol_type = other DNA
aaaaggtatcccaatgaaaaaggttctgaagttcagaacatggctcttacctacacttttttgcaaggtgaccctaacat

SEQ ID NO: 123401 - DNA, 80 bp, synthetic construct
  source 1..80: mol_type = other DNA
gccacttccccgccaggaaccatgacaaaagaacccacactgattatgacacgcatactcggagctatgctaaccagcgt

SEQ ID NO: 123402 - DNA, 80 bp, synthetic construct
  source 1..80: mol_type = other DNA
cgtttggttgggcctcgaacagctgggcaaggtctgcgcccggtggctcgggtgagcggcgagtcttcagcgcctcgagg

SEQ ID NO: 123403 - DNA, 80 bp, synthetic construct
  source 1..80: mol_type = other DNA
caagaagataccttccagccatagtccgtgaggccataaaaagaaagctgcgcacgctagtcttagctcccacaagagtt

SEQ ID NO: 123404 - DNA, 80 bp, synthetic construct
  source 1..80: mol_type = other DNA
tttctgacgacgatctcgcacgctggcttgacacccatgaccccaccactttgcaagaacggcgcaaaatgatgatggcg

SEQ ID NO: 123405 - DNA, 80 bp, synthetic construct
  source 1..80: mol_type = other DNA
tcaacaaagcccgccaagagtttttgctacgaaagggacggggggtttacttggacccccagtccggcgaggagctcaac

SEQ ID NO: 123406 - DNA, 80 bp, synthetic construct
  source 1..80: mol_type = other DNA
gctactcgcgggggcggagtcgtgcaactgaacctggtcaacaggcgcgcggtggcttttatgccgaaggttagcgtgga

SEQ ID NO: 123407 - DNA, 80 bp, synthetic construct
  source 1..80: mol_type = other DNA
ccggcacgacgggaacagagaaaacgcgaccgctccaacaagggtggtgctgggcctcgtccccacgcagacccgcgggc

SEQ ID NO: 123408 - DNA, 80 bp, synthetic construct
  source 1..80: mol_type = other DNA
ctccaacagacagtgggcatgatacagtggtcatggaagtcacattctctggaacaaagccctgtaggatcccagtcagg

SEQ ID NO: 123409 - DNA, 80 bp, synthetic construct
  source 1..80: mol_type = other DNA
acaacagctaaggaagtggctctgttaagaacctattgcattgaagcttcgatatcaaacataaccacggcaactagatg

SEQ ID NO: 123410 - DNA, 80 bp, synthetic construct
  source 1..80: mol_type = other DNA
gttttccgcttccgtgccttggtggtcgcgtggctcgggacggtgggcggctgggaggcgggacccccgttcgccgcgac

SEQ ID NO: 123411 - DNA, 80 bp, synthetic construct
  source 1..80: mol_type = other DNA
ggtcgtctctacagccacgcagaccttcctcgctacctctgtcaacggggttctttggacggtttaccatggcgcaggct

SEQ ID NO: 123412 - DNA, 80 bp, synthetic construct
  source 1..80: mol_type = other DNA
gacaaccgcaggttttgtaatgtatgtgctcgtgtttattgtggatacgaaccggtgacgggaggggaaaacccagacgg

SEQ ID NO: 123413 - DNA, 80 bp, synthetic construct
  source 1..80: mol_type = other DNA
agggtcaccggggaagctgcggcccgcactacgcagggtttcaccagcattttcgcaccaggtgcgcagcaacggatcca

SEQ ID NO: 123414 - DNA, 80 bp, synthetic construct
  source 1..80: mol_type = other DNA
catgtaaaactcgtttacggccttgtatgggcagcatcctttttctaccggaagggtataggcttgtgcggcttttcgca

SEQ ID NO: 123415 - DNA, 80 bp, synthetic construct
  source 1..80: mol_type = other DNA
cctcacggacaaatgtggcgagcgcggtgggctttggtacaaatacctgatacgtcttgaaggtgtagatgagggcacgc

SEQ ID NO: 123416 - DNA, 80 bp, synthetic construct
  source 1..80: mol_type = other DNA
caggcctcacccacatagatgcccacttcttgtcccagaccaagcaggcaggagacaacttcccctacctggtagcgtac

SEQ ID NO: 123417 - DNA, 80 bp, synthetic construct
  source 1..80: mol_type = other DNA
ctatgccgccccatgtgcatcaacgtggcttagggacgtttgggactgggtgtgcactgtcctctctgactttaaggcct

SEQ ID NO: 123418 - DNA, 80 bp, synthetic construct
  source 1..80: mol_type = other DNA
attcgaccaccgagctcgccatcctgccctgctcatttgcgccactcccggctttgtctaccggcctaatacatctacac

SEQ ID NO: 123419 - DNA, 80 bp, synthetic construct
  source 1..80: mol_type = other DNA
ttctcttgcgtaccttgtcgtacttctgccagcagaaatgggcccttgaacagcaaatacccctcctgcggccgtccttt

SEQ ID NO: 123420 - DNA, 80 bp, synthetic construct
  source 1..80: mol_type = other DNA
acaaaccgtcgcccacaggacgttaagttcccgggcggcggtcaaatcgttggtggagtttacttgttgccgcgcaggtg

SEQ ID NO: 123421 - DNA, 80 bp, synthetic construct
  source 1..80: mol_type = other DNA
acaacatgttccgccctctacataggtgacttttgcggcgctgtgatgatagctgcccagctcgtgatggcatcgcctca

SEQ ID NO: 123422 - DNA, 80 bp, synthetic construct
  source 1..80: mol_type = other DNA
gtcatcaggaaacttactgttcacaggacatctcaagtgtaggctgagaatggacaaattacagcttaaaggaatgtcat

SEQ ID NO: 123423 - DNA, 80 bp, synthetic construct
  source 1..80: mol_type = other DNA
gcacggcgaccgctcctcttgaccagctccccgacgacggcgacgcggggtccgacgttgaatcgcactcctccatgccc

SEQ ID NO: 123424 - DNA, 80 bp, synthetic construct
  source 1..80: mol_type = other DNA
ctgaccgtccccacatcggccatacactatcataacacctcgggcatctatcacatcaccaacgattgcccaaattccag

SEQ ID NO: 123425 - DNA, 80 bp, synthetic construct
  source 1..80: mol_type = other DNA
ggcgtgtcatactccttgtgtaccgcagcgttcacattcaccaagatcccggctgaaacactgcacgggacagtcacagt

SEQ ID NO: 123426 - DNA, 80 bp, synthetic construct
  source 1..80: mol_type = other DNA
attcgccgtgttcacgcagacgttttcgtagacccacatccatggtatttcctcgtagacacgccccccatcctcgctca

SEQ ID NO: 123427 - DNA, 80 bp, synthetic construct
  source 1..80: mol_type = other DNA
gtcctggataacgcagggattgctgggggctctcctgttgtggatgggcatcaatgctcgtgacaggtccatagctctca

SEQ ID NO: 123428 - DNA, 80 bp, synthetic construct
  source 1..80: mol_type = other DNA
tattggaatgttggaaagcgccattgcagctttaacacaacataaatttgcgatcatttacgatatgccatttgttcaag

SEQ ID NO: 123429 - DNA, 80 bp, synthetic construct
  source 1..80: mol_type = other DNA
agctccggcgccgcgcccgtcgttcggcgcggcgcctggcgcgccgagcggcccgccaggcggcgcggcgcgagcggcca

SEQ ID NO: 123430 - DNA, 80 bp, synthetic construct
  source 1..80: mol_type = other DNA
ataaatgaccccggggcgccatggaaaatttggatgcttaggatggcctgcctggcaataagtgcctacacaccttgggc

SEQ ID NO: 123431 - DNA, 80 bp, synthetic construct
  source 1..80: mol_type = other DNA
atattcactgatgagaacaagtggaagtcggcacgtgaggctgttgaagacagtaggttttgggagctggttgacaagga

SEQ ID NO: 123432 - DNA, 80 bp, synthetic construct
  source 1..80: mol_type = other DNA
atttttgtgcatggaaccaccacttcggaaaaccatgggaattattcagcgcaagttggggcgtcccaggcggcaaagtt

SEQ ID NO: 123433 - DNA, 80 bp, synthetic construct
  source 1..80: mol_type = other DNA
ctgcaaggccgcagggatagtagcgcccacaatgctggtatgcggcgatgacttggttgtcatctcggaaagccagggtg

SEQ ID NO: 123434 - DNA, 80 bp, synthetic construct
  source 1..80: mol_type = other DNA
gagtgaaattgtcagctttgacactcaaggggacatcctacaaaatatgcactgacaaaatgttttttgtcaagaaccca

SEQ ID NO: 123435 - DNA, 80 bp, synthetic construct
  source 1..80: mol_type = other DNA
ggtgctttggaaacttgtcggtcgccgtgctcctgtgagcttgcgtccctccccggtttcctttgcgctcccgccttccg

SEQ ID NO: 123436 - DNA, 80 bp, synthetic construct
  source 1..80: mol_type = other DNA
gcaggtacaggctaggcttctcacgaccgaggaagcctgtgatctgaccccctcgcattcagctcgttccaagtttggat

SEQ ID NO: 123437 - DNA, 80 bp, synthetic construct
  source 1..80: mol_type = other DNA
ggcaacttttcactttcaggccgagggtgcatcaagttgtccaagaatgtaattgttccatctacgctggccacatcaca

SEQ ID NO: 123438 - DNA, 80 bp, synthetic construct
  source 1..80: mol_type = other DNA
cacatactcctgcgtgcttgcctgcttgttcgtaggctagcaggaggtaaatacgtgcaggcgtgccttttaaggttggg

SEQ ID NO: 123439 - DNA, 80 bp, synthetic construct
  source 1..80: mol_type = other DNA
atccccctcgaggtcatcaaggggggcagacatcttattttctgtcactcaaagaagaaatgtgacgagctcgccaagca

SEQ ID NO: 123440 - DNA, 80 bp, synthetic construct
  source 1..80: mol_type = other DNA
acgtggctgtcgaacagtacgttgactttagtttagaccccaccttctccattgagacacgcacgactccccaggacgcg

SEQ ID NO: 123441 - DNA, 80 bp, synthetic construct
  source 1..80: mol_type = other DNA
acatgggtaacttatgggacatgtaccaccacaggagaacacagaagagaaaaaagatcagtggcgctcgttcctcacgt

SEQ ID NO: 123442 - DNA, 80 bp, synthetic construct
  source 1..80: mol_type = other DNA
gtcgtcgacttcagcctggaccctaccttctcaatcgagaccacaaccgtcccccaagacgccgtggcccgcagtcaacg

SEQ ID NO: 123443 - DNA, 80 bp, synthetic construct
  source 1..80: mol_type = other DNA
ctgtagtgctctgtgagtgctatgacaccggctgctcttggtacgagctaacacctgccgagacaacagctaggctacgg

SEQ ID NO: 123444 - DNA, 80 bp, synthetic construct
  source 1..80: mol_type = other DNA
tctccggtatgtgaacccgttgggggtgaatatatgccccgactgcagcctgaagatatggatttgttgtgctatgagac

SEQ ID NO: 123445 - DNA, 80 bp, synthetic construct
  source 1..80: mol_type = other DNA
cagtcccagcttcggccgttggggtgcgcaactcttcggggttgtaccacgtcaccaatgattgccccaatgcgtctgtt

SEQ ID NO: 123446 - DNA, 80 bp, synthetic construct
  source 1..80: mol_type = other DNA
tcctataaccgcctatgctattctcggccagtggcccttcgttctgctgctcctcgcgttgccacaacgggcttacgcgc

SEQ ID NO: 123447 - DNA, 80 bp, synthetic construct
  source 1..80: mol_type = other DNA
gtaccatggggaatgcatgggtgggcgactgggaaccaggagatgagcagaactacacggtcactgtccatggtagcaat

SEQ ID NO: 123448 - DNA, 80 bp, synthetic construct
  source 1..80: mol_type = other DNA
cctcaatgccgtcgcctattatagaggcctggatgtctcggtgataccaacatctggggacgtcgtggtctgcgccactg

SEQ ID NO: 123449 - DNA, 80 bp, synthetic construct
  source 1..80: mol_type = other DNA
atctcatggggtacatccccgtcgtaggaggccctcttggtggcatcgcggcggccctggcacatggtgtcagggccatc

SEQ ID NO: 123450 - DNA, 80 bp, synthetic construct
  source 1..80: mol_type = other DNA
ctgcccaacggccattatcccttggatctaagattgatttgcggtaacgtttgccaatcaagctttaaaaacgtacccca

SEQ ID NO: 123451 - DNA, 80 bp, synthetic construct
  source 1..80: mol_type = other DNA
tcttgatataaaacggcaaaaccctgtaacccaaatgctataatatgacctcctattgaaactgctaacgttacttgtgt

SEQ ID NO: 123452 - DNA, 80 bp, synthetic construct
  source 1..80: mol_type = other DNA
ccggagaccaaggagtgtccaacccagaaccgtgcctggaacagcttggaggtggaagattttggattcggcctcaccag

SEQ ID NO: 123453 - DNA, 80 bp, synthetic construct
  source 1..80: mol_type = other DNA
atggtttaacacctacctatacgaccacctagcgccaatgcaacattgggcagcagctggtctcaaagacctagcagtgg

SEQ ID NO: 123454 - DNA, 80 bp, synthetic construct
  source 1..80: mol_type = other DNA
ctcaaagaagacacctatggggttctcttacgacactaggtgctttgactcaacagtaactgagcgcgacatcagaactg

SEQ ID NO: 123455 - DNA, 80 bp, synthetic construct
  source 1..80: mol_type = other DNA
agactttcttggggaccgttttgagtggcgtgatgtgggcgccctaccacggcgcggggtcgaagactgtggctggtgcg

SEQ ID NO: 123456 - DNA, 80 bp, synthetic construct
  source 1..80: mol_type = other DNA
tcaaggggtggaggcatctcatcttctgccattccaagaagaaatgtgacgagctcgccgcaaagctgtcgggcctcgga

SEQ ID NO: 123457 - DNA, 80 bp, synthetic construct
  source 1..80: mol_type = other DNA
agtcctggaccaggcagagacggctggagtgcgtcttaccgtactcgccactgccacccccccgggttcagtcactgtcc

SEQ ID NO: 123458 - DNA, 80 bp, synthetic construct
  source 1..80: mol_type = other DNA
gcgaataaatacctgtgacggaagatcacttcgcagaataaataaatcctggtgtccctgttgataccgggaagccctgg

SEQ ID NO: 123459 - DNA, 80 bp, synthetic construct
  source 1..80: mol_type = other DNA
ggcacttacaccacaggggtggcgcaggcccgcactaccctcgggcttacgaccctcttcacgcgcgggccgtcccagtg

SEQ ID NO: 123460 - DNA, 80 bp, synthetic construct
  source 1..80: mol_type = other DNA
gtttgggcttgtcgttatgggagcctggggggcgtggggtgggtcacaggcaaccgaatatgttcttcgtagtgttattg

SEQ ID NO: 123461 - DNA, 80 bp, synthetic construct
  source 1..80: mol_type = other DNA
ccccggggcggagtggcctctcggtccataaaccggcgcacgtcctgactgccgccggccattgtttcctagtggaagat

SEQ ID NO: 123462 - DNA, 80 bp, synthetic construct
  source 1..80: mol_type = other DNA
ggccgcggtaatcataacgacccccagcgcggacgcggccagaaacccggtggcgatggtggcgatgggcagcgtgtcaa

SEQ ID NO: 123463 - DNA, 80 bp, synthetic construct
  source 1..80: mol_type = other DNA
atggcgtgcgaatacatcgctacgcgccaaagtgcaaacctctcttgagggacgagattactttctctgtgggcttgtca

SEQ ID NO: 123464 - DNA, 80 bp, synthetic construct
  source 1..80: mol_type = other DNA
agggggctgtccagtggatgaaccgcttgatagccttcgcgtcacggggtaatcatgtgtcgcccactcactacgtgccc

SEQ ID NO: 123465 - DNA, 80 bp, synthetic construct
  source 1..80: mol_type = other DNA
acgcggcctgcaggacgtgcgtcccattggggaggacgaggtgtttctggacagcgtgtgtcttctaaacccgaacgtga

SEQ ID NO: 123466 - DNA, 80 bp, synthetic construct
  source 1..80: mol_type = other DNA
cattcgacccgccgaccagaggccctactgctggcactatagccctgcgccctgcggtatagtgcccgcgagggaggttt

SEQ ID NO: 123467 - DNA, 80 bp, synthetic construct
  source 1..80: mol_type = other DNA
gtgtccgtagcccacgacaacaatggacagagatattactacctcacaagagacccgaccacacctatttctagggcggc

SEQ ID NO: 123468 - DNA, 80 bp, synthetic construct
  source 1..80: mol_type = other DNA
gccactttgaacttcctgctcaccaaccggcaacagaaaattccctcgcaattcacactgagtaccgaggaagagcgtat

SEQ ID NO: 123469 - DNA, 80 bp, synthetic construct
  source 1..80: mol_type = other DNA
ccacctacggcaaattcctggccgacggtggctgtgcgggcggggcctacgacataatcatctgtgatgagtgccactca

SEQ ID NO: 123470 - DNA, 80 bp, synthetic construct
  source 1..80: mol_type = other DNA
agtcttggtactgaacccctctgtagcagccaccctggggtttggagcatacatgtccaaagcccacgggatcaatccca

SEQ ID NO: 123471 - DNA, 80 bp, synthetic construct
  source 1..80: mol_type = other DNA
gacatatagcctgacaggtctctggtccctagccctgctcgtcctcctgcttccccagcgtgcctacgcatggacgggcg

SEQ ID NO: 123472 - DNA, 80 bp, synthetic construct
  source 1..80: mol_type = other DNA
ggcaacctgctccgcccatgggagaaacatggacacagacatggtggacgccaacttgttcatgggggcaagcgtggttc

SEQ ID NO: 123473 - DNA, 80 bp, synthetic construct
  source 1..80: mol_type = other DNA
ggccggcgcgcccggggccaggtcctcgagcataaggcggtggtagccgtagaggtagcgggacatccaggtgatgccgg

SEQ ID NO: 123474 - DNA, 80 bp, synthetic construct
  source 1..80: mol_type = other DNA
ccgccatcgacacgatggactccagggccagggcggcgtcgcccgccatcaccgaggccaggcgctgctcaaacccgccc

SEQ ID NO: 123475 - DNA, 80 bp, synthetic construct
  source 1..80: mol_type = other DNA
gctgtttcatcttcctatgcttcgcttggtacatcaaggggcgagccgtccccgtggttacctacggagtcttgcaattg

SEQ ID NO: 123476 - DNA, 80 bp, synthetic construct
  source 1..80: mol_type = other DNA
tacactctatatgggagccgttttacaaggttacatggggtgcgtcataaactggaaaggaaaagagcacgaatgggaac

SEQ ID NO: 123477 - DNA, 80 bp, synthetic construct
  source 1..80: mol_type = other DNA
tttgtagtggcggtttaccgcctgaagaagaacctaactgtcatccgcctcttagtaacattaaaattaacctttcaatc

SEQ ID NO: 123478 - DNA, 80 bp, synthetic construct
  source 1..80: mol_type = other DNA
ggtgtcatcaaagacttggcagctgcaagcccatcactttcttcaagcaggggtgtggtcccttggcagatgctaacttc

SEQ ID NO: 123479 - DNA, 80 bp, synthetic construct
  source 1..80: mol_type = other DNA
ggccgaaatctcatactctgtggagcaatggagtcttggaaagtgaaatgataatcccaaagatatttggaggaccaata

SEQ ID NO: 123480 - DNA, 80 bp, synthetic construct
  source 1..80: mol_type = other DNA
cctagggtttgaggtgactaaggtaatgctggcgctgatagggccgctctacctactgcagtacagcctcctgcgggtgc

SEQ ID NO: 123481 - DNA, 80 bp, synthetic construct
  source 1..80: mol_type = other DNA
ccattttcaaactaacctaccaaaacaaagtggtgaaagtcctcagacccacaccgagaggagcagtgatggatatcata

SEQ ID NO: 123482 - DNA, 80 bp, synthetic construct
  source 1..80: mol_type = other DNA
tatctgcggtgtccatcgcacggcccctaaggatcacgggcggtctgtgggtcccatgctgccgtgcctggccgggcccg

SEQ ID NO: 123483 - DNA, 80 bp, synthetic construct
  source 1..80: mol_type = other DNA
gccaacgccgccatgttcgcgtggctgtgcgcgttcttcgaggggatggtggacttggggcgcgcggtcggcaaggtcgt

SEQ ID NO: 123484 - DNA, 80 bp, synthetic construct
  source 1..80: mol_type = other DNA
tcgctgacggggggtgttcagggggcgcgtatgatgtaatcatatgcgacgagtgccattcccaggacgctaccaccatc

SEQ ID NO: 123485 - DNA, 80 bp, synthetic construct
  source 1..80: mol_type = other DNA
agttacaacattatatccggcactatgaataccttgtaccggagctggtttctggcttacaactacggcgatcccgagaa

SEQ ID NO: 123486 - DNA, 80 bp, synthetic construct
  source 1..80: mol_type = other DNA
cgggatgcgcgtggtacgaactaaccccatctgaaacgactgtcaggttgagggcctatatgaacactcctggccttccc

SEQ ID NO: 123487 - DNA, 80 bp, synthetic construct
  source 1..80: mol_type = other DNA
ggcactttgcgctgctggatacaagtaacacctaatgtggctgtgaaataccgcggcgcactcactcacaacctgcggac

SEQ ID NO: 123488 - DNA, 80 bp, synthetic construct
  source 1..80: mol_type = other DNA
gggaagtggctgtcgagcacgtagccctgtaccaagatctgcttaaagttcgggtgacggtggttcgcgaagacgggctc

SEQ ID NO: 123489 - DNA, 80 bp, synthetic construct
  source 1..80: mol_type = other DNA
gacgatcatatccacgcctggggccacatgaccatcagcaccgcggcgcagtaccggaacgcggtggtggaacagcacct

SEQ ID NO: 123490 - DNA, 80 bp, synthetic construct
  source 1..80: mol_type = other DNA
tcccttactttgtgagggctcacgctctcataaagatttgtggcctgctacggggagtgacacacggcaagtacctccag

SEQ ID NO: 123491 - DNA, 80 bp, synthetic construct
  source 1..80: mol_type = other DNA
acacctaacgtggctataaaccaacccggcgctctcactaaaggcttgcgaacgcacatcgatgtcatcgtgatgtctgc

SEQ ID NO: 123492 - DNA, 80 bp, synthetic construct
  source 1..80: mol_type = other DNA
tggtgttgatgcgcatgatgggagtgttgtggcatatgatcgccgggacggccaggagtccgattctcaagcgattctgg

SEQ ID NO: 123493 - DNA, 80 bp, synthetic construct
  source 1..80: mol_type = other DNA
ctggaccctaccttctcaatagagactacaactgtccctcaggatgcggtttcccgctctcagcggagaggccgcactgg

SEQ ID NO: 123494 - DNA, 80 bp, synthetic construct
  source 1..80: mol_type = other DNA
atgccagcgggtgccccgaacggctgagtgcttgcaagcccattacatacttctctcaagggtggtgcccgatctcatac

SEQ ID NO: 123495 - DNA, 80 bp, synthetic construct
  source 1..80: mol_type = other DNA
caccggctttatcgcagcactgttctacaccaatcgcttcgattcctctggttgtcctgagcgcttaacatcttgcaaac

SEQ ID NO: 123496 - DNA, 80 bp, synthetic construct
  source 1..80: mol_type = other DNA
aacgcctgtactgtggaggcccaatgtataacagcaagggccagcaatgtggttatcgtagatgccgcgccagcggcgtc

SEQ ID NO: 123497 - DNA, 80 bp, synthetic construct
  source 1..80: mol_type = other DNA
ggcaataccctgacctgctacttaaaagcccaggcggcctgcagggccgctaagcttaaagactttgacatgctggtatg

SEQ ID NO: 123498 - DNA, 80 bp, synthetic construct
  source 1..80: mol_type = other DNA
taaccacgcgccggggccgctcgctcgttctgcccaccgtgcgctaccaccccagcatcctttaatccgtgtgctgtgat

SEQ ID NO: 123499 - DNA, 80 bp, synthetic construct
  source 1..80: mol_type = other DNA
tcacagcgtgtcgcgagctcggccccgcctcttactccttggcctactcctgctttgcgtaggggtaggcatcttcctac

SEQ ID NO: 123500 - DNA, 80 bp, synthetic construct
  source 1..80: mol_type = other DNA
gatgaaccgcttgatagcattcgcgtcgcggggaaaccacgtgtcacccacacactatgtgcccgagacggacgcgtctc

SEQ ID NO: 123501 - DNA, 80 bp, synthetic construct
  source 1..80: mol_type = other DNA
gggttgatacacctgcaccagaacatcgtggacgttcaatacctctatggcatttcgcctgcgctggtgtcctgggccat

SEQ ID NO: 123502 - DNA, 80 bp, synthetic construct
  source 1..80: mol_type = other DNA
aaccaacatatggctgaaactccgagaggtgtacacccaaatgtgtgaccataggctaatgtcagcagccgtcaaggatg

SEQ ID NO: 123503 - DNA, 80 bp, synthetic construct
  source 1..80: mol_type = other DNA
ttaaggccagactattgcccttagaggaagcttgtgggttgacaccgccccattccgcccgttccaaatacggatacggc

SEQ ID NO: 123504 - DNA, 80 bp, synthetic construct
  source 1..80: mol_type = other DNA
gcagtggctctacgcgtacatccagcataagaatcacattaaaagccggccctccatcgatttcatcaatcatcatgtta

SEQ ID NO: 123505 - DNA, 80 bp, synthetic construct
  source 1..80: mol_type = other DNA
aagatatccaagagtggaagccttccactggctggtacgactggcagcaggtgcccttctgttcaaaccactttactgaa

SEQ ID NO: 123506 - DNA, 80 bp, synthetic construct
  source 1..80: mol_type = other DNA
aggccaccagggaagctcagaaaagaacagcggccggcatcatgaaaaatccgacagtggatgggataatagcaattgac

SEQ ID NO: 123507 - DNA, 80 bp, synthetic construct
  source 1..80: mol_type = other DNA
acgctcgcatgaaccggtgcgcgtcaaacacgcccggggcggcgcggttgtcgatgaccgtgcccgcgcccgccgtcagg

SEQ ID NO: 123508 - DNA, 80 bp, synthetic construct
  source 1..80: mol_type = other DNA
ttactgaacaggttcacgatgacacacaggagacctaccatagagaaagatgtggatttaggagcaggaactcgacatgt

SEQ ID NO: 123509 - DNA, 80 bp, synthetic construct
  source 1..80: mol_type = other DNA
actactcgttcgcgctttggagggtgtccgccgaggagtacgtgcaagttcgcagagtgggtgatttccactatgtcact

SEQ ID NO: 123510 - DNA, 80 bp, synthetic construct
  source 1..80: mol_type = other DNA
aaagcaatcgacttcgtgcctgtggagaacatggagactaccatgagatctccggtcttctctgacaactcgtctcctcc

SEQ ID NO: 123511 - DNA, 80 bp, synthetic construct
  source 1..80: mol_type = other DNA
gcgttccgtttccagactcgagcaccaaatgtgggaagccattaaggatgagctgaacaccctgttgaaagagaatggag

SEQ ID NO: 123512 - DNA, 80 bp, synthetic construct
  source 1..80: mol_type = other DNA
atattgatgacccatttcttctcagtgctccaaacccaggaggcccttgaaaaagcactcgacttcgatatgtacggagt

SEQ ID NO: 123513 - DNA, 80 bp, synthetic construct
  source 1..80: mol_type = other DNA
tcttcgtcgtcagcaccgtcatccacaccttatcgtttttgtgtattggtgcgatggcgacacacctgtgtggcggttgg

SEQ ID NO: 123514 - DNA, 80 bp, synthetic construct
  source 1..80: mol_type = other DNA
gcttcgtcaggcggtccgcgtacagccgccgtcgctcccgcacgtccgcggccgcttgcgtggcgatgtccccccacgtc

SEQ ID NO: 123515 - DNA, 80 bp, synthetic construct
  source 1..80: mol_type = other DNA
acctcctgtggcggcaggagatgggcggaaacatcacccgcgtggagtcagagaacaaggtagtaattctggactctttt

SEQ ID NO: 123516 - DNA, 80 bp, synthetic construct
  source 1..80: mol_type = other DNA
tttctgaacgacatgggaaaggtgaggaaagacattccacaatgggaaccatccaagggatggaaaaactggcaagaggt

SEQ ID NO: 123517 - DNA, 80 bp, synthetic construct
  source 1..80: mol_type = other DNA
actttagacaccatcctgaatacagaaatcaaaacgttgcctccttactttgtttggcatgattaagctattgctgatac

SEQ ID NO: 123518 - DNA, 80 bp, synthetic construct
  source 1..80: mol_type = other DNA
ggcatctcatattctgccactctaagaagaaatgtgacgagttggccgcgaagctgactggcctcggactaaatgctgta

SEQ ID NO: 123519 - DNA, 80 bp, synthetic construct
  source 1..80: mol_type = other DNA
tcgtaccagatgcggcagtatattaggtgcctgcccctcatgaacacactgcccatatacatgatctctttgggcatgtt

SEQ ID NO: 123520 - DNA, 80 bp, synthetic construct
  source 1..80: mol_type = other DNA
gagaatacgttattgccgcagttgatgtcttccgagcagcagcgggcgtcttcattcttcagctgaaccacgttgcgacc

SEQ ID NO: 123521 - DNA, 80 bp, synthetic construct
  source 1..80: mol_type = other DNA
ggagctacgtgaggcgttaggagctgtgcaaaagtatatgtattttatgcgtccagatgatcctacaaaccccagcccgg

SEQ ID NO: 123522 - DNA, 80 bp, synthetic construct
  source 1..80: mol_type = other DNA
aatcttaaggcttatataaccatgcagactctgctgatactgctattccttctatcccccgcccttgctacttttaatta

SEQ ID NO: 123523 - DNA, 80 bp, synthetic construct
  source 1..80: mol_type = other DNA
acgtacggcaagttccttgctgacgggggctgttctggaggagcctatgatgtgatcatctgtgatgagtgccacgccca

SEQ ID NO: 123524 - DNA, 80 bp, synthetic construct
  source 1..80: mol_type = other DNA
gggacctttggccgcagctttagcaaaaatgttattggggtgggatacatcatagttttgctccaacgtgagctcgtcat

SEQ ID NO: 123525 - DNA, 80 bp, synthetic construct
  source 1..80: mol_type = other DNA
cgcggaatcatcggacggggaagactttatagtggaagaagaatcagaggagagcaccgattcttgtgaaccagacggtg

SEQ ID NO: 123526 - DNA, 80 bp, synthetic construct
  source 1..80: mol_type = other DNA
ggggtggacgcgcgcacccatactgttggaggttctgccgcgcagaccaccgggcgcctcaccagcttatttgacatgcg

SEQ ID NO: 123527 - DNA, 80 bp, synthetic construct
  source 1..80: mol_type = other DNA
atttacagtgttctcctgcaggccatgccgttggacacacgataatgcctgatcggcttttcgatgatcttccaaaaata

SEQ ID NO: 123528 - DNA, 80 bp, synthetic construct
  source 1..80: mol_type = other DNA
gcggtagccaccacaattctgactcccatgctgagacacaccatagaaaatacgtcggccaacctatctttagcagccat

SEQ ID NO: 123529 - DNA, 80 bp, synthetic construct
  source 1..80: mol_type = other DNA
gtcttgcacgctgcgagtacggctagctgcaatggcttcctatatttcatcatcttcttcgtggctgcttggtacatcaa

SEQ ID NO: 123530 - DNA, 80 bp, synthetic construct
  source 1..80: mol_type = other DNA
gggaaacccccctcctctatagactaggggctgtgcaaaacgaggtgactctgactcatcccatcactaagtacatcatg

SEQ ID NO: 123531 - DNA, 80 bp, synthetic construct
  source 1..80: mol_type = other DNA
gcttgagccagtcatcttctcccccatggagatgaagtgtatcgtctggggggcagacaccgcagcatgcggcgacatca

SEQ ID NO: 123532 - DNA, 80 bp, synthetic construct
  source 1..80: mol_type = other DNA
gtggtgtcttcctctcctcctccctcgtacgagagcgtgatggcgcaggcgaccctggaggttccgtttgtgcctccgcg

SEQ ID NO: 123533 - DNA, 80 bp, synthetic construct
  source 1..80: mol_type = other DNA
gaagtcccagagagagcctggagctcaggctttgattgggtgacggatcattctggaaaaacagtttggtttgttccaag

SEQ ID NO: 123534 - DNA, 80 bp, synthetic construct
  source 1..80: mol_type = other DNA
tgccgctggacgagagcaaccccacgccgagcctgaagcccgtgaccctgcagcagatgctgccccaagcagtgctgctg

SEQ ID NO: 123535 - DNA, 80 bp, synthetic construct
  source 1..80: mol_type = other DNA
ccctgaagtcgttctggacatcatcactggagcgcactggggcgtaatgttcggcctagcctacttctccatgcagggtg

SEQ ID NO: 123536 - DNA, 80 bp, synthetic construct
  source 1..80: mol_type = other DNA
gcttggggtcaggtcggtgttaaggggtgcagtttttcagccaactggatggtggtagtgggcaggaccaagagtatgct

SEQ ID NO: 123537 - DNA, 80 bp, synthetic construct
  source 1..80: mol_type = other DNA
ataccgaatcatgacgcgaggaatacttggcagctaccaggctggagttggagttatggtagagggggtgttccacaccc

SEQ ID NO: 123538 - DNA, 80 bp, synthetic construct
  source 1..80: mol_type = other DNA
gatgcaagtggtccagaggtctccctcatttagtgacaacagcacccccccggcagtgcccagcaccttccaggtggggt

SEQ ID NO: 123539 - DNA, 80 bp, synthetic construct
  source 1..80: mol_type = other DNA
gcgcgcaccaccacagagagtgggaagttgatcacggattggtgctgcagaagctgcacgctccccccactacggtatca

SEQ ID NO: 123540 - DNA, 80 bp, synthetic construct
  source 1..80: mol_type = other DNA
cacaagggtaccatagcgaggaaccccggttcgaaaccggcaggatccgctatgagcacaagtgaggcgcttgcgcgttg

SEQ ID NO: 123541 - DNA, 80 bp, synthetic construct
  source 1..80: mol_type = other DNA
aggaggtggtgcgggacatggccacgtacgcgctgttgaggcgcaggttaccgggcgtaaagcagatggcgaccttgtcc

SEQ ID NO: 123542 - DNA, 80 bp, synthetic construct
  source 1..80: mol_type = other DNA
cctctacttgaggtgtggaaggccccagactatacacccccagtggtccatggatgcgctctacccccatccaaacaacc

SEQ ID NO: 123543 - DNA, 80 bp, synthetic construct
  source 1..80: mol_type = other DNA
gacaaagtcgaccaggcctgactcagcgaaccgcgtcgccagggtctgggtaaaactccgacgacaggagacgacgagca

SEQ ID NO: 123544 - DNA, 80 bp, synthetic construct
  source 1..80: mol_type = other DNA
ggcgggaccttggcatttaggaaaattagagctggacttcaactattgtgaaggaacaacagttgtcatcacagaaaact

SEQ ID NO: 123545 - DNA, 80 bp, synthetic construct
  source 1..80: mol_type = other DNA
ccgacccctcgccgacttcgaccaggggtatggtcccatcacctacgctgggggcagtcgcggcgatcagagaccctact

SEQ ID NO: 123546 - DNA, 80 bp, synthetic construct
  source 1..80: mol_type = other DNA
tgcaaaatcttacactgttgtttataaatcttacacatgatggggcttatcttggctataatcaccagggaactaaaaga

SEQ ID NO: 123547 - DNA, 80 bp, synthetic construct
  source 1..80: mol_type = other DNA
tcctcccccgtcatgggaccaaatgtggaagtgcttaatacggctcaagcccaccctcactgggcctactcccctactat

SEQ ID NO: 123548 - DNA, 80 bp, synthetic construct
  source 1..80: mol_type = other DNA
cagtgggaaacaaaagaaaagcaaggaactactggaggagtgcagcaagaaaaagatgtcacaaaaacatttggtgtggc

SEQ ID NO: 123549 - DNA, 80 bp, synthetic construct
  source 1..80: mol_type = other DNA
cattcagcctaaatacgctatgcaactagaaatcacaatactaattgtaattggaattcttatactatctgttattcttt

SEQ ID NO: 123550 - DNA, 80 bp, synthetic construct
  source 1..80: mol_type = other DNA
cactgcatacgcccagcagacccgaggtctgttgggtgctatagtagtgagtctgacggggcgtgacaagaacgagcaag

SEQ ID NO: 123551 - DNA, 80 bp, synthetic construct
  source 1..80: mol_type = other DNA
cggctcgcttaatcgtattcccagacctgggggtgcgggtttgcgagaagaaagcgctttatgaccccatccagaagctt

SEQ ID NO: 123552 - DNA, 80 bp, synthetic construct
  source 1..80: mol_type = other DNA
atggcaatccaacacccagtttaaaggccgttactctacagcaagtattgccagtgcttgggccttcggaagaaaagcgt

SEQ ID NO: 123553 - DNA, 80 bp, synthetic construct
  source 1..80: mol_type = other DNA
acaaatgtacacaaatgtagaccaggatctcgttgggtggccagcccccccgggggccaagtctctcgagccgtgcacct

SEQ ID NO: 123554 - DNA, 80 bp, synthetic construct
  source 1..80: mol_type = other DNA
atcttgctcctctaacgtctccgtagcacatgacaacaaggggaggaggtattactacctcacccgtgatgccactactc

SEQ ID NO: 123555 - DNA, 80 bp, synthetic construct
  source 1..80: mol_type = other DNA
ccgggtgtggaggtagcaccactgcatggcctcgtgttctggggttgtgttgtagatgatccagtcatagcaggtgcgct

SEQ ID NO: 123556 - DNA, 80 bp, synthetic construct
  source 1..80: mol_type = other DNA
cggtttaccacggggcgggcagcaagaccatcagcggcccgaaaggaccggtcaaccagatgtacaccaacgtcgaccaa

SEQ ID NO: 123557 - DNA, 80 bp, synthetic construct
  source 1..80: mol_type = other DNA
tggtgacctatttcttgctcctcgtgctggagcttgggtttccagaggcctcactgagcaacatttggaagtgggctgac

SEQ ID NO: 123558 - DNA, 80 bp, synthetic construct
  source 1..80: mol_type = other DNA
tctagagcggctctcattgaagagggacagcggatagccgagatgctgaagtccaagatccaaggcttattgcagcaggc

SEQ ID NO: 123559 - DNA, 80 bp, synthetic construct
  source 1..80: mol_type = other DNA
tagcttcggctcttatatgaggcaagcttacggcgtggagccgaatatccggaccggggtcagaactgtaactacaggtg

SEQ ID NO: 123560 - DNA, 80 bp, synthetic construct
  source 1..80: mol_type = other DNA
ctcccaggatagaccttattgttggcattatgcgcccaggccgtgtggggttataccagctaagactgtgtgtgggccgg

SEQ ID NO: 123561 - DNA, 80 bp, synthetic construct
  source 1..80: mol_type = other DNA
acaagggcgtgtggcgtggagacggtgtgatgtcgacacgctgtccttgcggggcgacaataaccggtcatgtgaagaat

SEQ ID NO: 123562 - DNA, 80 bp, synthetic construct
  source 1..80: mol_type = other DNA
gcgggagcagggacggtgtcatcctgctaacaagcctgctttatccatctttaatttttgacatcactaagctgctgata

SEQ ID NO: 123563 - DNA, 80 bp, synthetic construct
  source 1..80: mol_type = other DNA
ccaaaatgaaaccatgctatggctcatttgccagacctactaatgaaaagggaggtcaggctaaatttgtacttgaccag
